United States Patent Application Publication US 2025/0222082 A1 - sequence listing, part 2

SEQ ID NO: 2298 - DNA, 609 bp, synthetic construct
  source 1..609: mol_type = other DNA
atggaaactaaaaacctcatcataatctgtgtgactttaattattcttgtctgcctgggcttgttcctcatctcccatatgaacggtcaggaggaaacccacatcaccatcctcacatcgcagtaccttaccgaaggggacacactgaaattgaagctatgcgataaggatggcaagggcatagccgatcagaagattagcctgaagatccaatcaaaggacgggaacttcaatgacgacatcgtcattaaaactgacgagaatggtgagtcccagattcagaacctgcagcggggcaattacacgctcatagctaaatacgacggcacaagccaatatgaaggctacggcctgacctacgaatttatcgtaagcccaaaggaggtggagcagagttctaaaaccacgagcaccaccacaacggccacatccaacaatggagattacgcgagtgactataaggcagatgatgtgatcgatgggtgggacccctcagaacacgaggtttcccgcgagtatctgggagagggggagtatagggtcaactacgacgatggatactctagagtgattgacagtgacgggaacgtgctgagctatggatactga

SEQ ID NO: 2299 - DNA, 2523 bp, synthetic construct
  source 1..2523: mol_type = other DNA
atggcaatggtatctgcctcagatatcagtgccgacgacagcgtgtctttagatgcagctgacagtgacatcgtaagcacggattccataagtgtggactcggtgaacacatattctgccgactcagccatttcgtccaacgaagacaaagacaactatcacccctccaatctaaaggatgacgacaacaagattagcaaaatcaactacgaactgaatgacaccgtcttctacggagatgatgtcatcataaacgctaatcttaccgacatggacggcaacatcatcgatgagttcttccaggtgacagtttacgatgaaggcaacccactgcagtcaaacagcctgaaaggcaaggggaccatgattgtgcctacagtgtcactcaccgagagcagttattacgatgttgccctaagttttgcaggcaatgaggagtacgcttcctgcaacgagttcacaagcttcaacgtgacttttaaggaaaattcatatcttgccatttctaattacgattcatattctaaaataaattcaactaaaatcaacttcatcatctatgacgtggacgacgaatacatcaacgacacagcggacatctacctgaatggtgaatattatacaagcgtcctgaccaatggaaatgagaacgaagtgaccattgagaacctccaagtgggggagaatactgtgctggtgaaatataacggctcgaacatctataagggcagtgaggactctgccaccataatggggtatgaaaaggatacctccattggcatcgacgctccagatgtccttattggaaacgatgcacggataaagattaacctcacggacgaggacggcaatattgtgaatggccgcgtggatgtggagatctacgaatactacactggggacgacgagagctacgtaccatttaaagacgattacgtcgtgaatggagaggcaataattgttatttaccagtccaaactccgggctggcgtgacatacttcatcagggctgactacgaaggaaatctgacttacttccgtagtgttggcagcgactacttcgattgttttaacagaagcactgaaatcgtgatcgacggcagaatcgcctctgatgataaggatatcacgttggagattgggctgtttgaccagcgccaggtgatgattgcagggttggtcaatctcactgttttcgacaatgagtccaatgtggtcattgacacaatttctgttgaaacaagcgccgatgactacgtcaatgtgacaatcggcaaactgccctacggccattacatgatcaacgcaagctttgaagggaatgaagagtatgagggctgcgaattggaggctaatctgcacgtctttaaggcaaccaacctcaccattgaggtgcgagaccagatcaaaggggaatcccaaatcgtcaacttctcgctggtctcatctgacggcggtctgaatgaaagcgccagtctgatcataagaaacatggaaaacgacttgatttacgacgggattatcaacttcacagatggtaaggcctcctataacttggacaaccttgaggaggggctgattatcctggccgattataacaacggaatggacctcgtgggtccctttgaaacagtctacgacagtgcgtccaaattcgccactgtgaggatcatcaaacagctcaacggcaccatcgagtttgagccggtcaatgattccatcattgtaaacctgaaggacatcgatggaaatcccatcgccgaggctccacttagtgtggatgtcaacggacaagtgtttgagttaattaccgatgataacgggcaggcaatgctcgacaacatccccaacaatgtcaccatcgaggtgaaatacacggacaaccaggggctagtggccagcaacaagattgttgtccttgtgaaggaacagatcaagcaacgcgccgcaagcaagatcgtgtgcaagaacatgagcactgtagctgtggcgacgcctgacggccgggtcggtgagtatttcaatgtcaccctcaccgacgctgatggtaatcctctggtcaacaagacggttatgattggattcaacggaagggtatacacccggacaaccaacgagacgggagaggttaacttgcagatcaacctgggttataagggatcatatacctttgcgatgtgcttcctgggggatgaggattataatgcttcctacgaggtgtgtgtgattaaggtgtcatctcaccagccgaaactgaccgggagcgccaagacctacaaggtgtctgccaagactaaagcgataagcgccacattcaagacatctaatggcaatgtgataagcggcaagtcgttagttttcatcatagacggcaagctgtacaatgccaagaccaactccaaaggagttgctactgtgaatgtgtccatctccaaaaaaggtacttattcctgtaccgtacgatccagtgatgatggaatgtacgccgcgaccagcacgaagtttaacgtaaagatagtttga

SEQ ID NO: 2300 - DNA, 840 bp, synthetic construct
  source 1..840: mol_type = other DNA
gtgttcatactgaagtttgagatcaaaagaagtctgatattcatcagtatactcgccatactcatcctgtctattggaatggcatccgcctctgaagaaatttcggattctgtgtcaacggacatcgccagcgaggacgtgacaagcgagattcagacagataacgtcgagattactaatctagatgaggactcgagcttggatgatgcggaccttgagaaggatacaggcgacaaggtcaaaaaggccaagaagaggattaacactaaaatcatctaccagaacatgagtaccaccgccgtggtgaatgagtacgacggccgaaccggggaatacttcaatgtaacactcgtggatgaagacgacaagccagtcgtgggcgaattgattcagatcggattcaacgggcgcatctataatcggaccacggattcaaacggtggagcccagctgcaaatcaacctggcttattcagggccgtacacctttgccatctgctacctgggcgaagacacctatgagtcctcctttgaggtggcagtcatcaacgtggctgctaaaaagatgaccctgactgtgccctccaaaagctataaggcgtctgccaaaaccaaaacactgacggctaccctcaaggacaataagggcaacttaattaaaagcaagcagatcagcttcactgttaacgggaagacatacagtgcaaagaccgactccaaaggcgtagccacggtgaaagtcagcctttccacaaaaaagacttacagcttcacagcaaagtttgctggagacaagtcattcggggcggttaccaagactggtaaggttaccatcaaatga

SEQ ID NO: 2301 - DNA, 14478 bp, synthetic construct
  source 1..14478: mol_type = other DNA
atgcaggcaattattccagtgaaggacaattttctaattttagtgaccaatatgaagaaaagtgattttaagcggatattcatatgtctggttctgctgacttgcttgattggtgcagtcagcgcggccgaggacgtgtccgtcgacgatgtgagcacagatgccgtagcagttgacacaatcaccgaggatgccagtgaccctacagacataagtacggtcagcgagccagtctccaatgatgtgcaggccaacacaagccaggagctaaacaaagagcccgctaccaagtcgaccaatgtcttgaaggacggcacatccacgaacatttacgtggcgactaccggtagcgatgaaaacgacgggctgacgcagtctaccgccgttgctagtctcgctaaagccgtggagatcgtgaatgctaccgctggtacagattttaccatcaatgtggcaaacggtgactataacattagcaaaatcgaaagtccggccgctaagaacgtcaatcttattggtgaaagcaaggagggagcgattctgcacgcctctgatacatatggtatcaacgtttacgaggacaacattgcatggacgatcgaaaacctgactatctgcgatttcaatagtaccacctcgacaagtgcggctgtgcggtgctttgcgatcgacagtgtgttcaatatcaacaactgcatattcaaaaatatcgggtctaagaacggggctatttacataacgtccactggcacaaggacaatctccaatgttcttatcgaggactgtttcggtacttactcaagttcatcttccatcatccacctgtatggcgagggtccagtgacgttggataatattgaaatacgcggctcctatatggacccctctgtgggtacagccacatatctgaggtctgttatctatgccgaccaggcccagaccaatgtgactcttaagaatagtcgaattgttgacaacatcggggctatgggttcactgatcgaggcgaaaggagcatttaaggtcatcaacaccacttttgaagggaattatctcaatacttcgtctaatggtgtaaatggggggacgttcatgttctatagtggaaccagctccaactctgcctccaacattgacattagccagtcagttattaaggacaatgtccttgcggggggaagcatcggcctcttcaattgcgtctatggtacgcacaacattgaccacaatgtgatcatgaacaacaaatacgccaatggaaacgacgtgccacttgggagcttcagcggcgctgccatcagcacggacgacaactactggggaaccaacgagaggcctaacaccaaaacaaccgaatgggtgatcctgacggtagatacccctgaaatggcatttgtgggcgtgtcagaagccattcccgtgaaccttaacacctataaaaccaccaacaatgagacaggggccgtggagggcatgcctgatgttgactttggcgtgacatatgctcttaatcaggccaatccatccactgtaaccgtggccaatgggcagggaaccattaactaccttgccactgttgatggaaacgaaacactgaccttttccacgggagacgccttctcctttgatgtgaaggcggatatcgccagtctgatctacgtcgacggcctaaacggcaacgctacaggtcccggggacagtgaacacccgtataagaccatagcacaagcaatcaatgtggctgccgatggaaagatcatcgtgatcaaatcaggcacttacacagagaactccctgataattgcaaataacattacgttgaaggctgataagaacgccgaggtgatcattgacgccaacaacgaaggacgaatattcactgtgcagaaggacgcgatcatccgcgacctgaccttaatcaatggaaagtccaccggcaatggaggcgccatctctctggatagcggcctgctgacgttaaacaatgtgaaaatctacaactccaccgcccagagcggcggcgccattgttagtttgtccgggtctcaattatcagtgtccaattctgagttcattgacaataatgccagcaatggcggggcgatatatgtcgccggcgtggctgatattacaaacaataagtttatctccaatgatcctgaagacggcggggccatatacgtcgcaggcgtggctgacattgaatccaacgagtttacctccaaccacgccacaaatgggggagcaatctacatcgacagtgagaacaatcaaacgatcaaggataacacattcacttccaacaccgccgataagggagaggccatttatattaagaacgcgaatgtgagcctgtctggaaacacaatgggggagaatgattcaatatatctcgatggggcaagccttaaaaccactctgaccttcctgggcggaaagaccattgctgccgagtttggacagactctcaatctcacagctaccctgaccgacgaggatggaaacaatataaggggcggaatcgtcacattcaccgccaacggggaaaccattgcgacgattgacctgtccaccgacgctcagctcaaaacccagtataccgtgcctaatgatgccgccggggacataacaatttccggttcatacagtctggacaacggcggcgctgtcatatccgggaagatacacccggccgtgcctcattggttcattgaagggggaagcggatacgagacactggcggacgccattgatggtgccagcgctggagacattatctactacgaccttccagaggactacaccgaagtgattagcagcaagaccatcaacaaggcactcaccatcaagaacaatgggaccggtgtcgtgacgttagatgggaatctcgataggatactgagcatcagctctgcttcagtcaatttggaaaacctgattttcattaacggggccacggccactaacggcggccttatctatctgtccggttcagcatctaatgacctgaatataagtggctgtacatttaaggattctaaatttaccactacaagtacttacacatatgctgtcgccatttacgctaatggcggcaacatcaacatcaaggacagtgagtttcgaaacttgacggcccccaaaaccggaatgatctatcaatcttccagttcaggggccatcactatagagaactctctattcgacaacattacaggcgcctatgatggaggccttatcaactcaaatggtgatgtatccctagtgaaaaccaacgtgaccaacattttcgggtccacgtcgaccagtgactatgggctgatttacattaggtcctatggaggctttctgttcatctctgagtgtcagtttataaatataagtaatgcgggggcccatccggtctattaccggggcagcggcggttataacattacccagtccctgtttatgaacattaactcaaacaagataatagacgccagtgctaaaggttacgtgaattacaatatatttgccaacaattccaataattatgttctttatggaagttcctcttcgaaaatttcggccgattataatttctttggaagcaacagcaagcccacaagttatgtaagcaacgttaattacacttactggaccattgtcgagttgtcctctgcaagcgacacagcatacgtgggaaatcccacagacattgctatacagtttgttggaaccgacggcagcgagaacctgactctggagggcataatgcctgagtacacattcactctgaatgttacaaacggaactatcgtgcctaacactgtaactctggaagataacgaggccaatgcagagtttacccccacaagcgtgggaaaggtgaacattacagccactccaggcccggcccagttgacccttaatgtaatcgacccatccatactgctcgtggtgtccaccgatgggtcggacaccaatccagggactttgaacagtccatacaagaccattgcacatgccttgactcaggcgaacgccacacgaaacgtcatttatctcctgtcaagtgatgatgcttacgccgaacatggcctgacagtttcagacaatataactatccgagctgaagacaataccgtgaccattgatggcggccaggagggacctatcttcacggtcacaggcaccctcagcatagaggacatcatcctgagcaatgctaaggttgatgaagataatggcattgggggcgccatctatctcaatggcggtaatctcactgtcaatggcgtggtgttctctgactgtattgccgcttacgggggtgccattgctacaactgcagggtcaaatttgaccgtgatcaactcggttttcagtgataacaaggctaaatatggtggagccatctatgtggctggtgaagctaacatctcaaatagcgaatttagcgacaataataatgagattacgtatggcggggccatctatgtaaacggtactggccccgtggtgatctcggcaaacgagtttgataacaataaggccaacaagggcgaggccatctacattgaaaacggtgcggtgaatgtctctgagaacacaatccctgccaacgagacaatttatcttgcaggaggcagcataaactcggtgctcatattccttgctaatggcaccataagtgcagagtttgaggaagaggtgaacctgacggcgaccctcactgacgatcagggcaatgccattaagggaggtatcgttacattcactgccaacggcgaaaccattgcaaccgttgacctctccactgacgctcagctggagacccagtacaccgtgcctaacgatgctacgggcgacattctcatttccggttcatactctctggataatggtggagtggtggccacagggattgtgcaccctgccgtgccccactggttcattgaaggcggcagcggatatgagaccctggcggaggccgtggatgctgccagtgccggagatgtaatctacggtgatgctggaacttacgatgtaagtgatctgataattaacaaggccgtgaccattaaagcaaacgagtcagggtcgatcgtcttaaatgggaatgggaaccagatattcaatacccgggctaatgtcattttggacaatttgacattcatcaatggttcagcctcctccaacggtggatttatctatgtctacagcgactccctggtaatcaacaattcagtcttcaaggacttgaaggcgaccggaggactaggctctgcaatctatgttgctacgggaagctcgaacatcacaattgaaaactccgccttcgacaatattaaggcagctacgggtctcatcaactgccgctccaaaacaacaacatttacgctcgtcaaaaccaatttcacgaatattgatgtcagcactaatggcctgttctatctgtacgagggcggactgcgggcctacgagtctcaattcataaatgtgtccgggggagacggcgccgtagtttacttctatgggcaaagtgataatatcgtgaccaagtgtctattcgacaatgttacaaccacaaaaaccactggcatcatttattccaacagtaagagcgccaatatcacgtataatgctttcttgaatgtcaattatggggtgtactcctcgtcatcctatggggaagtcattactgccgattacaactattggggaagcaatgacaagccgggcacaagcctggtcaattcaaacagcaagttgaataactgggtggtcatgactgtgagtccagacactcttgacagcttggactcaggcgcgacccaggcattcaccgtggacttcacccactacaccgacggcacggcaaactacaccatggctgacaccattcccgagctgacagtctctgccagtgcagtcaagggcagcttagaccagagcgaagtggagactcagaacaatgtcgccacattcacttacacgggcagccaaaacggtgaagagaccgtaacgttcactaatgccaatctaagcatccctgtaaagttcgtggttggggaaggatactttggaatcgtgtacgtagctaagaacggcagcgatgagaacaagggcagcgaggacgcgccggtggcaacgatcgccagagcagtggagatcgcgcagcgcggttctggccaaatcatcatcacggagggcgtctataatgaaaacaacatcactataaatagcgaaatccccatttccatcaaagggcagggcgacgtggttatcgatggggagggattgtcctcactgagcatcttcaccatcaaatccggtgaagtgtcaattgagaagatctcgttccggaacaataaggccaaatttggggcaggggtcaatgtgcaaggcacctccggttcatcactgctggatgcaaacgtcctgatcaatgagtgtaactttgacaatctcagctcagatgcctcaggcagtcaggggggagcaatatacgcaaagtacctcaaaggaaacctagtgatcaacaattccaactttacaaactctattgttaaaagtggggggggcgccttaaccgtggcctactgtgcatatgaagacgctctggacctggtgatttccaattgcaactttgagaacaacacggctaataacgggggcgctgcatacctgatggctaatacaatcaatattgtaaacaccagctttatcaacaacaacgcgacatacagcccgggggcactggaactgtataattgtactggaactatggacaattgctctttcataaataacagtgctaaaaacaccgcggccgcatttaaacttgagtttgtgaaggatcagcctatcaccagtctgatagtgactaactccatatttaaggacaatgttgggcgggatgaagtcgctcccgctatattcgtggaccgcgccagcctcaacatctccaattccatcctactgaatcccctgaatattaataccagcacagtgaccggatacggggccgtccctggccagggggtcaccgtggcaaacagtaactggtggggaaccaatgaaaatccctctaacctcaccgccggcagtggggacaatgtcaacaccacaatagacaattgggtgatcatgaatgtcagcccaacggaggccatcggctacactggcgaggccctagagataactgtggactttaagtacactatgagtgcggatggcactatcgaaacactcgcaggtactttacccgaggagtttaccgtcaatgctaatgcggccaatggtacgttggataagaccacagcagataccagcaatctgcaagccaagttcgccttcactccggaatttgctggcgagaacatcgttaacatatacaccacagaatccaataccgtacccgttaccatcatggtgaccgagaaatacgcaggccccatctatgtgaccaaagacggtgacgacgagaacgagggttccgaaaacctccccgtagccaccatcgcaaaagccattgaactggcccagggcaaatcgggcctgatcttcatcggtgagggtacttatgttgaatccaacctcacaatcagcaaggacctgaacatcacagcacttggcgaagtgatttgggatgcgaacgggcagagggcattctccatgtctacaggcagtgtatccatttcaaacattacattcatcaacggtaactacacccgcaatgggcacctgatctactgtgctggggacagtctcaaattcgatgagtgcaagttcttgagcaacgggggaaatgtgactgggaccaacggcgtcatctatgtggagctggcctccgcaaacttcaacaactgttacttcgagaacaacacggccgggactggaaccagctatgggctgatctccgccaaagactcggtgattatagtggatggctgcacctttgtcaacaactttaataaaaacggctgtatttatgtgagcggaagcaacatcgggtccatggctgtcatcaacaataccaagttcattggaaacaatgcgacctctgccagcggagggtctggtggcgctatctacgcaagcggttcaatggcttaccagtactcgaacggtactgtacggcctggcgcccagtctgcggtctatgtaattgactgcgactttatcaataacacggctttcggcgggaaatactacaacgctgaaggcggagctatcttcgtcaatgcaaatgccacactctatgcctctaattcacgcttcatcgataataccgccctggactatgaagaaactaataaatcagggcggggaggagccattgcggccacaacagggaatgtacaaatttcaaattgtatattccagggcaacacggctaacaatggttccgttatcgccatgaaatttgcaaacaaagacctcacaaccgtcaatgtcttaagcatcagcaactctgtgatcatgggccctggcgagaagctgattgtctctgacttcacgaacgggtcgttagtggccaacaacaactggtgggcagcgaatgagaacccatccgatagggtcagcgaaggaatcactgtcgacagttgggtcatcctcactgccgatccaagtgaaatcactggaaccctggatgaaattatcccaatcgttgccaacttccgtcacaccaacagcactgatggaacgatcggggatctcgagggagaatttccagagctcgaagtgttcggcatgactctggatgaaggggagattactgaatccaaccttacggtcgacaatgtggctaccctttactacacgccagaggaaactggggagaccacggtgtatgctatttcgggcaatgccatggtgccaatcaaggtaaccataaccgacactccccagcccgttgcagatgttatctatgtgtcaccatccggggctgacaccaatgccgggacatacgaggctccggtggcaaccattgcccacgccgtggaactggccggggcggaaggggcttcaggattagtcgtcattgaagaggggatctataacgagaacggcatcgtgatcaactctgcgatccctattaccattacagggaacggaactgtgatcatcagaggaaacaaccatgtcgttaacggaaacggagccggcagattcggcgacgttagcgagtccacaagcataataatcgttaacacaactgaggctgtggtgattgcaaacatcgcatttgaagacaacattgctgcaaacgggggtgcaatcctcattgctggcaccagcagttccaacctgttcgacgcggatgtactggttgagaactgcagtttcaataacttgcagggaagaaatgggggtgctatctatgcatactacgccattggcaacctaacggtagccaattgcgaatttacaaacatcaacgcaacgtgggctgcgctgtgcgcataccaggccgcctatggcgaagggctcactgtcgagataaaggactcaagctttacaaacaactctgccaacaatgcccccgcactgtacctgcaggcaaccaatgtggtcataaaggattccaactttacagacaacaatgccacctaccaccccggggccatctacttgcagaacacgacggccaccatcgacaactgcattgtggcaaacaactctgccaaatacgacaaggcagctattgcaatccacggaggcaatatccagtacaacccagtgattgtgaaaccctctgaagtcaccattacaaactctattatcgaaaacaacatcgggagggacaaggcagcccccgctatctacctcgaaaactccatcctgaacatgtcgtactcttctgtcgttaacgagatcaacattaacaataccgtgaccgccacctatggagacgagaaacccggactggtgctgatcaacaacaactggtggggaaccaacgacccaagcactaccatattcggtaccaacatcaccatggacaattgggtcatcatgaatgtcgaggcaaacgcgactgagatccttgctggcgaggaggtcaagctgacggttgactttaaccatgtcaacaccaccgccggggagatcgaggagctgaccgggggagtgatcccacgagaatcctacagtgtagccctttctgtggataatgggacggtggcccctgagaccctcaccattgctaacggagctaccggcgaagcaattttcaccgccgctaatgcgaatgcattaataaccgtgacaagcgaaaacgcagtggagactatcttgattaatgtgggcgagcagccagtgcccttcactggcgtggtgtacgtctccaaagacggggatgacgccaatgaagggtctgaggatgagcccgtcgctagcctggcaagagcgatcgagatcgctacagctgaggagggatcggggcagatcatcatcaaggagggcacctacattgtggacggctacaacattaccaaggacctgaccatcaccggggaaggcgatgtaatactcgatgcgcagaaccaaggcaacagactgttcaatatggcctatggtactaccgtctccaatttcgaactgcataaccttgtgcttgctaatgtgactgccatgtacggcgccgttgtttacagctacgcagctaatgcagtcctcgacaacattacagtggctggaatcaaccatgagatggctaggctcatctcaaactatgggaatttgacaattaaagactctgtgtttgccaacaacaccgtgagcggaataatcacccactctggaaacaataatctcaacatcgtcaatacaatatttgaaggcaacaacgtcacatatgattcctctatcatgggggtggtgtatgtgtcctcaggcagaggcaacataaccatcgaggactccaagttctatgacaacctggtccggcaatccacagtgcgcggttacacagatactaacatcacagtcaagggcactgaatttatcaacaacacggcagacaactctccatattactgctcgggcggcgccatctttgcccaggcgaatctggacgtaacagagtccatattcatcaataacaatgctagacgtgagggcggagccatctacattggaatcaatggggtggccaacatcaccaaatccgagttcatcaataacacaatctatgataatgagtactatggcgatgctatctacaccaagggtaccaccgccatcaattactgtatattcctgacaaatggcacacgctatgccgtgtacaatggcggatcgaaagaggtaaatgcgcaatacaactggtggggcactaacgacgatcctcaaggattcgcttacagcgccgatgcctctaactggattattatgactgtgaccgctccaagcactcaggatatccaggccggagacgagtacgagttgactgtggacttcaaccattacaccgatggcagtgacattctggagctgccagatagcctggcgcaggaactgaccgtggaatttacctcgaccacaggcacatttgacaatcccgtcgtgactaccgaaaatcaggtggccactgccaaatacacggtagtggccggtgaaaacagtatcacagttaaatccaccgacgccgtgtggaacaccagtttcacggccggagaaaaggctaaggctaagatgaatgtgtcaatggaaaacaacacaatcatcgttaccctgaccgatgaggaaggagcccctatcgccggcaagaccattagtgtgctcattaacgaggacacactttccaacgagaccaactcaagcggtatcgccgccatttcgctcggcactctcgatgctggcacttatccagctacaatcagcctggccgacagcgaatatcaggccccagagctcaccgtatttgtgctcgtagaagagactctggtcgacaaccccataggggccgtcattgaattggcccttgccgaaaacggcacttccatcgaggtgaccttgaaggacattaacgggcagccgatcggcgacacgatcgttagatattacattggaagcaccgacggagcgctcctgcctatcgacgccaacgggaagggctcatttgacatcgacaacaccgtcaatcagaccattaaggtcagctacactaaggagggcacggaatggtcgtcgtattatgactttattgtcaacaatgaagtgactcccgttcccgttgccaataacgcgaaattcgatgtgattgtgcgtgaggatagcatcgacgtgttcctgtacaacgataacctggacgatttcgagggcgcgaagattatggtgaccatcggggaggaagatcccgtggaatatattgctggagagaacggaaacataaccatccccatcaatggcgataccactgtggagctgtcatacactgacgagaacggcgcgaccgtctaccacaccgttaaagtgtccacgagtggggtggacccctctgccgagattgagattatcgtcgagtctcataacgacacttctattgaagtcagcgtaaccgttgatggtgatgatgtcagtgatggtgagattacctattacatcggcgacgatgacgatggaaccgtggtgcctattgaagacggaatcgccatcatcccattcgacaatactgttaatcagaccatcgagatcacatactcagacggtgacgccacagagagtgtatactacactatagttgccttcacgcacgaggtgcccgttgagcctcccgtggccaatggcagctttgatgtggaaacaactgatgatgccattgttgctacgttggtggactctgatgggaaacctattgctgatgccactgtgtccgctatagtcaatggcgaagagcaaaacttcaccactgatgcggatgggaagctaagcgtgcctattgatggcaatgcaaccgtggagctgagctacacagatcccgaaaacggggccgtcctgaagtatgtgacggacgtggtgaccaaggaggtgccgattgaggtgcccgtggtggctaacggcactatgagtgtagagacaacggatgatgctgttgaggctaccctggttgacagtgacggaaacccgatcgaaaatgccactgtcaccgccgtgatcgatggggaggagcagaacttcacaactgatgcagatgggaaggtcagcatcccggtgggtgaaaacgctacggtagagctttcatacactgaccctgagaacggtgcagtggtgaaatacagcacgaaagtcgtgacgaaagaggtggaagttcctgtggacgttcctgtggtggctaacggcacattaaccgtggagacaactgacgatgctatcgtcgctacattagtggacagcgacggcaaaccaatcgctaacgcgaccatcattgccgtggtggacggcgaggagatggaaataccgaccgacgaggacgggaagtgcagcgttctgatcacaggaaacaacaccgtcgagttcagctacacagatccggccaacaacgcgacagtttcatactccaccaaagtggtcactgaggtcgaggaagtcatcgtgcccgtgcccgtggtggctaacgcgacaatctcccttagcactgaggacggcagctcaatcgtggccaccctaaaggaccttgacggcaacgctatagccaacgctacactggacgccaatgtcaatggcgaggagacgaagctcacgacagatgcaaacggaatcgcaacgattcccgtgtctgccaacacaacagccgtggtctcctacacagattctaacaaagcgacggtcaccagctcaatgagcctaacagtcatcgaaaccatcgttgaaatcaacaagacaatcgaggttcctcccgtacgcaacgcatctcagatcgtgtgcgaagacatgaacacaatcgcagtggcaaaagacgatggccgtatcggggagtacttctacgtgaagctcgttgacgccaacggcaatgccctggtcaacaagtccgtacagatcggattcaacggcagagtgtacaaccggacaacgaacgagacaggtgatgttaaactacaaatcaacctcgcctacaaaggaacctacacattcgcgatcgcatacctcggcgacgacaactacaacggttcatttgtcgtgtcgaagattaccgttaaacagcaatcccctaagattacgacaacgtccaagacttataaggcgagcgccaagacaaaggcattgaccgctacctttaagacagcaaatggcaacctcatcgccgataagactatcaagtttacggtaaacggtaagacatactctggcaagaccaatgcaaagggggtggccactgtaaaagtgagcctcaacactaaaggaacctacagctttacagccaagtacgctggagacgacacctttaaggcaactagtgccagcggtaaactgactattaaatga

SEQ ID NO: 2302 - DNA, 8031 bp, synthetic construct
  source 1..8031: mol_type = other DNA
atgaacttcaaaaagctgcttatgatttcattaatccttttgtttgtcctctccgtcggatttagcacagcaagcgctatcgacagcgataatctattagatgaaaacaacaacatcaacgtgaactacattgactctgacaactcagattcgattctgatctctgacaattcaaacgatgctaagtcaaataatctgatattaaacaattctatcaacaaaaaagaattgaatgataactccaactctaattctaacctggagtgtgactcgtcaatcaacgagaacctcgatctcgagaacaactacaagattaacgagaaaagcgcaggtcttaaagacaatacaaataccatttacgtatcggtagacggaaacgacgagaatgatgggttgacgctagagaccgccgtggcaaacatctccaaagccgtctccctcgcgggcgaagggtacaccatccacatctccagcgggacttacgaacagaacaagtccacccaactgagccatgctttcaacttcatcggagaggatggaacaatcattaaaagaatcggcaccgccaacgcctttacctacacttcagacacgaaaaagaccataagctttaaaaatatcattttttcttccaccaccccaaacccaagcaaccccatactgagcatggcgggaggcgccgacctgcagatcgacaactgcaccttcaccgacgccatcgcaggtcgaaacggcctgatccggtacttggggtcaagtacaggcaagatcacaaacaccaatttcattggattgaccggctcgaccagcgcgtcttccagctatatcactgccctggcccagtctaaggtcaaggtggagaattgtaccttcgccaatatcaatgaaccaggctttttaaactcactcgtgtatgtcaataacaatgagactaacctgacattggtcaactgtgtgttcaataatattaccggcaatctcaacgctgtggttaacaatagagggtatatgcagattaagaactgcagcttcacggatatctcacttagcggcaacagcccccgcgggattgtctggtcttcagaaaccatttcaaaaaactcaatcacgtacataaactcatctgtgttcatcaataattctgtaaacacagaagtggttgtcaacagttcagtcattcaggccaaatctcctactatcgttgaatacagtgcattcctggacaatgacgtggtgtttataatcaacaatgacaacgacactgacgttactgccaattacaattggtggggaactaatgagggccctaaaaactgcagtgtaaaccgggagtccagcgccagtagcaacccttcctcctccagtgaggaaaagattagcctagtctccgacggagtgacagtggacaactgggccattatgaccgtagacctagaaacgtcaggcctgattgccggtgaagactacccaatcataatcaatatcaataaatacatgaacgagaggggagagatcgactcgtccgtagagtatggaatcagcggtgccgagatccttctcagctcgcagatagggaccttcaattccgatttcattatttacaacgaggacaatggaaacataattcagaatcaggcgaaagtctatacaaacaacggcgccgtcaccgtgttctacaaagccaccgaagaagggtcagataccctgaatatcagttccggatatgaagagattgtatacaacctggaatttggccaatcaattgaatacaacgacatttacgtgtctaaagacgggaatgacaacaacgatggtcttagtaatgaaacctctgtgctgaccattgcccgcgcattggagatcggcgaaaacctgaactccaatatacgcatccacattggctccggcagctatcatgagagtggatttgaattgaacggaacgtacacagtgcaggatggggtcctccaggtgaaacggaccacatactcattcatcggatatggcaacgtggtgatcgacggagacggccaaaacaaaagcctcttcaccgtgcgaaacaattctgtgtcctataaaaacatccggtttacaaatgttgacggtgccacctacggtggggcaatcaacggggacaacctctatcgacggactgcgtacattgatctcaccatcaataattgcacctttgacgacctgcatgtgaaatcttccggaggcgctatctacttaaattacgtctcggggaggatctccataaacaacaccaagttctacaacctgacgaccaatagctcgtggggtggggccataagcgcggaagaggcctttgacctggcacgcgtgaaggtgactaactcggacttcagggacaactatgctaacaacgcccccgccatgtatttgagggtgagcaacgtcacagtcctgaacagcaattttattaataacagcgctaaatattaccccggcgccattcacttttataatgcctctgcaattatagagaactgcgtcatcgccaacaactctgcgaagaaggattctgcggctataaagatcagcgaaggcaccaatgatgtgggcaataagatcatcatcaagagctgtatcattgagaacaacagcgcgcgagatgagatttcccctgccatctacgtggagaagggtgcactcgacatctcctacagctctgtcgtgaacgacctgtccattgccacaagaacctactactcgaacctgtacggtctccaacaaggcgtggctatagctaacaataactggtggggactgagcaatccattcggcgaaaatgagattggcggaaactactcctcactccttgggggcgtattcaacgggtctaacatcactgtcgacagctgggtgattctgaacgcagtcttaaacgatacaggtgttctcaaggtggggaacattgtgaatattagtatcgacttcaatcacgtcaacactacacgcggagagattgagctcttgagcggaggcaagatccctaaagagtacactctgcgcttaaacgccactggaggtatcgtgtatcccaactatatgaagacagtgaagggggaggccaattccaagttcacagtgagggacttggacaatcttggggacgacttcgcctcctgcggcttcgatatcatatccgacaacgagattacccacatcgtcttcgagataaacaactacaagggggtgatctttgtgtccatgtcggggaatgacgattgcaacggctctatggacgctcctgttagaacaatcaataagtctatagagcttgccctggacgaggagtttggttctcacgagatatttgttcttcccgggacctacgaggcatacggcatcgagttagacagcacctacctgagcattaccgggagcggcagggacagcaccatcctggacggcgtgggctatacaggaggcatcttcaacatatttgagtcagagctgactgtgaaaaacctgaccgtgattaacggagtcaatacagtctcctctggtggcgcctttacaaacatgggcaatctgacgttagagggtgtcaacgtctcaaactgtcaggttaggaatgcaaacggtgcagctatctatagcgtcggcaacctcaatctgataaactcaagctttgtgaagaacacagcactctcaggcaactacgccaacggaggggttatttacgccgatggatattccacgtcccttccatatcctccaagcctcaacatcacggactgcgaatttatctcaaatgcagcacagggctcaacattcggcggaggggtgatctatgcccagtaccttgacggatataagtccatcaaaaactccaaattcatcaacaacacggccgagtttggcggcgcaatattcctgcaggactccgaaggggatttcataattgacaatacaagcttcattggaaacaaggcaacaggccaggccggttccaccaacccatactatggtgggggcgccctgaacctgattggcagaaccgacggccgagagggcaatttcattatcaccaacagcctgttcattaacaactcggccaagaacagccgtgggggaggagctatcctagatcggaatgttgacctgaacatcactaatagcgtattcctgaacaacacagacacaaacaagagcgtgcaggtatttaaggacaccaccgtgtacttccctagcgggggaagaattagcctggaggacaattggtggggagctaacgagttgagctccctgtctaccgttgcggcgaacgtgacgattaaccggtgggtggtgatgaatttatctgttgagctgatcgacgatctcgattcatggggtcttaatctggggaatagtctggatgacggcttaaacactgatctgggcaatacactcactgaaaacaatttgaataactatctagtgaaagttctgctgaatgagtacaacgatggaaccctaatagacaatcctaattactatccccttctccgcttgtacactctggagtcttctgacggagagatcaacccgtcctttggcattctgcaaaacaactgcgccacggccctgctgagctctagcaaccgcgaaaatgtgattcgggccactatcgatggagaaacgctggaatttaacaccatcgacctgtacacaaaaacagttctggacatcgaatttgactctccaattaaggccggggagaaccttaccgtctacctgaacctcacagacatcgacgataacccgattaatggaactgtgattctcaacatcagcagcgatctgtatgagacagtcgagacagtgaacgtaaatgagggcaaaggattcaaagagttcagcggattgaaagtcggtgtgtacacagttttggctaactattacggccagtcaatctatctggactccaatgacagcaaagtccttgagatatccccgatctcctcctatttggacttggaatctaaggagatcagtatcttcctgggattcggcaatctaacgggcactctgagtgatgataacggccccatctcaaatagaaacgtgagcttgattattgatgacgatacaatactcaatggactgactgacgaaagcggacagttcctaatcgacctcagcagcctgaaagtgggaaattattcggacttggaactggtctttgaaggtgatggggatcgcctgtcatcctccgaccttgtgaacatcactgtgaagaagattgtgctgaacctgaatctgattgtcgaagatgattctatcgtggtgaacctcagtatcgacgattcggttctggactatctgggggtggacgactcactcgacgatataagtctcgaaggcttgacagttctcgcgttcatcaacgagactgatcgtgtctccgatttaatcaacaagagcgcaatcacagacgacaacgggatcgctactattgacattagtgatctgaatcctggcaacttcaccgctctggttagcctcaaagagaatgataattttgagatagattctaacaaggatataaacttctccattgatcggtacaagaccaatctcactgctattattgacgagaacaatagttacattctcatcaatctcacttccgatatcggtcttgacagtaaaactgtgtccgtgacgatcgggaatgagtcttttgacgtgatcacgaatagctcgggcctatatgggctggatatcagcgatttggcccccggctactatgattgtctgttcgtatttgatggtgatgactattacgactcgtcctctgattctctgaacttcacaatcgagaatcgtatgagtgagttaactgcaatcatcgacgataattatgaatctatcctcattagcttgacctgcgacggcattggcctggctggtaaaacgataagtgttactatcggtaacgagtcgttcgagcttataactaatgactcgggtctctatagtctggatatcggggacctggtgcccggctactatgactgcctgtttgtcttcgctggggatgactactatgattcttcctccgattcgctgaacttcaccattgacaagtattccagtgaccttactgcgctaattagtgaggattctatcctgatcagtctgtctagtaataacctgggtctcgacaacaaaacgataagtgtgacgatgggaattgagtcgttcgatgtaatcactaacagttctgggttctacagtcttgatatcagtggcttggggcccggagactatattgattgtctgtttgtcttcgccggtgatgactactacgattcgtcatccgattctctcaatttcacaatcgacaagtacgacacgaagctggacgctaaaaacaccattggcagttttgctctcgtgaacctcgatgccaaactgaccagtggtgaaaatgcgctgaaggacaagtccatttcccttcacattgctaataagaccttcactaaaaagactgacgaccagggtaaagttgtttttgacctgtcttcctttgatcccggtaattatattgctctattgagcttcgcgggggatgaatactacaaaaattcaactgttagcgtggaggtcatcatcaacaagctcaatgctgatctgagcagtgaatttaaggataagaaattatatatttctctgagtcacaagggcgctcccgtgaaatatatgaatcttgctatcgagataatcgattcatcaaacaagtccaccgtatccaatgcactgaccgataacgagggtcatttcatcatggatctgagcgatctgagtcccgacagttacgtgagcatcataagggccattggggacaagatttataaccctgcaagtgacgaaatagagttcgtcattgggggcgacactccctctaagtccaccagaaccgctgccgacctgcagaaactcatcgatgatgcaagtagtggcgatatcatcgaccttggggaatacgactacctcaatgtgtctaatattaatatcacaaaggacattgtgctcattggaaacaacaccagcatctccagttccggagatggcaacccaatcttcaatatcgctaccgggttgagttccgtgaaaatcagtggcattgactttaatgccagcaatggggatgtgatcgttaaggcaattgctcagaacggaaccgattcattgtccatcattgtgcccgctattgaaatcaccaataacaccgtgatgggagacaatatagtgccagaatccatcacgatcctggaactggattcagataggggggtgcttgctccgaataacgagatctacattgccaacaacacgctggagatcggcatgaagccgtttgaatttaaggtcaagagctttgaaaatgactcaagtgcgaatgtgccgatcggcggggggctgaacggcaaaaagacgtccatcatccattacgagaatatggacacggtagcagtcaatatggatatcgaaggcagagtggggaagtactttgaagtcaatctaaccgattccgacggcaaccctctcgccgataagaaggtgcaaatcggattcaatggtgtagtttacaatcggactaccaacgccaccggcggggtcaaactgcagataaacctcgggtataagggcacttacacattcgccatctcatacctaggggacgacgagtacaacgggagctttgtcgtggcgaagataaaggttagcacccagaagacaagtcttaccagcacctccaagacctacaaggcaagtgccaagaccaagacgctcacggctacactgaaggactccaaaggcaatctgatagccggaaaaacagttaaattcactctcaacggcaagagctattcagccaagacaaatgccaaggggctggctagcgtgaatgtaagcatcagcagcaagaagacctatagctttacagccaagtatgctggagatgatatgtacgcatcttcctccgccagtgccaagcttgtgatcaagtga

SEQ ID NO: 2303 - DNA, 10176 bp, synthetic construct
  source 1..10176: mol_type = other DNA
atgaagattaaaaatattaaatacctcctgatctcgctcgtgcttctcatgttcctaataggtgccgccagtgcagcagacgatgccgtgaccctggaaggggatgcggcagcggtggattcaatcagtgaggacgcgagcgctcccataactacgacggttagtgaagatgccagcattgggaccacctttagtgacagcgccatcgaaagcgactctattcagagcaatgatgacctggagctaaagaacgtgactgacgttaaacagaaggattcctctgacgctcttaaagacggagaatccactactattttcgtgtccactgggggtaatgacaataacgacggcctgagtctggaaacggcggtggccaccgtggagaaagcaatcaatataacaaaaactggtggaacggacttcaccctcctgatttcaaacggtgactataacattgaacagatcaccatccctgtcggcaaatacatctctattatcggggagagcaaggagggcacaatcctccacgcctccggcgattacgggtttgacatttcatacgggtgtaattttgaaaacctgaccatatcggacctcaacagcacctcctctacaagtgccgccattaggatcattatggataattatgatatcaatataaacaactgcatatttaagaacattgggtctgcgtatggggcggtgcacgtttactccaatggcaaaacctccatttccaatgtgctgatcgaggactgctttgctaccaaatcagatgactcgtccatcatccatgtttctggaaaaggtccggttagtttggataacgtggagataagaggctcgtacatgctgccccccgcttttccatggagtaccccctatctgggggccatcatctttttgagcagcgccgatcctgatgtgactctcatgaacagtcgtatccacgacaataatgggtctatttactccatcatcacatcgaaagggaaaattaaaattatcaacactacaatttccgacaactgcttgaacgcttcatatgcaagcatcttttccagtggagtcaactccaacacggcaaccgacataactgtcactcagtcagtcatcgccgacaatatcctggcgaataacgccgtgggtctcctggacgcccgattcggtgtctttaaggtggaccacaatataatcatcaacaataagaacgcaaacggcaacgacctgtcagtaggcgacctttcgggcgcctcgtcattctccatcgacgataactattgggggacgaatgtcaggcctaacgataaaacaagcgagtgggtcatcttaactggagatgttgctgaatgcgcctttgtcggggtttgcgagaacatcaagattttcctcaacagctatgtgactgagagcggcgagatcggggtgattgatggcatgcccaccgtggagctggccgtggggtatgctctcaaccaggagaatccatctgccgtgaccattaaagatggagtgggaaccatcagttaccttgcttctatcgccggagaggaaactttgatcctgtccaccggagatgtcttcgaatttaatgtaagctctgagattggttctctgatttttgtcgatggctctgtggaaacatctggggacgggacacaggagaatccggtaaagaccatcgctgaggctttaaatatagccgcagacgggaaaatcattctcatcaaaaatggcacttataaggaaagcaatttgctcgtggataaggacattaccatcaagccatacgatggcgccgatgttatcatagatggagacaatcaagacaggatcttcacagtcacctccactgctaccatcagtgacttaagcctgaccggcgggaacgccactggtgatggaggtgccatctatctgaacggcggcaacctgactctgtccttcctgaatatctctaactgtattgccagtgacaatgggggtgccatcgcaactgctgccggatctgacctgtatctgtccaactcaatcttcacggacaacttcgccagcaagggccaatccatcttcattggaggggaagctgaaattttgatgaacgacttcgtcgctcatatggatgtgctcagtcccgatgcatctttcaacgccattagtataaacacagactctcctgtgagcatcgtgtcaaataacttcaacgacaatggcgcaattaagggccaggcagtgtacattaaggatgcgcctgtaagtctctctggaaacattatggacgatgaaatcatttacctggagtccggcagcgttaattccaatctcatctttatggatggcaaaaccctgaccgtggaaccgggggcggatgtgaacctgactgccactctaaccgacgataaggggaatctcatccggggcggcgagctcacgttcactgcaaatggtgtggctgtgggcgaccccattgacataagcggcgacaacgagctgagaatcccttatacccttccgtctgactcagagggcgacattattatttccgggtcatacagcttcgacaatggcggaacaatcgtaaacgggacaatcgagcccgatatcccatattggttcattgaaggcggacgaggatataaaaccttaaatgagaccgtggagaacgcagttgctggagacgtcatctacggcagtcccggcacttacatcgccaatggcattttcatcacaaaagacctgaccatcaaggccaacgaaacgggagacatcatactggatggtaacggatctcgcgtgttcaccataaagaaccaggccactctcagcttagttaacttggacctgagcaacggaggatctgagggcggcggatttgtgtacatttatgcggagggtggaaacctgaacgtcatcaactccacgctgcgggacctgaacatcgttggctatcccgagtcgttcgaaggaggagcgataaaaacgtacgcctcctccacaattaatattgagtcttcccatttcgagaacatcaactcttcagcctttgctccaattctttctgggttggggggtgtgaagctgagcctgaccataaaggattccagcttcactgatattaagggcacggccatgtatggcctcatgaatgctccagggaaagtgaacattgagaggtctaattttacaggtatcatcgggaacaccacgaagcagacggggctgatctttgcagactccacttcgaactatctgatcaacgaatgtctcttctcgaatatttcaacagactcggtgatccgatttaagaataatggaaatatcactgtgaccaagtcagttttccagaacatccaggacacagggggagccctctatatatataatccagggtctgccaaggtgaactacaatctcttcatcgataacaccaacctgaacgccgattccaatagggacatctattcctacggctccaatgtcgatctgtcctataacttctggggaaataacagcaagcccacagaaagccagatctatgatgtgtcaaaagcgccgtactggaccatcgaggagctatccatgaatagtgactatatctttacagacgagacggcagacattgctgtacagtttgtgggaaccgatggggaagaaaatctcacgctggatgacgtgatgcccgaatatagcttcaacctggaagccactaatggaacgcttgatgcaaacacggtaacgctcgtggataatgaggctattgtcacattcacccccccctctcttacaggcactgtgaccgtgacagccaccccaggcccggctgaattgacatttgacgtgattgagacctcaaaattgctggtcgtgtccactgccggtagcgatgagaatgcagggagctttgaaagcccgtacagaaccattgcatacgccctgactaaggcaaacgaaacacggaacattatctatctgatctataccggtgaggactacaaagagcacgacctcactctggcggggaatctgacgattatgggtgaaaatgatgaagtgaccattaatgcaactatcggcaggatattccttgtaaccggcaatgtcagcattaaatctctcactctgtctaatgggtttgaccaggactatgggggcgccatctacgtggatggaggtaatctgactctcgattacgtgaattttaattcgaaccgggcgtacggcttagggggtgctattgctaccagttcagagtcgaatctctacatttccaattcgatcttcaccgacaatttcgcctccttcttcggcggtgccattggcaccgcgtcgggctctaacctgagcattgacaactgcatattcagtgataataaggctagttacggcggtgccatctaccttgctggagagtccctgatcttaaccagcacctttgatggcaatcacatcctgctggatgatgggagaggaggcgccatttatgtaaacaccacagactctgtagtgatctcttcgaacgaatttgagaacaattttgcatacaccggcgaagtgatctacattgaaaacggtattgtcacactctctgaaaacacaatcgacggtgacaccatttacttggcgggagggagcgtaaactccaatctcgttttcatggataactccaccctgaaggtggagttgggcgagacagttaacttgactgcaagccttagtgacgactgtggaaaccccataagaggcggaagcataatatttacagtcaatggcgaagccatcggcgaccccattgacattagcggagacaacgagctgaagaccacttacacagttcccatcgatgcaagtgaagacatgatcatctccggttcgtacagcctggacaacgggggcatcgtgaaggcgggttccctgcacccttccgtgccgcactggtttattgaagggggaatcggatatgagtacctctctgaggccatcgatggggctgaagctggcgacgtaatctactacgaccttccagaggactacactgacgtgattagcagcaagaccatcaacaaggcactgaccattaaaaacaatggtacgaatatcgtgaccctggatggggatggcaacaatgtcttcacagtcagcgctgacctggacctgattaacttaaacttcgtcaacgggggaaataccaaaggcggcttcatatcacagagttccaataacctgaatattatcaactccagcttcaaaaatagtgcctccagttcctccgccgctgccatcctaagctccaatgggaatctaaacattgaatcctgtctatttgagaatatcagttccagcgcttcaagcaatggggggatcatctgttactctggaagcagcggaaacctgaacattaacaactcagccttcaacaacctctcaggtaagtatgacgggttcatcatctattccagcacttttacaaatattgccaactccaacttcacaaacctcctcggtccaacgagctctggctactggggcggcatctataacagcaaatccctcaatctcacaaattgtcagttcataaacgtgacaggccccaaaggggcagccatctattcaacaggatcactcaatgtgacaaggtctgtcttcgagaacattattacaaccaattcagtaatttattcatacagttccgattcctttatcaactacaacatcttcgcagacaacaacaaggccattgactcaacgcgcgccaatgccgactacaacttctgggggtctaatgatcgcccaagttcagatatcgtgagctcgagcatataccacgactgggtcattgtagagctgtcttcatccaatgataccattttcctgggatcaaccgaggatatctcgatcggatttttggcaactgacggagaggaaaactccaccctagaggatgccatgccatcctacggctttgagttgaccgtcacagatgggaccatcgaaccctccctggtcatccttgaggataatgaggcaaaggccgtttatactccctcggccgttggcactgtcaccattacagccagccctgggtctgctgagctcgagctgaatgtgatggacaaatccaccatgcttatcgtgtctgctgagggttctgatgaaggggacggcagttttgaaagtccatatgcaactattgcccacgccttaagtcaggtgaccgagacccggaacattatctatatcctatcctctgataaggcttacaaggaaagcgggttggtcctgtctggcaacgtgattatcatgggggaggacaactcagtgaccatcaacggtggcaatgaaagccgcatattcctggtgaccggcaatgcaagcatcagtgacctgatcctatctgaaggcatggctgatgattacgggggagcaatctacgtggatggaggcagcctggccctgaataacgtgattatttcacagtccaaagcatctctcggcggagccatctatatcaacaccagctctgatgtcagcataagctcaaatgtctttgaagataacgaggctgagaagggagaggcgatatacatcgagaacggcgctcttaccctcacggagaacgctatgggtaatgaaacagtgtaccttgctggggggagcgtaaactccaacctggttttcttggccaacagcacgctaaacgcagagtttggaaagaacatgaccataacggccaccctaaccgacgattgtggaaatgtgatccgcggaggtgccgtggtcttaacagttgacggcgagacgattgggaccgtggacctgagtggcagcgacccactcgagattgacttctacgtgccgcaggacgcaagtgaagacatgctggtgtccggttcatacagctttgacaacgggggaacagtctccacaggagcgatccacccttgcatcttctactggataatagaggaggggagatacggctttgagaccttggatgaggccatagacgcgtcccgtgacaatgatgtaatctactacgaccttccagacgactacgaggaaatactgaacgacaaggtcattagccataacttggtgattaaaaacaacggtaccggcattgtgactttagacgcggaccggcgacggatgtttgacctgagtggagacttggagctgaataatctcgtcttcataaatggggctacgaacaaggatggcggattcatctaccaaaattcaggaagcctgaacattatcagttccatatttaaagactctctttcatcatactccggtgtggtagtcttctcgaacgggggtgacatcagcatcgacggctcccggtttgaaaatctgacgtcacggaagggacctattgacttcgagtccaacagcggaagagtagacatccgaaattcagtcttcgaccatataaccggcaactacgatggatttgtgatctattgcaagtctgatctgaacatcgaggattgcaatttcactaatctcaacagtacacgcgctacaagtacaaactactatggagctatctgtcacgagagcggcagcggggacctgaatataagtggctcttacttcagtaacatctatggccctactggaactgctgtctactacaaaggttccgggacatataacataagtaaaaacatctttgaaaacatcagctccggcgccaatacttgcataatctatggcggcagctctggcaacatcaactataatgtgttcctggacattaactgtggcattaccacaagcggcggaaatattgactataattactggggcaccaacgattatgccggcctcggcatcaatggaaccgtccctaataattggatcattatgaatgtggtggccaatgattccgacgtgattgctgaaaacgaggtgccaatcaccgttgacttcaatcattacatcgagaacggcgagatcaaggagctggaggacagtctggccaaggaatttacggttcagttcacctcctctacaagtgagttagacgttgacgaggtgaatacaaccgaccaagtggcgattgccttctgcaccgctgtggtcggagagaacaacatcacagtcaagtcagataacgccgtagtcgagatcaccttcaatgcaagcgagccccttgaatctcatatgtctgtggatatggatgatgacaacaatctcattgtcacaatcacagatggcgaaggcaacggaattgagggcaagacagtgtgtctattcattggtgacgaggtcttaaatgccacgaccgattcagaggggaatgccgtcatcgctctcgacgaggtggacgacggtgcgtacaccgcaaaaataagctttaaggacccagagtataaggatatcaacgaaaacacttttgttgtgatacgcactaacgagttgattgaacctgtcgccgccaatattagcattgaattgtctattgaggatggcaaggtcattgctaatgtcaccgaccttgatggagtgcccctggccgaaaagcttctgacagtgagcatcgacggcgtgcctgttctgggggccaagacggatgagaacgggatctattcaattgatgtcagtcctaacgcaactgtgactgtgtcctgcagtgacgttaacggggccgtggccagtgcgtctatcacttacgtggaaaacaacaacactgaagaggtggtggttatcgagccggtgagcgctaacatcactatcgtgttgttagttgctgaggggaacgtcgtggcctatgtgaccgaccttgatgacgtgcccctggttgagaaactgctcagcgtaagtatcaacgacatccctatcttgggcgctaagaccgacgagaagggtatttggtctcttcctatagaggccaactcaacgatcgtggtctcgtgcagtgatgtgaacggggcggtcgccagtgcctcgatcacgtatgtggagaacaacaacaccgaagtggttgttgagcctgtcagcgccaatatcgtgatcggactgtccatagttgatggcaaggtcattgctaatgtcacggatcttgacggcaatacgttggcagacaagctgctgagcgtcagcattgacggcgttcctgtgctgggtgctaagaccgatgagaacgggatctggtccatcgatgcagaggctaattccaccgttgccgtctcttgcagtgatgcaaacggggctgtagcgagtgcgtcgatcgcctacatcgaaaacaacaagacagaggagataattgtccccgttcccgtgcccgtgcctgtggttgccaatgccacaatatccctcagcaccgaggatggcaaatcaatcatcgccaacctgaaggacctggacgggaaggccatagccaacgcgacccttaacgctaaagtcaacggtattgaacaaaacctgactacagatgcaaatgggatcgccactatcccagtatctgcaaacaccactgtggaagtgtcatacacagactccaacatggcgactgtgacaagctcaatgagcctgactgtgatcgaaaccatcgtggagataaacaagacaatcgtagtgcctcccattagaaatgcctcccaaatagtctgcagtgacatgaacacaatttcggtggctcaggaagacggaagggtcggcgaatacttcaacgtaaaacttgtggatgcaaacggcaagcccctggccaacaagttcatccagatcggatttaacggacgcgtctacgaccgtacaaccgatgaaaacggcagcaccaaattgcagatcaaccttgcatacaaaggaacctacacattcgctatagcctaccttggcgatgataactacaatggttcctttgtggtgtcaaaaatcaaggtgactcaacagacgccaagcttgaagaccagctccaaaacctataagactagcgcaaaaacaaaggccctgaccgctaccttcaagacagttgggggcaagccaataagcggtaagacagtgaagttcaccgtgaacggcaagacatacagcggcaaaaccaatgctaagggtgttgcaacggtaaatgtcagcctaaacaagaaaggcacgtacagctttacagttaaatacgccggagacgatatctttaaggcagttagtgctagcgggaagctcaccctgaagtga

SEQ ID NO: 2304 - DNA, 1323 bp, synthetic construct
  source 1..1323: mol_type = other DNA
atggaaagtcagtcaatcctgatcaaaaacgctagcatcctcaatccaatcggggatggcaaaacagaggagtttaggaaggatctgctgattgttgatgacaagatatctcaaatcgatgaggatatcgatgaatccaatgccgataagattatcgacgccagtgataagatactcatgcccggattcgtcaacacacacactcacatctccatgagcctgctgcggggcatagctgacgacctcgaactggacacatggttgaatgaccatatctggccgatggaagcacatctgagtgaagagtactgctatatcggagccctgctgggggcctgcgagatgattaagtctggaaccaccaccttctcagacatgtacttctacatggacggcgtggcccgggcggtggatgagattggcatgcgcggggtcctttcctatggcatgattgatttcggcattgaggagaaacgagagaacgaatttaaagaaaacatatccctcatcaagaagcacaacaacactgcagatggtaggataaccgcgcgattcggtccccatagcatctacaccgcgtcagtggaccttctggagcgggtccgcaaggaagctgacaagtacaacgtaggcattcacattcacatgaacgagaccctcaaggaaatcaatgacagcaaggaaaaccacgatggaaaaaggccctttgagctattggacagcatcggtttcctggccgatgatgtggtagccgcacactgcgtttggcttgacgatgctgagatcaaattgattaaggacaacggagtgtatgcttcccataacccatgtagtaacatgaagctcgcaagcggggccgcccctgtggctgagctattgagccagggcatctgcgttggcctgggaacggacggggccagcagcaacaacaatcttgacatgttcgacgagatgaagtttgctgccctccttggaaaggcctccaccctaaatcccaaggtactcactgctgaagaggtggtgaacatggccacaatcaatggtgcaaaggccctcaacattgacgcggggaccattgaagtgggcaaaaaggcagacatcattctggtcgacgccaatagtcctaacatgacgccaatgagcaacacactgtcatcgaatttagtctactctgccaatggctcgaatgtcgatacaactatctgtaatgggcgcatcctgatggagaacagaaaaatggtgacggtggacgaggagctgatactgtccgaagcaaaaagagcgattaaagagatgaaagagttaagagaggctgacgaatga

SEQ ID NO: 2305 - DNA, 1656 bp, synthetic construct
  source 1..1656: mol_type = other DNA
atggaaagtaagattatcaaatccgatgttttgattataggttcaggcggggccgggtgcagggcagctatcgaagtgtccaatgagggcaaagaagcgttaatagtaagtaaaggactgtccttccgctcggggtgtacaggcatggcggaagggggatacaacgcggccctgggccttgtggaccccgaggacactatcgaagcccatataaaagacaccctgaaggggggagcttacttgaacgaccccaagctcgtagacatcttggtcaacgagagtccaaaacgcttgagcgatctcgaggagtatggtgcattgttcgaccggcaggagagcggcgaattaaaccagcgaccttttgggggccagacctatcgccggacatgcttccagggcgacagaactggccatgagattatgacggcccttaaggaggagatcctaaagcgtaacatcaaaactatggatgaagtgatgattacgcagctgatactggacccggctgaatcctttatgccgaaggtcatcggagccgtggggcttgacctgaagaccagtgaaacgatcttcttccaggcgaaggctgtgattctggccagtggcggtgctggtcagctctaccctgtcagctcaaacaccacccagaagaacggtgacggccttgccatagcctggaatgccggcgccgacctaatcgacatggaggaggttcagttccaccctacagggatggtctaccccgattcacgtaagggagtcctggtaaccgaggctgtgcgggcagaagggggtaagctcatcaacagcgaaggggagaggttcatgggccgctatgatgatagaatggagctggcaacccgggatgtggtggccaggtccatttataatgagatcatggagggacggggcaccgagcatggaggcgtatacctggatgtgacccacctagacggcgaactcattgaggaaaagctggagacaatgctcgagcagttccttgatgtgggagtggatatcaggaaggagccaatggaagttgccccaaccgcccaccaccacatggggggcctgcgcatcaacccagacgccagcacaaatgtggaaaacctctttggagctggtgaagtgtgtggaggcgtccatggggccaacagactcggagggaacgcacttgcagacactcaagtgtttggtaagattgccggcagctctgcagcctctgccacagacattgctgagtttagatacaataatgaggcagtggaggatgaagagaaccgcattaaaagcttaatcaaggaaggctcaatcaaccccttggatatgaaaaaggaaatccagaacctgatgtgggagaaagtgtccattgtccgaaatgagcaaaacctgaagtccgccctggagcggctgctcgagatgaaaaatgagctgaatgacctgaatgtggatgatcggacccaatttaatgagtctctcatcacagctctggaagtcactaacatggttgagatatgcatcctgattgttaaatcggcaattctgagaagggagagccgaggagctcacttcagagaagacttccccgagacgaatgacacttggaagaagagcatcgtcatgagcaaaagcaagatcaggtttgcgaaacgatga

SEQ ID NO: 2306 - DNA, 642 bp, synthetic construct
  source 1..642: mol_type = other DNA
atgaatcaggaggaacgcttaaagggaagcccaatagagcgggttgagacggcactcgaggccatcaaagccgggaacggcgttatcgtcacagataacgaggaccgcgaaaacgagggcgacatgatcttctccagcgaacatctgactgaggaacagatggccctcctcattagagagggaagcggcatcgtgtgcctgtgcctaacccaagataaggctgatgctctggaactgcccctgatggtggagaacaatacaagtacctacggtacaggcttcacaataacgattgaagctgccgagggtgtgaccaccggagtatccgcagctgaccgagtgactaccgtgaaggccgcctcggccttggatgcgaaacccagcgatctccaccaccccgggcacgtattcccacttagggcccggcctggcggggtcctggaaagggacgggcatacagaggcaactattgacctgatgcgtctggcagggctgaacccatgtggcgtcttgtgcgagatcacccttcccaacggaacgatggcgagaatgcctgatgtcatcgagttttcagccgagcacgacatgccggtggtgaccattgaagacattatcgcttatcggaaggaaaatgacatctga

SEQ ID NO: 2307 - DNA, 2064 bp, synthetic construct
  source 1..2064: mol_type = other DNA
atgaagattaaaaagagttttgtcattctgtgcctgattatctgtttattcacgattgctagtgttgccgctagtgatatcaatgacaccaccataagtgatggtgacaatctcatcaaagaggcggatggggacctgttaagtctggaagatgacaacaatctcaaagagctcaatgaggagagcgacaaaaacctgctggtccaagaatctgataatgataataacaatcccgagtccgataaagatctccttgtgcaggaatctgacaatgacaataataatctcgaatctgatgagggcctgctcgtgcaggaatctgacgacgacctgaacaaaaaagcagacggtagtttgttcagctcaaagtacggagataacgctgctccaataaaaattaacacttcctacctcatcaaagagatcaacagctacctcgagaaagacaactacacggcccttaaggaggaaataaacaactacctgaagaaaagtaacaacaacgccatcaaggaggaaattagcaagtatatcttgaaaaatagctacaaggccttacagaaggagatcaacaactaccttgaggaaaacaatttcagcaccctaatcaaagaaattaacaactatctagaggaaaacaactacccgtccatcgaggatggaattaaaagttatctgcagtcaaacaactacagctctctgcaggatgtccttagcgacgtaatctcgaagatcataaactcctctaaaaaggagtcagagcccattgacgatggaactttcaccgctttgcagtataagatcaattctgccccaaatggcgctacaatatctctagataaggattattcctatgacgaagggttcagcacacggggcattgagatcaagaagagcattaccatcaacgggaacggccacaccatcaacgggctgtccgcatcaaggatctttctcattcacttcgggttgacgggcaacaataaggtcacactgaacaatatcgtattcgccaatggcaagacagacctctacggcggggccatcttcaactacggcaacctgaccgtgaacaagtgcacattcaagaacaactacgccaaaacctgcgggggagccatcaattctgtgggcgagatgattctgaaaaattccaatttcaagaacaacactgcaggaggtgacgccggggcggtgttctccttcaagatagggaacagcacaaacatcttcaaggacatctataaagacaaggtcattgatggaaacatggactttattatcgactacattttgaacatcaacataaactacggatgggacagcataaacaactgcagcttctcgtcaaatgtggccaagggccgaggaggcggagcgatctatgcatttacccacataaagattaacggctgtacattcaattccaataaggctggcgagcatggtggcgcagtgtttgccaataaaaacctgaatatttcgaagtccaagtttacaaacaataaggcccctaagtacggaggcgccgtgtacttccgctgccatgaactgagcggaagttacgtcaataagacttgggtttccaaaatgaagtattacaccgcgacaatcaaggactcaatctttaccaaaaacactgccagcaaagggggggcgatctatgagtttaatcacaccgtctctgacaagaagcggctgaaggtgtcgaagtgtaattttacagacaacaaggcatcccttggcagagatgtgttttccggcagctgttcaaactgcatctacttctacgtgaaaatcagcactaaatccgttacagttaaaaagactgctaagtcctttactctgacggccacgattaccaatggtactaaaaagctgaaaaacaaaaaggtcacatttaagttcaatggtaaaacctataccacgaaaaccaattcgaatggggtggctaaagtaaagatcggtaaggcagttattaagaagctgaagaagggaaaaacctattcagtgcaaatcacgtatcttaagaaaagtgcaaagaccactgtgaaggtgaaatga

SEQ ID NO: 2308 - DNA, 384 bp, synthetic construct
  source 1..384: mol_type = other DNA
atgagtctgaaatcaaaggcaaaaaagatcgggaaagcagtaatcttcgtgaagctcttcgaagatctgatggccaataaggacaaacgggaagaggacattgccaagttgcgcatccacatcgaagaatggaaggcggaggctcccgatgaccttaacgctattctggccgccatactaatgaaggcacccgatagctccccggacgagatcaaggcagagttcgagcaggctaaagccgaataccatgctgaggacgaagatatcctcccatggtttgaaagccagatagagaacattaccaaggagggcgaggaggcggaggaggaggccgaagaagaagccgtcgaggtggaggtgacagaagaagagcctgaggagtga

SEQ ID NO: 2309 - DNA, 237 bp, synthetic construct
  source 1..237: mol_type = other DNA
atggacaacaaattcataatcctcctgtgcctggtgacagtaagcgtctttatcagtgcgtcattcgcattcggcaatgtgctaagcaatgccgataacggaagcgtgcaaacgtacaactcgcacaaggatatctcctcccccaacatggactacaagcatccaggtgaactgatttatgggggctgtggcggaaatcagaacattcagaccgacgggcacatctgcgagaaatga

SEQ ID NO: 2310 - DNA, 165 bp, synthetic construct
  source 1..165: mol_type = other DNA
atgaatctcatatccgtcattatctatctcatcatccttatctttggcgtgtgggtgctatatcggggctacaagaaagggatggagttcggaaagttccagtacgcattcattgtatgcctgagcgccctgtttatatgtttgctgtacagcctgttcaactga

SEQ ID NO: 2311 - DNA, 747 bp, synthetic construct
  source 1..747: mol_type = other DNA
atgggccccgaggatacaatatacgagtcccagtccttggaagacaccatctacaagagaaaatcagtacgctcttatgaggatgctcccctggataacgagacgataaatgagatccgcgatttcatcgaaaatgcaaaccctctcaaccctaatatcgaatggagttacgagattctgcccaaagagaaaatcagcacaatgatgagatggaaggctccacactatattgccatcttttcagaggacaaggagaactattaccaaaacataggattcatcttccaacaggtggacctgtttctacagtcgaaggggatcggcagctgctggatcggcatgggcagtcctaaggattacaagaacccacacggtcataagtttatcattctcattagctttgggatgagcgaaagaatctaccgggaaatgaaccagttcaaacgaaaggacattgatgccatatccgacaacaaggatgaacggctgattccggcgcagttcgccccatcttccatgaatacccagccgtggtacttcacccacaatgacgacggtagcttcgacttatacagggtgaaaaggggagtcctcaggaaccgatttatggggcgctggaataagattgacactgggatcgcccttgcccacctgtatgtggcaaaccgggacaactttagcttctatatgaaggacaatcccaaagagctgaaaggccatatctacgatggaagtttcgaaatttga

SEQ ID NO: 2312 - DNA, 672 bp, synthetic construct
  source 1..672: mol_type = other DNA
atggacaataagctattcttgcaggcctttagcaagtttttcattggcctgattatcatatgcgcgcttctgtttattcccgcgggaactctcaactacccgaacgggtggttgtttatcgccctgctcttcatccccatgttctttgctggcatcatcatgtttatcaaaagtcccgagctgctgcgccgtcgactgaacgccgatgaggaggaagaggagcaaaaaatagtgatcctgattagcgccatcatcttcctgcttgctttcattcttgcagggctaaacttcagattcgggtggttcaagctcaattccttgattatcatcattgctagcgtcatctttctcctggcatacatcatgtacgccgaggttcttagggagaatgagtacctctctcgcaccgtggaagtgaatgagggtcagaacgtggttgacaccggcctctatggcattgtgcggcaccctatgtacacgtccacaatattcctgttcctctcaatgccattggtactggatagcatattttcgtttattgtcatgctgatttatccaatcatcataatcttcagaattaaaaacgaagaaaagctgttagaagaagagctggacggatacgtggagtacgaaaagagggtcaaatatcggttaatcccttatctgtggtga

SEQ ID NO: 2313 - DNA, 990 bp, synthetic construct
  source 1..990: mol_type = other DNA
atgaagtggaagatcggagacgtcgaaatagacaaccaggtggtgctcgccccaatggccggggtgtgtgacagcgcattccggaccatagtcaaatctatgggttgcgggctgattgagaccgagatggtgtcagataaggcagtcatgtatggcaactggaagaccaaggaaatgctgtacatgaccgactatgagcgcccaatctctcagcagattgtcggaagtgacattgaatccctcacgttcgcttccaaatacatccaagacaacacaaacgtggacatcatagatatcaacatgggatgccctgtcacgaaggtgaccaatcggggcaaggctgggagcgcgttgctaaaatcccccgataaaatcaaaagcattgtagagtctatcgtcgactcggtggacatcccagtgactgccaagatcagaagtggatgggacaaaagctgcattaatgccgtggaaatagccaagatcatcgaggatgccggtgcaagcgccattactgttcaccccaggacaaaggaccaggcttacagtggcaaggcggattggtccatcattaagaaggtaaagcaaagcgttaatatcccggttattgggaacggcgacgtccgaacgtgttttgacgcaaaacgaatgctggatgagactgactgcgatgcggtgatgatcggcagggctgccctcggcaatccctggctgatccgggattgtgtaaactacctggataatggggacctgcctatggaggttacaatcgaggagcgcatggatatgttaaaaagacacgtgaacctgttgcttgaaaataagggcgaagagtttgccattcctaagatgagaacacatgctgcctactatgtgaaaaaactgccccgcaccattgagctcaagcagatgatattcaagatgaacaccaaagaggaccttttcaacctactcgacgattacgtggactcactggatgaactgaaaaggtga

SEQ ID NO: 2314 - DNA, 939 bp, synthetic construct
  source 1..939: mol_type = other DNA
atggaaattctgaaacctgaggagctgaaagagaagttcaatgacccctggattgctccgtatgagaaagtcattaccatggctgatggagacaaagtggaactgattgaataccatccatgcccttccggttcaaactggctgctgtaccagtaccaacacagtagcgaactgatcatagacgccaagagggatggaaacaagcacacctatctttgcaaggtaggcaaaaagccattagaccttaaggcaagcataaatgccgccggcattgaggaggtggccatcgacgaagagaagaacgaggtcaaagtcacccacggggggctcgccggcgctggggtgggtgctggcatgtgcagaggcatgggagagggggtcaaatacatcgagctcctggaggtcggaggaggaagcaaggagggaaaagccactgtggtaacgccgaaatacgagaagctggtcatcggtatcgacgatacagacgttaaggatgccggtgcaacctggactatggcacacaatatcgggctgcagctgaaggaggaaggctatgagtacctggaccatatcatcgtgcagttgttcccccacaaccctcataagacgcagaactgtgtgtcgatagcgcttacatttgcggtgctcaaagaggaaaaggaaaatctaatcaaccggctcattgaaatactcaagcacgacacattgtccgacaagactgcaatcgccatccttgaggggatcggcatcccacccaagctgcgcgaatacgcgatggccaccaaaaccggcatgatggacgttgagacagccgaaaagctagccgaagaattaaacattcccctcctggcagtgaccggcgagcagggcaaagtgggggctctggcagccttgggcctctatgatgatgtggatgaggctgtgaaggtttattactga

SEQ ID NO: 2315 - DNA, 432 bp, synthetic construct
  source 1..432: mol_type = other DNA
atggtcaaatacaacatcggagccgttgtggctgagtttaattacgatatcactcacatgatgctggagctagccaaggcggaagcccaggtgcgcgactgtgagataaccaagattgtgatggtcccgggcgtattcgacatgccccttgctatcaaaaaattgacagaggccgaccaggagggacgcatcgacctggactgcatcatcacgctcgggaccgtgattgaaggggcaacagatcatgaccagattgtcgcccagcacgcaagtcggaagatagccgatctgtcactggaatggggcaaaccaatttccctcgggatcagcggtcctggcatgaccaggctggatgcacacagacgggttagctatggcaagaacgcggtggaagccgctgtgaagatgtgcgaccgactccaagatatctga

SEQ ID NO: 2316 - DNA, 1200 bp, synthetic construct
  source 1..1200: mol_type = other DNA
atgtcaattaataagtcaaaatctaacctcagcctcaagaacaagcttaaatctttattcagtggcaacagcaataagagcagataccaatccaagctaatacgtggggacttcgactcgctccacgacctgaatatcgcatacgtcctgaagggcttccccacactttcgcagactttcgtgagcaacgagcttagatacctggttgaagatggcttcaacgtagttgtcttctgctacatggaccctgccgacctggtggagttggatttcgatctcgaagttattcgcttcgacgagtcagacgacccgaccgggaaactggagcaactgctattggactatgagatcgacatagtgcacacccatttcgtctatcccccctgtacagaatacacatttcccgtgtgcgatagactgggaatcccttttacagttttcgcccatgctgtggacatcttcaaatacgatgtcgacaaaatcaaccgagtggatgagatctccaaaagcccattctgcaagggaatcctgaccctgagcaactatcacaagaaccacctgattgaaaggggagtggataaggataagattcacatcacgaggcaggctaccgactacgagatagaggagctggaactcaaagagcggaatgtgagaaacattgtaagcatttcccggtttgttgaaaagaaagggatcgacgtcttgattgatgtggcagacattctccgcgatgaggattacgagttttccatctatggctttggagggcttgaaaaggcctatcagaggcagatcgatgagctgaatctcgacaacatctccattaaggggcggttggacggtcctcaggaggtcaaagaggtcttcgacaaggccgatatactggcgtctccatgccgcatagcggaaaatggcgatcgagatggcatccccacggtcatatttgaggcaatggcctacggcgtgtgtgtactgactaccgaggtgtcagccatccccgaagtgattgacgacggaaggaacggttttatcgtgccgccagacagtcctgagatcttcgccgataagatccgggagattgctaatctgtccccagaggaacgctttgaaatcgctaaacaggcacaggtggacgtgcaggacacgagcagtgtggatgaaactatgaagaccctgtttttaacctggagtctctga

SEQ ID NO: 2317 - DNA, 1188 bp, synthetic construct
  source 1..1188: mol_type = other DNA
atgaattacgctttaatggtgtacaactatacaaccaacctgggcaatgagatacagaccatcgcggctagaagattcctgccgaagatcgactactatatcgatcatgagaagattaatctcttcaacgaggaggacaacgtcaagatgatcatgaacggatggtacctggactgtgaaaaggcatggcccccaagtgaatcaatcgaccctctcctgatctccatgcacttcaacaccacgagcagcaacaaggaacggctcaaagctcttttgagcgatgagagcatcgaatacttcatgaaccacgcccctataggttgcagggactatagtacagtggagttcttaaatgagcaagggatagacgcatacttttccggctgcctcacattgactctggataacggcaaaactaaagaggaacgggaactcgacaaaggacaggactacattgttgtaaactctgaaattgcggatgagatcatttcttttctaaaggataagacagataaaaagatctataggattcagcaagacatgatcccttcatttgacacctcatttccagaatccatgccactgtggctttacaacctgagctccttttatgactacgaggaaaagctgttcatggccgaaaaccttctccgcatatatgagaatgcctcgtgtgtgatcaccgaccggttgcactgcgccttgccctcgcttgccctagagaccccagtgatgctactgaacaataggggatttcgcgagcggttcgatggcctgagcaatctgctgctggagagtgacattgatagctatgaatccaattataacatcttcgatgtggacaatccgcccgaaaatcccaaggactacctcaaaatccgtaaggacctgatcgagaaaagcaagaaattcaccggtcacatcaacaactcttactacagtgacatctcacagcgcgagatattcgagagaaacaacctgctcctctctcgaaacgccattgggacgcgagattacattaggaatgtcctgaaaagaatgcgccagcatgagaaggacatttccaaaaaggaggagatcattaaaaatcaggaagcaattatcgataagcagaaaaagatgattgatgagatgaaggggtccaatagctggaagataactagtcccctgcggaagatccgaaagtga

SEQ ID NO: 2318 - DNA, 996 bp, synthetic construct
  source 1..996: mol_type = other DNA
atgaccaaacccaaagtttccatgattctgtccgcatataatgaggagaggttcatcgataaggccatctgcagtctcacaaaccagagcctgaaagacattgaaattatcattatcaacgatggatcaaccgataaaacgccagagatcatagagaaatatgccgaagaagacccacgtatcactgtgatcaaccaaagcaacattgggctgggggctagccgcaataaaggcatggcaattgcccagggcgagtatgtgggttttctggatggagatgactggtacaggctcgacgctcttgagattgcatacaatgaggcgaaaagcaaggatacagacataaccatgtatcagatgatcaattatgatgacgccacaggaaggatttacgagaacgactggttcaacctcaacaacctggacgaaagcttcgatggcatcgtatttacccctgagaagacgaaagactttctctttgacctgtccgtcagttcatgccagaagatctatagaaatgattttctgaagagcatcaacgccagctttcccgagggtatctattttgaggacatgcctttcttcttctacgtctaccttaaggccgagcggatttccataatccggcatcacttctactaccgccgaaagcacaatgcctcgatcacccacgtggtcgatgcaaattacctggatactgtggaagcgggctgtgaactaatgagacgcttcatagacaatgggttctacgatgactataagttcgacttgatcgcttacaagatcaatgggccacggatggccctaatggacataactgaagatgctaaggaaccgttgttcaacctgattaaggaggactacgagaagatcaaaaacacagaatactaccaggactacttagataacctcggccccaagaagaaaaagttctttctggacgtgattaagtatgacaattatgaggaatttaaaaagaacaaccccgagtactga

SEQ ID NO: 2319 - DNA, 1551 bp, synthetic construct
  source 1..1551: mol_type = other DNA
atgaaagacaataacaaaaaagagcaggctgaagacctcctgatagcaaacaaattccctccgatgaacgatgtcagtgggatcattcttgcaaaacgagccctgctgagcggcaagcggtacgatgtgtgccatacggtgattaaagagccccttgataatgacttcaacgagattgcagaggagattatcgataaccgcatcattatcaagaacttcgaatatgagatgagtaaaaaggagctgaacgagacctttaggaattacatcacggagggactgaaaaaactggaggagacaaatcccaactacaagacaatcactacccgttcctgggggttccagcctaatttcttagccctggaatacaaattgaagcaccctgacaccttctggactgcggagttttcagatcccctcactgtgaacattgaaaacaagccaagggatagacggttcaagttagacaataaggaatacatcgaccgcatcaacaatgaaatcgacaaggtcaacgaacggaccggacaaaatctggagcatattaaggaaagcgacttcatctacctgatatgtgaatatatcgcatatgtctttgccgacaagatccgctttacaaacccaaaccaaagggagattatgctcaaccagtgcccctatgacgtaaaggacatggtcatggctaagtcggagatcaatccgcaccctacccttgacgagaaatactaccacatcaaggaagttgactataagattgatgacgactgcataaatataggttactttggaacttattttggaaagcggaactttgagacaatcttctacgcctgcgaaagcctcaacgaggacattaggtcaaaagtgaagttccacctcttcctaaaccacggggataacctcaaacgactcacgggcaacctgaagatcagcaagaacatcatcgtgaatgacaaggtatcattgctggagtttctgaacctaagcaccaagttggacattctccttgtgaatgataccgagacaaaggggaactttgagataaacccctaccgcccaagcaagatcgctgattatattggaagcggccgggacatctggggcatctgtgagaaggacagcataatggacggcctggatgaaatcaaatataaaagctatattaacgacttctactccgcgaaactgaccttcaatcagatcgtgaaagactccagtaagatagatgatgggctgaaagaaaatccattcgaggataatgattatctagccaaacgagccagtgccatgtccgaggatgagatcgttgaactgatcaatgaaaataactacctcaagggtagaaccaatcatttaaaccacctgttcaacggcacaagaggtagaggcctgtttgccgacgaggctaagaaactgaacttgaagaatgaaaagctggagatggaaaataagaaactcaagaaagaaaacaagaagtacaaaaaggatttgaagtacctgaagtcgtccaaaggctcccttaagtaccagattaaaaagattgtgaagtga

SEQ ID NO: 2320 - DNA, 987 bp, synthetic construct
  source 1..987: mol_type = other DNA
atgtacgagatcgcggtgattcctggcgatggcattgggaaagaggtaatggaagccaccatcaacgtcctggagtccttggatgtggactttaacttcacgtatggggaggctggagacgagtgtctggagaagaacggcgtggcccttccaaacgaaaccatccaattagcaaaaaatgcagatgcctgcctgttcggcgctgcgggcgagactgctgccgatgtcatcgtaagactgcggcaggagctgaacctctttgctaacttaaggccagtgaaaagctaccccaatacaaatgccctctttgaaaacctggacttcatgatagtgagggaaaacacagagggaatgtatatcgcaaaggaggaggaatacaccgccgagggggccattgcccgacgtataatcacccggaaggcaagcgaacgcataatcgaatacgctttccagtacgcaaaggacaacaataagagcaaggtgaccggcgttcataaggcgaatgtgctcaaaatttccgacgggctcttcagagatatctttaatgaaattgcggacaagtataaggatgaaattgatagcgaggatttctacgtcgacgccacggcaatgtatctcatcacacgccctgaaagcttcgaggtgatcgttaccaccaatctcttcggagacatactgtccgacgaaggggctggactggtgggaggccttggaatgatcccctctggcaacattggggagaacggggccttgtttgagcccgtccacggttcagccccagacattgcaggtcagggaatcgccaatcccttggctatgatgctttccgccgtcatgatgctgaactacctcggtgagagtgaggctgaagagaagctgaataacgccatcctggaactactgaacgagggcaaatgcctaactccggacctgggtggctcgtcaacaactatggaagttagtgaggccatcaaaagcaaactgtga

SEQ ID NO: 2321 - DNA, 483 bp, synthetic construct
  source 1..483: mol_type = other DNA
atgaaaggcaaggtctggaagttcggcaatgatattgatacggacatcattctcccggggcgctatttaatctacaccgacgaggaaaagctttccgagcattgcatggaaggattggaccccgacttcaaaaacaaggtcagcgcaggggacttcatcctgggcggcaccaacttcggctgcggttcaagcagagagcacgctcccattgcgatcaaaggctgtgggatatcggcagtaatcgccgagtcctttgccaggatcttttaccggaacgccacaaatgtgggagtgcccctcctagaggctcctggtatcagtagtgccattgagaacggagaggaaatagaggtggatatggagaaggggattatcatatctgaaagcggaaaggagtacgagtttaagaagctgccaccattcatgctcgagatcctggaagaaggcgggctgattaattatctgaaaaaacagaacgaatga

SEQ ID NO: 2322 - DNA, 1278 bp, synthetic construct
  source 1..1278: mol_type = other DNA
atgagcacgatcgcggaaaaaatcctgtctcgagcgtcaggacaaggccaagtggaagctggcgatatcgtcatggcggacatcgacatagccatgatgcatgatttgactggaccgctcgcagttgagtcattcaacaagatagggactgagagggtctgggacaatgagaagatcgtcatccccttcgaccaccaggttccagcagattctcttgactctgccaacaatcacatcttaatgcgcaagttcgtcaaagagcaggatataaaaaacttttatgacgtgtacgagggggtgtgtcaccaggttctccccgaaaaaggccacgtgattcccggcactgtgattgtgggtgccgacagtcataccacaacatacggtgccctcggggctttttccactggcatcggctctaccgacatggctatggtattgagcaccgggcagctgtggtttaaggtgccagaaaccatccagttcaatatagagggaatcctgaaggaaaatacgtcggccaaggatgtgattctgaacatcattggacaggtcggggctgacggagccacctacaaaagctgtgagtttaagggcgagaccatttccactatgaacatttccgatcggatggtactgtccaatatggccatagagatgggcgggaaaaccgggatcattgagccggacaatgtcacctatcagtacctgaaggacagggtaaaggacgaaaacaaaaaccgcctgaaggcattcattgaaaagtccaatctcaaaacggatgaggatagctccagtcttgaaacaatggacatcgatgtgagcgacctggagcctcagatcgcctgcccacataatgttgataacgtgaagcccgccagcgagctaagcgacattgagatcgaccaagtgttcgttggttcgtgcaccaacggacggattgaagacctacgggatgccgccaagatcctgaaaggcaagcacatcgcttccggccttagaatgctcgtgatccctgccagccgcgaaacatatatgaaggcattggatgaaggcctgatcaagatctttgtggaggctggggccctggtgtcagcaccctgctgtggcccatgcctcggaggccacacaggattaataggtcctggcgaggtcagtctgagcacatccaacaggaacttcaaggggcgtcagggaagtcctgagggtgaagtgtacctgagcagcgccaaagtcgcggctcagtcagcaattgaggggagaattagtgtgcccaaatga

SEQ ID NO: 2323 - DNA, 1260 bp, synthetic construct
  source 1..1260: mol_type = other DNA
atgaaaatttgtattgtaggacagggatatatcggattgcccacggccgcactgtttgctaaaagtggctgtgaggttgttggcgtggacataaataaggagatcattgaaaagctaaaccaggggattgcccacatcgaagagccggggatcagcgactcaatcaaaaatgcggttgaccaaggccactaccatgcttcgttaacgcccgaggaggcagacacattcatcatcaccgtgccaaccccctatctgcctgaggatctgagctgtgacctcagctatgtcatatccgcctgcaattccattctccctgtcctgaagaagggaaatgtcgtgatcatcgaaagtaccatcgcccccatgagcacagatgaggtgatcaagcctatctttgaaaatgaaggctacgtcattggcgaggacctctatttggcccactgccctgaacgggtgttgcccgggcagatcatggaggagcttgttaacaacaacagaatagtgggtggaatcactgaagaatgcactaaaaaagccgccgatgtctatcgcacctttgtgaagggggagatcatcgagacggaagccaagaccgccgaactctccaaatgcatggagaacaccttccgcgacgtcaacatcgctctcgcgaatgagctggctaaaatatgtgcagagattggcgtgaacgccctggacgtgattgaaatggcaaacaagcatccacgagtgaatatccattcaccaggccccggtgtgggaggccactgcctggcgatcgatccatacttcatctacgccaaggctcccgagacagccaagattatcaagcttgctcgggatacaaacaacagcatgccaggttttgtgatcgagaacaccggtaagattctatccaaattagacaaagatgcagagaagataagcgtatttggggtggcctacaaagggaacacagacgatgctagggaaagcccggccttcgagataattgcaggcctgaaggcggcagggtacgaagtggtcattcacgaccctcacttcgacaaccccgactacctggacttcgatgatgctatcaaggacagctcaatgattcttatcctgtctgaccataaccagttcaaggatatggactacgattccattaagaggaatatgaagaccaagctcatttttgacactaaaaatatcattaaaagtgtaccggaggatgtgactctggtcaattatggcaacctgtacaagttcatacactga

SEQ ID NO: 2324 - DNA, 861 bp, synthetic construct
  source 1..861: mol_type = other DNA
atgaggattttaattacaggcgcgtacggaatgcttggatcagacctgcgcgaggttctcaaaaaccacgatctgatcgccacaggctctaaggacctcgacatcacagacgaagagagatgtattgacttcattgccaaggaacgtccggaaatagtcatcaacgcggccgcttacacggccgtggacgactgcgagacgcattatgacgatgcctatgccgtgaatgccctggggccgcggaatctggccatcgcctgtaacaagatcgacatccctttggtccatattagcactgactacgtctttgacggaaccaagcgaactccccttatcgaaaatgacaaactgggtcctcagagcgcatatgggaagaccaagctggctggcgaggagttcattcaggaaaacacccaaaagtacttcatcctgcggaccgcttggctatacggcatccacggcggaaacttcgtgaagaccatgttggatctcgctaaggagcacgatgagatcactgtggtaaacgaccagattgggtctcccacattctcccttgatctggcaatggcaatatgcgaggttctcgacagcgataagtacggcatctaccacctcaccaatgatggggaatgctcctggtatgactttgccaaagaaatctttcgcataagtgatatcgatgtgaaggtcatccccgtgtcgaccgaggagtttccaagacctgctcccaggccacactattccgtgctaagtaatgtaaaatggaaaagcgcagggttcgtgccaatgcgggattacaaggaggcgctgaaccagtatatttcactgtacaacttctttgtgaaaataggtaaaatttga

SEQ ID NO: 2325 - DNA, 873 bp, synthetic construct
  source 1..873: mol_type = other DNA
atgaaaggaatcgtgttggccggtggctctggcacccgtctgtacccaattacaaaggccgttagcaagcagctgctgcccctgtacgacaagccaatgatctactaccccatcagcgtcctgatgctcgcgaatattaaagatatcctgataatttcaacgcctcgggatctgcctatgtacaaggacttgctcggggatggaagcaatctcggaatgtccttttcgtacgcggagcaagagaaccccaacgggcttgccgaggccttcatcatcggggaagactttatcggcgatgacaacgttgctcttatcttgggcgacaatattttccatggccacagatttacggaaatcctagaacgcgcccgggaccttgacgatggcgcggtcatattcggctacttcacaaacaagcccgaggccttcggggtggtggagtttgacaacgaatggaacgtactctccatagaagaaaagccagagcaccccaaatccaattatgtggtcccgggactctatttctacgataacgacgtgatcgagatagcaaagagtgtcaagccgagcgacaggggagagcttgaaatcacctctgtaaatgaggagtatctgaacaggggcaagctgaaggtggagctcctagggagaggtatggcttggttggatacaggtactcacgacgggctgctggaggccgctaacttcatcgagaccgtgcagaagcgccagagtctctatatcgcttgcctggaggaaattgcatattcaaaaggatatattagcaaagaagagctgctgaaactcgcagagcctctgaagaaaaccgcctacggcgattacttaactaaattagcagaacgaaagatttga

SEQ ID NO: 2326 - DNA, 579 bp, synthetic construct
  source 1..579: mol_type = other DNA
atgggcaagtttaacataatcaaaagtgaaattgaaggtgtctttaccgttgagcccaccgtgttcgaggatgagcggggctactttatggaaacttacaacgagaatgactttaaggcggaggggatcgatctgaccttcgttcaggacaatcaaagcaagtcctcaaaaggagtgctgaggggcctccacttccagtacacacagccccagggcaagctggtgcgcgtcatcaagggggaagtcttcgatgtgggagtggatctgagaaaagacagcccgacctatgggaaatggatgggggagattctctccgaggaaaacaaaaagcagctgttcatcccaaaaggatttgcccatggctttcttgtattaagcgacgaagcagagttcgtgtacaagtgcacagacttctataagggcgatgacgagggaggtatccaatggaacgaccccgacatagggatcgagtggcctctgggcgaccttaaggaggaggatctgattctatcggaaaaggacaagctcttgaagcctatgaaagacacgccaactgatttctatatggaggatgaatga

SEQ ID NO: 2327 - DNA, 1008 bp, synthetic construct
  source 1..1008: mol_type = other DNA
atgacgaaaattcttgtgactggcggtgcaggttttatcggtagtaacttcatcaaatatatgctggataagtatcctgattacgaaatcgttaatttagatgcgttgacttactgcggaaacctggagaaccttgaagatattgaagataatccgaattactcctttgttaaggggaatatcatggatgaggggctggttgatgtggtggtgagtagcgtggactacatagtcaatttcgctgctgagagccatgtggaccggtcgattgaagacccgcagatcttcatcaaatccaacataatcggaacacaggtattgctggatgccgcctataagtaccagatcaaaaaattcctgcaagtgagtaccgacgaagtctatggaagcctgggccccgaggggtacttcaccgagacaactcctctccaggccaacagcccctatagcgccagcaaggcaggcgctgaccttatggtgcgggcctatggagagaccttcgacctccccatcaacatcacccgatgctcaaacaactacgggccttatcagttcccagagaagctgattcccctcatgatctccaatgccttagaagacaaggagctcccaatttacggcgacggaaagaacatcagggactggctacacgtctacgaccactgtagcgcgattgacctggtgctccacaaggggaagataggcgaggtctacaacattggcggccacaacgagaagcagaatatcgaaatcgtgaaactgattctcaaggaactggataaacccgagagcctaattaaatttgtcaaggacaggctgggacacgacagacgctacgcaatagattcaaccaagataacagaagagctgggctggaagccaaaatacacctttgagacggggatcgtggagacaatccattggtatttggacaatcaagactggatggagaaggtaaaatccggcgagtaccaggaatactatgaaaagatgtactctaaaaagtga

SEQ ID NO: 2328 - DNA, 984 bp, synthetic construct
  source 1..984: mol_type = other DNA
atgaaggtatcggtcgtgacacccaactacaatgggctgaagttcctgaacgcctattttgagaccttagctttccagagtaggttcatcgaggagatcatcataatcgacaacgcatctactgatgccagctgtgacctgatcgaagaatacatcaacagtcctagctataagattgacatcaaactcatcaagaatgacaaaaaccttggcttcgctcccgccgtcaatcagggcattcgcttggctaaatccgaactcatctactctgtcaacaacgatgtggagctggagttcaacacgatcgaaaccctgattcaatctatggaaagatccattgaggaggggaaaaacccattctccattcagtcaaagatgatacagtaccacaaccgaagcctcattgacgatgccggggatgagtataatctacttgcatacactaagaagctaggcgacgggagcccgattgacaactacaacgaaaagagggagatcttctcatcctgcgcaggagcggccctgtatcggaaatccattctggagaaaataggtctgtttgacgacaatttctttgcttatgtggaggatatcgatctgtcgttccgggcccagatcaatggttatagaaactacctcgagcctaaaagcatcatctaccattatggaagtgcaaccagcggcagccgctacaatgagtttaagatacgcttggcggcccgaaacaatgtgtggatgatttataagaatttcccaattcccctcaagattgttaatttcatcttcatatttcttggatttttcatcaaatacctcttctttctgaggaagggattcggttcaatctacttgggcggagtgaaagagggcctgcgggagagaaaggggatagaaaagacccactttgaatggaaaaactggaagaattactttaagatcgaatggaagatgattaagaacacatttggctactttaaaaaatga

SEQ ID NO: 2329 - DNA, 897 bp, synthetic construct
  source 1..897: mol_type = other DNA
atgcgtaacatcgacttatcaattatcgtcgttaattacaacaccttcaaactgacacgggacaccatagactcttgtcttgctgagccgactcattatacttacgaaatcttcctggtagacaacaagtcgacagacgacagcctcgaaaaactgcaagaatactttaagagcgaaaccgagcgaggaatactaaaaatcatccccaaccagtccaacgacggttttgctaaggcaaataatattgccattgagcaggcaaaaggggatttcatcctcctgctgaactcagacaccctgatgaagcagtccacgatcgacaagtgcatggattacataacagacaaaggccacgacgatattgatgcactgggctgtaaggtgtccctggccgacgggagtctggacaaggcctgcaagcgcagcttccccaatcctgccaactccttctacaaattgtttcatatcaacgtggacagtgacaagaacgattacaatctggatgaccttgacgatgatggtatctatgagatcgattgcctcgtgggggcgtttatgctcgtgcggcggacgacaatcgatgaagtgggcctgttggatgacgctttcttcatgtacggagaggatattgactggtgctatagaatcaagcaggcgggctggaagatcgtatacttcggccaggccgagataattcactataagggagctagcagcgaggataagaataccaagaaaagaaacccaaagattatctacgagttttatagggcaatgtatgtcttttacaaaaagcactacactaaaaaatataatttccttgtcaacatcgccgtctacattgggattggagtgttgctagtgtttaacctcgttcgcaatgccttcaggtcttga

SEQ ID NO: 2330 - DNA, 1401 bp, synthetic construct
  source 1..1401: mol_type = other DNA
atgattaaagaaaatcagcggatactgaacgccatactcgtcatcatagacattatcgtgattcttatcagcctcggcctggcatactttgtccggttcaagaccaccatattcagcgtgggaggctccctgccattcagtgactacttcatattcacgatcgtgtgcataattcctacgtatattctactgtactacttctttgggctttacaagccattccggaaccaaagctcaatattcagcggggccgaggacattgtgaagtcggacatcatggctttcatcatcctggttgctattctgttcatcatcaatcagcctaactttagtaggatcatgctcctgctgttaagcctatttggtatgattctcacaatcgctgagcgagtgctggtcgtgcttgtgttgcgcatgatgagaacaaacaaccttaacctgaagcacatgctgatcatcggggacaacgacctggcattcgagtttgcccataagatcaactcgaaaacctacctgggatacaatattgccggctttctgggaagaaaggaaaatatcggcaaacgattcgaaggcaccaagtttataggcagctttgatgacttgcctcgtgttctcaagacccataaatttgaccgggtggtcatagccatcccccttaagtattattaccacctaaacgaaatcgtggacgcctgtgaggaagagggaatcaaggcagaaatcatcccagactactataaatatctgccggctaaaccttccgttgacatgctcgatgacatgccgatcatcaatatccgctacgttcccttggatgatgccttcaataagttcaagaagatagtctcagattactttgtgtccattgtcgcgattattatcacctccccaatcatgattttaactgcaattgccattaagattgagtctcccgggcccatcatcttcaagcaggaaaggattggctataacggtaagcccttcatgatgtataagttccgcagcatgaaggtgcaggatgatgaggaggagaaatcccaatggacaactaaggacgatccaagaaagacaagaatcggcactttcattcggaaatggagcatcgacgagttgcctcagtttttcaacgtcctcaaaagggatatgagcgtagtcgggccccgccccgagaggccgtacttcgtggaggagtttaaaaaaaccatcccaaaatacatggttaagcaccaggtgaggcccggactcacggggctcgcccaggtgaatggttacagaggaaacacttcaattaaaaagcggattgaatatgacatccgctacgtagaaaattggagtctggcgctggatgtgaaaatcatgttttggacagtatttcgacgtaataagaacgcttattga

SEQ ID NO: 2331 - DNA, 2472 bp, synthetic construct
  source 1..2472: mol_type = other DNA
atggaaaaagaatttttcgaaggaatgaatctcgaggaagacattagtgatgaggacttccagactattgtagagggctgggaaaaagtccaagaccagatgtccaaagaggaatttataaccaaatttaatgaacacaaggccgagtttaaagacgcatctttcttcagcgacatagactttttaaacatgatcgtgaatcctctggtgggggggggcgatgatgagccaggacccgctatcgtggaaggcgagtttcagaagatatcggatgtggaacctggcaatgaaggattcaatgttgtggcacggataatgtcaattggaaacagccgaatattcacttcccgcaaaggaaagcagggaaagctgtgcaacctgcagattgccgatgacaccggagagctccgccttgttctttggactgaaaacatcaagcacctcaagcacgtcactgagggggatattgtcgagattacaaatatcgaatgcaaagagggcttccgggggggcaaggagttttccctccgtccacgcagttctctgagacctattgaagagggcagtgaaaactatccggaaaacatcgcggcgttccccgtctatgaggaaaagattacgcagattgccgacattaagcctgatgagaccgtgagcatcatagggaggctaatccgcgtgcctaagccacacgcctatgagagcaacggcaagaaaggtaaggtaacctccctggagattcaggatgcaagcggaaagacctcatacacactgtggaacaatgacgttaagctaatcgacatcctggaattgaaggaaggggacattgtcaaaatccttaatgagcagtcccgggaacgaaacggagagatttccttaagccattgggatggaagaatcgtcaaggctgaaggcgactacgacatcccagagtacgaggaaaacatcattaagatcgcagatgcccaagagatgcaggatgtgagcattatcggtctggtgacgaaggtgcaggacgttattcagttcacacgcaacgacggctcggagggctttgtgaaatcaatcgagctctcggacgacgaagggagcatcagagtgaccctatggggagacgacactaagatacccatctccaagggcgacattgtcaaggtcatcggaggaaacatagaatatgatgacttctcaaacggctacagggtaaacaccaactggaacactgagctcaaaatcaacccggaagagcatagcgatctcatagagaccctgaaagggcaggcagaaaacctgggaccgattcccatcagcgaggttcaatctattgaggaggacggtgaggaggtggacatcatcggtcggatcatcaccttgaatgacacccacaccttccccagggatgacggcacggagggtgttgtccgcagtggtgaaatggctgatggaagttctcccgacgggctggtgagggtatccttctgggatgacaaggctaaggttcctgaaataggcaaggcctacaaggtggagaacgccaggacccggatggggatgtacgccgtggaagtcaatgtcggaaagaccacacggttcattgagatcccagaaagcgaagccggtgaccttcctagttttgaggagctggaggagtccatctacatcagcaaaaaaatcgaggaactggatgaggatgacatgaacattaaagtcttggctcgcatcctggaggtgcatgaaccgcgggaatttccaagggatgacggcactaaagggctggtggggaatatggaggtggccgacataaccggctccattagagtgaccctttgggatgataagaataacctgccatacggcgtgggggacgctatcaaaatccagaacccccgtgtgcggtacaattcaaatatggactatctcgagctaagcgttggcaacgggacaaatatcctgactccaagcgacagtgagataaacgacatccccgacattctggagttacagaatacactctaccagaccaaggagattgcgaacctttcagatgacgacacgaaaatccgagtgacgggcagatttgtagacatctacggtcagaagatgatcattcctaaatgtccccaatgtaacaatacattggagcctgaggatatcgatgccgaggagtgcagcttctgcggcaactatatcgacgagcccaagtacctcctgatgctgcccgggaaactcgaggatgacacaggcgacattcaagtgacattcttcaacgaattggtcggggagctgcttggcatgaaacaggatgaaatcttcgagctctatgagggggaaggtggagacctgggtccattggagggcaagatcgatgatttggaaggcattacgctggaaatcctggcagatgtgacattcaatgagtatgatgaggaaaataggctgagaccccgaaagatctttaacatggagtggtga

SEQ ID NO: 2332 - DNA, 936 bp, synthetic construct
  source 1..936: mol_type = other DNA
atggtagaactggaagacctgccaaatgtgggagaaaaaaccgcagagaagctacgcgaggcgggctttgccgatatgatgagactcgctaccgccactgctaaagagctatcggtcaaggcggagatcggggagggtgtggctgagaaggtgattgaggcagcccggaaggccgagaagatagattttgagacggcatttgatgtgatggaaagacgacgggatgtgggccggatcacgaccgggagcaagaacgtcgacgagctgataggcgggggcatcgaaacccagtctatcacggaagtctttggtgagttcggttccgggaaaagtcagatctcccacgagctggccgtgacagttcagttgccgaaggaacgaggcggtctggaaggggaatgcgtcttcattgatacagagaacacattcagacccgagaggattgaacagatcgccgacgcctgtggaatcgaccgtgaggaggccctccaacgcatacacatcgcccgggctttcaactccagccatcagatactgatggccgaaaagattaatgagcttatccagagtggcgtaaatgtcaggcttgtgatcgtggacagcctgatggctcacttccgcgccgagtatgtcggaagggagtcattagcaacccggcagcaaaagttgaaccagcatctgcatgcactccagcaaatcgcgaacacctacaatgttgccgtgttcctgactaaccaggtgcaggccagaccagatgccttcttcggcagccctaccaaagctattggcggacacgtgcttggacacgcttcaacttaccgaatctggctgaaaaaagggttggcggggaaacgcattgctaggctcgtagacagcccccacctccccgaaggagaggcagtttttaaggtgacaacagacggcattgttgactga

SEQ ID NO: 2333 - DNA, 918 bp, synthetic construct
  source 1..918: mol_type = other DNA
atgctgattgctatggacttccggatcatcatactcagcatcatcataatgattctgctcggagtgctccttaagaaaatcgacctgctaaaagaggaagatgtcgaaacactcaacaatctagtaatcaacatctgtctaccttgtcttatcttcaatgcactgtacactgccgacgtgtccctgcttccaagcttgagtattttaaccctgtccaccaccatcacgagtctgatcgtcggcgtgttcacctacattctacttaaattatttgcctgggataatgtgaaaatctggagcatactggtgaccgtggtcctgggaaacacagggttcctgggctacccaattacacaggggatctatggcagcgagggcctcatacgcgcagtcttctgcgactgctccaccagcatcacatttgtaatcttgagcgtaatcctgatactgatttttgatggtgaattgaaggtggctttgaggaagattgcaacctttgttccattatggtctatcgtgctgggaatcctgtttaacattttcgccattccgataacagatgtcggaactactgtcgttggttatttgggtgacgccacgatccctctcattatgatctctctgggcctgtccctgaacatcagcgggctcaagaacaatctgaaggaggtgagtcttgcctcattcattaagctcatactctacccctttgtggctcttggggttatggccctgctgggcatcaccggattcaaccacacaatcggcctcattgaggcggcgatgtcatcagctatgattgggctggtgttggccatcacgtataagttggacccccatctcacctccgactgcattttcacttcgacgctcttcggcctggtgactattcccctgttcctgatgtttatcgtttga

SEQ ID NO: 2334 - DNA, 1983 bp, synthetic construct
  source 1..1983: mol_type = other DNA
atggcagaagaaataaacaatgaagaaattagggtgggcgtgtatgtgtgccactgcggtgtgaacgtgggtggagtcgtaaactgccctgaggtagcagcgtacgcagaaactctgcccaacgtagtgattgccaaggattacaagtacatgtgcagcgaccccggtcaaagtctgatccaggaggacatcaaagagcataacttgaatagaattgtggtggccgcctgttcccctcggcttcatgagcctaccttccgcagatgtgttgaagaggctggattgaataagttcctgtttgaatttgctaacctacgcgagcaggatagttgggtacacatgacacagcctgaagaggccacggccaaggccaaagatctgacgcgaatggctgtggctaaggcacggctgctggagcccctggaggccagcaaggtcgcagtagataaaaagtgcctcgttatcggcgggggagttgccggcattcagagcgcactggacctggcggatatgggcttcaaaacctacatggtcgaaaggaatcccactatcggcggaaggatgggccagttggacaagacattcccgaccttggattgttccatgtgtattctcgcccctaagatggtagatacatcgaaacacgagaacattgagctgattacttatgccgaagtgaaagaagtggacggatacatcggaaatttcactgtcaccgtggagaagaaacctagatacgtcaaagaggatgattgcaccggatgcggacagtgccaggaggtctgccctatcgagatacccaactattacgacgaaggcgtgggcatggtgaaagctgcctatatcccattcccacaggccgtgcccctctgcgccaccattgataagaactactgtatcgactgtggactttgtgagaccgtctgcgggccagatgcaatagaccgggatatggagccagaagaaatcgagctccacgtcgggaccatcattgccgcaacagggtacgacccatatgaccccaccgaaaagtacgagtacgggtatggccgatatactaacgtgatcaccgccatggaaatcgagaggatgatcaacgcatccggcccgacagggggtcacgtccagaaacccagcgacgggaaggagcctaagcgtgtggcctttatccattgcgtcgggtcacgcgacgagcagatcggtaaatcctactgttccagggtttgttgtatgtatagcatgaagaatgcgcagctgtgcatcgaccacgagccggatacggaggtcacgtgctactacatggatatccggtcatttgggaaaggattcgaagagttctataagactagccaggagaagtacgggatagagtttatccgaggccggcccgccgaaatcctcgagaatgatgacttaacactgacagtgcgcgctgaagacacactgctaggaaaggtgacggagtacacctatgaccttgtggtgctgagcgttggactagagccgcccaagggaagcaatgagctcagacaaacactgggcctttccagaactaccgacggcttttacatggaggcgcatccaaaactccgccctgtggacacattaactgacggtgtgtatattgctggggtggcccaggggcccaaggatattccagacgctgttgcacaagggagtgctgccgcatcacgggccagcatccccatggctaagggtgaagtcgaaatcgaaccgattactgccgacacggataccaccgtttgtggcgcctgcgaggtctgcgttgagctctgtccattcggcgctgtcagtatagagggggaaggcgcggacaaacacgccgcgattaacgtggcgctgtgtaaaggctgcggcacctgcgtgggcgcttgtccatcgggtgctatgaaccagaatcacttcaagaccgagcaaatcatggcacagatagccgctgccctggaggacgtggccaagtga

SEQ ID NO: 2335 - DNA, 666 bp, synthetic construct
  source 1..666: mol_type = other DNA
atgaaaaagttcgaatccgtggattttgacaaaaccgagaaaatcgtggacggcattgccatcgaagataacgaggctatggatatagtggtgatactggaacccggcagcgggcagtatgcattcctggcttcacggaaggcaccatccaagggtttcaacgcgttcattgagaccgaagcggccaaagaccataagacatttgtcaccgcagtgctttttgacaacgagtatgaaatcctccactcacggagggacattaacgaggtcccgattctcaccacgaatgagtacagctgtcgtggatgcacagccctgtacgatgccatcggaatcactattgagagtatcaaggatgaaatcgacaataaggtcctgttcttaatcattacggatggcatggagaacgcttcgcgcagattcaacgaggatcagataagatcttatatcgacgagctggactacgagtttatctttgttggggccgacatagacagttaccgggaagcctctaagatcggaatcaggcaatcccacaccgccagcttcaagaaaactggggagggcattgacgacttgttcaaaacaattagcgatgtgagcgacatccatcgcgacaatatgaagctcgaggacgtagattggaagcaccgactagaagattga

SEQ ID NO: 2336 - DNA, 1497 bp, synthetic construct
  source 1..1497: mol_type = other DNA
atggtgaagagaatccccgatgaagagcagatcaaactgggcatcagaactctggattttaacattccagaggaccacatcagccgttttgtggtggacttcattgacgagtattatcctctgttggggatcaaggaaaataaaaagaagaaggggcgggacagttttcctgtgaaagagatgctgaagctgctcatttatgctaagatcgagcatattgatagtatgagattcttagccgacatggtcaaataccacgacgtgtataagttcgttgggaatgggatctgcccctccgagaggtcactgcagcgataccgcgaaaagtacggcaagtattacaatgaactcctgaaagcgaccctgaaaaaagcttccgatgtggattacactgatttcaacgaagtttccattgacggtaccatcaagaaggcctacaacagcaaaaataaagtgatcacggagaaagaaactgaaatactgacccggtacttcgaaggaggccgggtcagtcaggaggagctagataagctccacaagccggcccgagagattcttgaaaataaaaagatcagcaaccaggagaaactctacctcttggacgacattaaaacgcagttcacactgagcggtcagaaatcggtgcccgttaccgacatcgaggcacgctggatgaaaagcaagaaagggaactcacaaatcagctataatatccagtctgcagtcgactacgatacgaagatgatttgtgcgataaacgtcgtgcaggcccctacagaccattaccagttgcccaagatcgtagacaaggccatcaacaacaccaacgtaattccaagattcgtgctcgccgacacaatctacctgaacgaggaaagcctgtcatatcttgcggataatcagataaacggagttatccccgatcgcaagcaatccaaggaaaaaatcggaaggctgaacaagaacccatatcacaaggatcacttcaaatacttccctgagattgacgcatttgagtgtcccgagggccagataatgtattttttcaacaaatacactgagaagaatgatgacttggacaagccagacaagattaagcggctatactccaactatggtgcttgcaaggcttgcaattgccgggagaactgcctctcatccacccaaacccaccgcacaatcaccgaatacggcggcagtttaaagaaggccatgtgggagaagatggaaacagaggagtacaaggaggagtatgccaaaaggtcgtctgtcgaaggaccgtttggcattctgaaggagcagttccatatcgaaagcgaagtagtgataggaaagacaaagactgaagagcgcattctacttgacgccgtggcttacaatcttataaggctctttaacctggagcaggaaataaaaaatgataaggaagatatcgtggacttctgtgagaaaattagcgtccaagagaaactggaggtccgagcaaccatcttttga

SEQ ID NO: 2337 - DNA, 294 bp, synthetic construct
  source 1..294: mol_type = other DNA
atgagtttcgaagacttgattgaggactatgtcaaagccaagatagatctcaacgtgaagttcggatcagtgctggatgaactcaatattgagtacgagagcttctgcttctatgatgaatttaaatccgtctgcctggacctggagatgcacaacaaggaacttagcgacgaggagatagaaaacatcatcgagaagacaggctttgacttcctaaaggtggaaatcaaaggcaaaaagtttccctttgggaatggtgaggagatcgattacacctacgtattcgagtgttga

SEQ ID NO: 2338 - DNA, 999 bp, synthetic construct
  source 1..999: mol_type = other DNA
atgaaaattagcctgaacaacgtatccctggatattgaccttaagaacagtcaaaaattcaagaacatggaggttattcctattgaggctctgagcgccgggaaaaaggagtttatcacactgaaggcgggcatccaagaggggtatgtgaagatctccgagtgtgagagcagcacagtgaatactgtcatggctcagaacaagtcttccacccccctcgtcctcatagatggcgaggaagtaatcggcgccatgcaaaatagaatcatgaacaggtccctcatcgtgcctggaaacaccactatgcccatttcagtgagctgcacagagcatggaaggtggcatacgcgtggaaacagtccaaaagcaagggagttctcccattcggacttctttgcagactatgaaacccggcaccggaagtctgaaaccttatacaataactctgactgccagtcggaagtgtgggcgtcaatcagcgacctggagattaagaatagctaccgctcgccaacatccgccctgaatgacagctatgtccaccaccgaccacggcttaatgaatatctgaaacatttcagcatgctgtacaatcagataggagccatattcataatcaacggccagatcaagggcctggaactcttctacaacccgttcctctgttcccagtactatgacaagatccttaagagctatatcatgaacgctatcacgaattactacagtaattgcagttcaaatagttcaaacattgatgtgggggcctttttggccgacctgagcgactccaaattgaaccactctcccaatcagggtctcggtcagcacattaagttctcaaacaaccacgggaccggctctgcactaatcaacgatggggagtttgttcacctgaattactttaaaaccaaatacgatgtgtcttacaagaagcagcgcaaaaacgtcagaacttttggctccttcgatgacctattgagtaagatggatgaatga

SEQ ID NO: 2339 - DNA, 1272 bp, synthetic construct
  source 1..1272: mol_type = other DNA
atgtatcagtacgagaatgaggttactaaactcaatgagctgatggagactcataataactggatgcgcgatagcgtgaacctgattgcgtccgagaacacgacatccaatgccgtgaccggagcggtggcctcagacttagctcaccgctacgccgaaggacaggccttcgagcggctgtaccagggctgcacatacatcgatgaaattgaagacattgtgaaaaggctcagcagagaggtctacgactgcagctatgctaatgtgcagcccgtgtctggggtaacggccaaccttgctgctttctttggctttgcaaaggctggagacaagatgatggcgatgaacataccctttggagggcatatctcccatgccaacgtaagtgcagccggtatcagaggactgaagaccctggagcatccgttcaacccggaggtgatgaacattgatattgatgccatgaacaagatgatattggaagaaaagcccaagatcattctcttcgggggcagcctgttcctgttcccccaccctgtgaaagaggccgtcgatgcagccaacgaagtgggggcaactatcatgtacgacggcgcccacgttctcggtctgatcgccggcaaacagttccaagatccccttaaggaaggcgctgaagttatgatggggagtacccacaagacctttccagggcctcaggggggaatcatcctatcagacgagtccaacaaggaactaatcgacaatgctgtgttcccaggtgtggtgagcaatcaccacttgcaccacttagcagggctgggcatcgccacagccgagatgctcgagttcggcgaggattatgccaagcagacaatcaagaacgctaaagcattggctggagctctggcagaacagggcttcaatgtgttctgtgaggatcttggctacaccgagtctcaccaggtcgccatgaatgtcagcgacgtcaagcgtgcaacaatactggccaaagagctggagcaaaacaacattatactgaacaagaacctcattccaggcgacaatgtcaatgacagcgacgacccttcgggtataaggatcggtacccaggagatcacccggcggggaatgaaggagaaagaaatggaggaagttgcggagtttatctggaaagtggccgaaggcgacaaagtagacatcaaggatgaagtcactgaatttatgagtcaataccgaacgatccattatgcgtttaaagaggaggaagggtataagtatattcagtactga

SEQ ID NO: 2340 - DNA, 702 bp, synthetic construct
  source 1..702: mol_type = other DNA
atgcgcataggatgggcctttaccggtgccggacatttgctgagggaaagtgtagaagcgatggaagaagtggccaaataccatgatatcaccgtgttcctgagccaggcttcagaggaggtcctccggatgtacggtttatatgaccgggtggttgcggtaactggcggccgctaccgagagctggcctgcgattccaaccagaaattcagcttcccaatcacgggcaggctgagcctcggaaagtatgacgctctgatcgtgtcccccgtcactgccaacacagtggcaaagatagtttacggcatcagcgacacgctggtgacaaatgccgtggcgcaggctggaaaggggagagtcaaaacccttatggtgccggtcgacattgagcccggggacgttgacaccgtccttccctccaagctagagctgtcgaaatgccaaaagtgcgatgtgtgtgatgccgctgaagtctgtccaaatggggccattgtggctcaccaggagattgatctcttgaaatgcattggctgtggcgcatgcaaggacatctgtcaatatggggcagtgtctgccgggaagatcataacaatgcacatgagagacatcgacattgagaacacccagaagctctcaaagatggaaggcatcgagatctttgcaagtcctcaggagctgctgctccacttcgattacaaatga

SEQ ID NO: 2341 - DNA, 402 bp, synthetic construct
  source 1..402: mol_type = other DNA
atgaagaacaatcggaagaataaccagaataaggagaacaaccatctaaagtcactgcacctgaagaaatccaacgaaaaaataaccgacctcaggatcgcggatagctttctgagccggttccttggcctgatgttcaagaaggatatcgactaccccctcttgttcaagattccccagaatattaacaacaggcaccgcagctccattcacagctgcttcatgcgatttgaacttaaactggtcttcattgataagaacaatatcatctacgaaatctcggacctcaagccatggagatattacgcacctaaaaagccggccaaatacataatcgagtttgacaagaacggatttagtgactatgacttaaaaatcggggatgaggtggagctgaaatga

SEQ ID NO: 2342 - DNA, 1209 bp, synthetic construct
  source 1..1209: mol_type = other DNA
atgagcaggaatatttttgttgagaaactcaatcaaacttttatcgaagatctggatattgaaattgtagagcggaaggggattggtcacccagacagcatcagtgatggtattgctgaaagtgtcagtgaggctctctgtaagatgtatatggatgagcttgggggagtgttgcatcacaatactgacgaggtccagatcaccgcaggcgagtcgaacccggtgttcggtggcggacagatcatcaaacccatcgatattctcctcaccgggagaggcgtgtctgaatacgaggggcataaattgcctcttgattatgtagccatcgacgccgcaaaagaatttctggacaagactgtgatcaacttagatgtgaaccgtgatacaatcgttgagtgtaagatcggccacgggtccggcgacctcgtggacgtcttcaaacgcgagggcgccccgagctccaatgacacatcgttcggtgtaggctacgccccattctccgaagttgagaccatcgtctttgaaaccgagaccctgttgaacagcaaagccttcaagaaagaccaccctggagtcggcgaagacataaaggtcatgggactgcgggaaggagacaagatcacgctgacaatcgggtgcgccacggtgagcaaatacctggcaaatcgagaggagtacatagcctgcagagatgtgctgaaagacattgtggctgaccttgccgtcaagtacacagacagggaaattgaggtgttcgtcaacacagccgacaacgacaatgcgacagatgagtcaggctactacctaaccgtgacgggaacgtccgctgagatgggagacgacggctcagtgggacggggaaatagggcgaacgggctgatcaccccctgccgccccatgagcatggaggcaaccagcgggaagaaccctattaaccacgtggggaaaatctataacatcctctctaacgaaatcgcgaacgatgtggccaaagatgtcgaaggcgtgaagcagataaatctgatgattctatcccagatagggaagcccatcgatcagcccaaggcagcttcagctggcattatcctggaggacggctatgagatgggcaaggtgagcccacaggttgagaagatcatagataattggctggagaacataaccgacattactgaaaaggtggttcaaggtaaggcccgcactttctga

SEQ ID NO: 2343 - DNA, 3432 bp, synthetic construct
  source 1..3432: mol_type = other DNA
atgccaatcgaagaggctgagaaatcatacgactttaaaaaaatagagagcaaggtccagagcttttgggaagacgaggacatctaccagaagaccaacgaactgaacaagaacggtccccaatactccttcctggacggacctccatactgtagtgggaagatccacctcggtacgacgtggaataaggtgattaaagacacactcttacgttacaaatcaatgaacggctttgccctgcgccgccaagcgggttgggacactcacggcttgccaatcgaacataaggttgagcagctccttggcatcgagtccaaacaggaaatcgaggagaaatatggcatagacaagttcgtcggcaaatgtaaggagttcgccatggagaacaaggtggctatgaccgagcagtttaaaagcctgggagtgtggatggattgggacaacccctatatgaccttggaccctaaatatatggaaagcgcctggtggaccttaaagaagactcatgaaaagaacctgcttacaaaggacaaaagggtcatcagctggtgtccgcactgtcagactgcactggctgccgcggagatcgactatactgaggacacagacccttccatttacgtccggttccccctgaaggagaagttcctaaatgaagagaactgcagtgaatttgcaaatgattctgatctggccaacttaaaacagtcgttcctggtttggacaaccaccccctggaccctccccggcaacctagctatctgtctcaatgaggatttcgagtattcattcgtgaaggtcgatgagcggttgaacgagtcagatgacgagatattgatcattgccaacgaactgctggaaaccgtgctgggtcccatcgagatcatacataagaataagattccaaaccctaagtatgatccagaaaataaggagtccaaggagaaaaaatacctcattgaagaggaaacggaagtgatgtacgagatcataaagacagtcaaaggctctgagctcctggggctcggctacgtctatcccctggcggaagaagttcccaagcaaatggaaatagaggccgagaacagtctggtgcacacaaccttccacggggaccacgttgaactgggggaaggtaccggatttgtgcacaccgctccaggccacgggcccgaggactttgagatcgggcaggaagtgggacttcctatccattgtcccgtggatgaggcaggatgctttaccgaggacggcggggcatatgccaatggctacaccaaagacctaaatgacacaatcattgcagacctgatagccaaaggattgatgtttaagaatgacacaataacccaccgattcggggtctgctggcgatgtaagactcctatcatttacctcgcgacggaacagtggtttattaaagtgcctgaaatcaaggaaaagatgctttctgagatcgaccgagtcgagtgggttcccaaatgggctggggaaggaaggttccacgattgggtggccaacgcgaaggactggaccatttcaaggcagcgctactgggggattcccatcccgatatgggtgtgtcctgactgtggagaaattaaggttatcggctcggtggaggagctgaaggagctgagcatcaatgaaatcactgcaagcgatgaggagctggttcacagaccgtatgtggatgacattctcatcaactgcgattgcgggtgcgatagccccatgaagcgtattccagacgtgctggatgtgtggattgactccggagtggccggctgggccgcattatactatcctcgggaggaggaaatgtttgataagtggtatccatatgactttatctgcgaagggcatgatcagacccgtggatggttctattcccagttgggtacaggggtgatcgcactggaccaagccccgtacaacaaggtgctgatgcatggattcgtgttggacgaggagggcaagaaaatgagcaagtccctgggaaatgtagtgcagccggaggaggtcattgaaaaatacggggccgatgtactgcgcttctacctgctgtgggcttgcaagccatgggatgaccttaagttcgtttgggacgagctgaacaatgtgaaaaagatgttcaacatcctctggaacgtgtatgtgttctcaacaacctacatggccctggacgagtttgacccagcaaaatgcgtactggatggcccggatgcaaatgtcacattgagaaatgaggaccgctggatcttatccagagtgaactcacttgcgaaggaggctggcgatgccataaatgacgtccacttccacttggccacaagagccatcaacaacttcatactggaagacttgagcaggtggtatgtacggctgatccgaggtaggacttgggtggaaagcgatgatcctgacaagctgggggcctactacaccctttacaatactcttaatacgctgattcatctaatggcgcccataactccccacctctcggaggaggtgtacgaaaacctggtgaaaaacctagatgataatgcagtggaaagcattcatatggataactggatgtttgacgagtgcctgatcgacaaggagctggaagctgaaatggaccacattagagaaatcatcgaggccgctgccagggcacgcgatgtcgctcgctacaagctcagatggcctgtgagtgacattaccgtggtttctcaggatgagagcatcctaaacagtgttgccctcctggaagatgtgatcaaagaccagtccaacactaaagaggtgcttacagctaacgagtttgaaaacctcacattcattgcgaagcctaacctcaagaccttaggcccaaggctcaagggagatatgggcattgtccagaagttctttgcccaagccaaggctgaaggaattggcaactccattaaagaagagcttgacagtagcggcaaatacatcgtcaccggggaggaccgcgagggcaatcagaaagagatcgaactcagtgccgacgatgtcctgtatgaaacggagctgccagatgacgtcgtgagcgcagaatttaacggcgggaacgtattcgtaaatactaagattacgcccgagatcctgagcgaggccatggcccgggagaccatccggagaatccaggacatgcggaaagacatggacctcgatgtggaagctaatgttggcgtcatgatcaatactgatggagagttcaaggagctcattgaaaagcaatctaatttgatcagcgatgaggtacgggctaaatccctggtgatattcgatggaaaagcctgcgaggtctgcacggataagggtatgggcagggagtacgaggacatctcggtagagtacagtaaagagtgggagatcgaaggtcataaggtgattatttccgttgtcaaactttga

SEQ ID NO: 2344 - DNA, 2211 bp, synthetic construct
  source 1..2211: mol_type = other DNA
atgactttgacagattctgaggtgaaatatatcgagggaattttgggtcgcgaaatgaacgagttggaggagggaatgctggatgtgatgttttccgagcattgttcctataaaagtagtcggccattcctccgcatgtttcctactgaaggcgaaaacattgtcctagggcccggagacgacgctgggctggtgtcgattacggatgaatacgcgctggctgtggggatggaaagtcataatcacccctcagcgattgaaccttacggaggcgcagggacgggtattggcggcatcctcagagacattatcagcatgggggccatgccaattgccctgctggacagcctgcgctttgggccgctggaggaccagaagtcacgctacctgtttgagcatgtcgtggagggaatctccgactatggtaacagggtgggagttcccaccgtggctggggagattgagtttgacgaaagcttccgaacaaaccctctggtgaacgtgctctgcgcaggcctcgtcaaaaaggatgagatagttctggctgtggctccaaacataggcgatgtcttcctgcttatgggcggaaccacaggccgggatggaatccacggcgtgacctttgcatctgaggagctcacgtcagacagtgaaaccgaggacagacctgccgtacaggtggccgatcccttcaccaaaaagcgggttcttgaagcttccctggaaatcctcgaaaagatcgactgctccggcgtgaaggacctaggggggggaggcctaacctgctgtgtctctgagcttgtagacaagtctaagaacggtgccgtggtggacctgcgagcgattcctctgagggaggagggcatgaccccatatgaaataatgcttagcgagtcgcaggagcgtatgatttttgtcattaaccctaaagacgtggagctcgcacaaaagatctgcgataagcacgaaattccttctgcagtgatcggagaggtcactgagggcagcaatatggtggtgaaggacttcgatgccgaagaagagctgcagaccctgtgcaacgttcccacgatccttttggccgatcccccgagcattgacaggccaacagtggagcccgctaagagcgaggacctggtggaagtgattgacggccccatcgacgaatcactcatcaagatcctgtcctctccaaacatcgcgagcaaggcatgggtctacaaacagtacgaccacgaggtgcaaaccaggaccgttgtaaagcctggcgacgacgcagccgtgctgcagatcgacgacgagacagcggttgcacttactgccgactccaacactgtacacacaaagctgtccccatacgatggcggggccggcagtgtcgctgaagccatccgaaacgttgtgtcaatgggggcgaaaccctacgccattgtggattgtctgaacttcgggaacccggagactccagagatcctctggcagttcaaggagtgcattagaggcatgtctgatatagcagagaaattcgaagcccccgtcatcagtggaaatgtgagtttctacaatgaaacggaaggtatcaaaatcaaccccactccggctgttggagtcatcggcgtggaaaagctatcaagcatccggacattgcccttcaagaatgagggggataagatcataatcatcggaaaaacctatgatgagctgggggggtccgagtaccacagagccgtccacaaccttgagcagggcgaggctcctaaaatccgcatagatgatgagttggccgccgccaacgctgtgctcgacctcatagaaaatgatggagattacgtcaaattcctggaaggtgaggacaagctcaacatcaaagccacacatgacgtatctgccggtggaatagcaattgccctgagcgaaatggttatgaaaggcaagttaggctgtgagatcgatatcagcaatgtcccagcggaggaaaatatcagcgataatgacttgctgttctcggaatcccacggtcggtacatcattgcagtagacgccgataaggccgaggaaatagtcaattccatcgacattgatgctgccatcatcggtgaggtcaaaggcgacagcttaataatcaagaataatgatgagaccattgttgactttgccattgacgagttagataacgcttataatggggtgattgaaaagtatatggcttga

SEQ ID NO: 2345 - DNA, 1227 bp, synthetic construct
  source 1..1227: mol_type = other DNA
atgaagtttataagcaatctgattcccctggaagaggcactgtcgaaaatcaatgacaacattaaacttatggatacagaaaccattgacctgaaggacagccagggcagagtgctcgcacatgccgtctcttcttaccacaacagccctccgttcgacaaatcagctatggacggatatgctgtgatcgcggaggacactttcggtgcgtccaataatgttattaaggagctcaaaatcatcgataggattggggccggtgacttttccaataagtcccttcaaaacggtgatgctattgtgatcgcaacaggggcaccaattccagatggggccaatgctgttttgatgaaggaatacacctatgaggatggtgacaatctggaaatccactcacaggtgactcccggggagaacatctctccaaaggctgaagacattgccaaaggcgacgagatcttaggagagaacgtgctcatccggcctcaggagatgggcttgatagcgtccgctggatacagtgaggtggaagtctacaaacggccaagagtaaaactgctgattaccagcaacgaactggtggacccttcccccaacatagacgacgccaagatcatcaacagtaaccaatacaccatcgccgccctcatccgaagtgccggagccacagtggatattgaccacggaatcgatgactttgacgaaattcgcgatgccatcgataaggcaagcagggaatatgactgtgtcattacaaccggaggcacggccataagcaaaggggatgtggtcattgatgccgttgaggacctgggagaggtactcttccacggggtcgccatgcgacccggcaagccggtcggggctggcatcgtcaacggcacccagatcttcatgctttcaggacagcctgtggcggcaatgggtcagttcgatataattgcaagacacttcctctttaaggtgcagggcctggattatagccataagatcgtcaagcggacgagctcaacgaagatccactcgtccctaggccgcaccgactacatacgcgctgtagccgatgacgagactgtgcatcacgttctgaaccgtgggtctggcatcatcaggtccatggtggaggccaactgctacatcatcatcgatgaaaaccatgagggcattgagataggcgacatggtggacttgatcttctttaatgatatggcttggcccagtctatga

SEQ ID NO: 2346 - DNA, 660 bp, synthetic construct
  source 1..660: mol_type = other DNA
atgaacaagaagatcattttcctggcgtgcgtgatagggatcgcccttctgtcggtgagctacatttcagccgaatccgatgtggacacctccgattgggtgaatataaccgtgaacgacatcaacttccaaattcccccagagtatgggggcggcaggaacgcaagcggcgattacctgtttaacaacgtctttaccttcggactcgtagctttggagaacaataagagtttccgcaacaattacggctatgaagcgacaaatgaagagaattatgacgttgaggagatggaaatcgacggacatcacgccgtggcctactacagcaaccggagcatcgtcaaccacacggtcacttatctctactttgagtcaaatggaacattctacgccttatcctatgacggggatgacgttaattcctctatgaagaaaatcgtgtcttatagtccgaaatccaaactgtcaaaggaagagtttaacgaaaagctaaacaaggctcaggaggagtatattgaagaccagatcgagcaggaagaggcttatcagtatgaacaggcataccgggagggctacaatcaagggcgcagcgatagcagaggaggcgagctcctgggttactacttcttctacaaactgggtcagaggagtcgatactga

SEQ ID NO: 2347 - DNA, 1158 bp, synthetic construct
  source 1..1158: mol_type = other DNA
atgaacggcatctattattatgtaatagcctttctactgatttggaccattgccattgtgtttaagggcagactggaaaactatggccttgaagtcaatttcccccttttgatgtggaagacccagcgcttgcgagggtttatcgaccggatcgccaatagggctccacggttctggaaatggtacatgaatatcgggatcgtcatctctaccggctttatgattctgatggctgtggccctggtgtacagcctaaagaccctgatggacgcacccaccgtcagcctggttattcctggggtggaagtgccaggctcgcctatcttcattcccttcctatcggggctgatcgccctggcaaccgtgctgatcgtgcacgagttcagtcatggcattttggccagggtggagaaaatcaagattaactcaattggtcttctcctgtttgccatcctgccaggggcttttgtcgagcctgatgaagaggaactgaagggactcaaccggcctagtagaatgcgcatatatgtggcaggttccatggctaacctgaccctggcagcgatcgcccttgtgatcatgatgctcataagctccttcgtcgtccccgccgtctttgaggacgacggcatcgtaataagccgtctcactgaagacggcaatgcaatcaactatctcagtgagggaatggtgatcaaaggaataaacaattactccgtaagcgacggggcgtcctaccaaaaagctgtgagcacattaaggcctaatcaaacggtgactgttctcacggatcagggagagtacagcttccagctcaagtcaaatccccagaacaagtctttgggctacatgggagtgcaggcccaggtaaaccagatcatctctccggattttgataacaaattctacacgccgttactctggggaataatgtctctgacagacttactcttctggatttacttcctcaactttgcggtcggcacattcaacctgttgccaatgaagcccctggatgggggtcacctgttcgaggaccttctgtcctacattacatcagagaatatctacaagcccgtggtgactttcatgtccttctttatgggaatcattattgttgttagtctggtggttggctttgtgggtgtcccattctga

SEQ ID NO: 2348 - DNA, 1227 bp, synthetic construct
  source 1..1227: mol_type = other DNA
atgaaagcaaaagcggagaaaatcggcgatggtgtgtactggatcggggtgcttgattgggaccttcggacgtaccatggttataccttggatggaaccacttacaatgcttacattgtattcggcgaaaaggtggccatcattgacaatgcctatcctggaaagactgaggagatgatggcccggatcgatgacgctttcgaacaagagggaagggaaatcaaagtggactacatcgtgcagaaccacgtagagaaggatcacagtggtgtcctgtacgacctgtggaaaagattcgatgccccaatctactgcagtaagatcgcgcagggaggcttgctcaggcactatcctaaactggagggggccgagtttaatattgtcggaactggcgacgctctcgacctgggcggcaaaactctcgccttcctggatgcattcctgctccactggccggacagcatgttcacgttacttgccgaggacggcatactattccctaacgatgcattcgggcagcacttatgctactccaaacgctatgataaggacattcccgaatatgtgctgatggatgccgcgcaaaagttttatgggaacctgatcacgccactaagcaaaaaggtgctgaacaagtttgatgaaatcatagagctgggcctgctcgagcaggtgaagatgattgctccctcccatgggcagatctggacagaccccatgaagataattggcgcttacagcgactgggcaaccggtaaacgagccgaagacaaggttaccatagtctatgacacaatgcattattcaacacagaagatggctcatgaggttgctgagggcatcatggccgagggatacgatgtggaaatgttcttcctccacgaagacgaacgttcggagatcgtcaagagcatacttacctcaaaggccgtcgcgttcgggattcccacaatcaacgactttccatttccaagcattggcgacattatctactacttgaaagggctgcacttcaatagaacaggctttaagcggcccgctgtcacctttgggtccatgggaggccgcggtggagccgtggaatttattgcaaacgagctcaccgaatgtggatttgaggtgctcgaccagcaggagatctactatgtaccggcagatgaagacgatgaagccagcttcaagctggggcaaaaactggttgaggaggccaagaagttggagctgtga

SEQ ID NO: 2349 - DNA, 795 bp, synthetic construct
  source 1..795: mol_type = other DNA
atggaaaatgaggagaatattagtcagcccaaggccattcagatttttgccaaggccccaggggagctaggcgtgaatgtggtcaagagccccgtgaaactcacgatcctgtccatgctaaaggacactgatatggagtttgatgaaatcgtgaaaaacaccggcaagtcaaaaagcactatctctgtacatctcaagagcttaagggaggatggaatcgtgagctaccggttcgatgcaaacgaccaccgaaagaaaatcttctacatcagctccaaattcctgggagaagtcgaaagcggggatgagaaggagctggaggaaagacaggccgaatttctggtcaagaacatcttggatgtggacaacttcaagttctcgtttctcctgttccacacccttcgctccaacttgattcaagagggcatcaacatcaacccagtactcaaccagacaggcaagaacataggtgcagcaatgtatgagaagctctatgacgacgacatcaaagtcttctgtgacaatattaccgaattttgggctgacaatggactgggcaaactggatatagtgctgggagatatcattaacgtgacggcctacgagtgctttgagtgcagtttgctgcctaagaagggtaaaccggcgtgctaccttgacgctgggatatttgaagccctgttcgcgaattatcttaaaaaggacatcgctgtgacagaggttaaatgtttcacaatgggggacgactgctgtcacttcctcgttgagggcattaatggggaatcactgacctga

SEQ ID NO: 2350 - DNA, 1983 bp, synthetic construct
  source 1..1983: mol_type = other DNA
atgagcaattcaatcttttgccccgactgcgggatgctgaaggagaactgtgtgtgtggacgctacaaggcaaatcgtgataaggtgaagtacaccaaaggtactagatccaatccccagtacaagaaacgaaaaacgttcaactactctaacaaaaaacgggcggaaaatatgaaaaatacgagcagcaacaaatcaaaaggtctgttccaatatgaagagcccaaagggctctaccaatacgaggatctcgaacctgttaaagtggaggaagaggatgactttggaagttcaaaggtctacgacatcgctgagcacgacctgcccaaggagatcatagatggcttaaaggaggactaccctgagattccagatagcatcatagagaacttcccctttgagaggccaagagagggacagctggatataattgccgatattgaggaggccatttcgaaaggcttcaaatacatcatcctcgaggcaggaacgggtacggggaagagcgctgtagccacaacccttgctagaatgtacgagtccgcgtacattcttaccatgaccaagcagctgcagcgccagtacgcagacgagtttgactttcccctcgtcaaggggcggggcaattttgactgcataaaagacggctttgaggtcacctgtgacatgggggcctgtaagacagctccaaagaatagtaagttcttctgtccatatggtattagcaaaaaccccacactgacaggagacttggcctttcaggactcctatgggggcgacatcttcttccagactaacgaccactgccattactggcagcagaaggccaatgcaatcaactctccaatcaccctcatgaactatgactacgctatcctcgagctgaattacgttaagcatttcgggaaacggaccctcctcatcctcgacgaggctcacaacatcgaagataagctgatgaaaaccatggaaatcaatttgtataatcggcagctggaaaaggacataaagaaggtcataagcccccagactcttaaaacccgggagatgggcgaatggatcatggagattgatgcgatccagggccactatgccgatattgacataaaggacctccctactaacaaggcagacaggatcaggagtacttccgcccgcctgaaggacctaaagaacaagctggaaacagagcctgggaactgggtgatcgactcaaatgaaaatggagtgtctttcaagccacttaaagtcaaccactatgccaacgattatctgttcaagcacggggatgttgtaatattcttaagtgccaccatcctgtccgctaagatgttttccaagtggctaggcctgaaccctcacgaagtgtatcacatcaaggtggacagcccattctcagtggagaaaagacccattgaactaaacctggccggcaagatgagcaaaaaccgcgtgaagcagtctgcccccaagtctatcgaaatcttaaacaagatcttgaaacggcatgaaggagacaaaggcctgatccacacccattcctacaaatgccagcagtatatcattaacaacctgtacaactcccgattgattgcacatggctctaacaatcgcgaacgggtcctgaaatactttgaggaagatgataaccctctcgtgctggtcagtccgtcgatgagcgaaggtgtggaccttccatatgacaagtgcaggttccaagtgatctacaaaatcccgttcccttaccttggcgatccgcagattaatatgagacgaaagaaggaccaaagatggtatgcctacaagacagtaatgacactgatgcaggcctatggaaggggcatgcgcgctgaagacgattcctgcgtgacttatatcttggatagtgatattcaaatgctgctgaagagcccgttgtacaggtcgctgattcccgagttctttaaggaggcgattattgttaatgatgatcgtattatctga

SEQ ID NO: 2351 - DNA, 699 bp, synthetic construct
  source 1..699: mol_type = other DNA
atggtgatcaaagaaaagattgaaattgaaggtatcccggtggaggtccaccgaaaaagaatgaaaaatgtctatctgcgtgtgctgcccgacgccacccttcgggtgtccgcccccgagagggtaagcaatgattacataatcgagtatgtcacttctaatctggactgggtgaagcagactcaagagcgcatcctgaaaaaccctcccaagcctaagattatgtataagaatggggaggtccacaagatctggggagaggagtacaagattcagctaattaccaacgacaccatcaaacacgccttctacgatgcagacgaatcgatcgtttacctgcccgtaagacgcagatccacagtgaacgaaagggagaaggcattgtttgagctttaccgcagtgaaatgaaaaggaacatcgactgctttttgaataagtgcgttccaattgtgggggagcagcccaaggaaataaaattccgaaacatgaagaactggggcaactgcaggcggaataagaccatcacgctcaacataaagctcgcttcaaagccgccaatctgcacagaatacgtgctgattcatgagctctgtcacatcctcgagttcaatcatagcccacggtttaaggcgctgatggatggcttctgtcctaactggcgggagatcaaaaaactgttaaacgaaagcgacgattga

SEQ ID NO: 2352 - DNA, 834 bp, synthetic construct
  source 1..834: mol_type = other DNA
atgctgacgaaaagaattattccttgcttggattgtgacctgcaagtgcctgaaggccgggtggtcaagggtgtggaatttaaacagatccggtacgcgggaaaccccgtggagctggcgaccaaatattacgaggatggggccgatgagatcgtcatcctagacattacagcttcccatgaacgccgtggaaccatggtggacgtgatagaaaggttgactgaaaacgttttcatccccatatgcgtcggtgggggcatacgcaaggtagaggattacaccaggatgctcaaggcaggtgcagacaaatgctccaccaatactgctgccatccataacccccagctgttaacagacgctagcaaggtggtgggatcacaggccgtcgtcatcgggatcgatgcaaagcgaagatatgtggaggaggacccagagcaagccaaagggaaaaccatagtggacacagacgatggagaggtatggttcgactgcagcatctacggaggccgcgagttcactggcatggacgccattgcctgggctcaggaatgtcaggaccggggagccggcgaagtccttctgaccagcatggatggcgatgggacaaaggacggctatgacctgattctcacgaaggccatcaatgacaacgtggacattcccgtaatcgcctcgggcggcgttgggaacccacaccacatcctcgaggccttcgagatcgcagatgctagtgcggcccttgctgcaagcatcttccactttgatgagtacccggtccctgtggttaagaagtacctgaaggaaaatggtgtgccaattagggagacgttttga

SEQ ID NO: 2353 - DNA, 1077 bp, synthetic construct
  source 1..1077: mol_type = other DNA
atgtcgagtcagaaaatcaattccctgatcgatcttaatctgacccagtatagtggccaaaccagccagagcccatggcggcacaactctatggagaacattgataagttcgacgagctcatttacctgaaagtgccctcaataattgatggactggatgataaaactatcaacttaaatggcctccccgtgcttctgaacctaagccaagacaaagacaacatcaatgggttcgaatacacatatagtctcccccagaaagtagaaaaacaagctttttctatcgggcaggacaatctgagcaagaaggaactgcagtccattgaacgggagatcgactccaacctcaataacatctacgacttggaatttgacctggagaagttctacgagtttcttctggaggacgagaagctggcgcccagcgttgacttctgtaagggattgagactattcatcgccaaggaccctttcgaatgcataatctccagcatttgttccgcgaacaattcaattgcccggtggaccgctagcatagacaagataaagctgaactggggcgaaaaggtggaatttgacgaaggtatgttttatggtttcccctcccctaaggactttttagacttctatgaaactcctattgagcagtcagaggctgacggacgccgatacgaggtggattgctacacaaaaaacctcaaatcctgcggcgtcggctacagggctccatacatgaagaaggccagtcagatgcttattgacgagatcgacatgaacgatgtgtcaaaaatggcctatgatgaggcattcgatctgattctgagattgccgggagtcggtccgaaggtggccgattgcatcttgctgtatggcttcggcttccaggaggccttcccaagcgacgtctggatcaagcgcatcgttagccacctctactttgacggggaagatatctctgcagataagacgagggagtttggaatagagcgctttggggattacgcaggctacgcccagctctatctcttccattacgcacgtaaatcggggctgatggatgagatcaagaataaatga

SEQ ID NO: 2354 - DNA, 444 bp, synthetic construct
  source 1..444: mol_type = other DNA
atgaaactggtcatccaacgcgtgactaacgccagtgtggaggttgaaggggaaattaccggccagatcgaagaaggactgatggtgctggtcggttttggccagacagatacagagaaagaggtcgactatctagccaggaagctgacaaagcttaggattttcccagacgaagagggccggatgaaccgatcagtgaaggatatagggggaaagctcctgcttgttccccagttcaccttatacggccggaccaaaaagaacagaccttccttccacaaggccctggcgccaaatgaggctaccaaactctttgactactttgtcgagaagtgcagcgaagaggtgccctgtgaaacgggggtatttggtgcattcatgaaggtgagcttgctcaacaatggaccggtgactatcctgttggagaaagagttcgaggactga

SEQ ID NO: 2355 - DNA, 450 bp, synthetic construct
  source 1..450: mol_type = other DNA
atgaacggggaaagcttccagggcatctgggacaacagccccttgattgcatggattcataatctctcgaagaatcacttcaaatacctcaaggccaaaatcaacgagtttgatctgggccacgagataaggtatatcatgatgatctacgacaacccaaatatctcccaggacgatctggtgatcatgtctggccaaagcaaggggaacattgccaagtcactgaagaaactggaggatgatggatatattaaaagagaggtaaacccggagaacaggcggaagtacatgctccggaccacgtccaaaggggacgagctagtccctaaggtgcgacagatcagtaaggactgggaaaaggaggtgggtatcaccgaagacgataaggaagtcattgaacgcataaaagagatagctatcaatggaatgaaactgacagaggacctttga

SEQ ID NO: 2356 - DNA, 1392 bp, synthetic construct
  source 1..1392: mol_type = other DNA
atgaaattcgactcagagacctctgtattgcttgtatcattccttacagccttctttgcagtgtttctggccgccggtattgtcataggagtgccagccattgcaaatgagttcggaatgaacaatgtagtgcagaattggattattacaatcgccctgctggtggtggccatgttcacgctgccggctggccagctgtccggtaagttcggcgtcaaacgcagtttgctcgtgggcgtcctgatcttcatcgtcggcagcataggcgcatgcctggctttcagcgccgaatccttcctcttcttccgggtgatccaaggaatcggaggggcttttagcaatgtggctagcatggctatggtcgttcaggccatcaagccccaaagcagaggaaaggccctggggcttaccgtcacgggggtctacctcgcaggatcactcagccctgtcatatgcggcttcctggtgtataactttggttggcggtccatgttttacttcaccattccattcttcctgatttgcatcgcgctcatgctttggaagattccaggggattggaaaacctatgaaaatgataagatcgactctatcggctacatgatctatgccgtgggcattttgctcttcatctatggatttacaaacctgatcaacgcctggggtttgatctgtgttgtggtcggcttcatactgctgctggcctttgcatactacgaaacaagagtggacactccggcatttaacatgcgactctttaagaacacgaagttcgcctcctccaacgtggcggcattatgcagctaccttgcagtggccgctctcactaccattttaaactatcatttccagtacgtcaggggctggaacgctcagatgtcggggctgatattgattgttacccccattatcatggcctttatggctcctaactccggtaaactctcggataggatacacccccaaaaattggcagccatcggaatgaccattgctactgcagccctagtgatcctcatcttcttagacgctaacactcccatttggctgattatcgttgctatggtcctgcagggggtgggcatgggcctatttaccactcccaacacaaatgcgatcatgagctctgtgcctcccaaagagacccctaatgctagtgccgcccagagcgccatgcgcacgatcgggcagacaatgagtctggggcttctgaccctggtgtttgcgtggatcatgggcagtctgaagctatcctcccagtacgccggaatggtggttcaggccagccagattgtttgtatcatctgcacaatcatctgtgtagtggcgatctttgcgtcactggtggggataaaatctaaggacgagtttaatattgagaagccaagttga

SEQ ID NO: 2357 - DNA, 1392 bp, synthetic construct
  source 1..1392: mol_type = other DNA
atgaaattagatctggaaacagttgtcgtggcggtatcgtttatcacctcattctttgccgtctttctgtctaacggcatcgtcataggggtgccagccattgcccaagagtttgccatgaataacgtgattcagaactgggtgcctactatattcttccttgtggtcgctatttttacagtccccgcagggcagatttcagggaaatttggggtgaagaagagcttgctgggaggagtgcttgtctacctctttgctagcataggggctgtgctttccttctccaccgagagcttcctcctgttccgaatccttcagggtgcaggggtggccttcttgaatgtgtccgctatggcgatggttgtccacgcagtgaagccccaaaatcggggaaaggcactgggatttactgtgactggggtttatctggctaccagtctgtctcccgttatctgcgggttcctggtgcacaatctcggctggagatccatgttctactttgtcattcctttccttgtcatttgcgtgctcctgatggcattcaaaataccgggcgagtggaagacatacgaaaaggacaagatcgacatgatcggaagtattctctacggcatcggcatcctggcattcatctatggttttacaaccctgactaccagcaccggtctgatcctaaccatcgccggcctggccatgctggtggtctttggcgcttacgagctccggcagaaatctcctgttttcaatatgaacctatttaaaaacaagaagttcacatcgagtaacatagcagccttgtgcagctacatcgccgtgatggtggttaccaccatcctcaattatcacttccagtatgtccgcggctggaacgctcagaccgccggtatgatactgatcatcacgccaattatcatggccattatggctccaaactccggaaagctgagcgacaaaattcatccgcagaaactggcggccataggcatgtcaattgctacggtggcgctcttaattctcacattcctggatggcaacactcccatttactttgtaatcctggccatgatcctgcagggtattggaatgggactattctcctctccaaacatgaacgcgatcatgagtagcgtgcccccaaaggacgcccctactgcatcagcgtcccaggccaccatgaggactatcggccagacgatgagtttagggcttctcaccctggtatttgcctgggtgatgggcagcttgcctctggccacgaaatatgcaggcatggtggttcaggccagccaaatcatctgtggaatctgtaccgtggcttgcatcctcgccattttcgcttctttggtaggtgtaaagtccaaggataaattcaatacagacaggcccacatga

SEQ ID NO: 2358 - DNA, 1017 bp, synthetic construct
  source 1..1017: mol_type = other DNA
atgaacgaccttacagacaggctgtttcactttttcaaggaagaaatcatcttctccattagcctgattctggccatcatttcctgttttttcgttcctcccagtgtcgattatttaaattacatcaactgggagactatcattctgcttttcataattatgctcttcgtcgagattttaaagaatctgtcggtgtttgaaatcctggtgcgcaagctcctgaagaaagtcaaaaataccagagggctggtgctctttctggtcttcacctgcttctttagctccatattcattacaaacgatgtgagccttatcatatttgtcccattcaccatattggccctgcggaaggttgaccgactggacctgatcatcttcgctgtgtctatggagacgatcgcagcgaatgtgggctgcatggtgctccctatcggggctccacacaacatcgtcatgtacatggtttcacatattccattccagtcattcttccttatccttctgccgtacatcgtggtatccgccgtgtttttgattattctctccttcttcgtccccagcgacgccgtaaacttgcccaagtttggcaaagtcgagattaataaggaaggcttctttaaacgcgtcctgttcggtgttgattatttcctgctcttgaccttcatcgcactatttgtactgataggaaacctcgaaaacatcacattctttaatctgttgtttaaaaagtggataatcggcaatgaggtgatttggggcgtagtggcctctcagtttatttcaaacgtgcccgccgcaatcctgctcagtggattcagcactaactacgaggcgatcatcgttggaatcaacattggagggcttggtacgctcatcgccagcatggctaacctaattagttacaagatcctggtgagggagcatggggagtttaaaatccggtatctgatcatatttaccttcttaaatgtggtgctgctcttcatcctattgggcgtgtacgtgtttattcactga

SEQ ID NO: 2359 - DNA, 591 bp, synthetic construct
  source 1..591: mol_type = other DNA
atgctcttcgagaaggaaaataccgaggaaaagattatccgggccacattcgatatcgttcagagggagggtttacagaaggcaaccactaaaaagatagctgcggaggccggggtgaacgaggtaactattttccgaaagtttgagaacaaaaagaacctcataaaaaagacgaaagaatactacaccaatcagctcatcgccaaactagaggagagctttgaatttaacgagaccgacagcattgaggagtacctgaaaagatccttcaacaagatcctggaattttcagaagaggatttcaacatcatccgcgtcgccatgcaggaagtgaagaacgatgacgacaaaaagctccttatcactaccattacagacacaattataaacaaactggatgagttcttcaaactgcaactggaaaagggcacgatcaaggatcttaattccaaggcggtcagtttgatgtgctttagcatcatattccagtcgctgatcctgtggcagatttacaatgacggagacctggctgccgactattatgcagatgaatttttggacatcatcttcaatggcattaaggtgcaatga

SEQ ID NO: 2360 - DNA, 3285 bp, synthetic construct
  source 1..3285: mol_type = other DNA
atgaaggtcctgaagatagccattatcatgctgattctgatcatcagtctgggagcggtttcagcaaccgagaattttaataatgatctgagtgataatggtctcaacgataacactctgagcgacaacagcctgaatgaaaacaccctgagcgacaacacgctgagtgataaatccttgagcgagagcacaatcatccagaacgaccacgacaacttgaaagacaccaacaacaatgataacaacaaagctctcaaagatcctgcgaagacgtttacagacctgcagatggaaatcattaatgcctccgaccttttggaactgaccgacgactataagtacaacaatgaaacggacaacatcacgctcaccatctctaagagcaacttcgtgattaacggcaatggccacacaatagacggcgacaatcagtgtggcattttccagatcaacgggacgaacattaccctaaaaaatctcaacatcatcaatgccaactctactaaggacagcgccctactcctcaacccaggctctgagcttgagacaaacaatgtgaccttcatcaacgacagctcggacaaaagagtaatctttgcatttggtgcaaaatataccagcaataatgataagtttatcgactgcacctccctcaacgatggcgtgattaactcataccttggtgagatcactatcaacaacggatattttgagagctccaagccactggactgggcgttcgtcaacagtttgggaaattcctcgatctacgttctgaacacgacattcgcaaataccacctccaagtacgcgacagcaatcaagggagatcgagagacagtaattcacgattctaagttcattaatctctatgccaacctgactgccggagccataggcctgaagcgcattgaggaggctgagattgacaattgcacattcattaatgtgagttcccaaaaaaatgggggggcaatattcctggacatctactcggatagcgaggacgtgcccatcatgatttcgcgatcctcctttgttaattgctacagcgagtttggaggcgccatcctctctcttgggggaaaaatcacactggaggaagacaatttcaccaacaacggggcattctttgacgggggcgctatctattcttccttctcccagcttaccatttcacagacaatctttgacaataactctgtggaattagatgatgaccggggttcctttgggggggccatattctctgacattagcgcactgattattttgaattgcagcttcagcaacaataacgcccagactgggggcgccctctatacctacgattcgggctactacattgccaactccactttcaaagacaacaccaacaaggagagtgagtttgatgatatcttcacggacttcgatggggagatcgccacactggaaaacaatagctattccggcgaggattcaatatgcctgaacaacgagaggtatgagtcagtgatcgccgtgtctggcatgaacttcaccctcatcgagaatgagatcaatgtgaccaaccctccgcggaaatttgacctccgtgaatggggatgggtgactccagtgaaaaaccaaggctacatgggttcctgttgggcttttggaactgtgggagctatagaatcttcaatcctgagatttttaggccttgaaatggacatctctgagaacaacatgcaggacagcctgttgcagtattaccgctacgggaccctcggcgcggaagaagggggcgagtacaacctcggcccgtcctatgcattgagttggtttggggtgttcccctcagagtatgacgtttacgacgagctgggaaagatttcagccataatcgctacagatgacagcatccatctgcaggacgcagtctttgtgcctcctctgatgaatagtactgacaaggataaacttaagcagtccctcctgaagtacggcgctttggcagtgagctactatgccgaaaccgatgagccaggattaaatgagaatacctcatcccagtacagcctcaaaaatgatagtaaccaccgcgtgcttttagtgggctgggatgacgactattccaaggacaacttctacatgaccccgcccggagacggggcttggatcatcaaaaacagctggggagaggaactgggggataaggggtactactacatatcctactacgacgccagtttcgccaccctagtgccctctgtcggcttccccatcatgaacacagtcatttacaataagaactatcaatatgacatcgggggcaccttggagtttacggatatgggtaacgaatacgtcaacgaatttgaggctctcgaagatgatttcattgcggccgtcggaacatacttcattgatgcgggcgtcgattacaacatcgagatctatgtcaatgatgaactgaagtacagccaagatggaacttcaccatttttcggtttccacaccatccaactcgattcgtatgtgcctatcaaggaaggggatgagtttgacgtgaagatcacatccgactgcattcccattctggagagtggccggcagcattatatagaaaacaagtcagccgccaatcttaatggggaatgggtggacctgaccagtgacgggaaagtctgtgctattaaggtgtatactaccgatgaggacaagaaaaaggagtcttctaggatcaatacaaggatcgactgtaaaaacatgacaaccacggctgtggcttctgaagacggccggattggtgaatacttccaggttactctgaaggacgagaacgggactgctttagccaataaacccatcaagattggtttcaatggaagggtctatgacagaaccacagatgaaaacggcagtgccaagctacagataaaccttgcctacaagggcacctacacctttgccataggcttcctgggtgatgaggaatacctgggagcattcgaggttgcgaagattactgtaaaagtgcagacccccaaactgactgccccaaataagtcatataaggtctcggcaaagacaaagagcctgactgcaagcttcaagacagctaacggaaaggccgtaagcggtaaaaagataagtttcacagttaatggcaaaacctactcagccaaaaccaactccaaaggcacggctactgtgaatgtatccctaaacaagaagggaacgtatagcttcacggtcaagtttgccggtgacgatacattcgccacttctagtgctaaggctaaactgaccttgaaatga

SEQ ID NO: 2361 - DNA, 138 bp, synthetic construct
  source 1..138: mol_type = other DNA
atggcacgctgtcccagatgcgggagcgaagccctcgaggagatcaacttcaacacctataagtgccacgagtgcggctacatgataaggaacccagacgacctggaactggtggaacgggagaatggagatctatga

SEQ ID NO: 2362 - DNA, 429 bp, synthetic construct
  source 1..429: mol_type = other DNA
atgaaaaaggccattattgaaacggaaaaaggagatatcgtcctggagctgttccctaatgaggctcccgggactgtggcgaacttcgagaaactggcaaacagcggcttctacgacggacttaccttccaccgggtgatccccgactttgtcatacagggcgggtgcccaaggggcgacggtacaggcgggcccggctggacgatcaaatgtgagaccgaagggaacccacacaagcatgggacaggcgccctctccatggcccatgcaggtaaggacactggaggaagccagttctttattacccacagtccgcagccacacctcgacggtgtgcacaccgtatttggccaagtcatcgagggaatggatgtggtgaatgctatccgccctggggataagatgctaaaggttacagtgcagggctga

SEQ ID NO: 2363 - DNA, 276 bp, synthetic construct
  source 1..276: mol_type = other DNA
atgctcgaacagtatatgcagttcatgtggctcatcatctttgggaatatagagaacttgattctgagctcccagggagttgtccagggagtggaccccaagatcctgggaggcctcagtattctggtagtgattatgtggttcgtcatcggcaccgtcattacagatgtggccatacagtacagcaatctaatcaacttcatcggcgggctggcaatctttcttctggggttccaagccgtgtacgaggctgtgcggaacatcaggggtggctga

SEQ ID NO: 2364 - DNA, 270 bp, synthetic construct
  source 1..270: mol_type = other DNA
atggactggaaaccctatgccccattcacggccttgctgattttcggaaacattgaaaaccttattctctcaagcgagggggtaatagcaggtgtgaatagctttgtgctgctgatcttaagtttgatagccgtcgtggcttggctgctcctgggaacctacgggacaaactacgcaatcaagtacgctgattatatcgagatcatcggcggcatcgcgatcatcctccttgggctagagtccatgctggaagccttcggcattctgtga

SEQ ID NO: 2365 - DNA, 1041 bp, synthetic construct
  source 1..1041: mol_type = other DNA
atggctcggattatactgggcaagactggccttgaaatcgagaaaaacggctttggcgccctccctattcaacgtgtagactttaatgagagtgcagagatcgttcgaaaggcttacaataacggcatcaacttcttcgacactgccagagcctatacagattccgaagaaaaactgaactatgcctttaaaggattcgataaagagtttccacgggaatccatcatcattgccagcaagacccagggggaaaaccgccgggacattgaaaaggatatcaagacgagtctggacaatttaggtaccgactatattgatctgtatcagatccacaacccctcattctgtccgacagaaggggacggaagcggagcctacgatgccttgttcgacctctacgatgagggaacaatacggcatatcgggttcacctcccacaaatacgagctcgcagaggaagctatccacagcggcctgtacgaaaccatacagtttcctttctcttacctcacggggccaaaggagctggcgattgtggagatggcaagggcgaacaatatcgggttcattgcaatgaaggccatgtccggcgggcttatccgaagctctaaagcggcatttgcttacatcaatcattttgataacgtcgtgccaatctggggtgtgcagaaactcagcgagctggacgaatttctaagttatatggccgacgacaccaaactggataagcagctggaagagatcatcgctaaggaaagggaggaattgcagggagacttctgccgcggctgcggatactgcatgccctgccctgaagacattcagatattcatctgtgcccgcatgtcactgtggattagaaggttccccgctgagccgaacctaaatgaggagactcaagagaagatgagaaagatagaggactgcacagagtgcaggcagtgtgtcatgaaatgtccctacgagttggacattcccgagcttctgaagaagaactatgaggattacaaaaagatcctctcgggtgagattaaggtgtga

SEQ ID NO: 2366 - DNA, 1176 bp, synthetic construct
  source 1..1176: mol_type = other DNA
atgaatacccaggaaatcattgatattgaagacaagtatttcattaatacattcaaccgcgtcccaatagtcctggaccatggagaaggagtcaaagtttgggacatcgatgggaacgagtacctcgacttcctcgcagggatcgctgtcaactgcctggggcacaaccatcccaagctggtaagcgcgatccaggagcaggccggaaagcttattcacgtttcaagcatctattataacgaaccagccacagtgtatgccaaacgattggtggacgctacgggcttcgacagaatattcttcgcaaacagcggggctgaggccaacgagggtgccatcaagctcgcaatcaaatacagtggcaagcatgaggtcctatactgtggagacagcttccacggccggaccatcctgaccctgagcgttactgatcaccctgagtacagcgcaccctatgtggaaaacctgccaaaaggatttaagaaagtggagtttggcaatttggactccgtgaaggaggcaatcacagatcagacggccgccatcatcattgagccggtgcagggtgaagggggggttcacgtcgcttcagaagagttctacaagggactcaatgacctgtgcaaggaaaaaggcatcctaatcattgcggatgaggtccaatccggttttggacggtgcggagccttgttcgcccatgagctgtttggcctggagcccgatataatgactgtggccaagggcatcggcggcggcttcccaatggctgcatttctggccaaagaggatgtggctggcggctttgtaccgggcgaccacggtactaccttcgccgggagccccctcgccggtgcggctgcaaatgcggtatttgatgccttcgaagaagagaatattgtggagaacagtaagaagatgggagagtactttaaggagaaactcgctccccttaaagacaaatacgacttcattaccgatgtgagggggtccgggctgttagtggggctggaactgaacttcgaaggcgccgacatagtgggcaagatgcttgaggaaggattcttaatcaactgtacagccggtaatgtgctcaggtttgcacctcctctggtcgttaaggaggaagagattgatgcgttggtggaggctcttgacaaggtgttttcgtccctgtga

SEQ ID NO: 2367 - DNA, 645 bp, synthetic construct
  source 1..645: mol_type = other DNA
atggagataaaaagaatcaaccggtacgtcatttacctattctccctgttcctcatctcactgggggccagtatctcaatcaaggccaatctgggtacctctccaatcatctgcttaccatatgtgagcagcctgatcttgaatatgagcgtggggactgtctgcttgatatttaacgtgatcttcatcctggttcagataatcctcctgcgcggagactttgaaaggcgacagtatctgcagataattgtcggcaccatcttctccctttccattgactttagtatgacgctcgtaactttcttaaacccgacaaactacattagccagttcgccgtcctgatgctcagttgtgtggttgttgcatttggcgtattgcttgaggtgcaaaccgaggtggtctttcttccccccgacggcatcattgtggctattagcaaggttctaaacaaggagttccccaaggtaaaaccattctttgatacatcgctggtgctgacagcagcgattctgagcatagtgttcctcggctacctggccggagtccgggaaggaaccatcatttccgctgtgatcattgggcctatcgtgaaagtgctccagaagttctttaatccttatatcgaggccgtgattgaaaaatga

SEQ ID NO: 2368 - DNA, 438 bp, synthetic construct
  source 1..438: mol_type = other DNA
atgacaaatcggaaggactgggggttgacggtccgtgggatcgtccaacaggaggacaagatactgatcctgaggagacaccccaagagccgaaacaatcctaacaaatacgagctcccaggcggcaaagtggaccccggagagttcttcgatgaagccttgattagggaatttaaggaggaaaccaacctggacgtaaatatagtgtccctgtttgagaccgtccaggatgaatttatcagtcgccggaccaaccagccgatcagcactgtgcagctcatgatgaacctagagatcatgggcggagaggtggaaatttcctcagagcatgatgatttcaagtgggtgagcatcgaagagctcaaggagctgtataaaaacgacatggttaccccaacattacgccttactctggaaaaaagagacttcaagatttga

SEQ ID NO: 2369 - DNA, 1284 bp, synthetic construct
  source 1..1284: mol_type = other DNA
atggatctgaacatcaagacaaacgacaaaggccatctcgatattggcggggcggatgcctgtgagctcgtcgaagagtatggcacacccatctacgtgatagacgaagaacgggtgagagacaactacaatcgcttttataatgctttcactaagttctatcccaaatttaaggtattctacgcctgcaaagctaatacaaacattgcagtgctcaaaatcctcgaagaggagggatgctgcatcgatgccgtgtcccccggagaagtctatatctgtaaaaagatgggattttccggcgacaggatactctttacaggcaataacattagaaacgatgagatggactatgtgaacagcgaagacgtgatcctaaacatcgattcagtcagcgcccttaaaaggctggccgagagcatcgatcctcaagggaagaagatctcgttccgggtgaaccctatggttggggcaggccaccacgggcattgtatcacggggggggagatgagtaagttcgggattatggagaccgaggcggtggagatctacaagctggctaaggagctgggattcgagcctgtaggtatgcactctcacatcgggagcggcattctggacccggaacccttcaaattggctatagagtctaccatgaacatcgcagggaaggtccaccaggaggcgggcattgactttgagtttattgacttcgggggcggcgtcggtattccttacacgccagaagaagagcttttagacctggagcacttcgcagaggagaatattaaactattcaaagagaagttagaagagttcgacatgggagaacccattctgtacctggaacccggccggtacatcgtgggcgatgccagcgtgatactggtggaggtcaacagcgttaaggaaagttaccgcaagttcatcggagtcgatgccggcttcaatactctgctgagacctgccatgtatgattcctaccatcacatcgttgtggccaacaagatgaatgaggagcccacccagactgtagacgtggctggtaatgtctgcgaatcaggagacctctttgcccgagaccgcccactgccagatattgaggaaggtgacatacttggaatcttgaatgctggcgcatacggttataccatggccagtaactacaattcaaggccgctgccagcagagatcctcgtgaagaacggagaatccttcgttattcgagaagcccagacctttgatgacatatttgagaagcagtccatcccagaacatttgaaatga

SEQ ID NO: 2370 - DNA, 864 bp, synthetic construct
  source 1..864: mol_type = other DNA
atggtagatctgaaagggctgaaattctcgaaaatgcatggcatcggtaatgacttccctataattgacgagagtaaaggcgaacagatcaaggaagcagacaagccagaggcctgccggcagctgtgtcacaggaacttcggtgtggggggagacggggtattgttcgtggtcccatcagacgtcgcggacatcggctaccggatgttcaatcccgacggcagcgaagcggaaatgtgcggaaacggcatccgctgctttggcgactttgtctacaggaacaagattgtggagaaggaaacaatgactgtggagaccaaaagcgggatcaagaccatcgagatcactgtggaggacggagagccggtgctctttaaggtaaacatgggcaaatccacattcaaggtccccgaaataccaatgatcgctgatacagatgagtttgttgatggggatctggacgtgatagataccacgttcaaggcaacgtgcgtgaatgtgggaaaccctcacgccattctgtttgtggacaacgtcgatgatattgatattgacaagtacggaccggccattgaatgtcatgaagttttccccgagaagatcaatgtgcactttgttgaggtgttgagcaagaacgagggcaaaatgagaacctgggaacgaggagctggcgttaccctcgcctgtggtaccggtgcaacttccacagcccttgccggggtgaaactgggtctcttcgataagaatgtccttctccacctacctggaggcgacctggagtttgaggtctatgaggaagacggggagctgggggcattcatgaagggccccgctgccttagtgttcaacgctgagatccaatga

SEQ ID NO: 2371 - DNA, 171 bp, synthetic construct
  source 1..171: mol_type = other DNA
atgatactcagccgcaacatcctcaattatctgaaagaggggaagacccttgaggaagcttgcgccaaggcaggagtggtccagaatgagctgaacatctggaagctgtgggccgataagggcctacagccctacaaagacttctttagggaaattgagaactaccggtga

SEQ ID NO: 2372 - DNA, 729 bp, synthetic construct
  source 1..729: mol_type = other DNA
atgaacctagaggagcgtaactcacgggaaattgaggagttcttcaaatccaaaggcgtgaaagtggtcggttttgctagtcttgaaaacattagaaatgtccctaaggagtatccaaacagcatcctcatagggataccaatcgagaaggaagcattgaaaaccatctataccaacgaccaaagcttgtatgttgagtccatgaaggaggtggctcagaagctgaatgacatcatccttgagggggaggattacatcaaaaacaccatgaattacaatgccctcgccatttcgcgggagagggtggcgggggaactgaaagacctggccagcaagatcccccacaagactaccggcactaggtctggcctgggatggatcggacgctgtgcactgctcatcagtccggagtacggggccgcactgagactctctacgctgctgacggacatgcccattaaggtcggcacaccaattgatgactccctgtgtgaggattgcacagactgccaggatgcctgtcctgtagacgcgatcaacgaagtgaaatggaactcacgccgagaaagggaagagtacttcgatgccgaaaagtgctttgagttcattaagaaggaaatgaaacgcacaaacggcaagagcttatgcgccaaatgtggtctggcttgcccctacactaaggaatacctcggaatagagaccgaccggaatctaattaaggaaatctga

SEQ ID NO: 2373 - DNA, 651 bp, synthetic construct
  source 1..651: mol_type = other DNA
atgaaaactaagaacaccaagacccgaccccagctcacaaaggacctgaagagtgaagacttcatggagtactattttcttaaggaagagttgaaggagttttgcagacgcgaggggctaaagatcgggggttcgaaaaaccagctggaggaaagaatcatttactatctggatactggcaaaagcttagatgaaagcgtgaaagatggcaataaaaccaagaatcacaagtcagtcaaagatgacaacaagacgaagaactgcaatcacaagatcagcaatagcgactctcaggaaatcacactcgactccattctgggggagaacttcaggtgcagcgaggacaaacgggaattttttgagagggaaataggaaaaggatttaagttcaaggtgaaattccagcgctggctgaaggcaaacccagataagacatatcaggatgccatcaatgcctactacgagttgcagaactccaacgagaagaccaaaattgacaggcaattccagtacaaccaatacatccgggacttcttcgaggacaatgagggccgttccctggatgacgctattaaatgttggaaatacaagaagagtcttaaaggccataaccggtatgaagacagcgatctcaagatactgaagtcatga

SEQ ID NO: 2374 - DNA, 585 bp, synthetic construct
  source 1..585: mol_type = other DNA
atggggaaatttgaaattgaaaccgacgatctggtatacatcccctcagacgacactttcctcctggctgagaacctcgagataaaggaaggccaaagtgtcctggaaattggcacgggctcggggcttgtgtctatgtatgcgagtctccttacagatgatgtgacagcaacagacatcaactacaacgccctggagctggcagagaagaacttcaagctaaacgatatcaacaccataaggctggagttcggagacctatttgagcctgtcaaaaatgagaagtttgacgtgatcctctttaataccccatatctgccgaccgacactgacgacatcattgacgatgacttgaattacgcctttgacggtgggatagatggccgcaaagtcatcgaccggttcattaatgaggtgagccactacctgaacgatggtggaatcgtgcagatcattcagtcctccttatccaataacgataagacgttggatatgttcgacagaaacggattcatcgccgaaatcgctaaaagcgagagctttttcttcgaagagattgttctgatcaatgcctataagatttga

SEQ ID NO: 2375 - DNA, 897 bp, synthetic construct
  source 1..897: mol_type = other DNA
ttgaaggaagaaatcagcttagcaaagcaaaccaaaaggatactgcaggagaacgacattaagcttaacaagaacctgggccagaactacctgatcgacgactttaaacggaagaaaatcatcaattacgcaaatctaaccaaggaggataccgtcctcgagattggccccggaataggaacgctgacaatagagctggctaaacgcgccaaaaaagtgattgccatcgagcaggacgagacgatttttaacatccttaaaaaacggctcgagaaggaaaaaatcaacaatgttgagcttatcaacggggatgccgtgaaagtggactttcccgagtttaataagatcgtctcaaacctcccttaccagatatcctcacctatcagcttcaagttccttaatcacgacttcgacctggctatcctcatgtatcagaaggagttcgccgaccggatgaatggtaaggtggggactaagcagtacagtaggctgagcgccatgctctacttcaaggccgacgtcaagttcctgactaaggtatctcccgagtccttcattccgtctcccaaggtggatagcgcggtgatccaactgaagccaaagaatattgatagtataagaatcaacgataaggaatatgaaatcgataaagaaacatacaagacatattcgaaagtggttaaggcgctgttccagcaccgcaacaagaaggccaggaacgcactgattgactccagacatatcattggctttaaagataaaaaggaattgaaaagcattctgaacgatctggaggacgaaaatccacgtatcaaagaaatcctattggagcgaaccattaacctggctccagaggagattatggaactcaccatcctcttgaaggaccagttatga

SEQ ID NO: 2376 - DNA, 750 bp, synthetic construct
  source 1..750: mol_type = other DNA
atggataaccccaacatcgataatccggcccccaagaaagaggagaatgtgattatactggactatctgaagttcgggtacataaatcccgaacggcccacggcgcgggggaagccaattgcacaggctcttggcgtggacaagttcacactgatcgaggtcacaccaaaacagggaattgacctggagattcatgagaaagtgtacataggttctggaaagagagacaagatcaaccgagtaaaggggctcctcgattatgaaaagctgaccgctacaagccgcatcgaattggaatacgcaattaaggaaatcatccagtcaaaagaggagatctacatcaagttctttaacgaaatcgatagtttaaacatcaagatgcacaagctcgagctgattccaggaatcggcaagaaacacacccaaatgattctggaagagcgtaagaaagagcccttcaaagactttgaggacctaaagaagcgagtcccgctgctgggtgatcctgttgacatgttggccaaaagggtgtcccttgagctcgacaccacccaggtgaaacgcggcaagaaaaaatactatatgtttactcaggtccccagcaaacacccttccaataagaagagataccggagaggccggaacaaccgcaacaggaacaacaggaaccgcaagcctaataagaacaggaataagaaacctaacaacaaggccaataataaggccactaataaaccaaaaacggaatga

SEQ ID NO: 2377 - DNA, 3177 bp, synthetic construct
  source 1..3177: mol_type = other DNA
atgaactttaagaccaaaggaagtctgattctgatttccctgctgttcattttaattataggtattggaatggcttccgcctccgaagatataaatacagatattgacacggattatcaatctgattccattgatgtgtctgatgtgagtcttaatgatgaacagatcgcgtctgaggacagtttgcctaactatgagattgccaataaatccaaggacaagctttatgatgaaggagaggaggaggagggcggcattacaaatgacgatgatgatgaaaactatcggatcgatggcatctacgccgattataccattaccccgtctgagaatggaacgatcttcgtggaaggcgaacgaatccagataatcttcaattttacagatcaggactatgagcctgtttccggcgactggtttattaacttctacggtgagagtacggacgtcgacatataccacccatttgaggccaccgggctcaccgactatgtcgttcccatttatttgccccccggggactatgtcatcttcttttacgagggcgtggtttttgacgacttcggtggaatcgaggatgaaggaactcagttagatgtgacttttgaggatgccgaaggaaaccagttggataatccggagttttctatcaggaccaactacaacaagaaggtgtatgctaatctgaccatagactacagtgtcgcggaactggaaaatcttgtggagggggacgatatcactgccaaaattagcctgatggatgagtttaataacaagatgactgaaaaggttaacctcgagatttacaggaatggagagaactacgattctaaaaaggtgaacgtggtagagggccagaataacaacatcatctttgaaaacctgcaggaagggaactattcactggaagtggccagcatcgacagtgttcccaaatacacgaacatcataacaaaggcagtcaacttcacagtcaaaagcaactatgacccagacaactaccagatcatcctcaatccagaggatgagaaaaaactggtgggggactcatatgaaatgggtgtgaaactcctcaatccatctgaggaagctgaggaggggtcgattgacctgtacctcaatggcaacttcgtgaaaacattagaactgaactatgatgaagacggttactcccaccacatcgtggaaggccttcagctgggccccaacaatgccacattcctctaccagatccgcgacggggtgaacgtgtccgaatcagtgaacctcatcagatacgaaaccgagtccatcattgacctggagagctcagatatcattatcggtgacgatgccaagatcaaggccagcctcagttaccttgacgggatcgtcaaaaagcccatcaacgaaaacttcaagctgtatatcaaaaactacgtggaggatgaggatgaggtcgaatttgtctacgatgaagagttcaccataaagggcagcgagaccataactctgagcgacctagaggaaggaacctactacatttcagctgtgtacaacggtaagaactacaaatacctagccactgaggaggagtccaccctggaggtcttccccaaggagacaagagttgacgctgtcgcccgaacctattcaactgaggagaatgttattgtaggcattgaattagctgacttgtctggaaaggccataaaaggcacggtgaatgtggtcctggacaacaagaccagttaccaggttaacactaccgacgacatccagcatcctgtggaactggacctgggcaagctgggctacggcctccacaatattgagctgaactacacaggagacgatagcgaaggatggcttccaagctacaacaatgcagagtttctagtaatctacccaagcttcatgagcatcgaagatggggacgtcacctccggcagcgacctgacggtcaacatttccctgacaggccctgacgatgagggcataaacggaatcattacagtgcgcatttacgacaataccggaaaatatctcattaacggcgacttcaacacaacaaatggcgtgaaaagcatcgagctcaaaaacatcacgaaggattacatcatctacggccgctactatggcctggacaccagcaaaatcgaaatcgggcctagcaaccattatttgtcgtcggaggcttatggcttcattcggatcgctgaagggaaatcggagaaaaccgaatatgaccttgagctgaccaaggtaaatgacaacacagtaattgcttcccttaaggactccgattcaaagcctgtggccaatgcggagctgaccgtgaaggtgaatggggttgagtccaaggcaaaaacagacaataatgggatggccaacatttccttctccggtaattcatcaatcaaggtaagctatactgacgcaaataacactactgcgaaggcatctatggagatcatcatcataaacaacgtgactgagaagatcgtcaaccagacggtagaggtgccggttgaaatagagaagatcgtctacgtgaaccagaccgtggaggtccccgttgaggtggagaagatcgtgtatgtcatcccaaacagaacagacactgcgttcgagtacgaaaacatggtgaccactgcagtggcttctgcagatggccggaccggagagtacttcaacgtcaggctcatcgacgctaccggtaagccgctcgcctacaagcctattaaaatcggcttcaatggggtcgtgtacgaccgtacaaccgatgccgacggacgggcgaaactgcaaatcaacctcggttataagggagattacacctttgccataggattcctgggggacgacaattacactggggcattcgaagtggctaagattactgtgaaactgcaaaagccccagttgtctacggccagcaaaacatataaggccagtgctaagacgaagacattgactgccaccttcaagagcgaacacgggaatacagtcagtggcaagaagataagttttacagttaacggcaagacctacagcggaacgaccaattcaaaaggtatcgccagcgtaaatgtgtcgctatccaagaaggggacttatagctttacggttaaatgggcaggtaatgaccaatttgcatctgtgaccaagagtgggaaattgaccattaaatga

SEQ ID NO: 2378 - DNA, 345 bp, synthetic construct
  source 1..345: mol_type = other DNA
atgatcggcaagaaaacactggaaagtgagccgataccagccgctaaagtcaaagaaatactcgaagagtttagcgagaagtacgagctcaactacgagcagaacttgaccttagctcatgtgacgaatctaaataagctttccctcgaagatgccgagaagctgatcgaggagcttgaggccttcatgacccacaagcaagcaatccgcgtggcggacctgctgcccagggacatggcagacctgcggctgattttcgccaaggaaagaaacgcccctagcaaagaggatatggagcagatcctggaaatcattgaaaagtatgaaatttacgtagaggagtga

SEQ ID NO: 2379 - DNA, 291 bp, synthetic construct
  source 1..291: mol_type = other DNA
atgcagagatcccgcggcttcaaaagccgctcacggaaaaagctgaccaagaaggtgaggcccggccgggccaacccgatcacaaggcgaatccagcagtttgaaaacggagacatggtccacattatcatcgacccaagtattcaaaagggccagccccacagcagattccatggaaaaacggctaaggtggtagacaaaaaggggaaggcgtacatactcgcactcaaggatgggaataaagccaaggaactgatagtgacccctgagcacctaaaactgcaggagtga

SEQ ID NO: 2380 - DNA, 1269 bp, synthetic construct
  source 1..1269: mol_type = other DNA
ttgaatcaagaaatactgaataaagccgaggagttaattaaccataccaacgggaacatctgtaatcactgtctgggccgtaaattctcagactgtgtggagggggatgggaacgaggatcgcggtgctaaaattcgccaggcacttaacctcgagccgtacaaagctaacgaagataatcctgcgaacgatgagaaatgcctaatctgcaatgatctgtttgaagacctcaacactgtcctggatttggtgaatgaaaaaatagatctcctgaaggtggaatttgacacctttgtagtgggatgcaagctgcccaaggaaatcgtggaaaaggaccaggagattagtgacgagttcgatttcaatgtggagatcatcaaaaaggaagtcaaccgcgaaatcggcaagctcctggagagcaatctcgagcagaacgtagacttcgacggggaggacgtcctggttatggtggacttcagacggattttaaaggaggacattgaaaatcccatcaaggtccgccttcagataaaccccatcttcattgagggaagatatcggaagctgatccggacgattccgcagaccaaatggccttgccggaaatgcaaaggcaaaggatgcgaggaatgtaacttcacaggcaagcagtacccagagagcgttgaagagctgctctccgaagtggttctaaagcacaccaacggctacgaagccaagttccatggtgccggcagggaggacatagacgtgagaatgcttggaacaggcaggccctttgtgctggagattaaagagcccaagatccgaaagattgacctaaaaaagatagaggaggaggtggcaatctctgccaaaggaaagacagagtacctgaacctcaagtttacagaaagacggcgcaaggccgaaatcaaggagagctcgccagacacctataaggtctaccgggctctggtgaaatgcgaggattatatcaaggaggaggacctggagaagctccaaacgctgcacatcatccagcaaagaactcctatcagggtctcccaccgaagggcggataagatccgacagaaggaagtcaaggagatcaaggcagaatttattgacagcaagaccttcgaaatgatcattaaaaccgaaggtggattgtacatcaaagagctgatctcttcagatgaggggaggtccaatccaagcgtaagtgaggttttgggcactcaggccatatgtgccgagcttgatgtgattgaagtggggattaaatga

SEQ ID NO: 2381 - DNA, 1335 bp, synthetic construct
  source 1..1335: mol_type = other DNA
atgttaggcagtctgggagagaacctgacaaacaccatgaaaaagctagctggaatgagtgttatagacaagaaggtgattaaagaagttgtgaaagacattcaacgggccctgattcagtcggacgtaaacattcagctggtgctgaagctatcaaagacaatcgagaagcgagccctggaagaggagcccccaaagggaataacgcctagggagcatgtgatcacaatcatctatgaagagatggtcaatctcctcggcagcgaagcccaggagcttaagattacagaaaagccatttaaaatccttttcttaggcttgcagggaagtgggaagaccaccaccatcggcaaattgtgccggtacttgcagcgcaaaggtttctcacccgccgtcgtctgtacagacacttggagacccgccgcttacgagcagctcaagcagctgactgaggaaatgcagattcagctgtacggggacccagacaacaaagatgccctggatctggctgaaaaaggtcttaagcactttaaaaatcagaaaatcatcatcttcgatacggcaggtaggcacaagaatgaggaagacctcatcgaagagatgaacaagctggacaagatcattaaccccagcgagtccatgctggtgattgacgcaacgatcgggcagcaagcaggggaacaggctaaggcattctcccaagcaacggacatcgggtccatcatcatctcaaaactggacggcacagccaagggggggggcgccctcagcgctgtggccgagactggtgcgccaatcaaattcattgggaccggcgaaggaatagatgactttgaagcatttgacccggaaagattcattagccgtctcctgggaatgggcgacatcagatcgcttatcgagaaggctgaggaagtgatagatgaggatgaggccaccaagaccatgaacaatatgctcagcggcaagttcactctggtggatatgcgaagccagtttgagatgatgaacagcatgggccctatgcaacaggtcatgaacatgattccggggctgggaggcaagatccccaaagaggccagccagatgaccgaggataagatcaatggatttaagataatcatgtcctctatgactgaagaggagatgctcaatcctaagataatcaagcagtccaggattcaacggatagcgcgcggcgcgggcgtagaggaaagcgatgtgaaagagctattgcggtactataacaataccaaaaaggctatgaaagggattggccgccgcggcatgggtggaggagccatgaacaggattatgggtcagttcatgaaatga

SEQ ID NO: 2382 - DNA, 567 bp, synthetic construct
  source 1..567: mol_type = other DNA
atgcttgagaacctggtagaatcactccggaacgcacccgtggtgaaaaagggggattacgactacttcgtgcatggcataagcgacggaatacctgccctgaacccatgcgtgctaaaagagattagcgaagttctcgccgaaagaatcgacttggataaagtcgacaagattgtgggggtggaggcgatgggtatccacatcgccactgctctctccctcgagacaggcctaccgctgctggtgatccgcaaaagggagtatggcttggagggcgagcacgaaatcctgaagcacaccgggtatgccacgtccaaactctacatcaatgacttaaacgaaggagacaatattgtcctggtggatgatgttgtcagtaccggcggaactctttcggtggtcattaacgagcttaaggcaatcggtgtgaatatcctggatacatttgtggtcgtggaaaagggcgaagggaaaaagatagttgaggacaagaccggagagaacattgtcaccctggtcaagctggatgtagtggacgggaaggttgtagctgacagcctgatctga

SEQ ID NO: 2383 - DNA, 1008 bp, synthetic construct
  source 1..1008: mol_type = other DNA
atgtcaatttacgatatggaactcaagaaggttattcgaaagatcaactccttaaacgtcaagaacgtgggtctgcagttcccggaaggtctcaagatgcaggcggtcgctattgctcgcgagatcgaaaaaaacacggaggccaatgtaattatctctgcggacccctgctttggggcctgtgatgtgagtgaccgcaaaatgaacggaatagtggacttcattgttcattatggccacacccccctcccactcagatatagcatccccacaatgtttatcgaggccaaggccaacgtgaacatcaagcaatacctggaagatgccctggaaatgcttgaggactacagtaaagtggccattgcgaccacagcccagcacctccacttgctggacgagatcgtggactttctcgaggaccacggaaaggaagttgtgataggctcgagcagaagcactaggaaagggcaggtattgggctgcaatttctcttccatcaagaatctgggggcagacgtctacctgttcattggaagcgggaacttccaccccctggggatttatatgttcaccaactctcctgtcctggccattgatccttatagtggcgacatccgtgagatgagcggctacgcagataggattctgcgcatacggtttgctagaatcgtcaaggcccgggaggtgaagaaatggggaatcatcgtatcctcaaaggaaggccaataccggatggccctggctaaagagctgaaaaaactgcttgaagacgagggaatggaggcattcatcctactgatggatcatatcaatccagacgtgcttctgccgtatatggaacttgaaggcttcgtggtgaccgcttgcccacgaatcgcaatcgatgactcccagatgtataagaagcctgtcatcactcccaaagagctcgagatagtgctaaataaaagggagtgggaaaagtaccagttagatgagatattgtttgaggatcggtactaccagtga

SEQ ID NO: 2384 - DNA, 462 bp, synthetic construct
  source 1..462: mol_type = other DNA
atgaacttcgaattttccatcctgggcttgttcctcctccttctcctcttcgtcccaaacataatctggacgaaattcatccctaaagactatgagaattactccaagagggagaacaagatactgctgatcctggagcggattggggaagtggcgaccgtggtattcgcccttttttgcggagccaaattcagctggtccttactgctgatcattatctttattctaatggctttgtacgaggtctactggatcagatactttatgtcgagccacacaatgaaggacatgtgcgatagtctgctcatgattccccttcccggggccaccttgccggttatcgcattctttctatttggaatctattcaaacagcatattcctggtgatctctagtattattctggcaatcggccacatcggcattcattataaccacaagaagcagtgtaatctgaattga

SEQ ID NO: 2385 - DNA, 567 bp, synthetic construct
  source 1..567: mol_type = other DNA
atgaaagtggaatcgggagatttcgtgatgcccggcgacttcctgtccgtgagtgaggaatttctgccaggccctggcgcatatgaggatgacggaagcgttaaaagtggtgtgcctgggaatgtctttgtggataacggggagaaggagatctctgtcatttcaaaatccggcggtccaaaccttctcaaggtgggagacatcgtatatggggaagtgaaggacgtccggggccagcgcgccctgatctccgtatacgccaaaaaggggaccgatcggcagctcgcgctgccatacatggccgctatacacatttcacaagtgacccccggctatatcgacaagctgactgacgctttcaggatcggagacttgattgaggccaaagtcgttaagataatgggcgataatctagacctcaacaccgaagacatcacgagcggggtggtgaaggccatgtgcacaagatgcagggcattcatggagccccgaacagagagcgaagtgtactgtccggtctgcaaccgcaaggagaaaagaaaggttagcaagaattacgattactga

SEQ ID NO: 2386 - DNA, 279 bp, synthetic construct
  source 1..279: mol_type = other DNA
atggagatcgaagtaatcaaggagagcaagctggaactcgaaatgattattcatggagagaaccacagtctgtgcaatgtcttgagaaaatatctgatggaggacgacgatgtggaatacgccgtgtacggcatcgaccaccccctgacaggcgcagggaagccggtgatgaccatcaagaccaaaaggtccaagcgaccacggaacagcctacttaaagctgcgacgcgcctgaaggaggagactgccgagttcaaagagctcatagaagagctctga

SEQ ID NO: 2387 - DNA, 417 bp, synthetic construct
  source 1..417: mol_type = other DNA
atggcgtataagatcccgagtctgactgtggacatattcatctttaacgacgagaaagagtttatactaatcaaacggaaaaacgacccttacaaggacttctgggccctgcccggtgggttcgtggattacggcgagaccaccgagcacgccgccgtccgggaagctaaagaagagacgagcattgatgttgaattgattaagctcttcaatgtgtattcagaccccgacagagacccacgacgccacacagtgtccgtattctacctcgctcatggagacatgaacgatgccaaggcagatgatgatgcaaaggacatcggcatcttcagctttgacgacctggataatctggaccttgccttcgatcacaggatgattctgaaccaggtcaaggagtactttgataaggaatga

SEQ ID NO: 2388 - DNA, 396 bp, synthetic construct
  source 1..396: mol_type = other DNA
atggagttctgcccaaagtgcaatgggatgatgatgaacaccacggtcaaggtgaagaaagaagacctcgaggagaaagtggatgaggagaaccagtcaaaccaagagacagaagaagagaaagtggtctttaagtgcatgacctgtggctacgaaaaggacccctcggaagtggaccaggaccagtacaaagtgaaggagacagtcgaatccagtgacagcgttatcatgcggggcgacgaaagcggaatgcgctctactgtacgagagatatgtccgaaatgcggtcacgatcgcgcgtcctacgagctgctgcagacccggagcgccgatgaggcacctaccaggttcttcacttgcgagaagtgtcatcacaagtggagagggtatgattga

SEQ ID NO: 2389 - DNA, 1620 bp, synthetic construct
  source 1..1620: mol_type = other DNA
atgtcaaactcgcaaaatgacggcctcgaagacgtttccaagggcaacaacgaaagtgccggtgagaatacagactcaactagtaataaaaagactcggtttaccaaatccaagagcatctcagaggtgtttaaggaactggactcccaggagaccaacgattccatcctcgacagcgaggatgcggcctctgagctggaaagcgaagataagtacagcaacatagagaactacctgtccgaggcagaatccgaagaagagatcctggacgccagctccgaggcagagagtctggatgcgagtagcgatgtcgagtttgaggaggatatcattatcgactctaccgccgaagaagagatcgacgaaatcattccaattcacaatgagtataaggatctcgatgagagtgaagctttcaacacagaatccattgatgaggaggaaatcagcgagtcttccgagttggacaattatgtggagagcattgtgaatgagaaggatgacttaagcagcgacgaacttgtcgacagcaaggagaacctggacgctgtcggtggagatgaaggctctatgagcgtaaaggacatcgaaaacgcctcattcgaagccgaagacacctcattagatgctgaggactacgaggatgactcgattgacagtgaggatatcgatcaatcgtacgaggaagagcttctggacgagaatatgaaagtgataaaggtaaataatgcttcttcagaggacgtgctgtcaaagaaaaataaaggcttccttagcagtttcgggagcataaaaatggactcttcctttattatcacagtgctgagtttcatcgtgggactgggaattttgatcatggggatattctatctcaactccagttctgaccgggtggtcgataacgttctcagcggggaaacggcaggtctagcagtcttcctcattatcattgggctgctgattatcgggttcagtatactcaggttcctgtcctctacaaaggccgatcagtcgtcttctatgctggacatgtttaaaagcatcagggacatcgactatgatgacgtcaaagacgataacataagtcgcgacgactttgacagcgtattctcgagcgtgttcggcaaggaaaagcgcagcgacttttccaacgacgatggcgataaaagctcggttgacaaaaaccttttcgacgaggacgacgagatctccgatgaggatattgatgccctgtactccgactcaaatctaaacaaaaccgcctcctctacgaaaaactcaaccggcatccaggacaccgacaatataattgaggaggatctcgatgacgattttgatatgatcgactccgacaactccgaggactttgacaacgacacggatctcgaggacgataatgtgtctgacctgaaggacaaatacagcaagtacaacttcgatgacgatgatgctccctccaagccgcagttcaagaagtcagtggacatttcaaagttcgatgacgatggactgagtgaagaggaattggaagccgagaggagacggaaggcggaagagttggaggaaaagaaacgacgtatcatccagggaactaactttgataatagcctaagaaagtga

SEQ ID NO: 2390 - DNA, 735 bp, synthetic construct
  source 1..735: mol_type = other DNA
atgttcaaggccgagctcagtgattcgagtatccttaaaagcagttttgacgctatttcatccattgtcgatgaggtgcagattcaaaccgacagcgaggggttccgcctggacgccctggaccggtcgcatatcacatttgttcacctcgaactcaaagccagcctgttcgacgaatttgtgtgcgacgagcccgaaaagattaatattgacactgatgagctgatgaaggtattaaagcggtccaagtccgatgaccgcgtcttgatgtcattggatgagggcaacttcatcctgaccttcgaaggcgaagccaccaggacgttcaaaatcagactcatcgacatcgaatatgacagtcctgcaccgccatccttgaactaccctacagagtttgagattcccttctctctgctcaaggattccatccaggatatggatatcttctctgacaagatcactctgatggtggacccagagtacttcaaagcttttgcgcagggtgagtttggagacgcaaacatcgaataccttcacggcgaaaagatagatgcaagcgcgaaatccattttcagcctggagaagatacgtgagatgctaaaggccgataaattctctgacatcgtcaacatcagcctgggagacgacatgcccgtgacactaacccttagacgagtggccaatgatggggagctgagctttctgctcgctccaaggatagagtcagaggaatga

SEQ ID NO: 2391 - DNA, 1614 bp, synthetic construct
  source 1..1614: mol_type = other DNA
atggatggagacttttttcagctcctgcgaagggtgcagaaggaggaacggactaaatccaccctcgcaagagtggacaaagacttctacaagcagctctactcctatattcgagacttggaacgtagcgtggctcagaaccccttcgataccgcccagtcaaatctactgaacaacgcccagcgcatcgctactgagatttgccagtggagagaaagcaagatcagtacggcggcaaacaataatatctatcggagcttccatctgttcaagaaaggcaacccccagtttgatttgattgatacaaccccactgcaccttacacccgaggaggaaacgttatatttcgccctgatggacgccctgaagacccatcgctacaatatttcactggacaagttcggggatgagaaggccgattggggcgcggacgattacgaggacgaagaggaggatgattttgaagaagtcgcttccgtggtgaaaagccgagtgaataaaggggtggtttcggacgaggagttcttcaacgaggggggttcttctaacgagtccgtgacggacggattcagcggagagtctatctccatcgaagagtccggggctgaccccgtagtgcaagagcccgccgtcgaaacccccgtggaggaaagttccggcagtggctttaagcaggaggttcaggagtcggctgtcgaaactactaataccaatgtcgggggatcggacgaggtgctcgacaggctcaatcagattaagaactcaacggtagttacagacgaaaagtacgaacccattgaaaagcagatcaataatcaggctaaggtcgtgccaaatgtctccatgagcaacaacctgaactatgagagtaaaaactacaacggtcaagacaatgagttcgactccaaacttaaaccagattacgaatctgatgtagaaagcgaaccgaaaatcgagagcaaaccaaaggtcgaatctgcaccccggatcgagtctaagccgaaggtcgagagcgcccccaaaatcgagtccgaacctcgcttggagtctaagcctaaggtcggctcagagccccgggtggagtctaaacctaaagtggagcccaagaccatcgaagataggcctaagcggaaaagttcaagtacactcgactttgacagcatctttgccaacccagacagccagttcgatagcatccacaattttgagccggactacgaggcggatcttgccaacatccaagccagttccagtttcgcagagcctagcgaggcagatctgatgttttcaacaaaacctaggccgaaaaaggagcccaagcctaagagccaggttggctccaaggaggagttcgaatcgcgccctaaggtagaggaaccaagccacgctccaactgctaaggcagaaagaccaagatcccaatctataaaggcgtttgccaaaaaggaagagctggagaacaccacagtggtgatatacaaaaacatcgactcattcatgggcattgatgaaaagatttatggacctttcatcgccaatgacgtggttatcctgccaaacataaccgcccaaatactgatagacaacaacaaggccggtctaattgatatttga

SEQ ID NO: 2392 - DNA, 279 bp, synthetic construct
  source 1..279: mol_type = other DNA
atgaagatgcctaaagagaagagaacatactgcccccattgtaagaggcacaccatacatgaagtccacacgtccaagaagcggaaagcaagcgagctgaagtggggccagagacagtttcgtcgagtgaccgccgggtaccgcgggtatccaaggccactacccggaggcaacaagccggtgaagaagctcgacctgcggtacaagtgcaaagaatgcggcaaaagccacatccgcaaaagtttccgggtgggaaaacccgagtgggtatcaaattga

SEQ ID NO: 2393 - DNA, 180 bp, synthetic construct
  source 1..180: mol_type = other DNA
atggcgagcaatggcaggggcaactttctccgcgtgaagtgcctggattgcgacaacgaacagatcattttcgaccgggcagccagcgacgtaaagtgtataatctgcgggaaaaccattgtgaaatccagaggaggtaaggctaagatcatggcccacatcgacgaggtcctggattga

SEQ ID NO: 2394 - DNA, 783 bp, synthetic construct
  source 1..783: mol_type = other DNA
ttggtcagaaagagccaggaatggccaaatgagggagagctgatagtgggaaccgtatacaaggtgcttaactatggggcattcgctaacttggaggaatacgccgggaaggaagcctttatccatatttctgaagtgtcaagtgggtgggtgaaaaacatccgagatcacgtgagagaaaatcagaagattgtagctcgggtgctacgcgtgaaccctaaaaaggggcacgtcgacgcctccctgaaacgcatcagggaagaccagcggaccaaaaagatacagcagtggaagatagagcagaaagccgaaaaattcctggagctcgccgctaaatcgttagataaggacctcgataccgcatacgatgaggtcggctacgagcttatggatatctttggggatatctatggcgcgttcgaaagtgcagcggaagagggagctgagacactgacagaagagggcattagccaagagtgggctgacgcaatcaccgaagtggcggtcaagaacatccagcccccagaggttcacattacaggctacgttgacattgaaagctatgccccccatggcgtggagatcattagggaagccctgctcgcagccgaggacgagaatatcgaggttcaatgcgtgggcgctccgcgttaccggatcactgtgacttccacggactataagctcgcagagggtcagctgaaagaggccgccaataaggccattgacatcgtcatcgagaacggtggcaagggagagttcctgcgcgagatagacaactga

SEQ ID NO: 2395 - DNA, 171 bp, synthetic construct
  source 1..171: mol_type = other DNA
atgaagatgaaaatgaaaaagtgtccggtctgcaatatatacaccctgaagccacagtgccctaactgcggcggggagctgagggtgatctatccccccaagttcagcgtggaggacaagtacggaaagtaccggcgccagctaaaaaaagaaatgctcaacaaggaatga

SEQ ID NO: 2396 - DNA, 789 bp, synthetic construct
  source 1..789: mol_type = other DNA
atgcgaacaacccaatttaaagtcctcgaagaagtgaaactgaacaacccaatatttatcgaagcactgcccggtgtcggccatgtggggaagctggccatagaccacgttattgacgagttggaggccactaaatttgttgagatctattccccatacttcccgcctcaagtgctagtgggagagggcggcatcgtggaagatatgaagaatgaattatactacttgaagagcgcgggcggagacgaaagggatttcatcttcctggtgggaaactgccagggcctgaatcccgaggggcagtacgagctctgtgggtccatactggactttgtagagtcactgggagccaaagagttctacacactgggaggcctagctaccggtcagcccctggaaggggtcgaagaccgcgtgctgggggcggctactgatgaggagcggattgagatgctcaaggaagcagatattgagatcagaagcgccgatggcgggatcgtaggggccagtggtctgttcctcggactcggacgtcttcgggggatgaaaggcgcctgccttatgggcaagacccctggctatttcattgatgccgaagccgctgaagccattttggcaaagctggctatcctggtgaagctcgaggtcagcacggacgagttagaggagcgcgccaatgagattcgggagatgatcaacaaggcgcaagagatggagcaggaaatgatcaacagggctatgggccagcagcaggcacagacccaggacgaccttagatatatcggttga

SEQ ID NO: 2397 - DNA, 1188 bp, synthetic construct
  source 1..1188: mol_type = other DNA
atgctgcagatcgccgtaacaggcaaaccaaatgttggtaaatcttctttttttaatagtgccaccgcatcgcaggtcgaaatggctaactacccattcaccaccatagatgctaacaaggcggtggggcacgtcatcagtgaatgcccctgtaaggagctcggggtcacatgcaatccaaacaactcccaatgcattgatggaacacgcctcatccctattgagctgattgacgtggcaggtctggttcccggggcccatgagggtaaagggctcggcaacaagttcttggatgacttgatgcaggcgaaggtgttcatccacgtaatagatgccagcggaggcaccgacgctgagggaaacccagtggaactcggctcccacgacccactggaggacattgaatttttggagcatgagatagtcatgtggatgtatggcatcgtcagcaaaaactgggttcgactgatccggaaggtggaagccgagcacttagacttcagcaaggtcatattcgagcaactgagcgggacaggcatcttaattgaagatgtgattgaagctctgcgcactgtgagtcctgactatggaaaatgggaggatgaagacctgatagaatttgtgagaaaccttctcaacatcgccaagccctcaatcgtcatcgccaataaggccgatctgcctggcgcaaaggagaacattgaaaggatgaaggaaaaatatccccgcgtcattgcgacctccgccgagtccgagcttgctttggttaatgccacgcgggccgggctcatctcatacatctcaggagacaacagctttgaaatcctagagaaggacaaactaaaccccaatcagatcaaggcactggagtacatccagaccaacatcctggacgtgtacggcagcactggaatccaggaggcactgaacacggcggttttcgagcttctgaatatgatagtggtgtatccggtgggggatgagcataagttcacggaccagaagggcaatgtgctgcccgatgctttcctcgtgccgaaaggctccacccctcgggagtttgcatacatcattcacacagacatcggtgataaattcatgcacgccgtggacgctaggaagaatatgaggattgccagcgactacgagatccaggatcgtgacattattaaaattgtaactagatga

SEQ ID NO: 2398 - DNA, 1119 bp, synthetic construct
  source 1..1119: mol_type = other DNA
atgatgcacccacggcctagtccaatcgccgcttcattatacactctgcgcgacttaaacgccgatgtgatcattatgcacggtcctcacggctgctgctttagaacaggcaggctcctggagagcgatggggtacgcgttgtcaccacggcgatggccgagaatgacttcatactgggggctgccgacaagctagaggaaacgttgcaggaggcttatgacaccttcaatccgaagttgatagggatcgtgggaacttgtgccagcatgatcatcggcgaagacctgaaggagccgattgaaaacctgaacctcgatgcggtggtcatacccgtagagagtcacggaggctttggagagggcgacaacaccgagggtgctatcgccgtgctcaacgctgccgtcgaatgtggcgtcattccccaggaggaagcggacaggcaaaatgagatgctgcggctggcaaccgtggttgagaaaacacgaggcatggctcagggaaagtacattaagcctaacttcggagacaataaggaaaaggtcgccaagattgttgtaaaagccgtgaaagaagggaaaaatgtggcatttgtcctgaatgcgaaaaaagaaacgtcctacctgtttgcagacatcctcaactgcgatttctctaaactgttccaagatactgattccaatatcaagtccaacaaagatattgaaaacttgcatttcatcgccaacctggacgagaacatcggcctgccaagaatacgccagcacgccgtgaacattaccaaggagctgaatgaaaccgggatcgacatcgagtgcatcacagggggcctcgatgagtacccaatcactccccggaaggctgaagagtaccttaacgagctaaaccccgatctcgtgatcgtggcaggagtgccccatgccttgtatgtcgaggagcttgactgtgagaccatcgcagtgacagatggtcctaggcttgtgcagcccctcaatgaactcggctatagccacgtcattgcagaacttgacgcccattcgaagacactgggtgtggacgagattgttgattcagacttcgggatgatgatacgtagcgccattgagtgggagctggaatga

SEQ ID NO: 2399 - DNA, 594 bp, synthetic construct
  source 1..594: mol_type = other DNA
atgatcacaattattgattacaaaagcggaaaccttcgcagcatctccaatagtttcaaaaagataggttcaaaagcagtcatcacgagcaaccccgaggacatcgcaaatgccaatcacctggtgctgccaggggtgggtgcctttggaacagcgatggaaaacatagagccctacaaggacttgatttatgagcatatcgacgatggcaagccatttctaggcatctgcctggggctgcaggtgctcctctcctcaagcgacgagacccctggagtcaaaggccttgatatatttaaggggcacgtcgagaagattcccgaaggccggaagattccgcacatggggtggaaccagctcaagcaagtcaagccatgccctatcctggatggggtggatggcaaggacttctacttcgtgcattcctattatgccgttctggacgatgaaagcaatctctctggaatctgtgactacggagtggacttgactgctagcgtttcgagggacaacgtgttcgctacccagttccaccctgaaaaaagtggcgtacccggcctgaaaatcctgaagaactttgtaaacttagagtga

SEQ ID NO: 2400 - DNA, 621 bp, synthetic construct
  source 1..621: mol_type = other DNA
atgggcaaattcaaattcatttttattctagtgcttgctcttttcctgatatgcgggatcgccgcagttgtcgatgcgcctgactcctttgatggctctctgaacctgatacccgtgtctgattccagtgtgagtcagtccgactcatcagtaaatcagtccgactgtgaaaacgggacttgttcagtggacttaaacaaatcggaggacaatagctcgaaagaaaccagcgacgatgaaatcgattatgacagcaagtattatgacgatagcctcattgacggtctctacttctgcaacgacctcgagcatgcattcaaggacgctaagcagcaccacaagaatgtgatgatcatttttgacggtgccgcctgcatctactgcgaatacctgaaggatgaggggttgacagactccgacatccagaaggaaatcaacgagaatgatatcttgctcatgacgtacaccagcgatagccccgagctgtctcaaaagctggagatttacggaaccccaacaaccgtcatatttgatgaaaacggaactgagctgggacggatcgagggctatgagagcccggagcagttcctgagtgaactgaaggagtacaacggcaaatga

SEQ ID NO: 2401 - DNA, 618 bp, synthetic construct
  source 1..618: mol_type = other DNA
atggagataatgccgattatctcattttttatcggggtaatttccatactcagcccatgcattctgcctaccctcccaataattgcaggattcagcctaaaagccgaaagcaaagccgaaatcgtggccttcatcctggggctttttagcatcttcaccatcatcatcttcctgacaggcttctttaccacgattctgttccggtatatcgtgtatgtcagggtcatcgccgcctttctgttgctcattatgggcatattgatgttttttgactacaacctatcttttggctcggtgaagtcccgcagtggtgagggaatagtcaactcattcattcttggattcctgacatccgtggcgtgggcagattgttatagcggttacctcatttccctgatcactatgcttgtctcaagcagtcccctgtacgcagttttcaatatcttcatctacgtgttcggctttgcgctcaccttgctggttctgtgcctggccattagcaaaatcgacctcgagaagctgatctacaagtccggctacatccccaagatattcgctgtgttaatcattattggggctttctatatgttttacactagtatccaggtgttcttatga

SEQ ID NO: 2402 - DNA, 693 bp, synthetic construct
  source 1..693: mol_type = other DNA
atgatttacagcaaagagattgaaaacatgtgtcccgttcataagggggcagaccacgggcctgccccaatccccgaggaggggagatgggtgaaaagtaaggagatcagcgacatttccggactaacccacggtatcggatggtgtgcgccccagcagggatgctgcaaattgactctgaacgtgaaggatggaataatcgaagaggcattggtcgaaactcttgggtgctcgggcatgacccatagtgctgccatggccggagagatcctggtcgggaagacaatcctggaggctctcaatacagatctggtgtgcgacgccataaacacggcaatgcgggagctcttcctccagattgtatacggccgaacccagtccgccttcagcgaaggaggcctgccgattggagctggcctcgaggacctgggcaagggtcaccgctcccaggtgggcaccatctattcaaccaaagtgaaaggcccacggtatttagagctgacagaaggttatatcacggaaatcggtcttgatgaagatgatgaaatcatcggctacaagtacattaatatgggggtcatgctggacctgataaaggacggcactgatccaatggaggcgatcgaaaaggccagcgggcaatacggcaggtttgaggacgccgtgaagaaaattgaccctaggaaggagtga

SEQ ID NO: 2403 - DNA, 999 bp, synthetic construct
  source 1..999: mol_type = other DNA
atgagtttatttgagagttatgagagacgcatagatcagattgtgcccgtgctggagaaatacggcatcaaggacctggaggaggcaaaagccatctgcaatgaaaaaggattcaatccctatgacattgtaaaaagcgtacagccaatttgcttcgaaaacgcgtgttgggcttacacgctcggcgcagctatcgccatcaagaaggactgtaaaaaggcctcggatgcggctactgcaataggagaagctctgcaggcattctgcatcccaggaagcgtggctgatgaccgcaaagtcgggctcggccatggaaacctagcttcaatgctgcttagtgatgagaccgagtgttttgccttcctcgcaggtcacgagagctttgccgccgccgaaggtgccattggaattgcaaacagcgccaacaaggtgaggaaggagccacttcgggtcatcctgaacggtctcggcaaagacgctgcactgatcatctcaagaatcaatggcttcacctacgtgcaaacagagtttgactactttactggagaggttaaggttgtgagggaaaaggcctacagcgacggcgagcgtgcaaaggtgcgctgctacggcgccgatgatgtcagggagggggtcgccatcatgcacctcgaaggggtagacgtgtcaattaccgggaactccacaaaccctacacgattccagcatccggtcgcgggcacctataagaaggaatgcgtcttgcagggcaagaagtacttctccgttgcctccggcgggggaaccggacggaccttgcaccctgacaatatggcggcaggccccgcttcctatgggatgacggacactctgggccggatgcactctgatgctcaattcgcggggtccagctctgtgcctgcccacgtggaaatgatggggctgataggtatggggaataaccccatggttggtgccacagtggctgtcgccgtggccgtggaagaggccctgaaatga

SEQ ID NO: 2404 - DNA, 1407 bp, synthetic construct
  source 1..1407: mol_type = other DNA
atgtatacatttctgatttgcctctttgcgttaatcttaagctattttgtatacggcaagttcctggagcggatcatcggagtggacgaaaccgccaaaacgcccgcttatgagcttgaggatggggtcgactatgtccccatgaacaaatacagggcacttttggtgcattttctgaatattgccggtctcggcccgattttcggagctattcaaggcgcattattcggccccagcgcattcctgtggatcgttctgggcactatctttgcgggtggcgtccacgacttcttcgaaggggccatgtcggtgcgaaatgacgggctatccatgccgggaatcataagcaaatacctgggagacagggtgcgcaagttctttgccgtcctgatcatcatcacatgcatcctcgtggcatcggtgtttgccagcggcagcgcagatctcctttcaagtctaaccaacatagacattcacatttggctcgttgcaatattcatatacttcctcatcgccacactgttccccgtggacaagatcataggcaagatctacccaattttcggagctttgttttttatcatggctgttttgctgatttctgccttgatcctgaacccaaattactcactgcccgaatttaccaccgccgggctctacctcactgacaaagccattttcccattcctatttgtcaccatcgcttgcggtgccatctccggattccacgcctcccaggcgccaattgtagcaagatgcgtgaaaaacgagaaggatatgcacatggtattctacggcgcaatggttatcgagggcatacttgccctgatttgggccactatcgccatgagctttttccacggacagcctcagctggccagtatttacggctcaagcccttccatcgctgtgaaagagatgtcaatcgctctgattgggacggtcggattggttttggccatcattggggtggtaatttgtccaatcaccagtggggacacttccctgcgtagtgccagaataacaatcgcagatgagctggggctcaaccaggataagctaaagactcgcctgaagatctccattcctctgttccttgtgtcttttggcctcaccttcatcgatttttccctcgtctggcggtacttcgcgtggagtcaactgattgtcgcgattgctgtgctgctggccgccaccgtgtatctgatcgataataagaagcatttcattgtgacatttgcccccgccatcttctgtacggtggtggctatcgcttatattctccaggcttctgaaggtcttcggctggaccctttcataagcaacgtgatcagcgtcatagttgcacttgcgctgagcgtgtattttatcctgaagtacaggaaacagcctaacaccaccacatga

SEQ ID NO: 2405 - DNA, 246 bp, synthetic construct
  source 1..246: mol_type = other DNA
atggggatattttcattctttaagaaggacaaagacaaggagaaagtcgagagtcatgaagaggtgcactccattcagatcaatgccgaaaactgccagggctgcggacggtgcgtgtccgtgtgtcccaacaacgcatacgagctgatcgaaggcaagtctagcctcaaagagaatttcacatgcagggattgtaaggtatgtctggctgcctgcagcaatgacgcgatcaccttcgtcaactga

SEQ ID NO: 2406 - DNA, 783 bp, synthetic construct
  source 1..783: mol_type = other DNA
atgaaaatttttattaacgcagacacctacaaggagattgcccaaatcaccaaggaaaaactgattgagacagctaatgagctggggatcgagatatccgaggacatcaacgaagccgacatcatctgttccattggaggcgacggtacgttcctagaatcttcaaagctcgctctgcagaagccaatcattgggatcaactgcgggaccctcggctacttgactgacgtgaatcccgaagggattaaaaaagccatgaaagacataatcgatgggaactattatatcgaggagcgcatgatgctcgaagcagagattatcaaggaaagcggcgagatcattaagatgcctccggccctgaatgaaatgtcgatctctaagaatatcttcggcgtggttagattcgacgccatcgtagatggcaaacttatcaactcatacactgcggacggaattttgatctgcaccccaacaggttcaactgcatacaacctttcctgcggcggccctattgtcgatcccacggcggagattatcacaatcacccccatcgccccacatacaataataaacaggagcatcgtcttatccgataagagcattgtggaaataaagatcacagagctgcgggagcacactagcagttatgccctgtccgacggaaagagcagtgaaatagagacgggagatatcctcaaaatcaagaaaagtgatgctaagaccaagattatcaaactgaattggcagagctttattgataccgtgcgagacaagataaactga

SEQ ID NO: 2407 - DNA, 1371 bp, synthetic construct
  source 1..1371: mol_type = other DNA
atggatatagaggggtttgtcaggggacgcctcaccaaaggcgaggatgaggaggagcttaaatctatccttgcggagcggataagagagtttaaagacatctcagaagaacactccctcctgatggccgaaagcgtgattgatgaggtgaagaccacgctggagctaaacaatactgaggatgagttcctcaaggacatcatcaccgttcccaaggcaaacgtgggcatggggaagatgggggtggggtcccggggggctggggacttcttcgtacatcgaaagattgctcagatcgtgaaaagtaccaacacacaaagcgttgtcgaccccaacgcgcaggacgatggcggggtggtcaaggtcccagccccaggggacgatgtctatataaccactgcagtggacggcatccactcccgattaagcgaatatcccttcttaggagggttccacgtcacaagagccaccctgagggatgtttgcgtgatgggagcagatcccgtcgctatcctaagcgacctgcacctcgccgatgatggtgacattggaaagctctttgactacacggccggtatctgcgcagtgtcagagcttattgacgtgcccttggtagccggcagcacactgcgtgtcggtggagacatggtgctgggcgatcggcttgtgtcctgtgtgggaagtgtgggcgtctcacagcaccctccaaccgccagaaaaggcgctaccgtcggagacatcattctcatgacggagggtgccggagggggcacaatcactacaactgccctgtacaatggctactttgatgttgtatgggatacaatgaacatcagctttgtgaaggcttcgaaggcattgttcgatgccgacctggtgaaggacgtccatgcaatgacggacgtgaccaacggaggcctgaggggcgacgcgcatgaaatctgcgaaaccacgggtgtggggctcgagttctatcacgacaagataaagaccacagtcgccccgaatgtattgaatatgctggaagacctggacatcgatcctctgggcgtttcgacagattctctgatgctggtggttcctccagagattgctgacgacgtggtgaaaactgtgagcgatgtgggcgtgtacattacagagatcggtaaggtggatgatgaaggcagtcctcgcctaattaaagaagatggctccgtagacactctggtgccgctcttccgggaagccgcgtacaccaagatcaaaaagctggttggagacaccactcccgaagactttgaaatcatgaaggagaaagttcagaaggctgccgacgactctataaggaaaaaagagcgcgtcattgactacattttgaataacaactga

SEQ ID NO: 2408 - DNA, 414 bp, synthetic construct
  source 1..414: mol_type = other DNA
atggccctggagggcgcagagagaatagatgagtttataagcgaggccaaggtgtttttcctggcaacggttgacggagacaaaccaaaaaacaggcccctcggtttccatctgcttaaggatggcaaaatctactttggagtgggcaactttaaggacgtatacaaacagatggaggcaaacccgtatgtggagattgtggccctcgtcgaaactgatttcctacgctactatggaaaggcggtcttcgaagagacatacgacatggctgatgccatcgtggctggcaacgaatttctgcaggggatttataatgacgaaaccgggttcaagctggccattttccacttggaagaggccacagcggagatccgggacatcaccgggaagatcaatgaaagctacaatttctga

SEQ ID NO: 2409 - DNA, 396 bp, synthetic construct
  source 1..396: mol_type = other DNA
atgagcctgtttaaaaacttcatcgggaactttaagaaatccgacgttctggatctcgccaagggcttcaagctggaatacgaggccaataacttagagaatatgaaatcgatcgtagacaagttcgtggacttccaccccgattcctactttgcgagttgctctatggtgatctatataattcagctgtataagaaagacccgctcaaggtgagcccaaatatgcttaacaatctcagcatcatggagcgcaacattaaattctacgataattcaagcaccgactcactggataacgaagagttggagctacggcagtggtttaagaaggaagtctacgagaacgtcaagtatatggaatccgcaggactgaggttcagtgctgacgacaaatga

SEQ ID NO: 2410 - DNA, 159 bp, synthetic construct
  source 1..159: mol_type = other DNA
atgcagctgaacaagatctgtctagccgctatcgtgctgtttgtcctcttcaccatcctcaaattcgtgatgaagtggagcttcaaattgtttgccattggaattgtaatttgcatcatccttgcaatatttggcttcttcaagggggatgacctgtga

SEQ ID NO: 2411 - DNA, 639 bp, synthetic construct
  source 1..639: mol_type = other DNA
atgagcagcaatagcgacaaagatatcctcaaagaactgcgtgacatcaccaaggacaaggaaagctggaaatcaaatatcaatcacgtcgcggtgaaactcaatgatgacttttccctgagcgtgaaggccaaggtcctctggcttctgggagagatgggcctgaaacaccccctggagatagaggagtatgtcgatgacattgccgtttacctggaggacgatcaccccaagctgcgggaaaggtccgccaacgcaattgggagaatcggcagggctgacaagaaccttgtgatcaactatatggataagctgatgaagctgagcgacgatgaatcggaatccgtgaggcacgccttcatctgggcttgtgagaacatcgccgtcaacgctccagagctattctgcgagaaattggatatattttacgagatgatttcagaccctggcgaaaaggttcgcatagaagcccccgagatcttccgggtggtaggaaagagaaacccaagttgcgtaaagccttacttggacaaactcgagcatatcgcagaaaatgacgagaacccggtggtgcgcattcatagtgctggggcagtgcgaattacacggaaggccttaaaagagagcgataacgcgtga

SEQ ID NO: 2412 - DNA, 693 bp, synthetic construct
  source 1..693: mol_type = other DNA
atgggcttcttttcaaatatgcgcaaacccgagggcaagctgggcaacattcagctgaaatccatgaacaaggaacatacgccagtgagcttatggggtctgaagcacctagacattagcccggaggacacaattctggatattgggtgcggcgggggaatgaacatcaatcgcatggcccagaccgcaaagaaggtgtatggggttgattacagcatcgagagtgtcaacctgtccaaggaggtgaatgccgactttattcggagcggaaaggtcgaagtatatgaggggaatgtgagtaacctcccttttgaagacaatagcttcgatatcgtcactgcttttgagacagtttacttttggccagatatcgaaaaatcattcggcgaggtgaaacgagtgcttaagcccgacggaatgttcttgataggctgtgagtcgaacggggccaacaaccttgcaatgaagttcttcgatcgggtaatcgacatggaactctacgaagacaatgagctctacggcttcctgaaaaacaacgactacggtgatatcaccatctatctgagggatggaaaaaacaaacaagagatcatcaaaaaggacgacaagaccttcgtcatcgatgacgattacgacaatttttctatttccgacagatgggtgcagtggatgaccataactgcgataaagtga

SEQ ID NO: 2413 - DNA, 462 bp, synthetic construct
  source 1..462: mol_type = other DNA
atgctcagtctcatcaaagacaacaaaggcttcctgtctctgattgatgctatcctgagcatttttcttatctttatagtgctcatcagttttaacatgatcgtagatatggagatgcccagcctttccgaagacaacaatcagttcaagaccagtcaggatctgatggagctgatgtcaagcaagatcgacgggcgcgactactccacattggaacggatcagctacgttttatcctccaacgacaattcgatagcctccagaagggaagtgaagaatattctagatgacttctttagcgcacacctgggtagcgactacaaatacgtcttcatcgagaccaaccaactgaacggctacgtcttgtcatctgacggggattactcaacggcggatgaggtgtctctcgccattcgaaactatggaaattattcgtataagctgtatattttcaaggcctga

SEQ ID NO: 2414 - DNA, 1359 bp, synthetic construct
  source 1..1359: mol_type = other DNA
atgctgaatgccaacacctatgttacagaggaggagggtatcggcggcaccataagaaacaggtgggaagacttctacgtggaggagattccggaggtcatccccgatggagaagggcccaacatctacatttggattgaaaaactggggaggaccacccttgacgtgctgctcgacattgcccgggacctccacatagacaggaaacgcatgggctttgccggaatgaaagataaaaaggccatcacccgccaatggatctgcatagcgaatatggatagtgaggaacagtttgcacaggtggaggctctcgctggcacaattcacaatactgagtttctcaaagtgatccgcgggcgaaaaaagctgcggatggggcagctgaagggaaataagttcagaattttagttaaggacattgatggcatggagagcgacaacgaagaaactcggaaactcgccatcgaggacgctgccaagagagcagatgccatccttaaaaccttggagaagacgggcgttcctaactacttcggctggcaaagattcggaaagccacggacaaacacccacctggtgggtgaggcccttatccacaatgatctgaaggaggcggtccggcgttatatcggaaaccccagcgaagaagagagtgaggactcacggaaagcccgacaggccttcgacgatggcaactgggaagagtccctggagttgatgcaccctggaatgcgctacgagaagatgatgctcaaggtgctgttaaaagaaaagcgccgcgcaatcaggaagatcgccgaggaggaggggatcgaaattgaggaagtagacgagtccaaagtggaactgtcagacaaggcctacaaaaacgcgatccatgcactcccaaagccactacaacgaatgttcgtccatgcttatcagtcgttcctattcaatgccgcagtaagcgagcgtgtcgcaatggggatggataaatatatcgaaggagatatcgtcattgataaggaagagagaattgtgcgcgacaagaccccggaggagtttcaggaaatggtgtcttcctttgaaataaatcagacgtgcccactgtatggtacaaaggtcccctttgctgggggagaagtgggcaagatggaggaggaaatccttaacagctacggcttgacgagggacgactttgaagtacctaaaatgccccgactgggcagccatgggctgagaaggtctatgcggttccaggtctgggacgccagcgctacagcgactgaggatggtgttatgtgtgagttctccatagataagggcagttacgctactgctgtgctgagggaagtgatgaagaaggacgtgtactga

SEQ ID NO: 2415 - DNA, 1206 bp, synthetic construct
  source 1..1206: mol_type = other DNA
atggaggaacgcacaggtcttttctcgaatggggttatctggttcggcgttgcaatctctgtctcagagatcgaggccggaatacagctggcctccatgaacacccttgactccatctggctccccctggtcctcggccacatcattggaggcatactgctattttctacaggactcattggtgcccggctgcgcttgaatgccatggagaccatcaaatcaacctttggcaactacggctccaaattcttctccacactgaacgtgctgcagctgatcgcgtgggttgctgtgctgaatgcccagggggcgtcggcattgatgggcttgaacctgcccatatccttcccgttaacctgcattatcctgtctgcaatcattgccgtgtgggtgtacgtcgggcttcggaggagttctaagattactaccatcatgatgattgtgctgacagcactgctggttattctatcggtgaagctcctcggggtccatatatccaatgcgttgcccattcagaacattaacagcacggccttaagcttttggagcatctttgaaatttccatcgccatgccaatcagttggctgcccgtgatttcagactataccaaggatgtggagaacccagtcaacggcacattggtcagcgccatcgcctacaccatcgcaagcctgtggatgtacttcctaggcatcgagatagtgggcatcgggacaacgagcattgcacagagcatcctccttgctggtctgggagcgcaaggcgtgatcattctcgtgctcagcactgtcacctccaacttcgtagctgctaattccgccggggaaagtgccaaggccatcttcaaccgaatcaatccaaagattgccggtgtggttgtgagtgcaataagtgctatcctcgctatctctggaatcatggatcactacattggattcttatatctcattgccagcgtatttgctcctatggctgccgtgctcctggtaagcttctatctgtcaaaggaagagactggcaatgctagaatctggtactggaacatctttgcctggcttgcaggatttattgtatatcaagctacggtgaacctggacagtatattcctagggcctactctgcttgcagtgattgtctcagccatactggcgtacatcccgatcttgctgaaaaacaagagcaaactgcctaatatcagcaaatga

SEQ ID NO: 2416 - DNA, 843 bp, synthetic construct
  source 1..843: mol_type = other DNA
atgaatgaaaccatcaagacccttacaattcaagacatctcctgttatgggcagtgctccatcacagtggccctgcccgtgatttctgctttcggaattgagacagccatcctcccgtctgctgtactctcaacacacacgagtggatttacggattttacagtgcgggatttgaccgaggatctgccagagatccgcaagcactgggagaaagagggcatctttttcgattccatttacaccggcttcattgcgagcgcggaacagctggattacatcaaggacatcatagactcaagacttaaagaaaacggcctggtctttgttgaccctgccatggcagaccatggggaattttataacgggttcgaccaggaatttgcagacaaaatgggcgagctgtgcaaactgggtgatttcatcctccctaacacaactgaagcctgctttatcctccacaagccctggaaggagagcttcaccaaagaagaaatgctagagatggctaaggagctgaaagcgttcacgaagaggtacgtcatactaaaggggtacgaggaggaagacaagatgggcatgatcgtgttagacaaaatcgaagacaccatcgacatagtttacaatgaaaagatcaactatgtgtcccacgggaccggcgatgtcttcgctagtagcttcgtgggaagcaccatgctgggtaagtcgcccagtgcagccgccaagatagccggagagttcactaagaaggcaattgagaagaccattggcgatgagactcatacttacggagtgaaattcgagcaggccattccagagttgtatgacctgctcaaaagcatttga

SEQ ID NO: 2417 - DNA, 675 bp, synthetic construct
  source 1..675: mol_type = other DNA
atggactggtcccccatcttcatctcgatgaaaaccgccagcctaagtatctttattacctttttcctgggtctgatcgtcgcttggcttctcgttaagatcaagaatgacactacaaaaattgtcctggatggcatcttcacacttccaattgtgctgccaccaacagtcgtcgggttcttcctgctgtatatttttgggatcaggggcccgataggcagcttcttcctcgacttctttgcggtaaagatcgcattcagctggcctgcaacggtgattgctgccgtggttatgtcttttcctctgatgtaccggagcgctaggggtgcattcaagcaagtagattccaatttactggatgccggccgaaccctcggaatgtctgagtggaagatcttctggaaaatcctctttgcaaatgccttgcccggaatcataagtggcgggatcttggcctacgcccggggcctgggagagtttggcgctaccgcaatgctagccggaaacattgccggacagactagaaccctccccatggcggtgtactcagaagtggctgctgggaacatggggacggccttcgactacgtgattttcattgtggccatatcattcatagcgatttttatcatggactatttttccatccgcaaggaaaaccagtggaaaaactga

SEQ ID NO: 2418 - DNA, 825 bp, synthetic construct
  source 1..825: mol_type = other DNA
atggattctaagaagatactgatgatagccgtagtggctctgatagccatcgtggcggtctcctcatgctctgcaggcttcctggactttctgggcggagacaacgctaccgacgacagtctgaatggcaaggaagtgaatctcgcggccgcagcaagcctaaaaaatgtatatgatgatgagttgatccccatgttcgaggcaaagtatcccggagtcaaagtgacaccaacatacgccagcagtggcgacttacagacgcagatcgagaacggtctggagacagacgtcttcatgagcgcgtccaacaaacagatgaacgctctcgctgatgaggggctgatcgacaatgacaccaacctgcagttcctagaaaataaagttgttctcatcgtgcctaaggatagcgacctcaacatcacatcattcgatgacctgaaagatgtgaaggggaccattgctattggggacccagaatctgtgccggcaggccagtacgccaaagaagcccttaccaacctcgggatttgggacgcggtggagtccaagttctcgctgggaacggatgttactgccgtcttgaaccaggtggctcagggcagcgccgaatgtggtattgtatatgccactgacgctaaatccaatgatgacgtcaaggtggtttgcgaggcccccgagaacagcttgaacactagtgtgatctaccctgtcgccatgattaaggacgctaaggatgccgatgcagcaaaggccttccttgaatttcttcaaacccaagaagccaaggacaaatttgtggagtacggatttaccatccacgagtga

SEQ ID NO: 2419 - DNA, 390 bp, synthetic construct
  source 1..390: mol_type = other DNA
atgatcgagtgtcggaatatcagtaagggcaaggcagagggggagctcatagtatcagacgaagccatcagctttctgggaggcgtcgaccctgaaacgggggtggtgatcgatcccaaccacgagctaaagggccagtccatcaaagataaaatcctgttcatcccaggtggaaaaggctccaccgtgggttcgtacgttatattccagatgatgaagaacaacaccgctccaaaagcgattatttgcctcaaggccgagcccattattgcaacaggagccataatgtccgacattccgatggtggactctcccagcagcgtggaagagctggtgaatggccaaatggtcgaagtcgacagtgataacgggaagatcgagatcctttga

SEQ ID NO: 2420 - DNA, 1239 bp, synthetic construct
  source 1..1239: mol_type = other DNA
atgccgtcgttatacattaaaaacgtaaatattataaacccattcagtgaagagcctctagacgaacgccacgtcctcatcaaggacggcaggatcgaatccctccatgcagaggagagtgccctgtatgccaaccacatagtcttggatggggaggacaattacctccttcccggctttatcgactcccacgctcatgtcatggcaaacgggttccataaagaggatacaatgaaaaatcccctggccttgcacttctacaacgctatagagaatatgaaagcgaccattgatgccggggtgacaacggtgcgggacactggcctggccgacatcggagtgaagatggcccaggagaggaagatattccccgccccacgattaaacatttccattaagcccctggcgatcactggcggtcattttgacttctatctcaactcaggctttgatatggaactggcatatcccggctttccaatcggtacctgcgacggggtggaggatgtcttgaagaaaacccgggaggtgatcagggctcgtgcggactttattaaaatcatggcaagcggcggcatcctttctccaaacacgagccctgagtttgcacagttcaacaaaaaggaactgaagacaatcgtcagtgaggccgagaactacaacctcaaggtagcggcccattgccacagcctggagggcatacaacggtgcgtaaaagccggaatcaagtccatcgaacacgggactttcattgaccgcaagacatcagagctactggctaaaaagagaatctacctgacgccaaccctgatcgttcaccagacccttattaaggaaggcttccctgtgtgggacaattttgcagacgataaggttaaaaagctgaaggaagtcgtgaagatccagaaggaaaacatcgagacagcttaccagtgtggggttaagttcctgatgggctctgactgtggtgtgatcgaccacggaagaaacctgggagagttgaagcagctggttgatattggactcagcccgctggaggctatccaggccggaaccatcgaaggtgctaaattcttcaaccaagagaatgacctgggaagcattgaaaccggcaagattggggatgtgattctagtgaaagagaatcccattgaaaatatcgggtctctcgtggataatgataatattctcgccgtgatccaggatggaaaaatacttaaggacaaacctatctattga

SEQ ID NO: 2421 - DNA, 249 bp, synthetic construct
  source 1..249: mol_type = other DNA
atgaatgaagccgatttcattcaggagatcatgaagcaggcgaacctgagtgaggaccaaggaggccaggtcaacgatattttccagagcaccttcctcgcaggaaataagaacaaggacacaattgtgaacctaatcgccgagaaacttggcgtggacgcagcccaagctgaacagatctacgacatcgccatagggctgctcgctagcggggtactgtccaagatcaaaggcttgtttaagaaatga

SEQ ID NO: 2422 - DNA, 207 bp, synthetic construct
  source 1..207: mol_type = other DNA
atggcagagaaggaactgaatgtggtcgggatgcactgcccaagctgtgtcatggcggtggagctctccatgaaggatctaaacggcgtggacgacgccaaagccagtctggacacgaacagcgtaacagtggaatacgatcccgacaagatcaccgatgcagacctggtgggcgctgttaaagaggccggattcgatgtcgagtga

SEQ ID NO: 2423 - DNA, 2481 bp, synthetic construct
  source 1..2481: mol_type = other DNA
atggctcagaaagagttggatattcctgtagatggcatgcactgctcctcttgctcccttctagttgaaaaatcgctcgggaaactggacgaagtggagtccatcaacgtggacctaaacaccaacaaagcccacatggtgctgaaggacaatctcagccccgaaactatcgataagacagtggaatctgtgggctttaccgttccaaaagaggaagtggtcatccagatcgctggaatgcactgcgcctcgtgcgtgaacaacgttgaaaagttcttgcctcgggtagatggtgtggtggaggcaaacgccaatctgtccaatcagaaggtgaccatcacgtactatcgagacatgctcaatctaaaggagattcaaaaaacaatcgaaatgcttggattcgagtacatcggcctggacggcgagctggacatcatggatgaagaggagcgctatcagaaggacctgcggggcaaactctatcgcatcattgtcggtctggtctttgccggtatactgatggcaattatgcacttccatattacgattccccccctgactatgggacaactctctttaatcatagctattttcccattctgttacgtaagcatgcctatcttaaaggctggctggaactccttcaagcataagaacctagacatggatgttatgtactcaatggggatactcgtggcctttgtgtcaagcgtgctggggacgttcaatatcatcctcgactcaagtttcatgttctacgagtctgccgtgatgttgccgagcttcctcactataggacgttatcttgaggcccgagccaaaaggaaaaccagctcatcaatcaaggagttgattggccttcagcccaaaacagcaaccttgattacgagtgatgaggagggcaacagcatcgagaaggaaatagatatcgaggatatcaatattggagacatcctgctcgtgaagcccggtgaaaagatccccgcagacagcattgtagttgacggtgagagctacgttgacgaggctatgattactggcgagccggtgcctaaactgaaaaaggagggaatcgacgtgttctcagggaccataaaccaagatggggccttaaagatcgaggctcagaagattgggtctgaaactgtcctgagtcagatcatccagctggtggaaaaggcccaggggagtaagcctcctgtgcagaggctggccaataagattgtcagctggtttatacctgttatcctgacgatcgcgatagtcgtcttctgtctctggtactttgtcgccggagcaggcctgctgttcagcctcacatgcctgatcagcgttcttgtcgtggcctgtccatgctccttgggccttgctaccccgaccgccgttaccgtgggggtcggtcgcgctgcagagtatggtatcctcatcaagaatggagaaaccctggagagctcgaaggatgtggatgtctgtgtgttcgacaaaactggcaccatcacagagggcaaaccggaggtcgccgacattgaaacatttgatatggctggggacaagttccttcaggtcctcagcagcgtggagaataatagcaaccacccaattgccaaatccattctgaacagatttaagagtgataacctgaaattaacagaggaaggcaaggacgacttggctctgctggaggtcagtgactttgagaacataactggtaaaggccttaaggcgaatgtggtagtggatgaaaataattcttcggtgctcgccggaaacttgaaactcatggaaagtgagggggtggaggtcacggacgaggtcctggataagttcaatacctttgtgtccgaagcgaaaacaaccattgtgatggcaattgatggcgagatcaagggcatcatcaccttaatggataagataaaggacaactccaagagcgcgattgatgagctccataagatgggcatcgagacctatatgcttacaggagacaacgagaagacagcctccactgtcgccaatgaagtcggcatcgataatgtgatagccaacgttctgccaaacgacaagctggacaaggtgcaagagcttcagaaagaaggaaaaagagtcctgtttgtgggggatggaatcaatgacgcccccgcgctgtcccaggctgacgtaggggtggccatgggaaacggtaccgacattgccatggaaagcggggacattgttattatggaaggcgacctggaaaacgttgtagcttccatccagttctccaaaaaggtcatgacaagaatcaaggaaaacctgttctgggcgtttgcatacaacatgctcctggtgccagcagctgccgggttgctcttcctactatttggaattgtatttaagcccgagtgggcgggcctggcaatggcactgagttcagtgactgtgatcagcctgagtctgctgttgaaacggtacgtgcccccaatcaaaaggaacaaggtgtga

SEQ ID NO: 2424 - DNA, 1479 bp, synthetic construct
  source 1..1479: mol_type = other DNA
atgcgaatcaagtacctatcaaagcaggatattaaaattatcctacactatctgggatacatcatgatcggcatcggggcgatcctgctctttcccctgccaatcgacctgttctaccgcgagtttaactacgtgtatggcgtaattccgcccctgatttccatcattctgggagttattttttctcagggcttccgggagtatgacaaactgaaattcaagcatgggatgatcataagcagcatctcctggctatgggccgggcttgtgggcgcgatcatcatgatgctgattttagacgtctccttcgtagacgctttctttgaaaacatctccgcatggaccggaagcggcttgaccatgttcagcgacgtggagtccttgcctatgagtatactatttctccgcagtgtggaacagtggatcgggggacttggagtggtcatcatcttcataagcctcctcattaagcccggaacgtcggcattcaagctctacaagtctgaagcgagggaagatcggatcaagccaaacatcaaaaataccctcaaaaaaacaatgcagatctacgccatttacaccgtgattggggtcatcctgtatctgatcgcagggttgcccctcttcgattccataaacctgactttcacgactatctccgccggcggcatgtcaataaagaacgccaatatcggattctaccagaacgatattgtttatatcatcactatcttcctcatgatactgggggctaccagcttcacagtccactataagatggctaagaccaagggcaaagccatcctgaaggatattcaattccaactcttgattgtcagcatcatacttagtgccatagccattgcaatcattaccaaacttgctcctatggacgtggttttccacgtcgtgtctgccattaccaccacaggcgccaacattgccccgccaagtgagatggcagcctgggctccccctgcgctgatcatcattatcgtcttgatgctgatgggtggttcttcaggttccactgtcggggctattaagcttgtgagagtgattacactcctgaaaagcacacatcttgctgtgaccaatattgttagtcctggacggtttgtaaagatcaagatctctggcaaatcaatcaacgaaggcgagatgaaagaggcatcgtcatacatggccgtttacatattctttttagccatctcgtggataatcatgacctactatactaatgaccccttcaacaccctgtttgacgtggtgtccacgttagggaatgtgggtctgagcacaggtataatcagcggcgagctgggcacgattccaaaggtagtgttgatttttctgatgtggctcggtagactggagataattcctatcctgctgactatccagatcggatttgagacatttaaccagagtctcaggtttgtgaagcgccgtatgatgaggaaaattaagccaaattga

SEQ ID NO: 2425 - DNA, 1656 bp, synthetic construct
  source 1..1656: mol_type = other DNA
gtgttttaccccaaaatcgaagaggtcaaggaaatagccaaggatgattcgtataaaagaatcccaataagctatgaaattttctcagacacgaagacttcgatcgaggtcctgagacgccttcgtatcttaagcaaccactgctacatgctggaaagtgtggaagactcgaaaaactgggggcgatacagttttcttggcttcaatccaatcctggagctaacctgtcaggatggggagctggtcattaaaggtaaatcaagcttcagtgattgtggaattgaggatgaaaaagataagtgcttcagcatcaaaacggataatccgggtgaatacattagagaaatcatagaagaaaacaaatctccaaagctggagaacatccctccattttccggtgggcttgtaggctacttctcatacgattatatcaagtacagcgagccctccctgatcctggacgcacagaatcaggacgccttcaaggacgttgacttgatgctcttcgacaaggtgattgcatttgacaactacaagcagaagattgttgtgatcgttaatatgaaagtgaacgatgaggatatgctcaaaaacgaaagtatcgaggagaactatcaaaaagcctgcaatgacattaaggacatagtgaatattataaaggcggataacatcgtggatctcctgaacgacgactttaaggaccagctcacaaacaagaagacaatcaagtccctggaggaaatgaaaggcctaaaaaccttagaggagttggaccgctgccgcaaggaaattaccaaacacctgccgattgagctcaagtctgacttcagatatctctttagcaaggaagagtactgtgacatggtggagcgggccaagcattacatccgcgagggagacattttccaagtggtgctttccaacaggatcgaggccgacattgagggaagcttgttcgatgtatatcgcgttctgagaactacaaatccctccccctacatgttctacttctccagtgacgatatcgaaatcgccggtgctagtcctgaaactctcgtgaagctcgtaaacaaccaggtgtacaccttccccctggctggcacccgtccaagggggaaaactgacgaggaagaccgacagctggaagaggagctgttggcggatgagaaggaacgcgcagagcataatatgctggtcgaccttggtcggaatgacatcggcaaaatcagccaaataggctctgtcaaggtcaaccggtatatggatattgtgaggttctcccacgtgatgcacatcggatcaacggtagagggaattttgagggaaaattacgactacctctccacaatcgattcaatcctacctgctggcaccctgtctggggcccctaagattagggcatgtgagatcatcaacgagctggaggacaacaaacggggcatctatgggggagcaattggctatattgacctgacaggcaacctggacacctgcattgctataaggatcgcttttgcacgagacaataaggtgtttatccggtccggggcgggaatagttgccgatagcgtccccgagagcgagtttgtcgagtctatcaataaggcccaggccgtgatggatgctctccggctggccgatggcgggatagagtga

SEQ ID NO: 2426 - DNA, 627 bp, synthetic construct
  source 1..627: mol_type = other DNA
atgatcctattagtcgacaactatgacagtttcgtgtacaacctctaccagtttattggagaggctctggccaatataaagggttacgacctcgccagcaaaggcgatctctacaagatctacgaagagattaaggtgatccggaacgacgaaatgacggtggaagaactcagagagctgaaccccgattatattatcctctccccagggcccggcaaacctaaggacgcgggtatctgtaaggacattgtcaaagagtatattaattcagacgttccaattctgggggtatgccttggccatcaagccatttgcgaagcccttggcaccaacatcatacacgccaaggaactaatgcacggaaaaacctctatcatcgaactggatgaggataagatattcaaggacatcagtgaccccattcagatcgcacgatatcactccctggctgtggagaatgactcgctgagcaacgatttgatcgtgctggcacgcacagatgataatgagatcatggcggtgaggcacaaaaacgctaatatctacgggctgcagttccatccggagagcgtcttgactcctgagggactgaagatcatagagaactttctgaatattaaaaactga

SEQ ID NO: 2427 - DNA, 1008 bp, synthetic construct
  source 1..1008: mol_type = other DNA
atgattaaagaagctattctgaaagtatacaaggacgaagatctgacgtacgacgaagcgtatgccactatggatgagatcatgagtggggaggccagcgaggtgcaaatgagcgcgtatctgactgccatgagcatgaagggcgaaacgatcgaggaaatcacagcaagcgctgaggccatgagggctcactgtgtacgcctgcttaatgatgaggaggtgttggagattgtcggaaccggtggcgacgggagtaacacattcaacatatcaaccacctcctctattgtcatctccgctgcaggcgtgccagtcgccaagcacggaaaccggtcggccagtagcaaatgcggtgccgcggacgtactggaagagctgggggtcaatattcacataagtcccgaaaaaagcttagcatgcctaaaggaaatcaacctatgttttctgtttgcgcagaactaccatctgtcgatgaagtatgttgctggggtgcgtaaagagctctcaatccggaccatcttcaatatcctcgggccactcacgagccccgcaggggccagcatggaggtcttgggagtgtacgagagggagctgatagagcctcttaccgacgtgctgaaaaacctcggcgtcaagtcagctatggtggtctacggcctggacggaatggatgaaatctccgccagcgacaagactgctgtttgcgaacttaaggatggaaagaccagaacatatgagatctccccggaggacttctctatggatattgcctccaaagaggacctggtgggtggcgatgcaaatgagaatgccgaaatcacattggctgtgctcaacggtgaaaagggcccccgacgcaacgcagtgctcctgaactcagccgccggcctctacgttgccgggaaggtggactccatcgaagacggagtgaagctggcagaagagatcatagattctggcaaagccttaaatcagcttgagaagttcattgaggtgaccaacagatga

SEQ ID NO: 2428 - DNA, 777 bp, synthetic construct
  source 1..777: mol_type = other DNA
atgctgaagaagatcgtggcgaaaacggaagagcggctcatcgaggctaaaaagatcaaatccctggacaagctaaaagaggaagtctcaaagctggagataaataacgaatttccgttcaaagaggccttaaaagaccccgagatcgcgatcattgcggaggtgaagaaagcatctccctcaaaaggcctgatcgccgaagactttgactacatcaagattgcaaaggaatatgagcaggctggagctagtgccataagcgtcctaacagagccatatttcttccagggcagcaacgatttcctgaaggagatcagccaaaatgtatccattcctcttctgcgcaaggattttaccattgacgagtacatgatatacgaggcaaagatcctgggggcttctgccatcctgttgattgtttcgatacttgacaacgtgcagctcaagaactacctggacttggcacatgatctgggtctctccgccattgtggaaacccacgatgccgatgagataaggactgcagtcgatgccggcgccgggattatcggagtcaacaatcggaacttagccgactttacagttgacattgaaaacagcatccgactcagaagtcttgtgagcgacaagatcttgttcatttccgagagcgggatcaaaaccgctgaagatgtaggccgcctcaagaaaaacaatgtggacgccgtgctgatcggagaaactctgatgaggagtgatgacaagaaaagcatgatcctggagctcaagaatggttga

SEQ ID NO: 2429 - DNA, 654 bp, synthetic construct
  source 1..654: mol_type = other DNA
atgctgaaactcaagatctgcggactaagacggaaggaggatatcgatattgtgaacaaatacaacatcgactatatcggtttcgtgttcgcaggcagcccccgaaaggtgagctacgagcaagctaaggagctgagcgcgctgttaagggaagatattatccctgttggggtcttcgtcaatgagcatatgaaactgattgtcgacctgtacaaggaaggcatcatcaagattgcccagctccacggagatgaggatgaggactatataaagaacctcaaagccaagtcactggagcagacggggcacgaaataccggtgattaatgcaatcgaaatcaacaacgccaataattacgacaacttcaatgacaagctgttggagtggcgcgactcagtttctgactacttcatcctggacagtggcaagggctcgggaaagacatttgactggtcccttcttgataaaaacagcgaatttttcaaaaattccatctttctcgccgggggtttgaactccgaaaacctggactctgctataaaggagttcaacccatatgccgtggacctcagcagttccgtggaaaccgatggctttaaggatgaggagaaaatcaaagagattgtggaaattgtagagcggtacaggaattga

SEQ ID NO: 2430 - DNA, 1185 bp, synthetic construct
  source 1..1185: mol_type = other DNA
atgagtagggggcgattcggagtgcatggtggacagtacatgtcggagaccctcatgaacgaactccttaacttagagaaacagtataatcactttaaagaagaccccgagtttatagaggagttaaacactcttctgaaggaatatgctggcaggcctagtctgctgtactatgccaagagaatgaccgaggacctgggaggagccaagatctatctaaagcgtgaagacctcaaccacactggtgcccacaagatcaacaatgtgctgggccagtgcctgctggctaaaaagatgggcaaaacccgcgtgatcgcagaaaccggggccgggcagcacggggtggctacagcgacggctgcggccctgttggacatggagtgcgaagtcttcatgggggaagaggacacaaagcggcaagcattgaatgtattccggatggaacttctcggcgccaaggttcacaccgtgacaacaggcagcaaagtcctgaaggacgccgtcaacgatgctttccgagagtggatcagcagagtggacgacacccattacgtcattgggtccactatggggccccacccatttccaacgatcgttcgggactttcaggcagtgataagtcaggagatgaaagagcagatcctcgagctagagggcaagctcccaaacatggttatcgcctgtgtcggtggcggcagcaacgcgatggggtcattttacaatttcctggatgatgaggaggtggagctggtaggcgtggaagccgcaggaaagggcatagacactgaataccatgcggccacaattgcaaaaggcgagctgggcatattccacggtatgaaaagctacttctgccaaggcaattatgggcagattgcccctgtatacagcatctcagccgggctggactatccgggaatcggtcccgaacacgcctacttgcacgatattggaagagcgaaatatgtcagcgctaccgacgacgaggcagtggaggccttcgagtacctctcccgcacggagggaatcatccccgcaattgaatcctcccatgcaattgcccatgctatgagggttgctggagatatggataaggacgatattatcatcatcaacgtgagcggtcggggagataaggatgtggccgctattgcccgctacaagggcgtggaactgtacgaatga

SEQ ID NO: 2431 - DNA, 783 bp, synthetic construct
  source 1..783: mol_type = other DNA
atggagaaggacataaagattagcgatgccttcaaagacgggaaagccttcatcggctttctgaccgccggagatccgacaattgaaaagaccgtggaatacgtgctggccatggaagaggcaggctgcgacctggtcgagatcggcatccccttctccgaccctgtagctgaagggccagtcattcaggaggccaatatacgggctctcagcaacaataccaacaccgacgatgtctttgaggcaattcggcaaatccgagagaagagcgatgtgcccctcgtgtttctcacttacatcaatccggtgttctattacggatacgacaagttcttcaaaagatgccaggaactaaacgtctgtggcattatctctcccgacctgccctatgatgaaaaggatgagatattggaggtaacaaagaaatacggcgtggatatcatcagcctgattgcccctaccagcaaggaacgcatccagatgatcgccagcgaggcaagtggatttatctacgtcgtttcaagcctgggagtcacgggtatgcgcagtgagattaggacggacttaaagtccataatcagtgacataaaggaagtgactgatgtgccaacagcggtgggcttcgggatcaacactccagagcaggcgaagaacatctccaaagtagctgacggtgtgattgtggggtcggcaattgttaacattatcgctgagcacggggaaaatgctagggagcctcttgccaactatgttaaatcaatgaaagacgccatctccaagtga

SEQ ID NO: 2432 - DNA, 1389 bp, synthetic construct
  source 1..1389: mol_type = other DNA
atgcagggtaaaacactcgatacaagaactcgcaacctgatcctcattctctttttaatcggcgtgttcatgggctccttggacaccgggatcattgggcctgtcctgccctcaatcgagcagagcttccatctgacgagccgagaatcaagctggatatttacgctgtttgtcatcaccttcatgattggttctcccgtgatggccaaattttcggacttctacgggaggaagaagatcttcatccttgacgttctgctgtttgggatagggtcttgcctaatcgcagcctccattagcatcgaattaatctttctgggcagactcattcagggtttcggctgtggaggaattttccctgtggcgggggcatttgtaggagacggattccccttggaagagcgcggtaaggcgttgggcattttagggagcgtgttcggcatttccgccattggagggcctcttgtgggtgctgccctaatcccctatggctggaactggtgttttacaattaacattccaattgctatctttctcattatctttgcttggtacatactgcctgactcagataacgataggaaactcaagatcgactacctgggcatcctaatcctgagcttgctcgccatattcctgtcctacgggcttaaccaaatcgacagtagcaatttcatcgcgagcctcctctctctcaatgtgctgccattcttagtcatcttcatcattctcatcccaatcttcctcaaggtggagaaaaaggccgaggagtcgatcgtgcccatccacatgctgaagaacaaggaaatctccattgcctgcatcgagaccctctgctacggtatcatctactcttctgccattttcatacccagtctggtgatcctgtccatggggttggacgatcagcttgctagccttatgctgattcctatcctgggcgcaaatgcagttgcggccccgattctgggaaaaatcctggataaaaccggctcaaagaagctgatggcaatgggcactatgattcttgccatcgggcttattgctattgctatctatccaagtaatctaatcttcttcataatcgccggatgcctgattggagtgggtctggtaaccataataggcgcgccgctgcggtatatagtcctcaccgaggccaagccatacgaacggggcgctggccaagccatcgtgaatatgctgtccagtgccggacagctgatcggaggagccctgattggaggcataatcgcatcctttacagggattttgggctatcaggtcagtctgatcatagctgcaatagttgcactgattgcctttgctttcacccttcggttgaaaggccgtgatgagcagatcgctactatgaaggccaaccagtga

SEQ ID NO: 2433 - DNA, 1365 bp, synthetic construct
  source 1..1365: mol_type = other DNA
atggcaaatgagaatgtagagctcatgcgaggggccccggagattgcggtgaagaaactggcaattcccatcatgatttccatgctcctaaccgccagttataacatcatcgatggcatcttcgttgcgggcctgggccaggcagccattgccggcatcggcttcgttaccccgatcttcatgattctgaacggtgtcagcgtgggtttgggcagcggtgcgacaagcagcattagtaggttcgtgggggctaaaaaccacgaaggcgcgaacaagtccgccacccatgccctcttgatcttccttatagccagcatcatcctaaccatcatattcctcttcatccaggaacccctccttagaacatacggggcaagcgggcagtctttggctgaaggactgaaatacggcagccccctgtttctgggcctcttcaccttcatgtttgcaaatggaggaagcgggattttgcgcggcgagggggacatgaaaagggccatgtatgcagtaattgtatctgtgatcttaaacacctgccttgaccccatcttcatctacaccttaggtatgggctccgcaggagcttcccttgccactatcgtcagctctgctggttcagccatcgtcattatgtattggatactgatcaagaaagacacttgggtccacgtggagctcaagaatttcaagttcgattcaaatattgcaaaggacattctgaaagtgggtatccctgcttccatggacatgttcatgatgtccctggctgtcagtctgtatctgatcttcatctcaacaataggaggggaatttggcattgctgccttcacatccggtcaaaggctgtacctgtttgctataatgcctctgacatcaataggatcggccgtggccgccgtggcagggtcggcctatggagcccggaacggagattacctctcccggacccacatttacggcgctaagtttgggatagcctttgggacagcggttacaataatccttatagcctttgctccacagctggcaacgatttttgcctacactccagaaactgctccactggtccctgagatcacccagttcttacgtattgccagcctgtgcctccccctgaccggggctggcatgtgttcaagcttcctgtaccaagggatcggaaaggggacgatcagtctcatgtggacaattattcgcgaggtgatctttacggtgagcgccacgtacatccttggcatcgtgctaggctggggattggtgggaatctggactggcctggctattggaagaatcactgcgagtatcctgaacttcacgtttgcccggtttaccatcaagaagattcgcgagaactttggcacctga

SEQ ID NO: 2434 - DNA, 414 bp, synthetic construct
  source 1..414: mol_type = other DNA
atgccctttattgcgttaatccaccacatatcccagaataagctgcggtatgccagaaaaaacccaaaccatatcgacatggtgcatgagggtcgctacctcatggagatacacaagagaaagaatctgagtcaggacgaccttgctaacatcttcgggcagagcaaaggcacaatcgcaaaggcactgcgcaagttggaagataaggggtacgtcgagcgtatcattaaccagaacaatcggaggaaatacattcttaaaaccacccaggaaggcgagaagctcgctattctgctggaagaggatctgtcaagctgggaagaggccgtgggaatcgacaagctcgacgatgaaacgaaaaaccaactgcgaaagatcgccaggaaaactgaggaaatcctaaaggaggagtga

SEQ ID NO: 2435 - DNA, 684 bp, synthetic construct
  source 1..684: mol_type = other DNA
atgattggaaacgattgggacaatgccttggaggatgagtttaataaagactacttcatcaagattaaggaatttgttgaggccgaatacaagacaaagactatctatccgccgaaagaggaagtcttcaatgcatttaagctgtgccccctggacaatgtaaaagtggtgattctgggccaagacccctaccacgagaaggggcaggcccacggccttgctttctcgacccctgaaggccatcccatcccacgcagcctaaaaaacatctttaaggaaatcaaagaagagtacaactatcctattcccgatagtggatgccttgagagctgggcgaagcaaggtgtgttcctgctcaacaccgtcctgacagtggaggaggggaacgccaactcccacagcaaatgcggctggcagacgtttaccgacaacgtcatcaaaatactgaaccagcaggactcccctatcgttttcctcctgtggggaaagcaggccgaactgaaaaaggagctcattacaaaccccaatcacctcgtgctaatcagcagtcacccatccccattctcagcacggagggggttcttcggttgtaatcatttcaagttagctaacgagtttctcaaggacaagggcctggaagagatcgattggcagataaaaaatgtgcagaccactttgatatga

SEQ ID NO: 2436 - DNA, 732 bp, synthetic construct
  source 1..732: mol_type = other DNA
atgaagtacctgattattaacggttccccaaggaagaagaacacctgggccatggtaaagcaggcgaagacaaacctagaaggggagtttgaggagattcagctgatgaaaacaaagatccccatgtgtaatggctgcttcaaatgcatcatggagggggaggataaatgtcctcacttcgagacagtgcatccaatcgtggagaagataaaggaagctgacggcctcatcatcacgagcccagtttacgctatgaatgtcacaggcctgatcaagaacttctttgaccatactgcatatatctaccaccgcccggaattttttgataagaaagccctgatcatcgtgtcaactgcaggggctggtcacaagaatgtggccaaatacatggacgaaacccttcggcattggggattcaacaagaaccacaagattacttacgcctgcggcggaaaagacaccatcaacaccgaagagattaacaagacggcgcagaagttccaaaaggacgttagctctaagaaactccactcccctaaatttatggacattgtcttctacaatgtgtggagagccatggcagtcagtaaagatcccataaaggctgataaggaatattgggaggcaaccggcttggtgaattatgacttcgcccccaacgtgaagctggggttcttcaaaggaatctttgccaaaatagtcttcgccatgatgaaaaaggtaattaaatga

SEQ ID NO: 2437 - DNA, 1344 bp, synthetic construct
  source 1..1344: mol_type = other DNA
atggccaaaaagaatacaaaggagaagatatttgactcatcgattgacctcttctcccaatatggatataccaacacttccatccgacagatcgccaaagaggtaggtataaaggaaagctcaatctacaaccactaccagagtaaggaggccatactggagtcaatcctgaactattatatcagcgagatgctcaaggaggaagctcctattatgcagtccaacgacaatctggatctgggcttcgagtacttctacaagcagggcagcgacagattcctatcaaaactcagcgaagagaggatgatgaaaatcacgcgcatctttctggttggctcgtatcacaatgaaaagatgaaggcgtttgtgaaggaaggcatcattgactacgccatcaagggttgggaggagctgttcaacctaatgaaagaaaaagagatcattcggaaggatgcaaacagcaaacagcttgctgagtccttctatagttacgggatcttcttgctctatgagcatttcattttcaactatcctgaagatgatgagaagttcctcaaggacttcgaacggcgaactaccgaccatatgaagattatctttaacagtgtgaaaataaacaatgaagaatctaagatcgacaataataaaaacaatccatcctccaatcacgataaagagaacaaagagttagagacagagatcatgaggctggaagaggagaaggactacaagaaggttgaaaatcttgtaagagatgccttttggaacatataccgtcccggagcttacgaacactttatcgtgtacaatttgagggaggaccccagcttcatcaaggacctggcctacattattgaggaagacgatgagattattgggcacattaactattctaagggcaatctgaacctgtacaagaaaaacaatcaggggatggagaagatcaacgattggaatgaggaggcagtcgtgcttggcccaatagccatcaaccccaaataccaaaaccaggggtatggattccggctgattaagcataccttacgcctcgcgaaaaacaagaacattccgtatgtctttgtgatcggggatgagaactactataaccgctttggctttgaaagcgcatctaaatacaatctctttctggagggtaccgatacaagcgaggaaaatcccttcttcatgatcagaatctttaaagacctgttcaaagacaaggactacgaccggggaatcttctacaatccaaaagtcttcaacgtcagtcaggatgacgtggataagtttgacgaaaactttgagtacaagcagaagagggtgcaagaaggacagttggaatga

SEQ ID NO: 2438 - DNA, 1029 bp, synthetic construct
  source 1..1029: mol_type = other DNA
atgtttgacgccaagtttcaatacaccaacaagatcatcaacaatttgatggaaatttccaccatcaaggagttcattctgaatagtcagattctgccgagttatgacattttactacgaaataaggcaatcatcacgagcagctacaattcaacaagtattgaggggaatccactggatttcaaacaggtcaccaaactgtttaacctaaagcaggaaaataagctcgatgagcttaagctgaataagagcgaaatagaggtgctcaactacttcaaaacccttgagaatctcgacaactacgaaaaaattgacgaggaaactattctggacatccacaaaaatatcactgaagggaccctgaaggaccctaacatggcgggtaaattccgcgattcgccagtcgtcatcgggaacataaagacaggccagcttaattatgtgcctcccagccccatcaaggtgccctacctcatccgtgagttactggactgggctgacgtccaggaggacctgaacccaatcatcctcgcgggaatcttccactatgagtttgtgagaatccaccccttcgtagatggcaacggacggaatgcaagagccctcgctacactgatacttttgttgaaagatttcgacatcaagcgctacttctccctcgatgaatattataatcaggataggcagtcctactacaacgccctgcaaagcgccgataagagccaggacctgactgaatggctagagtatttctccacaggtttcctcgtgtcactgtccaacgtgaagaaggacatcgaaagcataagccggtttgacataaaaatgaacggcaagattaagctgaacgaaaaagagatcaaaatcctggagtttattgagaaaaacaacagtataaagaacaaggaggttcaggatctgctgaacctttcggcccaaaggtcccatttctacatcaacgagctcgtgaagaaaggattgattaagtcaaaaggcaagggccggagcacggtttacatttttaaatga

SEQ ID NO: 2439 - DNA, 3303 bp, synthetic construct
  source 1..3303: mol_type = other DNA
atgaagctgaaatcaaagtattttgtgtttctcctcatcatttgtatcctcttcagtatttcgacagtgtcagcgaacgacaacgatatgagtatcaatcaaaacctgcaaaatgacgctaaccaagatatcaaccaggatctgcaactgaatgaagcctatcaatcagacaccaatctaaaccagaacttgcaggcaaataatcaggaaaatgatctgcttaaagcctctgaggataagacctataacgacctctataatgacataaaaaactgcgaagatacgttcaacattgagaacgactacaaatacactgaaagcgataaccacacctttatcagcatcaataagaccaatctagtgatcaacggaaacaaccatgtcattgacggatcaaataaagctgggggctttgagtttttaaaggagtcactcaacatcatcatcaatgacctcacgttcattaactgcaacgattacaccatcgtgaatgaggacggaggcaacatcagtctgaataatgtcaatttcacgaacaatcacaacaaattgggcattctgtattcggagggaatgatttcggtgttcaatggagcactgactattaataactgtaatttcgacagcaacaacaatacgaacctcatctacacgaattttgccgagctccgcattacaaattccaatttctccaacggaaaggggattggaagccccatttacgccaacaggttcgaactgtacattgataactgtagctttgagaacttcactgccccctacgggggagcaatcaacttcaaagggaacaccttcgtcattaagaactcaaagttcaagaacttgaatgccgagataactgccggcgccatttttgccaagtatttcccaaaaaccaacaaggatggcccctacattccgggtgaggacatgctgtttgagaactgtgagttttccaatgtgtccagtacgcacaacgggggtgctatctacctgaacctggactcaagttctgagggctttgcaaaaacgatccacattaacaactgcaacatcaccgatgccagctccgactttggcggcgcgattgctagccagggggagatcctagacttctccaacttgaatatcataaactgccacgccaagataggcggtgcgatctacagttcctgggcagacctgagtctgaaagattgcaatatcatcaacaacagcgccgataaggacgcaggcgctatctactttgattacagcaagctgataattgacaattccaatttcacagataataaggtgaacaatatctcttcaggcaaagagagcatcatctacgccaacgacgtggacgcggagatcagaaattccatatttgataacggaggcgttgccgtctacgcaaacttcgccagcaactccaaatttgaaaacaacacttctacagatctgttcctctggaataataccaactatattgtgtctgttgagaataagggaataaaacttaacctgaccaacaacacaatcaatgttgataaattgccttcgaaatttgacggccgtgattggggttgggctagccctcttaaattccagggagacaatgtggcctgctgggcctttgcaacggccggggcattggaatgcgctcttctgaagcagactggcgtcctgtacaacatttctgaaaacaatattcagaatctccagctgaagtatttctccgaaggggataggcgaaacagtgccatcggttacgcttacagtggtctcggccattcgctgagctggtacggagccatcacatcagaagatgacccatacgatgaacgcggcatgtactctgacgtggctgagaccgacaagcgaatccatgttcaggatgcgatgattatcttcggcgggagaaacgacacaaggaacctgatgaaggaagctattatgaaatatggtgcagtgtccatccagtatatgtatgctccctacgattacactgccaattacaccgaagtggacctgcagccaggccatttcgtgaccctgatcggctgggatgacaattgccctcctgagaaggtaaacaccaaaatggccattgacgagaccaatattcctcccggcccgggagcttggctaatgaaagacagcgaggattctaaattgggagaagacggctatgtgtacctctcctactacgacctgtcgatattatccaaggatttctacccagtcattcctcaggctgcgggtgtggcctacatctttgaaaacactaacgactaccatgtcaactatcagacagacatcacaggccttgcaggttttgatgaaaactacagctattactccaatgagttcgtatcaaagtacgacgagtggattggggctgttgggacctatttcaacgagtccggaatcgactattcctttgacatttatgtgaatggcgagaaggctcactcccagaacgggaccagtgagtttgcaggcttccggaccatcgttctggacaagtacgtgccaatcaaggcaaatgacacattcaaagtgattttcaaaagcaatgcgctgcccttccaggcctattcaaggcaacactatatcccgaatatgtctatgataagtgcagatggcagcaattggatcgattacgccgacaagaatcggaccgtctgtctgaaggtatatactatcgaaagcgataaggaaaacatatccagccgggcatctaccatcatagactgtaagaacatgaccacaaccgccgtagctagtgcggacgggagagtgggcgaatactttgtggtcaccttaaaggaccagaacgggaccgccttgacaaacaagcccatcaaaataggtttcaacgggcgggtctatgaccgcgtcactgatgagaacggaagcgctaagctgcagataaacctcgcctataaggggacctacaccttcgccatcggattccttggagacgaggactatctcggggcctttgaagtggccaaaatcactgtgaatcttcacagccccaagctaagtgcccccaataagtcttacaaggcgagcgctaagacaaaagagctgactgccaccttcaagacatctaacgggaacccaataagcggcaagaagatcagcttcactgtgaacggtaagacttatacagcgagcacaaacagtaaagggctggctaaagtcaatgtttcattatccaagaaaggcacgtacagctttacggctaagtatgccggtgatgagacatacaaggcaactagcgtaaaatccaaactcacacttaagtga

SEQ ID NO: 2440 - DNA, 1092 bp, synthetic construct
  source 1..1092: mol_type = other DNA
atgaacatttcgagtctgtttagcgacgaaaaagttaatacaggcagacaagtcgagctggatatcgcgaaggcctttgcaatcatatttatgatttttctgcatacggtcatgatcgtggaagcatacaatgtcggcctgagcccaacgtatacttacataatcggcaacgtcctcgggcgaccctatgccgccgtcgtcttcatgttctgcatgggagtgggtgtggtatactcccggcacagccagtggaacttgatgattaagcggggaattatcctctacctcctgggccttctggtgaacgtctttgagttcttcctgccacactaccttgccggttaccttggcgtgaacgccgaggctttccctctctttggaggcctcatcatcttttgtgtggacatcctcgccttcgctggtctggccttcatccttatgggcatcctcaggaaattcgaggtgagtaacaaagcgatgattatcattgcagtgataatgtctctaatcggcagtttcacaatcgggattgactttggaatccctgctgtatgctcattcttcggtcacttcattggggctaagaacggacataccgcctttcccttattcaattggtttatcttcccagttgcggggtacgtgtggggccagtatttcatcagagccaaggacaaacgtgaattttttaaatactggccgatcctcctgattgtggcttttgcctacttcttcatatcctcccgctactgggggggggtcttctcagaggacgttcacctgtactactttctgaacaccttggatgcagtgttctgcatcatcaatgcccacgcattcatcggactgtgctattggatttccgattacctgcccgacagcattaccaagttcttttcaaccttgagccgcaacattaatgaaatttatattgcccagtggttctatatccccgtaaccataatcttgatcacgtatttctccaaggggttagtgtttgatgacctggtgaccacaatcgtgagcatatgtatgctgattatatctacagttactgcactagcttataggaagctgcggactaagggctga

SEQ ID NO: 2441 - DNA, 1995 bp, synthetic construct
  source 1..1995: mol_type = other DNA
atgtatctgattagcttttttggattaggggttaaactgaccaacttcaatgatgttgcgctcttcatcatcttcgtcagtctcatcaatgcgatcctgtggcccatcctcacccgcatcctgatgccatttctcgtgctgtccttcgggatagggacactgattctcaacggcctcttactgaacttctgcggccccctgttcggcatcaatgtggaaggccctgccatcatccttgctccacttgcaatgtcctttgttacaacagccctctctacgatccttaccatcgaagatgaaggaagctattacaggtcagtctatagggatgctgaaaagaagcggaagggggaggtgaaggactatccgggactcatcatcgtggagattgacggtctggcctacgacgtcctgaaggaagcggtggataagggatatatgcctaccctcaagtcgatgattgacaacacacacaccctacgcatgtgggagacggacctctcctcccagacaggggccagccaggccgggattctgcatggcaacaatgaggacatcaccgctttccgctggattgagaagaagaacaacaatcagatgatgcaatgctctggcgtgactcaagtaacaacgttggaagagcgaatctcggatggaaatgggctgctggtagataacggcgccagccggtccaacctcttctccggtgataccgacaatgtgatatttacattcagcaaaatcttaaacatccgaaagctatacaacaaggcatggttctccgtgttcagcaatcccagcaactttgcccgtatcgtatgcctgtttatttacgacatgaccttggaaatcatatcccaaataaagcacagcgtgaagaacatcaggccacgcatcaaacggggcatagcctatatccccacgcgggctgcaaccaacgtgttcatgagggaaatcaacaccagcacgttgatcggggacatgatggtcggcgacattgacgttgcgtattccacctatttgggctacgacgagatagctcaccattctggcgtgcgcgacgaggactcttggtacgcccttaaaggaatgaacaagcagattgagaggctgattaataccaataagtacactcctagaaaatatgagtttgtcattcagtcagaccacggccagacaaacggtgcaacattcaagcagagatacggccagtcctttgaggattacgtgaagtccctgctgccaaaagagatgaagatgtttgcaaagatgtcgtcaaacgaagaccactatgccgaaagtttcctgcctttttcacgaaagaacgatgatctgatagatgagaaggatctcgaggagctgggggactctgaggtgattgtcctggccagcgggaatctggcaatgatctaccttacccagtgggactacagacttagcatcgaagagatcaataagttcttccccgagctgattcccggtatcgtggaaaacgaatacgtgggatttattgtcatccggtcagacgaaggagacctggccatgggtaaaaagggcatttacaacctggacactggcgatattataggaggaaatcctctggaaggatttggcaagaacattgccagacacctgaaaagaaacagctcattcaagtacacccccgatatattggtgaacagcttctatgactgtgaaaatgacgaggtctgtgcatttgaagagttggtaggcagccatggcggtgtggggggaagccagtccaaaccattcatcttatatccgtcagggtggaacgtcagtgatgaagagattgttggtgctgagagtatttacaaaatccttaaagagaatctgaagaaactaaaagagtacagtaatgataacactgccctagaaaaagagtacagtaatgacgagactgccctcgaaaaagagtgcagtaatgatgagactgctctcgagaaagagtacagtactgctttggaggagtga

SEQ ID NO: 2442 - DNA, 714 bp, synthetic construct
  source 1..714: mol_type = other DNA
atggacatatcggagatcattggcgacgcaatcgcctatcccatacacaacattaaggctctggtgatttatatgatcattggcatcattactggaatcctggggggcgccagtttcatgggcctgcttatgagcctaacaggcaaaaacgctctggcggccggcggctttggtatccttggcgtcttagtgctcctcatcggagccttactcattaccggctatgggttggatattgtgaaatttgggatagaacggagagatgacgggccgggaattgacctggtgcgacaggttctgaatgccgtgaaactgctgattgtcagcatcgtttactacatcgtcccagcaatcatcgcctgggtgttgttcaccctccttggtagggggatcttgaccgtgctgattgttatgataatttctattatcttcgcttttgctgagtttatggccatctgtcgcctggcgaagtatgattccctcggagaagcgctggctatcggggaggccattggtgacatatcaaaggtaggcgtgataaagctgctcgcaacgattatcatcgtcgtggtcatcgccatgatcgtgtgcttcatcctgctttacgtgtacaagctgaacagcctcatcggaggaatcctgttgggtatattcgccgtatacctaacattcttcgccaatcgggcagctgggctcctgtactccgatgcatga

SEQ ID NO: 2443 - DNA, 750 bp, synthetic construct
  source 1..750: mol_type = other DNA
atgattatcgatacacactgtcacatctacaatagcgaaatggaaaatgccaaggagatcatcaaagaagctcagaaaaacgacatctgcctcattttgaacggcactgatcccaaaagcaacaaggagattctggagctgagctccaaatatgataatgtgtacggtgcgctcggatatttctacactctggccgatgagataagtgacgaagagattgatctcttggacagtcagctcaacaacgacaagatcatcgcggtgggagaaatcggcctggactattaccatacgaaagagaacaaggactcccagaaggaactcttcgaaaagatgcttgatcttgccgaaaagcacaaacttccagtcatcgtccattctcgcaaggcctcgcaggacacctatgacatactaaagaatcacaatgcagttgggtcactgcactcttaccagggttcagccgaaatggccagggaatttgtgaagttaggcttttacatcggcatcggagggacgatcacctacaaaaacagcaagaaaatccggaaggcagtgaatcaagtggggattagccatattctgatagaaaccgactccccttatctgccacccgaggataaaagaggcgagaacaacacaccgctgaacctaaagtacattatcgaggagctggcagaggagttggacattaaggaggagaaaatcattgagataaccacagagaatgctaagaagctgttcaaagtatga

SEQ ID NO: 2444 - DNA, 717 bp, synthetic construct
  source 1..717: mol_type = other DNA
atggacgagaagttctcccggacagagatgctcgtgggaaatgagggcatggaaaaattaagaaatgcgaaggttgtgatttttgggctggggggggtcggttcctttgtttgcgaaggacttgcacgaagcggcgtcgggaacttcgtcctggtggattatgacaaggtggacgaaaccaacataaacaggcaggtaattgccaccacaaagaccatcggccaatgcaaggtggacatcatgaaggagaggattctcgatatcaatccggatgccaacgttgagatttataaggaattttacttggaggattgtgaaatcgacattatcactagtgatctctcctacgccgtggactgcgtggacacaatcatggcaaagattgccattatctgcaagtcaaaagagctgggcgtaccagtgatctcaagtatgggaaccggcaacaagctggaccctactatgttcgaggtggctgacatctacgagacgagcgtctgtccactggcccggatcatgaaaaaagacctacgcaagcgcaacataaaagactgcaaggtggtgtacagccaggagctgcccaaaaacacgaatgattgtgatataaacaaaaacaaggggaaggtgaaggtgaaaggcagcatctctttcgtcccctcggttgcgggtcttatcatcgctggagaagtaataaaagatattgtcaatgctaaatga

SEQ ID NO: 2445 - DNA, 471 bp, synthetic construct
  source 1..471: mol_type = other DNA
atgtttcgaaagatgcgccgggcaaaacaggaactgtccaaagaggagtgcatcgatatcctcattaacgagcctcggggcgtcctggctgttctaggtgatgacgaatacccgtatgccgtgccactgagccatgtctacgtagacggcaagatctacttccacggaaccataaaggacagccacaagagagacgccatcaaaaaacacgacaaggtgtccttttgtgtgatggataaggggactaagtcagattcgtggtggtacactttcaagagtgtgattgtctttggcaggatgaagacaatcaatgacaagcagaccaaaattgagaagctcacctatctgggaaacaagttcttccccagcgaagaggagacaaaagacgagattgataggcttttggacgtgacggaactgtatgagatcagcatagagcatatgagtgggaaagtggttaaggaaaaatga

SEQ ID NO: 2446 - DNA, 1350 bp, synthetic construct
  source 1..1350: mol_type = other DNA
atggccatacatccaattgaatttagatacggcactcccgaaatgaaacgcatctgggagcaggaaaataaacagcaacgaatgctggatattgagtcggcattggcccaggctgagggggagctcggaatcatccccaaggagtatgccgatgagatcaaagctaaagcaagcattgagtacgtgaccctggagcgcgtcagtgaaattgaagcggagaccaagcacgacatcgcgtccctctcaaaaggcctgagcgaggtatgtgagggggaggccggcgagtacgtgcactttggagcaacctctaacgatattgtggacagctctaactcattgcttctgaaagactccattgaggttctcgaagaaaaaatcgaacgcctgaccaagataattctgaaactggccgatgaaaacaaaacaaaggtctgcataggccgtacacacggacagcatgccctcccaaccacctacggcatgaagtttgcaatctgggccgatgagttgcacaggcaatatgacaggttgcagcacgccaaggacaatgtgtgcctgggcatgatggacggggctgtggggaccactgccgcgcttggcacccagggctgggaggtgcataagaaggtctccgagattctcggccttaagcccgccccaattacgaaccaggtcttacagagggataatcatgttgagttcatagccaccctggccaacattgctactaccctcagcaagatagctctggaagtgagaaacctacagaggactgagattcaggagttaggagaatattttgaccctgagaagcaggtgggaagcagtacaatgccgcacaagatgaaccctatcacagcagaacgcatctgcggtgtggctcggatcgtgaaatcctatgtaaatgcagccatggaaaacaaccccctctggcacgaacgggaccttacaaactcatcctgtgaaagaatcatgttcccggaggcttgcattctgacagattacatcctgaacctgacgatcaagttgatgaacaatctgatcttctacgatgaaaacatcgagcggaacctgaatttcacgaatgggctcatcatggccgagagactgatggcagagctgacacgggcgggaatgggtaagcagacggcttacggggtcgctcgaaagaatgcgataaaagcaaataaggaaaagcttctcctagccgacctgatcctggaggaccctgacgccagtcaattcctaagcaaagaggacgttgagcggatcatggacccccacacttatattggtagcgccccaatcatcgtggatgagatcctcgaagcttcgaaggactggttctga

SEQ ID NO: 2447 - DNA, 807 bp, synthetic construct
  source 1..807: mol_type = other DNA
atggacttcagcgtgaaggactttaacgtgcggctccgaaccatccggatttgggaagtagtcatagccctggtggtagcattctttctgaccgggttcacatgtgactatttcggaatctactcaggtgaagccgagtatatcattttcttcctgtatatgatggtcttcttcgcaatagcctccatcgggacccatgggttcaaagatgacatctacggcgtgttcaaggcctccaacctgtttaaggtcattatgatcgtcatcccaaatatgctcctggctttctttattcagcagcaccttgcaggctttgatgctatgttcaacaatatcaacctgcttgctctgccagttagcgacctggcttacgaggccagcaatcctctcctgttcctttttgaattttttagtgcaatcttcattgcgcctatttcagaggagctcttctttaggggcatcttgttcaataggcttaagattagaaaaggtgtgatctttggagtggtggtttcctcgatcatctttggattgtgccatttcaactaccccgaccacttggcccacatcatttacacttgcctgttcggaatgtgcttatgtattctctacctgcgcacagacaacctactgataaacatgtttgcccacttcctctataatctattgagttatgtgatagtttacacgcccattggggatctcttcttaggcggcccctttatggatttcactgtcatagtgctgctgtttagcatcgtgtttgtgccggcgtacatcttttacttctctatcaagctgaaatga

SEQ ID NO: 2448 - DNA, 804 bp, synthetic construct
  source 1..804: mol_type = other DNA
atggactttaatgtgacagacttcaatgtgcggctgagaaccatcaagctgcgggagttactggtgggaattgtcatcgcgtttatcctgtccatcgccctcctgatcatatttccggttatggatagttacgatgacttggcactcatggtgttcgtattcttcctgttcattttcttcctttacgccctgaaagggacctctggtctaaaacaggacttcaataagctatttgagagggacaacagccgcgaaattctgtatgtgctcattatcaacatgttgtttgctttccttgtcctcgctatttttagcaccttcgacgcctacctgactctggcggattcggagtgggtgagcatcctggactttactcccactgctatcgatcccgccgtgttcctattcgagagcttcacgagcatcataatcgctccaattctggaggaactcgtctttaggggcgtgttattcaaccgactgaagattcgcaccggcattctccccgccatgcttatctcttcattcctttttgccataggtcacgaatttggcgggatgacaagtgcatttgtttttggaatgtgtatgtgcgtcctgtatctgaagaccgataacatactgatgggcatgtcagttcatttcctgaacaacctgatctttacagtatgggacctcttcgcattggatgcaatcgtgttccagatgcctgtcctgccattgacgttgctcatttccattatctccggactcttaataatcctctatctttacaaggagatcgggaaactgctggccgaatga

SEQ ID NO: 2449 - DNA, 243 bp, synthetic construct
  source 1..243: mol_type = other DNA
atgaagactataatccgatacctccgccaggaggtgaagatgagccagcaggatctagcaaaaagcgcgggggtcacgagacaaaccattaacgctttggaaaacggacggtacaaccccagccttctgctggcctacaatatcacaaggattctcaataaagccacctatggcgacgacgtggattcctatctgagtatcgaggacgtatttaagttcgatgacgacgaaatctcagtgtga

SEQ ID NO: 2450 - DNA, 630 bp, synthetic construct
  source 1..630: mol_type = other DNA
atgttcctcatttacggctactcctacagggtgacaaaagtcagcgtggaggggatgatcaacggtaacgatcccctgccagaatttgatgacgtgatcggcatgtttgttgacggcataaaagtgtgcctggtctatctgggatatgcgctggttccgattataatattcatggtctttgccttagtctcgagcgctattggaggatacggcgagagtgtgttgatggccttcggctcaattattacgcttctcgccatcatcggcgcttatgtgatgagcatgtttggagttgcaaatatggctaattacgacggcgcactggccaaggcatttgacattaaggagatcatcgaaatcatccagtccgtcggcgtggtacggagcgtaggggcctacattggtctggcgatcatctgtaccgccatctttatgatcgtggggctactgctcttcttcgtgttcggattctttggaataatcactggtaccctagggtcctatacagccgccgggggcatattcatcgcagggattatcctgggttacttcctgatgctcttcatcgtgagtccttacattctgattatgcagtcacgcgtggctgggttgctctataaccttcactga

SEQ ID NO: 2451 - DNA, 849 bp, synthetic construct
  source 1..849: mol_type = other DNA
atggcgagcatcacagacattatcaaggaagggctgaaatacccgttcaacgacacgaggaaggtcctgattttagggctaatattcctcatctcggggctcatttcccttttcactcagtacgtggtgtatgattccatgaccctgatggtcaatgcctccccctatacctccgtgaatggcatgtttgcaagcattcctccatctaactcagcgctgattttcctgtcatggatcgtaacattcattctcttccttttcacgtcaggctacatctacgatgttattaaatatgccatcgacgggcggtacgaactgcccgactttggcaatatatttgccatcctcaaaaacggactgcgcacactcatcgtgggcatcgtgtactccatcgtgccagccctgatcttcatccttggactcatgctgatggtgaacgaggctagcggtgaggctgtaaacatgtttggtctcatattgctttttgtgtcatttatcgtcgccatattcatttacctgatcgaagtcattgccatctcccacatggttgaaaacgacagtttaaagtctgcattccagtttagtgagatctttgatataatttcgaatatgggctggggacgatttatcggagccctgatctttgctttcatcgtcattgcaatcatttccatgttcttcggaatgatcttcggggccataagcaccgggattggcatcttgttcgatagcgcactggtgagcactctagttagttctatattgaccggtttgctgctgagcccctatatcagcatcgcgctgggcagaatgtttggcagcgtgtataaggaggctattagtgagtga

SEQ ID NO: 2452 - DNA, 798 bp, synthetic construct
  source 1..798: mol_type = other DNA
atgaagtttaacagccgggttctggggatactgtctctcctgttcgtgctgacgattctcgtgagcagtgtgggggcagccgagtacaagctcaccgagaaagatttcaataacacctttaaaataggtatcccagaaggaacagacttccagcaggatgcatattcaaatattgcggccgggaatgtcaactttgccatgaaggtgttcgacaacatcggaaataatactgacggcgtggtctctgtattgtactttaaggactcgtcctctgattcaaatctgatttccgatgtgatcgatgacctgaacagcagtggggaagtggtcgaggagaacgacaactacatcatcgtgaagaacaactacgacgctgaatggaacgctccggatgccagcaccagctcagacgagttctggagcttcatcggcgatttatgctccagcggcagcgacatgaacttcggagatggtgacagtaatatccacctttccgatgatggagttaacattgaggatagcagtgcaaacgtctcattttccaaaaacggaatctacgtttctgactccgatggccagaatgtgtccataagttccgaaggcgtaaaggtctcgggcgggagctccaacgagacagtggacgtaaatgctgatgtggactcagtcatgaacagttattctgaatttgccgactattcgctgtgccttaagaatcccaaaaaggaccagttgattatcatttgtggcaatgacctcgacctactgaagcaaatggccgacagcgcgagcttcaaatga

SEQ ID NO: 2453 - DNA, 384 bp, synthetic construct
  source 1..384: mol_type = other DNA
atgtccaacaactacctgcccaaaaagctcgaaattaaatatagccaccagatcgacgggaccaagtcaatcaagctcttgaatggcacgctgctggtgaacaacccgaacccagaacttatagatatcaatcagatcgacgaggaaaagtggattgagttttgggatgcagtggagaagatcgggctatgggaccttgaggaggtctatgagagctgcacactggatggtggattcacctggaagatcgaaatcgaatatggcaatcgggagattaacagctacggagccaatatggagcctaaaataattatgggcgacaaggtatactcggtgttagaagagctgtacaaatccattgaggaactcatcagtctggactga

SEQ ID NO: 2454 - DNA, 777 bp, synthetic construct
  source 1..777: mol_type = other DNA
atgatctttgacttccacctggggagtctctttttcaaatttatcctgtaccttgtgatgttgctattctttatttataaattcaactctatctccaagaagaacagcagctcaaatttcaattataatagcagttcgaatagggattctaacagcgtgaacaacagcagcctgtcagatgcctttcggaacgatctgaacagcatattcaaggtgtcgaagatctaccacattctattcatcgttttagcaaacatactatttgtgtccgcaatatacttcgtactgagttacctgggatcaatctccattattcagtttaacgccccgctgttcggtgacttcaccggtctcggcttcgacgtaacgctcctttaccttataaccgtggttatcctcagcccaattatcgaagagttcctcttccggggcatcttcttacgaaggttcaatctggagctcgacaacctgacacttgctatcctgatctcctcagtcctttttggaatttgtcataactttggcggaatattgggcgccattctctttggcatctgcgtgtccatcctgtatgtcaagtcccgcaacgtgctggtccccatcttggcgcatttcatcaacaatctcatctccttcctgctggccttgattgggatagagaatttcattcacgggaatagcattgtcattgctctgatcatcatcctggccatcattagtaattttgtgctctttagagcgattgtgctggagtggcctaaatcttttaaagaatga

SEQ ID NO: 2455 - DNA, 606 bp, synthetic construct
  source 1..606: mol_type = other DNA
atgttaaaatttaccggtaaggaaatcagggacctgatcatcagtttcattgtgattgcgttggccttcagtattctgtactcgaaccgcgatttcaacggaattttattcatatttcccatcgtggcaataggggtaggtgccggattcatctttcacgaactggggcataagttcgcagcgatgcactacggatattgggctgagtaccagctgtggcccaccggccttgtcattgccttggtaagctcctttttcggattcatctttgcagctccaggcgccgttgtcatctacagccaaggcatggagaagtccgagaatgggctggtgtccctggctgggcctgccgtcaacatcgtgctgggcctaatctttctcgggattctcaattcactgggtcaggtgacggactacaacggctatatcatcgctctcatttgcctgctcggcactcggattaacttcttcctcgccacatttaacctgctgcccatcccgccactcgacggatcaaaagtgcttagctggaatgccctagtttggatagtggcattcgccatcagcgtgatattgcttgtggtctatggcgggtacctgggctga

SEQ ID NO: 2456 - DNA, 162 bp, synthetic construct
  source 1..162: mol_type = other DNA
atggccaagaaagatgacaaatatagcatgccgatgtccggggcaggactggtccggtactttgacgacgagagtgtgggccccaagatcgctccagaatacgtgattgccctaaccgtaatcctcggcatcttctgcttcattctgaggtacagcatatga

SEQ ID NO: 2457 - DNA, 3564 bp, synthetic construct
  source 1..3564: mol_type = other DNA
atggattctggcatggattacttcgagagactggaaagtgaaacacagcggctctacgagatagccaatgaggccagatctaagggttttgatgtcgagctggaaacagagattccagtggcaaaggacttggccgagcgggtggaagggctcgtcggtcctaaaggcatcgcccgacggattaaagagctcgaggctactggcatctctcgggaggaggtggcctttgagatcgccgctgagattgcctcccaggagtctagcgaaactggagctaagctggaagctgagaagcaggcctttgccgatcagggcctgcgtaccgcacttgcgatcatcactgaaggggtggtggctgcgccgctggaagggatttccggtgtcaagattaaaagtaactcagatggcaccaagtatgtggcagtctactttgccggacccatccgtagtgcaggaggtaccgcagcagcgctctccgtgctccttggtgataagatacgggtagcgactgggctggaccgcttcaagcccaccgacgatgagattgaaagatatgtggaagaggtcgagctgtacgagtcggaagtcaccaaccttcaatactcgccgacgccagaggaagtaaggtttgccgcacgcagcattcctgtggaagtcagcggggagcctaccgaccagattgaggtttcccacagggacctgccccgggtcgagaccaataacattaggggaggagccctgctggcgatggtggaaggggttattcagaagtccaagaaaatcctcaaaatctccaaaaaactcaacctggatagctgggagtttctggccgagtacgctaaaggtatcggctcatctcaagaggaggaaaagagtgaggaggaaaccgaagagatcgtggaggaaatcgacgataatattatcgataaggacgaactgtttgcccattcaaaatacgcccacgatatcatcggaggacgacccgttctgggatacccctcggaaaagggcgggttcagactacgctatggacgctcgcgcaacactggcctggctacaatgggggtgcatccggccactatggaactactggaatttttggctgtcggaacgcaactgaagatagagaggcctgggaagggtaactgtgtggtgccagtggattccattgaggggcctacagtaaaattaaagtcgggtgaggttcgcagattagattccatagcggatgcaagggaagtcaagggcaaagtggtggaaatactctttctgggagacatgcttgttgctttcggcgaatttctgagaaacaaccagcctatgttaggcagctgctggtgtgaggagtggtggatcgagtgcatacgaaacagcgacaaatacaaatcattctccaatgacagcgagctttatgactatcttatagagcgcggaatcgacttgagcatcgaacatttcatctcacacgaagactctagcaagtatatggactttgatagggaaagcttcaatctgaacttccttgagaaaaagcggtatacggccgaagaggcctttagaatcagctacgactttagtgttccactgcaccccgaatacacatactactataacgacatctcccgtgaggacctggcgtacctgaatgagtggctagacactaaaagggattatctgagtacggactacttgaatggagaggacttgattcttgatctggctcctcagaagagaatccttgagatattgggcttggtgcataagctgatcgataaaaaggtcgtcattgatagggatcatgcttatgccctaatgaaaaccgtgggaaacggctctgcactggaggacaatgatggggacctgagcagcgaagtgaaaaccatagattactccaagtacctggacgatgaccactataagagcaaggtggttgacatcctcaacgaaaacatcgactttgagatcatggataaggcgccatgctatatcggcacaagggtcggccggcctgagaagtctaaggaaaggatgatgcgccccgccccgcacgtcttgttcccaattggcaacaatggcggaagcagacggctcgtggccgaggccgccaaaaagagaaaaatcaacgtggagatcgcccgacgccaatgcacaaacccggattgtgggctcagctcattcatggctatttgccctcactgcggcgccccaactgaaatcaccaaagccagtcagaaggacatcaacctgtccaccatgctctcaaaggctagcaataacatcggggtgcggaaggtggatgaggtgaagggtgtcattgggctcattagcgaggataagctcccagaacccctcgagaaagggattcttcgggcgaaaaatggggtcttcaccttcaaggaaggaaccattcgtcatgactcgacagacctgcctctgacccacttcattccaagggagatcggcgttactgtgccaaaattaatcgagatgggctatacgcatgactgctacggccaggaaatcgtgagcgacgaccagataattgagctgaaggtgcaggatattgtagtgtctgacaattgtggcgattacctggtcggtgtagctaatttcgtggacgacctactcgagaagtattacggcatggaccggttctataatgtggaggacaaatatgacttgatcggccacctcatcgcagggctcgcaccccacacatcagcaggggtgttgggccggattgtcggattcactaaggcactgggctgttacgcccacccctacttccacagcgctaaacgacgcaactgcgacagtgacgaagactctgtcctactgcttctcgatgccctaatcaacttctccaaatcatacctgcccagtacccggggtggcagtatggatgctcccctggttctgtccacacggatagacccagaggagatcgacgacgagtcacacaacctggacatatttgaaagattcccactggggttctaccagaaaagccaggagcctttaaagcccgcagatatgctggaatttgttgataacgtggagatgcatcttggaacggacagacagtatcacgacctgatgttcagccaccacaccagtaacattcacgctgggcctaaggtgtgcctgtacaagcgcttaggctccatgaaagaaaaggtggaggcccaaattcatttggcagagctcatccgtgccgtagaccagagaggagttgtagagggtgttctgagctcccacttcctgccggacatcatgggaaatagcagggctttctccaagcagaaggtccgatgccccaagtgtggcgccaagtaccgacgcatgcccttgacaggcaagtgcaagtgtggaggggaccttatcctcagcgtttccaaggggagcgtggtgaaatacctggaaatctcccagaatctcgtaaacaggtatcccgtgtcacattacttggagcaacgcctcgagattcaggagtttggtatcaatagtctctttgaaagtgataaatccaagcagagctctctggatgtgttcttcggcaaatga

SEQ ID NO: 2458 - DNA, 2343 bp, synthetic construct
  source 1..2343: mol_type = other DNA
atgggtctgaaaataaatgagggtgtgaaagtggaaaatgtgtataatgtagaaaatgatattaggaaagctaaaatcaccgttaagaaaaacaacggggtctgcgaagctttcagttatgagaaactgctgaagagcttagtgatggttgaggccccctattttgagagtgaaaagatcgtgtcaacggttgtggaaaacctgtacgacggtatcactactaaagaaatcaagaagatcgtgtacgaatgcctggaggaggtggactcagaggccgctaacaagtatctcgccaagactaccttgaaggtccgttccagtcgcgataagatagaaccattcgacatggctaagattgcaagcacacttgtggaggagaccggggccagccaggagacggcttttgaaatcgcctctgaggtctggaaagagctgaaaaagctcaatgtggagtacctcacggctcccatgattagggagatcgtcaacacaaagcttgtagagtatgggctggaggaccttcgcagccggtacacccggttaggcatccccgtttataacattacaagtttgattgaaaatgggaaccgcgacaatgccaacatgatgcataacccggaatccattcacaaatatgtggcggatgaggccctaaagcagtatgctctcttgcatctactcccatcacacctggccgatgcacacatgtccggtgacattcacatccacgatctcgagtttttcgctggacgacccctgaactgtctccaacacgatataagggccttcatcaaatacggccttaaagtggacgggacaggtgaccacacgtctgtggccgcacctccttcccatatggagaccttgatgaaccacactggcgagatcatgctggcagctcagcagaatatgtcggggggccaagctatgagcctgtggaacgtgtttgtcgccccatttgccagaggacgaacctacgaagaggttaagcaatccattcaaatgcttgtctacaacctgaacatggcttatgctgccagaggatcgcaggttccattcaccagcatgcagttggaatttggcgtgccaaatttcctgaaggacgtcactgcctacggccctaagggccaggtcgtagggacttacgctgactttgaagatgagaccaggatgattcagagggccttcactgagatcctgctggagggcgattcagagggcaagccccacctattcccaaatacgatctacacactgcgggaagagaccttgaatggggactatgatgatgacatgctcctggtgcacgagcttagcgcaaagtacggaagctcctactttgtgaatatgttgcccgactacagagggcaaatggcgaactatatgggctgccgcacctgtctccaggacacatggaccggggactgggaacaggactgtctgcgtacgggtaacctcgcctatgtgacactgaacatgcctaggatcgggtaccaaagcaatgatgaggatgatgtgttcgaatacttagacaattatatggacctggccgtcgagacccttatgattagaagaaagcagggcctgaactgcttgaataactttgacatcctaccgttcctggaccaggaggttgacggagaaacatattaccgcatccagaacagtaccctctcctttggcttctgcggactgaacgaaatgctcctggcactgttcgatgagggcatagagaacccggatgcgaacaagttcggcatcaaatgtctggaatacatcaatgcaagggccaaagcactccaggaggaaaccggactcagatggtctgtgctccagacccccgccgaatctacagcctaccggtttgcaaccttagataaggagcagttcggagataaggccatcctgcagggtgacaatggcgctaactactacactaactcctcacatgtccctgtcaactctgacattgcgtttgccgacaagatcaagatcgagggccagtaccataagctaacacccggaggacacatcttccatgcattcatgggggagtcctactctgatcctgaggcattgatgagcctgaccaataagattgcccgaaaatccgacataggattctgggcctacagttcagcgttcagtttctgcctgaactgtaagacacttatgaaaggactgagcaacaaatgccccagctgcggcgaatcggccgatgtggaatggtatgaccgcataactgggtacgtacagcaggtgggccatgcgaaaagcgcgaacggcggatggaatgcaggtaagcggcaggaactgattgaccggcggcgatttgagcagtga

SEQ ID NO: 2459 - DNA, 1587 bp, synthetic construct
  source 1..1587: mol_type = other DNA
atgaaacactggattgagcgcatcgccgatgagttgaatgagatggacgtggagaaacatgtcatcgcaagcgggacatcgatctcaggctctatccacataggcaactcctgcgatgtgttcatcgccaacgccataggaaaggccctaagagagctgggcaacgatgccgaaacaatttggatcgccgacgatcatgacccgcttcggaaggtgccttatccattgcccgagtcctatgaccagtacctgggtatgccctactccatgataccctgtcccgagggatgctgcaagaactttgtcgagcactttgagaaaccattattcaatgtgctggatgattacggcatagagatcattcccaaatcgggtttcgagatgtataaagatgggagctaccttgaatcgatccggatctccctggaaaagcacaatgagatcaaggccatctttgaccagtaccgtcgcgagcctttggcagaccactggttgccttacaaccctatctgtgacgaatgcggacgagtcaacaccactgaagcctacgactacgacggagacatcattaagtataggtgtgaatgtggccacgagggggagatggatataaaatcaggcaatggtaagctgacctggcgggttgaatgggcagcaagatggaagatctttggaaccacgtgcgaaccatttggaaaggaccacgccgcagctggaggctcctacgatgtaagtagcgtgatatcagaggagatcttcgactaccctgctccttatccagtgccatacgagtggatcaccctggacggtgaagcgatgagtaagtcccatggggtattcttcacgcccgagcagtggctagagatcggccccgctgaaagcctgaactactacctcttccgcagcaaacccatgaaatctaaagacttttcacccaagatgccgtggctggactttatggacacttttgatcgggtggaaaaggtgttctacggcgaggaggaagccccatcagaaaaagagggcagaaaattcaagagcatttacaagatggcgcagatcaatccagactcccccctgcctttccgacctccattcaggttcctggtcaacgcgtatcagattgtcggggagaaggacctggagaagatttttgccattgttaagaagaacagtcaactcacaaaaagcttcgcagataaggagtttgaagacctcagcgaactggaagtgtctcaatttagtgagcgcgtggataatgtaatcgcttggctcgagaaatatgcgccgaaatttgtcaagttccaggtgcagtatgattccattcccaacctcccgcttcccgacgatcagattgccttcctaaaggacctggcagacctcatggaggagaaggagttctccagtgctgaagaactccacgatagcatgtatgagattctggaaagccatggcctcaaacctcagaaggccttccaagctatctataaaatgattcttgggcagaagcaggggccaagggccgctagtttcctgctgtctctggataaggactttgtggttaagaggttaagacaggaagcttga

SEQ ID NO: 2460 - DNA, 861 bp, synthetic construct
  source 1..861: mol_type = other DNA
atggtgatcttcatttcagaggaggaaatagaaactcttaaaaagcagctcgctgataaggacacaaaactcaaaaaccaggcaagcgagctgaatcacctgaccaatgaggtgattccggagctcaaaaaggacaacaagaagctaaaagcgctgaaggaggagctgacagacgccttggagacaagtaccaaaaagtacttcgatcaattggaaatcaacgcagacctgagtgaatccgtggccaagaagggcgcgggactacagctggctaaagtacgactgaacgagatcgaaaagctcgttgtggagttggagacggcccgcctggaagaggaggagaagaaagccgctattccaacagaggagacggacgaagatgaagtcaccaagatttatcaggagaaagaggaggccatagaacagctgcattccgaaatcgataagctggagaatgaaatcaaagagaaggacgcagagattgaccggaaggaatccctcatcaaaagcaaggattctaagatcaaggagaaaaatgatgagatcaaggacctgaatgacaacgtcatcccctctcttaaggccgaagtggcgtccaagaatgcagaagtgaaagccacccaggaagaggctcagaaagaaatcgatggggtcggaggcaagattgccaaactcgaagccgagataaagaacctgaatgagagcttagacaaaaagaagagggactacgatagattatacaccgaactgaacgctaaggacaagactatcaactcgcttaagaacaaaaaccagcaactgactgagcaactcgaagaggagagcagcaaagggttcttttcaaagcttaccggccggtga

SEQ ID NO: 2461 - DNA, 240 bp, synthetic construct
  source 1..240: mol_type = other DNA
atgagttttgggatggtgtttttcagctgcctggggatctgcctcttctgcaatgagttctggtatggtttcttcctcgtggtgtggggattcgtgtgttttgtcatgtcctttggcatggtgttcttctcatgtctggggatatgcctgttttgtaacgaattttggtacggcttctttcttgtcgtgtggggattcgtttgcttcgtaatgagctttggcatggtcctagttaactga

SEQ ID NO: 2462 - DNA, 2364 bp, synthetic construct
  source 1..2364: mol_type = other DNA
ttgtcaaatattgagacggacgattcatttattagtgaaaattcaatctcgagcgatattaatgataattccttaattaatgagtttaccgcctcaaatcaaatcaacgacaatatcgccattaacgatggcctgagcaaaggcgacaagagccagctgtctgagtccaaatcgatttacgtatccactaacggcagtgacgattccggagacgggagtgagaagagcccataccagagcatcaaacacgccgtgtccaaggcagatgacgattcaatcatatacctctccagcggaacgtacaacggcgagaataaccagaacataagcatcggaaagtcgttatccatctatggagaagattccacgataatcgacggtgaagacaaggcacagctattcatcatgaatagtagcgccaaactgagcctgaacggactgattctcacaaatgcgtataaggacggcaacctcagtgactatggtggggccatcatcaatgagggcggacaactgaccatcatcaactctacaatcaagaactcttatggcaactactatgggggggccatctacaacaacttggggcggctgaccatcatcaactccagtattttgaacaacagcgccattcagtatgggggcgccatctatacactgggggtgaccaacatccagaactcagtttttgagaaaaacaccctcacagctgaaaaaggtgtgggggcctcgatagccgccggggggactatcaccctcaacaataccgatttcctcaataatcatgcgatatactccgcagccgcgcttctcagcttgggcaacgcaacaatcaacaactgcagtttcatcaaccagaccactaactatacagccggggccataagcaatcacggcaacatgtttataaacaacagccttttcttcaactgccgagttcggttctatgccggagcaatcctggcgcctcccagcggccaccatgtcgtaactgaggtctacaataccatctttgactataacaatgccggaaaccacggggctgtgactaacaacttccaggacgcagagattacaatgataaactgtgcgatcaccaataactacatccagaagaacgttttctacggtgatattgccctggatgacaacgctaccgtccaatactgctggtggggccaaaacaacattagctcttactactattccccccactccaataatgaggaccctggtcaaattaacgcttcaagatggctaatgatgacgttcacaagcagcaatggaaacatctcagctgatgaggtgaacacactcactgtaagcattaagcagtactttgacaacgataccaaagaaatatacgaatataacgaggatatcaacctccctcttaccgtgaagttcttcgacgacaataaaaagaccattgccacaaaaacgctgaagaatggtaccgcatcctacaattacatccccgtgaagggtgtcaatgctgtctatgcgcaaatcaccaatgaaatcattgaaattccagttgtgcagaaaaaggagagtaatcttagcaccagcaatctgaccaaatactacaaaaatgagagtcagctggaggctaagctgaccgatggcgacaacaatccgctgtccaataagacgatcagcatcgaacttctgggcaaaacgtacaataagacaaccaacgagaacggcatcgttaagcagaacatcgggctgaagcccggccagtacactgctaacattattttcaaggacccagaatacaagaacaaaaacattacagtgcagatcactgtcttaaagaactcgactagcataagcgctaaaaacctggtgaaatactataagaacagctcccagctcacggtgaagctgctggacaataataagaaagccatgaagtccaaaaaggtcaaattcaccattggtaagaacacgtacaccaggacaacaaatgccaatggagccgctactttcaacatcaatctaaaggtgggcacctataacgtaaaggtgtcatttggcggagatgactactacaagggatcttcaaagacagtcaaggtgactgttaagaccacaaagatgcaggcaaagtctacgaagatccgcaaaaactctaattttgtggcaacatttaaggacgctaatggcaaggtcataaagaacactaaggtgaaattcactttgaataaaaagacctataccaaaaccaccaatagcaaaggacaggctacactgaaggtgagtgtgaaacttggcagctatacaattaaaagtcagtacgcatccactaagacctatggggccactgtctttaatactaagattaaagtggtgaaatga

SEQ ID NO: 2463 - DNA, 918 bp, synthetic construct
  source 1..918: mol_type = other DNA
ttgactattaaaaaagacttactagcgatcggccatacggcacttgattatataatcaccgtcgacgaatttccaaaggccaacaactccgcccccatgaagaccatgctcaacctgaatgggggggccgcggccaatgtggccatgattggcgccagcctgggactcaaatctggactcgtatccgctgtcgggaaggagtttattgactcgcactaccataaagagatgacccggctgggtgtggacactgaggcgatgatcatctcagagacggaaaacacacctactgccttcgtgatgacaaataaaaatcaggaccagattagctatttctactggggagcaggtaaggatttccacgatagtgaagtaccacgagagaagataaaggagtttaaggcagtgcacctggcaacgggcgatccccacttcaactgcaaatcgggcatcgtggccaaggaagaggagcgcctggtgagtttcgatcccggtcaggacctgggcatgtacagtccaaaaaagctcaaggaagtcatcagcaattcaaacatcctttttggcaaccatcacgaaatcaaacggattcaagagtcattggctgtggacattaacggtctgatggagctggggccggaaattgttctcaccacctgcgggaaggaaggaagcataatctacagcctggatgagggcaaattcgagatcgactccatctacaggcctgcagttgatcctaccggggctggagactcctataaggccggcttcctatcccagtttatcaatggcaagacactggaggagagtgctaagttcgcttctagcgtcagctcctttgtggtggagaagcagggatgtcaaacaaacatgcccagctacgaagacgcctataacagaatgatggacttctactga

SEQ ID NO: 2464 - DNA, 1299 bp, synthetic construct
  source 1..1299: mol_type = other DNA
atgacacagataagcgatgcaaaaaagggcatattaacggaagagatgaaacacgtggccaaaatcgaaaacgtgtcagaagactttattctgagatccgtggcaaacggtactatcgtcattccaagcaatgtccaccgcgacatcgaagcatcagggatcggggctggcctgagaacaaaggtcaacgcaactgtgggaacgagtacagacatcgttaactttgatgaggaagtgctgaaggcacagatcgccatcgaccatggggcagactgccttatggaattaagtatcggcggagacttggatgtgatacgccgccgagttcttgacatgtcccccttgcccgtgggaagcgttcctgtctatcaggccgctatcgagagcatcagagagcatggctctgtcatttacatggatgaggatgatctattcggcgccattgagaagcaggccaaagacgggatcgactttatggctgtgcacagcagtatcaacattgagaccctgacccgtctcaagcggcagggccgggtaacgggtctcgtaagccggggaggatcattcatgtccggttggattgttgagaatgagaaggaaaatccactgtatgctaactttgattacgttttggaaattgccaaggagcatgatgtggtgctgtccctcgcgaacggtatgagggcggggtccatcgccgacagcactgaccgggctcagatccaggagctgatcatcctgggagagctcattgacaggtcccgggaagctggcgtccagtgtatgatcgagggaccaggtcacattcccatcaatgagataccaaccaatgtgatgattcaaaagaagatgtgctcaaacgcccccttctacatgctgggccccatcgtgtgtgatgtggccccaggatacgaccacattgtctctgcaatcggggcagcctcgagtgccaaggccggcgccgacttcatctgttacgtaacccctgctgagcacctggcgctaccgtccccggaagatgtgaaggagggcgtgattgccacccgaataggcgcctatgcaggggacctcgctagcgggcagatagatggcagccaagacctggccatggctgaagccaggaaaaaactcgattgggaggcgcagtatgagtgcgctatgttccccggcgcggccagagccaaacgcgaccagaggcctcctgaagaggaggacacctgtacaatgtgcgggaactactgcgctgtcaagatcgtgaatcaatggctggaccagtctgattcggatcttattaaatga

SEQ ID NO: 2465 - DNA, 1062 bp, synthetic construct
  source 1..1062: mol_type = other DNA
ctcgacgcattgcgggccttagcgatcatctgcgtaattgccatacacgcttacgcatgctcccgcaatttcgtgattagcgagttggtggggaacctgccttccctgaactggattatcattcagttttccggcaatactttcagaataggagtagacctgttcctgatgctctcaggggctctgtctctgggaagggattggaagatgaaggacttctttgctcatcgcttcccccggatagtttatccatttctcttctggagcatcctcctcggaaccatctttcttctactgtcctattatgatagttttaatgtgatcagctcctttgatctggtgagcattgccaattacttctacggagtctttatgggcattatcgacttcgcgaagccctattggtacttctggatgattttggggatctacctgataatgcctgtcttcaacaaatggattctgcactctgacctcgatgaccttctttatttcctattcttctggcttattacgtgcctgtttgactatacattaggcgtggagtttcccatcagactgtcatactttaccagtccgattggtctggtggtcctgggctactatttgcgatataccaggagaatcatcctaaacaaccagtattttgcattgttcttgattatcttcagcagcctactgatgcttgtcctttcggccatctattcgacagacactcatttctacaactttaacatctactccattttagtcagcatggaagttatcggagtgttcctgctgttcaagaacttctacaagtttaatctgaacatcgggttcttctcacggccagatgggttcttcaataaatcagtttacgccctcgcccgatacagttacggcatatttctgatccacaatgcctttatctgtgtgctggtgcactacctgggcaacaccggcatccccccagtcctctacatgatcatactgtttgtggtgtctctgctctgtagcgtgatcgtcatggctgtactcagtcgcattccttacctcaacagggtgatcggtgttaaatga

SEQ ID NO: 2466 - DNA, 930 bp, synthetic construct
  source 1..930: mol_type = other DNA
atgagggatatcatgctcgagaacactgataatgagaagggcaaagccatcatcgaaccggaaattggaatcaccatcaatgggatatcctttaatcacaaactattcgaaaccctggaatccctctcacgaacatactcgcagagaaaaaccgctaaggaactcaaaattgcccattctgtgttgaaccggcgtatcaagaacgctgaggacaaacttggtgaaaagctcgtggttacgattggttcaggctcggagttaagcccaaaaggctacgagttgcttaatgcgtaccacaagtacaagaatcgcctggaggaccgcgaggagatcgtcattgccgggggccacatcataacgggcctgctgcaggcaatcagctacgacctgcccttcaagacactcatctacagcagtgacgatgagagcgcttatgagcttgcaaagtctaaccagatcgatatcctggccttagacgatccattgctcgcctttgagaacgacctgaacttcacagcaatagcctacgaccatctggtcctgatctcccccaaaaaggagaagcctattgaaaagatacgggacctgagcgatttggagtttatcggagtgaagggcagcgcccaaaggctagcttggagtactctcaaacaggagaacattccattcaacattgttaaagaggtcaaatcccagttcgatgcatttaagattgtgaagaactcagacgagtattacactttcctgaatgcgtcctatttcaacgggaatgaaatactgaagaacgagacccggcacgtaatcagcctggtgcagtgcaacgatgagaaggaagacatttataatctgatggaatatctgcttatggacgggcagagtcagatcggagaacaaggatttgtgcccatgaaaccttggaagaccagatga

SEQ ID NO: 2467 - DNA, 591 bp, synthetic construct
  source 1..591: mol_type = other DNA
atggaatacatgaaggacgccatcgaggccattctggataacatacgcgacgccgaggactacctggtggaggaggatgtggccacatttatcgacatcataacctcatgcgagaatattttcgtcactggcgcgggacggtccggtctcgccgctaaggcattcgccatgagactgatgcatctcgggctctccagctacgtggtcggggagaccattagtccagctatcaatgctgatgactgtattctggctatctctggcagcggcgagaccaacaccatcgtgactgcagcgaaaatcagcaaaaaccgcggggccaaggtgctagccctgacaagttaccccgaaagcaccttaggtcagttggcagattgcgttattctagtaaaagggaggacaaaggtggaagcggacgacgaaaactatctgaagcggcagatcaagggaaattatacgtccctgacaccgctcggcactgcatttgagctgacctcactggttttcctcgatggcatggtgtcggaacttatgaacgccatgggaaagacggaagctgacttgaaacttcgacacacggtcctggagtga

SEQ ID NO: 2468 - DNA, 1107 bp, synthetic construct
  source 1..1107: mol_type = other DNA
atggaaaagaaaacgaccattatactcgtgattctaatcgctctgatcgcctgcggggtgggaatcacccttttcgcttcaccatcaagtatctcgacagatgggaacaccacaatcactgatatggcaaatcgaactgtcaatatctccagtagtgttgatagggtggtggccacaagcccacctatgaccaccatcgtttatatgctggcacccgagaaactggtgggcgtcaacttccagtggaccgatgaggaactcaaatacgtcccggatcagtacaaggataaattccccgtgatcggtggatggttcggaagtcaggacgggaactacgaagagtttatcgcctctgagccgaacttggtgattgagggtattgacgaaggaatgggtgtggacctatcaactgttgaagaaagacaggagaagttcggttcactgcctgtcgtggccgtaactgacaacacaaatgtcacaaagatcgacaacacgatagagttccttggcaagctgctgggggccgaagataaggcaaatgagttaatcgcatttaatgacaagtatttgagccaagtgcaatccaccgcaagcagcattcctgactccgagaagaaatccgtttactacgcctctggggaggatggcctctccacctacgccagtggcgcctcacatgggcagctgatttcgcttgtgggaggcaaaaacgtagccgacactgaagttaaggatagcggcagtgaactgacggtatccattgagcaggtaatgagctggaaccccgatgtgatcatagccacagacgaggacttttacaacaaggtgtacaatgactccaaatgggctagcgtcaaggcggtgaaggaccaccgggtctacctgagcccacagtcgcccttcaagtggtttgaccgcccacccggcgctaacatcattatcggagtgccctggaccgcgaaggtgatttatcctgacaaatattccaatatagacatggtcggcgcgacgaaagagttttatagcaacttctaccactatggcctgagcgacgagcaggctaaagagatcctcaccagctccggcctcaaggggtctgatttgtga

SEQ ID NO: 2469 - DNA, 1026 bp, synthetic construct
  source 1..1026: mol_type = other DNA
atgagtgaaaactcttcctttagcgtggacaatctggttatttatctgctgctaatagcattgccaatcttccttttctttgtatcattcatgctggggaggtaccctgtggcccccatagatgtgatcaagaccattctatccccgatcttcccctctcttgccgtgtctcctgagctgaatagcatcgtctttaccatcaggctgccccggataatcgcggctctgctggtgggcgctgccctcagcatagctggagcgtcattccagggaatatttaaaaacccgcttgtctcgcccgatctgttaggagtgtctatgggcgcagggtttggtgcggccattgccatcttagctaacgctggtaacgcccttatccagctgagtgcctttgtctttggcctgatcgcagtgttcattaccttttccatcagcaagacatacaaggccggaggaatcctgctcctggtgctctcgggcactgctgtcagcgccttcttcaatgcactcatttcaggagccaaattcatggcagacccttatgataaattgcctcagattacctactggcttatgggcagtctctctgccgtgaattttgataagctggctatgataatcatcccattggtgctgggcatcattgtcgtgatgatcttaagatggcatttgaacgtcctctccatgggcgacgaggaagcccaaagcttgggtctgaacccatcccgcctccgcctgatcgttattattgcctgcacgctggtaacaagcgctgcggtttccatcagtgggatcatcgggtggatcgggctggttgtgcctcacatgacgcggatcattgtgggtccagaccacaagatcctgattcccgcctccctcagcatcggggcaagtttcctactcctcatcgacaatatttccagaactttcatatcaatcgagattccaattgggattctgacagcaatcattggcgtacccctcttcctttacttgctgcgaaaaggctatagcgagtggaactga

SEQ ID NO: 2470 - DNA, 831 bp, synthetic construct
  source 1..831: mol_type = other DNA
atgacaaaactggtagaggttaaagatgtgagtttttcctatgacaaggactctccgattgtctttgagaatattaatttctcaattgagaagggggatgtgctgtgtattctcgggccaaatggaactggcaaaaccacgctgataaagacattgaacgggctgcacaaggtcaattccggggagatcctcctaaacggaactaacatcaaggagctgtcattcaacgacatcgccaaacttgtggggtatattcctcagggccatattccctcgtttcctttcaaagtgttcgacgtggtcttgatgggccggtctccctacatcaacctgacagcttccccacgcgaggaggataaggaaatcgctctcaacgcgcttaagacgcttggtatagaagacctgaaggacaaaagctacaccaacctaagtggcggagaacgacagctggtcttcctcgcacgggtgctggctcaagagcccgacctgttaatcctggacgagccgaccaatcacctggacttcggaaatcagatcaaactcctcgaaatgatcgaacagctgtccgagctaggcctcgccgtcatcatgagcagccattacccagatcacgcctttctggcggccagcaaggtggcaatcatgaaagacaagagctttattgatttcggtacccccgaagatgttttgactgaagagaacctgaataaggcctatggcatagatgtgaagcttgtggagttggaagacgatagaaaaatctgcgttcctttaaggaccaacctcgagctggtaatgagcaactacagcaagaagtacagtaaggactga

SEQ ID NO: 2471 - DNA, 573 bp, synthetic construct
  source 1..573: mol_type = other DNA
atggtcagtgtcgaagactatgaggagcaactggctaaagcgggtgagtttcacggagagatctgtggaggaatagctatcggcacaaaactcgccatgtacgggatggagctgatgggcttcgagctgaacaagcgtcataagaaccttatcgtattcctggaaatcgacaggtgcatgagcgatgccgttcagtcagtcaccaaatgttctatgggcaaaagaagcctgaagcagatgtactacggtaaatttgcagtgactttctataacatggacacaggggaggccattagggtgtccgatgccgatgccaataagcaggagaagaaacgagaaaccagagacgaaatgattgaacggtttaagcgcacgcctgcggaagagctattcaatgtggaaaaggttcacgtagagttgcagccctcccagatgccaggaaagccccacaccagcgtgttctgctcggtctgcggggaaaaggtgactgacggccgccatgtgaaccggggcgggaagccggtgtgtattccatgcgcagagggcgcttattacgagctcatcgatgagtga

SEQ ID NO: 2472 - DNA, 4188 bp, synthetic construct
  source 1..4188: mol_type = other DNA
atgaagaataagagtctgatcctgatttctttactgcttctgattaccatcatcagcataggctctgtggttgcaacggacaatgaggagattaatatggataatatcaacaacattgataataatgaggatatcgctaatattgacaacgtcgataatgtcgataactccaatataaacaatccaactgacatccgtatagacaattccaacctcaatcgcgagactgagctagattcaaacctcaacaaatctaatcagattagggaagacgaactggaacaatccaatgccaaatccaatctcaaatccagtaagctgtcctccacaatcactgtggacggctcagatgagaaccagatgtctaatcctaccattcagagtgctatcgacagtgctaatgctggtgatacaatcatcataaccgggaagtcatatgttcactgccacttcatagttaacaagccactgacaatcataagcgagattggtacatcaatgagcccatgccctagtaatacaaaaggctctggggcacatggcattttctacatcagcccggaagctagcggaacggtcctaaagggattcaatctaacaaacacctacggggactacgacgactatggaatcctcatccgcggagctgagaatgtggagataatcaactgtactatcaacacagtctccgacggggacggaatcaggattgaaaacgccacaaacaccaaaatcgctgactgcttgattaaggactcaaacattggcattaacattacaggtagtagcaagaccaccgtaacaaacaataacataacgaacaacaaggtcacaggggtcaatgtgggaatcaacaacaacgataccacgattcacactaacaacatcacatacaaccagcattctggtatcgacctctactctggtgattatgtatacatcctcaacaactttattggtcacaatcagaactctaaaagctcaagcggcgctgggatatacgtgaactcaaatatcaccaaagtggagatcaaaggcaacttcctcaagcagaacggacagtacggcgtcctcaacgactatcgtgtgagaaacatggatgcatcccggggagctgaaaccctcgagataaacaataacaattactatctgggacataccgaacggatcacctaccatatcgagtactccaagtacgccggaggccccttcacttacgacagcgagaatgacctctacgtctatgtgggggacggaaatggagactgggacattggcaagacggtagtctacctgggatatgcgttctacagagacgagaccgtttgcggctcgactctctttaaagctcccagcaccacttggggaacggaggtctacaagctggagatcagtcccatcagccaggtcaagaagggggtgtactctgtttcgattgtagacgtcaacggcatcgtggcaagcgacatatcgtcgatatacgtgactttttatctgaacaaaaacaataccgatgccgagcctcaaagtggagacatctacaaaactgtcctaatggagaacgggacggctactgttaatctgaccgacaaagagtttaaggagagtggcaataagatcaccgcatgtttccccgggctgtataacgtgtacaccatcaacccctatgcgacctttgatgtaaacgactcagatatccctgggagctatcggaacaccaccatcaacgcgaccgacatgagtctggtgccaaactctggaaacaagattacggccaggttaactgacgagaacgggaatcctgtggctggcgaaagcctgcaattcaagatctctggcatttcgactacctatacaagaactacagacgaaaacggtgaggcgaatctgaaggtaagcctctccaatcctaagacatacacggtcaacatcaactttaaaggcagtgagaactataacaaaagctccaaaacaattaaattaaccgtgaaaaaacagacccccaagatcgaatcgagcaacatagatcttttgcctaaatccggggagaattttactgtgaccctaaaggacgcaaacaacaaggcaatcgccaataaagagataagctttacactgggcaagaagacctacacacgcactactgatgaaaatggtcaagccagtctgaagatcaaccttgccaacactggaaaatacacaatcactaccaaatccgaaaagacatcgcaatacaacgaggtgtcaaagtccaacacaattacaatcaagactggggccaacaaagtgaatatcgagtcctcagataagacctacattccgaaatccggggagaattttacagtcaccttgaaggacgcgaactcgaaccccatagcaagcaaggaaatctcctttaccctgggcaaaaaaacatacacccgaacgaccaatgaaaatggtcaggcgagcctgaagataaacctggccaacacgaagaagtacccaattactacaaagtatgccggagatgacacgtattcctcagctagtgccgagaatacgattacgatcgcgaaggccgctgccgaactgacgacttacaacaggacatatatcaacaaatcaggacagatgttcagcgccaagcttacggataaaaacaatattccattggaaaatgaaaagatcagcttcactatcggcaagaagacctataaccggaccacagatgcagatggcttagcatatctgaccattaatcttgcctacgataagaacatcagcacgaaattcctggggaacgatcagtacaatgccaaaacaaacacgaatagcatcaccatcaccgatgagatagaaaccgcttatatcgataagggccttaagaacgacgagattcagcgcatcatcgatgaaattaagcccaattacgacgttaaattcttgggggacagttacgacgatgtcaacctgaacattaacaaaacccttcttatctacaccgacgttaataccaccctcaatggcaagtcagccagccctgtgttcaatctgcgaggggggaatattggagtgagcttctttaacataaatgtgaactccacagatggggagggttatggcatcatccttaacaataccaaagaagcagtgatagatggaaacactatttccaacatattggattcctctaaaatgactgattacaacaatggcagcacaatactgccagggcacggcattgagattctgaacagcaaagccaccttgattgaacagaacaatattgaccactttgaaagcggcatctatatggaatacagcgatgatgccgtgatccgggagaataccattactgagaacaattatgggatcaagtacggctttggtaactccaacacccagatttacaacaacacaataattgacaatatcggatggtacacagaggaggttcccgaaggcccgaggggctacggggcattcctgaataactcagccaccaacatcaccatcacagataacaacatcagcaacaattacatgggaatttccgttgacgccaacaagagcaccggcatcgtcatcacccgaaatctgattgccgacaactcactggagggtatccgcttcaacgagggctatgacctggccgaaaatgcaattgagccagtggtaactgacaatgccatctatcggaatgccgagggccctagcctcatgattctgggtgagatgtccgcgaatccaaatggaatctatggggccggccagtgggacgacagcatgaagttgaagatcgatcccaactggtacggcgtgaacaatctcaggacctgggactatgaaaccggcattgtgggggttggcaccatgtgtccgagaatcaagtccacgacaatcaagttcaacaccctggagtatgaaaacggaacttacaagatcaatttctataaaaacggcacttttgcaatcaacctcgctaaattcgacatctacgccactatcaatagaaatacagacaagaaggccgaggtgcacttctatgtggaaaacggtactggtacattcagttttgataagagtaactacctcgactctaataacacgattgaaatctctgtggggtctttgattaatgtggtggaccgcatttatagtgtggtgtacgcttatgacgtgcccgattccgagattcccaattga

SEQ ID NO: 2473 - DNA, 1341 bp, synthetic construct
  source 1..1341: mol_type = other DNA
atgggaggtatttatatcatcatgaagacttttagacaacagctattggaagaccctgaatttcagaactacctgctgcagcgcccaaacctgacggagagcagcctgcagtcatacctcaatgccgccaccaacttcgtgcgcttcacaggggagcctttctacaaaaccgtgcatgagctcagaagccagcagaacgatcgaattgaaaacaacatcatcatacggttcaacccgaatcagtcccggataaacatcatgcagtttgagtttatagaatacctcaagggacgtggctgcaccgaggtgagcattgactcctatgtgaggtacatgagaaccatcctgtccaccctaggaatcattctgcccaaatctccgaaactggacgacactccacaggactggtatctcctgacaaaggacgacattaaatatgtactcgatacagcaaatctgcagtataaggccgtgatcaatttcgctgccgttacaggtctgagagtgagggacatgcgatcattgactatcaaggacttcatgactgctaccgaggagtatcatggctgtacggaggtcgaggactttctggatagcgcacccgacgggatgattggcttctgggagctttttcctcaaaagaccagaaagttccggcttccctgcaaagtgtgcaacaccccagaatccagcgatctcttactttttagtttgaatgagcgggtgaagtactttgaatggaaaaatgagaaggatggcactgacctgaagatcaccaagaatgatcctctctttgcaagccgccaacgcaaatacaagaacttcatagcgcccaattcgatcagttggaccctgtcccaatacagcgagaaactgagcgccgagagggaacgtgtcttcaaatacaaactggagcacggcgagatcagtcaggagacctatgacgaatccgttgcgacgatccccaagttccacgcgcacgggctccggaagttcttcatctcaacattggctaagaaccgagtggatgcccgcattagtgcactaatggaagggcacaaggctccactggtaacggattcgcactacatcaacaatgattacctgaaggagacaatcaaggaggagtatatgaggtgtattcccgatttgagcttcgagaatgtcgaagtccggttccttacaagcgaagaaaggaaatccttacagcagaagatagatgagctccaggaagaaaacgaaaacatgaagaaagacatggagaagtacattgacgatgccgtccatgaaaagatgaaagacgcctttgagaactggctgaacattcaggactcaaaatga

SEQ ID NO: 2474 - DNA, 297 bp, synthetic construct
  source 1..297: mol_type = other DNA
atgaatacactgaaaattgaatgtagcaaagatgactatatcatcaagaccgccaaggccaacagcgagaatgagttgaaagttgaagtgccggagaactggaactgcgactatgtgaacgctgtcctgtgggaggaggacatctgcgaagtgctggaaaagggggatgagcggatgctactcatccccatgtgtggcgaactgcttctcgagggagtgcaggaggacgagtacataaagtacatctgcctcccagtaaaataccaagatcagatggtcctgattgcaaagatttga

SEQ ID NO: 2475 - DNA, 885 bp, synthetic construct
  source 1..885: mol_type = other DNA
atgggaatgaagaaggtgaagatcgaaagcaaagcaaaaaacaatatgacacggaacgaaaaactcttctacaaactgtacgacgacctgtacaacgaagaccggctgatcttattctccacatactttaacatttatgataaatttatttttaaaaaagatatcatccactatgtgctcatgaactacagcgagaatgaaatcatcgaagccatgaagaaaatcgatgagattcagagcgagggcatcgatatcaagaccttcataccgaagaagtattgtcccaagtgcaaaaaggtaatggacagttatggcaaaatctgcccagactgcggtacaatcctgatagaggacgaaaagaaaatccaagagctccaggccaaagataaggcatatgaagaatatctcgaaaaggagtacaacatttacctccagaactcatatcacaacatgatccaagggtcatacactattaagatacgaacgaggaagcctaagacggaaacggagattgtgcgcatccccgcgcagacagtcacatccagaggcaagttcaattcgatcagccagcattacccaagtgaaacctacaccaggcagaaggtgactcgtgccaagtacaaagagtgcagagtcctgtttgacaaagagaagatgatactgaatattgacggaaccgccactaaactttactatgacgaggtgtgtgagttggagtaccctgagcaggaggtgaatgagcttgttaccctgaccttgcacaatggcaccgttctgactttcaaaattaagaacgggtggttcgcttccgataacgagaagaaggcccgcttcgacgctttcgtcaagacctttattgagcaggggaagaatctgcccctatga

SEQ ID NO: 2476 - DNA, 828 bp, synthetic construct
  source 1..828: mol_type = other DNA
atgaaaacacaagatctaattaatatcattaatgatgaggaaagccctgtgttcctcaacagagaagtctttgagatggactatgtgccggacatctacaaatacagggacgagcagctggcgaaaatggccatgtactgcaattcaatacctgacaacatagcacccaagaacctgcaactctgtggaggcaatgcgacggggaaaaccacaactttaaagcagttcttcaagatgcttaacgaggcatttccaaacatagtgacagtgtacatcaactgtcagctgttcaacacggaaaacaccgtgtacggaaaaatctacaacaagctgtacggagtaaaaggctcgatcaacgggaagagtaacaccatgctctttgacaagattgtcgcacgtcttaagaaggaaaataaaattttgattatcggcttggacgattttgacagtttcaagtcacgcgatgggctcaacaaaatgctttacaacttcctgagaatccatgaggccgaggaaggcatccagatctgcatcttcaccgtcagcaacaaggagaatctgaaactagctccctccgtcgagactatcttcaatcgggttcccatattctttgaccagtactccttggagcagatgtatcacatcctggacgacaggtgcgccttcggtttctatccaggcgtgatcagcgatgagctggtgcgagttgtagccggcaagtcctatgacctgggcaatctgcggtatgggattaagctcctgagcgccgccgggcagaaggctgaagtgtttggtgatggaaagattattcgcaattttctcgattga

SEQ ID NO: 2477 - DNA, 858 bp, synthetic construct
  source 1..858: mol_type = other DNA
atgtttctggagaaatgcgacggaaaggacaccatcagcatgtcccttcaagagaagatgaatctgattctggaaactatggagagcaaaggaagccccttcatatcctgcatccattgtaacattcccatcaatgaggcagaagaatggtacaaaaacggtgagatcggggaccaggacttcatcaatttctatgatgacgtcaacctgatcgaggaaagttttgggttcgagatctataagaaaagcgagtacccgacactccacacgcagagcataaaccagatagcctcgacctatccaatgaaccggacccaaaatgagaagacacctctcttcctccgaagggagagaaaactgtacgagatcactaacatttttaagtcccacagcaccaacgaaattttcatcagcatggatagcaagtccaagctaaaacatgagattaagtacgattttactcttaaggaactgaacgagatctttaaaaattatctcgaggaggattgctcaatctacattctgaacgataatagggcgtttgtgatgaccttgggccacttccagttcgaatttgacgtgtttggtagcgccaaggagagttatgtattcgacgtggaaatcgacgatgaaaaatacgacaagattttcattcggagttcatactattttaacattcctgttgatgagctggacggcttggccaagatactgaagcagaagcgcatcatcgaagaggggtttttcgaaggccagttcttataccacacaccaggaaacggcatgacatacggcgaccccgtcagaatcatagaaaatgagatcgagaaatacgctttccgcttcattacgttctga

SEQ ID NO: 2478 - DNA, 219 bp, synthetic construct
  source 1..219: mol_type = other DNA
atgcaatattggcggattgtcaattacagccccctcgctgtggcatgcaaaaaaaggaagcactggacctgtaaccattccttttacgccacattttacatcctgaactttcagatattcaagatcttgctgttcatggccaagcagcagctcttaagccgcatcgacctgaatctactgttccttatatatttccagaacttcctcctgattatctga

SEQ ID NO: 2479 - DNA, 168 bp, synthetic construct
  source 1..168: mol_type = other DNA
atggagaaactgatagaaatcgacggggtccagtacaccgaagcccagatccggagggctctggccattgagcgagacgtgcgcagtcccaacttcgtggatatgctcctgggaaagatcaaaccatccgagctagcaagcagagtaagcgagaagggcgacgcgtga

SEQ ID NO: 2480 - DNA, 156 bp, synthetic construct
  source 1..156: mol_type = other DNA
atgtgctatgtgggcaacacccggacactggtctaccacacggaggactgcttctgtaaccattggctgctaaatgagaacaagaccatcctcgaggaaaagccggtggatatgaaaccctgcagcttctgtaaaccacagtttgacactgaatga

SEQ ID NO: 2481 - DNA, 225 bp, synthetic construct
  source 1..225: mol_type = other DNA
atggttgccgagatggtagaaaacatcaggaaaggtgaaggggacggatatagcatctacccgccctttagctgcattgtgttcctacagggcaaaaagtactccgaatgttgctgcaaggctgaggcccgagaccagaagtttgcactggtgaacctcgtgggcttcagacgcgaggatgtcaaggtcatagacccacggaccaatgaggagctgttcgtgtga

SEQ ID NO: 2482 - DNA, 162 bp, synthetic construct
  source 1..162: mol_type = other DNA
atgagcatgttggccgacttcgagcccgccaggctccacaagcggacatgggctgaacgccatgatgtcgaaatcctcgctgtaatatgcctggccatcagcattgcaatgctacttctgttctttgcgctggcagagccaaccgtggccggcgtgatctga

SEQ ID NO: 2483 - DNA, 453 bp, synthetic construct
  source 1..453: mol_type = other DNA
atgacaaaggaatttgaggacttcatgagaaggaacacaggactgcttgtcttcctacggtgggacacggtggcctatctgaaatacctcgagtcccattatgatgagcgcaagtacgagtgtgcttaccgattgctcgaggcgatcgataatctctttgacttctatcagataaccttcagcaaaaagactgaacgggaaattcccgaccaattatttgaaaaggacaagataaacaaaggcttcctgtcacacatcggtaaggcttgcaaaaagcagtcggatttctacgggcagcggtggaagtccacccgtggaatcagagatgcctacggccactatagtgcaggcaatttcctgtttgccgacatctacgggtgcctgcaccgcatcagcgacgattgctacaggattctgaactttagcgagtatgaaattgaggagaaagcatga

SEQ ID NO: 2484 - DNA, 756 bp, synthetic construct
  source 1..756: mol_type = other DNA
atgaatgagatcgtgactacaactaacgagaacaatgtacctgtggatgtagactatgccatcgaggaatggaaggcataccagcgattgacgagagagctactggacgaaacggattaccagacacaccgcggccggaagtacaagaccaagagtgcttggcaaaaatacgccagagccttcaacataaacacacagataatcgacaaggaaatcgtcaaaaatgacaaaggaatcgtgattgaggctgagtatactgtgagagccacactgcccaacgggcgcttcgtcgagtcagacggcagctgcgaccggcgcgagtccggaaagcgagaaatgtccaaccacagtattaaggcgacggccaaaacccgtgctaccaaccgggccatcagcgagctcatcggggcaggggacgtcagcgctgatgaactggacccagcattcgataaggtgcagcactcgaagaccaatcatgtcattgaggcggaagttgccgagataattgaatctccgtatgataaaaatgccggttttgagactgccgacaagattgagccagtggatgaggaccctgtttgcaagaattgggtgaaaaccatctgtaagacaatcaaggcagagggcaaaccctgccttaaaggtgtgctgatccagaaggctaggaccattggcaccatgaccgacgaagaaaggaacaggctgatcgaatacattaagacactccccaaaggagaggtgaacctcgatgattga

SEQ ID NO: 2485 - DNA, 231 bp, synthetic construct
  source 1..231: mol_type = other DNA
atgattgagtgcatacaggaagagggcgacttcaccgattgggaagtacccagttcctcttccgacatcaagtacattgtgagcgtggatgatgaggggaacctgttttgcagctgtccagacttctactacaggaagagccgcatgaacccgcatatctcaaaccctgaatcgtattgcaaacacatcagacaagtcctagaggaggacaatcggctgcagatgctctga

SEQ ID NO: 2486 - DNA, 1005 bp, synthetic construct
  source 1..1005: mol_type = other DNA
atggataacattaataagacaaagacaagtctggccaagttcgaagagtttttcagcactgtgtacaaggacgaggtcatggaggttctggaaaagtatcccgaggaacgcaccctggtggtggactatgagaatttggaaatgtttgaccctgatctggcggacctcttaatcgagaagccggacgaggtgatcgccgcttcacagaaggcaatcaagaacatcgacccactgatgaaagatccaaagctggacatcaaattcaagaatgtgagcaactgcattgattttgtgaatgccgacagcaaatacatcgggaagctgatatctttcgaggccaaggtcatggaagcgaaggagcctaaacccattcttgacattgcagtctacgagtgtaggggttgcatgagtttgcgagaaatcccgcaaaccatcaacagcagccttgaaccctcactctgtcccgagtgtggagggaggtcctttagactgctacaagatgagtccgagttcttggaatcacagctactcattgtcagttcggacgacacttccaaaagcctgaaggttcttctgctccgggatgaatgctccttcgacctgtactccatgggtcaggaggtaagaataacgggcatactcaaatctttttcctctaactacgggtacgagtatttcctggaatgcaatttaatcgagatcctcaacgattctgaggattccgaatacgacgaatatggcaaccgcaacagtcccgagtaccgaacctggcagaaagtagtgatcgattcagaccgcgtgtgccagtgctgtggaggatcgaagcacctggaggctcaccacatcttcagctatcagaataatccaagttaccgggtgaacttggagaacggcattgctctctgtaaatggtgccatagcaaataccattcctattacggcaaggacgcctctcctaaaagccttattcggttcctgaaaagatttgggaggtatgatggctga

SEQ ID NO: 2487 - DNA, 435 bp, synthetic construct
  source 1..435: mol_type = other DNA
atgatggccaacaagatcagagtgaatctcacagtcgaccccaatctgtggcaactggcaaaagacaagctgccgtgcagccggagcgaatttttcgagaatcagctgaagatgttccttggcattgaggatgacgagagcgagatcattaaggacatccagaccaaagaaaatgagattaacgcactacgggacaagctgtgtcatgtgcgcaaatcaaagcagttaaaactcgaatccaacaaatcgatggagaaggctatggcctccctgaaccgaatgcacaagaaatacgggaaaatcggagagaaccagatcaggaacctcgcccacgttcacaaggtggatttcgatgacttgaagaaggaatgccaggacaattgcatgaacatattcgaatttgcggaggtaccaaagcatgatagtgtcatgtga

SEQ ID NO: 2488 - DNA, 420 bp, synthetic construct
  source 1..420: mol_type = other DNA
atggagctctttctgatgacaattgggagcttagacaactttggaaagagtgatggtgagaacatgaaccccgaagatttcgactgctctgtattctttgaaatgtacaaggcactgttcgagatattggacgttgaagtgggcagcttcgctgagctcttggatgtgtacaaaaatgtggagatggattacaccctgaaacgccatgccctgaaacaaaaagaaatcctgtactggttcaataccgactggaaggaggagcttggcaaggaaaagccaactgagaaggacaaggagaaatggatcaggcagaagattgggtatgactcattcgtggtcgagcagctggaagtcaagctcaagcacatcagacggatgtatgaaacggcgctaaaacactcctttgaggccatcaaatga

SEQ ID NO: 2489 - DNA, 276 bp, synthetic construct
  source 1..276: mol_type = other DNA
atgaatgtgaaaacagtcatgaacgaccttatcggattgtcaaaggagttcgagggtgtggaatatgagattgaaagcaaaaacagtatctacttctatagctttccaaagtacatgaaggaaggcattgtaatcctgaaatactccgccatctacgacctgcacaccatactaaaaggcatggatgggatcatagtcgacattctggaggttgaggacaaccccggggatgagaagaaggatctcctctatgtgcagatcgaggtgaaggaatga

SEQ ID NO: 2490 - DNA, 234 bp, synthetic construct
  source 1..234: mol_type = other DNA
atgattagcgacgaatgggaagaggagtactatgtaaaggtcaacgaggagctggagcaggtggaagtgaggtttttcagcaaggtggaccgcctcgtcttcgcgcagtcctactcgagttcatctagcttctcctttgaggaggcagaaatcctgtgcgaccggatatgtgacatcctgaccaacgatctagggaatgccaaatattacctcggaggcaaagatgaactttga

SEQ ID NO: 2491 - DNA, 150 bp, synthetic construct
  source 1..150: mol_type = other DNA
atgaattatcgcgaatgggtcgccagtcagttcgagctgaggatgacggaggatggcagagtgtgcttcaaaacaccctgtagctactacacctttagcaaggaagactttgagataatccgggaaatgttcctcaacttcgagtcctga

SEQ ID NO: 2492 - DNA, 174 bp, synthetic construct
  source 1..174: mol_type = other DNA
atggatagaatcaaagaactaaatgtatgcggcacctgcaaacacagccatctgattccagacatcaacggcgagatagccgtgaacatctgccggattgggagcgaggcagtcaacaaggacggtggactcacgtactgtgtggactggacaccccgcaggaagctgtcctga

SEQ ID NO: 2493 - DNA, 336 bp, synthetic construct
  source 1..336: mol_type = other DNA
atgctctccaaaaaagaagccatacagatgacgctggacaatgagaagcactatccagtgaagtgcaagtactgcgggaagcccttcaccaagtctcacaacaggcagatgtactgttccgacagctgccggcggaacgccttgagggagcagaaggcacgctaccaggctaaacgtagactaaaaattaagcagaaagtgctgatcgtcgatgaatataagaaatacgggctcggtagctatggcacaagtgcgaacggccacagaaagaacaatttttcacatgagtacatggccatccaaaaggagatgaaacgcatcggactgaagcgatga

SEQ ID NO: 2494 - DNA, 552 bp, synthetic construct
  source 1..552: mol_type = other DNA
atgtacttggcgaagttctgccccaactgcggcaataaggtagaagaaaatgataaattctgcatctattgtggaaataagctcagagttataatccctgagaagaaagtgaagcgcagctccaacagtattaatgacgagaagactagcaaatatgtggaggtcatcgatgggctgatgcgttataaggtgtttccatcgagtctaccagtgaaatatatcatctacaaggtgaattacggcacaacgtccgacgagattaaaaatatactggaaaacggtaactataactacaagattaatatccattacttcctccagaacaagaagctgtacttccggagccccaaaaaccccaacatgtttttcaaattccataatgacagattcaatgaggagatgaggaaggacaacaaagaaattatccacatttccagctacgcaagggtccaccgcccgtcactgaccaagatatttaactttaaccaggagaaaaccttcatccttgccaacaagcactttgaggaaaacatccgaaagacacggctgtga

SEQ ID NO: 2495 - DNA, 237 bp, synthetic construct
  source 1..237: mol_type = other DNA
atgatgatttatgataaagcgacggtcacaagcctcatagtggctatcctcctgcccttgatgtcaatgctaggcatcggcgaactgactcagaactacatactggccattgtgagcggtatgatcgccctggtggtctggtactacaatgagaagcacaacagtgacctcgtatccgggaccaccaagtgcgactgcgagctttgttatgggggagacgatgaagcactgatctga

SEQ ID NO: 2496 - DNA, 339 bp, synthetic construct
  source 1..339: mol_type = other DNA
atgaagcatctatatgagataatcccctataggcggactgtttggattacagggtttctgaagaccacagtctccagcgcaatgattaccactggcgtcgtgatactgttcaatagcattaccgagcacccatacttcatggagtgggacgaaatcggaatcgtgttgggcatcgtgagtatcaccatcgcctgcatttacatagcgatgattgatagatggaaagaacgcaggaagaaggaggagctggacacgatcgaggactacatcaaccggaaagctgaggagatcgccaacatgaaggtactccgaaaacttgaagaactcgaagaggaatga

SEQ ID NO: 2497 - DNA, 621 bp, synthetic construct
  source 1..621: mol_type = other DNA
atgactatgatagaaatcagcaccatcaagatcaccgacatcaagccagccgaatacaatccgcgcataatgagccagcttgaacacactaaactccggaactccatggagacattcggcgtggtggacccaattattatcaacctgaagaacaatcacatcattggggggcaccaaaggtatgaggtccttctggacaagtccatggaggacaacgagtttataaaggaactgcacctcatccggctaggagatgtgggctgggcattccccgaatcagacctcgaggtggaggacgatgaccatgaaaaagccttgaatctggctctcaataacatcgagggtgagtgggacctgccaaagctggaacccattttgacggatttaaaggatgtaggattcgacattgaacttacaggcttcagcgacatcgaactgaccgagctgaatctggaaaacaacctcgtgtttgcggaggagttcgagcccgacgagtcggaggaggatgtcgacctggaggacatttacgatgagcctgtgaaagaaatgctacagtgccctgcctgtgaccatgttgatgttgtgaaacgatttaaaagagtcgatagtcagggggattga

SEQ ID NO: 2498 - DNA, 201 bp, synthetic construct
  source 1..201: mol_type = other DNA
atgaagatctacttggcggcagccgacacaatgagcgaggacatcattcgcctcctgcccgtggccaaaaggctacactggaacctgttcagctactactacctcctgaccctgaagaagatggaggactatgatatcatacgaaaggcttccaaaaaacggccgtatagacagcggagtgcccagcttccagaaggctga

SEQ ID NO: 2499 - DNA, 459 bp, synthetic construct
  source 1..459: mol_type = other DNA
atggacgttgacaacctgctgggctatgataaggtactggaactcaggtctctgcttgaggaggtgacggataaggtgatccccgtgtggcacaagaaccgcggaatcaaggacttcaaacagatgtgccaggactacaattttgtcagcataagtggctggcgcaacgaggacgtgaaagatgaccagttcatccactttgtccggcatgcacaccggaatgggtgtcgcattcacggtttaggactgactcggagaaaggttctcgacagggtgccattcgactcagtcgactcgagcagctggctccagaccattctatatgccaggcttgggcaaaagcagttggattccaagttcgctaccgaacgtcgaggcgatctggccgtgctgtcctacatcaaatggatgaagacacaagaagagtactacaaaaaatggagacactatcatgattga

SEQ ID NO: 2500 - DNA, 657 bp, synthetic construct
  source 1..657: mol_type = other DNA
atgattaatgaacggataagaccttatcttaattttagcttcaatgacaagaaagtcatcttcgtcaccttgttcgttgtgtccaacctgataagcaacctgttagccatcaaagtattcaacctgggcttttggggcctgacgaccgattgcggaaacctcctgtttccgttaggataccttatggcagacgtgattaccgaggtctacggcgagaggacagcccgaagggtcatactgctggggctctttgccaacattctactgatcgtggccaccaccctcactgtctacatgccctatccatcctattggacagggcaaggggcgtacgcctacatgttcggcttcactccccgcatcgtgctcgcagggttcatcgcatacttggtgggtcagttcgtgaatgcgagactgatggtgctcatcaagaaatggaccaacagtaagtacctgtttatgcggacaatcggatcgacgctgggaggggagctctgtgatagttgcatctgcagctccatcgcctattacggtattgtgccaaactctggcattttgctatttattcttatgcagtatgtggttaaggttacttgggaagtggtaatgcagcccctgacatacaagtcaatcgcttgggctcgcaaagacggctga

SEQ ID NO: 2501 - DNA, 591 bp, synthetic construct
  source 1..591: mol_type = other DNA
atggcaatgccagagccctgggaaaggcagcgggacgagaacggaaaacttgagccgataaaggccttcgagtatttcacggagtacctgactatggataagccacgatctatgagggtgctgtgcgagcgcctcggcaagaaagatgggtatattcgccagctgcatgcctactcatccacatggaactgggtggaacgtgctgaggcctacgatgaacacataatcttgaaaaaacggctccgcaaagagaagttttacgatgaactcgtggagtccgagcttcccaatttgagaaaacggctcgaatactataacaagaatatgaatgacatcgagaccgacatgacgaccaaacccactagcaaggctcacgcctatgacaagaacagtaaagcgcactccacaaccctgaatgagattctgctgatgatcggcaagcctaccgagatcaaggaaaccagcttagaagcagacatcgaaagtgacaacaagattgatctggagaacagggtcgaggtagacattacatcggacgagttcatggaaagcgaactagaatacatgagaaagatgatcgaggagaagtga

SEQ ID NO: 2502 - DNA, 1476 bp, synthetic construct
  source 1..1476: mol_type = other DNA
atgacagctgcaagccgagtgaatgcccacggcacaatgggtctgggcagatggagcatttacataaacaacgggttctggaagcctagggactttgatgtcctgataattgagctcctgcagtatgccattcagggacgggtgagcggcatactgctgggcgtacccagccgacacggaaaatccactcttatcagtaagaacttctgcagctatttcctctcctatttccccaatgagcaggtcatcctttccagctattcgcaaggactggcttccgagttcggcggacaggtgaaggacatcgttaatcactacggctaccttagcccgtacaagccgaccatcaggtctgatagtaaggccaaaaacaagttcaagctcaatgagccttatcgtggccagatgttgagtgcaggtgcgggcgggtcaatcatgggatacggggcaggtctcctgatcgtggatgacccaatcaagaacgtcgctgaagccgaatccaaagtgcgacaggccaaactcaaggactggtggggaggcaccatcaagtccagggtccagcgccggtccaacgggcttcctcccatcaagattgtcattgcccaacggctacatctgaaagatttgcatggcatcatcaaggagacagagccgaccattcccgcaaatgacgccttccggatcttaaggaacggcggctcaatcgaccctaacacgtgggttgacttcaaccttccagcaatctgtgacagcgaggacgatattctggggaggaagataggggaagtgctgtgggaagagcagagagactacgaatggctcatggcggaaaagcgcagcatgggctcatatctctttaattcgatctatcaaggacagcccgtagagcgggatggggagatatttaaacgggaatggtttcaggacgaggtcaatcacaagctcacatgcctcatcgacccaaaggacatccccaaagacctgccccagctccgctactgggatttcggtgccagcggggacgctggggacggaacctctgccatcctgactagctacgatggtgaatacctgtacgttctggatctggtggccgggaagttttcatccctgaaagtgttgaaaacgtttaagagactgtgtaaaaaggacggcaaacaaacccgtgtaatggtggagcaggagccaggaagtggcagcaaactactgattaagaagtttaggagagaagaggatttacgaggatacaacattcgggccgataaggttcaggtgagtaaaaaagtccgcgcttttgacttggaagggctagcagaggacaggagaatcaagatggtgccagcccactggaacaataagttgattgaccagctggtggctttcaccggtgaagatggtggagaggatgatatagtggacactattacgggctcttgccgcttctggaccagacctcggcgccgcgtgaaagcgtga

SEQ ID NO: 2503 - DNA, 1326 bp, synthetic construct
  source 1..1326: mol_type = other DNA
atgtccaagaagcaggaaatgatgagaattgagaggcttaagcactacgcataccagacagggctcatcatccccattttcaagaaccatgatctcattaaaaaaatagagaacgggaagatcacaaacaccgacgagatcaagatctatattgaggaaaatgagaagcagatcaaacgacgccgggagtttatcagcattatttatgataattgcaaatattttaaatacgacagcatttgttataaactgatctccaaggtaaataactttgaaataaagagcctagaggagctcatgaacgaaatcgagagcgaaaaaaagaagaatggcttccggaagaacatagaggaaaaagagttgatcaaggagaacgaaaataagggaaggctaaaggagtacgtgcgaattgtgaggagagagtacggccttgatttcacaagcgtcaagaaactcaaactcaagatcgacaataacaagatccgcagcaaagaggagctgaatgaggaaatcattgaggaaaaaaagaagactgagttgaggcgcattgtgtacgactccgacttaaactgggacctgaaatgggaactggagtccaaaatccgccacaacgaaatcacaactaaagaggaactgattaaagagatccgaagaatcgagttcattaacattatttacgacaataaccgcgatttcaagctcgactatgtcaccatccagaaacttgtgagcaagataggaagtaacgagatcaccacgaaggaggagctgatcaaggaaatgacggaagaaaaaaagaagggcatcgagcggcggacggagtataagaagattgtcaatgaggcccatgccctggacaacacatcgcagtggaaactggaactgaagatcaacaatgatgaaatccgcaacaaggaagaactgatgaacgagatagaaagtgaaaaaaagaaaactgaattgaggcggattgtgaatgacagcgacctgaatgatacctcccagcggaaactgctgtcgaagatagatgaggatattgaggttatcaccaaggagaaacttaagaaagaaatacaaaaggaagaacgtatcatagagtacaagaaaattgtgaatgaggcgcacgccctggataatacctcacaatggaagctcgagttaaagatcaacaacgacgaaatcagaaacaaggaggagctgatgaacgaaatcgagagtgaaaagaagaaaaccgagttgaggcgtaagtcagaggagatcataagaagaaaaaaagagcggagcgactcataccacccgaacgctaataagccatggaagttttga

SEQ ID NO: 2504 - DNA, 1659 bp, synthetic construct
  source 1..1659: mol_type = other DNA
ctcagtaagaatgctaaagcagacgcctttgtcgtgaccactgaagacggatcatatgacattgtcgatgcagatgtcttggagaggtatgcaatcaagagcgaatctgacgagacaggcagcaagcagttaaagacggatggttgggaatatgatgacaccctgcttgagccgctctatgacccactgcagctctgcgagctcctcgagatcaacacatatcacgagaactgtgtcgatgttgtggcccgcgacagtgcaggtatcggctatgacattgttcccgttactggcgagaaagaaaaggaacttaacaagccaaaacttaccaattttctcgaaaacatcgagcccaatatcaatgaactgctgtaccaaatgaactacgaccggagggctacgggctacggggccctggaactgatccggaaagataaatcgaaatcagagcctgtgaacctatcccatatttcttcttacactctgcggaggaccagtgatgggaaaagagtaaagcagagagtgggaacgaagaccgtgtggtttgtaatctatgggaaaaactatgacaaagaaggcaatctgtgcgacgtgcactctgagaccggcgagttccacccctacaactccctgagcaaggaagaacgcgctaacgagctgttgtggacgatggaatacaccaccaaaagcaagtactacggattgcctaagatagtgggggcaattcccgccatttatagcgacataagccgttccaagtacaatacctccttcttcaagaactacggaatgccatccttcgccgtcctggtaagtggggacttcgtggactatggccaggaggagttcctggaggacggaacaaagaatcccgaatacgacgtgacaaagactctgaagtggaaaatttcccagcaactgaagcaggccatcaaaaaccctcacagcgctgtaaccatcctggtcccatctgagggagaggaaggtaatgtggagattgaactgaagccgctgagtgtcgagaccaaagaggcgagcttccgactcttcaggcaggataaccgggatgaagtcatccatgcacacagggtgcccccctacaaggtcggcatcaacgagacaggctccttgggtggaagcaacatagagggagccaccataaactacaagaacgatgtggtgctacccatcagattcaacgatgagtttctaattaaccaagtgattaagaatgactttaagataaaggactggcggttcaaaatcacggaacatgacacacgggactacaccacagacattgccatcatcaaggaactgttcctcatggcttcaatcactccacgacagatcatcgagaacattggcgagcgcttcgggctgacagcttcagacaatccttttctcgatgagtactacttaaacaatgtgcctttggagaatgtttggaatggcggtgatgtgccgatggaagcggagacagttcttgacagcctcgagaatgaccttatgaaagacgccggggtgatggatgaacagctgcgcgagaagagacagactcgtgatgatggcgctcagggggcctcgtttaaagaggccgattccgaatatcaagagcgcatacagaaggcgtttgatactcgaagagccgtgcagtga

SEQ ID NO: 2505 - DNA, 2328 bp, synthetic construct
  source 1..2328: mol_type = other DNA
atgatggcgctcaaggtgcgtcactccaagaggcagattcagaatatcaaaagagaataccgccggcgtttgatcctcgaagagcagtgcagtagggagattgcggacttcttccgcaggcttgagaggaaaatccacaaggtcatggatgagcactgggagagcgagctgggtcttttccacctgaacaaagtgtcggacatcatccaggacagccgccaggagtactatgacatcctgttcaagtactgtaaggactcctacatgaagggacgagaagctaccgagcgaagattcaaccgcaaactggaaaacattagcatgaaggctgatgtgaacatcacaagacttgaggacctgttcaagcccgaccctactatacgctacaatctcaacaataaggtctttcaggctagtgcccatactatggaccgagtcgacaataggatcatggagaacatcacccaaagttatgatgacggattaggcattgatgaggccaaggatcgtctgaccgtcgagtacaatgggttgaagtcttgggaggcacagcgtattgccaggaccgaaatcaattcagcccagaatgacggtgcctttgacgtctatggagagctgggcgttgagtaccatcagtggtggactgcccaggacgaaagagtccgggagacgccgcaggcagaccaccgcgagttgcacggcaaaatcgtgaaggtgggcaactcgttctccaacgggctgcagtatccaggagacaggacaggcaggatcgtgcactggatcaactgccgttgtacaacgctgcccttcctcatgcctctcggaaagatggccccaccaggaatgattgagttcaccgaagaggacctgattgacattccaaacttcgagatgcccacaatagatgacctgatgcggagatacgaggctgttgagcccaaatcccagtggattctggatgactttgaggatttaatcaacctcaatgaagatgaggaacgccggcttgctgagatacaggaaatctttaagaggaatgctcgggataatgtgcccccaagttatattgtgcaacgccagtacgacgaatttatgctacgaaagaactttgcagagaatctgcggatgctgaaaagagggcagaatccgttcctcaacgagtctgaaaaacagatgttcataaaagattacagccgattcctaaagcagtacgaaaacgagatacgcatgaacaaggaattacagaaaatgtatccgaaggagttttcaaaggttgcaaaggatgtcgacctgcaattctacagggagaactacaacaaccagttcagcatttaccatcccgatgatatcaggtcatttgaagtaacctccaaaacgttgacttctgaggagcgggcccggctgaaggaaatcgagaagctctatcctaaggaatccaagagaatcgccaaagaaatggacctaaagtattacgagaaacgacatcctgaacgctttggccgattcatggaggaagaggaacggaagaggctggcaaaaattgagcggatgtatcccaaggaaacctccaagatggcaaatgagtttgcgcctcgcgatgtgagccgcctgcgcaccaaggaggacattgacctgtacgagaaaaacttcatcatgaacaaatcatacagaaagaaagccgatgagattgtgaacggcaatggcatgacaataacaagaaacgtgaagtatgacctgaagggtagatacgaggattacatcaacatcactgacgatacgtttgatgttctgcggttcaaggattacaattgcgagatctggatcagtagcaaaagcgaagtgtccacggtggagatcatgcaaactctagacaaaattccccggaagctcatgaaccaaaaccacaaccggatcatattctctgctgaccgcgatgtctataatctcaagaagaaccacttcgtgggcggtgtgacaaagagaaaagacaatgagattgtgatctttaaatgcaaagagggcatcctttcgcaaaccaaaaccctcgctcatgaacttggacacgcctgggacaacaatctgagcaaaattgccaatcgggggggggcctactataaggtggccgaagaggaaggggggtttgtaacctcatatgcccggaagggctttgaagtcttcaagacccattacagcgaagactttgcggaagcaatggaactgtatgtaacaagccctgaaaaactgaggagaaaattcccaaaaagatacgagttcataaagaacatgatggaggacgatttgtttgttttggggctcatcccctattga

SEQ ID NO: 2506 - DNA, 264 bp, synthetic construct
  source 1..264: mol_type = other DNA
atgataatcgaaattcccggaaatgaccggacagaagaaattaatctccccaacgggcagtttgtgctgatcacctacctacaggagaacgacatgatgagcttgccggacgggaagtatgtgtgtccattcaggatgatccaactcttcacggaagagggcggcgagctgatcggcgagtgcattgaggaaaaccctcactacaacactcgcttctacaataccgtctttgagcatctggatgagggaatcgagtatagatga

SEQ ID NO: 2507 - DNA, 540 bp, synthetic construct
  source 1..540: mol_type = other DNA
atgctgcgggtcgtagagcgcacctattatcagcaagaggaaatcaagacactagactgtcgaattagagaggccggagtgaatacttacagcctggcccgacagggcgcagttgactatcccacctacgaatcctacaacgaggtgagagaggaaaggatcaaggaggctaaggaaaaatacggcgaaagttactactatcactggcgggacgttgagacttacttctattacctcggtcgcttctttagcgacctcgaggaaatcgagaagtacctggaaaggacggtgacatataagccacaccgggaagagctgaaagaagcgatggagaggctggacaagagattcgaggaagtcatcaacgagttctggtattcattagaggaatacgaggatataaccgaggatgtgctcgagcagttgaaagaaggggattgcaccgtgcattgcgaatttcttataaaagagtttaagaagttcgtcaatgtgatctgccgcatcattaaacagaacgagattaaccacaaggagttttga

SEQ ID NO: 2508 - DNA, 291 bp, synthetic construct
  source 1..291: mol_type = other DNA
atggacgccatcaacgttatcaaccagaacaagatactcgtggatgtcctgtaccggggcactgtaaatctgattgacatcgtgatcggtgatgcactggtctatgacaatcccacggtggtggtcaaatgctataccacagacctcgctttcgccaccacagagatagatgagattgtgttggagaacgaagaatttgagttactgatcacctacgaggacggcgagttcagcattctactcaagagccacaatcttggggaactgggatacatcgaatgggtgatttga

SEQ ID NO: 2509 - DNA, 330 bp, synthetic construct
  source 1..330: mol_type = other DNA
atggggaatctgggtggcttccggatggtgtttgtcgatttgtgcgagaacgaaattgcggacatggtggagagcttctaccgcaatggcgacggatcaagcaggatactaaccaaccgggcagttggcgagatcgtggagcactactgttcctttgaagtagacggtagaatcacgactaatctccgagatttcctgctgtatagtgttgtgctctatgacaccattggcgaggccgtcgatgatggagtgaaccttgaggaagtgttcatcatcgaagacaggaactgctacacagggaagtctcaggtcatcctgattggagggtga

SEQ ID NO: 2510 - DNA, 567 bp, synthetic construct
  source 1..567: mol_type = other DNA
gtgagaaaagtggtgaactggttgaaggccatcggagataacttctccgtggattacctccttttagcactgttctcgtccggagacctgatattggttgccatcgttctcaattcttacggtgtcatctcaccggagaacgtaagggaactggtgattgactatatcagttacaggaaagtagatattttctggcggcatctacggcgtccacgcatgagctttgaagattatgtcctggacaatttcgaagagatggaaacgggcgaactcaccagagagcaggttgtcgaatttgtcagccgacaggaacggaaaggcctcacattctgcaatgagatcttcatcgctgtgcccctaaagaaggggagcaaggacgatatcgtggagatactgtggaacgagtactttgtggaggactacaaggagaactggctggagcaacacgagaatcttgggtggaatgactggaagaaactgctcaagaaagaaattgtggagaacgggggcgatgacttccagatctttcgcaaccacctgattgactgtgtcctgatggagtattga

SEQ ID NO: 2511 - DNA, 192 bp, synthetic construct
  source 1..192: mol_type = other DNA
atgacaatgaaggtgacgtttgaagatgagaacggtgagcggaccgtcgagttcggcgatgacgtggacttcgtactcatcgaaagcgacgatgacggaaatattgagatccgcgaaggggactgggaactggacggcgatagcgacgacgattgggaagagtacgatgactgggacgaggaggagttctga

SEQ ID NO: 2512 - DNA, 282 bp, synthetic construct
  source 1..282: mol_type = other DNA
gtggacgaatttgttgagacgctgttcgacacatattggaaagtgaatgagaacggcgagtatatgagcctaaccgactgcggcgatttctacatcgcaaaggtcgcgccctgtgtacggaactggtccatagtgatcgaatgcaattgcttctgtttccactgcaaggaatttgtctaccatgaaaacggggccatcctggagatcggaatggagattagttcactctacctgagccagatggagatcaaagatctcaagatttacatgattgactgttga

SEQ ID NO: 2513 - DNA, 372 bp, synthetic construct
  source 1..372: mol_type = other DNA
atgggtctggatatgtttctggagggaatcttcgagcaagacggcgagaatgtgagggagcaggtgatttactggcggaagtccaatcaggtgcataactggttcgttgtcaacgctcaggacggggaggacaactgtcaaccgcacagcgtaagccgcgaacagctcgaggaactgcgagacctatgcagagccgtgctcgcagataacgacaaggcggaggaactgctcccaacaaggcccgggttcttctttggcgccatcgactatgacgaatggtactattacgatttgcagtacaccgtcgagaaaatagatgaagtgcttaaagatgaccggtacctgtactttgagtattgcagttggtggtga

SEQ ID NO: 2514 - DNA, 198 bp, synthetic construct
  source 1..198: mol_type = other DNA
atggaatgcccgtgcgataactgtgagatgctccgggagaacgaacccatcaaggtgatcgactggaagtccaacagcccatttggtatggatctgtaccacttcgaggacggcttccgctgttgctataatggggaggaaagtctgcgaaaagaggacctaagcaatcatgggtgcagactgaggggcggaatttga

SEQ ID NO: 2515 - DNA, 351 bp, synthetic construct
  source 1..351: mol_type = other DNA
atggagctgatgacgagggagatggaagggaagctcaaaagcttccccttctattcccaggacggaaagggcgacgacgcaatcgtggtgatgaagttctttaacccttacggtctcggaacctggtatgtccttgaggccgagaaacaggagaacggtgattacctgttcttcggatatgtcgaaagccccataacaccggaatttaacgagtacgggtacttttcactaagcgagctggagaacctgaagattccaatcaaaatcaatggcatcaccgtaagttacgggcggattgaacgagatttgtactttgaacgcgtgagaattggcgacataatcggcaattga

SEQ ID NO: 2516 - DNA, 225 bp, synthetic construct
  source 1..225: mol_type = other DNA
atgttcggccagaagaaagaatttgtgaagaagatgtatcacgtcggggacgtggtcgagctggtgcatatggacgatgcgcaggccccacccagcggaacccgcggcgaaatactcttcgtggacgatattgggcaaatccacgtgagatgggagaacggcagcggtctggcactaatctacggggaggaccggttcaaggttgtagagaggaaaggagaatga

SEQ ID NO: 2517 - DNA, 153 bp, synthetic construct
  source 1..153: mol_type = other DNA
atggacctgctctatctttacgacgacctgaccgcaaggcgggaggtctacgatagcgtggggctcagttttgtggtaaaatataaattcagctcccgcaaggaagctcaggatttcgccctaaagtacggcgccgagctgatcgaggaatga

SEQ ID NO: 2518 - DNA, 189 bp, synthetic construct
  source 1..189: mol_type = other DNA
atgatagagcggaggcgcctgggcatgaaatacgacatctttaccatcctcgatgaaattagcagaaagctggacgacggggaactcagcgatgagcaggtcgatttcctgttgcagatggagattctagtggaggaaggcacgatcacagacgagcaggcccaagatgtgatgaacggagactattga

SEQ ID NO: 2519 - DNA, 168 bp, synthetic construct
  source 1..168: mol_type = other DNA
atgatgaaactcagcctgaaggaactcggcgaggaaatcgagatgatacttgccgaagggggattgacgtttgaccaggtggattatctgctatacctggagacctgcatcgcagacggcagcattacagaggagcagaagcgggaaattatctgtagggacttctga

SEQ ID NO: 2520 - DNA, 207 bp, synthetic construct
  source 1..207: mol_type = other DNA
atgtatctagaaattgacgaggtcaagtgtgagaacatcgaccgaattgagtttgacgatgtggcaatggagatcgtgctgaccgacgaaaaagtgtacgagagaatcaagcggtggctgaaaagcaatgagattgattacgattgccgcgaagaccggtatttcgccaacctcatagaatacgtaatcaggatcacatggtggtga

SEQ ID NO: 2521 - DNA, 249 bp, synthetic construct
  source 1..249: mol_type = other DNA
atgtcggactcaccattacggaacggctcttcccttctgctccgcaattggagtatccccaagtgggagcggaacacgagagcctccctgaccgagccaagccactgctgtacacgaagcagcgaacccgagacttccagtagcccgacaaaaaacgggaactcttggaggatgctgctcagcttgtcagcgaccaatagggcacaggtgtttctggagggactatacgaagtccctctgttcctctga

SEQ ID NO: 2522 - DNA, 1353 bp, synthetic construct
  source 1..1353: mol_type = other DNA
atggcgaaagagaacgtgatcgattataagatcgagcgacagaatgataacacctggagctatctctacgtaacagaaagagggagaggcaatatcattgcttcatcctttggcgagctcaggcagaaagttttaaagagaggtctaccttggaatgacatatctaacctcttcacaaaaaagagttccgactctaacgtgcgccgcgaaagcgtcaagaatattgatgacgaatccgtgctggcggacgtcgctaaaaagagttctgactcaaacgtacgccttgaagcagtgaggaagattagtgataattacgttctgatcgacattgtgaaaaacgctagcgattacgacgtgcgtcgtgaggctgtaaggaagattaatgactcatcggtgctcgaggatatcgccaaaaataacaatgacgagaacgtccgactggaagccgtaaggaacattaacgacgagtccgtgctggagaacataagcaaaaacgcatccgattctaaagtgcggatcgaagctattaagaagattaacgacgagacgatcataatcaaactggcaaaaaacaataacgatgaggatgtgcggatcgaggcagtccgaaagattaacgataagacagtcataatcgatttcgccaaaaatgcctccgattccaaagtgcggcgcgaagccgtccgcaagattaacgactcaagcgtgctggcttatgtgcttaaaaacgaccccagttggatcgtgcggattgaggccgtcaggaagatcaatgacaagagcgttctggccaacatcgccaaaaaggacaacaacccgagcgtccggctggaggccgtcaggaaaatcagcgatgaatctgtgttgataagtgtggccaagaacgacagcgattatttcgtgcggcttgaggcagtcaagaagatcaatgataagtcggtgctggaggatatcgccaagaacgacatcaactccaccattcgacgggaaaccattaagaagattactgacgagtcagttttaataagtgttgcaaaaaatgatagcgactacttcgtgcgcctcgaggctgtaaagaaaattagcgacgcgtacatcctaaaggatatcgtgaaaaatgcctttgactccgacgtccgcatcatgtcgatcaatgagatcacggacgagaccgttttggtgaatctggacaagatcgacccaaatttgagactggttagagacagcctcaagaagaaaaacagaagaatacacaagtttaggaccctggaggaatgggaagaatattactacgacaagaaggtgccaaaacactggatcactccccggtggcattacggactggatgactga

SEQ ID NO: 2523 - DNA, 696 bp, synthetic construct
  source 1..696: mol_type = other DNA
atggtggtcaaatgccccaactgcttcagcccgcgtgtgtccaaatgtgaggacacgaacatcaaatggcaatgtgataaatgcaaatgcaagtttaaccacggcgccttcgatatcaatgcggagatggagaaggtagaacagctgacaatagagaagattgagcgggaacgagaacggaccgagcagtttgagcgcgccattaaggaggctaaggagcagttcgaaagagagcgaaccgagcagttcgagcgtgaacggaaggagaggctcgagagggaaaagagagaaaaagaacgcgagaagatcgagaaggagcgggagcgtaaggaacgcctggaacgaaacaggattaaaatagaggagagagagcgagaacggatcaagcggaatgaacgcatccggagagagaatgagagaaacaggattaagagtgacaagcgcgagagagaaaagagcgaggaaaaacgcatcaagaggaatgagcgcatcaggaaagcaaatgaacggaacagcattaaaagagaaaagagggaacgcgagcgggagagaaacgtgatgactattgacgaatactacaggagcataggctacgggtcaacaggaaaatccaaggtctggtcggccattatcatcccaatcctgttggttatctgtatcatactcatcctaatgttttatggcgggggaatgtga

SEQ ID NO: 2524 - DNA, 1044 bp, synthetic construct
  source 1..1044: mol_type = other DNA
gtgattaatattttagaggtggttaccaaatcaagggattccctcctgattactgctccagtgctgattccaggggaacgggactgtgagtttgactacggggaggagccgctgacggagggtcagatcaggcagattgcgcatgagtatctggccaattacagccttgtcgacaagaaccacgagttcttcgagacgcgtgaagtaataggagtgcctgtggagtcatatatcacaaacgagcccatcagtctcaaaggcttggacggaacagtcaacgagtaccccaaaggcacctggatagccaccacaaggatcactgatgaagaggagatggaaaaggcactcaatggagagtacactggctacagcataacaactgtgagcaagaagttcgccgacaagcaaatccagctgcccagacgagtcctgatgaaagacatcaaggacccagtggggttcaccattagcctagtccgcaagccttgcgtgagaggagctaaattttgcagtatgaaagaagatatagagaacggcgacgttgtgagcgaaaatatcgacgataagctggaagaggaaaccaaagggttcgtgcagtccatcaaaggaatctttaacaaggaagataaggatgaagacaagaaccctgaagatgaggatatcgaactagacatcaaagccattgtggatgaggtaaccaaggatttcgtaaacaccgacgattttgagacattcaagaatgagctcgagaaggctctgagcgacaaatttgagacgcttggggccgagctgttcaagagtctgaagaaatccttggagaaggacaaggctgaagaagccaaaaaccaggaagatgacgaaagcgacgaggacgatgatgaggaagaggcaaaggacaatggcgaggcacaaaacgtccagtccagcaaatcgattcccaatcacgacatcaaggacaaccagaaggttgcgaagaccggtgccgcccgggtgtatgaaatcatgggccgggacaacacaggctctgcagtccgcaaactctga

SEQ ID NO: 2525 - DNA, 1038 bp, synthetic construct
  source 1..1038: mol_type = other DNA
atgggaaatgaagctactttaaaccaactggtaaatgagcaggaaaaagccgtgttcaagtccatgcgcactgacatggagacaggcaaggctgtgttgaacgtcgagcagctaggttatttcctgagagaagcaacattagacaatacgattctaagagatgcggactttaagctgatgaaatcattcaagaagcatctcaacagggtaggaatcaacggcagggtcctcacaaacggatatgacgtgaacggcgagaccgacccggagattccggccgctgacgtcgatttcggagccaacgagttggacgtcaagaagctcaaggccatgtgcgaaatcgaggatgacgagaaagaggacaacatgacccaagcccagttcgagcagaccctgctccagatgatgggggaacgaattggggaggatctggaatactgggcattgtttgctgacagcgaagttgcacggagcgacgatccccttctgaacacgaatgatgggtggctgaagaaatgcgccaaccacataagtagccggtcaatagctcctagcaatggaatgtttgacattgaggacggtccagaagccatgttcgatgcaatgatcaaagcactgcctccacggtttcgaaaaaaccgacggatgctgaaattttatgtgccctttgaagtcgaggatgcctaccggaacatcctgataaacaggggcactggccttggtgattctgcccagatcgggttcaatgccctgtcctacaagggcatcccaatcgagcactgctcgaccttggacgatgaggacgggaggggcatgctcggcaatagagtgtgttccatgctgacaaatcccaaaaacctggcttacggaatctggaagaatctttctgttgagcctgaacgcattgccaagaacgagctcaccagatactggttccgtatccgcggcgatgtggactattacttccgcaacggggcagtggtgagcgtgatgaatagtagtgatgcggaggcgctccccgaactgtcccgcgcctga

SEQ ID NO: 2526 - DNA, 405 bp, synthetic construct
  source 1..405: mol_type = other DNA
atgatctcgcatatcattgtgctactcatttgctttataggacttgtggaggccatcctgatggccctcgtcgattgggaggacttggcaatctccgttcgcaagagtccgagaaagctctacaatgtgttgaaggatgagttaggcctgcctgaatggaacgaactgtctgtgatcgaacgacggagcatgaagaaaaggtatgctgtaattcgcgattccttccccgagctgcctccctgggaagagctgtccgtcatagacaggcggagccacaagagactctacaaacttatcaaatcagtgtacgatggcgactacgacgacagtccaagcctggaagggcccccagcggcagtcggtcctcagaaagagattccactggaggaggccgagtatccctga

SEQ ID NO: 2527 - DNA, 414 bp, synthetic construct
  source 1..414: mol_type = other DNA
atgacctggatcgggacggaggatgtcatcgagttcaccggcgtcaagccccagacattccggtttgagaagggtgacaccagcagcctggaaacactcctggagaagtggattctgcaggccgaaggcctgatcatatcctactgtaactatgatttcaatgacctggaggagatcccgccagcggtggttaatgtttgcctacgactcacggctaacatggtggcccttgcacaagccagaaaggacactcctgtaattcaggtgaaggaatggaacgtgcagactgtgagttccaacatattctcaaatgacctcaaacgcgacttgaccccctttgtgcacgaaaggaaaagctacaaaggggacgagattgacttctttgtcatcacaggagatgatgattcgtggtga

SEQ ID NO: 2528 - DNA, 444 bp, synthetic construct
  source 1..444: mol_type = other DNA
gtgaaactgcagattgacgtggaggagctcaagcccttggagccccggttcaaaaaggtcgccaaacgtaccgtcgtgctaaccgctaatgagctgcagagaaacctcaaaaagttatcacctgtggatcatggcaggctgcaaggctcttgggtaatcttccagactggagaactggaaaggacggtgaaaagcagtgcaaagtatgccatcttcgtgaatgacgggacaggactgtacgggccgctggggcacaagatacgacctaagaacggcaaattcctcgcgtttacaccaaacaaaggcaagttcaagggaaagcttgttgtggttccatggactcggggtcagaagccccagaggtttgtcgagcggagcatggaaatgaccgagcgcagagtccaagaatttatgatccgcgccatgatggagatggactcctga

SEQ ID NO: 2529 - DNA, 510 bp, synthetic construct
  source 1..510: mol_type = other DNA
atgcggttcgtgaacactgcttcgctggtgccccagactgtcaaagcatatctggagcgcgaaatctgcgaaggagggttacttgaggacgtagagacactcattccgtccgtgaactccgacgtgcctgtggacccaccagccatctggatagtccaacatcccaccacccgctggtctggcagtcagccaaatctctcaaacaagatcgccatgagcgtccctttcgagttcgtatgcgtggaatacagcgatgacctggaagaggcagagatcctggggatatctctagccagccgagtgggctcaagtctgatgaagaactttaacaaggtgaaagttgatgactccatgcccaacaggttctttcacaagctggagtttgagacactctatcctgtcggagaggtcacggtggtgggcaagagcgaacggattcccgcgaccagcatcatttttaatttcgtttacgttgtggattggttgaaatgtaatagaaggtacgattga

SEQ ID NO: 2530 - DNA, 1281 bp, synthetic construct
  source 1..1281: mol_type = other DNA
atgggcattagggttgtcgggatgaaggaagaggcaagatatggagtggcggagtcagcgcccgacttccaccaggaagttagcaaagcaaaggcttcccttaactccacgccgaacaccaagtcaagcggctcacgcatgaagaaaaaggcacgtgccggcgtgtacaagcctactgccaacatcgaaggtgaagttgatctcaagaggataggacactatctcaaagccttcctggataattaccattttacggatggaggctccaacccaaacgtccacgagttctggggcggggaaaacaataaattgagcagcttcactctttgggtaacttttgatatatttgagaagaccatcgtgggcagcctgctagacaacttcaaaatggaggtgtcggacgagtacatgaaattcaccgctgactttgtctacaagacagaggaaagcgatgagatcgagaacattgagctctataaagtgaaactgcttgatggcgattgggcactgatgttctacgacgtttcggtggagatagacgagaacgcccccccaggcattgtttcaagtttcagttttgacggaaagaacaacatcaacgtggacaagacgatcggcttaggaagcagaggtccccagcggaaagctgctgcccaaggacgggacatttccatttcctttgtctccactctggaacgagagaccttggagctgattcagaaagctgaatacggggaggtaggcacagaaccgtctgaatgtaagttgtgcaagattccactgaagctcatctgcaatgtctgtgaggacacaaccgaccggctagagatcaccttccctgaatgtatctttgctgtggactatgagctgagtgaggccgacgagatcgaggtgaccttcaacctcgacgccatggggacagggtacgccacaaagctggacggtacccgcgttctgaccgacatgtactgcaggctggtgaatgaccagcccgagataaagagtggggagggtgtgacaagcgccaccgtacgactcactgtcaaagacgataacaatcagcccgtggcatctaatgccgtaactatcgtgaatagagtgacggatgaaagctatgaggcgaccacaggcagtgcagggggctgctccttcaatgatgtggaacctgggcgctacgatgtcatcgtggaaggatatgatgtggtggccggaagcatcatctctgtcaatgacgatgaggaaagctttgacattaccgtcgaggaaatcgaagaggattga

SEQ ID NO: 2531 - DNA, 441 bp, synthetic construct
  source 1..441: mol_type = other DNA
atggtcgtcgtgaagaaaagcgacatactcaagggcgtaaaaaagattgaaaaggtgaagatcgaggcgctggacggcgacgagatgtacctacggccgctgtcccaggccgagatcaacgaggtcgacgagattgaggcaaaggctatggggatcttcgagacaaacgagaccgcacacaggggccgcagacagaaaccaaagagtgtggttgaaagcaaagggaaaatcaatctcgaattacagcagaaggcccagcaccaagccaagacgaaggccatcttcctgtctctggataatgagaagaacgtgggagaggaggcttggtcagaaaccgaaattgaacaaatgccccacaaactgtttgaggaacttttcaaccatgtgaaacgattgtccggaatagaactcgatgaggatgacgtggatacttttcattga

SEQ ID NO: 2532 - DNA, 3300 bp, synthetic construct
  source 1..3300: mol_type = other DNA
ttgccgtcatctaatgtaatgaacatcatagtcaaagccgaggacatggcatcatctgtggcccaaaaggttgaaaacagcttcagaaaactcgggaacacaatcgacagcacctttaccacatctctcagcaacaccaagttcaatcaggaactcacttcttttgggacagacctggacaaggtgacccaacggctgaaacaggtaggcgtgaacggtcagtcctcgttcaaccagctgacaaatgctgaacggcgcaccctggaaaagctgagcgaatttgatcccgtgtcagcacaggttctgcagcacctgtcacggatcggaatcaccgggcagcagacattcaaccaactgtcggtgtccgagcagaagtcactgatgaacatgaagagcaccgctcagcagctggaggaagtaaattccaagctgagagtggtggggatcggggcggctcaggccgcgaacatgctgaaccagatgaagcttgacccatccgttggctccaatctggacagggccaagctgaaagtttccgaaatgggctattccctggacagcaccaaagggaagatccttgtcctgggcactgcaatccagaccagtctcggcaataaatgggattcgatcaaaaccaaagttcagaccaccgccacaaacattaggaccgccttggggaatgcactgacttccgtgaaaagcaaggtccagaaccttggaaatgccttcagcggtctgggcgggatcatctcctctgcaatcggtgcgatcggaatggcttccatcagtcagctgactgtgggcttggccatgaaccgggaaaggatgacggccttgactaacgccacaatgggcggcgctaaggccggagatcagctgctcaacggattcacaggcgtgaacaaggtcttcaaggacctaaatgggaacagcaccaactactttatggggctcgacgagatgacgaaccactcgctcgtctcattggacgatctggggcaggctatgtcaacaatcaagatgtccacgggaatgagtaatgaggaactcatgatgttctccagcaccgtgaacgatgttgggcagagagccattctcatgggcaaatcgggggaggaggcgatttccctcatgcaagcggccggcagagggctgaacggcgagtttgacatgctgaagacaaacttcggcatcaccaaagacacccttacggatcttggatggagtggtgccgctgatgatgtcaaaggctaccaggaggctttagacaaagctcttgagaaaggtggcgacatggacggcatgctcgataccactactggacaccttgagacattgaaaaagaacttccgggtggccggccgccatgtgggagagatgttcactccatacatcgacatggcagtccagaaactgaatggcctcaaggagacttgtcccggcttgtttgagaaccttgtcatgatagcgggtgcagtgtccgggtttgccactgtggctcccagcattgctcctatgataagcgtgtttggggatgtgggaagtgcgatcaaaaggacagcaggattcttaggcctgatggaggtggccgaggacgcagtaaccttaaagagcacattcctgacaatcgcccagattgcaggcgccgacgccgccgtgctccagactgccgcaaactcggggttgacggcatctttctgggctatggctgctgccatcttggctaaccctcttacgtgggttgcggttgcactgatagccattgccgtggcagtctacgaggtcggaaagagttttggctggtggtctgatatcggctccatgattggtgctgtgtgggctggtatccaacgactatggtctgcctttataaacaatcccaacgtgcaaggctttctgaaagacctgtctaacgcctggaatgatatctgcgaggcactggcaccagtcatcgattgggctcgcaaggcttgggccgagctgttccctccttcggccacaggcagttttgacattgtccgcgcgatcattgacgtgttcggacagctcggagacttcttaggcaaggtggtgaatgccgtaaaatctgcctggaacgctctcggaggatttgccggatttctgcccatgctgcttgggcctgtaggaatggtggtcatggcgctacgcatgattgtctgcatcctcttaggttgcagtcccggcatagtgcccgcactccagaaaactcagtccgtgtttatgagcgtgttcggtgccattgccgagttcattgggggtgcggtgagcaatgttgtagccattctcaccaggataatctctgcactgaccggcatctttacgcgggtgagttcaatagtgagcacatatctggccaagatgatcagttccgtgatctcttgggcttcatccattgtcagcaaggctaagagtgcaagttccaagtttctgactaatgttgtgaattacttcagcaaattgccgagcaaagtgtggaaccacctgaaaaacatcattcaaaaggtgaccagttgggcgacgtcaattgtgtccaaaggaaagaatgctgccagtaagttcctgactgctgtggtgaaccatttcagcaagttgccaggaaaggtcggcacctatgtctccaatactgcctcgaggatttcttccggggccaacaagtgggtttccaatgcccgaagcaaggcttcatccacggtgagtgccgttacaggcccaatcagcaagttaccgggaaaagtgtacaatgagttcatgggcataggctcacgaatgctgagtgcagggagcgcccttgtgtctaaggcccggcagatcggaagtaacatagtcagcggactgttgaatgccatgaacattcactctccaggtacaattcagcagaaggttgttgccgaatttgagaacaccctatcacgtgtcgggagcatggattcaacggctcttgatgtcgggcaatccgtagggaacagcattgtccgtggcttcactgatttcggcctggataccggtagcttcaatgcggactattccaccgactacaatctcaaccgcaaaaatgacgataacctggacgtgaacattaagcaggaactggaatttgtgtttgacttcaagaatctgcctaatgatgtagatgaggacaagctactcgaaatgctaaaggaaatggttaccgacaagagcgtcatccaggccctcgtgagcaatcccgatttccaaagcatggacaccaaggtgaaaaacagcatcatcgcaaaagtcaagagagcaagaggtgtctga

SEQ ID NO: 2533 - DNA, 3039 bp, synthetic construct
  source 1..3039: mol_type = other DNA
atggcaagtgttacaaaatacccgagtaacgtgtcacagaccactggcggaaagttcgtgtccttcagcaatctggcaaacatcaagaacaatgctgacggggcgcatgccgtgagcagtgttcttatcaaaagtaagaagcagtctccaaacagaccgtccacagtctcatgtaaaggctttggattcagtcttcccgaaggtgctgaacccacgaaaatcacagtaacttataggcacaggaaaaatgctggtagtgactacagctcaaaaaacaagactcacatctgtaacatcgggggccctaccatctcattgttaggagtgagcggattcagctccaagggaagcgggtgtaccaccactatgaccactcacacaaaggctttcagcgttcatggcaagctctctagagcccaagtaaatagtgctaattttggagtgaagctggactatcctaccaactccaacacctacaacggttacatgcggataagttacgtccgtgttacggtcgagtacatcacgagccagtacagcgtgtccgtgaagcatgtctccggaacctatgaggatgaggactatgtggtctcattaggcatttcgaacaagaacctcaccagttacaaccccacatgcacgctgacggttcctgcgggattcacctataagggcgtgacaggtgccgccaccgggaccgtaaccaaagtcaacaaccgaactttctcgtggaaccctcagctgcagggccgggcaggttcgcggcagatcagcctagcatttgagccaaatgtgacatttccggaaggcactgactcatattctggcacatttagactgtccgagagcctcaacggtgccaacagtagcctcaatgccgtgatcagcaaaagacctgcgccctcaggctccgaaacggctggcgaatcgacacaagtcttggagaacgaggataccttaagcgggaacgattcctacctcatcctcaatgtgggcgaggagttcctgttctccgtcgagttcacggatgctgagaacgccgtctacaatcgcatcggcaatggagaggacgattggggacgtattgcactgactttgtttaaactagtggacggcagttggatcggacgaagccattacgatgtgtcaacccaactggaatacgatgaatcaattcccgaggaagtggcattggccgaaggcgacaagtggagcctcaataagaccctgagcattggtcaggtcgggacctaccggttctccctgagatacgagaacgagcacaaccacgagcttgactatgacatgaggcagttcctggcctatgtccgcccctccgaggaacagctgggcaatccatgtttcactgtgctgcggctgtccgatgaggagtgcgacagattaggctccctccacacatacatcgcccaggcctacatgaaacacattacagatgacacacatccccgggattggtaccgcaaccttcgccttggggtgttcaacaatgcaatcgccgataacataacagtaacctccgaagaggtcgacggtgaaatcattgaaactgtggaggatagcacagactatgaaagcctcaccaatgaagacatctttaataatgccgaatactggtcggatgccttggccaacgtgaatgagtttgacaatctggaatgcgagtttacctacaatgaggactatcctctctgcatcatcatgaccggggactacaatgaggcggatggctatgattacgatgtggggacggtcgaatacacaaatccatgtatcgttgagaaggatgtgtacaaacaacgagaacccagcggcaactatccaattcctctggagaatgttctatcaaacgacgattcaagcgaattgggcatagagcagttcaacatcagcacgccaataatcctctacactcttcccttcgatgagggctacggcaccaacgaggagatgactataaggggaatcgaggttagcggaactctggagcagagcgatgagctgacagtgaatgctaagctcaaatctccaactgggataagcggtacaagaagcattatcatcgaggagaatgacctgaccctggactccaccaacgagttcaggattggagggtttggagacctgtggggcttctccacatttgacttgactaatctggatgactttgaacttgagctaaccgtgaacaacaatattcacgatactgaggctaacattaattttcaggacgtgaaaattacattctatctggaatttatacaggaccagaagataaacatcaagatcaacgaagaggacctaagcttttatggggtgttcaccgatgacgtgatcattcctgaagggctggagacagatacttcctttctgacgatagacggcaccgacaccaacgacgcctaccgacagaacatcaaggaaaaggagattgagcttattctctacattgcagaatgcgatttccaaagcagtactgacatgctgcggcaactgagtaaggtgctcgtgaatgaaagggatgactataaccgtccgattcccaaccggattgagttctcgcactatcccgacgtctactttgagtatgtgatggaaagcgcattgtccgtcgagtcagacatctcgacctacaacatcaaggcgaagctcaccattcctagcgggacggccttcagcaaaaagacctattccacaggagtagatggctatgtgcaggggattgctccagtcaatccagtaatcacattcaagccccagagtgacaccgtggaaatcctggaacgcaaaagcgggcagcgctttaacatgacctacactgctggctgggaaacaatgattgccgagatagactgcgaatcccacactgttgttctgaaaacggatgaggacgattccgagatgacggacatcagcggtgcctgcgacttcaatgtggactggttcagcctgcatggagagtatcagtttgaagggaccgggtgcaacatcaggaccgtaagctacaacgagcgctggtga

SEQ ID NO: 2534 - DNA, 3309 bp, synthetic construct
  source 1..3309: mol_type = other DNA
atgggcattgctattgtcgtcatggacaatgaagaaaacttcctgcaattccttgaccccgatttatgtaccatcaatgagaccatagaggaactgggcctccggactctggagttcaactacaaatttcaggactatgtggaagaccgagatcttttccgaatcggtaacaagatctggattagcaattcccaaagcctggaggactgcctctatgtgattaacactcctgtggagaacagcgtctatcaggagaattactttgcatgcgagattgaggaagtcttggctgagctatactatgctccattgttcagtcagaccgaactgacgagtgccaatggcttcacgctgcggaccaccaacggagagcagaccgttgatgtggactggaatgccctgaactactggttcggcctgtatttcaatataggggttgttcaggaatgtttgggtacctatgcgaacaggatcactgtaaacggaacaatgaaccgtttgaacctgcttagatcgattgaagagcagactggaaatcgctttgtaacaaggtatgagaaagacttgctggacaacaccatccatcgctatctggatttcctgaatcctgtgaacgtgagcaagaactggaaattgaacatcgagtacgatttcatctatgaggatgacggggagtactgtgaggcctacacaagcgatggaaatcccatttccgaaatctatgatgacatcgaggaggaggacgatattgtggacttccctccatcaactccaagactgaacgtcgatcccgaaggcattgagttccggatagtgaacgaagactttgaggtcatcaacagtgacggcaatgtctatgtcgatgacagacagcagactcctctcgtctggagcagtgcgagcgttggctttaccggcgagaaccggcatgtcctaatcacgttgtccaaagagaaaagctttgtggaactgagcgtcaatgggaaaagctttgtgatgctggacaatgcagttggcgatgtcgtgagcacgggctttgtgaacccaagcagtgaaccggtgcaaaggtcgagcactgtaatccctgacgattcgtattttgaaatctttgatgtcagcaggaaccgggctgtcttccgcacctgcataaaccgggagatcgggcatgtgcacgaggaggtgcttgacttcggttacaacctcgaggaggtgttctttgaaaccaacgaggaggatacattcacggccattagcccagtgctgagcctggatgacgattccgaggggctcaccagagccaatatgaacaccataatcagtaactacactaatctcagcatcccaaaagggaagattatccccatgattctggaacgggtgaacgtcaaagcaaccacgctggccaatgcaaagagttcgttaggcacttttgatgtgagccggaactactattcaagacccgtgcagccgaatgacagcattgacacatcagacagttcaaacaacacttgggagttttggcgagcgacggcttactggagagctccgtttgcaaagttcggcggcgatctgcacgtggcgaccgatgccgtcctcaaaacacaatacactgacatcagcggaaggtccgacaatggggacgaacgtagagttacaagacccaagatgggcatggtggaaaccggcgatgaggacgcctatgccatctacaatgatgtggcactgaagctcaaggagaagatgtatccagaatttaatgtgtccgtggatgtggccaatctccgaaaaggaaggttcaatgactacagtctctacgataaggtttacataaagctacccaactccactgagcttgtgaccgctcgcgtgacgaaaacagtgaaggacgccaatgacatttcgaggaacacggtggagctgtcaaactacaccttcagctccaccataaagaacattcagaatgagacattcatcgacgcctacaacgtcagcttcaagtatcccaacagcaagaccctctctgcccggcttgtgaacctggactatgacaattccaatccggattccgttcagtatcctgccaaccagatgataacgttcaccgtttacaataaagattcccagtccatagtagcctcctacaacaagctaaccaatgcccagggctatgccacaatcaacatgaagtacgatcccggaaactatgagatcgacatcggatttggaggggacgaggaataccttgactgttcaacatccgtggaagccaatgtctacggaaagaaggtggtggaaaagcctgttgtggtgaagactaagtccaagacaaccaagaaaacatcctccaagaaaaaggcttcttccaagagtactgccaaaaccaaagcaaagacccgaagcaccaagagatactacagcaagtatggcgttagccctgacggtaaatatctcatggcgatcggtcgcccaagcgcaagtggagagctggccaaatacgggtacaagttttacaggacagtgttcgtacggaaatgccctatgtgcggaagcactgagatctactggtcaatcttctgggcaggaaacgagcacggatcgtggggaaagttccccgctaccggccggagagaatcaggctccgcagaaggtcaaatcttttgcaagaagtgcgatgcggattggtcaatcttcgggaacaaccacaattcaagccacaaggacttgaaaatttacaagaaacctgcccgcagcacaaagtcagaagcctacaccttaaagaagggcaaaatgtactatgacacagtaacagtaaccgtcaaggagaagaagaacacaagctccaaagaacgcgtagtgctggctaatgacattcctaaagccattgtgcagctcgctctgagcattgtggggaacagtacaggtcttgctgctgcgaagaagattgccaagtggtgcgggcacaagcgaaacctgaaatgggttgaatacaggaacttcaaacatggtgtctcttgggttcgccgtaagcgcaaatgtaactgttgcgatggggcccgcttcatgctgacgctgatggacgctgcagggtgcactgagaaactcaggttacagtatgtgaatgtgagcggtggcaaaggcgggcacgtgttcaccaaaatcactgtcaaggaaacaggctcttggtgctatgtagaccccacctgtaaatttgagaacggaaaaaacccctggaaccactacatcaagggttacggcagtcccccagggcatgtctacaattacaatgggcccatcaatccgccattttga

SEQ ID NO: 2535 - DNA, 1518 bp, synthetic construct
  source 1..1518: mol_type = other DNA
atggtcgagaagatcacagtgagtccccaggaagtcagagggtacggaaatgttgttgacgagaaggaattggaagattacgggagctaccgatgtgatgtgagcgagagctcggaggtgatcaagggtgttgaggaacggatattcagcgtttctggtgttccggctcccgctctgagcattgccaatgttactgaagacactcgcaggggccggtgcgcccacatctccgcctcctttgaggatggggaaggcgatggcttggatgataaggcaatttccctcaaaagcggcgatgatgtcctggcaaccatcacaacgggaagtggggaaaacgtgtttgatgtggtcctctatgacagcgctcagctctatgctgtctttgatggagatgactattatcctccagctgtcagcgaagcaatcaccgtcaatcctgcaaaaagcctgtgggatgtggagttcatccttgacgaagaggagtacgaagtgggagacacagccattctgtccgggaccgtgggaacgattgtggacgagattgtggacggggagattgttacccgcaggcaaatggaggcgaatgtgacactgaccctagtaacggacttaggaattaggcgctgctccaccaatgccaacggggaatttgtgcttcaggtgccgaacattcagcagaaccaatggagagtagtgatcgccgccaccagcacccatctggtcttcaatggcctgatcgatgtacccgtccatgactattccctcgtgatttcagggtcagaaaattccactgccgcctccactatattggtggtcggtctcaccgacttcaacagcatggtagagggagccacaatatccatcgctgggagtgacggctcgtcttacaccgctgtaacggactcgatgggcggagccacagtgaatgtgggcagactgaacggagccacaacattcaccgccacttacggcaatgtctccagcacggtgacggtggtgccacccttggactggtacgatgcgtcaaactacaccgcaggctcaggccggatgccatcctcgagagcgagttcaatctatctgcaggctgtgggcggacgatggctcaacaaggaatttactgacagtgagagctatgtgctcgagtttgacctgatcctgagcaaaaacaatcgtgagggtttctacttcggtgcaaaccctaacagtaacaccaacagcggaatcagcatcttcaaagacatctctaacaccatgattgagacattcgattccacaggcactgcaatacgcctggaaagctcattatcagggagctatttcaacaccggcactcaccacatccggatcgaaagggactatgacgtggcctacatttactttgacgaggacctgatattcgagtttgacgatgagatacttagctacggtgcggaggatcagatgtacaataccgtcggtatcctatcttggggcagtggcatcatcgagttcgggaactttgagctgagtgactga

SEQ ID NO: 2536 - DNA, 159 bp, synthetic construct
  source 1..159: mol_type = other DNA
atgaacgatgaaagctgccgcaactgtgtcttcaggaatgaggactacccaccgttctattgcgattttggggacgacaaccccgtgatctgcaccgtgaagatgaaaaagatgcgggaatacaagaaagagaagctcagaagctgtctggacggctga

SEQ ID NO: 2537 - DNA, 687 bp, synthetic construct
  source 1..687: mol_type = other DNA
atggtgcggttcagccgcgacatgctccaggacggagcgaagagaatgtttaagtggctacgcaagggcgaagggctgcctaactacttgattatgtatgatatggaccggaataaggagtataaactggtcccaaaggaatatgcagggctgtacgagtcccgaaacattttctggatcaagaacggacgggagccaaactacgtgacactgacttccgttgcaaggaatccccttgtgatggactaccagaacacgaattacacctgttgcccaaccagcttgtcccttgcctcgcaaatgctgtaccactataagtcagaaagtgagtgcgccaaggccctgggaacaagcaagggcagtggcacaagccccgcacagctgatagccaatgctccgaaattagggtttaagatcatccccatcaaaagagatagcaaggaggtgaaaaaatacctcaaaaaaggtttccctgtaatctgtcattggcaagtgaaccagagcaggaactgcaagggagactatactggcaacttcgggcactacggtctcatttgggatatgacctcaacccactatgtggtggccgatcccgccaagggcgtcaacaggaaatacaaatttagctgcctcgacaatgctaataagggctaccgtcagaactactatgttgtctgtcctgcgtga

SEQ ID NO: 2538 - DNA, 2250 bp, synthetic construct
  source 1..2250: mol_type = other DNA
atgaaaaagcactgcttctactttctgggggacagttttgccgacatatgcaacgaggccatgttttgtgagaaacacttagtggaaggaaactatctggattcaattatccgcgcaggcaaggctagcgagataattaccgtgaacatctgtgaacttgagggccaagacggcctgataagcagcgggcagaagaaacggctggaaatgcttggatacaagggtatcatcagttatgacatctacaaaagattgaaccatatcaggaaaatccgaaataaggcggtccacgggcatctgagtgacattgaggacaacgccaatattctgcacgcctatctgtacctaatttgcgcatacttctataaggagtaccgcgacactaacttttccgcggaagactacacgggccctatcatggacattgcctcgaagcctaaagagactgcttcagagaccagcgaggataatgaaaatatcggcgagttcatttcatccccactggatgattaccttttcgagaagtatgacgacagctacctgctcaacgagctgtctaagcttaaggactcttcaaaggaagctgtggaagacgacaacctcagcgagttcaaggaataccttcacatcgaccgctctatccaagaggatttcttaaaggcactcaacagagccactagtttcaattcatctcatctgattatgctttgcggtagcgtgggagacgggaaaagccacttgattgcaaacctgaaaaagaaaaacccagaactctttaaccagtttgctatccactatgatgctacagagagtttcgatcctgagaagaatgccatcgacacgctggcctcagtattggaacccttcaatgacaacaaccttaacaactcgacagagaaacttatcctcgccatcaacctaggtgtactgaacaacttcctggaatcctcgtatgctaacgaggattacacgaaactcaagctgattatagaagaagcgaacatcttcgaatctaacgaggtgtccgacaacatctacggagacaaggtgagtttcgtcaccttcagtgattacaacatgtttgagctgaatgacgacgaaaacagcaactacacaagctccaagtacatctcttccctattcaataagataacccagaaggaggacaccaaccccttctatgttgcatatctcaaggataaggacagccacttcatcaatcctataatctataattacgagatgctgatggatgaggaggtccagaagacaatcattgactacctcatcaagattttcataaaatacagaaaaatcatttccacccgcgacctgttgaacttcatttacgagatcatagttcccccggaatttctgaagagtgaggatctggacaatatcaacgatttcatggactatagcctccccaatctgctcttcggatacccagagcgaagcgatctgttgaagctatgcaatgagctggacccgacactgcatcggaacgagtctctggataagttcattatcgacctcaacattaacgacgatacggaaaagatattgaatcgttactttgatttcactcggtttaacttccttgaagagtacggcgagtacctggtcgattttagggagtttaacaatagcgaaaaagagaaggtcaccaatattctaattaggttcgcagtcttctatggcaagagcattatcaagaataatttcaaggataaggtgtacctgaactatttaaaatatctgtatgcctacaatacccagtcccataaggactacaaatacctgttcaccgaagtgaaggacgccatctttaattggaaagggtcctataagaagaacactatctgtattgacactttggattccttcaaagtgtataaaaacctgaaactcaagccatctgttgacaaattcgaaaaatccctgttggatgggctctttctcggaaatcggttcaaaacagacataaaaatttacttctccgtagagtctaacaaaaagaaaatcccccttaatgtggatttttcactctatcagtacatcatgaaattatataatggttttaagcccaatcagtcggacaaggacgatctcatcatcctcgacgaatttatcaacaatctgctggacgaggatacagatgatgatttgtatgtgatcagtctggagacctacgaagagtttttatttgagtccaatgattttggcacctttgaatttaagaggggctga

SEQ ID NO: 2539 - DNA, 1371 bp, synthetic construct
  source 1..1371: mol_type = other DNA
atggacttctcagaaaattacaacatcttactgaagcagatgacctgtgacgtgaataaaaggaagctgatccatcagattaaccagaatagcccactgttgcctttcaaaaccaatacgcccaaaaaggccaactttgagaacggcttcgacatcatactgggcgaactgtccagaatcctgctgaacaaaactatcgagaaaaactttaaacttgataacattgtttccaacctcatcgataataatattgaaatcgaagacggaaccaaggagtacataacaaaactgctcaatgaatatctgttcgatgaaaagaatgatctgaaaataagccacccgaacctctacctgtacatccctctttccaacaacaaaagttccaacggagagcaggaggtcgccctcttcctgcgagatattttctgcaagaataaccagaaccttatcaactttttcgagtcatatgacagcaatcacattatcctcaatctgatcctcaagaacactcccaacttgcaccataagataaccgaaactaagtacgtgattcattttgaggagatcgccaatttattcaatgaggacatcaactatgcaatcctttataagaaatttttcatggagaacatcgggaacattttcgcttactactatttcttttatatcagccagttaattctaaagatttcaaaaggctttaatgataataacgaatttgagaagctgtactacctcctcgactgggagtctgcaagtaagaatcggaagtcgctgaacagctactccttactcaagcaccactctaagcccctgtatgcaaagatggccgtcatagaccagatcaacacactactggggacaaacaatctcctcgagaaggatatttccgaatatttcaacaacctggacatcaactctaagaacaactttctgcacttccttaagaaatgggttagcgattatcgttacgtgaggaatttcgacgataaggagctgccagacaatttgctcgagctgacagaaatccttttcgagagcctgaaaaacgaaaaactgggtgtggatggcgcggtccaaagccgctacgccttgaaccttgaggacatagctaaaaagtacctgttgaagcggcgcggttcgtatgggtatgtgctcaatattaaccgggatatgttgcttgtactgaccgccctctgcgtgaaagacaagaaaatcaagctaaatcagctattcattgagtttgagaaaagaggagtgtactttgacaagtactcaaaggaagaggtcgtaaactttctgacgaagttgaatctgattgacaagaaaagtgacagtggcgatgcgcaatacgtgaagccagtgctgtga

SEQ ID NO: 2540 - DNA, 5223 bp, synthetic construct
  source 1..5223: mol_type = other DNA
atgcttaaccagttttacgactacctatccaacaaattactcaattactttgacgacaccaagatcctgagcggtgagaaatttttcatcagcttcgatgaagatgaccagatcatgagcttctataactccctcaggagtattgccgagacgaatttctcctgttctgaatttatatatgtccatactatttccggaaaggagtacaacacttattccataaacattaacggagtcaagtttgtcattagcgaaagtctgacaattaacgtggacttccttgtgaccctgagaaatcaagtgaccagccaggagggggtttggaaggacacggccctgctggtgatctgtaatgaagcaatcgacagtattggcaaggggatgcgcaaccttcagaaggagggcatgcccctgaacgtcaagtcgatctccaaaaatctggaggatgaaattaacgattcccaaatcctcaactactccgataagcagatcgctaagttttctctcaacatccaggaggaggaactgtttcaaacaacactctgggactacgagaccatcctcagcatcatcaacaaggggtttgtttccgatgaggacctgcgcgagctcaatcttttcaaagatgaccagctaaaccaaaactctccccaaaagatgctgaagcggctcaaggaaaattacgacacattcaacgaggtaaataagttttcacaatacggagataagaaagagcagctgaagaacatgtttaccgattcgggagtgtctatccttagcaaggacgactggtataaagcagagtggaagatggtgaagaagtcaaaggacgacttcatcaaccagcagaaccccctcaattacaacgaaaacttggagaagatcaccgagaatggcctcaattattgggagatccctaactcatttacgaagactggaaaaaggaagcgaaatatcattgtgtttaatccaaaccactcccatgaagttagtctcaagttcagcttcgaccagatcttgagtaactcattcctgaatacaaattcaaagaaattcaccatcgctcgcggcaagtcactgattgtcaattttacgctggactctagtgagcccattttcaagactataaagtacaaacataagaatgaaaacatctctgaatttacctttaacatcgtggtgctcaatttcgagcctgagattttcaattcgattaagtctcgttttagcgtcaacgtcaagtctaaacagatcatcgtaaccaatgacgaggatagtttcgatattgtgtttgggacgggttcaaaagaaatagagaagttaatcaaggagaatggtgagaagctgtatctttatgacgatgaatctctgataatcagcgagcagtctcctgcgtggaacgatggaaagcttagtttcaaactctacaaagacaacaattacgcccccttcttgatcaaagaaaaatcgaagaagaccctgcccgtgaactcctacgtaatctggaatctcaaacgcagaaacatggaaaactttatcttcaatggagtaaaggccgttcaagatgtcaacagtttctacctcgtggaagagtttaaagagtttctaaaaatggaacgagaaatcattaaacaggacatattttacgctaaaaggaatattgatggctctctcgaaaaaatcgaagtgtcattcagtaacgagctcgaaacggcttacatggacatattcaattactacaagaccttcgatgactctccagaagacaaccttcccagtttagtgtatctgaacgatgacttgaaagagttgtacaagaaattcataaccatcttcaataaggagataagcgagattgaggagaatagcattctgtcggattttaaatacaagaagaacttgcttaagctgggtcgtattgagaccgacaacaagataatgtattctcccctgtcgccactaaatatcgcgtaccaactggaggtttctaagcagtgcggcaacgaggacctgtccgtgaatatactggagcggttagtgcccaacaacttaatcccttacatttgttccgacgacggaaaagagttgtttcggccgatttatcaggaagaagcccatgaatggctgatctacgagaaatccgaagaagtgtcaattggcacaacaaatgtattcatcagcaacgttgtgactgaaaagcttaaccagtttgtcaaacactttaactacctgtttagcttcaacaactccagccccattaagattaacctcatcaacataaaagatgataaggaagttgtgaaaggcgtcttcaacttcattagatccagattgccggataagaccaagacaaaaaaggttatccccgttgagatcaacatctacaacgacgccgaaaagagttctttcgacaacctgttcgactgccagtctgaaatccagctgctggaggagtttggaatcaagaaactcaagtccgacatcttcgatccgatagacatcatccacatgattcagaacaatattagctattataaacatccatttaaaaaggaggaatacgaatacgctcatctttccttctataaagtcaaaagccacaacaacatcgccaatgacaacatggacaaaattgagactggcctctcgctgaacggcctgctgtcgagcgtgacctcaacgacgaaacactcagagtatcggacgggtttcggtacaaacaacattctgaatatgagcaatcctctgattaagacagtgattaacctgaacgaacttgtggagaacagcaagaacttcggcaaaaatacctattcaaaaaataagtccgttatcaccactgttgagttagaggaagacaatattgaagagttgtacgacaagtctcactgggtaacattcatcgaacctacatttgggatcgaatactttgacagtagcgatagcaacttgatcatcatccactacagcgaccagtacagttcctctagcaagtatgacactattaccgtgactaacaaatcaacacagtacgaggagattatacgcgacttcctccagtccaagtacgtcaaggttaccgatgaggaattgtatgacgtaataaagatgttcaactcaattaatggggagtggctcctgcgagtcattagcaactccggccactacgacagggaaaaactgagtattatctctgctatcaagtattgcctgtccattttggaccataaggatattgtgtggattccagtgagcatggaggagatcctgcgcatcgcaggaaatgtgaagctggacaagaataaaggcatctttgacagcaagctgataaagggaaaccacagtgatgatctgctattcatcggggtcaagttcaatgaggataatagaatcgaggtgatattctacccaatcgaagtgaaaatagggctgaataacgcttcaaccatcaagaaagggaaaagtcagttagacaacacttataagcttctcaagacccagctacaaaacatcaacgtggagaacagtgaatttcggaataagttctttcggaacttcttcatccaaatactgctgtccaacgagcagaaactggtcaccaaccacatttgggatgaaaaaggactcgaccggatcgaagagtttaaggcagaactcctgaacgacgagtacgacatcctctatggtctggaggagtacatcggaaaagggtcgttggtgagctttaaaaaagaatctcatcacatctccatctatatggacgtggataagcaagtcattgagctcccagaagactttgcttattacgggctggccactcccatcagagagatccacgatgagattcagtccgacaatacagatatcctggctgaaaccctccttagccatgtggatattagtgagattagagccaagaacaatgatatctgcgactcaaatgaggatatgagcatagatgatgatttcgacaacctgtccgagtttgaggacagttttatcgaggaagagtcagaaatcagcgaagagcccgatgaagagttgaccgatgcgacttccagcagcgacaatgaatcaattgagaacattggcgagtcccctagcaagattagcaatgtcagggcactgatcggcacccagaagggttacaatcacaaagtgtattgggaatttggccatccttctctcgccaataggcacatgctgattcaaggcaagagcggacagggtaaaacctatttcatccagcgaatgcttaaagagctctccattcagggcattcccagcataattattgattatactgatggattcaagccgtcccagctggagcctaacttcaaagactccctgggcgataagatcagccagtacttcgtggtcaaggagaacttccccatcaatccatttaagcgcaacacgatcatgatcgataaggacatattcattgaagaagacaacagcactattgcgagccggttcaagtctatcattaatagcgtgtatgggctagggattcagcagtccaataccctgtatcagacagtgctggattgcttggataagtacgacgataatttcgacttgaacatcctaaaagaggagattctaaaggacgagtcaaacagtgcccagacagtcctgaataagctgaacgagctgctggacaagaacccgttcgcatccactgacttcgactggagcgtcctggataataaggacggtaaagtgtacatcatccagctcactgccctttcgaaggacatccagacaatcatcaccgaatttatcctgtgggatttgtggaattacaaactgaccaacgggagtgaggacaatcctttcattgttgtgttagatgaagcccacaacctcgatttttccaacgactctccatgcagcaagatccttaaagagggcaggaagtttggatggtctgggtggttcgccacccagtccgtcaagggctcgatgaaaatcgacgaaatagccaaattagagaatgccgacgagaagatatacttccacccaacggatgtgtcaacaatcgcgaaagacctgagcaaggacaatgaggacaaaaaaatatacgagaaagagctttctcagttgacaaagggctattgtatcgtgcaagggtccgcaatagattcaagtggcaatctgtatcagccaaatcctgtaactgtgaagatcgaggagataagtttcgatgagaactga

SEQ ID NO: 2541 - DNA, 3165 bp, synthetic construct
  source 1..3165: mol_type = other DNA
atggagagtaaggacagaatagagaacacgatcttcaatgacaagcggatggatgcttatatcgacaagtacttcgaagagttcactctgagttcggagcaggaggaggccctgaacatttggatcgacaagctgaacaacgaccagctgacctcggagaaagggaattaccacaacttcttcgaaatcattcttgaagacctactcggttacaaacgtagtgatgtgaaacacgaggagaacattggtgatgaaggccatcccgttgagttcgtgttggagaaagacggtaaagactacgtgatcatagaactaaaaggcaccacctacaaagacctcacgaagcgtcgccctggccagcaaagcccagtcgagcaagcgacaaattacgcttccgccaagaaggaaactgaatgggctaccgtgtccaattatgacgagtttcgattttttaatccaacagcacgggataattacatttcattcaagttcaggcagctgaaagatctggagatcttcaagaagtttcttctcgttttcagtaaatttagcctgatcgatgaggacataccgaagaagctgctgaatgaaacaaaggtcattgagagagaacttgagaacgaattttatcagctgtatagtgacactcgtttaatgattatcaaggagctggaatactcttccgaggacatcaataggatcgaggccataaaactttctcagatcatcttaaatcgctttattttcctttgttttgccgaagacctggcgctcatggaggaagagaccacggcggacgtgctgctgacaccccttaagcacagaaacctgatcggaaacaccatgtggaataggcttaacgaattatttatctttgccaaccaaggaaacaagcatcgccgcataccagcctttaatggaggattgtttgaggacgatctgtcgaacctgaaaatcagggacgagattgaagacaggtccttcttcgagaattggaatctgaaagaagacttcgaagacaaatatgaggatatcgctaagctcatcggcgtttacaaggacactctgaacccaatcttcattaaccttctgatcattagcacatacgactttgacagcgagcttgatgtcaacatcctcggacatattttcgagaacagcattagcgatatcgaggagttgaaaaatgacaaccaggagcagcggaaaaaggatggagtgtactacacccccgagtacatcacagactacatctgccggaatacaatcatcccctatttaagcatttctgggaaggccagcacagtgcacgagctgctttacgagtatgaaagctcgaatagcctggacgtgctcgacagcaagctgacgaacatcaaggtgctagaccccgcctgtgggagcgggagcatgctgaacaagtcagtcgatattctgtttgaaattcacgaggcactgcatgcctccaaatacgctggcgattcatctctggaccggtttttcgatagtctggaaaagcgaaaggagattataagtaataatatctatggggtggatctgaacgaggagtccgttgagattacgaagctgtccttgttcctaaagctcgccaccactgtgggcctgaaagaggggttccagcttcccagtttggacaaacacattaaatgcggggattcacttgtggacgatgagtccattgccggaaataaagcattcaactggtacgaatcattctcagaggtttttgagagtggcggctttgatatcatcgtaggcaaccctccgtatgtggatatcaaagaaatggatgaaaaaaccgcaaagtacatcttcgataattatgaaacttctttcaacaggataaatctctattctacatttgtggaaaaaagctattacttgctaaaaaacgaggggatcttctcctttatcatgcctaattccatcctgtttaactctacttactccaagatcagggaactaatcctgaataatacctccatactgaacattgtacggacctcggacgatgtgttcaaagatgcgaaggtggagccgattattttgatcttcaagaagggctacgacgagggaaacaagaccaagatactcataaagaaggacgacatggacgagattccaatcaacaactatagcgaacacttctttacccaggagagatggtttgaaaacaacagcatcattaacatttttagcgacgactttaccttcgatctcctgaagaagattgacggcaacaacgagcgcttgattgactattgcgatttcagtctgggtctcactccttatgataaatacaagggtatgtccgaggatattatcaaaaatagaaagttccactcaaaaatcaagctggacgatacgttcaaggaattattggatgggtccgatatcacacgctacaacgtgaagtggggcgagaaggagtatattaaatacggggactggctgggagcccctcgggaggagaaattcttcaagaatccccgcattctcatccgccagattctgtctatagcccctaaggaatctcgaaaaaggatcttcgccgcttacaccgaagaagagctctataacgctcaaatcgccttcaatctggtcctgaaagagggcttcgatgataaaaatctcttgaagtacttcctcggaatcatcaacagcaaaatgatgacttggtactacgaagagcggttcatggacaagaataagaagaacttcgcaaaaatcttgattgaaaacgctaagaacctcccagtcatcattaactcaaactttctggatgagatagtatctaatgtggattcaatcatagagttaaacaaagagttttattccgtcagaaatgcattccagacctggcttaagatcgagtttgagatcgagaagctctctaagaaactagaaaactactacgacctcaacttcgaagaatttctcaaggagataaagaagaagaaggtagtcatccgacccaatcagatccaggacctctccgaactctttaacgaaagtctgggcaaaatagaatatctgcagagagagatcaaggaagcagacgagaaaattaacctcctggtctatgagttgtacggtctgaatcatgaagagatcgaaattatagaaaatagctttaacgactga

SEQ ID NO: 2542 - DNA, 261 bp, synthetic construct
  source 1..261: mol_type = other DNA
atggacgatgaaaccctgatcctcattgagtacatcagaaacgcccccacccgggagatggtgctaaagtccttcgaaggggtggactttatacgaccaatccagatcagcaggaaaacaggcattcaccccaacaatgtcagcaagaagctgaaggacctgcgcgaacacgagctggtatatgtcataaacccggagtaccatgtgcctaaactgtaccggctcacggagaagggaaaaaatatgcttcagttcttgtga

SEQ ID NO: 2543 - DNA, 2061 bp, synthetic construct
  source 1..2061: mol_type = other DNA
atgaataagaagattatcttatccctcctgttggtcctcctggtcgcgattagtgtctctgccgttgccgcagctgatgctgatgtcacatatataaacgatgccgccgatgtggacgatgtggcagacgagaaggtggcgccgctgacagcctcggctgatgcccaagacatccagactaagcttgataatgctaaacccggagacacaatagagctggagaacaagacatatgacgtggatacaacatttaatgtaactaaacaggtgaccatcaaggggcaggacacggtcatcaaagctagcggcgcctcccagggtgggagcggcgcactcttcattgccaatgaagccggaactgcgtttgagggaataacctttatcaacacggacggccataagaactatggagaacaggtgagcggatatgctatccaattagctattgagaatggtactgtcgacaactgcaagttcatcgactggagtagcggtgtttacgggaaaggcgcctctttctgcagcattaccaactcttacttcaacgggtcatccgaacaggtgaccaatggcgggaaaaaagaatacggtacaaaggcaatcaacctaatggggtcccacgacattaccgtgaccggatgtacctttgaaggacaagtgcttgacgccatttccattgccagcaattcaggtaacaacatcatgaccgacaacactttcatcgacaactgttatgccatctacttcgggggcgcgtccacccagggctgtgtgatcgcgaacaactcgttcatccggtgcggctactgcgtggatgacaagggcaacgtaatctttaaagatctgcctataatcagtactcagaaagccgctaacggatacatcattgctgataacacgattgaggcaaatgagggctctatctttatgaaggctgagtcaggaaacacagcacacggctatccaagtaagatcggggacataaacattacaggcaacaccattaccgccactgccggggctaatcccgaaggcataacattcatgtacatcctcagtaactctggtcctctgaacccatatgcacccattgcaatcgtgaacaacaacctcgacgccggcataacccctgtgaccgtctggtatgcggactgggacaatgaaaatggtactgttataccggccgccgataaggccgttacctccatcaacattgccgagatcgctgccgcagatggcaccgtcactgtggagttggtggacgttaatggcgctcctcaggcagggcagaccctgtcctacaaaatcgacgatggcaatgcaaccgagatcgagacggatgaaaacggtaaggccgtgatcaatgttccaattgatgaaaacgcgacagcccaaacagtggccgtggaatttgccggaactaacgacctggctgccagcagcgcccaggtgtcattcaagaacactgcaacaaagaggacagccacccagatcaatgcgaacaatatgagcgtggtcacgctggcacccaataccggggacacaaatgacaattacttcaacgctaccctacttgatgcagagggcaatccactggtgaacaaagaggtcaaaatcggctttaacgggaaggagtatactaagaccacaaatgagaatggggtagctcagctgaaaattaatctgggatacaagggaggatacacctttgctgtagcattcctcggggacgatgagtatgaagcatcatttggagtgtacttgattaatgtggccgcgcagacgcccaagctcactaccaaggctgccacatacaaggcttccgccaaaaccaaatccattagcgctaccttcaaaaccgagcagggctcggtcatcgccaataagaagatcagtttcactgtcaacggcaaaacgtacactggcactaccaactctaaaggggtagccacggttaaggtgtcaatcaataagaagggaacatacagcttcacggctaaatatgcaggtgacaacacctacaaagccgttagtgccagcgcgaagctgacgataaagtga

SEQ ID NO: 2544 - DNA, 2091 bp, synthetic construct
  source 1..2091: mol_type = other DNA
atgtcgttgtccatctttgtgctggttatcggaggtggctttatcaataaaagaatattattgatcttcgtgtttctaatattcttcataagcatcggctctgtagtggccaatgatctggattccaattcagtcaaccaggacaactatatctctgatgtggactctttcgatggttctaactcggtgctgtccagttcgaacttggacagtagcattgataaggacaattatctgaaccttgactctaacaacaacctcaacctggattccgataagaacagtgtttcaggttctgatctgaatttaaataatgctgacctcatcaattcggtgtcagggtcggacctgaacctcaacaatgccgatctcatcaacaactcaactactaatgattcaagcaactcaaacaattcaaacaaccttgagaaccttacaaacctggatgattccaagggtgcttctaatcagaagccgcagaagtacctgatccccaatgacagttccataggttctgcctatatccagaagatcattgacaacgcggcacccggaagtacaatccagtttacaggttccttctacaagaacatctatctgaagatagataaagccctgaacattataagtaaatctggcaccgtgatcaattcaagctaccggctgcctgtttttactatctcaagaggcgggtctggaacaaatatctccggcttcacagccaatcttgcaaactccttcgtagaggcaagtgatgtgtccgatataagcatctccaagaataaaatctttacaaaacggaaagccatcgtcctcgagaatgtttttaatagcaagattgtaaggaatagtttcctacgctttgaaacggccattgacattagcaagtctggcggcctgaccatatccaataataatatcaccccagataacggctacaatgtgggaattagcctgaaagacatttatcgcgacaaggttagcatattgaacaacaatatcaccggccatgaccgacgcatcgagtccacaggcatttacttcgggccaaacgcgaagaatgtgctgatcgaaggaaacattatcgacgaatggtacacgggtgtcgacttccctaactcggtcaataacgtgtccattctgaacaataccctcaatcacaatggtgacggggtaatcattaacgggtggattaataacttcaccttcaacaagaacgtcgtcactaacaccggccgagttggagtgctatttgactatgatttttatggaacaaaaggggacttcactttagagaagaacttcttcacccaaagcggccagttggacctcagaaacactggggaccaggccgtgacgattggggagaactttgccagccgccggtgtgttagggtggccatgaaaaacggattctccattaaaacccgtcaaaatggaaacggctattacttctcaattgtggacaagaacagtaggggcgtgagcgggctcccgaactttagtgcgacaatcagcatcaacggagtgtcctacaacgtcaatttcatcaattcggttgcttatgtggaggtggacggcgctagcggcgaaaacgatgaggtcctgctcgacgtgggggaggacaagcggaagctgagcgactggggagagactcagaacctcagttccagcgagatggaatactacaaaaagatctacgatgatctgatcaaaagcatggtcgaagagaccaacaatgataaccaggacatgaaaaaggtcgaagataagaatggaaccggctccaccccatccggggggaacggcggcggcgacagcgggatttcagacgggagatctagcgtcagctccaacggagactcctctcccgccagtgccggcacctctaacgtggcagccagttctgcaagctcaagcgcgggccccagcgctgctcaagcagacacgcctgaaagtagcacggtgaagtccttgagccttgatgaggagacctttagggtggctggggtgggtggactggtcttcctgatcatttgcgtaattggactttactaccgggaagacattatggacatgatcaaagagtga

SEQ ID NO: 2545 - DNA, 684 bp, synthetic construct
  source 1..684: mol_type = other DNA
atgatggatctgatctttgaatatctgattgttttcattctgctgttcgccacaaacatagcatttctgctccggtactctagttttaacaaaaacaaatttatccccttcgtgttaggctatgccatcatcgtctttgccctcacttttgtgtttagctccctgaacctccagaaggagtccatagacttcattccgtatatcctgttcgccgtaagtgctctgatgctcattattagcattcgatacgtgggctttggcaagaattacggaatcaatgacgataaggtggtgctctatggcaccatcttaagtagcttcctctcgatcggggcactggcgctgggactgaagtccgacaatcttttcctttccgggctggaactagccatcctcagcgtggtcgtgatctttctggtctacaagatctcaaaaatattcaacaatgctaagcgcccatactatgcagtcattggtgagtatatgttcttggagttcattctgcttcttattctggccctgaccttctctagcgtaagagagttggattactcaatgttcggaagcttcctaatccttacgcctacatacaaggtgctctacatgatcatagcgatcgtcatcttgttggttctgggggttctctacaacgactgggtgctgaaacggctaaaaaggaagtga

SEQ ID NO: 2546 - DNA, 642 bp, synthetic construct
  source 1..642: mol_type = other DNA
atgattcttcagggaacggagatactcacttcgtttatccacattgtctctgaatccctgctggcaccggtggtgatcgtgctcgttatcttcttaatctacgccattctgagcttcggcggattcctgaatgaatggttcacaaagaagccattgaaaagcgcaggactggaaaagttgctgcaggacatctcaagctccgactcacccgaggaccttaaggctgtgatagacgccagcgcgctctataaagagcagaaagagattcttgtcaagatcactgataactacaacctcgggccagaggcaaggaaggcgtttgccagtaagctgattgaagaggaggaaagcaatctgctcaagctcacaaccaaaacagatatcctggtacggctgggccctatatttggtctcctggggaccctgatccccctaggccccggactgtccgctctcggcacgggggacatcaccacccttgcccaatccctaacaatcgccttcgatactaccgtcaccggcttgactattggtgctttagggtacatcgtgtctaaataccgcaagcagtggtatgagagtgatctgacgaccaccgagacaatcgccgaggccattctggaaaaattgaaccagttttga

SEQ ID NO: 2547 - DNA, 318 bp, synthetic construct
  source 1..318: mol_type = other DNA
atgctgaggaagcgcaagcggttcagtgatgacggcgacgaggaccccatgtccgggatctccaacctctcagatgcaatgctggtgctcgctcttgggttcttgatctttgccattatggccctacaggtcaatccagacatgatggctaagacgcaggaaagccaggcgcaacaggccacctcgcaagtgagcacagggcaggacttcaacagtagcgccaacgcaggcgccagcctggaacagtccggatactcagaggtgggaaaggtttataaagatccggataccggcaaactggtcatggtacagggttga

SEQ ID NO: 2548 - DNA, 1623 bp, synthetic construct
  source 1..1623: mol_type = other DNA
atgaacaataaaaagatcatcatgtcttttctcctggtcctgttgattgccatttctgtctctgccgtgtccgccgccgacatcatcgcggacaatcaggattcaatttcatccaatgacaactccatcaacgaaattgctacagaggacatcagcaaggacatcaatgacaaatctctttcagatggcgtcagtaccggcgggaacaattggatcgtaaaacccagtacagatgggaaaagcgacgcaaactccattcagaaggcaataaacctcgataataccaagcctggagacagtctcctgctgactgataagaacttcaccctggagaagtccgtgagcctgaacaaagacctgacaatcaacgggggaaatatctacaatcagaacaacctcacggacctcttcatcatagatcctaagtctgaaggcggtcccaagaacataaccattaccaatgtgactttctatgttaacgggaacgaaaacattgtgcttgccaatggagagaattacggcacgacttatattgatttggccaatataaaaataagcaactgtacaatcctgccgattaacccagacagcaatatcaatgataccgtgctgctgaatataaagtccgatcgcacagtgggccaaacaggtcagagtacaggattcgttctagtgtcgggcaacaagctaaacggcattaacaccctgaagaataacgattacgtactgaaagacgactttgtgattcagaaggcggaccctatcttaaataccgccctaatttgccccaacatgactattaccacctatgataagaacacgaatgacactccaagctattatgaggtgaagttgatagaccagaacgtcaatcccgtaatcaaccggaccatccagattggcttcaacggcaagatctacgataggaccagcgatgagaatggaattgcgaaggtaaaactcaccctggcttacacgtcagtttacacatttgcggtgtacttcctcggtgatgaaagctatgcaagtgcctttgacgtttcaactgtgaccatcatcaagaaaaatgccaccatcacgcccaagacagtgtcctataacgtgaacgcaaaaacaaaaaccttaactgctaccctgaaagacaagaacaacaaggctctggccaacaagaaggtcactttcactgtcaatgggaagacctacactgccaccacaaactcgaaaggtgtggccagcgctaagatcagcctcagcaagaaaggcacatacacgttcactgcccaggtcttgcaggggaccatctctatcatccagtttccaaaaaagggaaagcttaccctgaatccgcttagtaccaacttgactgtcaagaagtacacattcaaaaaggcagccacgaagaagatccaagtcacgctcaaatccggcaagactgtgcttaagtccaaaaagctgaccatcaaagttaacgggaagacatactccggaaagacaaacacaaaaggcatcgctacaatcaccataaagctgacgaaaaaagggacctacacttacaccgctaattttgcaggagacaacacgtataaggctatttcgaaatctcaaaaagtggtgattaaatga

SEQ ID NO: 2549 - DNA, 822 bp, synthetic construct
  source 1..822: mol_type = other DNA
atgtcctttaagagccctgcagatacagccaaagcagtggcatctgccgcgaccgccaagggtgaaatgcccatcataaagcttgccattctgggtttcctggcaggcgcctatattgccttcggaggcttgctcgccgaagtggccaatactggggctatagctggcggagttccagttggcatcagcaaacttctcttcggggcagtgtttccggtggggctgataatggtggtgatctgtggatcggagctgttcactggcgacgttatgtttatgactatgggtctactcgacggcaaaacagatatcatgggcttgctcaagaactgggtcggcagctgggtgttcaaccttatcggaggactcttcgtggcttatgttctggcctacctgacgggcatcatggtgcctgaggcatttgccggcggggccattaccattgcgaacacgaaggcactggggggagccaccttcatggcggcggggaagtcaacagcttccctgacatgggtacagtgctttctgcggggtatcggctgtaactggctcgtctgcttagccgtatacctggctaacgctgctgacgatgtcgtggggaaattctttggaatttggttccccatcatggcgtttgtctgcattggatttgagcacagtgtcgcaaacatgtttttcatcccactggggatcttcctgggcgccgaggtgacctgggctcagttcttcatcaataatttaattcccgtcaccttggggaatatcgtgggtgccgccgtctttgtagcctgcgcttactggttcgtgtacctacgcgactga

SEQ ID NO: 2550 - DNA, 2052 bp, synthetic construct
  source 1..2052: mol_type = other DNA
atggtggagataaaatatgtgccaagtatctgcccgtactgtggcaccggctgtggtattaactttgtggtcaaggatggcaagatcatcggcgttgagccttggaaaaggcacccagtgaatgaggggaaagtgtgccccaagggcaattttggatatcagttcattaaccatccagacaggctgacaactccgctcatcaaagagaacggtgagtttagagaagcctcctgggatgaagcgctggatttggtggccagcactcttaagaagtatgctgacactgatcccaataagctcggattctatgcatgtgccaggtctcctaacgagaacatttacataacacagaagctggcacgggctggttgcggaacccagaatgtcgaccactgtgcacggatctgtcacggccctactgtggctgggctcgccacgaccttcgggtcaggcgcctcgaccaatgggtatgacagtatcgaagaggctgacttcattttttgcatcggcagcaacaatatggaggcacatccactgttcggacgcaaaatcatccgcgctattaaaaatggcgccaaactggtagtagctgacccccggtttactcccacggcaaagctggcgcatgagtacatgcagtttaagaccggcactgacgtcgccctaatgaacgggatgatcaagatcatcattgagaatggcctgcaggatgatgagttcattaaaaaccgaacaaaaggctacgaggaaatgaaggaggttgcgatgaaatacgaccttgacaaggttgctgagatcaccgaagctgaccctgagcagattgagcgggtcgctctcgaatatgcgcaggcggagaatgccgctatagtatactcactgggcatcacagagcactcccacggggccgataacgtcatgagcaccgccaatctcgccatgcttaccgggaatgtgggcaagattggtggcggagtaaacccactgaggggacagaacaacgtccagggcgcctgtgatatgggtgccttgcccagcgactatgtcggataccagaaagtggccaaccctgaaatcacaaagaagttctcagacgcctatcagatcgaactccccaccactcccggcctgacactggtcgagatgatgaacgccgcccactctggagacctcaaggtgttatacatccacggtgaggaccctgttctctccgatgcagatattaaacatacaaaagaggcaatagccaacctggagatgctgatcgtgcaagagctatttatgaccgacaccgccgccgaggcagacgtggtgttacctgctgcaggttggggggaacaggaagggaccttcacgagcggggaacgaagagtgcaatggttgcgtaaggcccaagaaccacctgagggaacaatgcttgactggaagatcatggaggaaatagccgtgcgcatgggcaggccacgcgaactgttccactacgaaaacgcggctgagatttgggaggagatccgagagctcgcgccgagttactacggaataactcacgagagattactcaagcccgagggggtccactggccctgccttgacccagaagatccttgcgagccactaatgcacaaggataaattcgcacaccccgacgggctgggtgtgttccaggcattggagcatcgcggcccggtcgaggtggttgatgatgaataccccctgctgctgactacgacacgtatcttgttccattatcatgccgccatgacccggcgctgtgagacccttgataaggaagtgcctacaggatttatcgaaatcaacacggaggacgccgcagaaagaggaattttgaacaatgagatagtgaaagcgtactccagaaggggagaaatcgaaattcccgctcgggtgaccgacgacattaagaaggggatcgtcaacattccgatgcactttaccgaatgcgccgctaatatgctgacgaactccgatagcttcgaccccaagtgcaagatggtggaactgaaggcttgcgccattcaagttgaaaaactgtga

SEQ ID NO: 2551 - DNA, 1209 bp, synthetic construct
  source 1..1209: mol_type = other DNA
atggcggttaatgtaaatgatatgttttatgcatattccggcaatgaagcaattaaggaaaaaggcgaatatggtggggtcgtcactaccatcatgaagtacctgctcgaggaagggatcgtcgacgccgtggtggccgtcgaagaggccgctgacctttacgacgccaaaccgattctaataaccgacccagaagatgtgatcaagtcggccggatcactgcactgcggtacactgaacttagcaaagttcgtgtccaagtacctagacggcgcccgcgatatgaagattgccgtgaccacaaagccctgtgatgcaatgaccctgaaggagttgatgcgaaagaggaaagtaatcgaagagaacgtgatcatgataggcgtgaactgcggaggaaccatgcctcctgtacccactatgaagatgattagggacgtgtatgaactggaccccgccgatgtcatcaaggaggagattagcaaaggaaagctcattatggagaccgccgagggcgagaaagcaataagtattgatgaactcgaggaggagggcatggggagacgcgagaactgtcagcggtgtacaatgaacatcccaacaaacgccgatctcgcgctggggaattggggagttatcggcgagcttgcaggaaaggcaacattcgtggaggtttgctcagagaagggtgctgatatccttgataaagtgatagaagcgggcctgattgagacccaagaaccaatcgaaaaaggagtgacaatccgtgctaacatcgacggcatcatggttaaacaagctatggcccagagagaaaaagactttgctggaacgtccggggacattctggaggtgtttgctgagtacaaggaagaatttagcaagtgcatgaaatgttacggttgccgggaggcctgtcccctctgcttctgcgacgactgctgtctggaggccgaaggtcctgaatgggtcccgggcggctatacgcctgccgcgcccttcttccatctgacccgcatggtacacatggtggatgcttgcactaactgcgggcagtgttctgaggtttgcccttgtgagatcccagtcagcaaggtgtgggctactgtgaaccagaaggtccgggacatcttcgggtactacagtggcgtggacaatgaggagccattgcccttcacggagtttgggcccaaaagctacaggcagtactga

SEQ ID NO: 2552 - DNA, 708 bp, synthetic construct
  source 1..708: mol_type = other DNA
atgagaattatttcaattgtgggcctcaaaaatacggggaagacttcgctgacaagcaagatcatcaaggagctgaccaatcgagaatttaaggtcgcttccattaaacattcacaccaccagatggaaatggatcacgagggtaccgacacctacaagcaaatggagagtggctctgacttcgtggtgggaattggaggccgcacctacttcaacatcaacgaacggctggacttggagcggattctattcctgataaagcttattgagaatccggattttgtggttatcgagggattcaagagctacccttatgccaagatcgcaacctgcaaagaggtggaagacgaatacacaatcaaaacggtcaatagctttgagatcacagatgaggagctgctcgatcttgtggacctcatcgaggaaaggtcctatgacatcctcgataccttattcgtctccgactgtggctataatgacgccagtatcataggtcaggcttttgcacagggaaaactggactataaccccgatactcaggcggaggttaacctggccatcgatgggatcaacatagggctcaacaagttcgtcagcaactacattaagcagactgtattgggcatactgaacccactgaaaatcaaggaatacggggtggaagacttcgagaatattgacctaacaatcaaaaacaaaaaggattga

SEQ ID NO: 2553 - DNA, 186 bp, synthetic construct
  source 1..186: mol_type = other DNA
atggcctgcaacgatgatttcgagaacaacgtgacgctggcaatcaatggcaatgacattgaactgaacaagtttacagacgacattatcaaagagaccatactaggactcctgaaggcgatcaaaaccagcgagtacggggtggatgaagtcaaggacgtagaaatcactataaagaatgagtga

SEQ ID NO: 2554 - DNA, 936 bp, synthetic construct
  source 1..936: mol_type = other DNA
atgaaggataaagtgcgggacgattacgaaaggccaattatttcactgcggattagcataaccaaccgctgcaatgtcaactgcatatactgccaccacgatggcatgctggacagctccagcgaaatgactcctgacgaaatctacgagatctgcagaattgcaaagaaactaggggtggagaagatacgcctatcggggggcgagccactggtgcgccccgacatcgtggaaattgtagagaaggtcaacagcctggacttccgtgacatttcaatcacaagcaacgggatattcctggacaaattggcaggtcctctcaaggatgcgggacttgacagaatcaatgtcagtttggacacacttgatgaggaaacctacaaaatgatcgtggggaaaaacgttttagagcgagtcaagaaaggaatcattgaaagttgtgccgttggtatgtatccagtgaagataaacatggtcgtgatgaacaacatcaacaacgatgagatcatggacatgtttgagtttaccaagaaacacggcgtgatcctccagcttattgaaattatcgagtccgagagctgtgatgacaatgacttcaattccaagtaccactaccccctcgctgaatttgaaaagcatctggctgagattgccgatgagataaaggtgcgggagttcatgcaggataggaaaaaatatttcatcgacggcggcgagatcgaggttgtgcaccccgtggacaataccaatttctgtaagaactgtacgcgcttgcgaatcactcccgagggcaaaatcaagccgtgcctgctcagaaatgataatctggtaaacctgattgaatttatccgggagggagcctctgatgaggagctcatcgacatcttcctgaagggaatccataatagggaacctttttataaggaagagaactga

SEQ ID NO: 2555 - DNA, 6930 bp, synthetic construct
  source 1..6930: mol_type = other DNA
atgaaaatccagcgcggtatatatataatactgaccttactggtgctctttagcctgtctgccgcaagcgccgcagacgacctgacagacgacatcattagtgcggacgagaatgaagagcttattttagatgagaccgtcatcgacgacgtttcaaacgccaatgacaactacgacgaagagctgattaaggcaaatgacgagaaattcgtctatgctggaaatgattcagatgagttaagggaggacccagggacctattccgggctctctagcgagattggcgcaggaggaaacattgtcttgacacacgattactatacttacgattccggcgacaccatcataatttccattagcaacagtgtgatcgacggtaatggggcgatcatcgacatggccggaagcactatccgagcattcaaagtgaccgcttccggcgtaacaattaaaaacctcaccatcaagaacgccaatgtgaccacagatgatctaggcaacaccgacgatgagggcgccgcgattgacttcgaaaagtccgggaccattgaatactgtaacttcattaacaactctgcaaacgctgccggggcagtctacttttataaagataacagcaaagccataaattgtaacttcagctataaccaggcggtatactctgggggtgcagtttgctttgaggaaagcgggactatcgaaaattgtacgtttgtcaacaacacggccgtgtatgatatccttggaggcggcggggccgtttgctttaacggtacagggaatgcgataaattgtaacttcaccaacaacaccgcgcaggggtacttttcctgggctggcgccatttgctttaacacaaatggtaacgcgatcaattgtactttcactaataataaggctcacgactctggaggcgcaatcgagatctacggcaacgggaagctggagaactgcagctttgacaagaactcggccaacgacggtggtgcagtcaagatttatggcgccaccaagatatcaaactgtaactttacggagaacaaagcagcagagctgtcaggggacggcggcgctatctactggaacgccagcgctggcaagttagagaactgcagtttcgctaagaactcagccttccacggaggtgccgtgtcctttgaggaagatggcgaggtaacaaactgtaactttaccgataacctcgccggcgacagcggcgccatctggtttacagcggatgggacggtagaaaattccacatttatcaagaatgaggcatgggatgagtacggcggcggaattgtcttctatacctccggggatgtcagaaattgtaatttcacggataatgaggctgataagcagggtggggcagtgtactttaacggcgcaggtactgtcgaaaattctaacttcaccaataacaaggcacaggatggcggggccatcttcttctccgaggacagtactgtcaagaactgtatttttgtgaagaattgcgctactgacattcggtctgataggtactttgagaggtgcaaatatgtattctacaagaacggggaggtgaccaactccagctttactgaaaacaatgcgacggagggtggcgccattcttttcaagggcaatggcaaggcaacagattgtaattttaccaataactcggctaaatttgggggggccatcgactttgagagccatgccactgtcgaaaattctagcttcaacgggaacaaggcctcctctaacggctccgccatctggatgaaccgtgcgggaggcattgtttccagctccgtttttgtgaacaaccgcgccaacaccggaaccatatttttccgcaatgataattccacttcccatttgacaatcaacgacaacattttcctgaataataatggtgttgcaatctacttcgataaaaacgactctgattccaataccgattacaactggttcggaaacaatgcaaccaattacgacatcgcccccgtggccaacaatgctgagataaatacttggctgttcctgaacaccacggtcaacccggatatgatttcgattctggactcactggacatcgcgtttaaactgtacgcttacacgccttctgaggtatccgaatatgacaacatccggttgaaagcggtcgacttgaccttgaccccaacaaacggaatcttcaacactaccaagacggagctgggcaagactgttcagtacattcccgagagtgatggaatcggaacactcacagcatcaatcgagaatgcctcctacactaccacactgaaaatcacagatggaaccacattctttgacctggattatatcatcaacgccaataataacaacacgattgtgttggatcgggactacacctacaactcaaccttcgactacaacttcacagatggaatagtcattgatcgtcctgtgacaattatcggcaatggccacaccatcaatgccgctgagatggtcagaattttccatattcaagcagacaatgtgaaaatcaagaacatcaccttcaccaacgccatcagcaacggatacgggggcgctatctactggcagggcgccaatgccaatctgtccagttgtctttttgagaataatagcgctgtcatggctggggctgtagcgttctatggaagcacgggcagtatcgtttcggattgcagcttcatgaataattccgccaacaacgggggcgcaatcatgtggcaggtctccgacgacagcgtggtttctgattgcagtttcatgaataactcggccatacagggcggggctatctactggagcagtaacgatggggtggtgtctgactgcagttttgtgaacaattccgccgtgcggaacgggggagccatatactgggaaaaaaataatgggaatgtgtccggctgtatttttgtgaataacagtgcggacaacggtgccatctatttcaataatcagaactttggtcaaaatctgacaatcaatcataatatcttcctgaacaatgatgccgtggcaatctatttcgtgcgcaacgactccgcctccaatgcagattacaactggtttggaaacaatgccacgaattgcgatatagcgccaacaagcaacaatatggagatgaatacttggctgttcctcaacgccacatccgaaccggaaggaatttctattcttgactcatgcgacatcatcttcaaactttacgcttacgctccctctggagtcagcgagtatgacagcagccggctgaaggagatcaacctcaccgtgactccaactaacggaaggatcaatactacccaggccaaactgggagaaaaggtgcactacactccggagagtgccgaatgcatgctaacagcatcaatcgaaaacgccttctacactaccagattgaagatctcagatggcaccacattccgcgacctgaacaatctcatcaaccgcaacgacaatgacacgatcattctcgacaacgatttcatctataactcacttttcgacagtaagtttaaaaatggaataaatattaaccgacccctgacaattgtgggaaataattataccatagatgctaccggaatggcaagaatcttccgtattcaagccgacgatgtagagatcaacaacattacattcgccaacgctaagatagacggcaatggtggcgctatctattggtattccggcgctagaggtattgtttctgattgcagttttgtaaataattcagctaagatgtacggagctgctatctattggaacggggcgaacgggaacgtgtcggattgcagttttgtgaatagcactgtgactgatgaacacggcggggctatctactggcacggtgccaacggagtggtgtcagactgcagtttcgtgaacaatagcgctaagaaatatggtggtgctatcttttggaacgccgccaatggcgttgtgtctgattgtatcttcgtgaacaattctgcgaagagctatgatggcggggcgatagtgtggaacgaaggtctgaacggtgccatttctgattgcagttttgtgaacaactccgccaatgatgggggtgccatcttatggaatgaagctgctggcgggactgtgagcaattgtagtttcgtaaacaatagcgccaacaagtccggggctgctatctactgggactccggggccaggggggtggtttcggattgcagttttgtaaataattcagcgaaccgcagtggcgctctctactggtttgctaatgacggggttgtgtctgcctctatctttgtgaataactccggcgacaatggggtgttgtacttcaacaacaccaacaagcgaaacctctcaatcaacgacaatattttcctgaacaatgacgtcgtggcaatttattttgtgaacagtgactccacttccaacgcagactacaactggttcggaaataatgccagcaactttgacactgagcccctgaccactaacgtggagattagtacttggctcttcctgaatgctacagcagacccaaaccccgtggagattctgaactcaagcgatatctcatttaagctctattcatataacgccacaggaatatctgattatgacaacagccagctccagcccgttaatctcacattgactgccaccaagggggacgtcgatagcattgctaaactgggggagactgtcatatacaacccaaccagccttggaactggaagcgtcacggcaaaagtggagaacgtcgcctatagcatcgagattaacaacatcaaatccaatcctaacctatcagtggaatccgatgaacttacatacggcaacaacatagccattgcgctgaattacgagtcggctgctaccggcaaagtcaatatcacattaaaaggcaagaagtccgattacacatttgcagacctggacctcaatgaaaccatttcactgggaattttagccgcggatgagtacgaggtcatcgttgaatactcccgagacgagatctacaccaacgcaagcgcccggggaacgcttaaggtcaacaaagccaacagcacactgacagtcagtgacattgaatttgattataaggatatgggatcgggggagattagcttcactaacgccacgggtgtggaggccaaagtgataaatcatgatgaggccattgtgttcgttagaggaaatacgattacggtactgaaccttagcgccgacagctacatactggaagtcacaactattacggacgaaaaccacaatgaggtgagcaagaatgcaacaataaccgtgagaaaggtcaactcgaccattaatgtgaacgacatcgtcctgtattacggcgagtccatcaacctggctgtaaccactgacggggccattggaatatcggccgatatcgacggcgagaacgtggagctcaacgagaacatcgtgacaatcccagacgatctcgagtctggaaatcacacactgaccatcaccaccgtgcctaacgacaaccataaggaggcaagcaaaaccgttaatatcgtcgattgcaggatcggcaatatcacggtggtggtggatggcgttgaatactctattcccgctgtaaacggcaccgccattacaaccaacatgccggaggagatcgagaagctgaaagagaacatcactgatctgacgggccagctcgaagaggcacaaacaaacgccaccaacctggctaacaacctcacaattgctaaccagatcgtggacaaacttatcgcccaattggaagaggcacaggccaacgcgacccagacaatcaatgacttgacgcaccagctgaatgaagcccagaccaatgcaaccaaaatagctaacgaccagacaaatgccaaccagatagtcgacaatctcactggccaactgaacgatgcccaaaccaatgccaccaagattgctaacgacctagaaaatgccaaccagatcgtggatgacctgacgcgccagcttgaagaggcccaagccaataacgatcagaccatcaatgatctgacgcatcagttggaagaagccaaagtgaatgccactaagatcgcgaacgacctagagaacgccaatcagaccgtggacaatctaacaacccaactggaagaagctaaggtgaatgcaactaagatagctaacgacctcgaaaacgctaaccagatagttgacaatctgactgaccagttggaagaagccttggccaacgctacgaaaatcgaaactgttgttgtcgacgggaaggaataccctatagagtatgtgaacggcacggcaacagtcaccaccaactctaccggtcctcagaacatcacgcacgagcggaaagccacccagatcatttataaggacatggaaacaactgctatcgacacgaaagttgacggccggatcggcaagtacttcaacgtcattctcaaggacagtgagggtaacattctggcgaataagcctattcaaattggattcaatggcaaggtctataacaggacaactgacgagaatggatctgctaagctgcagatcaacctcatcaaagcagacatctacacattcgctatctgctacctcggcgatgacgactataacggtagcttcgtggtgtcaaaaatcaccgtcaaggcgcagaagggcactctaaccgtgcccaacaaatcttacaaagcaaccaccaagaccaagaccctgtcggcaaccttcaaggccgccagtgggaaagtgctggccaataagaaagtgtcattcgttgtgaatggcaaaacctattctgccaagaccaacgccaagggtgtggcgaccgtgaacgtcagtctcaacaagaagggaacatatagcttcgttgccaagttcgcgggcgacaacacatacgccgcagtaagcaagaaagcaaaacttaccatcaagtga

SEQ ID NO: 2556 - DNA, 450 bp, synthetic construct
  source 1..450: mol_type = other DNA
atgccaaaacacatcgtgtctggcctaaaatatctggaaagtgtcgagctccggaaaagggggctgtcccaaaaggagatctcaagcgagatcggggtggacagaagtaccatctcgcactacttgaacggccgcaacatctctgccgatagcatcgagcttgctaaagttatcttagagctgaaccccaaggatttcatactgattgccagggtgctctttggagattacaacgaaattcggcagctcattagcatcttcaatatgaatcattacgacccgcagatagatgacgggtgtattggttgcggactgtgcgtcgacttgtgtgaagtgaagtccatcagccttgactcactgaaggcaaagattaaccctcgatattgctgtggctgcctcatgtgtgtggaagactgccccacaaattccataaagattctggaggtatga

SEQ ID NO: 2557 - DNA, 1104 bp, synthetic construct
  source 1..1104: mol_type = other DNA
atggtcaaaaacataaaggaaacagagggcaagaacttttgcattaagcgctcacttggcgaagaaagagtattgtctttcaaggatcacgtctgcgtcgggtgcggactctgtgaagccacctgccccgtggaggcgatcagcctggatgaggtggctcctatcgaacgcaagtatgtggacacgtatttcagtgggcatgagaagatagcccagaactatgcccttttcacaaatgataacgagatcaaggccaagctggacatttgcgaggataaatgcgttctctgcgggctgtgttcgggcgtgtgcccagcaggtgccctggagctggcgattgatggcgtgtccataaaagagaatgaggcttacccccatctggtcacgtcagcggaaattgatgaagacaagtgtttattctgcaagaagtgtgaagcggcatgcccgagggagtccattactatcgaccggaagctgcccaacagggcagacctcgtgaccggtgagatcgaagtggatgaggaagagtgtatctactgtggcgcttgtgctgagctgtgcccggctgaagctatcgtggtggacaaggcgaccggcgaggagagcatagtcattgacaaggaaaaatgcgtgtactgtctcgtgtgtaagaaagcatgtcctgttgacgccatcaaggccgtgtgccggtcctgctcctacggcgagtacgacctggaccccgccaaagcagcaatcacagggaacgccatcattgattctgagacctgcatcaaatgcggatggtgtgagggagtctgccctgctgacgccgctaccgtaaaacaggcatttaagggaaccctcgagatcgacgaggaaaagtgtgggacctgtggagcctgtatcgacgtgtgcccatgcaatgtcttgagctttccaaaaagcactgggcctggcgacagaggaacgcacctagttaaagaagaggattattgcatccactgtggtgcctgtgccaaggtatgccccaacgaggccctaacagtgactcgaactgatgttgactacaccccaacaagtagcaaaagttggattgccgctttcgaagccctgaaaaattga

SEQ ID NO: 2558 - DNA, 231 bp, synthetic construct
  source 1..231: mol_type = other DNA
atggaactgaaagtcgatcaggacaagtgcctcggctgcggcgtctgtgtgatcgcctgcccggtaaacgccagcatcagtccagagaacgctggaggacacgggtccaagacaaccgaaaccattatgatggtggagaatggctttatcaaactgttcagcgtggacaagtgtgacaagtgcgggacgtgccagatgttctgtcccactgaggcaatatggctagagtga

SEQ ID NO: 2559 - DNA, 537 bp, synthetic construct
  source 1..537: mol_type = other DNA
atgcattacgccaatacttatctggagaggccggtggtgggagatctggaaaacgtggcccaggaggggacgacaaaggtcctcaaatgcatgctgaatacagggtctgacatatatcagggagcttgcaagaagcgcggctccaccctgaaggaggagtataagaacgctagcggcacctgttacatggacccacgggacatggtgaaactgggcgtgaaaaactgggacacggtccttgtaaagactgactatggggaagttgtcctcaatgccgccaagtcacgagatgcgcctcacgagggtaccatcttcgtatgtaagggcccatgggccaacacaatcgtcagccacgagacctactgctgcagtgatcccacatacaaaggtattcacgcgactgtggaaaaaaccgatagaaaggtgctactcatggcagacttgatgcggtgggcatacaaaaagtacgttgatgaagaagatgacgacgtgatcgagaacatggagtccttaggagagaggcccgtgtacaactga

SEQ ID NO: 2560 - DNA, 1392 bp, synthetic construct
  source 1..1392: mol_type = other DNA
atgacatatgagccccccgtcactgattacgattatattgtcgagaattgcacgtgcgcattttgcggctgtaattgcgacgatctggattttttggttaaaaacgggcacgtggtggccgtccgccatgcatgccgacttggtgcaagtaaggtgatggaggatatggaccaaagattactagtgcccatggtccgcaatgaggaaggagtgcttgaagaggtggactgggacaccgcgcttgacactgcagctgagtacattgccaactccatccgaccggtgttctacggctggtcggagactagcacggaatgtatgaaggagggcgtggagctgggagaatacatcggcgccgtgctcgataaccaggccacaatctgccatggccccagcctacaagcgatgcaaaatgccgggtaccccatccagacccttggggaggttaagaaccgggccgatgtgatagcctactctggcagcaacgctatgaactcccacccaagacacctggcaagatatgctgccttccctcggggatacttcagacagaggggcaggtttgatcgaaccgttatcacaatggaccctaaattctcagacactgctaagatgtctgacaaatggattgggttcgaacagaacggtgactacgggttctacaacgccttaagggccgtcctcaaaggcaaaaagctgcagtctgaaagcgtgtccggcataccagcagaagacatctatgaattggccgcggagatggaggctgcagagtttggggtgctcttcttcggtctgggcctgacccataccctggggaagcagcggaacattgacatcgcgataaagttggtacaggacctcaacacaaacagtaagtggggactgacgccaatgagaggccattttaacgtaaacggctttaatatcttcatggcttatgagaccggttgggcttttggggttgacttctgccgcggatacggaaggtatatgatgggtgaaacaaatacaatcgacctgctcgtgaggaaggagccagactgtttcatggtgattgcagccgaccctggggcgcactttcctaacggagctaatcagcacctggctgacattcccgtgatccagatcgatattcactggggaccatccaccgagctggccgatgtcgtcctgcccggctcattcataagcgtcgaatgtggaggtaccagttatcggatggacggcgttcccatctggatgaaaaaagccatcgacaaaccggaaacctgtcgggatgatgagtggattgtgcgtgagttgaaggaacgcgtcatgaagctgcgcgaagagcctaatgtagccgatgagtacgtgccgaatgaggggctcgcctgcctcctggataagtga

SEQ ID NO: 2561 - DNA, 1719 bp, synthetic construct
  source 1..1719: mol_type = other DNA
atggagtatatactcaagaatgggattgtgtacgaccctgctaatgaggtgaatggcgaaaagatggatatctgcttcaaggatggcaagatcgtggaagacgttagcgctgacgccgaggtgctcgacgtcacggataaaattgtcatgccggcgggtgttgatccgcacgcccatgttgccggaccaaagctagtggtgggtcgactgtaccggcccgaggatgagcgccggggagtggcccagaagacaaagacaaccagagccgaggctggcttctctatcccaagttgtcctaccactggctacagatactcacgcatgggatacggcaccgtgtgtgaagcagccatgcctcctctcgaggcaaaacacacacatgaggagataaacactattcccaacattgacattaacccattgcccctctttgggaacaattggtttgtcatggaatatgcgcgcgaaaaccgtattgacgatctcgccgcattcatcgcagccatgctgcgggtcagtaagggatacggggtgaagatcgtaaacccatgtgggagcgaggcgtggggatgggggatgaacgttcacggctatgatgataaggcgccatactttgacgtgacctccagggaagttgtccgggctctggcaaaagccaacgagaaattgggacttccacactctatacatatccatcccaacgatctgggccaccctggaaatgttcctactaccattgcaacgttagactcaatcaaagacattgcaaaatcaacgaagccctcagcgtccgtaagggatcagaccatccattgcacgcatctgcagttccacagctacacaggaaatagctggaaggatgcagcctcgggggcggaggagtgcgctgacttcattaacaagaatccatatgtaacatgcgacgtcggtcaagtgaccttcgacgagaccacaacaatgactgcagatgcccccatggagtacgatctgtttaagattagcggcctgaaatgggccaacaaggacatcgagtgtgaaaccgccgccggcatcattccctgcatctacagccctaagactccagtgagtaccctgcaatgggctatcgggcttgagctgttcttgcacattgaaaacccatggcaggtctgcctaaccacggaccacccgaacgccggccctttcatcagatatccgaagatcatctcctggctgatgagtgctcccaagaggatggagatgattgacaatggtgaggtgcataaatgggcttccaagcggactggcctggctggtctcgaacgagaatacgacttttatgaaatcgccacaatctcccgagccgctcccgcccgcatccacggctttgctgacagaggcgcccttacccccggctacaacgccgatatagcagtgtatgacatcaaccccaatgactttgacccctccagggacccggaaggggtggagaaagccttcagcaatgcttactacaccatcaaagatgggcagatcgtggtgaaagatggggacattgtctctacaaagcagagccacaccatctggaccaatgtcataggatacgaagaagaggagaaacaaatcatagacagcataatgcctttcttcactcagtactattcggtcaagtgggaaaactatcaggtgcacgaccactatgtgcctaaccccactgtcgtggatgtagaggccaaatga

SEQ ID NO: 2562 - DNA, 867 bp, synthetic construct
  source 1..867: mol_type = other DNA
atgaagactattacttttgatcagaagaaaacttcgtcaattgctctggaatttgatgagttaatcacagataacatttatgcatggaccgaggaggacttcgccgaatacaaggtgcccataggaaattctcggttcccaatcaccgattacttcgacatcaccgttgaaggagaggccgagagtccggcggaggtgaagatgattctcaacggcgattgtaaccgcgtgaagtacatcggctgcaagatgagcgccggggaggtcgttgtgaacggggacgctgacctgcacgttggagcagaaatgagcggcggaattgtgaccgtgttcgggaatgtagccgcccatgccgggcgggagatgaaagggggaaaactcgagatcatggggaataccaaggagttttgtggcgcatcctatatcggtgagtggagaggtatgtccggcggagaaatcatcatccatggaaacgctggcaagcagtgcggcgaatgcctggtcggtggtaagatccacgtgttgggggactgcgatattctcgccggcattcacatgacgaagggcaccattgaaatcgacgggaatgtgaatcggtggcctggcggccagatgaagaacggtaatatagtcatccacggaaaagtgggccgccttcttgaaggcttcgtagagcagggaatcgtcacagaccccgaactggatggagtcacgtatccaggccgatacatcgagtacaaaggggacatagcgctgaacggtaaagggacactgctaatcgatgctgagaaaaacagggacagactgagcacatggattgaagaagacgacgagtataacgcaataagggagtaccgtgaccaatga

SEQ ID NO: 2563 - DNA, 303 bp, synthetic construct
  source 1..303: mol_type = other DNA
atggtcaaggagatcctcatggaccccgacgatattatagaatacgtgcggaatgaggtgaaagtggacgatatattcgaactgagctataacagggtgtttgccccaggcacggtgcttgggatcaccccggaggacgaggaaaccggggaaggactgattctgagcttacagctgaacggcgaactcctaaaccaggccgtagacattgacctgcatgcagttaaggatgagatcatcgaggcgcgccacctccctggcggagacgaggataaattgatcgtcatcgaggctacactgtga

SEQ ID NO: 2564 - DNA, 303 bp, synthetic construct
  source 1..303: mol_type = other DNA
atggtcgacaaggaactgacaatgacgtctgatgaggttctcgactacattaagaataacttcaaggaatttgataaagtggatatcgcatacaaccgggtgagcgcgaagggggacatactaggcgtggatctcagcgactataaaggcaaacccagttgcagggtgatgatcgccctggatggagagatcatatccgacaccattgaggtggacttcgaggagtataaggaagacatcattgagctgcatcactggccaaaagacgaatcaaaggaatccgtctacatcgaggtaatctga

SEQ ID NO: 2565 - DNA, 1038 bp, synthetic construct
  source 1..1038: mol_type = other DNA
atgagtgagaagttcctgaaagtcaacatccagaaggaactgaaagaatttgagctggacattgacttcaagctaaacaaggggtgtctgggcattctcggcccgagcggatgcggtaaaagcatgaccttgaagtccattgcagggattgtgaatccagacaccggcatcattagcctaaagatggatgaggagaacatctattttgattcggaaaaaaagatcaatctaaagcctcagaagcggaacgttggctacctgttccagaactacgccttgtttcccaatatgactgtggaggaaaacatcgggatcggtgtctccaaggagaaaagggagaaaacggtgtctgaaatgataaagagattccaccttgaaggacttgagaagcgctatccccgacagctgtccggaggccagcagcaaagggtggcattagctcggatactggcctacgggcctgatgttatcctgctggacgagcctttcagcgccatggacaccttcctcaaggagcagctccgaatagagcttgtgaacagccttaaggactttgacggattcagtgtgctcgtaacccacgaccgggacgaggcgttccagttctgcgatgagctgatcatcttggataaaggcaaaatcattgccaagggggaaacgcacgaaatctttgaaaatcccaagaaactcgatgtggccaggctgacaggatgcaagaacacatctagaattgagattattgatgactaccatctcaagtccctcgactggggcctgacactggaggtctctgagaagatcagtccaaacatcacccacattggtatcagagcgcatgactttgctccagccaaaaaagatgaagtaaattcattcgacactgaaaattcaagcctcctggaaatgcccttcgagtgggagataactttagcaaacggcctgtggtggaagcgcgaaaagcaaatccgcgagcatgagtttgtcgtgccggaccacataaaagtcgatcccaaaaatacaatcttgctggaggaatga

SEQ ID NO: 2566 - DNA, 1695 bp, synthetic construct
  source 1..1695: mol_type = other DNA
atgtcagagtccgagcaccggatgatcgagatcctcaggatcttaaatacccatgagaagcccataggcagcaaggtgatagccgacgaactcaagaccaaaggctacaaccttggcgagcgtgccgtccgctatcacatgcagattctggatgaaaagggatatacagaaaagcagggatactctggcagagttatcaccgagctgggcaaaagcaagctggagaagggcctcatctacgaccaggtagacttcacactgtccaaattcaaggagcggatctatctcaccgactttgactacaagaagaaggaggggaatgtgatcgttaacacttcgaacatccttgagaataaggcgttcgacatcattaaggaggtatttgctgcaggggtctgcgtaagccccctgataaatgccaaaaagactgaaatcaacggcaaaaagggatatgtgatgaaaacgatctgtggtacgaccatcgacggagtcttcctgaagaacggcatccctagcatcccgcaatatggcgggctggtggatattgaggattactatccaactaagttttcagagctgatctcctataggaaaacctccatcactccattggatgccttcattgcaaaggggatgacctctgtcctcgaagtggcggagcatggtaccggcacgattcctgccaacttcagaatcattccggagagtggtctagaaaaagctaaagaaatcttcgaaaagctggagaaagcaggcattgggggaatcctggaaatcggcgaaatctctgagaacattttaggaatcccagtgccagagggtatggttggcatatccatcattggaggcatcaccccattctgcgccgctcaggagatgaactataaggtggatattaagacgggtgaggaatttatcaactacaataagctaaaagagttggaatcctcgaagcacaagataaagcacgctaaaaaggtggattacaagaaaacacccttcattcttaccaaatcactgaaccgcgtgaatcaggtcgactatgacattgaaactggtcacggcaacatagtgtccaacatttcatacctccagaaggaagaccttgacgatgcaattagcattatgaaaaagacatacaaggcactccccaagtacatgaatagtcacttcagtatagtggaccatcccgatgacaaaagtaaagtggggatagctacagtctgcagcctgagcattgatggcatcctcatcaaaaacggcattatgagcacccctcaatacggaggactgctggagctggggaagccccctctgtttgtggagatgatttcgtacaacgggagcagtatcgacccccataagatcttcatctttaaagatttgacccagatcgccaagcgaaaaaaccctaagaaaatccttgcctcaatcaaagaggtgccctacatcgccaggcctgagacagaggaaatattggagaagataagcaaagaagggttttccatttttaaggttgggaaaccacgggaactagtctacaatgccaaggtggataattataacttcgggattgttacaggaagcgggttgaatctcattgctgcaatcaaggagaaaggaatcaatattgaagcgaaggccgtggaaactgtcctgccgatagaggacatgagcctgatttacgagcagtga

SEQ ID NO: 2567 - DNA, 1347 bp, synthetic construct
  source 1..1347: mol_type = other DNA
atggaaaagcgcatccaaaatattatggagagaatgaaggcagacaatatcaagtttattcgcctccaatttgttgatctgcatggaatcccaaagaatgtgagcattccctgcgagctggacaacatggaggacctgttcactgatggcatcctctttgacggctcatccatccctgggtttgttgggatcgagggcagcgacctcgtcctgaagccagatatcagcacgtattcacccctgagctggcggcctgaagagtctgcctcctgcaggttcatatgtgacatctataatcctaacggcgagccatttgaaggggacccaagaggaatccttaaaaaagctctggccaaaatcaaggaagaaggctacacctacaacataggccccgagcctgaatttttcattgtcgacacagacgacgacggctaccccattcctcacgatacagcaggatactttgatgtagagccggtagataaggggactgacttccgaagggagatcactaccaacctacaggaactgggctttgaagtggaagccagccaccacgaggtgggttccctggccaagacgaaatcgcattcaagctccgatgacgcgttaaagacggccgatgcggtgattacattcaagcaggccatcaaggcgattgtggcaaatatggctgacttcgacggcttcgactaccgcgtgactttcatgccgaagcccttctttggagagagcggaagtggcatgcactgtcaccagagtctcttcaaggatggtgagaacatcttctatgatgaaaacagtgaaacagggctgtcccaggaggctatgtggtttattgggggtttgctgaaacactctgccgcaatcaccgcggtgaccaaccccatcgtcaactcgtacaaacgattggttccaggatatgaggctccagtgtacatcacatatgggattcagaacaggtcaaccctgataagagtgcctgccgcacgtggaaaagccacccggattgagtaccggagccccgaccccacatgcaacccctaccttgcattcgccgtcatgcttgaggccgggatggatggtataaaaaacaaaatcgacccgggagagtctgtggagatcaacatttatgaattgaccgatgaggaaagggaggagaagggcatagaactgctcccttccagtctatgggaggcttatcacacctttgaagagtccgagatcatgaaagaagctttaggcgagcatatattcaatgctttcctctctgccaagtatgaggaatgggatgaataccgggtccaggtgttcaattacgagcataagaaatacctgaattactga

SEQ ID NO: 2568 - DNA, 12564 bp, synthetic construct
  source 1..12564: mol_type = other DNA
atgaatgataaaacaaacgattttttcagtgagtacctcagcggactgtgtctggacttcgatgaatccaccctcatcgcccccaacaagaatggggaaaaggagaaatgcatcatcgagaagtcggaatacgaaattaaaaaagacaatctggtgggattcgcaaagtccaatagcatttccatcaatgagcttatactggccagtctcacgctgacactgaacaaattcaacttttcaaatgagaccctgatcttcaatcagaacaacgtgccctttgctgccaagtttgaaaaccggcaaattagtatcagggagttcctcgagaaaattcacgagaactacatcaagaccttggaatttgacgagtatttcgataaggatgaccttcctctgaatccggagttttattttacgttcgatgaggatttaaaatcggacgctgaatattccaattatctaagcattgtggagaatgacgaaactgttagcctctttctgtcttacaacgacgagttatatacaaaggagttcatcaatctattcatatcaagcctggaaaaaatcctggaagaaatagccacttcggacatcgataagacaaacatctgcgacattgctattgtcggtgaaaacgaggatctcatcttcactgaagtggaaatgcccctgatccaccggcggttcgagaagcaggctgtggagaagggggatgagattgccctcgttgcaagcgacgccacactaacctacaagcagctggatgaaaaggcaaacgtcattgcaaatgccttgatcgcgaagggagtcaagcccaagagcaacgtcctggtgatgctgtcacgcgatagcaatctgatcgcttccattctcggcatccttaaggcaggctgcgccttcattcccatcgatcctgaataccctcaggagagaataaactacatctatgagaacagtcaggccgactacattattgccaacgagtctggagagaagtctctcgacattgaagagctgcttaaggatggcaactcagacgatcctgagctcgatgttgaccccgacgatctggcctacatgatctacacgtccgggtccaccgggaatccgaaaggtgtaatgatcagccacaaaaacatctgcaaccaggcttcaaatcccaagtccacttatgagagtctgctttgcatcaccaccatctcttttgacgtgtctgttgacgacatactgacctccctcagcaatggattgaagttggtactggccgatgacgtgcagatcaaaaacatccccgcgctaatcaagctgattgatgaaaacaagcctgaaatcctggagatcaccccttcaagaatggggtcttatctggaggtcaaggagttttgcaacgtcatatcctgctttaagtgtatcttcattggaggggagaaattttcctcgaaagtttacgaagatctgcggaaatatagtgacgctgtcgtctataacagttacggccccacagagacaacaatcacctccaacaacaaggcggtgaccgacgtcaacgacctgactgtggggcttccccatattaactacgtcaccgatgtgcgtgacattgacggcaaactggtccctgatggtgtaatgggggaactgtacattggcgggaccggagtcggaaaagggtactacaacatgccagaaaaaactgccgaagtgttcctgaccatcaacaacattccatactacagaagcggagactacgccattaagctgcccaacggcgagatcgacattaaggggcgaatcgacaaccagatcaaactccggggcctccggatcgagatcggcgaaatcgagtctaacgttggcaaatacccaaatatcaaacaggctgttgtggtgattaaggagatcaacgataacgaacacctatgcgcttattacactgccgatgaggagatcgacagtgacgatttgaaagagttcctgaaggaccgcctgacgcgttacatggtgcctaccgtcttcatgcagctcgatgagatgccacagacaccaaacggcaagacagacctaaaacagctgccagtgccacagcttaaactgtcatttaccctgccagagagcgaaactgagataatcctgcacgaaattgccagctcaatcagcaaaacaaaggagtttggtaccaccgacgatttgtacgcgattggattcacttcattgacactgatgaaactgaacgcccgcatctacgaggagatgggggtgaatctggacatcatttcgctcctgaatgaccccacaattaaaaatatcgccaaggagatcgagaacaacgacatcctggacttgaatggggtaatagaatcctctaaggatatggtgtattatcccttgacagaaaatcaaatgggaatctattacgagtgcatccagagcggcgagcttgcacaatataacctcccatccgtgatacgcttcggcagtgaaattgatgccgaccgcttacatgacgccatcatcaagaccatcgaggcctatccttatctgaaaacccgcattgtgctagagaaaggtaaagtgatgcttaagcgggacgatagcatagatatcgatgacatcccaattatcaatgtggatagtatttccgatgagcagatcgaaaaggagaacctaaagctattcgatctccataatgaccagttattccgcttcaagatctacaagactcctagcgagaccattctgttctccgacgtccaccatatcatttccgacggtgaatccttagataagctctttacaaatatttccaatgcataccagggaatcgagatcgagaaggagaccatcaacggttacatcaacagcataattgagagtgagaatgagaacagtgaaaaatacgagctgtctcggaagttcttccaggacaagctcacgcaagaaattgactccactgtactcacgccaaacctcaacggcaactttgaggaggggatcttaaagagcatctccaaaaacatcgactccgaattggtcaacaggttttgcagtgaaaacaggataacccccaatgttctgttcatggcagtcaccatgctcaacctaaacaagtacaccttcaacgacaaaactctgatcacaaccatcttcaacgggcggtccaactcatcctacatcaacacacaggccttgctggttaaaacccttcccatcgtgtcaatcaatgacgataggaccttgtcatttaaggagtacctcagctcggtcaacgacatctggatggagaccatcaaccattctgactatccttatactaagatctctgaggagttcggactcaaacccgagtttttctacgcctacaacaaccttgatgcggaagaaattgccattgacggcaagacttacaaagtcaaatacctcaaatcacttgaggtcaattataagatctctttggaagtgaacgagacttgggacaatattgaactcttcctggagtacaacgaccaactgtacagcgcagactacattgacaccttcctcaattgcatcatcgatgtaataaaccagctgatcgaatcggatatcgaagaactgagcatcggggagatagaattgggtaagggtatagagacccccctgagctttacacctgttgatatgcctattctgcataagcgatttgagaaacaggtcactgataaaggggacgaaaccgctctagtggccagtgacgccacactgacttaccgccaactggacgaaaaggcaaatgtcattgcaaatgctctgattaagagaggagtcaagccgaaaagcaatgtgctcgtgatgctttcacgagacagcaatctgattgcttctattctcggaatcctgaaggctggctgtgcattcatcccaatcgatccagagtaccctcaagagagaataaactacatttatgaaaacagccaggcggactacatcatcgccaacgaatctggcgagaagtctctggacattgaggagctgctcaaggagggcgacttcgaaaaccctgatgttgacgtgggccctgatgatttggtctatatgatttacactagcggatcaactgggaacccgaagggggtcatgatcagccatgaaaatatctgcaatcaggtgtccaaccccaaatcctcttatgatagtctgctttgcattacaaccatatcttttgacgtgtctgtggacgacatactcacatctctctccaacgggctgaaactgatcctcgccgatgatgtgcaaatcaaaaatattcctgcgctgattcgcttaattgatgagaacaagcccgagattttggacagtactccttcccgactggcctcctacctcgaggtaaaggaattttgcaatgtcatatcctgtttaaagtgcatcttcatcggcggggagaagttttcggcaaaggtctacgaagatctccgaaagtacagcgatgctgtcgtctataacagctacggtcccaccgagacaacaatcacctcaaacaacaaggcggttactgatgtaaacgacctgacggtggggcttcctcacattaactacgtcactgacgttcgggacattgacggcaagctgctgcccaacggggtaatgggtgaattgtacattggagggaccggtgtgggaaaaggatactataacttgcccgagaaaacccaggaggtgtttctcactatcgatggcattccctattaccggagcggcgactatgccatccaactgcccaatggcgaaatcgacattaagggacgtattgacaaccagatcaaactcagaggactgagaatagagatcggcgagattgaaaccaatatcggccagtatcccgacatacggcaggccgtggtggtgatcaaggaaatcaacaacaacgaccacttgtgtgcttattacactgccgatgaagagatcgacactgagaatctaaaagagtttctgaaagatcgcctcactcgttacatggttccgactgtgttcatgcagctagatgagatgcctcagaccccaaacggcaagacagacttgaagcagctccccgagccccagctgaagttggctttggtgatgcctgagagtgaaactgaagagagactctacgacattgtctcgtctctggtggatgccgacgagtttgggattacagacgacctgtacgccattggatttacctctctcacactgatgaaactgaactccatagtctacgagcagatgggggcgaatctcgacatttccatcctgttcaatgagccaaccgttaaaaactttgccatagagattgacaattccttcgagaaggattctggcctggaggagctcatcgagtccgccaagggcttggaatactatccgttgactgaaaatcagttagggatctactacgaatgtatgcagaatccggatgtgatcaagtacacgatgcctacaaccgtacggtttgacagtgacctggatgccaacagactgaagcaggcagtcattgacactatcgaggcacacccatatatcaaaacccgcattgtaaataatgatggggaactgaggcagaagcggtgtgatgacgtggcaatcgacgatatcgagatagttaaagtcgatagcatcagcgatgaggacatcgtccgaaatgacgtgggtccgatctctatcgaggacagtcagctgttcaagttcaaaatatacgagacccccgatgagatcgtcttattctcagatttccaccatataatcacggatggagtctcccaaaacaacctgtttagagatatagccgatatctacgaaaacagagaaatatccgaggagatcatcgacggatatatctacagtctgctggaaaaagaggccgagaacagtgaaatatatcaatctgctgaggcatttttcgacgacaagctgacgcaaggcatcgaatccacggtgctgactccagacctgaacggcaaccctgacgaggggaaaatcaaaaatctgtcctacgcgtttgatagcgaactgattaatgagttctgcaacgacaattccataagcaaaaacgccttgtttatggccggcaccattttaaacctgaacaaattcacattctctgacaagaccctgataaccacaatattcaatggaaggagcagtccaagctatttcaatactcaaggatttctcgtaaaaaccgtgccgttcattatcaataatgaaaaccggcaggcctcactgcgagacttcattaaatccatcgaccaaagctggaaagataccctgaccaacagtgcatatccatacattaagatagctgagaagtatcaactcaagcctgagtttttctacgcttaccacgagtttctagagtctgatgagatgatgataaacggcaaggagtacattccacaggaacttgcgggggtggacatggtgaccgttgagtccaaaatcaatctagctgtgtacgataatggtgacgagtttaatctcattctcgaatacaacgaccagctctacagtgaagattacgttaagacattcatagaatccctgaagagcattttggtgcaattccttgaaaacgatatggacaattaccgaatctgtgatgtcaaactgaaggacgacgaggaggtgcacgaatttgttgatgtggaaattccattcatccataagcggtttgaaaagcaagtggatgaggctcccgaaaagattgccttaatcgcaagcgatggctcctggacctacggtgaactcaaccaaaaggcaaatcgtgttgccaacgctcttataaacaaggggatcaaagccaacagcaacgtcctcgtaatgcttccaagggacagcaatctcatttcggctatcttaggtgtcctgaaggccggctgtgcattcatacccattgatattaactatcctcgaggcaggatcgattacattttcgaaaacagtcaggcagactatcttatagcagataggggaatcgaaaactcaattgacattaacgagctcctccaggaggagaatgccagcaacccccaggtggaaattgacccagacgatctggcgtacatgatctacacgtcaggttctacaggtaatcccaagggagtcatgaccagccatatgaatatcacaaacctgttctccaaggatgaggggagtgttatttataacgcttattcaaagatgaagaggacgctcgccctttcaaccgtctcttttgatgctttcctgcttgatttcatgccactcaccttcggtttggaggtggtgctggctaacgatagtgagataaagaacattaaggagctggccgaactcgtgaagagagagaaaccggattcactcacattctccgcaccatcgcggtttaagcagtatctggagtatgaggaatttgccaaacaagtacccgacttcaggtatattggccttggtggcgagatggttccccaggacctaattagccgactgctggagtatcctaacctggagctgtacaatatttacggcccgacggagacaacagtgacatgtaacacccataagcttagtgatgcggagaatataactgttggcagggccctccacaattgcatcacggaagtcagggacatcgacggcaaactggtgcctaacggagtgatgggcgaactgtacatcggagggaaaggagtatctagaggatattacaacatggaggagaagaccaaggaggtgttcctatctattaatgacatcccctactatcgaagcggtgactatgcaattgagcttccaaacggggatttagtgattaaaggaagaatcgacaatcagatcaagttacgcggactgaggatagagcttggtgaaatcgaatccaacattgcccgattcccccacatgaagcagatcgtggtggtgattaaggagatcaataacgctgagcacctgtgcgcttatttcacagctgatgaagagatagacatcaagctcttgaagcgctacctgggaaataagctgacggaatatatggttcccaccgtatttatgcagctggacgagatgccaatatctcccaacggcaagaccgacattaagcgcctgcccaagcccaaactgaatctggattacgtggaagccgaaggggagacggaggaaaagctcgtggagcttgtttcgtccattgccaacacaaccaacttcggcaccacagacaatctatatgaactgggcttctcttccttaacactgatgaaattgaactccatgatcttcaacgaaatgaatgtgaatatcgacataacgtcactgtttacaaatccgaccatcaagtcccttgctgacaagatcgacaataatatagaatttgaaatagacatcgatgaaatcatcgagaccgccaaggatatggattatttcccactgaccagcaatcagatggggatctactacgagtgcatgcagactgaaaaaatcaaatacaccatgccatatgcaatccgcttcgaaagcagcatcgacccctataagctgaaggacgccgtgatccgcaccgttgatgcccatccatatctcaagacaaggattatcaatactgatgatggcaagatactgcaaaagagatgtgacgacgtggagatcgaggagatcgaaatcgtcgaaatcgattctatcagcaacaggcagataatggacagggacataaagcccattccattggatgacaatcagctactcagatttaagatctacaagacacctacagagaccatcttgtttgcggatttccaccacatcattaccgacggcgtgtctcaaggcattttcttcaatgacctggctaaggcatacaacaatgaggaaatcgaggctgagaagattgatggatacgagtacagcctgattgaggagaaaatctcccttagcgaggtctcagagaatttcttcaagaagcagttcagtcagggcattgagtcaacggtgctaactccaaatatgaatggcaatccagacatcggcaacattaagctcatttcagaccaggtcggctccagttttgtcaggcacttctgtaaggactatagcataagccccaacgttttatttatgggcgcgacccttttatgccttaacaaattcacattcagcggcaaaagcctgattaccaccatcttcaacgggaggtccaactcaaattatgacaatacgcagggaatgctcgtgaaaaccctgcctatcattgtaaatgcggaaaatcgtgacatgatggtggaggattatataaaactggtggataaggcctggaaagatgcattgacccacagcaattacccctacacaaagctcgctgaggattatcagctgaagccggagttcttctacgcattccacgagtcgctgaaaagtaaagtggagcttgacggccggacttacgaggcgattgaccttgacggtacggtgtcaaccgactataagataaacctggatatctttgacgacggggagtttatcacactgtacctggagtataacgaccaaatctacacagaagagtatgtgaatcagttcatacgtagcataaaatatatcttgttccagttctttgtgcatgatatggataaattgcgtataagggacattgagttggttgaaggggaaatcccagagtttgaagagattgacactccgatcatccacaagcgctttgagaagcaggttgttgaaaagccaggtgacgtggccctggttgccagtgacgccaccctgacttatggggacttgaacgagaaaagcaacaggattgctaatgccttgatcaggcggggcgtcaagccccgcagcaacattctcataatgctgaagcgggatagcaatttgattgcttccattctgggtgtcctgaaggccggatgcgcatacgtgcccatcgaccccgaatacccttccgaacggatcaactacatttacgaaaacagccaggcggactatatcatcagctacgagacgtcagagaatagtctgaacgtttatgagcttctggaagaggagattgtggtcaaccccaatgtggaggttctgcccgacgacctcgcctatatgatctacacgtcaggctcgaccggcaaccctaaaggggtgatgatcagtcacaagaacatctgcaatcaggctcagaaccctaagtccacttatgatagtctgctttgcattaccaccatctcttttgacgtctctgtggacgacatattgacatccctgagcaatggcctgaagttgatactggctgatgacgtgcagatcaaaactctcccggagctcatcaagttgatcgatgagaataagcctgaggcgcttgagatcactcctagcagaatcggctcttatcttgaactggaagagttctgtaatgtgatttcttgtctcaagtgtattttcctgggaggcgagcagttttcggccaaagtctatgaggacttgcggaaatacagtgatgccgtggtctataacagttacggtccgaccgagaccacaatcacctcgaacaacaaggctgtgacggacgtaaacgatttgactgtagggcctcctttaaaaaattacgtcaccgacgttcgcgacattgacggcaagctggtccctaatggggtaatgggggaactctacattggagggatgagcgtgggaaaaggctactacaatatgcctgaaaagacagaaaaggtgttcttaaccatcaatggcatcccatactacagaagcggcgactatgccatccaactgcccaacggcgagattgacattaaggggcgtattgacaaccagatcaagctcagaggactgagaatagaaatcggtgaaatcgaatcaaacattggcaaatatcaggatatacgccaggctgttgtggtgattaaggagattaacaacgtggaccacctttgcgcctattacactgccaattgcgagattgactctgatgacttaaaggagtttttaaaggaccgccttacgaactatatgataccgaccgtgtttgtgcagctggatgagatgcctcagactccaaacggcaaaacggatatcaaacgcctgccgcagccaaaggtggagctgaattatgtggctccgaaaacaaggctggaacatgagatctgtgccatctttagctctatcctgaacatagagacagttggtgtagaggacaacttcttcgaaatcgggggcacatcacttattgcttcaaaactgattattgagcttctgaagcagggctatagtgtacggtatgacgacatcttccgcaacaaaactcctagagcactggcgaaactgttgtctggtgaagacatcggcgaggaggacctggatctcacggacgatatcatcaaaaactacaattacggcgaaatcaatgagcttctccaggagaatacctgggaaaacttctttgacggggagaatctggaattgggcaatgtcctattgacgggagcgacaggattcctgggaatccatatcctatatgaatttatcaagagtgaggaaggaaagatctattgtatgctgcggaaaggcaagtttgattcctgtcaggaacggctgattgatgtgatgaacgactactttgatgaggatttcactgatctcgtcggctcgcgcatcattcccatcgaaggggacataacggagatcgacgacttcaaacagcttgaggacgagcccatcgacacggtgatcaattcggccgccctggtgaagcactatactgccgatgattatatcttcagggtgaatgtcgatggcgtgatcaacggacttaaatttgcccaaactagaaacaacataaagtatgtgcagatctccaccatcagcgtgctgtcctcatactccctcaacgaagaggcctacccgaaccaggaatacgatgaacgcacactctactatgagcaggacctagaaaacaaatacgtctgcagcaagtttctcgctgaacgggcggtgctgcaagccgccacgaaagggctccccgtaaagataatcagagtggggaacctcatgagccggtatagcgacggtgtgttccagaagaactacgacacaaatgcatttctaaataacattaaaaccattaaaaaactcggagctatgaaccccgcaatggctagtgaaaaggtggacatgagtcagatcgactacgtggcaaagggaatccttgctttgtctaagaccccagagaaatccagggtgttccactgtatgaacaatcattatatttcccaccgagacattgtggatgcactgaatacctacggttacgggattgaagaagtggatttcgaggaatttaaacagatttacgagcagaacatgaatgagaacatccaggggatcatcacggccgattttagcattgatgactttgacgaggaggacgatttcgaggagaatgtggaaattgagcagactgttgatattcttcactcgttaggatttgactggcctgaagcagatgaagagtaccttaaacgactgtttgattacctcaacaagttcgattactttgaatga

SEQ ID NO: 2569 - DNA, 1620 bp, synthetic construct
  source 1..1620: mol_type = other DNA
atggccctgaacatagctagcgtcgtggatgccagtttcgtcagcacctttatcggacacaacgcccaggcggctctccaggtcctggagcctctcgttctgttaattacaatcttcgagtggctgttcggactgggaggccagattctggccttgaataaaaaggcggaatttgacgaggggggcagcaaccattatttcacaactgccatgcttgcaacaatagtgctaagcgttctgatcctgttggtatgctttctgtttaaagattccctgatcaacctcttgcatcccactgctggagccctgccgtacgttaacgcatacagtccttatctgttcatcagtttcccaatcgcgaccatcctcggagtcctgtgtcaatttattcgggtggacgggcagccgaactttgcttcaggcgtaatcattgtggcaaatatcatcaacatcatcctcgactacctcttccttggtgttttccacatgggcattgaaggggcctcccttgccatgatgatcggttacgcagttggcctgctctgcacgctgaagtatcacttcgattcaaaacggactttccgattcgttttctccgagctgaagtttgggacttggatacgctcaaccattgaaattatcaagatagggcttccaggggccagcatgggcttctttaatgtcctgctgatctatatcatgaatctcattgtgggcggcgtcctaggcgagctgggcctcgacatattcaatgtatgcgtggtggcactgcttttaataagcattctgatcatgggattcgccgaaaccctgtcgtccatcgtgcctatctactatgcccaaaacgacttctacaaccttcaccatatcgtgcgtaacagtatcatcatcaccctcgtctgttcggtgatcttcacggcattcctcctgatctatcccgatgggctcttgatgtttttcaagcttcaccagaccgctaatgatggtctggtggagaatgcgattaggatttactcattggccttcatacccatggccttttccactatgctcctgttctattacgaggggatcgagagaacggtggaatctggaatcattacagtcatctctgagtttcttggacccctcttttttacatacctactgtatccattcatcggcataaccagcgtctggctatctttccccttagggtttattctaagcattgtggctgtctccatttatgtgaaggtggttgagcggaaagacagcgagtactcaggtctgtttttcattaggaggggcctcattgagaaaacacgcaactacacgttagaaagcaagaatgatgctgtgaaatctgaaatgtttaatcacctgaagagtctgaatgtggacgattcgtctattgaaaccttggacaagatcataggtaccatatttgattccaacaatgagaaagtccatgtggagattctgttgattgactacggcgacaagattgtgatcaacatgaaagacgagggcaacagagaagtgatgaaggacatcgagaagtccttttcccaggacaagatcaaagtgagtgaagtgttgggattcaacaacgtagaatacctgatcgatggggcctga

SEQ ID NO: 2570 - DNA, 750 bp, synthetic construct
  source 1..750: mol_type = other DNA
gtgccagagcgctacaaaggctttgggtactgggatatagccacccgccagatgggcatcgtaagtaaaagccagcagacaagatttaaagatgcgaaagtcgccgtcattgggtgtggaggcattgggggagagaccatcctgatgctggcaagaatgggcatcggcgagctgatcatcgtggacaaggatgaatttgacttatccaaccttaacaggcaagcgatgagtagcattgacaccctggggctttcaaaggccgatgtgagcaaggaaaaggtgcggctgaccaacccctacacaaaagtcactgccatcaacgaatttatcaatgaggataatgtggagtacttcaaggactgcgatgtaatcctcgacgccttggacaatctctacacgcgagtgatcctcactcggttcgcaagggaaaacggcattccttacgtccatggcgccatccacggaacaaaggggcaggttacagttttcacaaaggacaccaagtcctatgaagagatgttctcgttgccaagcctgggtaaggagctgggagaggagacgaaagaggaaatatcaaaactcactaagggtgtgccgcccgtgattggtcctacccccaacattgtggggtgcctggaggcattcgaagcttataagttgattacgggcatcggagaggtcacctatgctccaaagatacttaatttcgacctactcaacctggagtctttctccgttctggaactatga

SEQ ID NO: 2571 - DNA, 1170 bp, synthetic construct
  source 1..1170: mol_type = other DNA
atgaaatacaggacgctcggcaaaaccggggaaaaggtgtccatcttgggattcggcgccatgcgtctgcctcacttcgaaacgaatgatcagatcgatgtcaaaacatctgatgaaatcttaagttatggaatagataatggcataaatatcattgatactgcttattcatatcatgcaaataacctgtccggcaaaggcaagtgtgaagagtacatcgggaacttcctaaatgagcactcttaccgcgacgaggtgttactgaccgcgaaaatgccaagctggctgatagagaccaaggaggacatggagaaaatcttcgagagccaaatgaaggatctgcaaacagattgtattgacctgtacatgctgcatagcctgaatgaagactactggaaaatgtatagggagattggtgcatttgaatttatggacagtctgctcgaaagtggcaaggtcaagcacattggtttttccgcccatactgagatggattggatcgtggacatcgtagatgactacgacaagtttgagttcggccttacccagttgaactatctggacgagcggtaccagtccggcagggagggggtggaatacattcacaagatgggccttggtaccatgattatggaaccactgcggggggggcgactcatccagaacatcccccaggacattatggacctctgggacacggccgaggaaaagagaactccccttgagtgggcctttcaatacctctggaacatggaagaagtcgatacagtgctcagcggaatgaatagcatccagcaggtcaaggaaaacattgagatagcaaacaagtccgagataaactcaatcagcaaaaatgacctgaacctcatcaaggaagtggcgtgggagtacaagcagagaaagggaaacgactgtacagggtgccagtactgcatgccatgccctcacggagtggatgttgccggatgcttccgcgagtacaacattgctaaaatgctgaacaacccggctggttcggccatgcactatttctcattggagagcgacacccgcgccgacaaatgcatccactgcgatgactgcctatatcattgtccccagatgatccacatctcggaggacctgaagaaggttgatgagttctttgggcggaaatacgactatttctga

SEQ ID NO: 2572 - DNA, 1497 bp, synthetic construct
  source 1..1497: mol_type = other DNA
atggtgaagcgcatccctgacgaagaacagattaaactgggcatccgaactctcgactttaacattcccgaggatcatatctcacgttttgttgtggacttcatcgacgagtattaccctctgcttgggatcaaagagaataagaagaagaaggggcgggacagttttcccgtgaaagagatgttaaaactccttatttacgctaaaatcgagcacatcgatagtatgagattccttgccgacatggtgaagtaccatgacgtatataaattcgtgggaaatggtatttgcccttcggagcgatcattgcagcgctacagggagaaatacggcaaatattacaacgagctgctgaaagccaccctcaaaaaagcttcagatgtggattacactgatttcaacgaagtttccattgacgggaccatcaaaaaggcatacaacagcaaaaataaggtgatcacagagaaggaaactgaaattctgacccggtacttcgaaggcggccgggttagtcaggaggagctagataagctccacaaaccggcccgagagatcctggaaaacaagaagatcagcaaccaggaaaagctgtacctcctcgatgacattaaaacacagttcacgctgagcggtcagaagagcgtgcccgtaaccgacatagaagcccggtggatgaagagcaagaaaggaaactcccaaataagctataatatccagtctgcagtcgattacgacaccaagatgatctgcgcgatcaacgtcgtacaagcccctacagaccattaccagctgccaaaaatcgtcgataaggccataaacaacacaaacgtgattccccgcttcgtcctggcagatacaatctacctgaatgaggagagcttgtcctacctcgcagacaatcaaataaatggagttattccagacaggaagcaatccaaggaaaagatcggacgcctgaacaagaacccatatcacaaggatcacttcaaatacttcccggaaattgatgcctttgagtgtccagagggccagattatgtactttttcaacaaatacactgagaagaatgatgacttggacaagcccgacaagattaagcgcctgtattccaattatggtgcttgtaaggcttgcaattgccgggagaactgcctgtcgtccacccagacccacagaacgatcaccgagtatggcgggagtctaaagaaggccatgtgggagaaaatggaaacggaggagtataaggaggaatatgcgaaaaggtcatctgtcgaaggaccctttggcattttgaaggaacagttccacattgagagcgaggtggtgatcgggaagacaaagactgaagagagaatcctacttgacgccgtggcttataacctgatcaggctctttaacctggaacaggaaataaaaaatgacaaggaagatatagtggacttctgtgagaaaatcagcgtccaggagaagttagaggtcagagcgaccatattttga

SEQ ID NO: 2573 - DNA, 246 bp, synthetic construct
  source 1..246: mol_type = other DNA
atgaaaagaaccattaacgaacggtgggagctgtggtacaaccgcatcctcccatacattataatcttcgattttatactaatcacagtgtccctcattctcaatgtgagcgagccgacgatggcccacattgagcatttcgacttgctggtctgcatcatccttctgggcgaatttttttatttcttatacaaggcacccagcaagaaaaagttcctgctggacagggacatcttctgtttttga

SEQ ID NO: 2574 - DNA, 270 bp, synthetic construct
  source 1..270: mol_type = other DNA
atgccggtcaacttcccaggcaccattctcggatacctacgcatgctccggcttattagggtgatcagctttgccagaatggggtcctttgaagatttcttcaagaagacagagttccacaaaatcattatcgcaatagcgatcattataatgacattcacggctctgttttacgtgtttggtaccagctacaatcctttcgactatttctattttgtcatcgtggccctgaccactgtaggcttcatcgacaaacccctgaagaagtga

SEQ ID NO: 2575 - DNA, 333 bp, synthetic construct
  source 1..333: mol_type = other DNA
atgaacaatattgcctaccttctgctggcaatcctctttgaaaccagcgccacatctctgctgaaggtcgctgagggcttcactaagcccttgccaaccattgcatcaatcatactgtacatactctccttttacagtctcagcaactgcctcaaaacagcgccgatcggcgtcgcctatgccatttggtcggctttgggaatcgtgctggtgacgattgttgggattatcgctttcaaacagacccctgactgggcggccatcctgggactgctgcttatcatcataggcgtaggggtgctaaacctcttctccaagatgagcttacactga

SEQ ID NO: 2576 - DNA, 387 bp, synthetic construct
  source 1..387: mol_type = other DNA
atgacgatcaaacggaaattcgataagctgcccccatactgccagtttgaaaagaatctgaatttgatcaagaacaagtggaccgtgtacattctcagagacatgattttaggcaagaaatacttcagcgacttcaaagaggacaagccggaactgtccaataaaatcctaacccagcgccttaaggagctggaagaaaacaacatcatcgagaagaacatcaaggataatgagacaagctatcacctgactgagaagggccacaggcttcaaaacatactctacgagctcgccattttcaacttggaagaggaatatcatggtgaggaactggagaaaataaagaaagagtttgagcagctgaagtatgggggaaaccagaaatga

SEQ ID NO: 2577 - DNA, 801 bp, synthetic construct
  source 1..801: mol_type = other DNA
atgaaagaaaaaatatttatcaacggaaggggcggatgtgggaagagcacattcatcagtctgattgcaaaggagttgagtaagaacaataaagtgttaattattgatatggatgagggcaacctcggcctgaacaagatgctgaacgtggacgtggcagacactagcttgatggaatactatgggggcagagacaagatcatgggtgagatccttaaagtcggtatcaagggtatggttttagaaaaaatcaacctgaaggatgacgctgccagtgacagcatcgatattctggacaatatgaagctgtcagatctgccctccgattacgtgacctggaacggaaatatagggttcatcgaatccggcaaaatcaacgaccctgatgagggctgcgcctgcccgatgggaaaccttacacgggacttcctaaatcacattgagctgcaagacaatgaagtaatactcgtcgacaccagcgcggggatcgaacacatcggacgcggcgtaatcgagagcgcggacaagctcatttcaatcgtggacccatcaagcgatgccattctcctcgctaataaaatcggcagcctgtcgaaagaggcctccaaggagtatatggtgattctgaacaaaattgacgaaaatacgaaggatctggtgttggaacagctagatgacgacatatctgtcgtcggggagctggagtacaattcccatatagctcagagcaacctttcccagaaggagattaacctcgaggaggttgagggggaaatcaaggagatctgcgccaagatctga

SEQ ID NO: 2578 - DNA, 828 bp, synthetic construct
  source 1..828: mol_type = other DNA
atggatttgctcttttacgtggtgttgctgttgatcggagggtgctttgcaggtttcatggcaggcctcctcgggattggcgggggaattgtaatcactcccatccagtattatctgctgaccagtattggctgcgaccccaagacgtccctaacggttaccttcgccacaggacttgccgtgatctgcgtcacgatgatcaacagtacacggaagcataaacagaacaatctcattgtgaagcagcacctaaaaccaatgatggtcttcggctttgtcggggccatcctgggtgccgtcatctctcagtacatagatgttgaggtgctgaagattctcttcggggtcatatgtatcgtgagcacagtatttcttgtgctcatcaaaagtcctacctcgctggacaatattaaaaccgacgctggattattctactctatcgcctttgcgtgtggtctggccagcggcctgattgggcccgccggaggcgcctttatcataccgattttcgtggcatatcttaggtacccaataaccaacaccatcggcacaacttcagcactgagcatcgctaccaccctcgcgggggtgatctgctacattgtgttaggctggggcgttcaaggactgccagatttctcactgggttacgtcaacttgctgcagttcgtgttccttacaatcactagcatcattgtgtccggatacgctgctaacctctccaagaaaatcaatcctactaagctgaaggcgctgcaggtaatcgtcatttcctatattggcctgcaaatgatgggcgtgttcgacatcatactgagcatcatatga

SEQ ID NO: 2579 - DNA, 219 bp, synthetic construct
  source 1..219: mol_type = other DNA
atgtataaggtgtggaaaaattgcattgggtgcggcgagtgtgccaaggcatgcgacttcaacctgatacagaccttcgacgactacatcctgatggatatcgagaagtgccggcattgcagcaaatgtgtagaaacgtgtcagaacaacgtctttacaaagtccgtgatcttcaagcactttctatacctcctgtactataagattaaaaaaagctga

SEQ ID NO: 2580 - DNA, 408 bp, synthetic construct
  source 1..408: mol_type = other DNA
atgaagatcgccattcgatactacagcaagacggggaataccgagaagctggcagaggcgataggtgaggcgatcggggtggctccgaaaacaatagatgagcccctcaacgaagacgtggacatcctgttcctgggaaacagtgtatataacgccggcgccgactcaaaggtcaaggaatttctcaagaatatcgacgtgaatgtgggctcgattgttaatgtctcctccgcagctcttatcgagagcacctacaagcagattaaaaaagaagccgagaaatgtggcctaaacatggatgacagagaatttcactgccgcggacagttcaaattcgtgcaccgggggcatccaaacgaggaagatatcaacgaggccgtgaacttcgctaagagcattgtcaggtga

SEQ ID NO: 2581 - DNA, 546 bp, synthetic construct
  source 1..546: mol_type = other DNA
atggccaagtatatcgtgataaatggcagcacacgcaaaggtaactcatacgcaatcgccaacttcatcaaagagaaaattgatggagacgttgaaattttcaatattaaagataaggagatcggcttttgccaagctgataacgcgtgtaaggccaaggacgaatgcatagtgcaggatgacgcctacgatctcatcaacgacctggaggagtgtgacggggcttttattatcaccccaattttcttcggacggctcccgggcatggtcgatgcgctgattgacaggttctattccaagttcaatcccgctaaggagatgaaggccccagacgaaagcaagaagatcgggatagtgttcagctacggtggaggggaggcagactacacgcccgtagccgaacatgtcgcatttgagttcggcgtgctaagatttggggcccacaaaaacgtgatgtgcagtgaaaacaatgatcctaagggctttgaatcgaaagacgaccagcagagccagatcaacgagctgatctcctgggtctgcgagtga

SEQ ID NO: 2582 - DNA, 702 bp, synthetic construct
  source 1..702: mol_type = other DNA
atgagtgagagtgatgagataatcaagagactggaccgcattgaaaacgagctgatcacaattaaggagaacaattacaatcaaaacctgcagacagccatcgagagcatccgagacacctactctaatagcatcaagaagaactttgcagacaacctgggggagaagtgtagcgaattttatctccctaactgcaaaaatgaagagtgcaaacagtttatcgtccaggagttcaaggaactttttttaaatactcaggagaccgacctcaacaaacttaatgagcagctggacgaaaaattctactctgtgtgtggcgtcgagtgcagtccatgctacaacaacttcaaggaatacttcttcgaagagttgaagatgatcaactccattaatgtgagctatgagttgaacgagaatgagccgattgaaaagctcgatgtggatatgctgatttccgatgtatttgaacccttatcgagcaagcaaagggttatcataatagagtccctctacgtggaaaacaaatcatatactcaactttcacatctgacgaagctacggggaggaaacctactgttccacctggagaaactccaggacgcgggcctgatcagccagaagcaggaccggggcgaatacctgctcaccaagaaagggtatacaaccctgtccttgattaatcagttccagaaactgatgtga

SEQ ID NO: 2583 - DNA, 1896 bp, synthetic construct
  source 1..1896: mol_type = other DNA
atggaaataatcgatttgttcggcgcggcgcttacaggagtcaaagaacagaacgtggacttgctgttcaagtcaggcttatacatgctcatgtacaccgtcatcagcatgatcgccgtgtatgtcatctctttcctcaccacacgggtggcttcaaaaagcgcatatacggtccgggagaaaattttccacatcctgatgaacctcccccgggaggaaattgataaattcaaaattagcgggctcgtgacaaggagcaccagaggcatgtcctccgaacagggatttatagtgatgatcctcgagcagctgatgctgattcccgttaccttcgtggcaatcgtatatgagatcgcgctgattgatggcacttacgcacttttcttcttaggatttattggtgtgctgtctgcaatcatcatttttcgaatgaagcagattgtggagatctttttccgcgctaagaagacatatggtaaactcaacctgctcttcctgtccaagatcaatgacatagctggcaggattcctttcaacaaacaggagtacgaggtcgaatttgaaaaggcctgtgagaacagctacgataagaatgtcatctatatcaaaagtcaatgctacctcggaccaatactgatgtggggcctgtatgttatcgtcctggttaccctggctatggtgaactccggatacaccattggattcgaaacggacagtgtgattgatagcttcattatcctggtgtatgttgcctacttcatcactacgctagctaacattcccgctctgattgaccgatggccacgggcctatgccacttctgtgcggttggaggaggtcctgaatatcgaagataagatcataaagtccaataccaatgacaacctgaaggagatagagatcgtggaggaggacattgctcaagaggctaagggcatctgggatgaacgaaagggcatctctgaaaaattcactgcactcttaaaagaggataaggccaaagtaagaatttcaatgattctgctcacgatatccacattgtgcatggtgtacgccccaaaggttgccggaaagacagttgaccttctggcttccaattggaatagtacgaatgaccctgccatctacatcagtctggccctgctgctggtgttgtattcagtaggctacctgttcaagcttccgcccaagagaatcatgggggccacaggtgaaaaggtcgcatacgatcttagagtgaagttatttgacaagctggatgccgttggttccgacttcattcaggagaactcgaagggcctcgtgctatcccgcctcaacaacgatgtgatgaacatcagggagtttgtgagctctaagtttactgagatctatgcgcagatcctatttatagtctttgtaatagtgttgattgtgatgacagacttcaggctgagcctgatatacctggtgattctgccggtctacgccgtgtgcttttatgtctgtgacgtcaaatctaaaaactactacgatgggcaccagatgcagctcgggcgccttatgagctattttgaaaggggcctgtcgaaccgtgacagcttccatgagaaagggtttaaaaaaatgaatcagactgtaatcgactactacgtcaaatccaagaacgttaccaacttcatggtgcccgtgacaacccttctgaccaatatcagtaagatcaccgtgtatatcgcggggatctactttttggccggtaatgagatccagatcgggaccctcttggccgtgatcatgtacgggcaacttctcaccgaccctattaagaagctaagtagctcgatggccactattgaaacctcattctcaagcatcaaacgcatatttgcaatcattgactacaagaacgacaagtga

SEQ ID NO: 2584 - DNA, 1044 bp, synthetic construct
  source 1..1044: mol_type = other DNA
atgcccgaatttaagcttattgagaagctgctctacaagagcgaacagaacgatatcgaggctgagtttatcattggaaacgagactctgtggtcgagtcagaaggtgatcgcggaaatatttggcacgacgtccgccaacatttccatgcacttctcaaatatcatccaggaaggggagctagacgagaaggaagtaagcatcagttccaaggacctgtttaaagacaaccccaatttcattaagaagtccctcaaaaagagcaataaccgagggaggccccagaagtggtataacctggacgcaatcatatcgatcggctaccggattaacagtaaggaagcaacccagttccgccggtgggccaacaaaatactcaaggaatatatgatcaaggggttcgtcatcgataaggagctgctgaaaaaggggggaagatttacagaagactacttcgatgaactgctcgagaccatacgagaaatcagggcttcagagcgccggttcaaccagaaaatcacagacatttacgcaactagcttcgattataacaaggatgcggacatcacaaaggagttctttgccacagtgcagaacaagctgatctttgctatcagcaaccacactgccgccgagctcatcgagaccaggagcgacattgagaatcctcacatgggcttgaccacctggaaaaaagcaccaaatggaaagatccttcaatccgacgtggtcatatccaagaattacttgaatcaaaacgagcttagcagattaaatagtctggtcgagggtttcttgaatctcgccgaatcacgcgccgaggatagaatcccgatgggaatgaaagactggaaagaactgctggacgactaccttaaactgcgcaggctgccaattctggttggcaagggtaagatatctgctgaggaggccagagaacatgtgctcgagaaatatgaaaaattccgggtggtgcaggatgagaacttcatttctgactttgatcaaatgattttagatattaaacgtctagagggcaaatga

SEQ ID NO: 2585 - DNA, 135 bp, synthetic construct
  source 1..135: mol_type = other DNA
atgaagctggtcaaacggaaccagaagctacacgacccagacagcccgctcctgatcggggatgtgaaagacggcgacgtggtaaatgaggtgaacgaacccagctacatagatctccagaccaagctgttctga

SEQ ID NO: 2586 - DNA, 333 bp, synthetic construct
  source 1..333: mol_type = other DNA
atgaacaacattgcgtacctgctacttgccattctatttgaaacctccgccacgtcactgctcaaagtcgctgagggattcactaagcccttgccaacaatcgcctccatcatattatacatactgagcttttacagtctcagcaactgcctcaagaccgcaccgatcggcgttgcctatgccatctggtcggcattgggcatcgtgctggtgacaattgtagggattatcgctttcaagcagacccctgactgggcggctatcctgggacttctgctgatcattataggcgtcggggtgctcaatctgttcagcaaaatgagcctgcactga

SEQ ID NO: 2587 - DNA, 387 bp, synthetic construct
  source 1..387: mol_type = other DNA
atgaccattaagagaaagtttgacaagctgcccccatactgccagttcgagaagaatctgaatttgataaaaaacaagtggacagtgtacatcttaagggacatgattctgggcaaaaagtatttcagcgatttcaaggaggacaagccggaactgtccaacaagatcctcacgcagcgcctcaaggaactggaagaaaacaacatcatcgagaaaaacatcaaagataatgagaccagctaccacctgactgagaaaggccaccggcttcagaacatattgtacgagctcgccatcttcaatcttgaggaggaatatcatggtgaggaactggaaaaaattaagaaagagtttgagcagctaaaatatgggggaaaccaaaagtga

SEQ ID NO: 2588 - DNA, 801 bp, synthetic construct
  source 1..801: mol_type = other DNA
atgaaagagaagatatttatcaatggacgcggcggatgcggcaagagcacattcatctcactcattgcaaaggagttgagtaagaacaataaagtgctgattattgatatggatgagggaaacctcggcctcaacaagatgctgaatgttgatgtagccgacacgtcgttaatggagtactatgggggaagagacaagatcatgggtgaaatcctgaaggtggggatcaagggtatggtgcttgagaagatcaacctgaaggatggcgctgcctccgatagtatagacattttggataacatgaagttaagtgatcttccatccgactacgtgacatggaacgggaatatagggttcattgagtccgggaaaatcaacgaccctgatgagggctgcgcctgtccgatgggcaatctgacccgggacttcctaaaccacatcgagctgcaggacaatgaagtcattctggtcgacacctcagcgggcatagaacatatcggcaggggagtaatcgagagcgcggacaaactcatcagcatagtggacccctcaagcgacgctattctactggccaacaagatcggaagcctgagcaaagaggcctccaaagagtatatggtcatcctgaataagatcgatgaaaacactaaagatctcgtgttggaacagctggacgacgacatctctgtcgttggggaactggaatacaatagccacattgctcaaagcaacctttcccagaaagaaatcaacctcgaggaggtggagggtgagattaaggaaatctgcgcaaaaatttga

SEQ ID NO: 2589 - DNA, 828 bp, synthetic construct
  source 1..828: mol_type = other DNA
atggacctgctgttctatgttgtgctgctgctcattggcggctgctttgccggtttcatggcgggccttctcgggattggcggtggcattgtcatcaccccaatccagtactacctgctcaccagcattggatgcgaccccaagacgtccctaacggtgacctttgcgacagggctggcagtgatctgcgtcaccatgataaacagtacacggaagcacaaacaaaacaacctaattgtaaaacagcatctcaagccaatgatggtcttcggctttgtgggggccatcctgggggccgtcatctctcagtacatcgacgtggaggtgctgaagatcttgttcggtgtaatctgtattgtaagtactgttttccttgtgctgattaaatcccccacctcccttgataatatcaaaactgatgcaggattattttactcgattgccttcgcttgcggtctcgccagcggattgattggacccgccggaggagcttttatcataccgatcttcgtggcatacctgaggtatcctataaccaatactatcggaacaacttcagcattaagcatcgccaccacactggccggggtgatctgttacatcgtgctgggctggggcgtgcagggcttgccagatttttcattggggtatgtcaacctcctgcaattcgtgttcctgaccatcacgagcattattgtctccggctatgctgctaacctctctaagaaaatcaatcctacaaagctgaaggcgctgcaggttatcgtcattagttacatcggccttcagatgatgggggtgttcgacataatactcagcatcatatga

SEQ ID NO: 2590 - DNA, 219 bp, synthetic construct
  source 1..219: mol_type = other DNA
atgtataaggtctggaagaactgcattggctgcggggagtgtgccaaggcatgtgactttaacctgatacagacattcgacgattacattctgatggacatcgaaaagtgccggcattgctccaaatgtgtggagacgtgccagaacaatgtattcaccaaaagcgtgatcttcaagcactttctctacctactgtattacaagatcaaaaaaagctga

SEQ ID NO: 2591 - DNA, 117 bp, synthetic construct
  source 1..117: mol_type = other DNA
atgaagctcgtaaaaaagaaccagaagctacacaatccgaactcccccctgctgatcggcgaggtgaaagagagcgacgatgtcaaggaagtgaacgaaccaagctacatatattga

SEQ ID NO: 2592 - DNA, 804 bp, synthetic construct
  source 1..804: mol_type = other DNA
atggagatttttaaggtggtctgcgaattaattattccaatcctgatctttggcgtgctatttgcagttggcaagttcatccatgtcagacttctgaatagtaagagccggattttaaatccaggagagtatttccccgacgaggaactggagacactgaagcaggtttattatctggtcatgatgctgatcttctttgcctttatcctctacatcatgatagtgcaagccaatgaggtattcgcgattgccgtgctccagattctggtgtcagtctacgtcgctcttacgctggactactcctacttgaaaaacaagatattgttcttcctcctggtgcccttcgaagctataatcttcctggtgttcaacgatttcctaatgatttggccgatttatttgatgcacatcctggtatacgcgtacttcatcaaggtatacttcgataaatttaggaagtacactgagacaaacgggcttggaataacaatcatcctactcttcgccatagtgtttatcagcttcattatcaccctctttgtggaaggggtggagcctctcaacagcgctgtcatggtgtcgaacgcatttacctccaatggttatgcaatcctggggaactcaggcatcggcaaactcaccagtttggttctggtttggagcggatacatcatctctggcgtgggtactgccacgctcaccgccgccattatgatgcgccacaaccagaagcgggagaaagagcttaacaaacgactggacgagctggaatccctgattaagaatagcaataacaaagaatga

SEQ ID NO: 2593 - DNA, 1965 bp, synthetic construct
  source 1..1965: mol_type = other DNA
atggaaattattaaggggaaggagattccgaaaaaaagtctcaagcgaagtcttatcgtgtttattgggaacatgataggaatctacctgatcagtattctgggtctgggcgtcgaaattagccagacgggggacatattccttctggtcttgttcctagggatagtgaacgctatcctctggcccattctgacaagaatcgctatgccctttcttgtgctgaccttcggtataggttcactgatactcaacgggctcctgcttcagctgctcgccccaagctttggcatcgagatcaagggggccgctatgattctggctcccctaggaatggcggccgttaccaccgtgctatctagcttgatcacaattaatgatgacagttcctattacaggtccgtgttaaatgatgccaaaaagaatgccaagaatgaggtcaaggattacccaggcgttataatcgttgaaattgacggactcgcctataatgtgctgtgcgaggcagttgaaaagggggacatgccgactctgaaaaaaatgattgagagcgaagactacaatctgcgcatgtgggaaacggacctgtcgtcccaaaccggggccagccaggccggtatcctccacggcaacaacgaaggcatcgtggcattccgatggatagaaaagagcaatggcaatcagatgatgcagtgctctggaatcagcaacgtgcccgagctggagaagagaattagtgacggtaatggattgctggtggagaatggagccagccggtcgaatctcttctccggagacactgacaacgtgatcttcactttctccaagatcatggactttggaaagctctacaacaaggcttggtacagcgtattctccaacccaagcaacttcgcacggattgtctcattgttccttgccgatattgtgcgggaaatctggtcacagatcacgcattccatcaaaaacattaggcctagaatcaaccgtgggatcgcgtacattccaacccgcgctgccacaaacgtctttatgagggaaatcaacacttcaacccttatcggagacatgatggtgggagatgtggatgttgcatactccacatatttaggctatgacgaaatagcccaccactctggggtccgagacagtgacgcatggatcgccttgaggcaaatggaccagcagatcaagcacttgaccgatgcaaacaaatattctccccgcgattatcaattcgtgattcagtctgaccacggccagacaaacggcgccacatttacccagagatatggtcagaccttcgaggacttcgtaaagtccttgctccccgaagacatgaccatgtttgccaagatgacttcaaatgacgaccactttgtaggggattacactccttttgcacgcaaagataaaaagatagagaaggagaaggaggaagctaaggagctgagtgactcggaggtgattgtcctggcttcgggtaacctggcaatgatctatctgacccagtggacgaaccggttaagctatgaggagctgaacagctacttccctgagctgatccctggccttataaataacgagtacgtaggttttattctggtgaaatcccaggagcatggcgatctggccattggcaagaatggcacatactacttagacagggatgaaatcgatggggagaacccccttctcggcttcggcgacaatatcgtgaaacacctcaaacggaccagttcatttgagcatacaccagacatcctcgttaactccttctatgatgaggaggcggatgaggtctgtgcctttgaggagctggtgggcagccatggaggagcgggcggcgaccaatccaagccgttcatcctctacccttcaagctggaatgtcagcgatgatgaaatcatcggggctgaaaacatctacaaactactgaaagagaacctggcggaactgaaaaagtga

SEQ ID NO: 2594 - DNA, 828 bp, synthetic construct
  source 1..828: mol_type = other DNA
atggagataatggaaatcattaaagattctttcctattcccctctaaaaacttaggcaccttctccatttacgtggtattgtcagtcctcgtggcaacatttacctttggaggaatcttctcctatttattggggttcattggcagcgagtacattcttatcggcggcctgaccctagtcttcgccatgcttattggctgggtgatgtcgggctatgagatcagcatcatcaagtctgggatcgacctggatgatgaagtgcctgagtttaagtggtgggacaactttattaccgggttcctgaacttcatcgtggccatcgtgtactttatcatccccgctttcatcgtgggagtggtcggatatctgatcaatatcaatgacaagcttatggcagtggctcaggagattagctcactctatccaaatattttcctcacaagttccccggatatcgcatttgaggccctgagccaggccataatcgaactgatagtgcctctggcgatcctcatcattgttgccctcatcgtatttgtcatctttttgttcctccaatccatggctgaggccagactcgcaaacacggggagtttgagtgaagccctgaacatttttgaagccgccaaggacataaagcggatcggtgtccgcaaagtcattatagtcatcctgctggttttcgtgattattggtgtgattgggatggttacatcggttatctttaactacgtgcccactctgagcatcctgtcaattatcataagcccataccttgtattcttcgctcagagggctactggcctgctgtactccgacatagcgtga

SEQ ID NO: 2595 - DNA, 462 bp, synthetic construct
  source 1..462: mol_type = other DNA
atggaacctaacaaagtctcaggaatactgtccattatcctgggactgattttcatcatcttccccctggtcagtagcggactcgtgagcatcatgatcggcgtgagcctgctattcctcgggatagccagtattctcacagagtttagcgccctcaacataatcattgggatcttggccatcattttcggtctactcttcattttcaacattgacgcgttgtccttccttctcgggttccaattttacattatcgggatcttgatgatcctgattggcgtggcaggtatctttgccggagagggcgtttccaagatcgcttcaatactgattataatcttaggggtgatcgcacttggccttggcggcttttcgctgacccagccgatctttgctgccgtgctgattggcgtggctctgatcacgcagggagtacggctgtatgtcgcgccaaagaattga

SEQ ID NO: 2596 - DNA, 1521 bp, synthetic construct
  source 1..1521: mol_type = other DNA
atgaacgagaccattaaggaaaactcttgggtgcccttgatcgtcgtggcccttgcttcctttatcgtcgctctggacgctacattcatgaatgtgagtatttcacaggttgttgtggacctgaacactgacgtcagtacaattcagtccatcatgtccttttatactctcatcactgcagcatttatgctcttgagtgccaagcttcaggacatagtggataagaagaagctgtttcttatcggcacggctctgtatggcgtaggtacattcaccgcaagcataagctcgagtgcgggcatgcttttcgtgggatgggccgctatcgagggggtggcgggggccctgatgatgccggcaaccgtgtccatcatatcgggaacatattctggtgaaaagcgtacagtggctctggcgattgtaggcgttatgggtgcggtggcagccgccgtgggcccactcttcggcggggtcatgacaacctttctgtcctggcgctacggctttgcagtggagttgataatcgtgttcgtgatcctgatattcagaaatagcatacctcacttcgagcctaccgaatctaggagcgacctggacatctcaggcgccatcatttcatttatcggcctggtcctgctggtactcggtatcctgagcctatctaaggacttcaccaccagcatcggcataattgtagtcggcctgattgctttagtggcctttgcctactttgagatccggcgaaaacgcaacggcaaagtcccattacttgatatggagctatttaaggacaggaacctgcgggtaggaacgatcatcttgctgttatcttaccttgcaatgggggggggcctgtttgcggtgtccctcttcctccagagcgtcttgcagctcaatgccttcaatactggggtgactacgctgccactcacgctgggcctcctcattttcgccgtgttggctcccagcctgacagaaaaactcagtcacaagaaaattatggcaatcggatgcatcatggctatcattggatgcctcatgttgagttaccagtttagactggatacaaccctttggacactgctgcccggattgctggtgttaggggcgggactggggttcatcatggccctatgtactgatatttcactgagcaatattcctgctgaatcccagaacaacgcctcaggtgtcaatagcaccggtaccagcctgggggagtccatggggaccgccgttatcggaattattctgatcctcggagttatgggcgggatcagcactgccgtcgacacctacgcccccgatcattcgggcgacgagcaattccagctcgaggtggccaattacttccaaaaagtggccactatagatgatctgaaacaggactccacccttgtcgacgttgcaaacatcatcattcaaaacaccatggctttcgtgatgcaggtcaccgccctcattatgggagtggttttcctgctaacgctgcggctaaaggataacaagatcaaacagtga

SEQ ID NO: 2597 - DNA, 1251 bp, synthetic construct
  source 1..1251: mol_type = other DNA
atgagcaatgtgaaagacatgtctctcgcggatgaggggattcgcaagatcaagtgggttcagaagcatatgcctgtgcttgagcatattaagaagcagttcgaggaagaaaagccttttgagggaatcactattggttcgtgtctccacttagagcccaaaacggtgaatctgggtttgacccttcaagctgggggcgctgaagttgcaatgacaggctgcaatcccctctccactcacgatgatgctgccgcaggtgccgcagctctcggcctgcacatatatggctggcgggaacagactgatgaagagtactatgaggctatcgacaatgtgctctcccacaagccagatgtaatcatcgacgacggagcagacatgataatgtacctgcacgagaaacgcccagagctattggagaacatcaagggggcttgtgaagagacaacaaccggtgtgcaccgcttggaagccatgcatgcggacggagcactgaagttccccgtcatcgcagtcaacgacgcctacaccaaatatctgtttgacaaccggtacgggaccggccagtccagcctagacgcgatcatgggaacgaccaacatgctgatcgccggtaaaaacgtggtcgtctgcggatacggctggtgcgggcgtggagtcgccagtagagccgccggactcggcgcgaacgtaattgttacagaagtcgatccaatcagggcacttgaggcccgaatggatgggtaccgggtgatgaaaataagggaagctgtgaagatcgccgacctggttgtcaccgtgacaggaaacatagatatcatccatggcgatgacttcaagtacatgaaggacgggtgtatgctcagtaactcaggccacttcaatgtggagatcaacaggggcgacctggaggcccaatcagtaagctgcgaggaggtgcgagaaagcattgaaatgttcaccatgaaagacggcagaaaaatttatctgttagccgatggaagactcgtgaacctggccgcagccaggggccaggggcaccccgctgagatcatggacatgagttttgctgtgcaggccctgtctgccaaatacattgtcgagaatgacttgagcctgggggtggagaaggccccggacagcattgatgatgaagtggcccggctgaagctgaaagctatgggcatagaaattgacgatctttccgagcgccagaaggattatctggcggactggagagagggtacgtga

SEQ ID NO: 2598 - DNA, 666 bp, synthetic construct
  source 1..666: mol_type = other DNA
atgtcctatttccgctatatcgacaacggagaaggccccaccaagctcttcatcggcggagtgcacggggatgagggcaagcatgtcctgcctttgatcaagctgctaaaacgggaggacttttcctcagggcagatctacatttacaattttgacaggactccatatatctcgacaatccatcgcgagttttaccagagcgagcaaggcaagaaaatactggatttggtcgattactacaagcccgacttttatacagagcttcacagctataacattaagcactttgatagactcacttcactggacaggcttgacagcgaagggattccgcccttaatcgattgtggtcagtacgtgctctgcagtagcgtttccccactgatccgacgtaagcacttcaccaaagaagcaatatgccagacgctggagtttcctatattccgcggtgaagacctaaagctgagtgacgacgagctcctggaaaaatacgatttcgattatgacctctctgtgaaggagtacatggccttcctcagactgattaccctgagcaagaatagggatgacttcgagaaacgggtgctgaaggactacaagaaacaggctgatcttgccctgaaatacgtaaaaatcatttacggattgaacttcccacggtattga

SEQ ID NO: 2599 - DNA, 987 bp, synthetic construct
  source 1..987: mol_type = other DNA
atgggggtgaagtttaaggatatagtgacggccgaagagatcaacctcaaggatctggagggccgcactgtagcgatcgatgcttacaacaccctgtatcagttcctctctggcattaggcagagggacggcagtcccctgatggacgcgaatggcaatgtgacatcccacctgagcggcattttgtaccggaccgcttccatcgtggacaaaggcataaaaccggtctacgtgttcgatggagatgtctcagaatataagacaaaaaccgttgaaaaacgacgggccttaagggaagaggccaaccagaagtatgaagaggcaaaggcagcagggaacattgaggaggcccggaaatacgccatacgcagctccagattatcaccatacattatcgaatcctctaaaaaacttctggagtatatgggcatcccctacgtgcaggccaaaggggagggtgaggctcagggagcctatatggtgaagaacggagacgcttgggccgtcgcttcccaagattacgactgcctgctcttcggagcccctcgtatcatccgcaaccttaccctgagcgggggactatcgaacctcgagtaccttgaactggacaaggtcctcacagagattgaccttagcagagagcaactggtggatgtggccttgatggtaggaaccgacttcaacgaaggcatctatggcatcggtgcaaaaacggggctgaagttgatccgacagaatagtctggaagacatcttggttcagaaggggattactgacgtggaggtggagccagatgagctgagagaaatcttcctgagccacgatgtcaatacagactacaagattaagtttaagagcgcggacaaggaaaaactctgtgaatttatgtgcgaggagcatggtttctctgagactcgggtcctcaatgttgcagacaagctaaaaaagctgagttcaacccagaagtcgctggaggactggttttga

SEQ ID NO: 2600 - DNA, 564 bp, synthetic construct
  source 1..564: mol_type = other DNA
atggcaacgacagacaatgacatcaacgtacgactgattgagaagattaaccaggtggaggaaaagtacaatcagaactttagcaacacgcagaagatcctcatgaccactgacggctcaatcactgccattttagatgtgctgtatggaaaaattgctctgaagaccctcgagcaacatttcgaagaggcaaccgccgaaagcgccaagctggtcaatgtggatgttggcgacgaggtcaactttcgggaaatcatcatgcacaaggacgaacagccactgatctacgctaaatcctatattccccttaaacgcctgagcaaagagatcaaagaggaccttgtgcgggccgacatcccgataggtagaatactgaagaaataccacattgagtcccgcagggagataaacattatcgatatggaaaaggccaacgacaagttgattgagatctataatacagatgaggacttcctcgcgagggattacacaataatcaaagatggggaaattctaatgtggatcaaggagtacttccctatcagttacttcaccgaaatctga

SEQ ID NO: 2601 - DNA, 1254 bp, synthetic construct
  source 1..1254: mol_type = other DNA
ttgaacattacagaaaagatcctatctcagaaagcaggccacgaagtcgagccgggggagatcattgaaattggcgtcgatctggccatgtcccacgatgggacttcacctcccgccatcaaaacctttgagaaaatcacagataaggtgtgggacaacgagaagatcgttattgtctttgaccacaacattcccgctaataccatcggctctgctgagttccagaaggtggcacgcaacttcatcaagacccaaggcatcaaaagccattacattcacggagagggtatatgccaccaggtgcttcctgaaaagggccatgtggagcccgggatggtgatcgtcggtgccgactcccacacatgcacatacggtgccttcggagcgtttagtaccggaatgggtgcaactgacctagccatggtctacgcaactggaaagacgtggtttatggttccggaggcgttgaagatagaagtggaagggagcctgaggccaggcataacatccaaggacctgattctgaacataataggagagatcggcattgccggggccacctacaacactgccgagttctgcggggagaccatcgacaatctggacgtggaaagccgaatgaccatgacgaatatggccattgagatgggcgctaaaaacgggatcatggagcccaacaaggcaacgatcgagtatgtgtgcaatcggaccggcaaaagcaaagaccagttgaacatcatcaaaagcgacaaggacagcaactatctcaaggagtacctcttcaacgtagacgatatggaagcccaaatcgcctgtccaaatgatgttgacaatgtcaatcccctctcaaaagtggagggaacccatatcgaccagggctttattggcagttgcacgaacggccggctcaatgacctggcgcaagctgccgcagtgctcgaaggcaagcaggtgcacgacgatgtaagattaattattatccctgcatccaaggagatctatcagaaggccatggatctgggttatatcaaaaccttcctggatgctggcgcgattgtgtcgaaccccggctgtggaccatgtcttggaggacatatgggggttctttccgaaggggaaactagcatcagttcgacaaacaggaacttcaaggggcgcatgggtgatcctaattcaagtgtgtacctggccaatgctggggtggtagctgcctctgctgtctccggattcatacagaacccagatagcctgtga

SEQ ID NO: 2602 - DNA, 1179 bp, synthetic construct
  source 1..1179: mol_type = other DNA
atgcagtattatatcagtcccttcaacaaggaagaggagtacaaattccccaaaaacattactatctatgatacgacccttagggatggcgaacaaaccccaggggtctgctttagtaaggaagacaagctggagattgctagaaaactggaccaatttcgcatccatcagattgaggcggggttccctatcgtgtcaagccgtgaagccgatgccgtgaaggcaatagcaaatgaaggcctggacgcacagattatctgcctcgcccgaacgaaacgggcagacatcgacaaggcgctggactgtgatgtggatgggataatcaccttcatgggaaccagcgacattcacctggagcacaagatgcacatcaaacggcaggaagccctgaatatttgcatgaaatccattgagtacgctaaggaccatggcttgttcgtcgccttcagcgctgaagatgccacacgcactgacctggacttcctgaagaggacctactccaaagcggagagctacggggctgacagggtgcacatcgccgacacagtcggggctataactccccaaggcatcactttcctaatcaaagagcttagaaaagtcaccaatgtcgatattgccatgcactgtcacaatgactttggtctggctgtaataaacagtatctacgggctgctcgcaggcggttccgccgtgtcgacaacggtgaatggcatcggagagagggccggaaacgcctccttggaagagctggtaatgtctctaaagatcttatacggaaaggacttggggtttaagaccaaatacattcaggagctgagcgagctcgtggcggaaaagaccaagcttggaatcccttataacaagccagtggtaggtaagaacgtgttccgccatgagtctggaatccacgtggatgcagtgatcgaagagccgctcacatatgagccatatctccccgagcttgttggtcagaagcggcagctcgtcctgggcaagcattcaggctgccgggctgtgaaggccaaactcgacgaatgcggctttaaggtgacaaacgatcagctgtgtcagatagttaagaaggtcaaagaaagcagagaggagggcaaatacatcgatgataacgtgtttaaagacattgttcgaagcattgatgccaactacgttgacttatga

SEQ ID NO: 2603 - DNA, 546 bp, synthetic construct
  source 1..546: mol_type = other DNA
atgatcgaggtggaggtgaaagctaagattaataacttcgaagatatcaaggtcaagctgaacgaaatcaatgccataaagactaaaacagaaaagcagatagaccgctacttcaacagtccggtaaatgacttcgcaaagaccgatgaggccctcaggattcgggaaaccaaaacagaaaagtcccacaacttgtttataacctataagggccccaagatcgactcgaaaagcaagactcgagaagaggttgaaatgaaaatcgaagacagcgacaaatgcgcaaaaatcttcgagaatctcggtttcatcgaagtgcggacagtcaagaagaacagagagtactttaagctggagaactttgagattagcttagatgatgtggagggccttgacccatacatggagatcgagattgcgctggaggacgggtccgattataacgaagcccaagacaaaatcttcgacctatttgagcagctgggaattacggatgggttcgagaggacctcatacctggaactgctcgaggagcaggacaaatga

SEQ ID NO: 2604 - DNA, 546 bp, synthetic construct
  source 1..546: mol_type = other DNA
ctgaccgacgtggatataaagatcgagaacatcgtggcgtctgctagcattggtaaggacatcgtgctgacggaagttgcaaaagccctggagggagtcgatttcaacagagaacagtttccagggctagtcttcaaactccaggaccctaagactgccgctctgatttttagttccggcaaactggtgtgtacaggcgcgaagtcgatcgacgattcaaagctcgccattaagaaaacggtcgacctgatgcgcactatcgataccgagatcccccacgagtttgacattaagatccagaatatcgttgcctccgcaaatttacagtccacacttaatctggaggcagtggccctggagctggaaaacaccgagtatgaaccagaacagttccccggcctcgtgtaccggctcagtgatccgaaggtagtcctcctactgttcgggagcgggaaggtggtgtgcaccggcgctaaaacaaaacaagacgccaggttgggagtagagaacgctaaggcccgacttagcgagttggaccttatatga

SEQ ID NO: 2605 - DNA, 2064 bp, synthetic construct
  source 1..2064: mol_type = other DNA
ctgattaaactggtcgtgttcgacctggacaatgtgatcatagacggcgagggcatagacgagatcggaaaactggtcaatatcgaagaccagatcgcaaagatcaccgagcaggccatgcagggggagatcgacttcgagacatccattaaaaaacgggtgggtctgctgaagggagccagcaccgatgacattaagacactggccaacgaaatgccactaatggagggcgctgaagagaccgtgtccagcctgaaggagaatggctttgacgtcgctatcataagtggcagttttgacattatcgccgacatcattaaggagaaactcaatgtggacaatgttttcacaaattcactggtggaagaggacgggatcttgacaggtgaagtgactggaccattggtttccgggtcaaaagtcgatgtgctgtctaagttcattgaggacaagggctattctctggaggaatgcgtggctgtcggagacggagctaacgacatctccatgattgagtccgcgggatacggcatcgcattcaacgccaagccggccctgaaggagaacgcagacatcatagtagaaacccgcaatcttacggacgtccgtgacgtcattattaacctcaactctgagaacacggaggagggggccgacgtggataaggaggtggaaattgaaacagaagtggttgagagcaccgatgtagtggtcgagaatcaggaagaacaggttgcagatgcaaccgaagaagtcgtggaagtggaggaagccgaggaagccgttgaggaggcagtggagaccgaggaggaagcagtggaggaggaaactgtggaggctgaggaggaagccgttgaggaagaagccgaggaggctgtggaggccgaggaggaagccgaggaaatcgaggaagccgccgaggaggaagcagaggaggcgaccgaagaagaagctatagaggaggccgaagaggaggctgatgaagaggtggtggaagaggccgaagaagaggtcgccgaagaggaggccgaagagatcgaagaagcggtggaagaagaggctgaagaagaagtagctgaggaggccgcagatgaggaagtcgtggaagaagccgcggaggaggaggcagaggaggctaccgaagaggaggcggcggaggaagaggccaaagaggaaaagcctaaaaagagtaagaagagcaaaaacactcttcccgagcccgacttcgagctcgccgatacgatcgagggcgtcagagcccaaaaagatgagcgcgaggcaaagattgcccaggttgcggacgagagggaggccttcaatcgcgaagcgaaggagcagcgtaaaataagggacgaacttaacactgagctgaaactcaacctcgcaaaggccatcgagtttcgggatcagcggaacgagatcaaccgcgaggttgaggaaaacaagcgagctcggaacaaagtaaatgaagagattaagaatctcgagtggtcgagcgggaagaaggatcggatcaggatagagaacgaaatcaagaagatagataaaatcatcgaaaccagggtgctagacatcaaaaaggagaatcagctagtaaagacggctaacgatctgcgaaagcagctggcagaaattacagaggacaacaaagtgaaggaagaggctgagaagctcaaaaagcagtcggaggagtaccacgcgaaagtggtcgaactttccgagcaagcccaggaagcccacgaacaaatgctgtcatactttaggaagactgatgaaatccgcacagccgcagatgaggcacacaagttattcatccaagctaggaagaacgcctctgccaagcatgaagaatttaaagtcattctcagtgagattcatgtgatcaataaacgattgggcagcaacagagccagaagaagaaaaagcgagaagactagcaatgctcccggtaaacgcaatcgggaggagaaagagaaggctgaagctatctttgataagttcaagaacgggaaaaagctgtcaaccgaggagcttttactcttgcagaaatatgatattaactga

SEQ ID NO: 2606 - DNA, 246 bp, synthetic construct
  source 1..246: mol_type = other DNA
atggacgacattatggacctggagaataaaaaggatgacaaaaaccagaacaaagaggagatcatagaatccagcgaaaaggaagtgaagatggaaatctgttatacctgcgggaaggagttcgatatgaatagcgacgagggcgcacattaccactacggcgaataccccatgtgcggctattgcacaaacttctttggattctacaaggaggatatgatggggggaaaggccaaaaaggagtga

SEQ ID NO: 2607 - DNA, 2226 bp, synthetic construct
  source 1..2226: mol_type = other DNA
atgcacgaagtgattatctcagaaaaaccaaagagcgctgagaagatagcaaaggcactgagtccaaatgcccagaagaaaaaatacaacagaaagatcaactattgggaatttgaagaaaacggcaaaaagaccactgtcctcagcgccgtgggacatctgtactcactgacttctgccagtagccgcgacagattagggttcgacctgacttgggttccagcttatgaggtggaaaagcaaaaatatacaagggactacatcaatgctattaaaaaactctcaaaaggggcagataagttcgttcacgcgtgcgattacgatgtggagggcaccctgatcggctacaatgccctgaaatacgcctgtggaaacaatgccgaagcaaaggcaagccggatgaaattttcaacgctgactaagaaggatatcgtcgaggcctacaatacgatgagggacattgacattagacaggtggatcacgggattgcccggcatatgctggactattactatgggatgaatatctctagtgccctgatgaaggcggtacgggcctctagctcacggtttatcagcctgtccgccggtcgggtccagactccaaccctctctattttagtggatcgcgagaaggagatccagtccttcgtgccggagccctactggatgatcaaggccaaatctgactacgacatcatagcagaccacgtcgaggggaagatatttgacgaagagcgagctaaaaagatctacgccgactgtcagggggctgatgcggatgtgacaagtgttaaggttacagaatccattcggaaacctcccattcccttcaatctgggcggactgcagtcggaggcccatactgtctttggattctcgcccaaaaggactcaggtggcagctcaaaacctttatgtgggaggatacacatcctaccctcgtacatcatcgcaaaagctgcccgaatccttggatttcaaaaacatttttgccgggcttgctaaagaccctgagtttaagaagcatatcttcgaccttcctgccaagctgaagcccaatgaagggaaaaagacggatgccgcgcaccccgctatacaccccacaggcgtcttgccttccaatctatcagcagatgaggcgaagatctacagcctcattgtgtaccgattcatcagcgtgttttccgaaaactccaagcttgagaccatgaaggtcaacttgaaggtggcagatgagaagttcaccttctccagaaaacgcgtcagttacgaaggttggctaaagcactatccgtttaaaaagcaggaaaacgacgccttcccgcctataaacaagggcgaccagctcaaaatccacaagatcctcgttgaggagaaggaaaccaaacctcccgcccggtataacgaggctagtcttatcaaggaactggaaaaaagggagttgggtacgaaggccacccgggctgacatcgtggccaagctgtatgatagaaaatacattgaaggcaagaagatcgaggtcaagcctttaggcatcaacatcatcgacaccctgaacgagtactgcaaggacctgacaagcgaggagctaacccgagagtttgagagggaactcgagggcatcgacactgacaagtatacaaaggagcagattctcgaaaacggggagaaagaagtcaagaccattctggctgagatcaaccagaacaagaagcaaatcggggaaaagctttacggagcatatcaggagaccaatgtggtgggcgagtgcagctgcgggggaaaactgataaaacgctatagcccaagaacgaagaacaccttcgtaggctgctccaatttcccaaaatgtaaggtgacctattccctgccaaaaggcgcgaatatgctcaagaagacatgccccacctgcggtttgcccatgattagcattaaaaaggctagcggaaaaggacgagaccatgtctgcctggatagtaactgtggcaaggacgtgagcagacgccaggctcccgaggttgtgggtaaatgtccggagtgtggcaaggacctcctcaaacgtagcggccgctacggggaatttgtaggatgctctggcttcccaaggtgccgcttcacctgttcggtggatgagttgaacaacctgggcaaagataaaaataaggaggatgtgaaagagaataagggtgttagtaagaagatagtaaggtccgaggccaaatga

SEQ ID NO: 2608 - DNA, 2703 bp, synthetic construct
  source 1..2703: mol_type = other DNA
atggagaaacaacaggtaaaaacaattttgaagtcagtggtgatcatagccatcctgctcatcattgtgtttggccttcgcgctcagtccgtcgatattggaggagttcccaatgaacttaaatcacactacgtcgacgagaacgggcttccgtacttcagtgaaatggacagctacttcaactacaggatgaccgagaactatatggatcatggctactttggtgacactaaggtcaacggtaccggctgggacatgcatagctacttcccctcaggcagggccgttggggattatcagccgatgatcgcttatgtgacttcgttcctatacggaataataaatatgttccaggaaatgtctcttctggaggtggcgttttggacgggggccattgtgtcctcacttgcggtgatccccacttacatattcacacgccggattacaaacgactatggagcaatcgcggccagcttgatcgtagtactcgggccaaactacatttcacacacattcgcaggatttttcgatacagacatgttcaacataaccctgcccctatttttcatactgttctttgtggaggctctgaaaacggataagctaagttacagaatcatcttctccttactggccgtggctagcatcgcgctctattccctttcctggacaggctatatgttttatgttgccgtcatggtcctggtgatgatcgtgttctttgttttgtgcttctacttcaatattgagattttagagccatttaagaactatggcaataagctggaatggctgatcaatcagaaggaactgtttgccacactcatcgtactggttgtcggcctcatcggcttactcttggccgtcggcgtcggcggaatcatcgaaggtatcaccggccttacaggcggcttcaccctgcaggccggggctgccgacgtttggcctaacgttctgatttccgtggcggagatgcagatacccaatttggtgactggaggactcgtgggtagctttctcgctaacaccggtggagtagtcaacggggtgggaggaatcgtatgcttattcggggtgctgattgtcttgtacacttttgttcaaagattgttcaggctcaactctgtgaaggtgaagggagacaccgccaagcctcacaaatccaaacgaaaagccacctctgttcgcaccgaacagaagcgattcagcgtgtctttaaaagacattggcagttttggcagcaccgatgagatcaacaaaagcaaaagacacaccgtgctctacctgagtctcttctttgtgtggattgtatcctcggccattgcagtcacgcagggcacaaggtttatccaggttctggtagtgccgatgggtatttgtgcagggatattcgtcggatatgccgtcgactatgtcaagaataatgtggacaacgataaggtgctcctgctgattgccgtgatcgcatccatcctcattgcccttcccatcactcaaatcgcttacggcctggataatgccatgactatcgggttggtggtcttggttattctgctggccatttcagccatcgtgatctatgcgaaaaaatccattaaggactccgatgtgtcaatcaagaaggctttggtggtcgtgctaatcacgctcgctctggtcagcccaaccgtgtgcggcgctttccaaaccactgccgccaccgttccaggaagtagcgaccccatgtggtttgctatggattatgtgaaagagaactcgaccaatgacactgtcatcatatcctggtgggacttcgggtacctattccaagtggcatctgaccaccctacctctttcgatggggggtcccagacaggggatcgggcatactgggtgggcaagtcactgactacgtctgactatgcccagtctaaaggaatcctgcagatgttggcaactacagggagcaatgcatccatgctactgtccgagtacacaggcagcaatgtgacggccgtgcacgcactggatgagaccctgggtaagagcagatctgaggcgcaaaagatcctgacaagcaagtacaacctgacgaatgaccaggctaaggctgtggtcaaacagtcccatccaagcaatcctaacaacgtgagcttcgtgctgagtagtgatatgatcggcaaagccggatggtggtcgtactttggctcgtggaactttgacaccctgaacagtaccaactatcaatactacatggctaacgactacgtgcctatcaagcagaacacacagggaaacattacaatcctgaatgagagcggcatcatataccaggccgtggtcaaccggggcaagaacgggaccaacgagacgacagctcagatggaaaccatttgggacaataaccgtagtaaaattgacctcaacggcaccgaatataaccccctgaaggcaagcaatctcatttgtatcgaaaacagttatcttactgtgaacaagaccctgaataaggacggtaattacaccctgtaccttctggggtccggggatgattatacggccatactgatggataataatcttaaggacagcgtctttacccgcctcttcctcctggggggtatcggtcaggacactttcgagctcagtaatatgcaggatggtgtaagcgtttggactctgcgggacggaagctcaaactctgatgacgcaggctcacagtga

SEQ ID NO: 2609 - DNA, 1095 bp, synthetic construct
  source 1..1095: mol_type = other DNA
atgacgatagaggagaaaatcaaagcgattgaggaggaaatccaaaagacaccttacaacaaagctactagccaccacataggcaaattaaaggctaagatttccaagctcaaggaagagcagatcaaaagaagtagcggcggcactaaaggcgagggcttccacattaagaaaagcggagacgccactgctgttctggtcggcttcccatctgtggggaaatccacattgctgaacgaaatcaccaacgccgaaagtaaggttggcgcctatcagttcacgacactggaaatcattcccggggtcatggagtacaataatgcacagattcaaatatttgacatcccaggaatcattacaggtgctgccggggggaaaggtagaggaaaagagatcctgtcggtggcccggacggccgacctgattattgtggtcttggacgtgctcaaccctcagcacattaatgtgatcctcaaggagcttcgaaatgtaggggtgcggccaaatgagaccaagccggatgtgcgcatcaaaaagacacgaaaaggtggcgtcaacgttagctccaccgttcctctgacctacctggacgaaaagaccatcaggtcaatcatcaacgagtatggaatacacaacgcagatgtcttatttcgcgatgacgtcaccatcgaccagttcatcgatgtgattgaggccaataagtcctacgttcccatgatggtgctcctgaacaaggtggatctggtagatgaacattacctaaacgaaatcaagaaggagcttcctccattcatcccgatcagcgcagacaaacagctgaatatagaagccctcaaggaagagatatttaacaatctgaacttgatcagggtatatctcaagccccagggacgcaaagcggacatggaagaccccctggtagtgaaaaaagggagcaccgtgatcgatgtctgcggaaagcttcacagagagtttgtgaagaacttcaggcatgcaaagatttggggcacttcagtgaagttccccgggcagaaggtgggtcccgaccatgtcgtggaggatgaggacatcctacggattattctgaagaagtga

SEQ ID NO: 2610 - DNA, 603 bp, synthetic construct
  source 1..603: mol_type = other DNA
atgagcatctcagacaagatcgaggagaacaaagtaatattcatctccgggacgccctgcaccgggaaaacaaccatcgcgactaagctaaacgacttcttgaccaacaatggattcaacagctattttattaagataaacgatttcgccattgaaaatgacctggttctcggcaaggacccagacaagctgtacacagtgatagacattggccggctggatgaagtcttaaacaaggagatcaataacttcctggatgagaactcatcggatgactctaagatcgtcgtggtggaaggacacctgtcccacttgtgcaatggtgccgataagatgattattctccgcctgaatccggaaaaactcctcaaaagactggaagagaggaagtatagtgagaacaaaatccatgaaaaccttgaagcagaggccttggctgtctgttctgcagaagcttacgacctttacgatgataaggccagtgagattgacactacaaataaaagcgtggacgagaccctggagctagtgcttaaaatcatcacgggggagctcgagtcccctgttggcagcgtggactttatggattggtttctgctgtga

SEQ ID NO: 2611 - DNA, 372 bp, synthetic construct
  source 1..372: mol_type = other DNA
ctggcccgcgggaaaagaccaaagtggatgatagatatcgcccaggaacgcatggacatcctgtttaaccgagcagagaaagaatataagaagaacccggagagatcccaccggtacatcgagctggcgcgaaacattagcaagaaatacaatacaaagattccccagccatggaaccggagatattgtaagaagtgctacaagttcctcgtgcccggccacaactgcgccgtgcggctaatcaataatgaaattaacatatattgtggcgagtgcggacatgtcatgaagatcccttacatcagggaaaaaaagctcaaaaggcgcgctaagattgacagctacaccttcaaaaaaagggactacgagtga

SEQ ID NO: 2612 - DNA, 216 bp, synthetic construct
  source 1..216: mol_type = other DNA
atgaccatcaacatcggaaaagccggcgtaaacgacaatgtcattgaagagattaagcgccagctaaagtccaaccccataatcaaactgcggttcgccaagaatgtcgcaagaaataaagacgatctgattaacagcatcgtggagggcacaaagagtcaactcatcgacgttagggggaacgtggctgtgatatacaagaaacagagccactga

SEQ ID NO: 2613 - DNA, 441 bp, synthetic construct
  source 1..441: mol_type = other DNA
gtgacaaccgtatttgacgtgcccgccgagctgttgataaacacggtggcggatgaatttaaggataataacgacaagatcgtggcccctgaatggacaaagcttgttaagaccggggtgcacaaagagcggaaaccagagaacatcgactggtggtacgtccgctgcgcttcaatcctcaggcgggtctatatcgacgggcccgttggagtccgaagtctgagaaccttctatggcgggaaaaaagatagaggcgtgaaccccgaaaaattccgcaagggttccggctctattgtgagggtagccctacatcagctggaggacgcaggatacgtggagaaggtcgacgcaggccggatcataactccgcagggacgttccttcctggataatactagcgctgaactcattaaggacattccagagctgagcaagtactga

SEQ ID NO: 2614 - DNA, 372 bp, synthetic construct
  source 1..372: mol_type = other DNA
atgagcgaactcgacgaattacggaagaaacggatggctgaactgcagcgacaggccgccatgaacgccgacccgcagatggcacagcagcaaatggcgcagcagcagatggctcagcaacaactcgcacaacagcaggagatggaggcccagctgaagcaagccatgcgtcagatcctgaccccagaggcgcgcgggagactcgacaacctacgcctgaccaagcccgagttggtgcagaacattgagatccagctgttgcagtccgcccaggcaggaagcctgaggggcaaggtcacggatgagcagcttaaagtgctgcttaagaatctcatgggccaaaaaagggaaatccacataacacggagatga

SEQ ID NO: 2615 - DNA, 582 bp, synthetic construct
  source 1..582: mol_type = other DNA
atgaaagcctgcgtactgtatagcgggggcaaagacagttcactgatgggatacatcctcaaccagttaggcttcgacgttgaactggtcacggcaaatttcggggtttacgattcatacattccagcttcgaagtctgctgagtccattggcttgaagcacagggtgctcaacctggacatttccatcctggaaaaggcggtagacatgatcctagaggacgggtttcctaatgagggcatcaagtatctccacgaggccgtggtcgaggaagtggcaaaccattacgatctggtggccgacggtacaagacgggatgacaagacccccaaactcaataggaatcagatccggagcctcgaagaccgcaaggatgtccaatacatgaatctagatagtttcggctataagaccatcaaataccttgtgggaaacctttttgaactgaagcatgagaagagcaacaaggatacaagctccgactacgaggtggagatacgattgctgattgaccagaaaggtgggaacagctctgaaatattcccggagcactatcagactaacgtggtcggactgaaatga

SEQ ID NO: 2616 - DNA, 156 bp, synthetic construct
  source 1..156: mol_type = other DNA
atgagcaggaacaaacccctagcaaagaagctcagaatggccaaagccaataagcagaaccgaagaatcccaatatgggcttatggcaagacccagcggaaactgaggtaccgtccgaagcctcggcactggcgccgcaacgacctgaaagtgtga

SEQ ID NO: 2617 - DNA, 261 bp, synthetic construct
  source 1..261: mol_type = other DNA
atggcagaggagctcgaaaggacatacgttatacccctgcggaaggtgaaaaatgtcaaacgcacgatacgagctccgcgcgccattagggaagtgcagaacttcctaatgaaacacatgaaagctgaggaggtaaagattgacgcgagcatcaacgaatttatctgggagagaggcatccagaagatcccaagcaaggtgaaggtgattgccgtgaaggatgaggaggggatcgtccgggccaccctggcagaaaactga

SEQ ID NO: 2618 - DNA, 678 bp, synthetic construct
  source 1..678: mol_type = other DNA
atgctgaaaagaattaacctgaccggcaaccctaatctgggcgtctacatatctgtgaacgatgaaatagctattgtgcccttcaatgtgcctgtggaaatggaaagcgtgatcaaagagaccctggaagtcgacatcatcaagacgtccatcgccggctcaaacctaaacggcgtgctggcgactggaaatagcaatggatttcttgtttccccctttacatatgaccgggagatcgaactcttggaatcagccggcataaatgtggccaagcttcccggcaaatacaccgccatcggaaacatcattgcggtaaacgattatggggccctcgcagggccgaacattggggaggagacaatcaaggtgattgaggatactctgaaggttccagtaaagatctacccatttgcagacactaagattgtgggtagtgcaagcatagttaccaataaaggagctctcttgcacagggacacaatctcggaggagatcgatttcattgaggacttcttcaaggtggaggccaacattggcaccgtctgcaaaggaatgccactcgtcggagcttgtgggatcgccaattcccagggggtcatggtgggggaaagtacgacaggtcccgagatggctcgcatcgaggagagcttaggcttcctggactttggtaacttctga

SEQ ID NO: 2619 - DNA, 225 bp, synthetic construct
  source 1..225: mol_type = other DNA
atgatcacgaagaactacagagtgaagggcagctttgtgatggggtccgaaacacaagtcttcaccaaagagctccgcgcaataaaagaggaggacatttatgaaaagctgtactctatcttcggaagtaaacaccggataaagaggaatcagatcaagatcgattcaattgaggagatcagcgacgacgaagtggaagatcccatcgtacaggccattctgtga

SEQ ID NO: 2620 - DNA, 438 bp, synthetic construct
  source 1..438: mol_type = other DNA
atggaagaccagcagaaactgcagcaaatcctgagccagcttgaggtgtacaagcaacagtcggagctctacaagacccaaatcgatgccgttcaggcctcacttgctgagattaaaatcttggaaagcacactggacgacatcagtggcaaagacaccatagagacactggtgccgctgggggccggctccttcatcaatgcagagattaagaacgaagataaggtcatcatgagcctcggtagtggggtcgccgtgtccaagacttttgccgaagccaaggagaccactgctgcacagaagaaagagctggaagagaccctcgataagttattcgcagatctccagcagataacggacattgtagctcagctatctccccaagccgagcagttgatggcgaaagctcaggcgcagatgggacagccactgtattga

SEQ ID NO: 2621 - DNA, 1731 bp, synthetic construct
  source 1..1731: mol_type = other DNA
ttggcagggatcaacctgtttagtagcctgaagaagaaatttgctgacgccagtagcaaattacgcaataaggtagaggaggaggctaaagacgaggataacatcgaattaatcgaagagtccaaggatgaatttgacgacatcgacgaagatctcatcgagtatattgacgaggaggatgaagatgacgattgggacttcgacgatatcgataaagaagataaatcgaaggaagagcctaaggaggagtcgaaggaggagagcaaagaggaaagcaaagaggaaagcgtagaagagacagttgacgaggcgatagaggaagtcgaggatgtgtccgccgatgaggattctgacgaagaagtaaaagatagcgatgaggagaaaaaggactctgaagagaaggattcaaaggataaaaaagagaaatccggattcttcagcttcttgaagcggggtaagaaagaagataagaaagaggatgaggaggagattgaggattctaaagaggaggaagtgcccgaggaagaggtcaaggaagctagtgatgaggaagtgccagaagaagagacaagcgaagaggagtcggaggaggaagttcccgaggaggagatagaagagagcgaagctgaacccgtggaagaaacggttgaggaggaggccgaagagtctgaagctgagccagtggaagaggccgtggaagaggaagccgaggaaactgaagaagccaaggaggaaacctccgaagaggatgaagaagagaagcctaagaagaagcggtccctatttagacgcggcaagaaagacaaagagaaggactcagaggaggagtttgacgctgaggaggccaagggcaaagggggattcctcagcttcatccgggaaaagacgatcagcgaagatgacgtggaggacattctattcgaactcgagctgggccttctggagagcgacgtggccatggacgtgtccagtgtggtggtggattcagtcaagaacgacctggtcggccaaaagattaaaaggagcagtgacatcgaggaatacacctatgaagccctgaaaaaggcagtttacaacattataaacatcgagggcaagtccatgaccgagctgcttgaagagaaggtggctcagggagagcctcttgtcgtcatgctggtcgggattaacgggacaggcaagacaactaccataggcaagctggctaacttttacattaagaaagggtacactcccgttatcgcagcctcagacacgtttagagccggggcgattgagcaggtggcctaccacgcagacaagctgggggtcaaattgatcaagcatgagaaaggttcagacccggcagctgtcgccttcgacgctgttcagcacgcaaaggccaaaggcaaagagttggtgctcattgacactgccggacgaatgcagacaaataccaatcttatggacgagatgaagaagatcaggagggtgtccaagccggacctggtggtgtttgtcggcgacgcgctgaccggaaatgacgcaaccgagcaggcccgtaagttcaatgaagccattgacatcgacggagtaatcctgaccaaggcagatgcggactccaaaggcggcgccgcgctgagtgtgggttacatcattcagaagccaatcctcttcctcggaatgggtcagtcctatgatgacatcaaggaatatgaccccgactggatgctcgagcaaatattctcttga

SEQ ID NO: 2622 - DNA, 1695 bp, synthetic construct
  source 1..1695: mol_type = other DNA
atgaatctcgacagcaacgttaagaccggattgatcgtggctatttcgataatcttcctctttgtgctctcactgtttattactagtgcacccacaggcgtggacaattctgcccggttcggaattttgacactgcttcctccccttatagcgattgccctcgcctttattaccaaagaaaccattctaagcctattcgtgggagtgttcgtgggcgagtttatggtgtcagtcagcgacctgaacatcatcagctcggccgtgaatgcctttctggccatgggggggcaaatcatcagttgtatggctgatccatggaacgctgggattgtcctccagtgtctgctcattggtggtgtgatccagctgattacaaaaatgggaggagcaaaggcgctggcggatgccctggctaaacgcgctgacactcctcgaaaagcgcagctgattactgaatttctgggactgtgcgtcttctttgatgactacgctaactccctgattgtggggcctatcatgcggcccgtgatggacaagctaaaggtgtcacgcgagaagctggcatttgtagtcgacgcaacggccgccccagtggccgggattgccattatctccacctggatcgggctcgaaatcagcctgatcacgcagggtttcgaatcaatcggcatgaatgtgagcggcttcggcatattccttcagaccatccccttcaggttctataacattttaatcctcatattcattgtgatctctgccgttaccctgtacgagttcgggccaatgaaagaggcagagaagagggctcgtgcaagaaaagccgatgaaccggttaagtcgctggaagcaaccagctttgacgatgtcaagccggtcgagggcataaaactgtccgtgtggaatgccatcattccaattgcagtcttaattatcggcgctcttatagcattctactggagtggttacacgaccatcttaggcggtgaggaccaggcgctcattcacttaatgaagaccagccccctttccttcaacgggatctttgaggctctgtctgcctcagatgcctccgtagccctcttccaagctgccttgctggcttccattgtagcgatcgtgatggcagtgctccagaagatcctgacgatcgaggaggccattagcgaatggattggcgggatgaagacaattgttatcactggcgtaatcctgcttctcgcgtggtccctggggggcgtcatcggcgacataggaactgccgattacctggttggcatattgaaggacacaatccctgtgttcatcctgccaaccttgatctttatcctcggcgccttgatttcctttgccacaggcacgtcctatggtaccatgagtatcctgatgccccttaccatccctctcgcttgggctgtgaaccccgatatgggatttgttatcgtctgcactagtggggtgctgactggtgccatcttcggggaccactgctcaccgattagcgatacaaccatcctatcctctatgggcacaagctgcgaccatatcgaccacgtccggacacagatatactatgccatattcgttgccagtataagcatcatattcggatacatcccagcaggatttggcatcccctggtatatcagcatccctgtcgctattgtagtggatgtgagcttgggactgagaaggtga

SEQ ID NO: 2623 - DNA, 1332 bp, synthetic construct
  source 1..1332: mol_type = other DNA
atggccaacagtaatcagtctgagtgggatagtaacattgcctttattttggcaatgattggtagcgccgtgggtctgggaaacatttggcgctttccaaatgttctatactcccacggtgggggatcattcatgattccttatatcgtgtccctcttcctgctgggaatttcctttgtactggtggagtatgctgtggggtacagattcaagtcctccctaatcaaggtgctatacagcgtcaaaagcaaattggagccagtcgcctggtttatcgccctcatcgtctttctcatcaccacgtattacatttgtgtggtgggctgggacctgatatatgtggtcctgagcttcacaaaggcatggggctcaaaccccgacctgttcttctctagcatcgtccttcagagcacagattccattgaagggctgctccatattgtgcccatggtgtttatatccgtcctggctctgtgggctgtggcatggtacatcattcagaaggacttaaatgacggcatcggtaaggtgagtaagttactgctgcctctccttctgattattgttgtgacaatcgtgctgttctcactgaccctgcctggcgcttcgattggctacacccagatctttactcccgattggagtgccttgactgacctgaacgtgtggcttgcggccttcggccagatcgtattctcccttagcctggggatgtccattgcactgacctacgccagctaccttccggagggcagcaaactgacggacaatgctttaatcgttgcctttagcaactctggatttgaaatcttcaactcgatcgggatcttcagcatattggggtttatgaccttgaacacgggcatcccatttgatcaactggttactgaaggaaccggcttggcatttgttgtgttccccaaggtattcaatataatgggaccctgggctactatcatcgggccgctcttcttcctatgtattctctttgctggcgtaacctctgtgatggccctgcttgaggtggtctgctacagtatctctgaaaagttcaacttctcgcggaggaagtcagccacaattgtctgcattatcggctttatagttagcgtcatctttaccacaagtgcgggaagcatgatcctcggaatattcgatgccttcctcaacaacatcgcgctcctgtttgcagtgcttctggagtgcatcatcttcgggtggatctataatttcgacaatctcatagagacactgaacaacaattcaaatataaaggtgggcaaagtctggaaaaacgtcattaaattcatcctcccaatctgtatctgctga

SEQ ID NO: 2624 - DNA, 2649 bp, synthetic construct
  source 1..2649: mol_type = other DNA
atggatgatgaaactaacaacaatcagtggaacagttcaacaagcttcattctggtcatggtcggcagcatcatcgccttggcagggatttggcgcttttcctatctgatttatgaaaacggggggggcagcttcctcatcccatacatcctggccatcgtgatcatggtcatccccctgctggtcctggagtttggggtggggttcaaatacaaggccagcctgccacgtatattctacaacatcaagtctgaatttgagatagtggcctggtttatccttttcctaatattcatagtcctcatctgctacacttgtatcatgtcctgggaccttatctacatagtcctcagtctgtttaaggggtggggcaacaaccccagtgtgttctttacaaccaccctccttcatagcacctctaatccatatggcctcacgtacctggtagtgcctattggaatcggcctcatcctgatctgggccctgatatatttcatttcgcgacgagaaatcaatcggggaatatcattagtgaccaagttttccctggcactgaccttcgttctcgtcatcatcctaagtgtctttgccctgcaactgccaggaagcagaacgggccttatggccttgttcaatcccaactgggagtatctcctggactacaacatttggctcactgcattcgggcagctgatattttcctacggcctggcctacggtatcgccagcacctactcctcctaccttccagaggacagcaagctgatcgacagcgcctgggtgattgttctcatcagcctaatcttcgaaattctgatgtcggtgctcatatttgccctgcttggccacatggcgttgggaaagaacatgcccattacaagcctcgtgagcgacagcttctcactcatctttgtggtgttccctaacgtgttcaatgtgatgggcagctgggcaaccattattggtccactgttcttcatggttatatttatcggggggctgggtgccttattcgctctgatcgagcctttggccaatgccatctgcgagaagttcatttggactaaggacagggccatcaagacattggtcttggcaggactctttgcgagcttcatattcgccaccggcatgggagagtatttcctcaggattgtagacggcttcatcacccagtttgcaatcattctagttgtgttggtagagatcctggtattcgggtggctgtttgaccttgatgacatccgcaacgtgttaaacaacaattctagaataaagctcgggaagtactgggtctatctaatcaagtttgcgattccgattctgctgattgtgatctggatcttgggagtttacaacctgattatcactggcgaccggcagagccttttggttcagtccattctggctagtatcattgtgattgtgcctctcgctctcacggtggctccatttaatggggagtattcgctgggcagcattacaggaggatataactactttagggacagtggggatgatgaagaggccaaaagtaactcaaagcccgacctgaagtcccggttcacatcacggttcacaagcaaggataatgacgtggataatggcacggaaggctacgaagagaagacctatgtggagaagacaatcgacgactatgagggctacgacggtgtagtggcaatcaccgacgatgaggaggaaaattccagccttaaatccagattcagttgggacaagtttaaaaagtctaaaaacggtaagaacgtgctgaacaacgttgatctgagcgcgaaagagttcgatcctcccagcgacgacgattacgacgactacgagacctacaacagtttagatgacggttatagccaaggcagcgatgactttgataatagtatggacgactatcgctcgaaatctaagtccaagtcgaaatccaagtccaaatccaaatctaagtccaagtctaagtcagaaagcaagtcactgtttgaaaagattaacctgtttaacaaagaccagggagagaatgattacttggatgacaattacggctataactctaatgataattacgaggacgatgattcctccttcgaggatgtcttcgacgactttgattatatcactccgatccgcgaggaagaacctaagtcgaaacctaaaacaaagtccaaaccaaagagtaaaaccaattccaagtcaaaatctaaggctaagggtggaaacaagaaaccgaagttcattagtgctgaggatctcgacggaattgagagtttagacgacctgagtagccagcccaacaagaagcccgctagcaaaaagacgagcgcttctaaaaagaagtcaagttcaaaatctaaaaaggagagcggctctaaatccaaaaaagcgtcagaacccaaggaagagcctaaacccaaggaggaagaaatcgagtacgaggagttctcagacgacttctttgatgacggtgtctttggggaggaaggctacgaggctcttctagacgattatgtggaaccgaaacccaagtccaaaaagaaaaaggcatcttccaaatctgaccagagcacccctagggactccaaaccctactacgattatgaaaagaaaggatcagattcggttttcaatctggatgattga

SEQ ID NO: 2625 - DNA, 732 bp, synthetic construct
  source 1..732: mol_type = other DNA
atgatcaagaatcatctcatactgtacttttttatctcttatcttttcctagtccacttctttacctacctgacaatctccattccaattattttctatcactttcacttcttaagcctgttcgtgcacgatttttcaatcaatcttcatatctacccatacttccagaacatcaagttcataaaagacaaaaacatccccataattatcaaaataggagattatatggacaagaagatgacagttctgttggtggccctattctgcctgctctgtgtcggctcatacctcatctttgaacctgccaggcatatcagctatcacgaggtcaacctcactgacacctgcgttgcaaaggtcccggtaaccgacaaggtgtcctcatataccgacaaccttaacattcactactactccgattatgaaaacgatctgaacatcacaagtttctacgatgtggctcccgagagctcgagccaggggcacctgcgcatggacaatctgaaaaaggaggtgctgggcacggaaaagggaagtgcaggcaatctcacttattacaaaaacaacaatgccgggacctacacaatgtatgtggaagacagaatgtcccataattacatcttgctgtccgctaaggacctgaccattttcacgaatgtatactctagcctcgaggcgcggatcgtggtgaacgagactgatattgacagtttggacagcagctacgcctga

SEQ ID NO: 2626 - DNA, 1737 bp, synthetic construct
  source 1..1737: mol_type = other DNA
atgaacacggccgagattctggtcaatctgcttgaaagggatggaaacgaatttatctttggccaccccggcgaacagatactgcccttttataaggcattgaaggacagctcaatcagccatatcctaacacgccacgagcaagccgcagcccacgctgccgacgcctacgcgagggtgagcggtgagtacggcatttgcataagcactgcaggtcccggtgccatgaatctggtcatgggagcctccacagccttcaaggattccgttccaatgctggtgataaccggcgacaacgactatgacaaaaaggactccgacatctttcagagttttcccataaacagtgtctttgagaatataagcattaaaagcttccatccttacgatgggaaatccgcggtgtacaatatgattgaggcactcattctgctgcataagtttccaaagggtcctgtgcatatcaacctctctagagacgtcttgttggaagagatcgatttcgatagcattgatttgcgcgatatcgggctctcgaatataccctctctgaatctcaacgatagcgacatcatcgagaacttcgaccttttcgatgattccctcgacaacctctatgacttctcacagaagctctccgctgatgtagacatcactattcagtcagctattaaaaagttaaaggactcgagcaaaccattagtcatcctaggaaacggtatagtttggtcaaaagccactttcaaattgagcgacttcctgagtaaaacgatgctgcccgtggtgaccacataccactccaagggaatcgtcagtgaccacgaccggctgaaccttgggatcgtcgggcttaggggaaacagcctgagtaattacgcttacgagaacagtgactgcatcctggtgctcggggccaaactcagcgagcgaacaatcggtgcttccgacttcgacatcgccaaggagaagatgatccacgtgaacattgacgagaattgcctgaagggcaaaatcaatatctgcatggacgttaacgagttcttggactgtcttctggatgaactggatcaagataacggaacctttgattatgatgacggctggatcgacgagatctactccaattacgaggaactgattgtggggggaatcgaagaggtggaggaaaacttcaatccactccgaccgccctacgcgatcaacagaatcatcgacgcgttcaaaggcgcctacttcctaagcgatgcaggaacccacacgacctggaccactctgctcgcaaagagcgatagtttcggcaagcttctcttttcaggcggctttgggcctatgggctacagcctgccagggtccattggggtggccttcgccctcaagaagcgcggaattgacgaacgggtgctggtcatctgtggggatggcgacatccagatggtaattcaggagctggctacaattcgggaatatgacctgaatattgatattttcataatcaacaactcccagttaggcataatcagacaatgggaggagaccgtgtatgacttcgataagtatcaggtggaccttattaaccctgactttgctaaactagctgacgcatatggcgttgattctatgaaggtggaatctaaggaagacctgcagctggctattgagatgtcgctggattcaaataaggcctttttggccgatgtatgtgtttgcgaagagaatatccctatgccgaaaaaatga

SEQ ID NO: 2627 - DNA, 348 bp, synthetic construct
  source 1..348: mol_type = other DNA
atggatgggctggaaatcattaatagcttcaataaggagacaatttacgagtttagcgaggcttttaccatcttcgaagacgagatctacttcatattcaaagtggacatcatttcaatcaatgcaaacccctccaagacgaaggacaaaaacaaaaataagaacaaagagaacaaggacaacaagaaggcgcaacggatcataagtcacctggaaatcgagccaatagcctatctgctaaaaaaggccgaaaatgaagactatcagatcgaggccattgatgaaaaatacaccgagttcattggcaaaaacaaggataagctccttaaggagtttctcaaccagtga

SEQ ID NO: 2628 - DNA, 849 bp, synthetic construct
  source 1..849: mol_type = other DNA
atgatcctgaatcttatcttgattatactcatcgccctgattatcattttctcaatcatcctctacaacggccttaggatcattctcaccgtggaaaaggagaaagcagaagcccggtacaaactgaagataaccctgcttaaaatccccatttttaccaaagatagcagcgaggacaaggctacagagtccgaagaggagaaagaagaggatggggaggaggaggagtcgaaagacaaaaagggcctgatggagaagtacaacgagattaaacctatcctaaaggagctcattaaatcaaagaaagagctgaagaaatatctgaaggacatcctaaaaagcatcgatatcaagaaactcgaggggcacttgatactcggccttagcgactctttcaccacagtcaagatagcaagttggatttggagtatcggagcgatcgttaacagtaaaaagccagtgagcctgactgtggacccgcgctttacagagatcatcacggatttcgaaggacagttggaactgaagataaatctcctgaagatcatattctacagcctgatcctggtcagcaagaaggacattagagagttgatcaaggtaatttacgcttacaagaaggccaaggataaggagaatgaagaaaaggaaaactccaatgaggaactgtataagaaggaaaaggacactgagattaaagagaacagcaaggaagaattatataaaaaggaaaaagacactgagatcaaagaaaactccaaggaggagctggacaaaaaggagaaagacacggagattaaggaaaactccaaggaggaattagataaaaaggaagagaaggagacctga

SEQ ID NO: 2629 - DNA, 516 bp, synthetic construct
  source 1..516: mol_type = other DNA
atgattgacgaagagccgattaaaactaccgtcgaggaattacggaagctgattcacattagcaactatatcggagacgccattgagactgaagacaaactgctgatccccgtgtccaaggcggcagtaggatttggcataggagagcagaaggctgataattcccttgccggcaccggtgccggtgtaagcgtggagcctattaccatggtggtcgtgtcaaaagggaatagtggggtggatgaaataaggacaatcaacctctctaaaggcaaccagaccaacaagacactcaacgaaatcgggctaatcctgacggatgtcttgaaggagttcctcccatccaaaggcaatgacgactacatcgacgttgatgacgtgagtgaggtggatatccaagacgcagacatcaaggaaaaggtcgaagatgccgtggaagagtcggacctgaaggagaaggttgaggaggaggtggaagaggctgaggagagcctgggcatcgaaatagatgactga

SEQ ID NO: 2630 - DNA, 1167 bp, synthetic construct
  source 1..1167: mol_type = other DNA
atgaacgagatattactcatgctcccaggcccaacaactgccgacccccgagtcctgcaggccatgagcaaagctgtggtaaaccaccgcggagacgagtttggagagatctatacagaaacaaccaagctcatgtctaaaacattccagacgaagaatgatagctacatcctaacagggagcggaacttcggccatggaggccgcagtctcaaacctggtcaatagaggagataagatccttaatgtagtaggcggaaaattcggggagcgttttgcagacatcagcaagatgcatggcatcgagtccgtgcagctggatgttgagtggggcaccgctgtgactccagaccttgtggaagaagccctggagaaagacgaagacattaaagccattaccatggtgcacaatgaaaccagtaccggggttgccgcacccatcaaggaggtgggagaagtgatgaagaaccacgatgcactgttcattgtggacacagtgtccagtctaggaggcgactatgtggatgtggacaaataccacattgacgcctgtgtgaccgggtcccaaaagtgcctcgccgcacctccgggccttgccgcaatcacattcaatgacgatgcctgggccgcctgcgaaaaggtggaggacaacaattactacttgaacatgccgaaataccgggctaacggtaataaggaccctgctcaaaccccttatacgcccagtgtctcattgatctatgcactgaaggcggcgctggaggttctccatgaggaggggctggagaacagaatagaacggcaccacaccgccgctgcggctagcagggatgctgtgaaagctctggggctcgaactcttccccgatgaggctgtgtcctctgccactgtcacggccgtcaagatgcccgagggggccaatgacgatcagatcaggggcaccatgctcaacaaatacaaggtccagttggccgggggccaggaccacctgaagggcaacatattccgcattggccatatgggtgtcattaactatcaggaactggctatcacgtttactgcacttggcctgaccctgaagggcttaggactggttgaggatgcaggtgccggtgtggcggctctggcgaaccattacatcaagtttaagctgttggaaaaagtttga

SEQ ID NO: 2631 - DNA, 1101 bp, synthetic construct
  source 1..1101: mol_type = other DNA
atgagtttcagaacaaaacgggtgatcatctccaccctgttggtaatgatatacgaattttttctgatgaaataccttttccttctctttggcggattggatgacatctacctgctgctcctcacgattctgttcggtatactcaatatggtgcccatgttctttgaggaaaagaagtccaggcctatcacccgtcttctggatacgatatcaggattctggatatggatgagcctcttttacctgttcgtcattctgatcatctacatcggcggggtctacattgattggccgttttatattatagtcattctcgttctcctggttcccctgctgaccgtgtactcctatttccacgcccacaagatcatcattcacgagcgaaccatccaaatggataacattaatgaggatatcaacattgcccacctgagcgacgttcacttcggcagcacacggcatgataagatcattagggatcttagtgacaaactcaaggagctgtcagattattgtgacttggcgatcatcagtggggacatcgtagacgggtcctctgctattgaagaggacgattttctaccccttaaggacgtgaacatgcccatagtcttcaccccaggcaatcacgacagctatctggatatcgaggacgtcttcggggcctgcagaaatgcaggcatcattgtgctagacgatgagggaatggaatttggcaacctgaacatcttcggaatgacattcatcttcggaatgacccgcaagtttgaagagttcgaagtggtcagcacaggtgtattaggggacttcgtgaaggaagacaaggtgaatattatcatcttccatgtgccaaaaaactgggaggacttttcgaaattaggatttgacattcagttgtctggccacactcacggaggccagttccatccactgacttggatctgcgacctgatctggtataaccggggtctgttcaaagcaaacattgggggcaaggacaggtacttgcatgtgacgaccggtgtgggctctatggattacccttttcgctgggggactgatagcgagatagttgtgctaaaactccgcaagaacgactga

SEQ ID NO: 2632 - DNA, 1266 bp, synthetic construct
  source 1..1266: mol_type = other DNA
atgcttaaaagaacagttaaaaagaatggcgacgagctattccctctgggtctgggcgctatgcgactgccaactaaaaacaactcaatcgataaggatctggctcgggaatttatcctgtatgcaatcgacaacggaatcaattacatagacactgcctacgcctaccacgggggtgaaagcgagtccttccttggagacatactgagcctcacagattccgacggcgtgaagtaccgggacaaagtcaaattgtccaccaaaagcccgtcttggatggtccgcagcagggaggactttgacgccttcctcaatgagcagttacgccgactgaaaacggactgcattgattactactatcttcacaccatcgatttaagcatactggagcgtctcaagggactaggcgtgtacgagtttctagaaaaagcccggtcagagggcaagatcaagaacatcggcttctcctaccacggcgcaccgaacgagttcaacgacctgattgacgactatgattgggacatggttctggtgcaatacaattatctggatgtgaatgcacaggccggcattaggggaatccggtacgcatacgagaacgacgtggctgtattcattatggagcctctcaagggcggtatcctcgcgggagaattgcccaaggaagttgacgggctgttcaagggggtcgattccaataagtctagtgtggattgggctctgagttgggtcctgaaccaaaaggaagtcacctgcgtactctccggaatggggtcgatcgagcagatcaaggaaaacatgaacatcgccgagagagtggaagtggacagtctgagcgatgatgaactcgccgtgctggagaaggcgcagggaatcttcaactcaatgatgaaaatcaattgtacaggctgcggctattgtcttccctgccccaagggggtaaacattccagattgctttaacatttacaatgagaaatatttgttcaacaaaaaagccttcggtcctattcccggggccatggtgaattactatatggtggtggggggaataaccaataagcagtcaaatgcgggtctctgcaaccattgcgggaggtgtaaaagattgtgtccacagagcctggacattccaagccacctcgatagtgtgaagagcgaatttgagaagttcggcttcaactatcagattaagtttattcgcaatatcgctatgccctccataaacaagatctctaaggtctttgacgtctttaagcattcgtga

SEQ ID NO: 2633 - DNA, 4308 bp, synthetic construct
  source 1..4308: mol_type = other DNA
ctgtacatctcagagatcgagattaaccagaacattatcctcaacacggagggcaataaaatctatctaaacaactcccctaaaagcaatatccacgataactggttcggaaacactctgctgaactacgatgaggtgccatatgaaggctgcaccaattggattttcctgaatggcgaaagcaaccaggtctccctggagaatccgatcagctttgagatcaccttcaccttgtcctctttcaataagaataccaagaagattagcaactacgatgatcggaagcttcccttcaatctcaccgcacacgcagagcacgggatcttgaatccgaacagtaatctgctgggtaaaacaactatctatgaaacagagatcatcaatgttgagcggataatcggaaatattgcaaacatagattcggaatttgagattatggagtttctggtcacggacggaaccaccttctacgacctgaaccagctcatcaacaacaacagcaataatgaaatcaatatcagcggcaattacacatatcacgatgatattgactttgagtttaaagaggggatcaatgtcaaccgcagcctcatcattaatgggaacggattcaccatcaacggcttgaactcctcacgcatcttcaatataaacggagacaatgtcacaataaataatatttccctgataaacgggaatggatatgaggacacctacgactccgacggaggtgccatctactggaaaggggctgacgggaccctgattcagagcaacttcacaaacaacagcggatacaatggcggcgccattctctgggaaggagacaatggacggattataaacaacaccttcaaaaacaacagcgcgttcgatggcggaggtgccatcaccataaccgtggagcgaggtatcatcatcaacaacacattcaccaacaactcggcatcctacgatggcggcgccatctacttgatcgcatccagtggcgagatcattaacaacacattcaccaacaacagcgggtataaaggtggcggaatgatctgctacgcagataacctcagcatgatcaacaacaccatggagagcaacattgcttccgacgacaatggtggcgccattctctgggagggagaaatagggcgtataatcaacaacaccttcaaaaacaactacgcctctgaagagggtggggctatcagcatcagaggcgagatcggagagataattaacaacacattcacaaacaacaacgcctcctaccgaggtggtgccatctccattatcattacgagtggcgagataatcaacaacacattcactaacaacagcggatattcgggggggggcattctttgttatgggaataatgtgagcataatcaacaataccatggagtcgaacattgcttcctacgatggcggtgccctttacgtcagcatggactatgccatgattattaacaacaccatcaagaacaacaacgcgtccgacaatggcggggcaatctactgggaccggtataagggaattatcagcctcaacaccatcgccaacaataatgctaatcatgggggcgcaatctactatgagggctactcttcaaatctgaactataacatcatcttaaacaacaagaatagcgagatctatttcgacaatgtgagaacgttcaacggaagcaataactggttcgggaacaatgctagcaattataatctgaaccccaacacgagcttcgaatacgacaacagcccgaatgtaacccttagtgactggctctttctgaacgggacagcaaaccctaagatagtgaacgcctttgaaagctcccagatcttgttcaaattatactcctatgacgggatcttgatctccgaatatgacaattccctcataactgacaccaagctcaacctgtccgccgaaaggggaagatttgacaagacaagcgccagtttcaatgagcccatcaactacacggcaatcgaggggggccgcgatacaatccggggggctatagataagtcgggctacagcataaatctcaccaacaggagagtgtcctcaaaaattgccatggatactaaggagataaactatagccgcaatgcttcaatcaagcttaattacaacgactttgcggggggaaacgtcaccatcagactaatgggcgagaataacgaatacctctttgaaaacatgaccctgaacaagaccatattccttggcgtcatcaatagggactcctacaacgtacgcatcgaatattcaggagataggtcattcctcgaggagaacattagcgaaagccttattgtgaacaaggctggtaccaaaatagtccccacaaacgacacaatcgacttgggcatcggagagaactcaaaagtcaactacacgttctatgttattgatgatgaaggccagtacataactaaccccgaggacattggcaacattagcttcaagtcagatgggagcgccgtcgaagtggattcaaagactggggagattaataccattaaggaagggactgccaacatcctcatccgcttccagggcgacgaaaaccaccttgattccaatgcaagtgtatatgtaattagcagtaataaaatcaggaccaaaatcaccgctgagaacctcaccaccgattacaaaaaggatgactacatcattgcccgactgaccgacctcacagggaaacccatcgccaacgccaagctgattgttgagcttaatggcactaataactatacaactaattcaaagggcgagattaaggtgcccaccaaaggcctggattcaaatgagtacatagccaagatcatctacgaaggagacgaatcctaccgattttccaacgcgtccgtaagactaatcgtgaataagctaaacaccgagattactgccaataatatcacgactatctacaacatcacgaaggagctggtgattagactcaaagacgtcaatggcgacccagttagcggggttgagttgacggttgacctgaacggcatgaataattacacaacagatgacaatgggcaagccattgtggaaatcaaaggattgattcctaacaattacacagccaagatcacctttgaaggcaatgggaactacaacaaggccagcacagagagcgatattgagatactgaagattcctagcattttaaatgggaccgacatgactgtgaactataaggaggataaatatttgacagtttctctaaaggacaaagataacaagcctatccataatgccagtatctcagtggagctggagggtattaaaaactacacgaccaattctgatgggcaaatcaaggtgccaacatccagtctgcctgccaagaaccataccgccatgattcgttttgaaggcaacgagatttacgaaaaatccaatgctaccgcgaagatcactgtgaataagatttccggcaaactgactgcgagcaatgtcactgcccggtatggcgacaatcagaacctcgtgattagtttaaaggactcgaagaaaaatccattaagtggttttaaagtgtctgtggacctaaacggcaagaagaactacactactgactcttcgggccagatcaaagtgtcgacgaaagatctggtgccagacacgtataaggcaatcatcgtctttgcgggaaatgagaactataccggttcgaatgccagtgcatccgtgcggataaatcggatcaataccacattcaaatacactaacatgaataccattgcttttgattcaaatatcgaaggtcgtattggagaatatttccgcttccaactgctggatgaagatggcaagccattgtctggcaaacaggtgtttattggatttaatggtgtgaagtacaataggacaaccaatgaaacaggggaggccaggctgcaaatcaacctgaagtacgtgaaccactatacctttgcaatagctttcctgggagacgactattacaagggtagcttcaacgtggctctgatcaatgtgactgaacagattcccgtgctgagcactagtgctaaaacatataaatcaagtgcgaagaccaagacgctgacggctactcttaaatcatctaggggccatgtcctggcgggcaagaagattagttttacactgaacggcaaggtttacactgctaatacaaacagtaaaggtctggcttccgtaaaggtctctctgagcaaaaagggaacttacagttttacggtgcagtttggaggggacagtacttacaagaaggttacgaagagtagcaagctgacaatcaagtga

SEQ ID NO: 2634 - DNA, 1392 bp, synthetic construct
  source 1..1392: mol_type = other DNA
atgaaattcaagaaatacctgttcattctgcttatagctctgatttgcatcatcagtgtctcggccgtggctgcatctgatgcgaatgaccctattagccaggacaataaccaagggctcgttcttgaagaaacaaatcaggatctgtcgatcactaagactaaagagatagtggaatcaagcaccaataaagaaattagcttggaagacaacaaggtgatttctaaggaaaacaagaagacaagtctgaaggatgaggagacagactcattcaccaatctaaataacctcatcaacatcgacaaccccaacaaccacacgattagcctcaattgcgattacgtcctcctggaagaggactgcacctacattgacactgagatcctcagttcctcaaatctgacaacatcccacatcctcagggatgagggcagcctgcccattgacctgaacccaaaaacctacaaggcccgcttaatggtggaaaactccaacgaccaatccattgaggtgatcaaaaccacgaatatagagggatcatcattctggctcctgaaccagaccataaacaataactcgaacagtgagatcacacttgatagcaattacacctttaattccagcgcggattccggatttatcaacgggatatacatcaaccgctccctgaagctgaacggtaacggcattaccatcaacgggctggatgaaggacgaatcttcatcatcactgcagacaatgtgaccattaccaacgtcaattttgcaaatggcaaatctgacaagggaggcgccatcttgtggcttggcaaaaatggaaacatcagcaactgtaactttacagacaatatggcaacgtctggtggagccatcttttggggaaataccaatctaacggactactatagcaacggccagggggatgacggcaccatcatcaactgtaatttcattgggaacgaagcccagaaggggggggctatgttcttccataccggcggagccaccataaaagatggttgcaccttccacaacaatactgggggccaggagggtggtgccctgttttggctgaactatggcggccggatcgagaataactgcaatttcacgtttaacactgccaaaggttctggcggcgccatctattgtccccaggtagagatcctcaacaactgcattttccagaacaacactgcccaatccaagattgaggagaggatcatgaagggagggggcgctatctatttacagaagggaggaacagttcgggactgtacattcataggcaatattgctctgaacgacgagagcgatggtttgagattctataaggggggggagccatttacattgaagggcatgcccccgtttccaactgcgcctagttga

SEQ ID NO: 2635 - DNA, 4176 bp, synthetic construct
  source 1..4176: mol_type = other DNA
atgaaactaaagcggtactcgtacataattatgatctttcttgtttgcatgatcagcatctctgccatcagtgctgccgatgactcatcaatcgctacggacgattccaacaagatcatcaatgataacaacaaccaggacattgtgctggaagaaaatgggccctcaacaaatatcgctttagaggacaagaactataaaattgagaagccacagctgaaggagaatagcccaggcaactttaccgatttgaattacctcataaatgaggatgaaaccacccgccataacactactatcactttggaccgggactacatcggcggtgagaaaggcataagaatcgaccgtcccctcatcattgacgggcaggggcatacacttaatgcctcccaaaataacagggtcttccacattacttccgagaacgttacccttaaaaacatcattttcaccggcggtcgatccgactacggtggcgctatttactggcaaggcgacaacgggaagattatcaactgtaactttacttacaacacagccaccaagtatggcggtgccgtgttctggggcgacgacgagtttgaaggtaccgctgaccagaccatcgctaaggatggaattatcatcaactctaatttcatctccaataaagcgaatgtagggaatggggaggcctgggagaatggcggaggcggagaaggtggtgcagtttactggtatgccaacaatggcaccatctgcaactcctacttccacaataaccgggccggtggacagggaggcgccatcacttggaaaggtaatgatgggatcatttgcaataacaccaacttcaccgccaatagtgcaggagattctggcggtgccgttttctggagaggagataacgggaccatcagcaataactgtgagtttaataataatatagcctacggtcggaccagtgatggcatttccagagggggaggagctattttttgtcatggcgagaatggtaagatctcgaactgctcttttatggaaaacagtgcgaaacctgaaagtgaaagcggtaaaggggggggcgccatttatgctgagtacaacactttcatcacagattgcattttcataagaaactctgccgattattacgggggtgcaattctcatcttcagaacaggtgatgtctatcgcaatatcttcatcaacaacactgccttaaacggcaacacgataacattaaaaggaatcggccactcaaccatcacaaacaacattatcctaaacaagaccaatgcaatctactggaacgaatccgactacaccatcgaggctaattggtttgggaacaacgctacccaatattcagaaccgtatgaatactcccagacctggttgtttctgaacgccacagccaaccccaaccctgcgccattcaatattcccacggaagtgaagttcaagctctggctctacaataaaaagacgaaaaaaatcacagaatatgacaattccctcctgcccactatccaacttagcttgtcgcaaacaaaggggagcattaacaaggagaccgcagggctggatgacccgatcaactacacggcaaatgaggtggggaccggaagcataactggaaaaatggaatggatcacagatagcatcttctttgagatcgtgaatgaccctaaacttgaggtgtctgtgaatccctccgagatcgactacggcgacaatattaccctccacctcggatatgaggacgaggctacaggaacagtaaacatctcttttaagggcagtacccacgagaagactatcgaaaacattcctctgaacaagactatcaccattaccgagtccattctgcccgacgagtacaccgtgactgtattctattcaggggataatcagttctcacgcgcaagtaagaccgcagatgaaaaactgaaaatcaatcagaagaatccgaatatgacagtgacatcctatgagatctacgttaatgacactaacggcgtcatgttttccattaagctcgataaggacgccacagggaagatcattctcacaggggacattggcagggagatcaatctgacggagggcagcattaaggacgggaaacgcattattgaaattaagaacaatggttttgatctgggcaagtacaatgtcacattttcatatcctggcgatgagatctactgggagtatgaaaccacggccctctcagagattaaagtcatagagaccaaaataattccccagaaggaggaaatcgtgctgatcattggcgacaagtcaaagatcaactataccataaatccaagcaacgccgttggagatgtcactttcaccagcaatgacactaacgtggtcaaagtgaatggaagcggggatattgaggcaatcgataaagggcaggccaccatcacaattaaattctctggatcgaaagactacgcccccagcaatgccactgtgaacataaccatcggcagggaaatggctaagctgacggccgaaaacattacggtgacatataacgctgagggctaccttaaggttgccctgaaggatagtaagaacaagtccataagcggagccattctgattgtcgacctgatcaataagacaaattacacgaccgactccaacggcgagataaaagtccccacaaagagcctggctgctgggaactatacggcaagcatcgaatttgagggcaacgataagtacctgccagcgaacacaaccgccggcgttaccatcgagaaggataatccgcgactgacttcaaacaacatcacaaacaaataccacactgaggattacctgatcgtgagcctgaaggacagtgccagcgggcctatcagcggtgccgagctgactgtgtacctaaatggcagcgaaacctataagacagacggaaacggacaaataaagatccctacgaaagacttgctccctaacatatatgtggccaacatctcctttgcgggcaacgaaaactacacagaggcgaacgctagcgccagcatcaacataactaaactagataccaggctgaatgccaccgacacaatcacaaaatacaacgtgaataaggacatgatcgtcaccttgaaggacattgatggaaacgccatcagcggtctgaacatccttgtagatctggacggggtgaaaaactacaccacagactccaacggagaggtaaaagtgccaaccaagtcattggctgctggcaactatacggccaacatcgccttcgaaggcgacaatatctatattggctccaatgccaccgcaaaggtgaccattgagaaagagagcaccgagatctcggctacaaacgtcagcgcaaagtatggctcaaaccagtccatgatcgtcacgctgaaggacagccagggcaatccaataagcggagctaaggtctctgtggagatcgatggcaagaaggactacacgaccgactctaatgggcaggtgaatgtgccaagcaaaaacatcgttccagacacgtacaacgcgaccattacttttgctggaaatgagaactacacctcttccaacacatcggccagcgtggtgataaagcgcgtcaaaactgcgctcaactacaccgacatgaataccactgcgtttgattcgaatattgaaggacgagtgggagagtacttcagtttccagttgcttgacgaatatggaaagcccttatccggcaaacaggtcttcattgggtttaatggggttaaatacaaccggacaactaatgaaacaggcgaggcaaggctgcagataaacctgaaatatgctaacaattacactttcgccatagcattcctgggagacgagaactatagcgggagcttcaatttcgctattatcagtgtgagcgaacagactcctagcctgtccacaagccccaagacctataaggcgtccgccaagaccaaggcactaacggcaaccctcaaatcctataagggaacagcaattccggacaaaaagattactttcacggtgaacgggaaaacctatagtgcgaacaccaactcaaagggcatcgcaactgtgaacgtaagtctcaacaagaagggcacgtacaacttcaccgtccagtacgccggcgatagtacttacaagaagattagtaaaagtgaaaagctgacgataaaatga

SEQ ID NO: 2636 - DNA, 789 bp, synthetic construct
  source 1..789: mol_type = other DNA
atgaaaaatatcctaatttccaatgatgatggggtgatgggtcctgggatactggcttcaaagcaggcccttgaagggctcgccaatgtggttgtcgtagcaccccaggaaaacaacagcgccgtgggccgcaaagtcaatatcatgaagcatatgtacctggaaaactacgagctcgctgatgggagcatggcgtacggcttgtctggaactcctgccgactctgtgaatgtggggatcaactatgtgtgtgacgaggtgccagatctggtggtaacaggaattaacccgggcataaacatcagcagactgcagataaccacatccggaaccgtctgtgcagcgatcgaagctgtgggtctgggcattcccgccattgcatgctcactgttcctcgacgacgactgcttcaaacaggatgatgagggcaactggtatgtggacaccgactactcctttgctcaaaaaatcctggcaaaactcgtcaagaaggtcttggacgagggcatgccagacggcgtagacctgtttaacctgaacattcccagcaagcccctgtcggataagatcaagatcacacgacttgccgacagcatgctgaagttcaacatcctagagcgggtggatgacgacggcaatgacacggtcatgaatgttccggaactgattgaggactacgaggagggaaccgatggatattgcctccttgtggagcggaggccaagtttaactcctctcaacgttcacttcggtgccgaaatcagtaatttggaagattgggagttttga

SEQ ID NO: 2637 - DNA, 735 bp, synthetic construct
  source 1..735: mol_type = other DNA
atggacatcaatgaatgggaagaatggtatgaagagatcctcaacacctttggctttcggagggaagatgatgagaagactgcggacctcttggacgaaatccttgcagatcatggattcctcaccattgatgagttctatgatgagatcatgctgaagaaggggtacactgacaagtttatcgtcttcggagcaggccctagcctgaaggagcacataagattcctcaaggaaaactacgacctgagcaaatacatgctggtaagcgccgatggggctacaacagccctgttggaagaggatgtcgtgccagatatagtggccacggacctggacggcaaaatgtccgacctgttgacggccaactcactgggcagttactttgtgattcacgcccacggaaacaatgaggagcttattgacctatggacaaccagctttaataaaatcctggggacaacccagtcggtgcccgtaggcaatctctataacttcggagggttcaccgacggggaccgagcaatgttcttcgtggtcgagctgggtgcgaaagagatggttctagctggaatggactttggcaccgttgtcaccaagtactcccggccgaacatcgagggtgagacgggccccgccgacgagataaagactaaaaagcttattttcgctgaacgcctcttaaactggatcagggagaatgaggatgtggaagtgattaacctgatcgacagttga

SEQ ID NO: 2638 - DNA, 627 bp, synthetic construct
  source 1..627: mol_type = other DNA
atgaaagagatcgagttcgaccttaaaaacaaccccttttataacttcctctcgagtcgctacagcatgtccgcacggctgaatgtggagaaaatgtggaattactcaaaggaaaacgacctctccttcttcacactgagcctggcggccttaatcaacagtctgaacgagatccctgaaatgagacgaaggatagtgaatggcaaggtcattgaatacgactatctggatgcagtttgcccgataatggacgaggatagcggtatctacaaggagatgcgggtaaaagcgccccagcgctttgacgagatcctggattggcatgattatgtccaagagcacgaaaggaagattctaaacggaaccgaagacgcttttgaggtgaagactaccgaaagagacgagctgaatattgccaacttcagctgtattccatgggtggattttgattcaatcactaactgcaccgcctcttccaaccagattcagccattgatcacgtggggcaaggtcaacgaggactacgaaatgaccgtggccataacagttagccacatcttcgtgaatgggcgtgagctcgcctacttctatcagttcgctcaggacaattttaataatcttttttga

SEQ ID NO: 2639 - DNA, 1119 bp, synthetic construct
  source 1..1119: mol_type = other DNA
atggccatagaggatattttgatgttcgacgagacaatatttaatgacatcaatgcattcaacccagactatatgccccctaactataactttcgggacagtcagatggaagggatggctatggctatccgcccggccatcagaggggggcgtcccaccaattccgtcatactcggaagttgcgctacagggaaaacgacggcaattaaaaaggttttcgagctggtggaaaagactacagacaaagtggtgtgcgtttacatcaattgtcagcttcacactactcggtttggaatcttttcgcaaatccacaaaaagatttttggacaccagccccccgagactggcgtgcccttctcacgcgtgtacgaaaaggtgatggataaactgtcctcagatggaaaatctctgattgttgcctttgatgacgtcaactatctattccagacccctcatgcaaacaaggtattctacgatatcctgagggcctacgaggaatatgaaggggtacgcaccggaatctttgcgatcctctcagacctggagtttcgattcgcccttgacaagaatgtaaacaccgtcttcattccacaagacattgtgttcccgccttacaactacagcgagatcttcagcatcctaaaggatagggctaaggcgggcttcttcccaggtgtggtctctgacgagatcattgaagagatcgccaaccagacctacgaggtcggtgacctccgggtgggcatcgacctgctccgagtgagcggtaacatcgccgagtccaatgccagcagaaccatagaattggagcatgtggaagaggccgttgcaaagcagggctctgtgaatctgatggagacaatcaatagtctgaacgacctggaaaaaaccatgatcaaggtcctcattgatagggacgaggtggtgacagcaggcgccctgagcaaggaatttaaggagcaggctggcgtcagctatgcgacattcaacagaaccctcgaaaagttggaatttttacgactggtggatacccgctacacgggcaaaggggtcagaggcaactccagggagataattcttcggttctccccagaggatattaaacggtgcaacctgtga

SEQ ID NO: 2640 - DNA, 192 bp, synthetic construct
  source 1..192: mol_type = other DNA
atgatggtcagtcacaataacagaacgtgtgacctgcggaaaaagcagaatctccgcgacccgctgaccttcaacaacttgaggataaacattaaggactgcatggtcatcttcgttgtgttcacagtgctacttctgagcatcctggcggtatccgcagcccccagcccagattttatgctctgggtgtga

SEQ ID NO: 2641 - DNA, 474 bp, synthetic construct
  source 1..474: mol_type = other DNA
atgatcttaattcactgcggggcaataatgagtgaaaacaatcagagggagaaaaaattcgaatactttgaagtgactgcagacattggattttatgcctacggcaacaccctggaagaggcttacgaaaacgccgcgctcgctatgtttaatgtggtgactgacatagacaaggtgaaaacgagcgaaaccagagagttcgaggtcgagtcagaggatttggtctcccttctgtacgactatctcgatgagttcctgttcctacaggatacagaatttctgtttttcagcgagttcaaggttgacatcgacaaaacagaggatgggtataagcttaattgcatcgcctccggcgaggagatcaactgggacgtccatgtgccccgcagcgaggttaaggccatcaccttccacaagatgtgtgtaaaaaaggaagatggtgtgttcaagctgcgggccattctcgacctgtga

SEQ ID NO: 2642 - DNA, 1449 bp, synthetic construct
  source 1..1449: mol_type = other DNA
atgtccatcagggagagtttggtcaaagttagagaaaatgtgtgggagctgccaagtgactacaagaaggagatgcgggttcctggaaggatgtaccttgatgacgaagcggtgaagaccattgaagaaggtgctttggagcaggtgagcaatgtggcctgcatgccggggattcagggggcctcaatcgccatgcctgacattcacttcggctacgggttcagcataggcggcgtcggtgcattcaactataataacggggtggtaagtcccggcggcgtgggctttgacattaactgcggagtacgaatgctgaggaccaacttaactgaagacgagatcaagccgcaccttaaggagctgacagaggttctctttaaaaacatcccaagtggtgtgggcagcaaagggcagatacgccttaaggacaacgagatcaatgaggtcctggattatggggcctggtgggcagttgagcgtggcttcggctgggaagaagacctcaaattcctggaagagaatgggcggatggaagaggccgagtctgaggtcgtaagcaaaaaggccaaaaaacggggcgtgccccaactgggttcactggggagcggaaaccacttcctggaggtgcagaagatcgaggaggtctatgacgataatgtggccaaggcatttgggctagagcctggaaacgtgacaataatgatccacagcggctcgagaggctgcggacaccagatctgtagcgattacttacggaagatggataaggcttacagaaactataagatcaagctcccagacagacaattggcctgcgcccccattgactctccagaggccacaggatacctcaaggcgatggctgcaggcgcaaactacgcttgggcaaaccggcagatgatgtcccactgggtcaggcagtcctttgaagaggtctttaagcgagacgcagaagacatgggaatgagcacgatctatgatgtggcccataacatagccaaaaaggaagtccacaaggttaaaaattcccatatggaagtgctcgttcaccgcaaaggtgccacgcgagcattctgtcccggccgccgcgagattcccaaggaatatagagacgtcggtcagcccgtcctgattcccggaaccatgggcaccgcctcctacatcctgcatgggactgatgtggcgatggaggagaccttcggctcaacggcccatggggccggaagggtactgtcccgcaccgcggccaaaaagcaatacactgcgaaggatattgaaaaagagctgaatgataagggaatccatgtgaaagccaattcagctcctgtgctcgctgaagaggctcctggtgcctacaagaacgtggattcggtggtgaagacctctcacgacgctggcatcgctaaactggtggctaaggtcgtgccactagcagttacaaaaggatga

SEQ ID NO: 2643 - DNA, 774 bp, synthetic construct
  source 1..774: mol_type = other DNA
atgattgccattatagggggaagcggtgtcgacgagatcacagacatggcagaatcaatagagaaaaagatagtggataccgagtatggctctgtccaggttagcctctttgagattgaaggcaaagaagtggtgttccttccccgccattcggaagggcacacctgtcccccacacaagatcaactttaaggccaatatcatggccctgaaggagttaggggtgagccagatcctggctacaaatgcagtcgggtcagtggatctggagattggcccgggaagcatcgtcatccccgacgacttcctcgacttcacggtcaaccgagaccggacgttctacgacgatgatgtggttcatatcgacatgagcgagccttactgcaaccggctcagaaatgccctgctagagaacagtgactgtgtcaacggcggtcttgtagatggtggaacccacatttgtacagaagggccacgcttcgaaactccatctgaaatcaggatgtttaaaatgattggcggcactgttgtgggaatgactacactgcctgaggctgtgctggcgagggagaaggagatgtgctatgcttccatcgccatcgtgtccaactactgcacctccatcgccaagcataaactgggcgtggaggagatcatcgaaataatggccgtaaaaaaggaagaattgattagtctcctgttcaataccattaagaacctgcccgtggactacgattgcgagtgccaccacgcattgggagatgcggagttttga

SEQ ID NO: 2644 - DNA, 627 bp, synthetic construct
  source 1..627: mol_type = other DNA
atgaacatcaaagagctgtttatagagtccctaaaagacaacaagaagctgataataggcctctatgcgttttttatcatagtgttcatcgccgcttggattataaccggtccgaaaatgcaggccattgccagcaatgtcacggcaatgaacggtcctgggggcgcccagagctccgcgatcgaactgttcatccacaacgagctgggcggaatcattacataccttgcatcagttttcttcggcatcgctgcaattgtattgctcggatacaatgcattgaatctggggagtattggccaattattcaaccatttcatgcccaatgggggcatcctgtacctaatttacctcattccccacggaatctttgaaattactgccacagtccttcagtccgcagctggcatcctcttgttcctcttcatttggaggttcatcaaggccttccggagtaaggataccaacggggcctcagacgcctttgagatgaccaaaaagacactgatccagagcatcgtgcttatggtgattgctaccatcctcctgctgatcgccgctccaatcgaagcctatttctcgactgcgtttagcgagtttatcatggggtttctgggactgcgctga

SEQ ID NO: 2645 - DNA, 393 bp, synthetic construct
  source 1..393: mol_type = other DNA
atgaacgagtttggccagctgcagctcatctggattaggagactggcccgcgaaacggggcgcattaccgcacttatagaagcgggaaacctgagtgtgatcgatttggtccggtataaaaagagcattagctcaatggatggcttctgtagatttgtgatcgagagccaagattgggatgatgtacggcgaatccccgagatcgtggaggatgttgaggaaaagctcttcctgcacttctacgaaatgatcgacaggttcgacggcgagggagctcatctcgacttttccaaagaggacgaggggaagatatgcctaaatttcgacgacgcctccttagaggacattgtctttacaatcattgacgacgaagacatcgatgtgttcctgtga

SEQ ID NO: 2646 - DNA, 204 bp, synthetic construct
  source 1..204: mol_type = other DNA
atgcggaataacctaaagatctacagggcaatagagaatattacacagaaggagctggctgatgaactcggcgtgagccgccagaccattgtcctcatcgaaaacaacaaaaacgatcccagcctggagctggcctttaagatcgcccacaagttcgacgtgaaaatcgaggacatcttcattaatgactccaacaaaaagtga

SEQ ID NO: 2647 - DNA, 300 bp, synthetic construct
  source 1..300: mol_type = other DNA
atggagaatctactcaacttgaagtatacctgtaaggactgcgatttcacctggatcacgctgaacggcgagcatagcatatgccccaagtgccactccgaaaacatcgacctgctgggcgaagtgaaggacctggatattgaggccatccttgctcacaacaaaatgcgggggggatgttgcgggagcgcccgcggcaaaggtcccctcacatgcggaaaaccaatgcctgaccacgcaaatccaaatattccgcaccataaccacaataagaaaacttgttgtgggtacaacgagtga

SEQ ID NO: 2648 - DNA, 1068 bp, synthetic construct
  source 1..1068: mol_type = other DNA
atgaatgtaagtgacctcaaaagggaccactacatgctaaaggggcccctggccaaacagggctatgactggtggtggcattccctcactgcatacaacaaggaaacaggggaaccaaggcccttctttatagaatactttgtgtgcaatcccgcgcttgctgaggatgagcctaccctgggccaagacccgaaaaacattgaggccgggaaaaagccatcctactgcatgctgaaggtgggagcatgggggaaagagccaaagcagatccacaatttctattccatgaaagatttcgaatgtcccgatgacaagttggatgtgaagattggagagttcagcctgaccgagaaacacatgaccggctactgtaaggtcacagaggaggaagcccgcgaccatccggagtacatgtgtgatgcaggcgagatgaaatgggacttggacattgacaagcagatcacgtttaacgtgggatatggtgctaacactctcttccgcaaattaaactcattcgaaatgttttggcatgctgaaggaatcaagactcagtacagcggaaccattgagctagatggggtcgagtacgaggtgattccagaaaagagcttcggctacgccgacaagaactggggcgccgactttacaagcccttggctgtggatctcctcatgcaacctcacaagcctcatcacgggagagaagctgaacaactctgccttcgaggcagggggcggcaagcctaaggcttttgggataagcctgcctcgaaagcttctgataggcttctattatgaaggaaagatgtacgaatataacttcgccagattctggaacatggtcaaagttgatttcggcttcaaggaaggtgaggagctgaatgaatggtttatcaatgccagtaataaagactcgaagatggagatgaagctgtattgcaagagagatgagatgttgctctttaattacgaagcgcccaccgggaagaagctgcacacccggctttggaatggtggtaacggctttggcgagatcaaactgatgaaaaaaggacggcacatcgattga

SEQ ID NO: 2649 - DNA, 690 bp, synthetic construct
  source 1..690: mol_type = other DNA
atgttgtggacagattttatcgtgctggcgattgtgtatatttacgtggttgcaatttttatcctgtctgagaaggtcctgaagagcaggcccgaggtctcgcggaagtttttacacatcatggtagggaatatgatatttgccatgccattcttcagcgacccttggattatgcttctgttcatcaccctgccggtgactgtggccctattcttcctgacagagtactcccctatccagattgaaaacagcgtgaccgaatccggccatgccttaggcctcctcttttatgccctgatctggtccatattgctcttcgtctacccaatcatgctcgatcccaactacctgtggattgtcgccatggccatcgttcccctggtatatggggacggcttcgctgctcttgtgggaggcaaatgggggacaatcaagtaccacgtcttcggcggagagaaaactgtggtcgggtccctggcaatgctatctgtaacggcagttcttagcgtctttgtgtgggtgttctacagttcaatcggatacactctcccagagttgaatctgtggtatattttgctgatatcagcagtggccaccctgtgcgaagctctcagttacggtggtgtggacaaccttacggtgcccgctgtgaccagcgtgctgtactatatcgttgcgaccgtcctctga

SEQ ID NO: 2650 - DNA, 1059 bp, synthetic construct
  source 1..1059: mol_type = other DNA
atgaagcatcgcctgaacctcgataataaggacccaaattatattctcctgaaagagatctttaaaattatggattcccgcaagtccaagagtatcctggcctcctacggcttcaaaaaccttaatcgcacaatatttacctttaaaattatattcatcagtatgttctttggaattgacattcccttcatcctcaacgagctgaaatccaaaaaggagcttcgcaagtacttcaatattagcgaggtgctgactgcagaccaggtgtataagattttctcagaaattaactctgagaagctcattaagtgcctgaacaggatcttgaacagcaggaacatggtgaagagaagaggaaagaagacctttatcgtggatgcgacccccgtggacgtggatatcaacttccacaggaataagaagacaaaagaacatctggaaaaaatcaatctcaagtggagttatagctcctctaagggttactatattgggttcaaggctactgttgtactggattatgactcgatgaatcctgtttgtattcttgtccactcgggggctccaaacgatgcaaagctgttcgaggagatcctggaaaacctccagaaacggcgaataatccggaagggggacacattgatctttgataagggctattacagctacaaaaactaccagatcggtatcagcaagtacaagatcatccctttcatctttcccaaagagaagttcagccggacccgattggacgacattttaacttacctcctagccgtcttcaacaaaacaaagcggatcatgaaagagaaacgtctttacaatagcttaaagatggaattgatgaagaagatagactcctgggagaagttcaagccaataaggggcaaaattgaggactttttcaaactgctcaagcagggcctgaacatgagagaaatccacaaatacacgccgaaaagtgtcgaaaaaaccgtctatctaaatgtgtttctgggagccctgatcatatcacagggcttttactcaaaaacggccatccaacaactgtctgagaactga

SEQ ID NO: 2651 - DNA, 2208 bp, synthetic construct
  source 1..2208: mol_type = other DNA
atgactgatgtggagctgaaaatcaaagttgcagagaccttgtcgcaaaatgacgtgggcaaaaacattgctaagctggatatggagtccatgttcaagctcggcctgaaggacggcgacattatcgaaatagtcggaagcaaaaacactgcagctattgccgtcgctagccagtcggatatggaaacaatcatcaggattgacgggaccacccggaagaatagtggtgcgtcaataggcgaggaggtgaccatcagaagagccgacgtaaaggaagctaaaaagatagtcctcgccccgatcgatgcccgaatcaggattggtggtgactttaacagggccttcgcaaatcaggtcatggttcagggcgacctcataaacactggcatcaagacaccccaaagacgcgtgagcggcagcggattcttcgatgatatctttgatgaccttatgaatgtgcccggaataggggccatgagccagatcaagctggctgtggtgagcacaagccccggcggggtggtgaaagtgggccctaacactaaactggagataaacgaagagcccgtggacatctctaaactggagggggtgtccaatctcgtggacatcagttacgatgacattggcggtttgaaggaggaagtcaagaaggtgagggagatgattgagatccccctcaagaaaccggaactcttcgagaaactggggatctcccccccaaaaggggtcttaatgcatgggcctcctggaacgggtaagaccctgcttgcaaaggctgtagctaacgagagtgacgcccacttcattgtaataaacggtcctgaaatcatgagcaaatatgtgggcggctctgaggagaacctacgcgaattttttgaagaggctgaggagaatgccccctccattatcttcattgatgagttggatgccattgcgccaaaacgggaagagacaaacggggaggtggaacgcagaacggtggcccagcttttaaccctgatggatggtctcaattcccgggggcaggtggtggtaatcggcgccacaaaccgaccggattcactggacggcgctcttcgccgtcctggacgctttgaccgggaaattgaaatcggcgttccagataaggatgagcgaaaggagatcatggaaatccacacacggggaatgcctctggccgaggatgtggacctggaccagatcgcaaatacaacccatggatttgtcggggcagatctggaggccttggctaaggaagccgctatgcgagttgtcagacgaatcattccggatctggggtccgacgatgagattccccccgaagtcctggaaaagctggtggtaaccaaggaggacttcaagtccgcccaaagggagatccagcctagcgcgctgagggaggtcctagtccaagttccaaatgtcacttgggacgacgtgggtggactggacgacgcgaagcaggaactgaaggaggctgtcgagtggccattgaaataccccaacaagttcaaggagtttggagtccggcctcccaaaggcaccctgctctatgggattccagggacggggaagaccatgctcgccaaagccgtggcaaatgagagtgaagctaacttcattgccatcaagggacctgagctcctctctaaatgggtgggagaaagcgaaaaaggcgtgagggaggtctttagaaaggcccggcagactgccccgacggtcatcttctttgacgagatagattcaattgccagctcaagaggaggcgaatccggcgactcgggcgttaccaaacgcgttgtaaatcagttgctgacagagatcgacgggctggaagagctagaggatgttgccatcattgcagcaaccaacagacccgacatcatcgatccaggtctcatgcgcccaggacggttcgaccggcacatcaaggtggacgcgcctaacgaggacgcccgcctggcaatattcaaggtgcacacgaaagacatgccccttgcgaaggatgttaagcttaagaaactggccaagcgtgccgaaggatacgtgggcgctgacattgaagccgtttgccgtgaagcagcgatgctagccttaagggacgatattgaagcaaaagaggtgtcagcgaaattctttgacgaggctatggataaggtgaagccaaagagcagtaacgaggaagagttgatccagtacttctga

SEQ ID NO: 2652 - DNA, 840 bp, synthetic construct
  source 1..840: mol_type = other DNA
atggatcgccacgtgattgaggctctgggtagggcccggataacggtggagaacgggaaggttgtggatgtaggagagcccatgatcgaatactgccccttattcgacaagcacaggggtatcaaggaactaacaaaagaggaaatcgaaaaaaacatccaattcagaatcgacgactttggaatgtgtaccaaaaaccggcaattgcgccttaaagactttctctcctttggcatatcggagatcctgtccaccttgctggacgagaatctgatcgactgtgcagtcatggtttgcgaaggctgcggaactgtcctcgtaaccgagagcgagatggcccagggagtgggaggcagagtcagcggtctggtggaaacaagtccaatttcccagagctttatttggaagagtttcggtcaggatcgtgtggtggacagcgagacggcccgcattgatcaggtggatggcctcagactggccattgacaacgggtacaagaacatcgcggtgacaatctgcctcgccgaggacggcatcattcttagggaactggagaaggaatatgaagacattaatgtctacatatttgcagtccattcaacaggcctcggccgagaggaggccgaaatcattttcgacaccgcggatgtggtaactggctgtgctagcaagcaccttcgagacatcggaaaggagctaaaggtcttctctgtggggacctcaatcccaatcttcgctgcaagcgataagggggaggagttcattaaactgcggctggataaaataggggggcccaaaaagaagactggcaattccaaacagcctaacccgctggtttga

SEQ ID NO: 2653 - DNA, 636 bp, synthetic construct
  source 1..636: mol_type = other DNA
atgtcaaaagacgtggtgctgatcctgtcaggcgggctggactctaccacattactctacaaactactgaacgagggaaataacgtcactgccctcagtttcaactatggccaaaaggcggccatcgagattgagcgcgccagtgagatatgtaaaatgaacgatgtcaatcactttgtgttcgatatccggaacattgtagacttgctttccagcagccttaccgataaggacaacgacaacgtgcaggagccaaaaagcaccgtagtgcccagcaggaatacaatcttgctggagctggccacggcctttgcaataagcaacaacctggaggaagtttattacggggcaatcaaggcagacactggcgactatcccgacaccacccctgaatttctgaagcagatcaacgaactaaataaggtgaataattacgagtacatcccagtttgcgctcccttcattgatacagataaaaaggatgtggtcaagctcgcgctcgagctgggcgtgccgattgaaaagacttggtcctgctacgtcaacaatgacggaacgccttgtggggagtgcttctcctgcaagtcgagaatagaagccatcaaagaagctaaggaggaactcggtattgagtga

SEQ ID NO: 2654 - DNA, 360 bp, synthetic construct
  source 1..360: mol_type = other DNA
atgctaacactggtgagtgaacaccggatatacggctgccacaaactcaaggaccagggggggaaatgtacacaatggcatggacaccagtacagggtcatcctgacgctgcaggcaccctataaggatctggactatcgcaacatgatcatggacacctatgacattgaagccatctttaacgagttcattggcgtggatcatttgaatctgaacgagtttatggatagcgagaatccaaccatggaagagatgagcaaattcttctacgacggtcttaaggataagatcgaatgcctcgtctccgtgggcgtatacgagacccctgagactggagttacctacactccgatggagtga

SEQ ID NO: 2655 - DNA, 609 bp, synthetic construct
  source 1..609: mol_type = other DNA
gtgatcaaaattaaagtctcggaaatcttcacaagctttcagggcgaagggccttacatcgggacccccgcaactttcctgcgactgtacggatgcaatctgaactgcccatggtgtgacacggatatctccacctacgagattctatccgtggacgaggtctttgagatcctcatgacccaaatggagtttaacaatatacgcatactggtgatcactggtggagagcctacattgcagatggaagagctgaagcggctcattaaggaaattcccgacgagattaagatccaaatcgaaacaaacgggtcaatctttgaatacgttccagaaatcgattacgtgataagtccgaaggaagataaggagaccgtatttaagaactattacaaatatgataacgtgttcttcaagttcgttatttgcagccaggaggacattgacgaggtcatctatctcaaggataaatacaattatgacaaaaccatctggcttcagggcgagttcagcaaggacggcgaaatggccgacctgataagggagaacttcccccacttggagaacgtgaagctgtctgtgcagacgcataaatatttaaatcagagatga

SEQ ID NO: 2656 - DNA, 423 bp, synthetic construct
  source 1..423: mol_type = other DNA
atgtacaaaaagataatactaccaacggatggaagtgaatactcgaaccgggaaattctcagagctaccaagctgctggctgaggacggagaagtcatcatcctgtccgtcgcaacagaactccgaaagaccgccttccagcgcagcaaggacatcgatagggccaacaaggagagtattcaagaggccaaagagtatgttgcagccatgaagaaaggctttgatgacagcgtaaatgtccggactaaagtcgttgtgggcttccccgcggaagccatcaaccaggtggcagaggaggagggggctgacttgatcattatcgcgtcttcaggtaagcgcgggctgcacaggttcgtgatcggcagcgtggccgagaaggtgcttaaagactccgagattgatgtgctcctggtgcatgactga

SEQ ID NO: 2657 - DNA, 582 bp, synthetic construct
  source 1..582: mol_type = other DNA
atggcggataaaaaaccgaccgcagagaactggcccgtggtaagtggcgattacattgtcggagacccagagagccctgtcgctgtcaccacactagcttcgcataatgaagacattcctgcagccgctggcgccgccatagccggcccctgcaagaccgagaacctgggtatcgaaaaggttgttgcaaacatcatcagcaatcctaatatccggtttctcatcctttgtggggccgaggtgcagggacacatcacaggtcagagtttcaaggcgctgtacgagaacggctgcgaccccgagaagaagaaaatcacgggagccactggcgcgattcccttcgtcgaaaacattccaatggaaggggtggaaaggttccagcaacagctcgagctggtggatatgattgacaacgaggacgggggagcaatcactgccaaggtgaaggaatgcatagagaaagacccaggggcttttgaggaggattctttggtgattaagatcgacgaagagcgctattccaaaaagagctcattcgtggagtcttcatccgagagcgaaaaaatagaatccgaggcctga

SEQ ID NO: 2658 - DNA, 450 bp, synthetic construct
  source 1..450: mol_type = other DNA
atgaaaaaagagtcgatcttcaatgacgaggtgagcctcttcaattccatttatgtaatgcacaaggcgtttgagaagttcctcaagacccacgtcaacgatctgaatatcaacaaggccgaatctaaatttctaggcgaaatctattacaacgaagggataagccagagggagatcgctcgaaacctgtttgtgtcagaggccaatattgccaagacatacaagatactggagaaaaaaggatttatctataagaaggtggacgaaaagaacaacacccggagacagttatacttgactgaaaaaggcaaagagagcttcgaagaaatcatcaagctttacgaagagtaccatcacttcattctgagtgattacacggaggaggagatccgcaagcatgaggagatgatgaaaggtattgcagacaaatccctcaagttcctgaagtga

SEQ ID NO: 2659 - DNA, 771 bp, synthetic construct
  source 1..771: mol_type = other DNA
atgaagaattattttgacataaaggataaggtcgccgtggtcaccggcgcttcgagcggattagggtggcagattgcccaagcctacgccagccagggtgctaagctggcgctgttcgcccggcgagaagagaggctgcaggagaacgtaaaggagatcgaggacaagtttggcactgaggttatgtatgctgtgacagatgtcggagattatgatagcattacggcctccgttcaaaaagtgatggacgcatatggaagaattgacatactcgtgaacgccgcggggatgggcaacaacaaaatggtggtggaccagtcaaacgaggaatgggcacgccatatccacatcgaccttacaggggtctactacatgtgtaaggctgtgggcgaaatcatgattgagcaggaatatgggaagatcataaatatcgggtcaatccacagtcgggtgatcttccctggcggaggtatcagcgcatactccagtgccaagggggcagtgatgaatctgaccaaaaacctagctgtcgagtgggcgaaatacaatattaccgtgaacgccatcggccccgcggtatttgaaacagaactgacggttgactccattgagatggacggattcatggatctcattgcagcttactgcccagccggcaggttggggaaaccgggtgagctggacggccttgccatctacctcgcatctgacgcctctagcttctgcaccggccagctgatctgcgtggatggtggatggactgctatatga

SEQ ID NO: 2660 - DNA, 1275 bp, synthetic construct
  source 1..1275: mol_type = other DNA
atgactcagatgactgaggctaagaaaggcaacgtcacccctgagatgcaagctgttgccgaatttgaacgagtggatgtgggcaagatcctaaacggcctggcaagtggtagaatcgttattccaaagaacatcaaccgcgacacaaaggcgtgcgggatcgggcagggcctgacaaccaaaatcaacgcaaacatcggatctagtagcaaaatcgaagacatcgacctggagattaaaaaagccaaattggcagtggactttggtgcagatgccatcatggacctcagcacaggccccaaattattggagttcagggagaggataatggactcagtggatgtggccattggcacggtccccatctatgaggccggggtcgtgacattaaataagggcaacgaaatcatcgacatggatgaggacgacattttcaattccataatccatcaggccaaggatggggtggacttcatgacccttcactgcgggatcaatcaggatctcgtctataaacttcaagaggctaaacgtatgatgggtattgtaagccgcggaggaacattcctcgcttcctggatactccacaatgagaaggaaaaccccctgtactcgaactacgactacctcctggagatcgctctggaatatgatatcactctctcactgggcgacggactccggccgggatgccagtctgatgccaccgacacctcccagattcaggagcttgtgaccttgggcaccctggtcaagagagcacaggaagcgggagtgcagaccatggttgaagggccaggacatgtgccccttaatcagatacgcgccaatatggagattcaaaagacactgtgtcacggcgctccattctacgtactggggcctattgtgacggacctggcccctggctacgatcacatcacgagcgccattggcggagcgattgccgcatccagcggcgccgacttcctatgttatgtgactccggccgagcacctctcactgccctccctggaggacgtgaaggaaggggtcatcgccagcaagattgcggcccaagccgctgatgttgctttgggtctggacaccgcatgggagaaggaagtggaaatggcacaggcccggaaaaactttgattgggaaaagcagtttgatctggcctttgatagtgtcaagccacggcattacaggaataagtgtgagctggacgatgacgagatgtgtgctatgtgcggggagtactgcgcggtaaagatagctaaaggtgacttctga

SEQ ID NO: 2661 - DNA, 1653 bp, synthetic construct
  source 1..1653: mol_type = other DNA
atgaaatacgaggaactggtgaacgtgtatgaggccctgggggctacgacaaaacgcctggagaagaccgagatcctcgcagactttcttaaaaccgtggaactagaagatttacagaagattacgctcatggcgctgggacgtgtgttccctccttggagtgaggaggaacaggggattggcgacaagctggtgatgaaagctgtaggcgatgcggtcggcgtctcggtggcagtagtggaagacgcaatcagagacgaaggagacatcggcgccgctgccgagaagctgtacggcaaaaagacccaaatgactttcttctcacagcccctgaccgtgaactttgtctacaatcagctgaggaaattggccaaaataacgggaaacaggtccacagccaaaaagatcagcaacatcttggaactgctgagctccgccagcgctctcgaagcgaaatacatctgccgaaccatactggaagaacttcgcatcggtgtcggtgagggaatcattcgggacgcaattagccaagcctttggggtggataaggcccttgctgagcgcgcgcatatgcttacaaacgatctcggcctggttgccaaggttgcaaaggaggagggtgaagatggccttaagaaactcagcctgattcccggcaggcccgtcaagccaatgctagcccaattgagcgaggggatcgaaataagcatcaacgaaatggggtgtgccctgtgtgagacaaagtacgatggaatcaggatgcaggttcacaagaaggacgacgagattacaatattcacacgcagactggagaatgtgactatggccttgccagaggcagtggacctcatccgggaagctttcccagatgaggacttcattgccgagggtgaaatcatcgccatccgggatgggaagccgactacattccagaacatcttgcagcgagtcagaagaaaacataatattgaagaggctatggaaaaggttcccattaagatctatctatatgacctgctctactttaaggagcccaccattgacgagccgatcatcaagcgtcgggagatcctggaaagcgtggtggactgctcaaaccccaatttggccctcagttcccttgtcaaggtagggccagacaacatagatgatgcagtggatctgttcaataagtcaattgaggggggacacgaaggaatcatgattaaagactgcgatgagccctatattcccggcatccgcggcaaaaaaatgctaaagctgaaggcggagcctgagaccctggacgccgtcgtgatcgggggagtgaaagggatcggcaaaaggggagactttataggctcgtatgtgatcgccttacgagacgagaatgaccagctccagccgattgctcacgtaggaaccggtctgtccgatgatgacctggcaaacctcacggaaaagatggaggccctgaagatcactgagaagggcaccagaatcactgtgcaccctaagatcgtctttgagatagcttactccgagattgtcaagagtccagagtacagcgctggttactccctccgcttccctgtggttaaacggataagggacgataaaggcgttgacgacattgataccattgaacggttagagagtatgttcaagggctga

SEQ ID NO: 2662 - DNA, 399 bp, synthetic construct
  source 1..399: mol_type = other DNA
atggagctcaacgacgaaatcatctttaaagtggcactgatcactgcgctggtcggaatgatcgggatgctagcctttgcctcttatattgaacccaaggagataaccatcaatgaaattacacggaacaacattggcgagacagtgagcgtcagtggcgttgtggagagtgttaagttatcctcaagcggaagctcctgcttcctggagctcaacgacgggacggggaaaatcaacgtcattgtgttcgaatcggtgttggtggagcttaaggatgctggcaacgacctgaatgatttcaaaggtcacaatatcaaggtggtaggcagcataaccgagtacaagtctagcatggagctgatcctggccaactccaattcaattaaactcgaatcctga

SEQ ID NO: 2663 - DNA, 213 bp, synthetic construct
  source 1..213: mol_type = other DNA
atgtatgagaaggataaactagtgctgccaaacatcattaaggaggagtttgactgcatcgagctgaatgaagacaccatattcgactgggccatcgaagatgacaagatcatcctgaaaccccggaacatcgtcacaacggacgacatcatcgggattatagatgatgacggaggcgaatgggacattgataacgagatttacagcctctga

SEQ ID NO: 2664 - DNA, 234 bp, synthetic construct
  source 1..234: mol_type = other DNA
atggggttcctagcatcatcgaagatctacggcgactaccagatagatattcccaaggaggtgatagaggaatttaatgtggagagagactccatcatggagtggatcattaacgaagacggacggatctccatcaacttccgcaagaaatatagcattaaggatctggtaggcgccttccacctggatgacgaagtcagcagcgtggacctcaaaaggagtctgtacgagtga

SEQ ID NO: 2665 - DNA, 1365 bp, synthetic construct
  source 1..1365: mol_type = other DNA
atggtcgagaaacgactgttcgggacatttggggtccggagaaactgcgaaatgatggtgttgactcctgagttcgcatcccgccttgccgcaagttacggaagtattgtgcaggggaccgtcgccatcggcggagacaccaggaccagcacgccaatgctgaaacacgcaatcactgcagggctcctctcttccggctgtgacgtggtggacttgggaatcctccccacgcctgctatccagtacgcagttcgcaattattatgatgggggcattatcgtaaccgctagccacaatcctccaaaatacaacgggctcaagtttgtggacgaatttgggataggcactcccgatgatatggagatcgaggtggagaaactatacttcgatgaggagcctatccgcgcttcttgggataagattggtgaagtctttacaaacgagtcaatcatcaaggaatatattgctgagacgctgaaaagagtggatgtggaggccatcagggcgcgaaagcttaaagtggttgtggactgcggttcaggggcaggcagctacaccgccccctacatcttgaaggaactgggatgcgaggtaaccacactgaactgtcaggctgacggatttttcccaggtagggaccccgagccaatagagccgaatctgcaggacctcatcgccacagtcaagaaccttggcgccgacattggccttgcccatgacggtgacgccgaccgtaccatttgcatcgacgagaaaggcaacttcatactgggcgataagaccttcgccctggtggaaaagcacatgctgaaggaaaacgggggcgggatcgtggtcaccactgtagccaccagccaagccatttacgacatcgccgaagagttcggcggtgaggtgatcgctactgctgtgggagacctgctggttgcccggaagctgaaggatacagatggcctcttcggcggagaagaaaacggtggactcatcttccccgacttcatctatggacgggatgcggccatgaccgtggccaagatactcgaaatactggttaaggaagataaacccttaagcgaattggttgccgagctgcctgtctactaccaggaaaagctgaagattgagtgtccagatgaccagaagcaggatgtcatggcgaatattgcaaatgagattaaagacacaacggactttgagctggacacaactgacggcgtgaaaatcctaaaagaggacggctgggtcattattcggccctccgggaccgagccgatattcagatgctttgctgaatcggattccatggataaggctcaagagatggcgaactggggaatcagtttagtggagaaatataagaattga

SEQ ID NO: 2666 - DNA, 804 bp, synthetic construct
  source 1..804: mol_type = other DNA
atgatttccgacaggcagaaaacattgctcatccttatcctcgtgctggttctggctttcgcaataatcttcctaggatactccatctccttaggcaacaatcagaccgccggtgtcaagctcaatgattcgaataagatttatattaaccaatcttacccggccgagccgatccccgacgcgaaaattgacacaagcggggttaattcagtgctgcttgggcagaacgaactgggtagcgtcgagctgctcggcccattcggcaactccgatagcgaaatcaagatagcctatagtatcgggatgcacccctgggaaagtaaggtccacaaggctctgttcgataccgtcctcgctaaaaacagctctctgaaatactgctattacatctataagataaacgtgaccaactacaatactgacgacgagggccggatggatgggcagctgctagcgcaggagtttgtggcacctcatatcattaatggcgattatgacttgtttctggacattcacagcaacaagggaactgtcggaggcacctacgagcaaactaactttgcctttgcagtggggcaggatgaaaagagtgaggcctttgtaaagaaaatcctggataagatgccagaacttgtgtactacttcccagccgaccagtcaagccctccctacatcaccctccccgtagagcaggccggaacgcctacggtgaattatgaaacattcagctatgaggacattaacacaacctacgatctgatcgacaaattggttgacgtggtggacaacctggagttcaaatga

SEQ ID NO: 2667 - DNA, 714 bp, synthetic construct
  source 1..714: mol_type = other DNA
ctctgcgatttgatcctgaatctgattatcaaaatcgatgatatcatgattatcaaaaactattctaacgaacccactgacgaagcgaaggtcgactcaagtctctatgacgcccagcttatcggagaaaacgacctggggaccgtacacctgcatggcccattcggaaacgaggagtcagacattaagattgcgtatctcatcggcatgcaccccctggagagcaaggcacaccgcgctctctttgacacagtgctggacaaggatggggatctgaattactcctactacatctacaacatcaatgtgataggggagctggacgaggcaacggagggtcggatggacggccagcttctggcccaggagttcgtcgcccaccacataatcgaccgaggctacgatttcttcttagacattcatagcaaccgggggtctaggagtccaggaacttatgagataagcaatttcctattcgccccaggctttgatgaagagtctagcaaatacatgaacgtcttgctatcgaagattgatgaattggtgtattacgccccggaatacagaacctcccctgaatttattacagttcccgtgcaaaagtccggtatccctacactcgtgtatgagacctactcctatgagcccatcgagctcacctacgagctgagcgaaaaacttgtggatgctgttgacagtctggactttgactga

SEQ ID NO: 2668 - DNA, 1137 bp, synthetic construct
  source 1..1137: mol_type = other DNA
atgccgattatgtccttcggcagtcagaacatcaacatcattacaaataagaaagccatgaccataaggaaactgtggaaaacccctcttaagaaaggtgataggctgcactgctactggaatctcgcttcgaaggaaaagaaaaaaatcttcgaggctgaggtcacagaagtggagaccattaccttcaaggagctcaaggataacgatgagttggccagagaggaaggctacgaggactccaaggagatggtcaaggaatttaaaaaaatgtatcccgacagaatcgccgacgacgacctcttccagataatctatttcgaaaagctggacatcaacaaatggaaaggtgaaaagattgatcagaaggagatgatcacccagagggccgatatcctctttgatactgggaaatacgacaagagtgtactatgctacaatgctgccctgaagatagacccaaatgatgtgtacctgcttaacaagaaaggagacaatctcggacgcctcgaccggtttgaggagtctattgaatgttacgacaaggccctggaaatagagggggacaacgagtatatctggaacaataaggccattgccatgcttaactctggcaatatagaggaagctctggtggcaagcgatggagccttaaatgcaaacccagacaatcccgtggtcctctactggagaggcttcatcctggaaatcctatcagaatttgataaggctctggaggtttatgacaagctaatcacaattgatgacactaaccctgaggtatggaacgctcgcgggaacgtcctgacggacatggaccgactggaggaggcattgcaatcatatgacaaggcgttggaactgtgcctcgaggatagcgagattgacgcaagcgcacaaaaccggaaagggaacgcgcttctggacctgggccggtttgaggaggcaatccagtgctacgaccgcgccatcgaactggaaccactcaacacgagcttcctcctgaacaagggagttgtgttgatggagattgataagttcgatgaggcggaaatcctgtttactaaagtgcttgccttagacccctccaatgatgatgcccgagtgctgaagttggagtgtctggaaaatatgtga

SEQ ID NO: 2669 - DNA, 723 bp, synthetic construct
  source 1..723: mol_type = other DNA
atggaatacggtgcgaccattacttctagcatcgaatatcctaagaagatgtcgttcgtcatcttcctcgcaaagtgtccgctgagctgtccttactgcagcaacagcgaactgctctacggcggcgaggaaattagcctggaagagatcattgaaaagatagacgattccgctttcctatccgatgcagtggttgtctccgggggagagccactggtgcagctcgaggatacgattgagatactgaagtacaccaggaaaatcgggctcaacaccaaactggacacgagtggcgtctatccaaaccggctgagaaaggtgctagaccttggattggtcgactacctggccatggacgtgaaggccccctttaacaagtataaagaggtgatccattcagacattggggacaaggtaaaggaatcactggatatcgccaatgaatacgatgatgttttcctggagtgcaggacaacctattgcccagccttacttgaggaggaggacctctttaagattgtggatgaagtggagtgtgacctgtacacaatccagcaattccgcaaccggtgcacattggatgagagtctcgacggagccgaggagcccaacccccacaatatgcgagaaatagctcaaaaaatcaaagaattgcaccccaatcaggacatcaacatcaaaactgcggagtttggccagcagaaaatcgagcttgagaattga

SEQ ID NO: 2670 - DNA, 1125 bp, synthetic construct
  source 1..1125: mol_type = other DNA
atgaaagcccgtaaagccgtggaggaaattgatccatatgtgcccggccgaagcaaggaggagatagcgcaggagtttggggttaagaaggaggatataatcaagctcgggagcaacgagaatccatgggggccctcccctaaagccctggaagcaatcaaggaggagctgaataacatcaaccggtaccccgaaagtgacgtggagctgctgaaaaaggagttcgccagatacagtaatgtcaagcctgaaaacattattatcggcggcgacggcgcggacgagatcctcgacaccctcgccaagaccttcattgaaaaaggcgacgaatttatcgtgcccctgccgtcgtatatgtactatgagtttctattcaagccgtacggcgctatccctaactatgcgaagtggaatcttgaaactaacacactggatttagacagcgtgctggatgccatcaatgaaaaaacgaagatgctgttcctttgcagtccaaacaatcctactggcgccttgattacacaggacgagtttcgcccaatcctcgagaaaaccaacaagtcccgcggtggtgtctgtgatgcaatagtggtaatcgatgaggcatatgtggaatacgcagagggaaccaacgttaatctccttgaggagtatgacaacattttcatcatacggacaatgtctaaagtcatgggactggctggaatgaggattggctatggaatatcaagccccgaaatcattgaatacatgcataggataaagcccgtattcagcctgaccaagctctcctatgtggctgccttagctaccatccgggacacggagtacatcgaagagtcaatcaaaaagggtattgaaagcagagagtacctgtacaatgagattaacaagatgaagagcgtcaaagtcttcaagtcctactcaaacttcatgctaatcgacatccacaacacagggtacacggctgccgagctgacacgagagtttatgaaaagagggatgattgtgagggactgcacttcctttaagggaatcgatgaatactacttccgcattagcatctgcaccttggaggaagataaaaagttcattgaggccatgaaagacatcttgaatgaatga

SEQ ID NO: 2671 - DNA, 477 bp, synthetic construct
  source 1..477: mol_type = other DNA
atgaaactcaaggaacccgtgaaaatattcccgggtgcgcaggtaatcggcgacgtggagatcgatgaaaactgttccatttggcatggggccatcataaggggagacgtcgggcccatccggatcgggaagaactcaaatgtccaggacaactgcgtcctgcacactagtgccaatttgacccttaagattggggataacgtgacggtgggacacggagccgttgtgcatggctgcgaaatcggcgacaatgttctgataggcatgaatgcaacaattctgaacggtgccaagattggcaaaaactctatcgtgggggctggagcagtagtcagcgagaataaggagtttccagagaacagcctgattctaggcgtgcctggcaaactcatcaaggaaaccacacaagagcagcgcgacaacatcgcttggaatgccaagcactacgtggagctggcgaacgaatatgatgagtga

SEQ ID NO: 2672 - DNA, 1320 bp, synthetic construct
  source 1..1320: mol_type = other DNA
gtgaaagccctgatcctgtccgccggggaaggtactaggatgagacccctgaccctgacaaaacccaagacaatgctccctgtcgcgggcaagccgatcatccagtataacatcgaggccctgcgggagtgtggcgtgaaagacattcttctgatagtgggctacaaggaggaaatggtgaaaaattactttgatgacgggagcaaattcggcgtgaacatatcgtatgccacccagaccaagctggaaggcactgcaaatgcaattagctacgggaaagacttcatcgaagacagcctgatcacgcttaacggggacatcatcctcgatgaggagattctcagggaaatcatcgaggactacgaggagtctggcgccgatacattaatggtcctgaccgaggtggaagatccaagcgctttcggtgtggtggaattggatggcgagaaaatcacaaacattgtggagaagccgaagaaggaagaggctccaagtaatttggtcaacactgggatatatatctttaacaaggacatcttcgacaagatagacaagactaaagtctcccccaggggagaatatgagatcacggactccctatccctccagattgaagatggcaagtttgtaaaaggccacaagaccgagaaggaatggatggatattggaaagccctgggagctcattgagatcaacgagtccctcctcaacaatatcaaaggggaaatcaaagggaccgtcgaggaaggagccaccttgcatggcgaggtattccttgatgagggaagcctgatccgttctggagtgtacattaagggtcctgtgtacataggaaaggactgcgacataggccctaactcatatatccgcggaaactcatacttcggcgacgatgtccacattggaaacgcggtggagatcaaaaactcaattattatggaaaacaccaatgtaagccacctaagctacgttggggactctatcctgggcagtaactgcaatattgcagctggaaccaacattgcaaacttgcggtttgacaataagaccgtgaagttcaatatcaaaaataaaaaggtcgacacgggcagacgcaagctgggggccattgttggggatggtgtgaagactgggatcaatagtagtctttcccccggagtgacgattggtacacgagctacaatcggttctggcgtcctgttatacgacgatctgccatcggacatgcgggttctcctgaagcaggagcatataattcagaacaagaaggaaaatggccaaatccgcctggaggaagttgaggaggatatgaataaatga

SEQ ID NO: 2673 - DNA, 162 bp, synthetic construct
  source 1..162: mol_type = other DNA
atggtcaaatacgtatgcatgcactgcgagtatacgtgggacagcgagaccggcgatgaaacatacaaggtgccagcaggcccgatcgaagacttccctgatgactgggtgtgcccccagtgtgcggccgggatagaaggaattatcaccgaggaggactga

SEQ ID NO: 2674 - DNA, 1347 bp, synthetic construct
  source 1..1347: mol_type = other DNA
atggccaataaaaaattattcgggacttccggcatccgggggaagatcggaagcgaagtcaccagcgagttggcactgaagataggaaagtcattagccaagtacttgaacaacacggggaaggtcgttatcggctatgacacccgtacgaccaaccgcatgctggagcaggccatcactgcaggactcatcgagcacggcgtcgatgtaatcaagatcgctatggttcccacaccgctggtgggctacgccaccattaagctaggtgccgatgctggaatcatgcttaccgcctcccacaaccctagcgagtacaatggaatcaagctctggaatgcgaacgggatggcttatacacctgagcaggaggaaaagattgaggagatctactacaacgaggacttcggcaaggtggaatgggacaaaattggaataatcagccataatgatgagattaaaaagcaatatatagatgatcttctggacattgtagacatcaagccgggtctcaaagtggtcatcgactgtgcctgcggggcgggcagcgagctttccccagtgttgtttagaaaagcagggtgtgaggtgatcaccctgaactcccaggttgacggcttcttccccgggaggaacccagagccaaatatagcgaacctgtccagcctgatgaaagcggtggtggcaaccgaaagtgacctgggcattgctcacgacggtgatgcagatcggatgattaccgtcgatgagaacggtaaggtgtcagactttgacaagcttctcgctctggtgtccaagaaattcgggggaacagtggtgacaactgtagatgccggactgtgcatggatgaggctatggaagaagtaggcggcaaggtcctccgaacaaaggttggcgacgtgaacgtggctgaagtgatgatagaagaaaatgcaagcttcggcggagagccctcggggacgtggctgcaccaggacttctgcatgtgccccgacggcatcctcagtgggctgagaatggccgagatcgtgtcgaaggagggaaagctaagtgagctgctcgcccagttcacggactatcctcatatgagggaaaaggtcatatgcagcaaagagcagaagattgccgtgatggagaacatggaagagctcctgaaaaacgcctttgatgatattaaggaaatcaatacaatcgatggcatccgcctgagctttgaagacggcagttgggtgttggttaggccctcaggtaccgaagactacgtccgcgtgactctggaagccaaaacccaagagaaagccgaatttattcgggacacttgtgtcaaaatcattaaagagaatatttga

SEQ ID NO: 2675 - DNA, 1239 bp, synthetic construct
  source 1..1239: mol_type = other DNA
atgaagggcatgattttggttatggacgggttgggtggccggcccctgaaggagctgaacaatcaaactacactccaggctgccaagacccccaatatggataaaatggctgaaagggggataaccggaataatggacagcatcgctccggggatcataccaggcagtgacacagcccacctgtccctgttggggtatgacccctacgaggtctacactgggcgcggcccttttgaagccagtggagtcggagtggatgtgatacccggtgacattgccttcagatgtaatttctccacttcagatgaggatggaataatcaccgacaggcgcgcaggccggatcagagaaggcaccaaggacattgttgacgtcctcaacacaatggtcattgagggctacgaagacattgagatcattttcaaggaatccacggggcacagggcggtgctagtcctgcgcggggagggactgagcggtgaggtgagcgatgcagaccccaaggtggaaggaaacaagcccaaagaggtaaagggcctggacggaagcccagaggccgataagactgcagacatcctgaacaaattagtggtcaaatcgtacgaaatggttaaagatcatcccgtaaacctgaaacggatcgaagagggcctgccacctgccaatatcatcatcccgcgtggtgcaggagaagtgcctgaggtggagccaatcaacgagaagtacgaggtcaatagcgcatgcattgccgagacagggcttatcatgggcatcggccgctttgctgggatggacatcattgaaatggaagatgttaccggcggggtggacaccaacctctacaatatccgggatacgatcgtggatcaggtgaacaacagtgagcatgacttcttcctggtcaacattgacggcgcggacgaggccggtcacgatggaaatgctaaagacaagcttgagtttatcgaaaaggtggatgagattgtaatgagcgagcttctgaagctcgaggacatttatatcttcctcaccgcggatcattccacaccgattagcgttaaaaaccactcaggagacccagtgcctataatcatcaacggccctgaggtgcgagtggacgatgtcaaggaatacaatgaatatgccgtggctaaaggcggaatgtgcagaatccgaggtgcagatgtgatgaacattctaacggacctcatgggctatgcccacaagtttggggcctga

SEQ ID NO: 2676 - DNA, 699 bp, synthetic construct
  source 1..699: mol_type = other DNA
atgaaggaagccctcatgataaattggggctacgtggtgctgctgtttattctaggggccattagctataaacgaaaaagcctcgacatgctaggtgccctcattatgattttcatggggataaccatcatcttctccgcaggagtgtcatggttcatcctgatcgtgctgttcttcattttaagcatcatggccacgcgcttctccaagccatacaaaaaggaaataggccagtacgaaaagacccggactgcaaagaatgttatctctaacgggttggtggccttcctgatggctgccttcggcagctactatctgccgttggctggcggctttatcggagccgtagctacggctacagccgacactctcgccagtgagatcggtgtccttcaggagcctcggctgattaccagctttaagaaagtgcccgcgggcacagatggggccataagcattctgggcacatccgcagcgattgtgggggcaggaatcatcggaatcgcttcatttctgcttggcatcatgcccgatccactgatagccatcaagatcagtgtcatctcggggaccgtcggctgctttattgacagtatcctgggagcagtcctcgagagaaggaactttattaacaatgagcacgttaacttgcttgctaccatctccggagcgataatcggtatcatttctgtaatgtga

SEQ ID NO: 2677 - DNA, 579 bp, synthetic construct
  source 1..579: mol_type = other DNA
atggccaagaaacagaggcggcgcgtgcgggacacttggaaagagaagagctggtacacaatcaaaactcccatagcattcggggaaaaggaaatcggtacaacccctgccagggacccagagcttgtgtacggcaggactgtagaggtaacaatgcgagaactgacaggagacttctccaagcaatacatcaaactgcagttcgaagtcgacaacgtcgccggagacattgcaagtacgaaatttaccggccacaagaccactacggattatgtgcgtagcatgatccgcagggggaccagtagaatcgacgcccccgttattgtgaccacccaggatgaacggaagctcaaactccatgtcctagcggtcaccacgcgccgggcgaagtcatcccagcagaagtacatgcgagagaccattacagaactggtgagcaatgtcgctagcgagaagacatttgatgagctggtggagatatcagtgaacggcagactcgcctccgaggtttatcacaaggctaaaaaaatctatccgttgaagagagtggagatcattaagtcgaaggtgctggattga

SEQ ID NO: 2678 - DNA, 804 bp, synthetic construct
  source 1..804: mol_type = other DNA
atgtgcgagatatttggattcagctcctctagggaagaggaactgaacgattacttaaagacctttttcagtcactgtgaggagcacccccacggctggggactcgctattcttgactcggacaaataccaaatacggaaagaaccggtcaaggcccgaagtagcgtcatgcttggaaacatcctgttaaacccaatcgtctgtaaaaacatgctggcacatatccgcttggcgacgatcggcaacctggatttctataactgccatccttttgtgaagaaagacaatagcgacaggagatggactctcatccacaatgggaccatcttcgactgccaggatctgtgtcggtacagtacagaagaggagggggagaccgacagcgaacgcatattgctttacatcgttgatactatcaataactatgagtctgtaaagggcgagcccctcagcctgaaggaacgttttgatattgtgtccagcctgattaaaggcatgtcctgcaccaacaagctgaacctcatggtgtcagatggtgagcagatctacgtgcacaccaatctaaaggattccctgcactatctaaaaaaggaccattccattttcgtgtcaacacagcccctcgacgacgacgactggaaggaggttccactgaataagactttttcaatcattaacggggacgtgctgtttgaaagcgattcccatagtaatgaatatttcgaaacagaggaacagctcagattcattgagaaattcctggagagcttgaagacggactcggatgaggagtacgcctggtga

SEQ ID NO: 2679 - DNA, 726 bp, synthetic construct
  source 1..726: mol_type = other DNA
atgtgtaaagatggtatcagcgatgaggcactccgcgaaaaactgtaccaggccttcctggagcctaccaaaaaggacaaaaaggaatacattggcatcgaaatcgagatgccaattatcaatctcaacaaggaagcggtggacttcaaagtggttcacaaggtcaccagggatttctcggaggagtttgacaactttgagcttgaaggaatagattacgacgggaacatctatgccctccgggacaaggccagtgatgacattatttgctatggctgctcctataacaatatagaatttgccatgggcaaggaggagaatctgttttctgtgaacgagcggttccttaaatattactcctacttcaaagataagtttgaagagcacggtcatacattgactggaatgggaatcaacccatacagaaagtacaataatgaggtgccgattcccaatgaacgatatctgatgctgttccatcacctaaagagctccagcgactatgtcgggatggagtttcaccagtaccctgcttacggcatgttctcaagcgcgtctcaggtgcaactcgacgttccctatgacgaattggtggacaacatcaacgtcttctcaaaattagagccaatcaaggcactgctgttcagtaactccgtgttttggaagaggatgaagacgatcttcgctctggagataagctacgggaacagtgtacccatggcctga

SEQ ID NO: 2680 - DNA, 654 bp, synthetic construct
  source 1..654: mol_type = other DNA
atgtacaaccaggagtttgaggacatagacgagctgcttagttatttggagtccctgaatatctactgcgtaatgagagacgggttatacatcaactttccttcaatggggctgaaggagttcttcagcaaggacaagataacaggagaatactattgcaagggagaatacaagaaacgggaatttgaaccctcgctcgatgatatccaatacctgcgagcttttaagttcatcaatctcacgtttcgcggcacaattgaatacaggagcgtgtgtactcagccgatcaaggattccatgtcagtggcggccttccatgtcggtttaaagcacaaaaccgatgagctgaacgagctattcctgaaatccggcatttataagaacgactgcgacgccaacgagctgcggaaactattgatcagacgtgaaatcccagatttcgttgatatggagaagatttatggcctggccctcaaggtgctcgacctggcaaaagagggattgcttgaacgggacctcggcgaggaagtgttcctggacagcctttacgacaacctgaacaataggaccaatcccgggaaacgcctcctggacagtctcgatggtggcaaaagcctggaggagatcattaaggagtatggggaagtcgagtga

SEQ ID NO: 2681 - DNA, 1425 bp, synthetic construct
  source 1..1425: mol_type = other DNA
atggacaaaattttcaacctgtcgcagatcaaaaacaatttgagctccgagcagctaaaagaaggaagctttgggattgaatgggaatgcctgagggtcaaggaaaatggagagctctcactgagtccgcaccccgagatcttcggagataagctgacaaacccttatattacaactgacttttccgagtcccaaatagagataatcacgccagccttcgataccattgatgaggctttctccttcttctccttcatgtctgacctggtgaacagttccctatccgacgatgagtacctgtggttccagtcattgccctgcatacttcctgagtctgataaaatcccgatagccaaatataaaggcagaggcctcggggaagaaagcatggagtaccgaaagggtctggctaaaaagtatggccttaaaaaacagctcatcagcgggattcactttaactttagctttaaggaggagctcatcgaaagcttctacgacggtgtcatcggagacaaggagaagatctcatataaggaatttaaggacagtctgtacctgaagattagtcggaattacattcgttatgtatggctcatcatctatctcactggctgttcggtggccgtgcataatagctttactctggattgccagaaattgatgaatcataaggacaaccaggggagcgtctacagtgaccgcgggcctagctttagaaattcctcctgcggctacaagaatttagagcacctgtatccaagttacgccagcgtggaagagttcaccagggacattcagtcatttattgataacggacacttatcggaggcaaaggagctgtacacgcagatccggctgaagccccgcaacccctcagaccttctcggttccctgaacaacaacggcatacagtacctggagatcaggacactggacatcaacccattctacaaatgtggccttattaagaatgatatgaacttccttcacatgttcatgatctacctcctcattaaggaagagtctgactatgaaagctggcaggaggatgcgctttacaacgaggagaagaccgcagaatgtggatacgaagatggggtgaagctgatcaaggacggcaaagaggtcgtattaaaggattgggccctgtctatcttggacgagatggagatgatggtggagtccttgaacctcgaaaataagtctgttatagagctcatgaagctgaagattatcaactcagacctgacctacggtaggcggctggcgcggctggtggaaaaggatgggtatatcgaaagccaactgaagctcagcagaaataacaaactacgcagtaaatacctggttgaagagaccaatttgctaaatgacgagcgattcaaagaatatgtgcccatcgctcttcaaggcctgagcaaatga

SEQ ID NO: 2682 - DNA, 339 bp, synthetic construct
  source 1..339: mol_type = other DNA
atgcggatagcagtggccacatccaacggcgaggacgtaaatctacacttcggtaaagccagttcactgtatatctacgagtacgatgaagagaacgatgaaacgagcttcattgaacacaggactgtcgagatcgaaaaggacagcaaacaccagaaccccaagatcattaaggcactggcggactgcgaggtcgccatctgtgaggaatttgggttcaaggcctctatctttgctgaggatgctggcctgaaacttgtgaaggacgagggaaccgtggaagaggtgctcaagaaatacaccgaccatgtgaagttcctcaagaatgttaaaatttga

SEQ ID NO: 2683 - DNA, 1572 bp, synthetic construct
  source 1..1572: mol_type = other DNA
atgaaaatgatcaagcagacattaggcctgaatgtggaggataaaaaatactacctgaagctcattatagaggctgtgctgatcggtctgttcagcggattcattgtgtccctgtatcgacttggcttagaccactccgaaagcatcctgtcctacatcctgaagtatatccagggagacttgaccctaatagttctctggtttgtcatactcgcgatcatggggctgatcaccgcccttctgatgaagtgggaccccgactctctaggtagcggaatccctcaggtcatgggagaggtgaaaggttactttgatgtgacatggtggaaaacgctcatcgcaaagttcattggaggaacccttacagccctgggaggcctgtcccttggtcgggaggggccctctgtccaactgggcgccatggctgctaagggggtatcaaaatacctcccaaacagtaagactgacgaaaagcggctgctcgtttgcggcagcggggccgggctggctgccaccttcagcgccccgctggcaggattcatcttcacactggaggaaatcaacaaggggtttgaccgcagtatcgtccttgtgggtctggtgtcagcagttgtggcggtgcttgtctccaatgtctttttcgggcagagcccaatctttccctttacctccctgaatctgcccttggaatatttttggctattaatcgtcctcgggatagccattggcatcttagggtacatctacaacgtagggatgatcaaggccgctgaaatgtgggataaactaagtttcctccctctcgagataaaattcatcattgttttcctggtgacgggcattgtaggcctcttcttgcctgaagtgctgggcggcggatactctatgatgcatctgatcgagctcagcttgcctccactgtctgtcctcattgtcctgttgattggcaaatacctgctgctgatcttctgcttcggctcaagcgcccctgggggcatcttctacccggtgctggtaatcggagcgtatatcggtgccattttcagtgccatcgtgattccaatatttggtctgaaccccctgatcgcttacaagttcattatgattagtatggctgcaatgtttgcaagcagcgtgaggactcccataaccgcagttgtccttattgccgaaatgacaggcgttacaaattccattgtggccatgatagtggtggtcatcctggcgtatatcattccaaccattctagacaacgatccgatttatgagaccttgcttatgagactcctcaagaagaataagggcatcgactttgataagaccaaaagcgtgttggaagagtatgtggttcccatggactgtgcattgatcggcactaaaatctgggagctgcctattcccaagtcggctatggtggtgtcagtggtaaggtccggaaacactctcatccccgatgagaacctcgagctgaagtatgccgatgagctttttatcattatgaatcagaacacgtacccagaggacaataacaagatagagtcgttgatttacaacaactggaaagaagaatga

SEQ ID NO: 2684 - DNA, 1308 bp, synthetic construct
  source 1..1308: mol_type = other DNA
atgaaaataggcattatcggcggaactcggggtttagggagaaccttagcctggtacctgaaggattttgacttcgacgtgacagtgacaggccgggattccatagtgggagctcaagttagcgaagagattggggtgaaatactcaaacaacaacaagaagatagtgcaggacagcgacatagtaatcatctccgtccctatctccagcaccgaatcggtgattgaggaactggcaccattcatgaaagacgggagcgtgatgctagatgtcacctccgtgaaggaagggccaagcaaaaagatgaaagaatgcttgagcgaaggagtggagttcatcccaacccaccccgtcttcggtccccggacaaccgacctgaagggccagatcattgtcctcacgccgattaaaaagggcaaatggtatccccgcatctacaagttcctagaggataagggaatgaggatcatcgaaacgactgccgagcaccacgatgacatgatggggatcgtgcaggtcctgactcacttctcctacatcagcacagcctcagcaatcgaaaggctgcaggtagacctgaaggacacccaaaactatgagagtccgatctacaatctcatgatcgatacaattgcaaggatcgtttcccagaacccttaccttacctactcgatacagcatgagaacaaaaagggcgagaaaatccgccaggccctgtttgattcaatgagtgaactgaaggacgccctgagcaaagaggacgaagaggaatttgtggagattgctctgaaggccaccaagcatatgggagacattcagggagctttgggtcgaagtgacaaggcgatcaatgccctcactcaagaatacaacatcttgctccagtccattggtgaggaggtggggcttaagcacatctattctgatacaatccacgttggaaagatcaaaaaaatcgatttggatttcctgtatcttgaggatgagaacgggaaagtcaagaagctcaagatgtctaatgtagcgattctgagtgagaaggagctctttgagtggaaaataaacaatcagaagacctactcaagagacatcagcgccatgtttacgaaaaatagcaatccccatatcattaaagacacccttaagctgatggaagacattattgacgtggagattattgatatttatgatggcgagcctgtcaaggaggaccagatcagctatacttttaagatagaagctctcagtatggaggcaattaagaactgtcgcgacatcctgataggcttcggcggcatcagccgttga

SEQ ID NO: 2685 - DNA, 1062 bp, synthetic construct
  source 1..1062: mol_type = other DNA
atgaaagtgacttccgaagacgagagcaaaggcactgtggagctgtttcctgagacgctggacgacttatggcacttgtcccatattgtagctgaaggggacatagtctactccaagactacccggaggatacaggatacaagcggcgatctgatcaggggagaccgaggggtgaaaaagacattcaccctcggcattagtgtaaaaaacgtcagttttcaccttttcacgggcaaactgagaataatcggctcaattgtgagcggtccggaggagttcgttcccctgggatcacaccacaccatcgaggccaagctgcacacgcccatcacaatcaaaaaggaacgctggtccagctacgccttaaaacggattgagcgagctatcgaagcatcgaaaaaactatccgccatcattgtggttatcgaggatgatgtggccgattttggcctcatgagacagttcggaatcgaatattatgggccaatcatgggcaacgtcagcggaaagcgcataatcgacaagaataggaagaaaaacatcgaaaagttctacgaaaagatcgtggactacattaacaaatttgacaacattcaaaccattgtccttgcagggcccggattcttcaagaatgacttctttaagtacctcgagctgaagcacaaggatctggctaaaaacaccatcatagaatcgacagggtcaggtggccgtgtgggcatcaatgaggtcctgaagaagggcaccgtggaaaagctggctaccgagaatcgcgtcgcttatgaaatatccgccgtagatgccattctgaaggagatcgcgatgaatagtccactcgtggtgtatggcaagaagcaggtccatgaagccatcaatatgggagcaattgagaagctacttgttctggacaacctcgtgagaagtgaaaacatggaggactctatggatatggtggagaacatgtctggggaggttctggtgatcagcagccagcatgaggggggtaaacagctcgaggccttgggtggaatggcagcgaacttgcggtacgccatttcttga

SEQ ID NO: 2686 - DNA, 957 bp, synthetic construct
  source 1..957: mol_type = other DNA
atgtttttcgaactgttaatcgtgttcctgctgtgcttctttggcaccgggatcgtatcaatcgtgttccgtttcttgggaaaacgaggatacatgggtaacctatatgaaacagtcaggggcgggacgccccgcgcggtagggatcgttccttttattcttatctccctcttcatgcccagcggatttaacaacctggtgttggtgatgggtctctgtgccctgatagatgacatcatcggccgcaagacaatcgctaacctccccattgagatcggtcagctagcaagaggaataggcatgctgtgcgtaataggccttggatatcccatcatgggggtcagctccattttggttgtcctgctgatccagcccatgaatatcgccgatatgcagccgggcactgctgcagctacaaccattataatgagtttcttcactctgctggcggttgtgatcatgcaagtcgggcctgtccttgagattcatccatactactacccattgctcgtgctggtgacatgcctagcctattgcccgctcgacttcgccggaaagatcatgatgggggaggtggggaaccacacctttgcaatctctctgggcatctgtttctacgctctcggcggcttcattggtacgctgattctcttcattgtgaccaccggcctgattgcctacctgcggcggtataatctctcgaggttccttattaataaactgcacattccaaaccctactttcggagacttatttatggatgtcctgacgggcggcggtctcggggacttatttagaaagatcctcctgaagagcaaccagtatgacgtggataatgagatattgatcgcccttggatttcgccggctgctgtacaatccatactcccctaacctggaaaaagtggtgcagaaggacagtagaaccaaacgggccgaccttcgaaggttttactga

SEQ ID NO: 2687 - DNA, 546 bp, synthetic construct
  source 1..546: mol_type = other DNA
atggcggatgtttttgacgtcattaagaacagacggggcgtccgagcttacaaagacgagcaaattgacgacgaggatatcgagaagatcttgcaggccgcaatcatggccccgacggcaaggggagaggctccatggcattttaccgtagttcagaacaaggagctactggatgagatcaatgactctgtccacagcatactcacaaattcgggtgatgagcttctcgaagcaatcgctgcctccggccggaatgtaatgcacaacgcccccacagtggtgttcgtgagtgccaaatcagatgctactaatatgcaggccgactgtagcgcagccatcgagaatatgctcctggccgcggaaggattagacattgggtcctgctggctggggcttgtcgcgctgttcttcagcgtggaggaaaacttgaaaaagctccacatacctgaagggtacacccccctgtacggcgtgtccctgggctataaggtggaggaaaacgaacccaacccacgcagtgacgtgctggtgaactggctgaaatga

SEQ ID NO: 2688 - DNA, 1374 bp, synthetic construct
  source 1..1374: mol_type = other DNA
atgaaggagactaaaaaaatcaagaacattgtcattggcgccggccctgcaggtagactagcttcatttgaactggggaaactgggtgaggaaaccctgctcattgagaagaaatacattgcggggacttgccttaacgaaggctgcatggttgtctgtgccttgactgacatcagccgcttctggaagaactgccagaggttttccgagatgggactggtcaatgggctgctggagttgaactacaattccatatgtgagaacattaagaagacccagaagttcctgcgtaaactgaaccaggaagagaatgaaagcgtgagcaacaaggtgctctatggggaagctagtgtggaagtggacgaagacgagaagatcatcgtgaccgtgaaattggacaacgacaacgagcttcagaaggaggagtacaaggggaaggagacactgtcctttgaggccgagaatctcctcattgccaccggcgccaggccattcatcccaaacatccctggagccgaatatgccctgacaagtagtgatgtaattaacctcgacgaagtcccgccgaaactgaacatagtgggtggaggaataatcgcaacggagctgtcgaacatcttttccagcttcggaagcgaggtaaaaatcatcgcccgcagcgagattctaaaagacctcgagcctgagatcaagagttatgtagtcaaaaagatcatcaatgatgttgagatccacgaaaacaccaatgtcctcaagattaacgaggactcaatcgaaacagataatggtgagtttgagggcaagacgctcatagccaccggacgggtgcccaactccgaaatactaaaaggccttgtggacctgaatgaagacggttcaatcaaggtgaacgaatttttccagacaagcaaaccccatatctacgcggccggggatgtcaccggcgggataacccttaccccctatgctcgaaaggagggcattagcgcagcgcggaatatggctggatacttgaataaatttgaagagatgattgttccccaatctctgacgctcgatctggacgtgagcttcactcaaaagacggacaaagaggcagacccagataagattgaggatgtgatcatccccggcctgggcgggcctcacgccttctggcggatcttaaggggagaaacaggccttacaaagatctcactgaataccgaaaccgatgagatcgttagagccagccagatatccccatccagcattgacgatacagcttacctggcattcctcatgaatttgggcattaaaaaggaagcattcgatgacttcttagaggtgcacccctcgactgatgcttactataagatcctgaagatcatgtga

SEQ ID NO: 2689 - DNA, 267 bp, synthetic construct
  source 1..267: mol_type = other DNA
atgtgtatcgcggccccagcgaaaatcgtggagatcgacaccgaaagcaacatctgcgccgctgacttcgggggtgtgaggcagaatgcaaaattggatctcctccccgatgccgaaattggcgattatgtcctgattcacgcaggatacgccatagaaaagctatccgaggaggccgctaaggagagcctggagagttggaacgaacttatggaaatgctggacgaggaggaccgggagcgcgagctgcagatgaacggcctgtga

SEQ ID NO: 2690 - DNA, 495 bp, synthetic construct
  source 1..495: mol_type = other DNA
atgtgtgaggaaatcaagctcctgaaggatctgggctgcccggaatgggtgattgaacactccaagggcgtttcacggaaagccgtgcaaatcgcgagcaacttcgacgacgtcgacatcgagttagtaagagttggtgggctgttgcacgacatcggtcgatccaaaaccaacagcattgagcacgcagtcattggagcaaaaatagtgtctgacctgggctatagccaggagatagtcaacatcgtggaaaggcatattggaacggggctaacagaagaggatgctaaggagttgggactccctatcaaggattacactccccagacacttgaagagaagatcgtgtcgcatgccgataatctgttcaatggggccgacgaggtggatgtggacttcaccatcaacaagtggaagcgcaagctgggcgaaaatcacccaagtatcgagaaaataaaagagattcacgaagagctcgtcggccggtttgagtga

SEQ ID NO: 2691 - DNA, 909 bp, synthetic construct
  source 1..909: mol_type = other DNA
atgaaagttatctgcacagtggacgagtccctctacaggcccgaagtcgttagatggcgcgaaagaatggccatgatggagcctttaggggaagtggtggtagcgctgccctgcagtatgaagaagccatattccaattcacagtcccatcagaaattcaaaagagcgaccaaaggctatcaagaagtgatagtgacctcgccattcgggatttgtccgcgtgaaatggaaaacacattccccatccagtcatacgatgtgacagtctctggcgattggagctttgacgaggtgagaatcagcggtgagctcctgcgggactacgtaggcgacaagcctgtcattgccaacgtgcatggcggctatgaagaggtgtgccgagaatacctggacaactgcgtgtatgtctgtcaggatggacggcccacctctcctgattcaatctaccacctgcgagaggagctaaaaaagtattctaaggtcaaacacagggataaggtgctaaacgagttgcggtccattgcaaaataccagtttgggccggaggcctataagataataagcgacgatgtggttgctaaggggcgataccaccggactatctacagcgagggcaagcaactggcccttctcaaccgcgacattgggctgtacactctcaatttggaaggtggccgccgcctggcagagcttgacatccacgtggttgagatcgattttgacctgaagaccaatagtgtcttcgcccccggaatttccaacgctgatctcagcatcgtgccaaaggacgaggttgtagtcgtgagggacggtgaagtggtcggggtgggaaaggctgtcctgacgggaaaagagatgattgagagcacgagtggaatcggcgtaaagatccggcacaggaagaaatga

SEQ ID NO: 2692 - DNA, 288 bp, synthetic construct
  source 1..288: mol_type = other DNA
atgtccgaggaactggcgctggctgtgaaagacgcagtgtctgtagttaacgacccgcacatgggcgtcagcattgtcgacatgggtattgtgcagtccatcgccatcgaaggatcaacagccgagctcgtgatcaagccaaccaaccccggctgcatgagtgtgacgcgcattgcagcgcaggccaaagccgaagctctaaaggttgaggggatcgataaggtgaagataataatcgaggggcatgtcatggccgacagcctgaatgagatgctcaaccgggattga

SEQ ID NO: 2693 - DNA, 504 bp, synthetic construct
  source 1..504: mol_type = other DNA
atgtgggaatcccttaattcgaagttcagcaaatatccggcacgaatgactgtggctcagaagatgttcgagctcgggctcaggatcggtgaggacaataagatctactgcggaaacctcaagatcagtgactctgctttggccgcagccgccaacgtggatcgcagagtgatcaaaagtaccgtgaatgtaatcgtgcaggacgaggatctttttgaggtcttctccaacatcgtccccgcaggcaccttgctgaaaaacattgccaagaacctgggactaggggtcgttgagatagaagcgggagaagaaagcgaaggtatcctggccgccgtcgctacaacaatgagcgagcacgatatagacattcggcaagcgtacgccggcgacactaaattcgagggcaaccccgtgctgacgattataaccgaaaaccctattccaggggagctgctgaatgagtttattaagatcaatggcgtactgaaggtgtcagttttatga

SEQ ID NO: 2694 - DNA, 1074 bp, synthetic construct
  source 1..1074: mol_type = other DNA
atgctctcagacccaataatccaaaagaacttcccgggaacatttgaatttgaggaggccatggtgatcatcgattgcctcaaggaatggcccaaaagccgcctgtgtgacgataaagcgattgcacggaaggccgctaagaccatcgacatcgacatcaagacagtgagggacgtgcttgctctgctagaggtcaacaactgcgcctacaatataaagatcaatgagctatgcattaaattgattaagcattaccgatccggaaaactgacgcacaagaagattgccaaaaagctgaagatagatgacaatattgttgaccagttcattgaagagaatgaatcactcctggaggaaactaaaaagacctattcccaggagactttaatggctctgaacgatagtttcaatgacttcatcaagggccgcaaaccccttaaaataaataaggatgaagaggaagacaacccagatgaggattccaaagacgaaaaggctaccgatgaagagttcaaatctggggaggtagagattaaagaggaagtggaagaaaccaaagaggaggaggaggtagaggaagagaaacctgctaaaaagagaacagtgaaccagaagttctggtatctcacctttgacgaggtcatcgattgcctgaagaacggctatgccacagacgaagaaataagcgagaaaatcggttgcaagctgaacatcgtccggaaaatcctgtacagcttatatgacatgcacctggcaagctacaagagggataaggataaggaaacccagtggtatacttacgattggaagttcaacgaaagcgagtacaagaaactggagttgaatatcgccagtgccgagcttaagaagctcaacgaggatctggaatacgaggcgaacaacatgttcttcatctgtcctgtgggccactacagactcgactttgaggacgcctccacggtcgagtttatctgtcccgaatgtggggcagagctggagtttgacgacaattcggaggttgtggaagccttgaaggaccagatcgcatacattgaggaaatgatttctgagtga

SEQ ID NO: 2695 - DNA, 903 bp, synthetic construct
  source 1..903: mol_type = other DNA
atgaccgacaaccccaactataaagaggccgaaactgagcaggggcaggtttacaagtacgtagagatcaggggatatcaggtgatccctatcgagacacattacatcaagcctaatgaaagcattgactttatgattgatgacatctccaaactgtgtaagtccggcgactacctagtaattgccgaaactcccatctcagtctcgcaaggcagattggtggatgaagcagactatacgccatccctgaaggccaagttcctagccacatattggagcaaatacttctggggatacgtcctgggccctattctcggcataaaggagagaaccattaaaaacctgcggaaactgcctgaggagagcaaacgacacaaggaggtggtcctccagctgtatggttggaagcacgccttaaagccagcttcggaggcgggaatcgacctgagcaacgctccggggacttgcgtgtccctccttcccgagaacccagaaaaggtggccaaggaaatcagcgaaagcctgatggagaagacaaaccaggatgtcaccacgctcatcatcgacacagatgccacctatcgccgcaagaacaaatacttcaccggtcttcccatcgcaatagatggcatcgaagcggataagggggtttttggctacgcgctggggcaattgagcgagaatatgggcagtaccccacttgggtgcagtagggaaatctctgtggaggagggaataaaaatagccaatattgctgaagactaccagaaaagtctgtctaccgcaatggagaccatctacagcgcaaaggacgtgctcaattcagacactcccgaggtgacggtcgagtccttggattcaattattcacacaccggctgtgctggttcggaaaattgaatga

SEQ ID NO: 2696 - DNA, 570 bp, synthetic construct
  source 1..570: mol_type = other DNA
atggagaaatcaattacctactttgaaaaccccggggctgagaatactgacgcagtgatcgaattggtgcgggagagactcgagggctcaaacatcaaatatgttgccgtggcaagctccacgggggccagtgccctcaagctgaacgaagctctgaaggacctcgatgtgacaatagtgaactgctcccaccacgttggattcagggaaccaaataaggcacagatcagtgctgaaacgaagactgaacttgaggagaagggcatagtcacattcatcgggagccacgccctaagcggtgtgggcaaaagcatttccaaaaagtttgggggagtcaccccagtggagatcatcgctgccgtctaccgcaccttcagccagggaatcaaggtgtgtgccgaaatttcgatcatgttagcagatgccggcctggtacctgtaggggaggagattatcgctattggtggaacaggctctggcctggacaccgcggcggtgctgaccccggccaacatgactaatgtcttcgacatgaaatttcatgagattatagccatgccccgaccctga

SEQ ID NO: 2697 - DNA, 1170 bp, synthetic construct
  source 1..1170: mol_type = other DNA
gtgaagtttatagacgatgcaatcaaggaaagcgaggagtccattgaaaagactgcctctcccaagaaatcagatgacgagctggataaggagctgctcgacatcatcagtcgcagtcgagccaagattatcgtggtcggtgcgggtggcgccggcaataacacaatttcaaggttgacagaaataggtattgagggcgccgagacaattactgtaaacaccgacgcacaagacttgttctactcccaggccgataaaaaactgcttcttgggagacagacctgtggcggtctcggcgccggcggagagcctgccatcggcgaggagtccgcggaagagagtgaggaagacattagggcagaattggaaggggctgacatggtcttcgtgacctgcgggctcggtggcggcaccgggacgggcagcgcgcctgtgattgctaaggtggctaagaaggccggggccctcacggttgctgtggccacaatgccattctctgcagaaggggttaaacggcgggagaacgcagaaatcgggttagagaaactccaagaaaatgcagatacggtaatcgtcatccctaatgataaactgctggaagtggctccaaacctgccgctaaacaaggcattcatggcttccgatgagatcttaggacgggctgtgaaaggaattaccgagctcataaccaagccaggcctcatctcgctggacttcgccgatatcagttccatcatgaagggctctgggatggctatgataggtatgggagagtcggagtccggggacagagcaatcgagtctgtccacgaagccctgagcagtcccctgctggacattgacatctccaacgccaagggagcccttataaacatttcaggaagctctgacttgaccctgcaggaggccgagaaaatcgtgcagatcgtggccgaccgtctggacccggaggcgaacattatttggggagcccagatcgatgaggaactgcagaacatgatacgcacaaccatcgtggttagcggagtcaaaagccagtataattccagctcaagcggcagcgatgatggcgaatttactgacatcgatgattttactgatgcggacattcttggggaggacacagctcccaatgaccccctggacgaatttctagacggaatcttctga

SEQ ID NO: 2698 - DNA, 180 bp, synthetic construct
  source 1..180: mol_type = other DNA
atgaactaccaggaggaactcagcgacttctggaaacaatgcaagcgggtcctaaaagtggccaagaagcccgaccgcgaggaattttttgatttcagcaaggtgaccgcgatcgggatagcaattatcggcgtcattggtttcgtaatcgtgctcttcggccagctgctgggactgtga

SEQ ID NO: 2699 - DNA, 492 bp, synthetic construct
  source 1..492: mol_type = other DNA
atggaagacgataagaatagcatctttgctcttaaaacgtccgcagggcaggaaaggactgtagccagactgctgggtatgaaagcggataagcctggcgtcgacattaaggccatcgtggtgcctgagagcctcaaggggtacatcattgtcgaaagcgccacaaacctagatatgaagaacccagatatgaaggtgcgccacctgcgcggcatcgtaggggcaaaacgagacggaaccatcgacccatccagtcagataaccctggaagaggtcaagaagttcttaaagccacagcccatcatcagctcaatacagaagggcagtattgtggagctggtgtccggccccttcaaaggagagaaatcaaaggtggtccggctcgacgaatcgcgggaggaggtggttctcgagttgattgaggccgcggtgccgatacccgtgacagttaaagctgaccaaatcaggatcattaaaaaggaggccgactga

SEQ ID NO: 2700 - DNA, 483 bp, synthetic construct
  source 1..483: mol_type = other DNA
atggccaaggataccgtggaagtgctgctcgagggcggaacagccacgcccggacccccactgggccctgccattggcccattcggggtcaacatgatgcaggtggtagaggaaattaatgaaaaatccgctgacttcgcaggtatgaaagtccccgtcataatcactatcgactcaaacacaaaggagtttgagatcgagattggaacgcctccaacaactgccctaattatggacgagctgggcatcgagaagggcgctcacgagcccggtgcggaagttgcggccgatctctctgtggaacaggccttgaaaatcgccaggatgaagttcgactccctgcttagcaacgattataagagcgcaaccaaggagatcatggggacctgcgtgagtatggggataaccgtggacgggaaggacccgcgggatgctcaaaaagcagtggacgctggagaatacgacgatatcctggttgagtga

SEQ ID NO: 2701 - DNA, 639 bp, synthetic construct
  source 1..639: mol_type = other DNA
atgacacaagagatcatagatgcggtgaaggaggcaaaagaacaagccaagcccagaaacttcacgcaatccatcgatgtgatcatcaacattaaggatctagacgtcagaaaaccagaaaaccgattcagcgaagaagtcgccctgccccacggccggggaaaaccggtcaagatcggtgtgatcgccgacggggagctcgccctgggagcaaagaatgctggcgtcgacgttgtgatttccaaagaggatctgcaggagtttgggaaggacatcaaggcagccaagaaagtggtaaactcggtggatagttttatagcccaggccgacatgatgccccttgtcgggcgcttcctgggccggatcttggggcctcgtaacaagatgcctaagcctgtgccagctagcgccaaaatcgagcccttactcgagcggcagcaggcgaccattaaagtcggcgtaaaacagcagccatctattcagatcctggtgggaactcaggacatggatgacgagaagttggctgaaaatattgaagctgttctggcagttctcgaccgcaatctggagaagggcaggaaccagataaagagcatgtacatcaaagcgaccatgggttcagtggtgagggtgatttga

SEQ ID NO: 2702 - DNA, 1008 bp, synthetic construct
  source 1..1008: mol_type = other DNA
atggcacacgtggctgaatggaaaaaagaggaagtgaacgaactgaagggcatcatcgatagcgctgaggtcgtgggtattgtgaacctactgaacatacccgctcgacagcttcaggagatgcggaaaaccctgtccgggaaggccaccatcagactctcaaagattaacctcatgaagctggctctggaagattgtgtaaatgagaaagccaacattactgagctaagcgattatatggaggggcaacccgcactcgtgtgcaccgacatgaatcccttccgcttgtacaaaatacttgaggactcaaagacaagcgcgcctgcaaaagccggcgctatcgctcctgaggatattgtggtacccgccggagatactggcttcccaccaggaccgtttctcggggacctgcagcagataggagtcccggcaaaaatcgacaagggaaagattgtggttcaaaaagacacgacagttgtcgaggcgggagagcccgtcccaaaggccgtcgccgctgcgctgaccaggatggacatcaagcccatggaggtaggcatggatctcaaggcggtgtacgaggacggttccatctttaaggcagacgtgttggccatcgacgaggaagaaacctttgccgatattcagaatgcatttacacgggccttcaaccttagcgtcttcagcgccttcccaaccagtgagacaatatccacaatcatcagtactgcccataccaaggcgtacaatgtggctattgaggcggctattcctacgggcaagacttctgatatgctgatcgcactggccaacgctaagatgctcgccttagctggcgaactggcctcggacgcaatcgacgatgaaatcgccaataagttagccaacgtggccgttgccgccgcccctgtcgtggaggaggccgaggaagaagtggaggaagaagaggaggaagaggaggacaaaagcgaagaaacggcagcactggggctgggcgctttgttcgggtga

SEQ ID NO: 2703 - DNA, 312 bp, synthetic construct
  source 1..312: mol_type = other DNA
atggagtatatatacgcggccatgattctgcacaccacagagcaggatattaatgaagaaaacgtgacgaaaatcctcgaggcagctggcgccaacgtggacgatagccgggtcaaggccctaatcgccgcactggaggacgtggacatcgaagaagccatggagacaactgccatggccgccgctcccgctgcagcagcgccagtcgccgaggcagccgtagaagaagaggaggaagaagaggaggaggaggaggacgaggaacaggccgccgcagctgctaccgcggggctgggcgctctcttcggatga

SEQ ID NO: 2704 - DNA, 726 bp, synthetic construct
  source 1..726: mol_type = other DNA
atgatttgcccggagtgtggggcggaaaatcaggacagcgcaaagttctgcaagcagtgcggcacttcgttaaaccctgtggccacaatgaagaaaaccaacagcgatgaatcaaggcccatcaagtcaggtatttttaacgaaaacaactcgtccccctcctccttcgaggccaaaggatcgggtggggacaacaaaaacctcatcataatttgcctgacggtaattatttgtgctgtgttgatcgccggcggcctgatcttcctctcaaacgggtcaaacaatggcaacgactccagtgatgttggcaattccataagtcttccagacaattctgtgaatcagaccgatgacagtcagaatcaaactgacaccgaacccgctcctaaaaagagcagcgtgtcagacatgaagatactgagcggaagcttcacaaccggaagctctctaagcgataagacttggtgttccgtctacgtgggagagaagtatgccggcgaggatgtgaaaatcagcgtcctctacagccgggatggctctgacctgaatcaaggaaagatcgtgcccaaaaacgttgggtccgacggcacagtcagcgtgccaagtgcagatgcgtttaagtactacccagaccacgccctggtaaccatctatgatagcaacggtaatgtcctggacacccaggaggtgatcatgagtgctaaatccgggacgcagacattttga

SEQ ID NO: 2705 - DNA, 606 bp, synthetic construct
  source 1..606: mol_type = other DNA
atggagacgaagaaccttatcatcatttgtgccacagtgatactcgcggttgtgatcgtgctgtccgctttcatttacgtcaacatgggcaatgagactcacataagtagcaacatcgccgatactctgcagaatggcgacgagatcgtggtcaagctcgtggacaaggataataagcccttggtaaacaagaccattagcctgaactttaaagacgagaatgggaagggcaatgccgttagctacgacctgctgaccaacgacaaaggtgaagtctattataatgtcaacctaacagagggaaagtatgtgttctccgcagattacgctggagaaacattcattggctcatcaagtttaaacaagagcgtagaggtgaaaaaagatgtgaaaacggcaaacctcagtagcacagatacgactaaaaccgccaagaccaagacctacacagattggcaggaagactacgagaccggacgctatgacgaggacggaaatcctatctataggagcataatgagcacctccgggggccaatacgagccggggatctacgaatgctactggtcggccaacggtccaatctccgaacggagaattgggtga

SEQ ID NO: 2706 - DNA, 348 bp, synthetic construct
  source 1..348: mol_type = other DNA
atgaaatgcccggtgtgcggctgcgagaacccagatggctacaaattctgtcatgattgtgggaaccctttgatcatgcccgattatgacgaaatgaataacgactacccctctttcgacagcaagaagctgatcattattggctacataatcgctatcctattcggttggggaacatttatactgagtgccatttttggctcatatggatttatcggtttcatcgggctcttcttcccaggattcatgctgaacagcaaggactccaatatcaggaagcacgcctacatccagcttgcaattatgattgtggggatactcgcgacctttctggtcctgtttcggtga

SEQ ID NO: 2707 - DNA, 726 bp, synthetic construct
  source 1..726: mol_type = other DNA
atgaacaagaagctgaaaataatcctctatattttgctagcgctcatcatcattatcgcaggaatcagcctttggtatctgatggattacagtccggcaagtgccgacgctaattccctgattaacggtacatcagaggtttcagtcagtaaaatcaacaacggattgttcctagatgggcccggcaatgacagcgctgtcatattctatcccggggcaaagatcgagtacaccgcctatctgcctttgctgatcaatctgtcggctgacggtgtggattgctttctggtggaaatgccattcaatcttgccttctttggcacaaacagtgccgacgagatcattaataacgcttcctataactattctaattggtacattggcggccattccctcggcggtgtcatggcgagccggtacgcccacaaccactttgacaaaatcaaaggcgtgatactcctggcagcgtaccccgccgattccctcgagaacgggtcggtgcttagcatttacggatcaaacgacaagtccttaaataaggaaagctacgatgacgccaagaagtacatgccaagcaacttcactgaatatgtgataaaagggggaaaccacgcccagtttgctagctacggcaatcaaacgggagacggggtagccaccatctccgcctaccagcaggaaaatgagaccattaaggatatcctgctgtacatcaacggcagctga

SEQ ID NO: 2708 - DNA, 2733 bp, synthetic construct
  source 1..2733: mol_type = other DNA
atgcttaaaatatttgaggatctcggctataagaaacagatatgcaagacttgtgggcaagagttctattcacaagtggacagagacacatgcggcgacgctccatgtgacgaatacggattcatcggcaatcccgctactgacaagccttatgatctgtacggaatccaagagacgtttcgcacgttcctagaaaaagagggccacgaaccgattagtcggtaccccattctcgctaaacgctggcgggacgacgtgttcttagtgggagcttcaatattttgcttccagccctgggtgaccagcggtctggtggaacctccagccaaccccctggaagtggaacagccctccatccgcctgaacgatgtggacaatgtcggccgtaccggcaggcacatgacctgctttacaatggggtcacatactgtcatcaacaagcctgataactttatctattgggaggatgagacaatacgcctctgccatgagttcttcaagtcaatcggaatcaatacagaagagctgacctttatcaagagctggtggaaaggtggaggaaacgaaggcccatgttatgaggtatgctgccggggggtcgagcttgccaccctcgtcttcatgcaatacaagaccctggaaaacggagacaaggaggagattcccatcaaggttgtggacaccggctacggcctggagaggatcgcctggattagccagggaaccccaacggcatacgacgcctgttttgcgccggtggtggataagctgaaggaaatcaccaatgtctccgtcaacgaggagattttagcgcggaacgccgagatcgcaggaatgatggatattgaggatattggtgacatccgggaccttcgccaacaggtggccgacagcttaaacatcagtctggaagagtacttggaaaatgcagagcctatggaagccatctacatcatcgccgatcacacaagatgcctggcatttatgctggccgacggcatcattccctccaacgttaaggaaggatacctggcaagactcgtactgagaagaactatccgattcatgaaggagctggagatggaagagtctctatctgacatcatggccattcagctcgacttcttgagggaattttatcctgaaatcgccgagtcccaggagcacatcatgaacatcatcaaccttgaagaggagagatacgccaaaaccatagaaaaggggaaaaagactgttaagcgcacaatcaaacgtcttaaaaaagagggaaaaactagcatgcctctggagacactgattgatctgtacgacgcgcagggcatgcctccagaaacggtagaagagctcgcatcgggagataaggactttgaggtctttgtgccagataacttctttacaatcgtcgcggatatgcacgaagaggataaggtggctaaaaaagagaccttcgagctcgatgttccagagactgagcttgacttctacaaggacatctatcagaaggaatctgatggaacaatcattgaagtcgtggagaaagatggcaacctcaacattattctcgaccgaaccatattctacccggaagggggagggcagccgtcagacatcggtataatctctatagaaggcaccatctatgaggtggtctatgcggagaagttagatggtgttgtgctgcatcgaatagccacaaaagaggatgaggacgtggcttccctggtggaggacctgcggaaatacatcggaacggaagtccatatggccatcaattggaataggagaataacccttgcaaggcaccacaccgggactcacctcgttattgccgcggctcgcaagattctaggccagcacatctggcaggcaggtgcccagaaggggctggcccggagccggatcgacctggctcattacaaacgaatcaccatcggggaactcgacgagattgagaaactggctaatgagtatgtgatgatgaacattgacctcgacatcaactggctaagccgtgacgacgccgagaagaaatatggcttgatattgtaccaggggggggtcgtgcccggctctcaaatccgcgtcgtgaagattcccggcatagacgtgcaggcatgtgccggcactcacctgtccagaaccggcgaggtagggcccattaaaatcaataagactgaaagggttcaggatggtgtggaaaggattgacttctcggcaggtctcgccgcgattgattccattcagaacgacaaggcaatcatcaaggagagcagtgatgtatttagtgtaaccaatgaccagctgcctaaaacctgtgaaaggttcttcaatgagtggaaagcgcaaaagaatgagatcgcccgactccagaaggaaattgccaacctgaaggtcagcacactggccgagaatgccttcgaagttaacggcttgaaagtgttgaaggaaatcctggatgccaacattaaagagcttcagaagatagccacggactttacagacaatgacaaggttgacctggtcttcatcggtaacaacgaggggaagattgtggggagcgcatcgaagaatgctattgatagtggagtgcaggtgaacaatattattaaggaggctgcttccctattgggggggggcggcggcggccggcccacgctggctcagggggccggtccaaacgcagataagatggctgatgctttggatctggccgtggagctcctgaataaatga

SEQ ID NO: 2709 - DNA, 2448 bp, synthetic construct
  source 1..2448: mol_type = other DNA
atgatcaaaaagataacgattctgtcagtgattctgatcctgtttctggcagtttcaacggtggccgccatcgatgtggatacgaacgataacttggacgatgggagttcctcgaacagcgacttaatcagttctagttcactggactcgtccagttctgacgatgtgtcctccggttcgagtgaggtgtctagttccgacgaatcacttgatggcaacaatttgtccgatgggaatgtgtcctcctctgacgagtcggtgggggctgacaatttgtcggacgggaacgtttcttcttccgacgagtccgtgggggccgataatctctccgacgatgagtcatctagcgacgccctctctgaagaactgcccaaaacggaaacagtcattaaagcagacccaatcaattataactacgcttcagtgaaaggactgaccatcaacctcacagattcggcgggtcttgcgttatccaacaagacccttactgtcaaggtcagtgctctcaacaagacgtccaacctgactaccaattctaaaggccaggccatctttaagctcagcgcgtctgtgggatcatatgatgtgtttattagtttcactggggatgagagctatgccccctccaacgccagttctaaaatcactatcaaaaagtcctcaaccaagatcaaattgagcaacattcacggctatctgacgatttcaaattacgtgagtgtcacactcctggattctgccggaaagcccataaaaagcaaatcagtgacaatccaggttaacaaggcaaaatataacgtcaaaacagacagcaaaggcatagcgaaagtcaaggtggccaataagattggcacgtactccgtgaacgctaaattcagtggagacaagaattactacgccagcagtaatagctccaaactgaccataacaaaaatgaaggtgtacatcaaggctccctctgtgaagtactacatgacaaacagctctgctccttacctcacaattaacctgacgaacgtgaaaggcagtccacttgcaaaaaagaaagtctctgttaagataggcaaaaagacttatacactgaagaccaacagtcagggcatcgcgaaattcaagttcaccaagaaagtgtcaagctataattgcaagattaattttaaggccacctccaatttctatggtgcctccgtaaatagcaagatgactatccaaaagatgccaacctccctgaaggcccctagcgttagcattaactcaactaactatggaaaagtgctaataagcctgaaggacggcaagggaaaagccttgaaaaataccaccgtcaccgtaaatgtcactgaactcaagaaggtgttcaccctaaagacaaacgccagcggagtggccacatttagcttcaacggggagaagacattcaatctgaaaataaagtatgcaggaaacaagaattacgccgccagctctgtgagttctaaaatcaacgtgaaacagattaaggtaaagctcagcgacgtcattggggcctcacgggtgctgattgactacgtaaaccgcaccaaggacttgccttcaaatgtccagtacaataactataacttcaccgtcactcagcttacctatctcgcttcgaaggcagttaagaatatcaacaataagaactacggcgacatcgtgctgatttccgtgccaaaaagctacaagtcctcgggtgagatctacgacacagtgtataagaaggactttgtgaagatagcaaatagcgttgtcggtagttcctacaattataagaataaggagtacgtaagctattccatctacaaggttccctttaaggtatactccatcagctttgcgaaggtgctaaacttctacggcaacaacaagaaattgcctaattattcactctttacccttgcagactttgctaaggttaaagacaacggaggctataacttctacctgacaactgataatattgccggtaagaaatctgatctgaacatgcttaagagcctcgccaagaccctgaaatccatgggatacaacgccgtcatcgtcgggatcgggccggatatccataatgtggcttataggtacggatgtaccggaaacaatagcgtgctgctggcttgcttcggcggcgtggatgtgggatgcatcgaagaatgggctggcgatctaggggacctgaacggccatagcttcgtcaacagctaccagggcgctcacgttctcggcctgtggttcaccaagccttacggggcatccgtaagcctcaataagaaggtcggcattgcgtgggacgcagactacggtttcccattaaacactccggctaaatacatgaagagtcacaacatcagctacatcgagactggcaccgttgcaaacgcctgtaaactgttaagcgaggggaaaatgggtgggccccaactgatcagctga

SEQ ID NO: 2710 - DNA, 1161 bp, synthetic construct
  source 1..1161: mol_type = other DNA
atgaggtacttcatgaattacgatctgatcatcgcccgatacggcgaagtcgccctgaaaagtaaccgagtaaggcgcagattcgaaagtcggttagtaaacaacattaaagcgtcaatagatgcggaagtgaaggtgaaccaggcacgcatctacatcttccccaaagagttcgatgacgcaattgagaagctggagaggatatttgggatcgtgtcatacagccccgctatctccaccaagtccacttttgaggatattgaaaaaaccgttggggaatacgcagagcatttgtacgaagaagggttgctcgacgagaacacgaaatttgcgattagctgccgccgggtcgggcaacacgagttttcgtcacaggaaatggctgccttcgcaggggccgtggtggtgcgcaaatactcttgccccgttgacttgagcaacccagagctaactatctacctcgaagtcagagacggcgatgcctatgtgtatcacgaaaagattgagggtccgggaggccttcctctgggcactcaaggaaaggtcgtgagccttgtctccagtggaatcgactctcctgtcgctacatacctgatgatgaaaagaggctgtcaggttattgccttatattgtgacaatgagccctacacctcgcctgaggctctgcagaacttcaatgacctgatagatcaactcaatctatatgctagcggagccccaatcaagagaagggtggtcaaatatggagagtacctgtccacctgtaaggcggaggccccagacaagatgacgtgcgtgctctgcaagtctggaatgtataagctggctggcaaattggccaagaagcttaatgccgaggccgtgattgacggcagcagcctgggtcaggtagcttcccagacactgcccaacatactcgcaacccgtgaggatcttgacgtgccggtgctcagtcccctgatcggtctggacaagctggagatcacgcggatcgccgagaaaatcggcacattcgagatctccaaacgggatgatgggggctgcaaggccgtgccacggtatcctgaaacaaatgcagacctcgagtttgttaagcaggtcaaggaagagatgaaccaggacgaagagctggaaaaggccttcaagaccattgtgtattga

SEQ ID NO: 2711 - DNA, 627 bp, synthetic construct
  source 1..627: mol_type = other DNA
atgagggactgtagcaattgcaaccgagagagctgcctgttgcagaaggtagcaggcataatcatggtgtttggcagcttatactacatcctggccgagttgatttcagcaggattcttcaatgactccctcatcaacacctatctgtttcacaccattagcgaactgggagttcccgtggccaactctcctctctcctttttaatgaatagtgcctttattctaatcgggattacactgctgcttggttacttcgccaagttccgggatttcatcatcaaatacaagctgatcatttccatcctcgcggtcatcacagcactgggagtgatcatcgtgggcttcatccatgcgggaaacccattgacggacggctatcacagtctgggcgccgtgatggctatccttggcgggaacgtgatgctgattctggtttcaagagctatggccgagtttgaaagctaccagaagatcactttcatacttgggattattgggttcattgtcttttggataatgttcttcaacctagaaagcctctacatgccggtctttgagcgcctgtcggtgtacaccctcataatctggaacttcatgactggtttttatctctataaaaattcctga

SEQ ID NO: 2712 - DNA, 567 bp, synthetic construct
  source 1..567: mol_type = other DNA
atgaacacaaacagattcgaaacattctttgacgcgattatcgcaatcattatcacagttctggtccttaagctatcacagccagcagctcctaccgtgccagcctttctggccctcaatgcacgattcataacctacgccatctgttatttggccctgttcatcatctggtacgataaccataatctcttccaagtagtcgaagagattaacaacacggtccttatcatctatgccatccagatgttcgccatctcgctgctgccctatttcgctacttgggtggccctcaacgtgaacagtattgcagctgagaccatgtttggcatcgactttcttgccatactcattctgtacgtgctgtctatttacgcggtgtatagggcggacccctacaattgcggaataagcaaaaacaatttccgcaagatctattgctacattccgattataatcgtgctgatcgggatctttaataagctatacagcttatactcccggaacatttgtctgcacagcgactgcacggatttgctggcttttctcttcaaaacttccaagacctga

SEQ ID NO: 2713 - DNA, 522 bp, synthetic construct
  source 1..522: mol_type = other DNA
gtgattaccgtgatcgtcctcgagattccaatggccgtcgatgggtcgtggggagctctccttgatatcaaattggaatttattgtgtacgcagtaagcttcatcgtttgctttaacttctggaattacaacaacaatgtgtttagcatggtcaataagatagaccataaggttatctggtcaataggcattgcaatgtttttcctatctctgatcccctatcttactacattcgtggccctcaaccctgacgccttcctgccaagcttcctctacggcctggactttatcatcgtagccattctgaccattttcactataaacgcgctgaagaacagtgacaaagctaacatcgccctgcagatcgctctggcagataatcagccctacgtgacgacaatcgtcttcgtgttgttcgggatgatcgtgggatatttcatttacccgctggcgatcgtgatcgcctgtctgttttccataattaccctctggttaatctcctactataaaaagcacggctga

SEQ ID NO: 2714 - DNA, 1101 bp, synthetic construct
  source 1..1101: mol_type = other DNA
atgaagacaacagtgagcgtgatcaaagcggatattggaagtgtgtccggccactgcgtctcacatcccgcactgatggaaaaatgtgatgaggtgctggctaatgctttagaaaccggaattttggaagattactatataacccgttgcggtgatgacattgatctgatcatgacccacagaaacggcgaattgaacgaagaggttcacaaaactgcctatgatgccttcatccaggccacggaaatcgcccgagacctcaagctatacggggccgggcaggacctgctgtctgacacattctccggcaacgttaagggcatgggcccaggctgtgccgaaatggagtttaaggagcggcggagcgaccctgtgatcgtgtactgtatggataagacggaacctggggccttcaacttgccgatattcaagatctttgctgacccattcaatacagccggacttgtgattgaccccagcctgcatgacggattcagttttgaggtctttgatgtgatggaacacaagaaagtggtcctggactgcccggaagagatgtacgacctgcttgcactgatcgggtccactggacgatacgtaataaagagggtatttaagaaaaacggtgagatcgccgcagcagtaagtaccgacaaactgaacatgctcgccggggagtacgtgggcaaagacgaccctgttgcgattgtgagggcccagtctggcttccccgctaatggtgagtgcgtggagccctttgcattcccccacatggtgagcggatggatgagaggctcccataacggtcccatgatgccaaccagccaagaggaggcgaatccaatcagatttgacggaccgcccagggtggttggcctggggttccaggtcacggatgctaagctagtcgggcccgtcgaccttttcgacgaccctgcttttgatgagacccggcggcagagcgccaatattgcaacctatatccgccgccatgggccattcgagccacaccgcctcccctcggaggagatggagtatacttcactccctggcgtcatggagaagctcgaacctaggttcgaagatatggatgatgactga

SEQ ID NO: 2715 - DNA, 378 bp, synthetic construct
  source 1..378: mol_type = other DNA
atgagcttctgtcctaattgcggagtggaacggaaggaggggtcccacttctgccatcattgcggctacgattacagggaggccaattcaagcgggatgggcagtagctctagttcggactcacaggtgaaccagaatccgagctttaacagccaggtcaaccagagttccacgtataatgtcccaaccaagcagaacccccacaacttcgcgaagatcacagggtacattctgtcctttctgattcccgtattcgcaatcgtgatcggtatctatctgattctatccaaaaacgaggaagtgcacaaacacggcataatcattatcggaatttctatagtggttcaaatcctctctatgatctttatgatgggctga

SEQ ID NO: 2716 - DNA, 513 bp, synthetic construct
  source 1..513: mol_type = other DNA
atgattttgaagacagcacggctcattcttaggccatggaaagaggaggacgctgaatgcctctatcacttcgctaagaatcccaagatcgggcctattgccggctggcccccgcataaaagcgtggaggagagcttagagatcatcaaaactattttcgcgaagaaagagacctacgcaataacgataaacgacaaggccataggatgcgtcgggctgctgttctacccagatacaaaccacaagtgggagaatgagggtgtagagctgggctactggattggagaggaatactggggccaggggctagtcgtggaagcctgcaacgagctcatcagacacgccttcgaagacatcgatatcaacaagatctacgcgtcctttaagtacgaaaatcatcagagtaagcgcgtgcttgagaagctgggatttaaatattattgtgatctgaaaaacaaggactacaccggcgaagaattttatgaaatcgccatgttcctggagaaaaagtga

SEQ ID NO: 2717 - DNA, 192 bp, synthetic construct
  source 1..192: mol_type = other DNA
atggccgacgtggatgtgacggagatacggattatcctagaggacctcagcaaggatcagctgaccgaaatcttggaaaagaacggctacaccagcaagggaagtgaaaagttcctgattaaagagatcatgacaaaaatatcccacgacatcatcattgatgagctggaccagcttggggtcctcgactga

SEQ ID NO: 2718 - DNA, 243 bp, synthetic construct
  source 1..243: mol_type = other DNA
atgaaggatctggagagcgaagaaaagatcgcaattgacatcgccaaactcgaacggaacctgaaccaggtggaggacatcaagttcgagggcaaagagaaggaagtctatgacagggcgatagattactggaatgattccaagtattacctcgagaaaaaagacacccgcacagcttttgggtgcattgagtacagccacggcctgttggacgccctaagaatgatccatggacttatatga

SEQ ID NO: 2719 - DNA, 597 bp, synthetic construct
  source 1..597: mol_type = other DNA
atgctggaaagtctgagaccctttctcaccaagatcctggaacctatcgcctcccgactcaatatcaaccccaacattgtgactattattagtccatttttagctatcatctcagcgtatttctttgctacagggaatctgattggcggcgccctgttcatcctgctgagcgggtttctggatgtggtggacggagctgtagcccgctaccacaaccgttccagcccatttggtgcatttctagactctaccatggaccggttcgccgatgcaatcatattcattggaatcatcttcggcggttattgtaactggttcgttggagtgctcgccatccattcagcaattacagtcagctatgtcaaggctagagccgagagccagggggtggagtgcaacacgggcatagccgagcgggcagttcggttgataattcttatggtgggggcggtcattgccttcatcttcaattcggacataattttcacttactttatctacatccttgtagtgctgtcctacttcaccgtgggccaaagggtgtaccacgtctggaaagagctcaacaagaagaaaatcccgcagcgcaggttgtga

SEQ ID NO: 2720 - DNA, 666 bp, synthetic construct
  source 1..666: mol_type = other DNA
atgaagatattcaaaatgaacccggaaaatcccgacatggatcttatagacgaggccatcgacattatggctcaaggaggtgtgatactctaccctacagacacggtctatggcctcggcgcgaacattttcaacaatcaggcggtgcagcggatctacaagatcaagcaccgcgagagatcaaagccactctctgtccttgtttcggatattgagagcttggagctgatcgctcacctggacgaccattcacgggaagtggtgaacaaatggctgcccggcccttttacgtttatcctcaacaagcagaagaccgtctctccctacgtaagtagcagcaccaaagtgggtgtgaggataccagataataagattgccagggagttggcctccatcttcccaatcacaactacaagtgcaaatattgcaaacgaagagaccctcagtaatccgcacgacatcttaaagcagattggggattgcatcgacctggccatcgatgtcggagacctgaccgggggaaagcccagcactgtgatcgatctgacctccgccaaaccttctctggttcgaaagggcctaatctccaacgacctggaatccattaaagaggatattggggatatggacagcaataaaaacgacatcgatgacatgaacctgtga

SEQ ID NO: 2721 - DNA, 696 bp, synthetic construct
  source 1..696: mol_type = other DNA
atgaaaattctgtctacaatgcaagactatgagaagatatccacgaatagccccctggatgagctcctggatgggggcatcgataagagaactatcactcagatttacgggccgccaggcgtgggaaagaccaacgtttccctgaatattgccgtgaacgtcgcacggagtggaaaaaaggtaatctacattgacaccgaggggggcatctctgtggagaggattaagcagatatccggggaagactttgataatgtcgccaaaaatatagttgtctttgagcccacgtcatttaaggagcaggaagaggatttggagctgatagaagattggctagcttctaacaacagtgaggtggaactcatcgtcctggactcggctgtggccttgttccgggtggaggacgacaagagcagaagccaccttctgggtaagcagatgcagcagctggcgaagttcgcagtagactacgacctggccgtgcttgtgacaaaccaaatctacgcctccttcgaggaagacagcgacgaaatggcgcctgtgggtggcaccatcatccagtataggagcaaaatcatcatcgagctcaaacgggaggaaggaagcagtgagcgtatcgccattctcaagcgccataaaacccgacgcgaaggattagcaattcacttctcaatcacaaacaacggcattgaatga

SEQ ID NO: 2722 - DNA, 1161 bp, synthetic construct
  source 1..1161: mol_type = other DNA
atgatccagaagaagaaatatgccaaggcagccaagatcattccagaagggtacaaatctgcgaatcaattcttcgaatctgtgtttcaggataaagaaatgatttggatggggcagaacaccaatgagctccacatagggcacaatgaggaggtgcacaaggccatgattgactgcattgagagtgacgagtactgtaagtacccgcctccagaaggattcacagagctccagtccctgatcctcaaggatttggacttggaggaccttagcatctacattaacgcgggggcaacagaatcgctgtacttggccatgaacgccgtgttatccgacaccgataacgtaataacgcccgatcccggctatcttatcatcgataatttcgccagccggttcgccggcgaggttagggcggtcaagatctatagtgaagagaacaattataagctgactcctaagctcgtgagagagaacatggatgagaatacccgcgtcatcctgctcatcgatccccttaacccactaggaagctcgtacacagaagaggaaatcaaggaatttgccgagattgcaaaagagaatgatctcttcctgctgcacgacataacttatagggactttgcccaaaaacataccctcgcggcaaaatacgcccccgacaacaccataacctgctacagtttctctaagatatttggtatggctggactgcgcctgggcgctatcgtatcaacgcaggaggtgatcgatgtggtcaaaagcatcatcattaacgacgttggcacaagcatggtggctcaggctggtgcaattgcagccctgaagacgaagcctcagtggattgatcgagttaaagacaccacttttgagaaccagaagatcatcaaggaagccgtggatcagtgcgaaggtgtgttcctgccagtctatccgtcaagtggcaatatgatgggaattgacctgtccggggccggcatcgactccgaggacatgtcccaatacctaattgaccgtaaagtctttacaaggcagggaagctacacaagcaacaccttcggccataagtatttacgggtgtcctactcaatcgaccccgagaaggtgaaagtcttcgctcgggagtttgtgctggctgtagaagctctgagaactaaatga

SEQ ID NO: 2723 - DNA, 1776 bp, synthetic construct
  source 1..1776: mol_type = other DNA
atgtcccgcatatctattctagacaaggacaagtgccaacccaagaaatgtaacacggtctgcatgcactactgcccgggcgtacggatggatgaagatacaatcgtaatcgacgagaagactaaaaaaccacttatttccgaagagctatgttcaggctgtggtatctgcaccaacaggtgcccttttggtgcaatcagcgtgattaacctgcctgaggctcttgatgaccctatccatagatacgggcaaaacagcttcgagctcttcggcctgcccagcctcaaggagggcacagtgctggggttgcttgggcagaacggtatcggtaagtctaccatcatgcgcatcctatctggagagctcattccaaacctgggcaactatgaggaggaagccacttgggataaggtgattgagtactacaaagggtcatcccttcagaactactttaaggcgctccaagccggagagatcaagaccatccataagccacagatggtggatcagctctcgaaggtggtgcagggcaatgtcaagaccctgctgtcaaatgtggatgagcgcggcaaattggatgagataatcgatgacctcgacctgaagaatgtgctagagagagacatgcagaacctcagtggaggggaactgcaaagggtggccatagctgctacagtgctgcgggaaggagacttctactacttcgacgagcccaccagctggttggatgtgcgccagaggctgaatgccgttaaagtaattcggtccctggccgaagccggcaaatccgtccttgtgattgagcacgacctggctacgctggatgcactgagtgacaatgtccacttgctgtatggggaaccgggaggctacggcgttgttagtggaaacaaaggtgtgcgcgtcggaatcaatgcatacataaacgggttcctccaggaggagaacgtgcgcatccgaaaacaggccattgaatttagcatccgtccccccacccctgaggatgacggggaggtcttaagcgaatacagcgacctgaaaaaggaatatgacggctttacccttgaagcggaggctggcaaaatctatcacgatgagattgtgactgcattcggttcaaacggtatcgggaagaccacatttgccaagatattggccggcgttgaaaagccaagtgaaggcaacattctggaaaaggtggagatcgcctacaaacctcagtacattgaatcggactttgatggaacggcgcaagacttcctgtttgcgaacgcccccacgtatggatcaaatatcttcaactccgagatcggcaagccactggcactggagaacctcttggacaagaaggtgaagaaactcagtggaggggaactccagcgactggccctcgctgtaaccctgtcccaggacgccgacacctatctcttcgacgagccaactgctttcttggatgtcgagcagagactgattgccgcccgggttatccggaagatagtggaaagcagaaatgcagcttcgctgatcatagaccacgacatcgttttcattgactacatttccgacagggctatggtctttagcggcgagcccgggctgaatgggaaggcatctaaaccggccgacctgcgaacaagcatgaatcagttcttaggcgatttagatatcacatttaggagggataaggaaactaaacggccccgtgtcaataaatacgactcttatcttgatagagagcagaaggagcagggagagtattattacctgaaagaatga

SEQ ID NO: 2724 - DNA, 339 bp, synthetic construct
  source 1..339: mol_type = other DNA
atgaaacaggtaatggttgtccgaacagatatcaagatgggcaaaggaaagatcgctgcacagtgttgccacgccgctataggcgcctacaagcaagcggataaggaaaaaatcagaaagtgggagaatgaggcctacgcaaaggtggtcctcaaagccccgacactgcaggacctttacaacctaagggagattgcccgggcaaacggggtggcctattatctcgtgaccgacgcgggccgcacccagttgccaaaaagcacggtgaccgtgctgggactgggtcccgacgaagacgacgtcctggataagattactggggatctcaagttactgtga

SEQ ID NO: 2725 - DNA, 816 bp, synthetic construct
  source 1..816: mol_type = other DNA
atgaataagataaaaaagcacgagagtaaatttacaaacaacaggctccttaatcccgcggaatatatgccaaaggaggaggttgaaacgttaaagcaggtgtcctacctgatcgtgctatttctcctcttcatcttcttcatctacagtttctggccaatggcaaatatgaagttcttctcatttctcgagattgtcttgatggtttacattgccctgaacatcgactatagcaactggaaaaacaaggtgctgtttttctttctcgtgccttacggcagcatcgcatggttcctgttcgaggagcttaccaacagcctcttcgacatcttccatatgatcattctgttatactttatgaaagtctactacgagaagtttcgggagtacactgagaccaatgggctgggcatcaccatcttgctcctgtttaccataatcttcatttcctttattctgacaatgattgtagaaggagtctccccgatcgattcgatagcgatggtctcaaacgcctttacaagcaacggatatgccgtgctgggaagttccttcggtgggaaattgaacagcatcctattggtgtggagcgggtatatcctgagcggcgtaggcactgctacgatgacagtggcccttcttagcaagcacttcaacaaaagaatcaaggagaacgaaaaaaccaatgaggctcagtatgccgaactgaaggagatgattgaacgcaataatgaggaaattaaagagatcctgaaggagaacaatctggagaaaaagactgaagaagaactggaaaagaagattatagagccctga

SEQ ID NO: 2726 - DNA, 711 bp, synthetic construct
  source 1..711: mol_type = other DNA
atgaactatttaaaccagaactacgccacggtcttcatgggcaatgactttctcctgatcatcgcctccctcatcattatgatcttcatttttggatacggcagcgtcattaccaaggacgtgatccgggggggcaagaaactgcccaagatctacattaaagagtgcaccatctatgggattaagtgtgtgatagtggcgctcatatactctgccgttcaaaccctggttatggtggacctgtcccacagattcctttttccagaatttgagctcgagcatgccctgacagatattaccggtacattacagatgttcacggctaataaccctatcctgatcggcgagtatgtggtaataagtataatcctgacctacatctttgtgttctttatggaaattagccttgcccgcttggcagacgggggaaagctgctggaatcatttaatttgcttgctatcaaacgatgcatagacactattggctggaaaaaatatacaattgattatacaaagctgctgctcgcaataaccattctcacttatctccagtacggattccagttcctgggattcttcgactacatcactgatttgatcttcggcctactagtcttcattatccaatttatcggtattgggcagatctacaagatctacaaaatcaaaaagtacagcaacctggataggccgaccaagaagtcggtgtga

SEQ ID NO: 2727 - DNA, 915 bp, synthetic construct
  source 1..915: mol_type = other DNA
atgagcaataaaaagtcattccttgcaaagatcgaagagattatcctcatgcagacaaagcccgactatatggactcctacgaaaaggtcaacgatctcataaaagagaggttaaacgctcaggagaagccgcctaaaagcgccctgttcaagagcacctacctgaatgggacacagatcttccattatgggaatagccagagcaaaaacctgattgtttacatccacggcggggcctttattaatgaaatcggattccagcatcacttcttctgttcatatattagcaaaaaactggacgcctatgtgatctctccagtgtaccccctcgcccctaagcactcctgcaacgaaacctttaaccaaattactgatctatacaagtccctgatcgaagagaataaatcgaacggcgataataagaataataactacaacaacagtaacaacaataaatccatttacctgatgggagacagcgctgggggtggatttgtcttgagtttctgccagtaccttaagaccgtcaaccttccccaacctgacaagatcgtggtgtattctccctgggtagacatctcaatggatgattcgccctacgataatgagtccgatccgatcctgggtgagataggcctgagagagatagggaagtcatgggccggagaactggacacgaaggactaccgcgtgagcccattgtttggcgacaacagcggcctggcgccaatcctcatctttgcgggagacaacgagatattctacaaggacatcttgaagtactatgaaaagctcaaagaagataacgttgacgcacggctggtggtgggcagtggcatgttccacatttatcccctcttcccttccccagaggcaagtgaggcctttaaggagctaaaaaaagagtttgagtga

SEQ ID NO: 2728 - DNA, 1044 bp, synthetic construct
  source 1..1044: mol_type = other DNA
atgagcaagaatcgaatcgaatggatcgacctcgtgagagccctcgctattctcaccgttctctacattcacgcaacagatggcatctatatcatctcctctgatctgatcccctattggactcctttttcacgcgtgttccagttcatcagtctttttatcggacgtataggagttccattcttcttgatgattacggggtacctattgcttgacaggacctacgacgacgagcgggtcaaaaagttttggaacaagagctgtaagggcttggtcattgtgacaatcatctggtccctgatttacgccgtgagcattcagctggtggcctattccagcatccaggtcaatacgatagaagctggcaacctcttcttcagccatatgtggtatatgcccatgattatcgggatgtacctctccatgcctttcgtcgcgaatgcattgaaaaactttgatccacgcaccattaaccaagccacaatcgtattctcctgcctggccttcctgctgccgttcatttcgatcgtctgcgagatgcaggggcttcagaatgtaaacatccagtactgccttggtttcagtggcggcgtatacgggatctacatcatactgggctggctggtgaagaaggggctattcaagaagtacagctcaaacagcctgaggctgctagccatagtttcgtttattatctgcgtgctcttccaatggtacgcattctctattgacttcagtttctctctgtggtacgagttcccctttatcctcaccggctcttttgcactgttcgagctctgttcccgcagggaaaaagtccggggatttcggggagtggagtttttagccaaatattcatttgctgtgtttttgatacacaacctgtttagaatcatactgctgcctatggtggtgtacctgccatatactgaaccggtgaaagcgattattctgtggatacttttaatcatcaccagttacgccgctgcggttatcatttatcgaatccccaagttcggtaaatttattctgtatatgagatga

SEQ ID NO: 2729 - DNA, 300 bp, synthetic construct
  source 1..300: mol_type = other DNA
atggagttgatcaaaaactataatgaaaaggagctgaccatcgagacgggaaacaagatagatacaaccactgccccagacttcgagaatgaaataatggatgagatgggcaactttgatagcttaactctcgatctcaagaacctcgaatacatctccagtgcagggctgcgggtcctgattcttgtgcagaagaaactgaaagcggacgacatccccttcgtgatcatcaacaccaatgacaacattaaaaacattctaacaatgagcggcttcgacaagatcctgaatattcagtga

SEQ ID NO: 2730 - DNA, 633 bp, synthetic construct
  source 1..633: mol_type = other DNA
atgatcaagctggcctactgcaacgtagaagaacttgacttaaaaagagcgtacagcctcgtctccaagtcacggcaggagaagatcgacttctaccgattcgataaggataagaagctaagcgctggagcatatctgctactcaaaaggctgttgtctgaggtgaatatcaaggactttgagattattatcgaaaaatacgagaagccccgcatagtcgaccacgagaacatatacttcaacatcagccattcaagcaaaatggttctgtgtgccatctccgacaaggaacttggcgtggatatcgaaaacattgatggggaaattgacctgaacatcgccaaaaattttttctataatgatgagtacaagtcgatcatgaactgcgacaacccaagtgatgaatttttcaaatattgggtgctgaaggagagctatatgaaatacaccggcctgggcatgaatctcaaactggactccttcgagatagtgattggagatgagatcaagcttaaggacgacgacagtgacctgaaattcaacctctttgaaatcgaggattataagattgggattgcaagccactacaatgtgtatgacttgatcgagtacgatctcaaggagctgtactga

SEQ ID NO: 2731 - DNA, 1875 bp, synthetic construct
  source 1..1875: mol_type = other DNA
atgaagactaagctaaagcaaattcttatctcattcattgtgacaacgatcttctactttgcgctgtctcagacctttatcactcaactgggattggggagtccacagatcggcctcctgtacgtgtttggcctattgtttggcccttttggtgctctgggtgcaagcctgtctaacgtagctattgatgtttaccatggatacacctttgtgcagatactcccctcagccatcatcagctttggcgtgtctcttctggcctacaagctgtggtactccggctttaagtcggacgagtacactaaacctagactggacacaatttaccacctatgcctctttttggcaagcataatcatatgcgggatgatctactcagtaggccacggaaatctggcttacatcctcatcagcccggatattgaggaatcaatcatcattccatccttcttgaacttcacaaacgtggccttcatcatgggtattgcaggaatttggctgttcaagcggaccaatctcattgagacccctaaaaagtccgagcgtcgattgaacaagaacctctacagactgatcttttcccttttgatggtgatgacaatcgtgtcgttcatattcatcattcggaactcggataatctcaccatcatcactggcctgataatcgtggtggccctcatgtatgcctatatgacgaagcccttcattcacgagatccaagaggtcaacgagaacagcatcattgctaagatcgtccgcaacttcattataatcaccctgatcctgggattctttggagggctcgtttccatagccagctttgactacgttgagacaagcattacgctcaacatctacctccatctgatgccgattctggtgataagcgacatcatcataattctcttcttcattccagggatcattatcctgaaatacattggcgataatgtggtcaagccaatcacctcattctccgaaatcgaagggttcatcaaggaagatgagaagatagaagcggaggggctcattaaggtctatagtgaatatgtcaatgagcagaatgaaataggaacccttgccaggagctataccgagcttatcaatcacaacaacaactatatcgagaacatccagaagatcgagggggaaaaggagcgcacaaatgcggagctggacattgccacaaacattcaggccgctgccctgccaactgaagcaattaaaacagacgcattcatcgtcaacggttatagcaagcctgcgaaagaggtcggcggagacttctttgactattatgagttggatgatggcaatttagccattgtaatcggtgacgcttccgggaaaggcgtgcccgccgctctggttgccatgattacgcaggtggtaatcaagcagacgctgattaacaaccacgaccctagtgaagtgctcttcagtctgaataatcagctatgtgtgaacaatcccgaaagtatgttcatcaccctgtggctcgggatatacaacaaaaccaacaaaaagctgaccttttccaatgccggccataatccgcccctgatcaaggaaaacggcaaattcaaatatctggatatcgaaagcgggatcgtcctgggaataatggaagacttccagtacgaggacgaggagatcaccattgatggcgagctggttacctacactgatggaatcaccgacgcaaacaataacgatggtgaaatgtatggcgaggacaggcttttagaattttttaataagttcaaaagcgataaagaccccatccttcccttattaaaagacattaatgactttactaaggatacagagcagttcgacgacatgactcttctgtacttgaaagtgaacgattga

SEQ ID NO: 2732 - DNA, 378 bp, synthetic construct
  source 1..378: mol_type = other DNA
atgaatagtatgaacttcaaggtggagatcgatgagctccatcggctaaacgagttcatcttaaacgaacttccccatgaggacttcatggtaaatctgattgtcgaagagatctttgtgaacatcgtgaactatagccagacagaatacatcattgttaacctggactacaaggagcctaatctgacgatcgagtttgtggacaacggtatagagttcaatccgctctccaaggaagattatgaggccccagacagcattgaggatgcaaaaatcggaggcctgggcatccacctcaccaaggaaatagcggatgagctggactaccactacgaagacggggaaaatcacttgatgattgtgaaaaaagtcgagtga

SEQ ID NO: 2733 - DNA, 318 bp, synthetic construct
  source 1..318: mol_type = other DNA
atgtccagcagcaaggagtacctggaatatatactggaacagctcagtgagctggatgagattacctaccgcgccatgatgggcgaatacatcatctactaccgaggcaagatcattgggggtgtctatgacgaccgcttcctcgtgaagcctgtgaaatcagcaagggagatgatgccaaacgctaatatggaattgccgtacgagggagcgaaggagatgatcctggtcgatgacgtggaggacaaggagtttctgcgggaacttgtagaggccatgtatgaagagctacccgcccccagaaaacggaggaaatga

SEQ ID NO: 2734 - DNA, 471 bp, synthetic construct
  source 1..471: mol_type = other DNA
atggacatcctcgctaagctgctgaacgacaaactggcgtttgccgaaatcagctacaccatagaagaagcaaaaagtatttctgattcaaacaagatcccaattatgatttgtagcgagatcctaaaggagaatgagccgttcgcccactcctgggacgtcacaagcgactcgatcgccgcgtatattgccagccttctggatgccaagctcctcatcgcaaccgatgtaaatgggatatacacaaaagacccctccctttccggcgctgagctgatcaaagagatcgacgtgaacgagctgctgacgtttgaagaatcaagcatcgatctgatgctgcccagtctcttgattgagtacggtttggattgctatgtcgtgaacggagagtaccctaagcgggtgttatccataatcaacaatgaggactgctctttcgaatatactttcattaggaatggcaacgactga

SEQ ID NO: 2735 - DNA, 162 bp, synthetic construct
  source 1..162: mol_type = other DNA
atggagaaggtcaactgtcagtcctgcaaacaggagattcccctgatcgagccgtatgtgcaattcaattgtcccgagtgtgggaggcctatcgcccggtgcgaaagctgccgcaccttcggccacagctacaagtgcgaatgcggatttgaaggcccatga

SEQ ID NO: 2736 - DNA, 270 bp, synthetic construct
  source 1..270: mol_type = other DNA
atgggcgaggtcgttaacacactgaaggtcatgcccgagagcccagaagtggatctcgaggccctaaaagtggcaattacagatgccatgccggaggacgccgagctgcacgaaataaccgaagagcctatcgcctttggtcttgtagctctcaacgtggtgttcatcgtggaagacggggaggggggcacgggacccaccgaagacgcgatcaatgccatcgaggacgtcgcttccgcagagattactgatagcaggcggctgatgtga

SEQ ID NO: 2737 - DNA, 1251 bp, synthetic construct
  source 1..1251: mol_type = other DNA
atgttcgatctactggcggcctgtttcattggaatcgcaatcggcacaggtacaggcatggtgcccggcatccacgtcaacaccgccggcgccatcatgtttgcatcctcaggctttctgctgagcttcctgtcgcctgaatttctgtgcatcgtaatggtatcaatgagtattgctcacgctctgattgagtttgtgccatcaatgcttctgggggttcccgaggagggcactgccagttcgatcctgcccggacaccgcatggtgctagaaggacggtctaaggaggccatccgaattgtttcagtcggcgggttcggcgcgattgtggtcgtgatattaatgctcccaatattcgccgtggctctgccctttctgcaggatctgagtaagccctacacttggatgatccttacggtggtttcgattcttatgatttacaagctcagcaacggaaggctcgcctttatgtggagcatcctcctgttcgtcctgtctgggattttaggttggattatgcttcagacccctatttccagcggaatcagcctcatgtgcactttcagcgggttattcggcatcagcacgattcttttcagcttgaatgacagcagttcaattcctcaccaaaacaaatactacgatttcgtgatcgacaaggatacaataaagagcatcttcgcaggaggcacggcaggggctatcctgggctttctgccaggtttcggaccagcccagggcagcatcatcgcacagggagtgtgtggaacaagcgcggacggggacgacaccaaaaatttccttctcgccaacagtggactgaacaccagcgacaccctcttttccctaatagctatctacctgattggcaatcctagaagtgggatcgctgtgtacatgtcctacttgatatctgaatttaccttgtctcatttgatgattttcacttttgcgtctctcattgccgtttcaatctccttgattatctgcctgaagctgggggacggcttttccaacctcatgcaaggtgtggattatcggaaactgtccatatccgtaatcctactcatgatagtgattctctatatcttcgccatcatctatgagggtccgatcctgtatctcacccttgcactgatcacatccaccgccatgggtttgctgccccactacctgggggtcagtaaatcccatctgatgggggtcttgatcctcccggctattataatctatatgcagatgttcatgtga

SEQ ID NO: 2738 - DNA, 1515 bp, synthetic construct
  source 1..1515: mol_type = other DNA
atggcgaaaacaatcattccaaaatataaggtttcaaagtttgaatttacagaagaagagagacggactctcgaagagttgcgggagaatctgatcgatctggccatcagcgagagaatgtccaacttcaacgaggacctcatcctaaacgacatcatccgtttcctcgacaatcgactcttcagtaacgcagattacgtgcgcaatatcgacttcgagaaactggacagtttcaacccgagcaaatacaagcacatcggaaatcctaaaaggtattcgcagttctatgcaatattcaaggacgagattgagaaatacaagaacaacttggctcgaaacatgtttcaggagcttatcgggtatggggaaattggctttctgattgatgacgatgacctggaagagattatggtgatcggactcaataagcctgtgtttgtctaccacagggaatacggtatgatggaaactgacctgatcttcaaagaggaggaaaagattttgagcataatcgattctattgcccgggagacgaaccgccgcatagatcagcagagcccaattctggataccagacttcctaacggctcccgtgtaaacgcaaccattcctcccctgtcagccgacggcccaaccataaccattcgaaagtttaagaaagaccccctgacgattgtcgatctgatacggtacaacacgctcaacactgagatcgcatccttcctatggctctgcgtggacgggcttggggtaaagccggctaatatcatagtctccggcggaaccagctcaggtaagacaaccctccttaatgccctgtccatctttatcaatcccaaggagcgaatcgtcaccatagaagacactcttgagctgcaaatcccccacaagcatatcctgagaatggaggcccggaccgtgaacatcgagaatcagggggaaatcaccatagaggacctggtcaagaactccttaaggcaacggcccgataggataattgtgggtgaagtgaggggcaaggaggcgatcactctgtttaccgccctgaacacagggcatagcggattcggcacgttgcacgccaacagttcaagggagaccatcacacggttgaccaatgctccaatgtctgtgccaaagatcatgataagttctatcgatttcatcattatggaaaagcgcatctacaagtcagacggattgtcctatcgcagaatcactgaaattgctgaggtggtgggcattgaggaaggaacaatccagctgagcaaactctttgaatgggatagtaaaaaggatgagttcaagaacctgacaatcttaagcaaaacactggaaaacattgccagcctaaagggcgtgcacattagcatccttaacgaggagtggaaaaaccgcaagaaagttctggactacctggtaagaaatgacattagctctcaggatgatatctcgaaagttctcgaggactactacattaatcccgactatgtcttaaatatgatttccaattga

SEQ ID NO: 2739 - DNA, 552 bp, synthetic construct
  source 1..552: mol_type = other DNA
gtggtgattttcatttttgataaatttttcatccagctgagtgatagcatcatcaatttcctggtatccatctcaaaccttttcctgtcattcttcgataagaataacgactccaaggagaagtgggggaacgagaccaatcagtttgatagcagcaaatacgaggagttgaactattttaacaatttcaagagtgtcaacttaaactacagcgacaattctaactcgggagacgacctaaagaatgagaactacagtttcatcagcaacttgaacctgtctaagatttttaataatgaaaatatcttcgagtacctcgaaaacaaatatctgaacaagcaagccatgttcataacgcccaatggcacaaacgaaaacgaatcaaacaagaacttcctctataatctcaagatcaaactagtggttctgatacttgacaaccggttctttcagatcaggtccagccaggacctgctcaaactgctgttttacgtcctctttaattacaacaaatcctttttccactcctattgctgcatttgtttcttttga

SEQ ID NO: 2740 - DNA, 606 bp, synthetic construct
  source 1..606: mol_type = other DNA
atgtttttcatcttgttcgccctgtttatcctgtatctcccaaaaatccggcatgagaatgattactcatctatcagcaaagaactgccctacgcactccgccagttgtccacggagctccgggctggaaagagcctattcgacgctcttgattcgattgtcgactccgactacggcgttctcagccgcgagttttcaagggtgcttgaggagataaaatatggggaaaccagtgaaaacgcctttctcaatctggagaagcgagtgaactccaaggccttgtccagagtaatctacgagatactagcaagcctcaggatcgggagcaatctgtcccactcactgaacattattgctgaagacgtcaactttgacatgagaatgaagctcaaggaatatagtgagaaactgaacgccttcattatgatttacacctttttagcgatcctggcgccggtgatcatcttgacaatgcttctggccgccagcgtggtcattggcgatatcgtgccaagcagtctgcttttcattctgtacggtctgttcttccccatgataatcgtgttcttagccttcgcaatcaagaaactggagcctaagctgtga

SEQ ID NO: 2741 - DNA, 1509 bp, synthetic construct
  source 1..1509: mol_type = other DNA
atgtacgagcttattaaggaatcaattaatagtgatgagagtgctctcgaattagctaaatccaaaaaagatgtgatctctgtggtcgatgccatatccgatctgagctttgaagacaccatgaaactggggacgcgattcaagaagttcccgatcggctgtgacctcactgaagtggtggttggcacctgtgcgtcggatctggaaaagatggatctcttcggcaactgcatgctggcgaacatgatcggagctcctatacacatttgcgcgtacgcgttctcagacattgcagagaaatacggccagcggggtgtggaaataatggaagaggtctacaatatcacagatgttcccctggacctggaccactttgggaagtacggtgccatgaggttcccaaagcatattgtcggctgcggaggagactgctacaaccagggcccaagcttcaccgaatgcccgcgaggcagaatccacgagcggctgctggacaaggagaaggccgagctggacgacaaggagacctgggtccagctctcctcttccgtggccatcaacctcagcagcgagcagtgcaacgacggccatgcggcccccctggaggaggcccaggacttggcagaccttgccaagaaatatggaaagggccttgaagccatcatgtttgtgggggacggatacgatgagttaatcacaggcttcaccaaggccatcgagatgggtgttgacgtatttgtgattgaggggggacccttcaacaggtgtgaaaacaccaacgaaagctttgctaagacaattgctatgagccgggtcctgtgtcccggaaaagtggtggccacgaacggtgcctatgaaagtgagtgtcgcgcagggctccggtccgggctaaatgtgataattaccggttttcccaaaaaccaccacggatacatgtgcggtttcgagccgggaactgccaggcgcggcaagttcggcctcccacgcgtgatcaagatcatgaatgaggagatcagtgcaggcccaacgagagtacctgtccagcgtgaagagctactggcattgacccacgctgtcaagttggcagggcctgaaaacatctatcctaagacaatcggatcgtttgcaattggggacgcccactgggctacaatccaaaactctaagatgtataaggaaatgtatctgccaaaaaccctggaggagatagctgacagcgtgaatggcaactccgtttcattgcatggggggaggttcgtttcatggcttgtggccaaagagctggataagaaaggcatcgatgagataataatcactgacagcaacccctgggtggagaaagtcagcgtagacaatctccaagaggaactgaatgcaactatcatcagaggccacgccgatgataagggggctggaatgattgctaaggagtctattgtgaccactacaattcctaaaatccataatgccattaaatccaagattccccatgccgtaaatatcatctga

SEQ ID NO: 2742 - DNA, 1017 bp, synthetic construct
  source 1..1017: mol_type = other DNA
atgaaagttgccattctgggtgctggctgttaccgcacgcacgccgctagtggaattacaaatttctcacgagcctgcgaggtcgccgacgctaccggcaaggagaacattagcatgacacatagcaccattgaaatgggtgccgagcttctagaactcgccggggtggacgaagttgtggtcgcggaccctgtctttgacggcgaatttacagtggtggaagactttgactatgccgaggtcatcgcagcccacaaggcgggcaatcccgaggatgtgatgcccgcaatcagggcaaaggtcggagagctcgccgagaccgtgcccaaaccagcgaacggcgcgatccatttcactcacccagaagaccttggaatgaagtgcacgactgacgaccgggaggccgtggcggacgctgactggatcatgacatggttgcccgagggagggatgcagccggccatcatcgagaagttcgccgatgtaatcaaagacggcgcaatagtgacatccgcatgcaccataccaactcctggactgaaccagatctttgaggatctcggcaagaatgtgaacgtagctagctaccacccaggggcagtccccgagatgaaggggcaagtttacatagccgagggcttcgctgatcaggccgctatcgacaccttgaaagatctgggagccaaagcgagagggagcgcattcaccctgccggccaacatggtgggtcctgtctgcgatatgtgttccgccgtgacggcaattacctacgctggccttttatcctatagggatacagtgactcagatcctgggtgctccagcaggattcgcccagatgatggccaatgaggcactcaccaatgtaaccaagctgatggccgatgaaggcattgacaaaatggatgatgctctgaaccctggcgccctgctcgggactgctgactcaatgaacttcgggcccctgtcggaaattgtgcctacgatcctggaatctctagagaagcggagtaagtga

SEQ ID NO: 2743 - DNA, 1002 bp, synthetic construct
  source 1..1002: mol_type = other DNA
ctgatcgaaagtatcttggagaaagccaaaaaccgggagaagctgagccggaatgaactcatccagttatttgaaatcgatgacgaggaaactctgaaggaactctgtaaaattgcctgcgatatccgaaatgagtgttccgacgtcatcaaattaacatccactatccacctcacaaataaatgtcaggttcaacctcgttgcaaatattgcggctttgctgctaagacctcatcgatcgggtattatgacgccttctacaagagcgatgaagagatacgccaagctgcaatgtgtgtggaaagatcaggcattcctaggataagctgttctggcgggcatgggtataaaggaaagcaggccgtaaacgcggcaaagatcgtgaagggagagacctccctggaaatactggtgaatgtcggcgctgatctcacgcaggaagccgtagacgaactgaagaaatacgacgccgatactgtatgctgcaacctcgagacaaccaacgaagacgttttcaactttgtcaagcccggtgagaagctgtctgaccgcatcaacatatgcagaatggtgagtgatgcaggaattgggctgagttccggtctgttgattggcattggggagtcctacgaggatagggtggaccatctcctgttcctgggaagcttcgagagcctggaggagattcccattatgggattcaacccatacgtggacaccccgatggaaaaccaccctccctgcagcatcgaggagcagctaaagaccatcgccatcaccaggatcatgtacccccgcattcggataacggtgccaaccccaacgatcggtcccgagaatgttgagcttcctctgatggcgggagccaacaacttggcaacagtcatccccgaagactacccgcttgtcgtgaagggcgtggggaatccagagtacggcaacctccacgaggtgatttcagtcgtggagaatcttggcctggaggtgcagctacacgcgtga

SEQ ID NO: 2744 - DNA, 474 bp, synthetic construct
  source 1..474: mol_type = other DNA
atggccttcgaggaaagcatcagaaaagctagtatccaatcttatgaagggacacggaagggagacactattgaagagattgaagcaatccagaactatatccgaaacgcaaagatcgtggttcctaacaagaatggcataaaagtagaggtcataaacgaggtgctggccaaattcaacatcccgcccgctgagtacctgcaggtcaacaccaattacgctgatttcagtcgcatgcccgccatcgctaaggcgatgattgccgtggatcagtcagacgcagacctggtcatcgcccggggtcgcctcggcatccccgggtcgggctccttcttggtgtttatggacagcaagtccaggattctaaccgccgccacgtccccaagccacataattcataatcagccactcgaaaagacagtgtacaaggagacccttgaggcgctgaagaaagtgggatttaaagaggagtga

SEQ ID NO: 2745 - DNA, 408 bp, synthetic construct
  source 1..408: mol_type = other DNA
atgaataatcaggattacgacactggtatatccagcgaggttttcaccgtcaaatcaaacatcaaacttattgatatcttcaatctgatcctggaaaagaaggcacgggccgtgatggacctgttcgacagtctcaccaacaaggagacaatccacaacgaaagttccatcataatcattggaacctattttacaggaatcgccattgcgaagtacctctcctacaacgggttcaagaacatcactatagtggacatctatccccatctggagggcttcatcgatagcaacctaggcgatccaattgatgtgaacaaatcgtctaaagggaagtttaaggagaatatcgaattttcaagcgacttgggcctgattaggagcgctgacgtagtcattgacaccacgtga

SEQ ID NO: 2746 - DNA, 441 bp, synthetic construct
  source 1..441: mol_type = other DNA
ctcggaggcatagatgagagccagtccgagtccatttacacaaaggtcttcctcattgaagaccccatagccgaggacaatgatgacttgttgaagaacaaaaacaacatctattctcgcataagcctggtgaacagttataacaagttcatcctgaagaccgaaggtttaaacacaaaaaccagcgggaccatgactctgacgatcgatatccttcggcagagcatgaatgagatcctgtcaagggaaggcgtcctatactgttcatctgaaatgaccttctttgaggagattgtgtttaaggaaaatgacctggataagttctttgaactgatcgggtccccggtaatcaaagtgagtactattgcaccattcgactgcgaggagatcatcaaatgctttattgacaagatctactcggagatcctcattagatggtga

SEQ ID NO: 2747 - DNA, 729 bp, synthetic construct
  source 1..729: mol_type = other DNA
atgtacgccaacgatattttcaatattatagatgaactggtgcctcggaaactggcactgaagaacgacaaattcggctattttgggaagactttcgacaacttcgacatcaaaaacattaaagtcatcctcgatcttcttccagaggatgacctaaaattcgataagggtgacctggtgatcagccaccatccccccctctttatgccaaagaccccaacctacgtggtccactccaactgggacatcgttcaaggaggggcaaatgacgctctcgcctactatctggggctgaagcctatatcaatctttcacaagcagacaggcataggcaggatctgcagttcaacaaagaccttggaccagttcctggccttggtatgttacaagttcggccctgagaatgtgcgcctcgtgcacgatggcgacttcgataagatgcttcggaaaatcgctatagtgtccggattcggcctgagcaataaggaatttatcaaactggccaaggacaggtccgtagatgcattcctgtcgggtgacctgaaccacagtaacgcgatctacgcgaaaaagctcggaatcactttaatcgacgttagccatcatattatcgagatcccggggctatttgccctgaaggagttgctcagacgaaatgaggacattacggtccccgtcgaaatgattgacaacggagtgccctggaaatatattagcgccgatttttga

SEQ ID NO: 2748 - DNA, 645 bp, synthetic construct
  source 1..645: mol_type = other DNA
atgatccaagagatggagaatagtctgatccccaagggcagtatcgatctggtggggttcggccggctaggattgcgcacagggatcaatctgattcaggtgcaccgcggaggtccagctaagatcacagtgattgacggccagaagatcagcgagtcggatataatatttctcctcaaaggggccaaagtcggcacttataagtcagactttttaaaggaaatttccacccactcaaaggatttcagggaagtcgttagcatcacggaggacataacggaggacaacatcgatttgatcacaggcgacgtggtcgtgatcgagatagcgggagggaataccgtgccaactgcagccaagatcattaaaaaagcgcacgaaaacggctccaaaaccatcggcaccgccggtattttcggaattggggacgaagagatcgttgtcgcagacatcagcgagtttgacgactccaaccccgctattgaggagcttcggaaagaaggaatcctggacaaccatctggtgataagcaccaataggttcattcgagatggcatcccgattactccttacgtactcgatgatattgccaacatcatcacaagagaggccctgaagcttctgattgaaaagaacaacgaatga

SEQ ID NO: 2749 - DNA, 609 bp, synthetic construct
  source 1..609: mol_type = other DNA
atgattaccatcgcaacggccgaatgtttcacacatgggattctcgcccgcgagatacacgccctcgctcaggattacgacgatattttcgccagctcctactggggtctggtgaacaaggtccagaaggattgcatcaaggacgcaattctggaagataaatgctccatttttgatttaagggacctgagtgttagctgcggactcttcatcccaaccttggacgctgtgaaatctgtgctgaagatcgagaatccgctagagcccttgacacttatcgacggcatcaaggtgtacgacgatgacggcgatcgagaaatggctatcctgatggcagaggcggccaagaaggtatcggggtcagatatcggaatcggcaccactgccgggatcggctacggtggcatcgccattgtcgacgacgacatcgtcatcagcaccagtagcgacgtttatgcggacctggtgaatgtggattccgacgacctttacatgcggcaaagatctggaatagaaaagactctgaaaatactgatttattacctgaacgataacctcgacattatcaaccagatgaacaacgtgaaaatatataataaatcagagtga

SEQ ID NO: 2750 - DNA, 2169 bp, synthetic construct
  source 1..2169: mol_type = other DNA
atgattttcaccatagagtatgacaagggcacgcgcctgcgagtgcgatgtggtaaggaagcattcaccaaagaggagtcctatggcttagctgagaccctcatcgactatgacttcatagatgaagtgaaggtgtctcaccgtaacgggagcattcttgtcctgtacaatgatcccaaaaaaaggattgaaattctcagaatcataagtaaaatcagccaggacaacctgtacgaaacaaaggccagtgataaggctgctcttgaagagctgaatgacaagttcgcgataaaaattgcaaagcatattctcaaaagatacctctttaagatcatattgccaattcctctgaggaagctgagaatgctgtaccatgcgtcatcctatatctggcgcgggctcgacagcctaaccagtttccgcgctgacgtggcccttctggacggaacagccattacggcctccctgttgactaagaactacaagtctgtggggagcatgatgtttctcctatccatctctgagatgctagaggactatacgatgcagaagaccaaaagcacacttaaaagcagtctggccttgaacatcgacagcgtgtggaaggtggagatcgatgatgagggcaacgagatcgagagccagttccccctgagcaagctggagaaaggagacaagataagaatccggaccggcgcgatcattcccgtcgatggcgtcatcgctgatggggatgccatgatcaatgaagcctccatgactggggagagcctggctgttcacaaggataatggcaaggctgtgcacgccggaaccgttgtggaagagggctccatagtcattgaagtccgctccgtgaacgatgagactcgactgaacaagatcattgacatgatcgaggattcagaggagctgaaggctggtatccaaagcaaagccgagaagctagccgactcgatcgtgccatacagcctggctgccaccgcactgacatacctcattacaagaaatgtgacaaaggcgctctccgtactgatggtagacttctcctgcgcaatcaagctaacaacccccatctctgtcatctccgcaatgaaagaggcctcagacaacaggataatggttaaaggtgggaagcacctggaagcctacgcgaatgcagacaccattgtctttgataagacgggaacattaaccaatgctcacccagtgttggagaaggtcatcccctgtggaaagtacgaccgggatgaggtcctgcgcattgccgcctgcattgaagagcacttcgcccatagtgtagccactgccatcgtgaagcaggccgagaaagaaggattgcaccacgaggaagaccatagtgaagtggaatacatcgttgcacatgggatctcaactacgtacgacggcaagaaagccatcattggaagcaggcactttctcgaggaggacgaaggcatccggtttaccaaaaagcaggagaaacttatcgaggaaaatgcggaggagtattcggtaatctatctggcaatcggtaaaaagcttcagggcatcctgtgcatcgcagaccctgtgagggacgaagcccatgaggtaataagtcagctgaaggccttaggcattgaaaacgttgtgatgctcactggggacagcgaaaacgctgcaaaacggatagccaaggacctgggcatcacccggtataaatctcaagtgctgccagaggataaggccagcatcattcaggagattaaagccgaaggccatcaggtgatcatggtgggggatggaatcaacgactctcctgcattaagtgctgctgatgtgtcagtggctatgcgtaacagcagtgacatcgcaagagaagtggcggatatttccctcctctccgatgacctctacgacctggcgacgcttcggttgcttgccaccggcatgctggacaagataaatactaactacaggcacattgtcatgtttaacgggtcactgatcgggctcggattgctgggagtcattccgccgacaaccagctcactgctgcacaacctgtcgaccatgctcttcggatatcgcagcactaagtcggttctcggtgaaaaagaagaggtcgttatcgatacaaacgtgattaataatgatggtgctttgattggccaatccggcaaatga

SEQ ID NO: 2751 - DNA, 279 bp, synthetic construct
  source 1..279: mol_type = other DNA
atggtcgaccggcatgaaattgtagacaaaatgtatgagaacaaacacacgctgctgttcgtcggcggaattgcaacagccatcgtgggggccaagatcctgaaatcccagaccacaaaggattacgccgcgaagggcatggcgaaggttctcacctgcaagagcgatctagaagaaagcatccaggacataaaggacaatgccgaggacatacaaaccgatgcaaaggctgctcagaaagaggccatctgtgtggatgtgactgaggaggaggaatga

SEQ ID NO: 2752 - DNA, 234 bp, synthetic construct
  source 1..234: mol_type = other DNA
atgatcaagaagctaagcgagctcaaatcaggagagcagggcaccctgagttcctatgggacaggcggggacctggaactgaaaaggcacctgctcggtatgggcttcataaagggcgcagacatcgaggtcgaaaaggtggccccattgggagaccccatgcagattaaggtcaaagggtacagcgtatgccttcgcaaagaggaagcgcggaacatcgatgtggaggtgtga

SEQ ID NO: 2753 - DNA, 2016 bp, synthetic construct
  source 1..2016: mol_type = other DNA
atggccaacctcaagataggcctcgcaggcaatccaaatgtcggcaaaaccaccctattcaataacctcaccggtttaaaccaacacgtgggtaactggcctgggaaaaccgtcgcccaggctaaaggttcctacaaacatagtgggaacgaggtggaggtcattgacctccctggcaactatgccctgagcgcgcatagtattgaggaaattgtgtcacgggactttatcgtagatgaggactcggatgtcatcgtgaacattattgatgctgcaaacatcgagcggaacctgtacctgactgtgcagatgatggagctcggagctaacctggtagtggcactgaatatgaacaagtacgcccaggacaagggctacacaatcaacgcagataagctgtctgagctcctcggagtgcccgttgttgaaattgaggctaatagtgatatagggaaagagcaactccttaaaactattgaacaggctgccgccaaccccgtagactcttctaagaaactggtgtataacaatgaacttaaagagcacctcgctgagctccaggccgtgattgaagaggacaaaaacctacttgatgtgccttcatcttggattgcaatcaagctgctggaaaatgatgaaatcgttgaggagaagatcgaaggctcttcaaagagaaacaatatagtgaatgaaacacagaaggtcaaggaccacttgaagggcatatttggcgaaggctccgaagaggtcatcgcaaatgccaggtatgccttcattgacggactcctgaaggagagcctcaccaagccggaccacttgaaaaccacgataagtgagaagatcgaccgcatcgtgacaaacaggatattgggcttcccgatattcctggttataatgtatgctatgtttgagatcgtgtttacgttcggcgcacccttccaagatctgatcgacgaattttttggaatcctgggggatgccatcatcggctcccttggagagacaatgcttagctccttcctagtcaatggccttatcggaggggttggcggcgtcttggtcttcctgccccagatcattctactgttcctgattattagtttcctggaggattgcggttacttagctcgggctgccttcgtgatggataagctgatgcataagtttgtgggcttacacgggaaggcctttattccaatgctgctgggaatcggttgcggggtgccagggattatggccacccgtaccatggaaaacgaaaaggaccgcttgatcactatgctgattgttccattcatgtcctgcagcgccaggatgcccgtatacttactgcttgtgggggccttcttcgctgcgaatgagagccttgtcatcttctcactgtacctgctgggcatcctggtcgcagtcatcgttgccttcatcctgcgaaagacgacatttaaagaaatggacgctccatttgtgatggaattacctgactacaaactccccacaatcagaggcatcataatgcacacccttgagaagtcctggggcttcatcaaaaaggccggtaccatcattctggtggccagcattgtcatctggatgctgagctacttccccgctggggtggagtacggaagcgccgactccgcaatcggtacgatcgggcaggtcatcgcccctgtgtttgcgcccctggggttcggcgaatggcagcccgcggtggccttgctctttggtctggttgctaaggaggtggtggtcggtactttcagctcgctctttggagtggcagaggagggagccgagattgccgcagcgatgcatggaatctttactcctctaaccgcgtacgtattcatggtgtttgtgcttctctacattccgtgttttgccgccttgggggcaatcaagcaggaaacaggcggatggaaatatccattgctgatggctggattgactctggtggttgcctatgtggtagcgttcatagtgtatatgattggactcgggctgggcctggggtga

SEQ ID NO: 2754 - DNA, 198 bp, synthetic construct
  source 1..198: mol_type = other DNA
atgcaatgcagtatgtgtggctacgagttcgacccactagagggagggccgtgcggcgcctgtggacagtgtaagggctgcaacaaggctttctgccccaggtgcggttatgggaatagcctcagcaccgtgaaggaatttgattacatctccaaactgcaggcgaaactgcgggccttcaaatcaaaggcaaagtga

SEQ ID NO: 2755 - DNA, 627 bp, synthetic construct
  source 1..627: mol_type = other DNA
atgcatatacctgatggttttatccctctctggcagtgcgcgatctactatgtgatcttgatcattgccctgtatttcgccggcaagtgggccaaggccaacctagacgaaaagcgcatacccctgcttgccgtgctcgccgcggggatctttgccattatgagcatgaacatgcccattccatttggcacgagtggccacatggtcggtggggcactggtggctatcgtgttcatggcgccagaggccgctgtcctcgtattcaccgccgttctgttgatccaggccttattcttcggagacggggggattaccgccttgggtgcaaatgtatttaacatggctatcgtgggaggctgtgtcgggctgtacacctacaaaggactgaacggcatcattggaaaatatccgtcaatcttcctgggcgcatggctggcaacactggttgcagctgtggtctgcgcgcttgagatggctattgcaggcactttccccctatccgtgggcgtcgctagcatggccctttaccacgccttcatcgggctcatcgaaggagtgctgacagtgattgttatatttgctctggagaagtacaggccagacctcctcgcctggaatcgggagtga

SEQ ID NO: 2756 - DNA, 294 bp, synthetic construct
  source 1..294: mol_type = other DNA
atggagctgagtaaatccgacaaatatctcatcgtcgtggggatcatcttctgccttgcattagccgtactcagcccgtacatcgccagcggagacccagacggactcgagaagtcagccgaagatgccaacgttggcgaagatgtggaggctcccgtgatggaagctccatttcccgactacacctatgagcctttggagaagataggggagatcggcgtcctgattctaggcgcgctgattacactgattgtggcctggggtatagggtacgcactgaagcggtctgaatga

SEQ ID NO: 2757 - DNA, 831 bp, synthetic construct
  source 1..831: mol_type = other DNA
atggcaattgaggaagtgcggaatttggaggtgatcgcctcgaaggacactatcattcacaacttggagggtagggttaaactcattgccatcctgctgatcatcgtgttctgtgtgttttcagacaggctaatagttccccttgtgctggaaatattcctgctcattgtaatgtacctggcagaactctcctttaaggacagctttaaacgcatcgctctgctcctgccattcggtgggttcgtgatcgccttccagccattcatccaccctggcaatatcatttggcaagggccttatccctggttgtttatcaccgacactgggttaaactggacagtgctcctttttgctcgcttgatcgtctgcctgaccgcgattgtcatcctgagtagcacctccccaatgcaggaggtggtgcagtcatttagaaagctgggaatgcccagagatctggccatgattctcacaatcatggtcaggttcctatttatcttcgtagatgaattacgggacatccgccagagcatgaagtctagaaacttcgatcccttcaataagaaaattccgtataaatggcgggtcaaacaggtgggctacagcatagcgatgatgtttctgaaggcatacgaaaagggagagaccatttatcttagtatggccagccgatgcttcagtgacaactcccgactgtaccatgccaagacgataatcggaaagcacgagtacatatttctagcttgcgtgattggcatcgtcattgtgcttgagctggttgtcctgttctattctggcaacctggattacctgggcgtatccctctctctctga

SEQ ID NO: 2758 - DNA, 1350 bp, synthetic construct
  source 1..1350: mol_type = other DNA
atgtcgctcatttattctattacgagcacaataacccgtaatatcgagaaaatcctacgcgagtccctgttgttcacaatcattttcaatatcctcgagttcattgaaaatcagtgggtcaacagttacttcaagggcctctaccctagcgaacggttcttgagcatcgtgaataagagtaagatcctcaaggaggagatattctcacccctgatcgtactggtcaccttcacgctctttatactgctggcaacggacccggtcccaagggatttgcagaccactataatcatcgctttcctcagcttttttattggcgcgattatctttccaagatttattctgaataatcagttgaaccaactcaacgatgaaacgaacaccgacaacaaagaatcaaagactgacaaaagcaagcagatccccttattcaattcctacgacgtatatagtatcggattctgcctgtccctgattggcattgtctttctgtttttgagcattgcctccgtgggggggctgcccattctaaagtcctcattaagatacagtcttaagcccgcatttacaatgccggtgtttctgattatccccggtatcggccttatggcttcacactatctcaaccagtacaagaataacgaaatcagccgctcccaaaccagattccggttcctggttctgactgcgatcggcatcggaactgtccttacactccagtaccggaccccaatcatcgccatcctgcttatgatgattatcattggatattacggtaaaatactatcagtgtgggaggtcattctgggtgccctgctgggcgtatgtgccatcatcggcattggatatttacgaagcctgaatgagcttgccattagctcgaacacaaatatcttctccaccttaaacagcagggccaacttcaccatgcatgtgctgaacctactgaactatattagcgggaacttcgggttgatgcacggaaagatgatagccagcgccatgcctggcagcgatctggggccacgcatgatggtgggcaaactgattgcttggaggacagaggttactgtgacccctacactcctcggacagatgctcgtggatttcgggaagctgggggtggcagtggagatgtgcctgcttgggttcctcctgggcactggatataaaatagtgaaaatcaccgagaactctttttacatagccctttacggcctgatcctcacctattccatcgtgggtgttgaaaccggaatcctggacatacagatcttggcttacttctttatcagtgcttttatctactttgcagttattctgaaggacaaaggcatccgaatctactga

SEQ ID NO: 2759 - DNA, 792 bp, synthetic construct
  source 1..792: mol_type = other DNA
atgaaaaaacccgggatcttgaataaaattacaatcattgacattctcataataatctgtatcatcggagcagtgggcttcgccgtgtaccacatggttgatgacgactcaaccaaggcttccgcgacctcctttgactactcaaccaacaataagatgctggagacgtatatgaattactacaaagatggaaagatcgtgaccagctcgctgattgggactaaatcaaacaccggcgagaagatcgaaatgaacggcacagtcctatggctgggagacaaccagaacgataaggtaaacatcgagatcaacaacgacggcaagcctatactcgctggtttctacaaagacacgccaaatgcagatgtctttattgaacagatcagcttggagacgaatggggacagctatgccaacatcacagacttcgtggtgagtccaaaggagattaagaatctgaaggaaataatatctaaaattcccaatgataccgaatatgagatcagtaccagcatcgccatcgatgaccttgattccgttactgctcaaaagctcgcaaatgccctgaataaaaataagaagccgtgcattgtcctgaagaacagcggcaccgtaatccttgaagtcaacagggccaaccagactgattttgagattgctgacaacgtgctgggggacttcaaaggtcagacaagcgagatccagattcggatctacaactctactgcccaagattccatagacattcagaatgccttcaacgtgttatccatcgcgaacacaagtcattga

SEQ ID NO: 2760 - DNA, 162 bp, synthetic construct
  source 1..162: mol_type = other DNA
gtgatcgatctcgacgagtgcggtgtgtgtgagaaatgcattcccgtctgtccgaaggaactgattgagaagaaggggtataccatgatcataaaagacggctgcgatgactgtggcatctgcctagacatgtgcccactgggagccatctacgaggaatga

SEQ ID NO: 2761 - DNA, 984 bp, synthetic construct
  source 1..984: mol_type = other DNA
atggcgggcctgatcagcggaattgtggctttgttcaccagctggctaggggtctcgggaacagtcatagggagcgttttcagctcatttctgtaccagttcctgtcatcctactcggccgagaagtatgaggagcgagtgggggaaggaacctccaggaagcccagaaacattggcagcgaaatcgtctacatctttccaatcgtggtcatcgtgataatcgaagtgatcttcatcctcagcgacatgcattatgtctttgataagatctttgacattctggagtatgggatattccagaacaatctctttaggcttatgggtctgggcctgattgctctgggggtgtatccattgctaagctccactaacattgaaaagatcaacggcgaaatcgtgcttgttgccggaatatacctcttcatcagaggcatggtggacatcaatgacttgaccatgcaggtgcataacatgttcttcgccgacttcgacttttttattgcaatcatcgtagtgctggccctggtattcgtaattttcaatgttcttcgcaattctacacaggaatactttaacaaggaagatggcgactacgacgcagtgaatgacgagttcacgcaaaaacggttcagcaagcctcggcggaaatcaaaagcgcgcaagattgacaccagttccttccacaagggccaggagtacaaagagcactacctcaacagtgattttaatgataagggtcacaaccagagtcccaacccggattccaatatggatgattaccataatgatgatctgaacaactaccaaactccccaggaggatctgcctatctatgaagaggagattatttatctccacaatccggaggaccctaacaatccaataaagaaacgcatcttaaaacgtgtcaaccccgacagccactacgatgatgactatgacgagacatacatcattgacgacgccaaaaacgacaacttttga

SEQ ID NO: 2762 - DNA, 318 bp, synthetic construct
  source 1..318: mol_type = other DNA
atgcgattctgtccaaagtgtggcaagatgctcatgcctaaaaacgatattctgaaatgtgcttgcgggtacgaggaaaagatctccgcggaagtagccgagagggagtataagttcaagggcgagaggaagaaagagaataaggtgatagtgacagacaataataacattgcactgccgaccactaagatcacctgctacaaatgcggaggcaccaagggggtgtggtggacagtccagaccagaagcgccgacgaagcccccacgtactttatccgctgcgtcaaatgcggaaacacttggcggcggagcaactga

SEQ ID NO: 2763 - DNA, 894 bp, synthetic construct
  source 1..894: mol_type = other DNA
atgaccacgaacgacaaagtctctgattacatcagctttcctaagacctttgaaagctataggtggtacaagccgattctagtgtttatcatcagtttcattatcaccctgatactcggtgccctgatcgtggcggtgttttatctgatcatgggtcctgatttcattatctccattttcaaagggggagctgagagcttaaacactagcatgaacattttcttcaccgacctgattattattgcattcattcccagtttgtatatcgcgtcaaagatcgttaaggaccggcccttttcctcctatagtagctcacgagggggatggaacttccgcctctactttaaggcactggcaatccccgtaattttgtatattatatacttgggggctgaaagcctcatcctcggatcagaaggcacatctcatttctcgatagcctttcttgctgtgcttttgatttccgtgccactccagtgtatcgcagaggagtatatattcagagggattatcatgcagacactggggtcctggattggcatcccactgatcgccatcgtcatccaggccattatctttactctcggccacggatacgacgccctaggactccttgagaccctggtgctgggtatcgcctacggcttctttgcctggaaaacaaacgggatcgagataagtagcgccctgcacacggcgaacaatttcagcctgggcctgttcatcatgctgggcctggaggcttcaaattccagcttccaactgtacgataagatcggaggcatcgtctacctgatcattctttgcataataatgtactacgttggcaagaaaactgattggtttggtgagatcccagaagactcgcagaatatcggcttactcaatttctga

SEQ ID NO: 2764 - DNA, 522 bp, synthetic construct
  source 1..522: mol_type = other DNA
atgatcgagattcgctttcacggccggggaggacaaggggccgtgacggctgcagaaattctggccaaggccgcctttaaagatgggaagtacagccaggcgttccccttcttcggggtggaacggaggggcgctcctgtgatggcatttaccagaatcgatacagagcccatcaacctccgatatcaggtctacaatccagaccatgtgatcgtgctggacgacggcctccttaatgttgtggacgtctattccggcctaaaagagaacggcgaggtaattataaacactcacgaaaaagtcgagagcgagagtcacaaggtcttcgacgtggatgccacaggcatcgcattggaaattctgggtgtgaacatcgttaacaccatcatcctgggatactttgcgaaaaagaccggggaggtaagcattaattcactgatagaggtcataaaggaaactttcccgggtccaatcggagagaagaacgcagtggccgcccagaaggcttacgatatggcttga

SEQ ID NO: 2765 - DNA, 243 bp, synthetic construct
  source 1..243: mol_type = other DNA
atggtgtccatcgggtgtgccatttatgaacctggcagcacgcgcaagaacaagacagggagctggcggacctttaagcccatcctcgacaaagacgcgtgcgtagattgcaataactgtctgatgttctgcccggagggatgcgtgaacaaggagcacgacatcgattacgactactgtaaaggttgcggcatttgtaaggtcgagtgcccagtgcaggcaatcaaaatggaaatagagtga

SEQ ID NO: 2766 - DNA, 1149 bp, synthetic construct
  source 1..1149: mol_type = other DNA
atggcaaaagaaatcatgaccaccaacagagcagttgcagaggcggtgaagctggcaaaaccccaggttgtgccggtgtaccctatcacgcctcagactacaatatccgagtacctcgcccagtttgttgccgacggcgatttggacgccgagtacatccgggtggaaagcgaacacagcgcgattagcgccacgctgggcgcctccgaagcgggagtgcgcgtattcaccgctacttcatcacaaggcttgatgctaatgcacgagatactgttcgccgctgcagggatgcgagctcccatcgtgatggccgatgccaaccgcgccatttctgctcccctgaacatctggaacgatcagcaggacagcatcgcccagagggacgccggatggatacagctgtatgtggagaatgctcaggaggctttcgacaccgtgttgcaggcctatagaattgcagagcatgaggaggtcatgcttccagtcatggtatgtttagacggatttattctgacccacacagtcgagcctgtcgatctcctggaacaagccgatgtggatacattcctcgagccatacgtgcctaagtttgcatttctggacccggagaaaccaatgtcgctagggaacttcgccgaccccgagtattacacagaggcacgacatgacatgcaagtggctatggacaagtccatggatgttatcaaggaagtaggggcggagtttggtgaaaaattcgggcggacctacggcctgacggagccctacctttgcgacgatgccgagatcatcctggtctgcatgggtagtatggcaagtacagtgcggtatgtggtcgataatctcagagagaaaggcgaaaaggtaggcctcttaaaaatcagggcttacaggcccttcccattcgaggaaattgacgaaattgtcaagaatgccgataagctggctgtgcttgacaagaacttcagctttgggatcgggggagcgctctttgctgacctgaaggccaaatgccacaaggaaacctatggattcatcttgggcctgggtggacgcgacgtgattcctgagtacatagaggaagccgtcgaacttactaaaaatccagtgaaggaggttacttggctcggcctgaaggaggatgaatga

SEQ ID NO: 2767 - DNA, 867 bp, synthetic construct
  source 1..867: mol_type = other DNA
atggagttccctgaagaggaattgctggcacccgggcacagaggctgcgccgggtgcggcgcagcgatcgctgtacgcctcgcccttaaggcactgggcaagaatacggtggtcgcttgtgccacgggttgtttggatgtaatgaccagtccttatcccgaaacagcctgggaagtcccatggattcatgttgctttcgagaatgccggggcagtggcctccggcgtggaacgggcactgaaagctcagggaaaggaagatgtcaacgtcgtggctttcgggggcgacggaggcacggccgatattggtatccagtcactgtccggggcaatggagagaggccacgacttaacctatatctgttacgataacgaagcctacatgaatacagggatacaacgaagcggagctacaccttacggtgccagcacaaccactagtccagccgggaagcagagcttcggcgaggacaagccaaagaagaacatggccttcatcatggccgcgcatggaatcccctatgtggcgactgcctcgatctcctatccggaggactttatgaaaaaggttaaaaaggccgctgagaccaaaggtccagcgtacattcacctccagcagccctgcaccacaggatggggattcaagcctgagcagaccattcagctgggccgtctggctgtggagaccggcgcctggggactctttgagatcgaaaacggcgaatttcgggtgacttacaggccccaggagcgcaaaccggtgaaggagtacctatctgctcaaaaaaggttcaaacaccttgacgacgagcaaattgcaataatacaggagtttgtggacaaccagtgcgaagagctggggatctga

SEQ ID NO: 2768 - DNA, 501 bp, synthetic construct
  source 1..501: mol_type = other DNA
ctcgagaaactaatagtggacaatgagctgtgcgatggctgccaggattgtgagaaggcctgcgcgggagtccacggggtgcctcgaatcactatccatgaactggacggttcttacttccccatccggtgtcagcagtgtgaggacgctccttgtgaaatcatctgcccaaccggggcgatgtcaaacctgggagtggacgtgaccaagtgcatagcctgcggcttctgcgccatggcatgtccgtttggagccatcagcattcagtacagcaacgctcacaagtgcaaccactgtgcagatagagaggagggtcccgcctgcgttcgcgcctgttccaagagggccatcgcagtccatgacattgcaaatgtgatcaaaaggaaacaaagagaacacattgagaagatgtatggcctggacaagcccgctaaaaagaaagggcttctcagtgtaattacaacggacacacgcgctcggaagccattggatggcgaatga

SEQ ID NO: 2769 - DNA, 429 bp, synthetic construct
  source 1..429: mol_type = other DNA
atggatgagctgaaagtcaacccagagctgtgtgtggactgcggcctgtgcgaacgcaattgccctaacaacgccatccgggttcacgacggggtcccactcttctgcatgcactgcagccctgagaaagcgccctgccttgctgtgtgccccaagggagccatagtggccctcggcggggcaatcacaattaagcaggataaatgtatcggctgtggcctctgtcatagcgtatgtcccattggggctgtcaccatcaatgagatcggtcaggccacaaagtgtgatctatgcgcagactacgacacccagcagtgcgtggaagcctgtccgacccatgcgctgactaacgatacggaaaagatcattcacgacaaacaggagaagatatccgaaggatttaagaaggtgcaaactctgttgaaatga

SEQ ID NO: 2770 - DNA, 435 bp, synthetic construct
  source 1..435: mol_type = other DNA
atgaccttcatgaataacggcgcgaatataaaacagttccaactgctcaaattcatcaacgagaactgcaatgatgatcacgtcatttccaagatttcaatcgtgctgcgccgagacaagattgaggccccctactacatgaacacgaaaattagattaagcacatgcatggatggggaggaaaagggagtaatccatgcaatggacatcctcaaccacagcaggaagcacaatctctgtgagtacaaatatgacgaaatcaaaagtctaatctttgacctgttcgatagcgaccacaagtccgaccaggtggaatttagtcagaacgacaaccggttgaagatatcgtttatgagcaagaacgatgaggagttccggaatcttttcgaaaactatcatgaactgtttgagaagatcgacggcctggtggattga

SEQ ID NO: 2771 - DNA, 255 bp, synthetic construct
  source 1..255: mol_type = other DNA
atgtccgatcccctgatcataaagaaggagctgctgttcaatgaatacaccgggcatgaggatggaaactgtctcgagtgggtcgacggccggctaagcaatagcgatgaccaccaccgcatcccatgcaaccttgaggatgcttttgaaatcgcaaagaaacaaaaagccgtgctcgtgatccagccggaatttcaggagcagtgcattttcgccgacttcacaggcgaagagattgacgagaactgggactga

SEQ ID NO: 2772 - DNA, 840 bp, synthetic construct
  source 1..840: mol_type = other DNA
atgatcactgagaagcagatcgaagatactatctatcaattgtacaaacaggccgctatcgtcctcggcgatgatgttaaaagcgccctggaggatgcgttaaaacgggaggacagtgagctggggcagctcaacatcaaagccatcctgaagaacattgaacttgctgaggaaaagtcaattccgatgtgtcaggacacagggctacctatcattttcgtaaagctgggtaatgttcaggtggaaaacctctacgagggaatcagaaaaggggtcgcacgggccacggaggaggtgcctctcagaccaaacgtggtggaccccatcacaagggtgaactctggcaatgtgggcgataaagtgcccatcgtggacatagagctgatagacgaagactacattgaatttaccatcatgcctaagggattcggctccgaaaacaacaatgccttaaagatggctctgccagctgagggcatagaaggtgtcaaggacttcgtcgtggagaccgctcttaaggccggcggcaagccatgcccccccatcgtagtgggtgttggaatcggcggtagctccgatatggcgctgaaattggggaagaaggccctcctgggaaaagtgggagagcgcaatggcgacccaaccctggccgaggtcgagctggaatgcctgaatcgaataaacaaggatggaaaagggcccatggggcttggcggacgtaccacggcactggatgtgaagattctaaagatggacactcacaccgcagggctcccgattggcgtagtcattcaatgctgggcagaccgccatgcgacagcccggttgagggacgactga

SEQ ID NO: 2773 - DNA, 1590 bp, synthetic construct
  source 1..1590: mol_type = other DNA
atgatcctcattataaccggccacctcgcctaccccctggtcaaggagatggcggataaatcaaaaaaggaaacggtcgttcatatcgcagagactcaagtggcggcttttctgacgcccaatcagattattaaggagatccacgagtacttcgaagacagattagacgatattgatctcatcctggtgccaggtttaataagaaaagacacattcctgattgctgaggaatttggaatcccctgttacaaagcctctacagatgccgcagacctggctatggtcctagacctggtggatgagctggaactgtcccagtcaacacccgctgataagctgatcatagaggagaagaagaagcaggccttgaagttcatcgaagacttcgaaaaagacatggagaagcgggaggagctactgaaaaaagagaacaatattctcgtccgcaacctgcccgtgggtgaggatttcccaatgagggtactgtctgagatcgcttccgcccctatactgagcaaagaggacctgattaaaaaggccgagttttttgtcgcctccggctctgacatgatagacatcgggatgattgccggggaggaccgttccgatgagattcccgacctgattgacactctgcggccaatcgtgggagacaggcctctcagtatcgataccctgaacccgaaggagattgaagctgccgtaaaccatgggattgacatgatcttgtccttagacaatgggaattaccacgagatcctgcctttgctcaaggaaaaaaatgttcctgccgttatcttgcctacaaacttctcggaaggctatgtgccccacagtcccgcggatcgagtggcgtcgatgcagaaacttgtggaggcctgcgatggcctggaagtggtctgcgacctcatactggacccagtcaacagcgccagtcttgtggattcaatcatcgctttccacgatttccacgaggtggataaaaagccgatgttctttggcataggcaacgtgattgagcttatggataccgattctgtaggggccaatgcagtgcttgcaggtatcgctatggaactcggagcaagcatcctattcactccagaggagagcggaaagactcatggcagcgtccgcgaactcgccatcgcatcaaagatgatgttcctggctaaaaaccggcaatccattccgaaggacttgggcgttgaccttctcgtattcaaagacaagaagaaaaggtttgacttgaagcaggatgacaacgttcccatcgtgaagcaggaccgaccgatcaagttcgtccgggataaggcaggaagctttaaaatacgcgtggaacacggcattagcgttaaggattcctatatcgtggccacgcacttcaagaagacaaagccaaccattagctttgaaggaaaaaccgccagtgaaatctacgaggagatcatcgagaaagggctggtgaccagactcgaccatgcggcctatctgggtaaggaactcgaaaaggcagaaatcgctatgcttaccgggaaagagtacgtgcaggactttgacctattcaaggaccctgaagagtttatctga

SEQ ID NO: 2774 - DNA, 357 bp, synthetic construct
  source 1..357: mol_type = other DNA
atgaacatcaatggtgatttgatgaataagaagattacggtagacattttgatgttcatcgccatcatagtggaatttctgagcctgcccatcctaatccatgagatcgtgggggtgggcctgctcttcctgattgcactgcacctgaaatacaacaagcggtactttaaaacaataggcaaagggaaatacaaccttaagaggaccctcaaccttatcatcaacatcgggctcctggcgtccttactcattaccattattagcggaatcttctcgagccagaagagcctgaagggcatgaagataggaaatcacaagatttcacacatccataaaagttccagctatctggtctga

SEQ ID NO: 2775 - DNA, 1161 bp, synthetic construct
  source 1..1161: mol_type = other DNA
atgaacgccaatcccaagatcctcctgtacattctcatgatttcggccctgggaatcaacactccactcagcattgtcgggatcatctcccaaatcgcggagtatttcaatacatccatagccattagcgggctctatgtgagcagcttcacctttaccatcgccatctgcggtttgttcatccctgtgttattcagcaaatacaaccggaaaaggacctttgtatccattttaaccgtgtttgctatctcaaacattgccatcatctttactaaaagcatttacattgcctctttctttcgcatcctgagtgccattttttacccggcgttcatctcaatagccctgacggtgtgcgaagaaatcgcccccaaaggagaagaacaagattacattaccaagattctgcttggtatatcaatcgggagcattgtcggcctgcctatcacaacgggccttgggacaatattcaattatcaggtggcaatgtcatggatctttgccatcaacctactttccctgatattgatcatcatcttcttccccaagatcaaaggcaaggctaaaagttatgagatgccgttctccagtctgaagtcgaaggagtttctgcttgctacaattggcataatgatgatgcccatcggcgctagcatagtttataattaccagccatacttcctgcaggttgtcagccacgtctacacctataaactcagcatcttcctattcatttatggactgttctccatctttgggacttggctgggcggcaagctgatcgctaagagagacaaggcgaccattctcattttccagttaatctgtggaggtgtgtttgtgctcctgtacctctttgcaaactatctgattcccgtcctcatattgattctaatatttgggatcttggatggaatgggctacaacctcatccagtacattgagagtagcgtaatcccagacagtccagagctggcaaacggcgtgtttctgagcattcttaatggaggcatcgctctgggcatagccatcgggggtttcttggtggacgggtttggcataatgtccatcttcattttcggagcactgttcttgctgcttgcattcatcatcctgtattacattattggaatcatgaagatgcctctgaagtactcttga

SEQ ID NO: 2776 - DNA, 873 bp, synthetic construct
  source 1..873: mol_type = other DNA
atgacagatgaagaactgaccatcgaagaaatagagaaaaaactggagagtacgggatacatctccaacaaggagatcagcacttcggtctttctaagcctctccctgaacaaaccgatactgattgaaggcccccctggagtgggcaagaccgagcttgccaaagcgctggcccaatctttagagcgggacttcttccgcattcagtgctatgaaggtattacctttgagcagatcgtgggagagtggaactaccagaagcaattgctccacctggaggcgttcaaaggcagcaagaaaggggaagattccatcttcgaggaggacttctttatcagaaggccccttctcacctctttcatgaacgagaagccaagcctgctgctcattgacgagatcgataaggcagatgaagaggttgagagcttcctgctgcaggctttaggtgaaaagcagattacagtcaatgacttggggacctttgaccttcagaatgacttggtggtgatgctcacgtccaatgcccagaggaatctccttgaggagactaaggaccgttgtctgttcctgtatatctcttacccttcagttgaacgggagatggctatcgtcaaagcccgcctgccaaacgcagaagatggcttggtgaaaaaggtggttaacatggtgcatcggatcaggacttttaacctaaataagaaacccagcgtacgagcttcaatcgattgggtgaacagtgtcatgcacctcgataaggactataagaacgtggatgccgccctggaggacagtgtgggggtagccattaagacagagccagacaaggcaaaggtcgtgaaagagatatttagaaacgaatacatgaatgactga

SEQ ID NO: 2777 - DNA, 1161 bp, synthetic construct
  source 1..1161: mol_type = other DNA
atgacagagcgcatcgtccggctgagtaatgacttgcgaaaaaagggcatgcctgtcagcatcaggtccactcagactgccatagatgcctacgcccttctgggggaagatgatctgccaaccctgaaggatgcattccgctcaatttatgtcaaaagcaaatacgacattccaaaattcaatgagtcatttgacggtttcttcaccaaaaagcaggtgaaaaacctcaccgatgagctgaataaatccagccgcccaaacagcatgaaaggcaagttgtcccagcacgaatggaaaatcaccaaacaaaaaggcaaaggcggcaagcagatccagatgggggctgagcaagcgatggagtacttcgccggaagacctgtgctcgaggaccgggacaaggacctggccagggacaacgacatcttaaacagtgacctatcgaagctgaacaagtacgatgagcgtgtatttgagctgtgtgtagagcttggacgaaagattgctaacaagcagtcaaggcgaaagagactggcccggtccaataagattgatatgcggaggaccatgaggcagaacatgaagtacggaggggtcccgatagaccttgtccacgtcaagaagaagccccatcggaagcagcacctcttccttaacgatgtgagcggttcctgcgagtggatcagcagctggtttttcatgctgatgtttgcctgtcaaaagacattcaaagactcgcggatgttcgaatttgataacaggacaatagaaacgacggaatttctcaaagaaaagtatatggtgaacgcgttcgcagaaatcagactcctacgtatgagaaatatgatggtgagaggcacctccaatatgtacactgccttccagagttttatgaaacaggcggacattagcaataagtcttatattatcctcctgtcagattgccgcgattgggctggccccaaggtggacggggtgcccgccagtgtagagctggtttcccaaatgtctagcatggctaaaaagttggttatcctcaaccccgaggacaagaagaagtgggatgtggttgacagttgcgtgtctttataccgcggagcaggggcacaggtgtatgaagtgagcacactgaatcagctggctgagtttgtggccgacatgtga

SEQ ID NO: 2778 - DNA, 918 bp, synthetic construct
  source 1..918: mol_type = other DNA
atgcagtcttgcactaaatgtggcaacccaaagatcataataaaaaaaccggctagcggacaggccctgtgcaaggactgcttcatagagagcatcgagaaaaaagttcgccaaaccatcaagcgggaaaactttatcgataggggcgataaggtgttagtagccctctccggcggaaaggatagtgtcgtgaccctggatatcctgaatagctatcgtgagcgccacatcatagacctctgtgccgttaccattgacgaaggaattgcagggtaccgggaagatggggtggagattgccaaggcacatgccgagagactgggcatcccccacaaggtcgtgtcattcaaggaaagtttcggaatcgacctggacgagatcatggccaaagaaaaccacagaggctcatgcacctactgcggtgtcttcaggcgatggatcatcaatagggctgcacgcgactttggggcgactaaaatagcaacaggccacaacctggatgacgagacgcaggctatcctcatgaactaccttgaggggaacacagaaaacctcgctaagattggtcccaagacagagtcgaatgacgagttgttcacagtgaagatcaagcccctgcgggaaatcccagaaaaggaaatcggtctttacgctattgccaaagggctggatattcacctggcgggctgcccatatgcggaggagagcttccgaatggagatttccaatattctcaaagacctaacgaaggatcatcctactatcatgtatagcaccctacggggatttgacaagatgagacccgccattaaggaagagtttaaatccaattttgtgtacaaacgctgtgagcggtgtggcgagcctagctccaacagactttgcagggcctgtaccttcctggaagagttggactga

SEQ ID NO: 2779 - DNA, 201 bp, synthetic construct
  source 1..201: mol_type = other DNA
atgagctttaagctgaaaatcaaggacaatgtggaggagcgggaaatagatggagagctgacaattaaaaagctgctagacgacctcgatctctccagcgagaccatggtgacgaaaaagaacggggaaatagtcattgaggaggaaaccatcgaagacggtgatgaaatcgagttcatccagatcatttacggcggctga

SEQ ID NO: 2780 - DNA, 720 bp, synthetic construct
  source 1..720: mol_type = other DNA
ctgtctagcaatgctaccggaacacggattcaccagtacatcaaaaaggaaacgggctgttacgacccctatttttaccaaaagaaggagggcaatgagattgcattatcactcatgccaatggtgcgcgagatcctgaaggaggacaacgacctggaaacctacgttaagatagccatcgtggggaatattcttgatttcggcacttttgatttggatacagacttcgaatcactgatcttcgaggggttgaagaaagagttggtcatcaacaaaatcgacgagtttgaagaggccttaaagaaatatgataacgttctttacctagtggacaacactggtgagattgtcttcgataagcttctgatcgaaaagataaaggaatacgatgtggacattaccgtggcagtaaaggaaaggcctatactgaacgatgcctgcatggaagaggccctggaggctgggctggacgagattgccgatctgatcaccacaggctccgactcggtaggcgtggtcgaatccatgatctccgatgagttcaaggagattctactcgacagtccgtttgtgatcagcaaaggaatgggaaattatgagggactgaccgaaatggacctcgacggtcaggacgtcttcgtgctgttctgcacgaaatgcaacgcgatcagcaaagacctcgggctgcccgagggcagccatatcctcagtaaactctga

SEQ ID NO: 2781 - DNA, 825 bp, synthetic construct
  source 1..825: mol_type = other DNA
atgaaattcggttttattgggtttggggaggtctcatataccctctccaaactgctgctggcgctcgactttgagatcctcagttctatcgaaggacgttcccagaaaacgatagacctgattaatagcctggacctgacccttcttgatagctttaaagacgtggccaaggagtcggacgtgttgatcagcgccaacagtcccgatatcgcgctcgatattgcaaaaaactacggcaatctcacaaacggcttcttcctggatttcaataacatttccccaaaaactgtgttcgaaatcgaggatatcttatccgatgacaagttcatcgacagcgcaatcataggcagggtcaactcggacgaattgaacatatacctatctggaagcaaggcccagttcctcttagataagataaagaaagagattggtagcaaagggattgacattaacaagatggactttaagatcaatgtcaagctgatcagtgataagatcggcgacgtttccaaactcaagatgctgaggtcttcatatacaaagggagtgagcgctctgctggtggaaagctttgagttggccgagaagttggatctggaagaggagctgtgggagattcttagtctaactgaaaaccgcgatttcgagagaagctccaagtcacggatcgatagttcaaagaaggcttccaaacggagatatgaggagctcgtagaagttctgtacttccttgacaacgtggacaatgtggacgagagcaagatcatggctcgagccaccaaagacaagttcgaatacctgaaaaaccgcgaaaataaggagtga

SEQ ID NO: 2782 - DNA, 1299 bp, synthetic construct
  source 1..1299: mol_type = other DNA
atgatagcgattagtgccgatttcgatccagtccacaagggccatgagcagctcatcaaaaaaggaaaggaaatcgctgaagagaagaacagtaagctagtcatctacctgaataaaggctatagtgcaaaccacgccccattttttacgccatttgacgcccgctgccgcatggcaaaggccttaggggcagatgaggtcgtgggggtggagggcctgcaccacagactcattctgtcttactccgtgccgattaggctcgcgcagatgcatgaggatggtgttaccgattacatcactgcagccgacattagcctggaagagatcaaaaactatgccgagcgtttcatcaatgaagggagctttcttggaatcccacaggactttccctcccgcaacgtaatacgttggtatgctatcaacgagttcctatcgaagaaattcaaccgaaagattgattttcaccttattcccgaagtgagctctcccaaaaagattagcgggcgattcatccgaaaagagatactcaacaacaatctgaccatctcaaaggaaatcagggaattgcttcctaaaacaagtatcgaaattctggaggaggagattgaaaagggcaatgttcctggaaaaaggaacatgaaggtgcttaagcacaagatgaacacgtattcccgctccaacctgacaaatatcgcctacctgaacggcaaggtcatcaaccggattgtggaagggagattctacaaggaagatgacgagtccatctgggctagcttcagaagggcagactacggtcccgtcatgacccggctggctgcctcttgcattgaggaggaggtcaccaaagacgaagtcctcaagctgatgcgccactacgaatcaaaaggtgtaatccctccggagcaaaatgtggacaaaatcatcgagcgggcgtggtacgtggctttggaggttgacaagggcgtgcccgccaaagaggcaaatgagaagttcagaaagaaggagaacctgaagttgaatcctatgctcagcctggaggccggattgaacctgacaaaattcgaagccaaaaagattcatgaaggcattgaagccaagatctttgtggataaggacaacaagatatcctgtgagatcaaggacaagaagataaaagtaaaaaccgctttaaagctgccatcgatggaggtgacttatctcagatacatactggactcaaggtatatccccgtgagcggagagctcatcaaaaataagcggaatgatttccgggtgaaaataactattcatgactactga

SEQ ID NO: 2783 - DNA, 474 bp, synthetic construct
  source 1..474: mol_type = other DNA
atgagcatcattgcaatctttctaggaataattgtcatcgcgttcccccttttagggatcattgccgcctccgatattctgggcctcagtgtcctgctgctgtccatctttttgctccttaacggtatttctgaagtggagtacaacaccacaaaagggcttctaaataccatcatcggcctgataatgctggtggtcagcctgggactgatcttcaacccaagcatattttcgttcctgaccgctattacgatttacctcgcaggaatcttcctcataatcatcggcctggtggtgattgttggcaaccgggagaataagtacaagttctggatgggaatcattggcattatcctgggggtaatctacatcatcctgggcacttatatccacaattcctttgtgctcggttcattgattggcatatggctcgtggccacagggatcttgaacttactgagtgacgggtattga

SEQ ID NO: 2784 - DNA, 1089 bp, synthetic construct
  source 1..1089: mol_type = other DNA
atggaaattagagagctgacaaaggagatcagagaccgatccatcgaatatgcaaagccaaaggacttggataacctgtcggccagctggtaccaagaggacctcttatatagcggtaagggcaagacaatcttccttattctccctactcccgggtgctcctgggctctgggacccagcggaggatgcactatgtgcagctacatctccgactgctatctaaagccaatcgaaacctccaaaatcatcgagctctttgaaatggaactgggcaaatgggattttgctgaggactacaaaaacggggagaagattgcaataaagctcttcgcctccgggtccttcctgaacccagaggaactaccaaaggaagctcgcaactacatccttcagagattggccgacctggatgagatcagcgagatagtcgtagagtcccggcccgagtatgtgaagaaagagataatcgatgaaatcttcgagatcatcggcgacaagctctttgaaatcagcatcggcctggagacgtcaaatgaggagacccgcttaaacaagattaataaagggtttaacaataaaagcttcgaaagggccattgacaccattaagcagagtaaagagagctatgacatcaagtcaaaagcctacatctttgttaagcccattctcctgtcggaaagtgaggccatcgaagaggcaattgaaaccgcgagctactgcgaaagtattggtgtcgatagggtgtcttgttgtcccgccactatccaccggggaacacttattgaacgtctgtggcgcaggggcagctacaatccgccttggatctggtctacagtggaggtgataaatcgcatccgagagaatgtgaatattccggcgctgatggacacctccgggttcggctcacggcggggcccttacaactgtaagaagtgcaataaagagctgaaacataagataattgattcaaacttcgaccagagccagatagagcacgattgcaactgtaagagtgaatggattgctgaggtcaagttctctaacctgaacaggagtaaaacgcagaccaaacacttgcctctgtactga

SEQ ID NO: 2785 - DNA, 957 bp, synthetic construct
  source 1..957: mol_type = other DNA
atgaaatttggcatagagtttgtcccccagataccactagatgaactcgtgaggctggtgaagatagccgaggacgtcggcttcgagtacgcatggatcacggatcattacaacaataaaaacgtatacgagaccctggcactgattgcggccaatacggagaccattaagatgggccctggtgtgaccaacccatacgttagaagtccggcaatttccgcgagcgcaatcgctactatcgacgagatcagtaacgggcgcgccacattcgggatcgggcctggcgacaaggccacctttgacgcactggggatcgcctgggagaagcccgtgtccacaattaaggccgctatcgccgatatcaccaccctcctcgacgggggaaaaaccgaagcgggcgccgcgttggggggagccaagaaagtgcaagacgcaatccctatttacatgggtgcccaggggccaaagatgctggaaacggcgggcgagatcgctgacggcgtgcttataaatgctagcaaccccaaggattatgaggccgccatgcctatgatcaagaaaggaatcggcgaccaagataaagatttcgatgtagccgcctatacagctacatccattggtactgacagcgaagcggctaaaaacgccgctaagatcgtggttgcatttatcgcagccgggtcaccacccccagtcatcgcacggcacggactgcccgagggattcaacgaacagatgggcgagtttctggcacagggtaatttcggcggagccattggcgccgtgactcccgaggctcttgacgctttctcggtttgcggcactcctgatgagttcatacccaagatcgaagccttggctgacatgggggtgacacagtatgtcgccggatctccggtgggtaagaatgtggaagaatcaattaaattactcggagacgtcattgctagcttctga

SEQ ID NO: 2786 - DNA, 210 bp, synthetic construct
  source 1..210: mol_type = other DNA
atggaaaccaatcggctggaggccttttacgatgcgataattgcaatcattgtaacagtgctagtgttggagctgccacagccggaaacggctaccatagccggcatcctggccctgaaggtgtcctatttcacttacctcgtcagtttcctcgtctgccagagcctggcaatctcaccccttgacatctgcagctgtgagaaaaactga

SEQ ID NO: 2787 - DNA, 315 bp, synthetic construct
  source 1..315: mol_type = other DNA
atgtttgtgatatccctcattccttacttaacaattttcgtcgcgaacaatcccaatagtcttctcagcgaatccctgtacggactggatttcatcctggtggacattatcctctttatcatgagccggtacctgataaagataaacgagaacagcgagtacctgtctgaagtattggaccttaaaaacgcaatcatcattccattcatcttcctaattatcgggttcatcataggctttctgggctatccgatcgccatcagcattgtctgcttgattaccatcgtgaggtcgatcctgtattcaatcaagtga

SEQ ID NO: 2788 - DNA, 483 bp, synthetic construct
  source 1..483: mol_type = other DNA
atgtttattgaaaaacgctgcacaggctgtcgggaaggcagcgcctgttatctgacctgcaccatcgctccatgcagcattgaacatggaaacatcgactactgcttcgagtgtgaggagtatccctgtgacaagtacgatgggattgagctctacgattcactcatcacccacaggaaccagaagaaggatttgcaaaaagcaaagactatcggtatcgagaactatcacaaggagcagctggagaagaaggaaatcataaaccatattctaaacaggtacaatattgccaaccggcacatcttcttctgcctggcggtgaatctgcttgaggtcgacgacctgaagcagatactgaaagactgcgatgagagtacgaaagacatggatctgaaggaaagatccgactatatcaaacacgagttatacgaatttgccaaaaagcgcaatatcatactcaaacttaatacagggcgatactga

SEQ ID NO: 2789 - DNA, 252 bp, synthetic construct
  source 1..252: mol_type = other DNA
atgaattacgtggaggaagcggtgcaactgttcgaggacgggtacatgtgttcacaggccgtcctggaggtattttgcgaagagttcggactaagtcgggagcaggcattcaagatcagcataagctttggcggcgggatgcggaaaggcgaagtgtgcggagcttgcaccggcgccatcatggcactggggctcaaatatggtgatttcgaacgaatggcccagattaggagaaacaagcgctccctctga

SEQ ID NO: 2790 - DNA, 456 bp, synthetic construct
  source 1..456: mol_type = other DNA
atggatgatttgcctgagatgatatcaatctggaacgagattgtcgaggagggcaacgcgttcccccaggaagaagtgctgacattaaagaccggactggactttttcaactcgcagagtcacgtgggagtggcatttgacggggaaattctcggactgtatatcctccacccgaataacgtggggcgctgcagccatatcgccaacgccagctacgtagtgtccagcaaggccagaggcaaatacatcggccagaaactggttctggattccatcgaaaaagccaaagagctggactttctaatcctgcagttcaacgctgtggtcgaggataatttgtctgcaaggcaactgtatgagaagctcgggttcaagcagcttggtgtcattccaaagggcttccggctcgacaatgacgaatttgctaatatatgtccctactacattgagctttga

SEQ ID NO: 2791 - DNA, 660 bp, synthetic construct
  source 1..660: mol_type = other DNA
atgaactaccaagaaatcagtaatatcattaaggagagcctgaaccttaaaaccagccctgttagcgtgaagctgtttgaaaaggagaaggatgcagaagagatcttcgagaagacgaacaagactattcattgccaggcaattattacagcgagtaagggcaaatccttttacgggaccatagacgaaatcgggtgcccgatcggcgcgggaattttgggtctaaaggaactccccgaaaaaatcttaaacggatcgcagttcgacaagatgaatgtgacctcctctcaggaaagcgggaaagccctgattgatagcgtggctaagaacaatcgcatagaggccatcgcttacatgcctctggaggattccaagatcgagcccgacgtggttgtggtcattgccaaaccaaggcagatcttcgatctgatccgggccaatacttatcaggaaggaaaaagaatggacaacagtgtgggcggaacacagtcactctgcggggacattgtcgtaaattcaattcagacaaacgagccccacatctcattcggctgtatcggcagccacatggccaccgagctctccgaggaccaagtcataatcggtataccaatatccaaacttgaggagatcgctaactctctgaatatcatcaactga

SEQ ID NO: 2792 - DNA, 750 bp, synthetic construct
  source 1..750: mol_type = other DNA
atgaaattcaaattcaacacgccactcactgagggcaagataatcaagcgcaacagccagttcaccttggatgtcgaaatcaacgacaacattgagaaggtgcactgtcccacaaccgggcggatcggaaatatcgatctcaaaaacgtcgcgggactgctgtccaagagcgataatcccaaacggaagacaaagtacaccctggaggccatctccatcagcaacctcaacaggaaagataaaaagtggatcggcataaaccagatcgcttcaaacaaatacattgagctgtttctaaaaaatcatctgctcgacgggatgcttccggagtatagtgagatcaagagggaagtgagcctgggcaagtccaaattggactttctggtggggagcacgtaccttgaagttaagactcccctgcagaccctccaaattgagtacgatacggatattaaaacaaagaaggtgagcagcttctcgtcaactgacagattcatcaagcacatcaacgagctggcagacagtcttgagagtaacgaaaaggccattctgctaaatacctttcagtacgacaatcctggatatgaaatcctgaatccaagcacaaattatatcgaagtcagcgaaaatgtggaccgctgcattgagaagggcttggagatatggcaggtaaacatgaagatagaccacgagggtgtggaattactcaaatactggaataccacctccaactttcgaaagattaagtga

SEQ ID NO: 2793 - DNA, 510 bp, synthetic construct
  source 1..510: mol_type = other DNA
atgaagagcaaggataaaattgtcaagtcccttattgaactaatggaaacccacgagtttgaggagataactgtgaaagatatctccgagctggctgaagtgaacaggtcgacctattatcgcaatttcaagagcaaggaagacatcatcaaatacaagttggaaagcataatggacgagtacctgaaggagtttgaaagtaaaactgataaaacaaaagagacgtatatccgaacaattttagagacgttcctcaagcatgaggagttcctgaagatcatacacaagcaaaatcagagctacatcctgcagaaggtgctcgccaactacttcggcgacgtactcaaggatacctctaagaaggaacggtaccaggtctattaccacatcgggggaatttacaactttacaatctgctggattgagaatgacatgaaagacagaccagaatatctggcaaaaatcggcgccgagatcacctcaaacattgagccctacctgcttaaatga

SEQ ID NO: 2794 - DNA, 1059 bp, synthetic construct
  source 1..1059: mol_type = other DNA
atgaagcatagactcaatctggacaataaggacccgaattatattttgctgaaagagatctttaaaattatggatagccggaagtccaagagcatcctggcctcctatggattcaaaaacctgaacagaacaatcttcaccttcaagattatctttataagtatgttcttcggcattgacatcccattcattctgaacgagcttaagtccaagaaagagctgcgcaagtacttcaatatttctgaggttctgactgcagatcaggtgtacaaaatcttttcggaaataaactctgagaagcttataaagtgtcttaaccggatcttaaactcaaggaatatggtgaagcgccgcgggaaaaagacctttatcgtggacgcgacccccgtggacgtggatattaatttccaccgtaataaaaagacaaaagagcatctggagaaaattaacctcaagtggagttattcctcctctaaaggttattatatcggttttaaggcaactgtggtcctggattacgacagcatgaatcctgtttgcattctcgtccactcgggggctcccaacgacgccaaactcttcgaagagattctcgaaaaccttcagaagaggcgcataatccggaaaggagacacactcatctttgataaaggctattacagctacaagaactaccagatcgggatcagcaaatacaaaatcattcctttcatcttcccaaaggaaaagttcagcaggacccgactggacgacattctgacttaccccctagccgtcttcaacaagacaaagcggataatgaaagaaaagcgactgtacaacagtttaaaaatggaattgatgaaaaagatcgatagttgggagaagtttaagcccattaggggcaagatagaggattttttcaaactcttgaagcagggcttgaatatgagagagatccacaaatatacgccaaagtcagtcgaaaagaccgtgtacctaaacgtatttctgggagctctgatcatctcacaaggcttttactccaagacggccatccagcaactgagcgagaactga

SEQ ID NO: 2795 - DNA, 990 bp, synthetic construct
  source 1..990: mol_type = other DNA
atgggctgcatggggttcggggacccggagaacggaatgcacacctggaccctgcctgagaaggaaagcatagaaataattaccaatggcctacacaacggcattaacttctttgacactgctatcgggtaccagaatggcacttccgagcagtatgtgggaaaagcaatccgggaaaacgctagccgggaggaagtggtggtggccacaaagttcctgccccgttcccaggaggatatcggaaataatgtctctgggcgccagcatatccacaatatggtcgagaaaagccttataaatctgggcctagattacatcgacctgtatatctaccacatgtgggactacaacacgcccctctatgatctccttgaaggactgaatgaggtcattgaagagggaaaagttaagtatattggaatctcaaactgttttgcctggcagctggcaaaggccaacgctctggctgaaatggaggggtttgcgaagttcgtatcaatccagggccattacaacttaatcttcagggaagaggagcgcgaaatgatcccactgtgccacacagacaacattgccttgaccccatacagcgccctggccagcggccgattgtcaaggctcccaggtgaagagtctaagagattaaacgaggactactacgccaaactcaagtatcaaaattccgagcagcaagatctcaagattatagaaagagtcaacgagcttgcgcagaattatggtgtgtccatgacagaagtgtcgctggcctggctcctgaccaaagtgaccgctcctatcgtaggggccactaaaatgcatcatgtggagggtgcagttagttccgtggatctgacactgacggaggaggacatcagttacctcgaggaaccctacatcgcgcacgacttggtgggcgtgatggcagacaacaaggttagcgccagtgataacgagaaagtctggattaagcacacgaagaacaagatttga

SEQ ID NO: 2796 - DNA, 534 bp, synthetic construct
  source 1..534: mol_type = other DNA
atgaagatcatagtgttgaagggctccccaaatattaacggttcgtctaatcttctggcagataacttcattaagggagcggaagaggccggccatgtggttggggaaatcgacgctgctcacgccgacatcgccccctgttctgggtgtgtgagctgcggctatgaggggccatgcatcatcagcgacgatatggatatttttcgggaaaaaatcctcgaggccgacatgctggtgtttgtcactccgctgtactactacggaatgtcagcgcagctgaaaatcctcattgaccgcttctgctcagccaacagttccatccagtccagtcacttcaaaagcgcactgataaccgtagcctataatagctccaactggacgttcgacgcactggaggcccactacgataccctagtcaagtatctgaacctcgacgaccaaggcaggattttgggttacgggtgcggcacacccagcatgacaaaatactctgattatcctaagaaggcttacgagtttggaaagagtttatga

SEQ ID NO: 2797 - DNA, 1401 bp, synthetic construct
  source 1..1401: mol_type = other DNA
atgccgaatttcttctccggaggcgaccttatatccaataacaagccgcaggaaacgtttaggggaaaaactgaccgggcgattaagaaacgacccccatggaaggaatacaacctgcatattgtgtgttttgtgctggttgccattagcatggccattggagtgaaggagatccgtatcaccgataccataagtgtgctgttgctgcctctcatttacgccctaatcatgggtctggccctcttcctcgctaagcccattaagtttatagggaaaaagcagtcaaaggtggcggaaggggccatggtattgtttattggcgttctcatcgctaagctggcgatttcgagcggccagtccatcgacatcatcttcaatgtcggcccctccctgatcctgcagcttctcggggatctgggcaccctgatcgcactgcccgtggctctgattctgggattccggcgggaagtaatcgggatggccagttccatttgccgcgaaccgaacctcggggtcattatcgacaagtacgggttcaaatcccccgagacaaggggcgtgctggccatctttgttataggaagcattatcggcacgccttttatcagcttcctaagcagcatatgcatctcgctcattccttaccacccatatgccttcgcaatggcttcgggcataggcagcgcaagcatgaacgctgcagccctggtgcccttggtgcacatgtaccccgccatggctacccagctggaggcctttgctggctgcagtaacattcttagcttctgtctgggcatctacatgtgtatattcatttccctgcctctggctgaaaagttgtacaaatggttatctccaatcataggcaaaggggaggggagaaccatcgatgacgaatacgccatcgagggggtgaaagacgataagtatgcgacatctgaggatctgagctctgggaagattgagagatgggtcactttcctcgtactcttctcaatcatcggcacagttggaaatttcataggttatcacacccccttgctggacgtgttcatcggaatgctaatcatctcaatcatcaccctcatcggaatgtgccttgagcgcataattccatgggatatcccatcaatcatctatatcagtcttcttgggattttcttggccattcctggagtcccaacttcagacatcattattacgtatgtctctcaaattgagttaactacaatctgcacagcatttttagcatatgtcggtatcgccatcggtaacgactgggaggagtttaaaaagatcggttggaaaggaatcatcattgctataatcgtgatttccggcacctacctcggttctgcaagtattgccaacctggtcctgtttgtgacaggcatgatctga

SEQ ID NO: 2798 - DNA, 894 bp, synthetic construct
  source 1..894: mol_type = other DNA
atggcgcggagcgataagaccctcgaggacattctcaacatcattttttatgacaaaccgtccactcaagacgaaatcgccgaaaaactgaagattagtcgaagatatgtgacgcagctgcttaagccactgatcgaggaggacatcgtcaaaagggcctatgtcatcgacttgaacaagtacgatgaaatttacggctcgtcagaccctatcttcaatctcaaacagcattccgcattcttcctcatcgagaacatgctaagcagcatgagcgagcatgtgaaggagcaggtgcagatgagtttcgacgccatcctgactaatgataaggacctggccgaacaggctttaaagctggattttaccacaaacaacatgtacgagaaagtacgcgcgtcggtggagacggtcgttgacgttgacccccactccaagctgtccaagatccttctgttcagcgaggcggcatacaattatgaacgcattggagattacagtggccacatcgccaaatttgtcattaatgagaagactgccgtagacgatgaactgcttgatatactgaaaaagatgcacaagtacgcacagaaatctatcagctacgcaaccgatgcttttataaatgggaacattgactcacgggggaacctaatggatacagaagaaaaaattcacgagacacaacagaaagccatgaacctcatcgccaaccagatggtggagaccagcttcgaggacatagaaatgtccaattactatatctacatatcccgggtggtgaagagtttcgagagaatgggtgatatctcagtggagatcatggacttggctgctgagtttcacaaggacatacccaggccaacaaccccccgtagcttcagggaaaagatttga

SEQ ID NO: 2799 - DNA, 1935 bp, synthetic construct
  source 1..1935: mol_type = other DNA
atggaagggtcggaactgcagaacataaaaggaatcggcgataagctgtcccaaaagattctgctaaacctgggcggagaggaggaactgaaccgggtcataaatgagctggaccttgaacgcttaatccagattgaaggtatatcccagcgcaaggcgattgaaataatgaaccaattactgggcaatcctgcacagaagttcttaaaaagcgaacgtgctattcagctctatgaggaaatcattgaaaaaatcctcaaatactccaatacaaactactctaaaaacagaatcttgttgttagcgcccatcaaggatgagtttattattgccgaaaggctgtcattcgtcatgtcggccaaggagagagtcagcaaactgcctttagatgagctgaacaagctgatgagaaatctccacgagcccaagaatgcaaaggcaaactacgatgccagcaaggcaatacttgttgaatccgctgaggacagcgattatctcatggacctcgggctgaacaaatactacaccatcctaactgcctccgactcaccattcttcaaggaggaaatcagtggctatgagcttgtctattacatctactctgaagggatactcgactttggcgacatgcctaacctcatcatgatcagcaaggaagctgaggactaccagcttgtgcccgagattatcctggattacttcaaggaaaacagggaactcttcgagaatgtttgcaaaatccgaaagatcctaggggaaagcactgtcctggaggatgtagggccggtcctggaggagcttgacaattacaagacccaagagattgacctcgatggcatcgtgcaggaagagaagacctatattgatgaggaacttaaaacgaggatacacaatgtggacttggagggcgatgaggtgctggacctcctgaacaatgccttgccccccaagatagagaaaattttcgacgaaatcctgtctaaatcaaaagagaacatcaaggctaaaagtggaattgacttcgacccattcatcaaaaaataccccatcgaaattgacgatatggagatggagcggatcaagatggagattctctccagcagcgagaacaactattttgacatgaaaatcactgctgccgaacatctggcgctcattaaggagcaggccgaacgcgaggtgaaggaaaccatcgaatttgactttgagtatgccctaggaagtttcgcataccactataagcttaacgcccccgaattttcaaacgaatacgccctcgaaggagccctgcatttggaactatgcctgaaggagacagaggaggacaacgagaatggcgagattcagcggatagactacaaactgaatgagcaggagaacgtggcgctcctgacgggagcaaacagtggtggcaagaccacactcctcgagacgatcagccagatcgcgattctggcccagatgggcctgccagttccggccaacatggctaagatcaaactgttggatgagatttatcacttctctaaaaagcgatccttggatgccggagcatttgagtcgttcttgaatgtgtttatgccaatcgtgacatccgactgtgagaaactggtgcttcttgatgaactggagggtattacagaactggaggccgctgtaaagatcatctcaagctttattgagatgataaaggacagcaattccttcgcaatcatcgtaacccacatggccaatgagctgatgaagtatacagacattcgggtggatgggatcgaggctactgggctggacgagaactataatctgatcgtggataggacccctaagatgaattacttggctaagagtacccctgagctcatcatcaaacgcatgtacgagaactctagtccagaactgaagaaggtgtacggtaagatcctggagaaattctga

SEQ ID NO: 2800 - DNA, 3054 bp, synthetic construct
  source 1..3054: mol_type = other DNA
atgaaactgcctgagcttttagccccggtgggtagtgctgagcacctcaagacggccatcttatctggcgcaaactcgatttacctctctggcgagaactatggtgctcgcaagtacgctgagaacttcagcctgcccgaaatcagagaagcgatcaaatatgcccacttgcataatgtcaaggcctatgtgacagtgaacaccctcatcaaggaaggtgaactgaagaaggtaagcgaatacctgctccagctgtacaaaatgggagtggacgctgtcctggtgcaggacatcgggttgattaatattattaacaagcacattccgaaactcaacatccacgcttccacccagatgaacctccacaacatagagggcatcaaatgggcctacgatcacaacatcaaacgaatcgtccttcccagggaaatcgagatgcgagagctgaaggaaatagtggaatacgcccactcccttggaattgaaatcgagatctttgcacacggagcgctctgctatagttattcaggccactgcctcctctcctctctgcaaggggggagaagcggaaaccgcggccggtgcgcccagccctgtagggagcagtatgagctgtccatcaacaaaagcaaacgcatcagtccaaagaacgaaggaaactaccttttatccccaagggacctgtcactttatgagaacctcgatgagatcgtgaacctgggcattgatagcctaaagatagaagggcgaatgcgcagcaccgactacgtggcaactgtcgtgaagaactaccggaagagacttaaccgactgcgttacgacaagacctcaaagtcgctgaatagaaacatcaatgaatctatcaaaaaaaccaaaaaggggaagaaaggtcggaagagcgacctgaaaaagatagaggataaggagaagattgagagccttaagaagattcagaaggaagagaaccgaaatagcgaggaggaactgggactggtcttcaatagggagttcacggcaggtcatcttattccaaaaaacaatcccatgatcatgaaccggaagaaacctggccatcagggcctgtatattggtaatattcaccggtacaatccccaaacagaggagattcatatcctactgaacgacaacttgattcacattcccgaaaaaggcgatggcatcttaattgaaagcagaatcaatcgcgaaaactctgatgagagaaacaataaatctaacaaaaacaacaagaataagcagaatgagtccaaaagtaataagaaagacaaaaataaaaagaaaattaaaaggatggagaacgatgagaactaccactcgatcattcagacttacgggtttgacatctcctcaaagcctgtcctcaaagattccaaagacaagcattggcggaagagggagaaggacaaggacatagaaggcaaactcctggtgataaaacgcgttagggagaacaaacgtatcccatttcctcttgagaagggctcgaaggtctacctcacaaagcggaactccctgataaacgaagtcaagaatctaaaaagcgacaagtccaagcatatgataaagaaaagcaacctggagctctactttagaatcgacagcgacaattaccctcacttgaaaggaaacctgaaattggacaacgggaaggtgatcaccctgaaaatacgaggggaaatgccctgggaagaggcaatcaaaaagcctattacaaacgagaccatcaaaaagcagctgatgaagatcggagacctcccttactatatcgagaagatcacagtaaacaacaataagagcctattcacccccatcagcggaataaatgagcttagaagagagttttttgacaagctggaagaggaagtgattaattcgtacattcctacggatgaggatatcaagatcgccgaagaaaacatcaaggagttgtctaaggagctggacagaaagatcgatttgaaggccaaagtgaaaagtgagcaggaaaacaatgatctgaagtccaatgccaaactggaaaacaagaacaagaatagtaagaatctctccatctacatcaatagcctcgaaagcttaaaggaaattaacaaaatcaatgatctctcaaatactttgttcaatcgcatctacctggagatcccgccaaatcgtcgcctggacgaaattaccaaggatcggatagagaactacaacccaaacgactctaaagagctgaacatcagctactgtgtgaacttcctaaagtctgcaatcaacttggcccaggaccaagactatgagctcatatggaagctgccagacattgctcataagcagtccaaggagtcaatagtaaagatattgggcattctcaacaaaatgaatctgcacattaatattatgactagtctgatcggcctcgacgattcattaaaagataagttcaagcttgaactttatggaaattatccgctgaatgtgtataatgcttatagtgttatggagctgaaaaactataagaccttgtgcataagtcccgagctgtataagaagaacattgaaaaactgatggaggactattacacaaacaaaaacaatgaggggctgtctgaaatggaaatcttggttcacgggaagattgaagccatgaccactcggaaggagctgatttccaagaaacagctgaagcttatcgacaagtataataagaagatgcggagggataaaatggacatctctagtaatgagttctacctcaaaaaccgcaaggaccagtactaccccatccgcacaagcatcaacgaggacaatctgatcattctaaactcagaggagttctgtctgatcgacgagattgattacctgaagagtattggcatcaaaaactactccatcgactgccggtggaagggcatcgactacattagggatattggaatggtttacagggattccctagataatgatgattatgacctcggtgagtttaaggaaatcatcaataaacattcagagcaactgacgaaggcgaatttcgatatagggctgaagtga

SEQ ID NO: 2801 - DNA, 2586 bp, synthetic construct
  source 1..2586: mol_type = other DNA
atgaccttacccgaacttctcgcgccagcgggcgactacgacattctggtgactgctgtgaatgccggagccgatgcagtgtatatctctggcgaacgctttggagcccgggccttcgccaaaaacttcacactggaagaaattgagaaaagtgttgagtatgctcacctgaatggggtaaagatccacgtgacagtaaacaccctcatcaacaactttgaggttgtggatgttgtccaatacctcttcaaactctacaagctgggggtggacgcagttattgtgcaggatgtgggcattatcgagctcatcaaaacccttatccctggtctggaggtgcacgcctctactcaaatgaccctgagcgactatgactgcattctttgggctgtggagaacggcatctcaagaattgtctttccccgtgagataagcgtggataagatcagggaaatcagcgaaaagctcaaatcctcaaacttgaacatggagcttgaggtattcggccacggagcactgtgctactgcttcagcggcaactgttacatctcatcttataactcgggccgaagtggtaaccggggggcctgcgcgcagccttgtcgtaagcagtacaagctgaaatacaaaaactacaatgtgggaaacggcttcctgctgtcaacccatgacttggctgtctataagggtttggataaaatcgaggaggccggcgtgttctcccttaaattggaaggtaggatgaagtctgcagattacgtggggacgatcgtgaatgcatacagacatataatcgatggagatgagggggactacgaaaaagacctgcatctggtcttcaatcgggagtttaccgatgggtacatcctcaaccagagtccaggccaggtcctaggcagggagagctcaggccacgagggtgtctacatcgggaagatcatcgaaaagaagggtgagcagattaagatttccaaagaaaacaaggactttagtataaaccttgacatcggtgacggtataggcttcaagtacaaggacaaaatcaagggaatctacattgacaacattaaagaacagactgacgattatatcatcctcaataccacacgcaatgtccgggaaggagataaggtgctcctgagctattcgaagtccacccacgataaattaaagaaattccataatgagacaatcaagcagcacatcccattgtccctcgacatttactggaatgaggatctgagcctaaatgtcaccggacggttccagatagaggaaaagggcatcaacaacaagaacataatcgagcgctttaactttaactatatttccgagaccaagtttgagaaggctttgaatagacccattagcaaagaggatatcgagaagcaaatgttgaagactggggacagttccttttatatcaaggaaatgaacattcatggcatgccggagaacactttcatcccgattgggaagctgaacaaaatccgcagacgccttctggaaaaagccacgaatctcctgctggattattacaagccctccaagaaggaggtgagggctacgaataaaaaggtaaatcagttcataaaggaatacaagacgtacagtgacattgatctaagaaaggaaaaactgaacctttcaatctttgttgacagcctggagctgttggagatgacaaggaaactgcctattcataagtactatttcgacccaagtttcagtttcaacagccccgaagagtattttgaaaagattaaggacctgttgaaggaagcttattcaatcgtgggcaattccaacaatccaaataataaatccaaaagtaacgaggatgaacggcttgtgctcgtcttgtcttcctttattagtgatgaagagattgaaaaactgagcaaaatcattgatgagctaaaagaagagggcatttcgatccctattatgtatgacactcccggaatagggaagagcttcaataccgacatctacgggaaccacaacctgaacatctggaacagctacaatgtcaaaaacctctctgagtctggatttaaaagcctgatcctctcgtcagagctctcccacaaggagataaaggaactggtatcaaagtaccagtacattaaaggcgacaaggagaccgacctcaacataattattcaagggaacctggaagtcatgagcagcaaggacgacttttccaatttaaatgatggaaaggacttcatcatcaactctgcagatgactatgccatcctggaggataagaaaagaaagaaattcaaatacaaggttgtttttgactataataagcacagccacttcatcaacaaggactgtctgtgcctgatcgaggaagtggagctgataaaggacacaggagtggattctgtgataatcgatacacgcttctcctcggccaaatacagctctacaattatctctctgtacctgcaggccttaaaggaggacaatacttatgacttatccctgctcaaggatcagattcgaaacatcaccctatcccgactgaatcaggggaacttcataaatggcaggcttcatgagaaagactgttga

SEQ ID NO: 2802 - DNA, 591 bp, synthetic construct
  source 1..591: mol_type = other DNA
atgtatatcgtcctggaggggatcgatggcgccggaaaatcaacccagataaactacctgaaaggatggctggaggataacggcttcaaagtggaaacaattgttgaacccaccgacctcgaggtggggaacctaatccgacagctcctgacgaggagcgacgctacaagtgacaccatgcaaaagactttgggcctacttttcgcagctgaccgccttgtgctcatggataaaatcgagaagctggaaagcgaacgcaccgtggtcattagcgatcggtcgttttattccagtctggtctaccagaagccgcaggattggattcgggagataaacaagtttgccaagatccccgacctggtactcctcctggacttggatgtgaagaagtccgtcgaaagatgcgatggtacagacgagtttgaaaacgaggagttcctgactggcgtgaaagagaactacctggccctttccagagagaatgacaacttcaagatcattgatgcgaataatgggccaaataaggtggcatctgacattaaaaaggccgttgcccctttattcgacatctgtgtagactgcatcaggtga

SEQ ID NO: 2803 - DNA, 207 bp, synthetic construct
  source 1..207: mol_type = other DNA
atggaggaggaaccaatctatgagatgaaactgacaaacggaattggcgaacagatgcttgcacacgtgtttgaaaagttcgatgtggaactgaagcaaacggagttcgggcccaaactccagggcaccaaggaggagctcgagaaggcccaggaatacatcgtcgaaatgatgaagaaaaggctagaggagctggaccggcagtga

SEQ ID NO: 2804 - DNA, 966 bp, synthetic construct
  source 1..966: mol_type = other DNA
atgaacatagaggaaaaaatagagctgatccaggaaggtacactggagatcattgagctggaagagcttaagcagaagctggagaaggaaacccccattgcttacactggatatgaaccgagcggaaaaattcacctggggcatgccgttaccattatgaagctaaagcaattgcagaagctcggatttaagataaagatcctcctggcagactaccacgcgttcttgaacgggaaaggaactgtagaggagatcgcagaaacggccgagtacaataaaaggtgctttcaggggctgggcctggcggatgacaccgagtacatcctgggttcaagctttcagaccggatctgaatatacgaatgatgtgtaccaactcgccaccataacgaccctgaagcgagccaaacggagtatggatcaggtgagtcggcacgacgacaacccaaaggtggcctccgtggtctatcctctcatgcagactgctgacatgtctgcacttaatgtcgatattgccctgggcgggatggagcagagaaaaatccagatgctcgccagggagaacctgccccgcatcggcaaggaggctcctgtgtgcattcacacacccttgatccatggtctcgacggcgacgacaagatgtcctcaagcaaaggcaactatatcgctgtggatgatgacgaaaagacaatcaaggagaaaatccgcaagagctactgtccgcaaggggagatcgaagggaaccccatgattgaaatcgcagacttctttgtgttctcccagcaggacaccttcgtcattgaacgtcctgaaaagttcggcggcaaccttgagctaacaaaagatgagctgcatacaatgtacagcgagggcaaactgcacccaatggacttaaagaatggaatcactaaattcctcattgatttcttaaagccagttagagaatttatggagtcgggcgagtga

SEQ ID NO: 2805 - DNA, 1041 bp, synthetic construct
  source 1..1041: mol_type = other DNA
atgttctgtcccgagtgtggtgccactgacgtggagatggtcgacggaatctgcaagaactgctacctgaagaaattccaactcatggaaattccggaaaacattaccgtcaccatctgtaaacactgcaacgctaaactggaggaaggcaagtggaaagacgagtatattccagaggatgagattatataccgtaccctcgagaacaatatcaagctgaatgatctggccgaaaacgaggagatcgagctggaaatcgaccaaatgcgaggcacaattgccgagtgctacattgaggccgtggcgacggtcctgggggaggagattgtggaaacccacacgcctaatgtgaaaatcaaatactccgtttgtccagactgcagtaaacgcaacgccggatactatgaagcagtaattcagcttcgggcggacaaccgggaattgaaggaagatgagataatcaaggctgaggaaatcatcggcagaacactggacaagcagtttaagaaagacaaattggcctacatcccccaggtggctaagcttaaggagggaaacgactattacatcggttccttaaagtcggctaaaaaggttgtggaacatctcaaagaggagctgggggggaaggtcaaggaaagcccaaggctcatcagcgaggacaagagtacaggcaagggcctctaccggatctggatatcactgcgccttcctaagtttgaaaaagagaatataatcaagtataacgacaagatctacagggtggaggccattgatgggaatcgcattttactggccaacctggaaaaccaggactccctcgcactgaaatggagggagtatgattcaattgaaaagatggagaacctaaatggaatccagaaggcaatcatcactgcaaaatctcccaagagcatccagatcctagatcccgatgacttcagccctttggacctggatatgaatgaaaagctggaaggctttaatatcggggatgagattgatatactcaaaatagagggcagaatcttcattatttga

SEQ ID NO: 2806 - DNA, 408 bp, synthetic construct
  source 1..408: mol_type = other DNA
atggacgattatgaaaacttactaaacagagcgattgatcagctgcctcccgaggtctttgagaccaaaaggtttgagccagtgaaagcctacagcgtcattcagggcaatcgcaccttcatccaaaatttcaaggatgtggccgacagcctgaaccgcgacccccagcacatacttaagtacctgctcagggagttggggacagccggaaacctggagggcgtaagagcaatcctgcaggggaagttcaatcacttcctgatcaacgaacggattgacgaatatatcgagaaatacgtgatctgtcatgagtgcaaccggccagatacgaagatcatccgtgaagaccgaatatttattctcaagtgcgccgcttgcggtgcaaaagctccgctcaagcccctttga

SEQ ID NO: 2807 - DNA, 1998 bp, synthetic construct
  source 1..1998: mol_type = other DNA
atgtcccccactaacaaaaccaaggcatcgctggcacgctttgaagaatttttctctacaatttacaaggacgatgtatttgaggtgctagagaaatatccggacgaaaggagcctgacagtcgattacaacgatttagaaatgtttgacccagatctggcggacctgttaatcgataagcctgatgaggtcattaccacttcacaaaaggctatcaagaatatcgatccattgatgaaggacgctaatctcaatatccgattcgagaatctgactaacaacgtgcccctcagcgacctcttaagcaaatacattggcaagttcgttagcgccgatggcatcgtgagaaaaaccgacgagatccgcccccgcatcgaaaaaggtgttttcgaatgcaggggctgcatgaggcagcaggaggtggagcagacatccagcagccgcattatggaaccttccatgtgcacagaatgtggcggtaggtcattccggctgctgcaagaggagtccaaatacatagacactcagagcgcccggatgcaagagcccttggaaaacctctcagggggcacagagcctaagcagatgctcatggtgctggaagatgacctggtggatgaactgagtccaggagacaaggtcaggattaccgggactcttaaaaccttccgcgaggagaagagcggaaaattcaagaattacatctacgtcaatcatattgagcctctggagcaggagtttgaggaactgcaccttagcgaagaggatgaggctaagatcctggagttatcccaggaccccaacatacatgacaaaatcattaactccactgccccctccatcagaggctaccgcgaggtcaaggaggcgattgcattgcagctcttcggcggatctgtaaagcacctggaggacaagacccggctcaggggcgatatccacatcctcatcgtcggagacccgggtatcggtaagtcacagatactgaagtacgtttccaaactggccccccggagtgtctatacaagtggtaagggcacgtcgggggcagggttgacggcagcggcagtgagagatgagctgggcggctggtctctggaggcaggtgccttggtgctcggggaccaggggaacgtgtgcgtcgacgagctggacaagatgcggtccgaagaccggtccgccctgcatgaggcgctggaacagcagaccgtgagtattgccaaggctggaatcatggctacattgaatacccggtgttcggtgctggccgctgccaaccccaaattcgggcggttcgaccgatacaagacccttgccgaccagattgacttgccttcaccgattctctctcggttcgaccttacctttgtgatcgaggataagccaaacattgaaaacgatcgtaaactggcccagcacattctaaagatacaccagtctgagagcgtgaactatgagatagagcctgatctccttcgaaaatacatcgcatatgcccgtaaaaacataaatccagtcctaaccgacgaggcaaacaaggtactggaagacttttatgtttctgttagaagtgccggggtggaggaagacactcccgttccaattacagcccgccagcttgaagccatcatccgtctagctgaagcgagcgccaagctccagctcaaggacaaggtagaggccgtggatgctcagcgcgccatcaccctgcaaaggaagacactcgagcaaatcggattggacccggagaccggacagctggatattagcagagtggagggcggaaccactacctcagatagggaaagaatgcaaaagattgaggaggaaatcaagcttctggaacaggaatttgaacgagctcccatagacacgctgaaggagaacatgaaagagaaatatgatatgagtcctgagaaggtggaaacgctggtgaaaaaacttaaaggaaaaggcatcatcttcgaaccaagaaatgggttctttaatacggcttga

SEQ ID NO: 2808 - DNA, 393 bp, synthetic construct
  source 1..393: mol_type = other DNA
atgttgataagcgtcctcggagtgattgtcatcatcattatggtagtggcagccgcgtacgttggattcagcgtggtgagctcgagcctaacaggcgggatttcctctggcacacagtacgacgagttagccaccctgaagtccaattgctctagtctggaagcccaattcaacatcaccggcactaagatctacgcaatgcaaaacatcacgctggaacgcgagtttgtcaacgctcaggtggagctgattaaggtgcagaatgatctcgacagtgtggagagtgcgctggcttccgggcagcccgcctcagaagttgacaagcggatacagcagtcaaaagaggatctcaaaatcgctcagcaggcctataacagcctttccgtcaaatga

SEQ ID NO: 2809 - DNA, 642 bp, synthetic construct
  source 1..642: mol_type = other DNA
atgggcagtcgatggcaggtggagaagaagaaagatccctattatcggcgggctaaaagtgaagagtaccgatccagggcctcctacaagcttaaacaactcgacaagaagtacaagatcatcaaagaaggcaacactgtagtggacttaggtgcggctcccggaggatggtctcaggtggccctggaaaaggtgggggaggagggcatcgtagtcggggtggatttgaaccgcatcaagccatttcctgagaagaacttctacggaattagaggggacttcaccaaggagatcgttcaggataagattatggaactgacgaacggcaaagccaaagtcctgatttcagatgccgcaccgagccttactggaattaagacaatagaccatctcaattcagtggacctggtggagaccgttataaaaatagcagacaatatcctggaaaccgagggcaacatggtcatcaaagccttccagggcccagaatacaagcgcctcctggatgaaatcaagcaggactttagaaaagtcaaatccacaaagccacccagcagcaggcaccgcagcaaggagatgtatattgtggggctaggctaccggaagggtcctgggagcagaaagtcgaggaataaagagtga

SEQ ID NO: 2810 - DNA, 540 bp, synthetic construct
  source 1..540: mol_type = other DNA
atgctgatcgggttaataagtgacacccacatcccagatcgcagaatgaagttgccccagaaggtcctggatgcgttcgaagacgttgagatgattctccacgccggagacatcacgagccagagcgtcattgatgatctggaggccattgcaccggtccatgccgttgaaggaaacatggacagggtggtaggggaaatgaaccttcctccatcgaaaatcgtggaggctgagggccataagatcggcatagtccacggagaagtctatccccggggggacacccaacagctctactacactgcgctggaactcggtgtagacatccttgtgagcggccactcccacgtggcccagctggagaagattaagaacgtgatcctggtgaaccccggcagccccacaaatccacgactatcagacccttccgtggccattatggagataaacggcaacgatatcaattttgagtttgttaaagtgggtaatcctgtgtgctctgctctgaacttcttcaaagacaaggcaaataaagagtga

SEQ ID NO: 2811 - DNA, 1092 bp, synthetic construct
  source 1..1092: mol_type = other DNA
atgggaaaggtgagcaaggagaaaatactggagatcctggatggctatgacaaggagaacattaccatagccacgctcgggtcgcacacgtccttgcatattctgaacggggccaaggaggaaggctttcgcacagctattgtttgtgagaagggtagggaggtaccctacgaacggttcgaagtggcagatgagtttatcatggtcgatgaatttaaggacatagtgaatgaagatgtacagcagaagctaagggatatgaatgcaatcgtcattccgcatggttcctttgttgcctacgcgggcctcgacaatgtggaagacaaattcaatgtgccgatgttcggaaaccgggacattctgaggtgggaggctgagcgcgacctggaaagaaagctcctggtcaatggtaaaatacgcatccccatgaaatacgatgacccctcaaaaatcgaccgtgcagtcatggtgaaattccccggggcacgcggcggaagaggatactttgtcgcctcatctcctgaagagtttgacgccaaaatcgacgcgatgaaagagcggggatggatcgaggatgaagatgtggcccaggctcacattgaagagtatgtgtcaggctgcaactactgcatccactacttctactctgcgctgaatgacgaggtggaactgatgggcatggacagccgatatgaatccagcattgacggattcgtgcggatgcctgctaaggggcagttaagcatcgatatcagccctagctatgtggtgaccggcaaccaccccgttgtcatgagggagtccttgcttccacaggccttcgaaatcggggacaagttggtcaagtcggcagccgagcttgtaaagccaggcctcaacggcccattctgcatccaaactctagtcaacgataacctggaggtggtggtgtttgagacaagtgcccgaaccgacgggggtactaataccttcatggagggttcttcctacagttacctgaagtatggcgaaggcatgagtatgggacggagagttgccagagagatcaaaaacgctctcgagaacggggggttcgagaagatcattacatga

SEQ ID NO: 2812 - DNA, 513 bp, synthetic construct
  source 1..513: mol_type = other DNA
atggtagacgcagagaaggccaaacaacccaaggagcgcaagaataaaaactccaacctgcccgacatcgatttcaaggcccttatttttggggccgccgcctatgcattcttcccgctggtggcttatcagtacaacctagacatccttatggtgttcgccgccatagggccactctacatcggctataccgctaagacagaactgaaatccatcattctgggcattgtgggggcgacaccactcttgtatctggctttttcaggcatgctgggcagctacggaagcggtgaaatggcggatataatcatgacggtcggaatcttaggactgggcgcattgatgggctactttgggggctacctctaccgggataggcagagaaataaggccaaagcagggggtattgtggtcgaggacactcctaaaaaagagaagcagtttgaagacaccggaagtgtgaagaagaatgttgctaacctcttcctgcccaagagccgacggaaaaagtga

SEQ ID NO: 2813 - DNA, 375 bp, synthetic construct
  source 1..375: mol_type = other DNA
atggcaaaaatgaacgcggtgatcttaggctttatactgaccctggttgtgtacttgttctttggacggtatgaattttggggtctcctcattgtcgggttcattgtaggatacatagctcacgaagggattctgggcgggatgtggaatgccgccctggcaggggcgttcggcacaatcataagtgccatcctattcatcatcctggtcaccattgggggaactgctatgatgggcttcctcggaggccttgctggctttacagtgagcggcatcacctccctgattgacatcgtgttcactatcatcaagtacatgattgtgatggggatcacgggtgccgtcggtggcgcccttagcggagagaaggagtga

SEQ ID NO: 2814 - DNA, 969 bp, synthetic construct
  source 1..969: mol_type = other DNA
atgatggatctcatttacatattaataatcattatcattgcaatcatcgcatacaaaagcatcaagatcatacgcccttatgagaaaggggtggtagagcggctgggcaagtacaaccgaactgtcgaacgcggcctgaacattgtgattccatttatagagacaatcagaaaggtggacctgagggaacaggtcgtagatgtgcccccccaagaggtcattacaaaggacaacaccgtggtagtggtggattgtgttatcttttgcgaggtcatagacgccttcaatgccgtctacaacgttgtgaacttctaccaggcaattaccaagcttgctcagaccaatctaagaaatatcatcggggacctggaactggaccagaccctgacttcgcgcgagatgatcaatacggagttgcgtgaaacccttgatgttgccacggacaaatggggcacaaaagtggtccgggtggagattcaaagaatcgagcccccaaaggacatcgttgaagccatgtccaaacaaatgaaagccgaaaggatgaagcgagctacaattctcgagagcgagggttacaaggagtctgaaatcaaaaaggccgagggggacaagcagtccaagatcctggcagcccaggcggaagctgaagccataaagcaggtcgcagatgccaacaaatatcaggagatcgccattgctgaggggaaggccagggctaccgagatcacctataacgcgatccacgcgggtaacccgacgaatgacctgattgccatcaagtatctggaggctctggaaaacattgctgatggccgggccactaagatcttcctcccaactgaagtgagcggaatcctcggctcagtgggaggaattgccgagttgttcaaggacgaccctgaagcgctagagaaatttgaaagtatcaaagtgctcgagaatgctaaagagacagcagataacgaatga

SEQ ID NO: 2815 - DNA, 420 bp, synthetic construct
  source 1..420: mol_type = other DNA
ctgtatttggagttttggatcattctggccattatcctcataattggcgagctgctgactggtggcttctacctactttccataggactcggcagcctggccgctgcaatcttcaactacttccagtttagcattacgatccagattgtggctttcatcttagtgaccgtcatttttatcatccttagtaggcccctcttcaaccggctgaatcgcaacacaatcgacaagaagtccaacaccgagagactgattgggttgaatggagaagcgatggaagacattgggcaaaaaaatatcggagcaatcagcataaaaggcgaggtctggaaagccatctcagacgaggagatatcgaaaggggaggaagtgaagatcatcggtatcgatggcgttaagctgaaggtagaaaagctctga

SEQ ID NO: 2816 - DNA, 2598 bp, synthetic construct
  source 1..2598: mol_type = other DNA
atgattaaaaaacagactaaaacgtatagtaagaagcagatttacaagaatctgcatccgttcgtacgcgaatggttcgaaaacagcttcgaagactttacgcccgcccaaaaacagagtattcccgagatccagaagggcaaaaacattctggtcagttcaccaacaggttccggtaagacgctaaccgccttcctcagtgtgattaacgagcttacgaccctggcagacaaaggggagctggaggataaggtttactgcatttacatctctcccctgaaggcattggacaatgacattgagcgcaatctggacactccgctcaaagagatcgagaaaatcgctgggaagccattaaacatcagaaaatctgtacggacaggcgacaccacacagtatcaaagaaacaagatgttaaaataccctccgcatatcctgatcacaacccctgaaaccctgtccatcttgctggtggcccctaagtttcgggaaaagctttcccatgtgaaatatgtgatcatcgatgagatccactcgcttgctgaaaacaaaaggggagttcaccttagcctatcccttgagaggctccaggccttaatcggcgggttcgtcagaattgggctctctgccacggtatctccattggaggaggtggccagatttctggttggctacgaatacggcaccgaaagggattgtttgctcgtggacatcaattacctcaaggaactggacatcgaggtcatatcccccgtggatgacattgtaatcgctgatagcgaggacactcgcctggctacctacgccctcttggatgatttgattatggagcacaagactagcctgatttttaccaacacccgtagcgccaccgaaaggtacgtctacaatcttaaaaagctctatggcgagcacttcaacagcaataacattatggctcaccattcttccctgagtaaggaactgcgcctggaaactgaggaaaagctgaagaaaggcgagctaaaggccgtggtgtcctcgacgtcccttgagctgggtatagatatcggatacattgacctggtgatcctgatcaactctccaaaatcagtgagccgggccctgcagcggattggtagaagcggtcacaggctgcatgagaaatcaaaggggcgtataatcgtgactgacagagatgagctggtcgaatgtagtgtgcttttaaagaatgcaaaggaaggaaagatagataacataaagattcccaaaaactgtctggatgtcctgtcacagcacatctatggcatgggaatagaaaacccatgggacattgactatgcctttgatatcatccgaaaaagctactgctacaaagatctctcacgggacgactatgaggacgtattaagctacctggccggggaatacgtggagctggaagagcgttatgtctacgccaaaatctggatcaactatgaggagaacacctttgggaaaaggggtaagctggcacggatgctctattcaacaaacattggcaccatccctgatcattcggcagtgattgtgaaatgcgacggggaggtcataggaaaggtggaagaggacttcatggaaaagctgaagaaaggagacagctttgtgttgggcggtcgaacatacaagttcaaatacggaaagggcatgaccataaatgtctcccctgcgtctggccctccctcaattccatcttggtactcagagcagttgccccttgcgtttgacctggcagtggatattcaacgcttcagatacatcctggacagcaagttccagtatggccggagcaaggaagagataatggagtttctccacgactacctctatgtggatgatttcgcggctaattccatctacgaatacttcaatgagcagtatctctatgcgcagataccccataagcagaagctccttgtggagtactacacaggctttggagggcgcaaattcgtcatattccatagcctattcggccgaaagactaatgatgcaatcgctagggcggtggcatttctcgccagtgacttcaataagcgaaacatcaccatctccattactgataatggattttatctgagtagtgatggcaagatgggggccctggaggctttgaaccggctgaatcctcaaaacttcgaaaacattctgatcaaaagcctggacaagactgaaaccctagccagccgcttccggcactgcgccgggcgctccctcatgaccctaaggagatataaaggccacgagaagtctgttgggcgccagcaggtcagaggaaagatcctgctcaagcacattcaggagatggacaacaacttcccaattctgaaggagtcccgaagggaagctacagaggactacatggacatcaagaatgctaagcgggtcatctcgtggattgacagcggagagatggaaatcaaaacaatcaatacaatcatccccaccccgtttgcattcaacctggtttcccaaggatatttggaggttctccaccaggacgataaggccgagtttacaaaaaggatgcaccgcgccgtgctcgataagatcaaggaagagatggacaaccagttctga

SEQ ID NO: 2817 - DNA, 852 bp, synthetic construct
  source 1..852: mol_type = other DNA
atggtggagaaactgagcatcgatgaggctattgaggcactgaaagacgaggatgtggcgaaccgcaaactcgccatcaaatcgctggagcacaagagcgacgataagattatcgaacccctgattgaggccacaaaggacgaaaacgcccaggtgagattcggcgctgccgaaatcctaggggatattggagactcagcagtcgacaaacttctggacgaatttaacaaggagtccggttcaaataaacgcttcttggccgttgcactgcagaagaccggcagcgagaaggcagtggatgcctttgctgacgcattgaatgatgaagactttggggtgcgaaaagtagccgtccgggcgctcggagaactgagggcggaagacaagatcgatgccatcgccgaatgcataaatgatgaggacgggggagtaaggacggcggccatcttcgcccttggggatatcggaactgataagtccattcaaatcattaaggatgcaagacgtaaggagaaggacaaggacttcaagaagtactgtaataaagccataaagcaggccgaaaaagtgcagaagtctggcggcaaagtcaagtcctccaaaggtcagccaatgagcacaattaaggagatggagaagcaagaccctgaggctgccatcaaggcttatgaggtgcatgtcaaaagtggcagtaccaaggacaccccctacaagaggctcgctatactgtatcgcaagatcaacgactacgacaacgagactcgggtgttaaaactcgctatcgaagtgctcagcaaagaaaacccgagcaaggttggctggttcgagaaacggctggagaaaatgacctga

SEQ ID NO: 2818 - DNA, 807 bp, synthetic construct
  source 1..807: mol_type = other DNA
atggacatcttcaattatatctttcagatcatcgtgtcggtgttgattttcgcagccatcttcgctgtgggaatactgctccgggataaaatagtccataagctcaatttctttgtaaaccctcagaattacttgcccgaagaggaaatacaaaccctgaagcaggtttactacctgattttaattctcatcctggtggtgtgcatcctaaacttcttctttgacaacaatatcattctgcccaacagtccggaattttacgtcttcaactccttccttgatatcatagtaagtgtgtacattgccattatcatttacgacggctctaaaaaaagcaaaatcctcctgattttcctaattcccatcccaagcattgcattcctcctgttcggcgagtccctgattgagtactgggattttgtccgcattcctgcattgctgtatatcatgaagatattttacgacaagttccacatctataccgacaagtacaacttggagaagtcaatccttcttctcttttcaattgtgttcattagttttatcatcacactggtggccgagaacgaagacccacttaacgccctggtgatggtctccaatgccttcacaagcaaggggtatactattctgggtgaaagcaccatcggcaaaatcgatagcatatttctcgtttggggggggtatatcatcagcggagcggctaccgccactctgacggcggccatcctgatcaagcactttaacgctaagatagagaaatttgacgaaaaattcgaggagttagagaagctgatctccgagtga

SEQ ID NO: 2819 - DNA, 846 bp, synthetic construct
  source 1..846: mol_type = other DNA
atgaataaaatcaagatcgctctgtgtcagatgaacgtggtggacaacaaggacgagaacatcaaaaaggcaattgagatgatcaaggagtctaagaaacagggggcagacctggcgatcctgcccgagatgttcaactgcccatatgagaacgagaagttcatcaaatatggcgagaccctcgaagatagccggacgctgaagtccatatctgaaactgccaatgaggaaaatatctacgtgctagccggtagcgtcccagagcttgtcttaaatgattcgagcaatgagaacaacttgtacaacacatcagtgttctttgacaacgaaggcaagatattgggaaaacatcgtaaggtccacctcttcgacatcgatatcaaggataaaatctattttaaggagtccgacactcttagtgccggcgatgactttacaatcattaagacacccttcgcacgcatcgggattggaatatgctacgacatccggtttgtagagctgtcaagaattttagctctcaacggtgccgagatactgattttcccaggggcattcaacctgaccaccggccctgcgcactgggaacttctgtttaggagcagggccctggacaatcaggtttacgccattggagtggcccccgctctggataaggaggctagctataattcctacgggcactccatcattgtgagtccgtggggcgaagtaattgaagaactggactacgatgaagagctgaaaatagtggaactagatctcgatctcattaagcaagttcgagaggagatccctgtcctcaaaaatcgcagaaccgacttgtacgacatcaacgaaaaatga

SEQ ID NO: 2820 - DNA, 1179 bp, synthetic construct
  source 1..1179: mol_type = other DNA
gtgaagtactgccaggagtgtggtaatgccagctacgacagtgcaccggtatgcgggaactgtggggctaagctcgggcccaagtcagaggccaattctacacccccttcccgggacaagaaagccaaatcgacatcaacgtcttcggaaagctccatattttcaagcaaatccgacggatttagttccaaaataggcaaaaagattggcagtttccaggtgagcagcaccaacacggcagtggaaaataaacaggagagagaagaagctttcctgaagcagacttcaaaaccaagtttcagcaaaactgcaaccgagggttttaagcagaaggataaaggcataaagaaccctgctacaaagtacaatatgccgaaaaaggaagagacggttgatgccaaggctaaggaggcccccaaacgagaggcgcccaagaaggaaatcaagagggaatcccctaagaaggaggtgaaaaaagaggcgcccaaaaaagaaattaagccaaatattgtcaagaaatcagatgaaggttcgtctggcggcattaacctgaaaaagattggaattattgccatcatcatcctaatcattcttctgatcgccggaatcggactgaaccagatgcaaaaccagacaaccgatgaggtgatgaactatacagacggcatcatcaatttcacctactccgggaactggtcagtgtacaacaataccaatgcagattccaacatgaccgaccttgccttcaagactaaggataagactctcattgggtttaccacaatccagagcgacgaaatcacttatgagaagatcttgtccgacgtaaacgacaccgcccattccttaaatggcgagatcctggagtatcaagaggtgaatgtggggggcgtcccagctcaggagataatcataagcacccaagatcagggctattcccgctacctctgcatcctgcacgacggagtctactattgcttcgttgccaacaatgcaaagtctgacaaccagaacttgaccagcctgaataccactgagatccagaatatgatcaacagtattagtttcaaggatgtggtcgctggagacacggcgaacctcgataccagctaccaggaaagcagctaccaagaggagagctacgacaactataactatgaagacacaagcaactactga

SEQ ID NO: 2821 - DNA, 501 bp, synthetic construct
  source 1..501: mol_type = other DNA
atggtcaagaaagaaaagatcaaatgcgacaacattaactacgcagtttatcggatcgacgattgggagaacgattacgaaataaacatcattggaacggcccgggagattcccgtaacccagccgaccctggagcacatgctgaagcagatggatcacatccgccaatccgtgttcgagatcggcgggaaaaaggtgaatggaatgattggcctgtcgatgcagtttaatccatccttcgcctcaagagacattgatgagctaatcgaacaggagcaaaaggagtttgatagcatcatggcggagttgaacgccctcgaattaaaggacgcaaaggatgtgatattcttggacacagacgagtacgtcatatacaaactggagtatgacgggcatagcctgagccccaagccttataatgactacgctaaacagcatcacctcgacgaaatcaaacgactgaaggaactcagtggcgaaaggttcgtgctggagctttga

SEQ ID NO: 2822 - DNA, 726 bp, synthetic construct
  source 1..726: mol_type = other DNA
atgtctaaaattcagcagttgcaggagataataaactcatccgacaatatcgttttctttggaggggctggcgtgtccaccgaatccggcatcccagacttccgctctgaaagcggaatctttaaaagcctggaaaaatacggggatgttccggagaacctggtgagccacacttactactcagaccacacagaggagttctttgagtactacaaggacacgcttgtcttcgatggtgcgaagccaaacccagctcatctgaagttggcagagcttgaagaaaaaggcaagctccgagccgtgatcacccagaacattgatggcctccaccagaaggccggaagtaagaacgtcctggagctccacggaagcatccatcggaactattgccagatctgcaataaggagtatagtctggacttcattttaaaaagcgaaggcattcccaggtgcgattgtgggggtgtggtaaagcccgatgtggtcctttatgaagagcctctagacaatcggattctagcttacgccatcgactacatccaaaacgccgacaccctgattatcgggggcacctccctggtggtgtatcctgccgcagggctcataaattatttccacggtggcaacctggtactcatcaataagagtgagactggctttgattacatggcgaatctggtgatcaacgagcccattggagagacactgtcgcaaatcagagtctga

SEQ ID NO: 2823 - DNA, 573 bp, synthetic construct
  source 1..573: mol_type = other DNA
atggatttcatttcaactctcctgattgcgatcgccctcgcaatggatgcctttagcgtgtccctgacaaagggcttcaccctgaagaacctcacaaagagccaagctctgtggttcggcatattcttcggtggctttcaggctctgatgccggtgctcggctggctaggcggcatccagttagaatggctcattaccaccttcgccccatgggttgcattcatcctactgcttctgatcgggagcaacatgattcgggagagtctctcgggtgacgaagaggatgagaaggacagcgacaagttttcctttaaggagttgacgttgctggccatcgctactagcattgatgcattcgccgtggggatcacctacgcggtgctgaaagtcgacattctgatccccatcataatgatcggagttgtcgcctttatctttacaattatcggactgtatttagggaaaaaaatcggaaattacttcggagacaagttcgagatagtcggtggcgtgatcctgatccttcttggggtaaaaatactcctggaagggcttggaattttggtgctgtga

SEQ ID NO: 2824 - DNA, 783 bp, synthetic construct
  source 1..783: mol_type = other DNA
atgaagtataagatccttgagaaccccaattacaaagaggcgtacgagctcatcgaagaggggctagtgaaaaaagcaaccatgctcctattcgcctgctgtaaggtaagctatgaaggccgtgcactgagtgagctggactacggcgagcgcatcatcatgatcaagccagacggctgcttcttgattcaccaggacaacaaggtggacccggtcaattggcaacctccaaaatcaaaaacaaaagctttgatcaaagatgaaaccctgtacttggagagccacaggcgaaagccccctgaactcctggaagtggaggtgaagaagattcactatgccagatacaacctgatcgaagattacgaagagctggaaagagcgggctacgagaaggatatgggggatatgatttgggacaacccacacatcatagaggaaggattccgcccgaccgtgagggaatatgctacagagcatggtttcattgacattctcggaaaggatgccgacggaaacctgatggtgctggagctcaaggcccgcaaggccgggatcactgcagtgaaacagattcggcgatatctcacggactttgagaatagggagaacaaggaaataagacatgaggaggaaaagcagaaggttcggggcctgcttgttgctcctagcataggtgacgatgcccttgagctgctggaggaagaggggatcgaatttgtctccgtcgagcccccccgggagctgaaaaaggacaaaaaagtcactttagatgcctttaagtga

SEQ ID NO: 2825 - DNA, 1377 bp, synthetic construct
  source 1..1377: mol_type = other DNA
atggaaatgaacgaaaatgtggaaatgattacaggcgaccctaaaaaggcaatcaataaactggcgtggcccctgatagcaagcatgctcttgatctttttaaacaacattatcgacagtatctgggtggctgggcttgggcccgaccctcttgctgccatcggctacgtcacacctctctttatggtgcttgtaggctttggcaacgggatcggcgccggtgcaaccagcctaatctcccggtatatcggcgcggagaagagggatgatgccaacaacgcagcgattcacagcgccatattaagtgtggtggtgtccctggtgctcacggtcatcgcccttctgatcttagagtccctgctgaagctaatgggtgcggggagtgtgctcaaatatgcaatggactacggtgtgattatttttctgttcactgcccccatcctgataccgcctatctttgggggcgctttcagggctgaaggagacattaaacgggcaaccgtgcccattgcccttgttgctgttatcaatatgatcctagatccgatcttcatgtacgtatttggctggggaatttccggcgctgcctttgccacagggctggccccatgtttcgggctttgcatgatgctctactggatattcattaaaaaggacacctatctctcatacaatcgcaaggacttccacaataacctgaacatgtacaaggacatcctggtggtgggaataccagcgagcctggagcagctgatcatggctgcactggcagtgaccgtcaattacatgctcacccttgtgtcaggttcagtggcagtggccgtgtatacagccggatggagaatcatctcgctgggcctcttgccagctattggagttggaactgcggccattacagtcacaggggtcgcttacggggccaagaaatacgagaacatccgtacggcctgccgatactcggttaagctagggctcatttcctctattatcgtatgcatattgctcttcatatttgccgatcagatcgcctatatcttctcttatagcgaggcaagtgctcatctcctgcccctgatcgctggattcatacaactgatgtgtctcttcattctgtatgtgccattcggtgccaccgccggtaacgttttccagggcttgggaaagggaaccacttcctttgtcttgaccacgttccgcgagttcgtcctggtcctggtctttgcctacctgctgggcttcgtattccacatgggagagactggaatttattatggcatgctgatcgggggctttatcggtagcgtcattgcctacggctacattgaatactacgttgatagattgatcaagggcaaggtgaaaggcagcgatatctga

SEQ ID NO: 2826 - DNA, 768 bp, synthetic construct
  source 1..768: mol_type = other DNA
atgcaaaaagtcatcaactctcactgtcacatatacccagataagattgctgcaaaagcggttaaagggatacgcgatttctacgaccttcatatgtccctaaatgggacggtagatgatctgattgaagacggcaaaaaagtaggggtggtgcattatctcatccacagcgtggccacaacccccaagcaggtcgagtcaatcaatgaatttatcagttttgaagtcaacacgcaccctggcctgtttacaggcttcggcaccccgcaccccgatagcgaagacattgagcgggacctagaccacataattgaactggggcttaagggcgtgaaggttcatccagacttccagcagtttgccttgaacgaggagcgggcctttaggatgggtgaggccatcaacgagcgaggactgcctattatgatccactgcggcgacttccgctataactactcgaatcccgagcagttgaggcccttcctggaagagttccccgacctcacagtgatcggagcccatttcgcaggatggagcatgtgggagaaggctaccgaggaactggccggaacccctaatctgatcgtggactgcagttcaagcttatattccctcactccagagaccgctaaggacctcatccacgcatacggtgccgataaggtgctctgggcgactgacttcccgatgtgggagtccgtcagcgagatggaaatgtttaacaagattgatctgtccgaggaagagagaaacacttactctctgtga

SEQ ID NO: 2827 - DNA, 999 bp, synthetic construct
  source 1..999: mol_type = other DNA
atgttcgatgtggagagtattgaagtggagtacttcactctcaaggaatttaaattcaaaaacggagaagtcctgaaggacgccaaagtggagtatatcaccttcggaacccccaaatacgatgacaacggaattatcaataatgccgtaatctacttccacggaacaagtggcaattgccactcggccaagcggctgtgcgagtctatgggcagcggtgatatactggacacagataagttcttcttcatttccttgagcactcttggcagtccaaactccgcatcccccagtagcactggccttatgaacaagtttccagaatatgacatcgaggatatggtcaatttccaaaaacagttcgtcgaggaaagattcgggatcacccatatcaaggggctgattggcaactctatgggtggtttcgaggtcctgacatgggggtgcgtgtacccagactcggtggactttattatctctctggtgagcagctttaaggtagggggccacaactacatactcagcaaagtgatcgacaacatcttcacgtcagacccggactacaatgacggcgcatacgatctgcccatctccgattctctgaaacgaagcctcaagctctcctcagatgcgatgtattcatttggactatcacgggaggagtatcgcaacaaccttaccaacgaggaattaaccgagtttatggctgagtttgcggaggaaagcctagaagaggaccctaacgacgtggtgtatatgaacaaggcttccattgattttgacattagtgaggacttgaagaatataaaggccaaggttctgattatcgctatcaatcaggaccagtacttccctcctaatttggatgccatccccatgagcaagatgattgaaaacaataaactcgtcatatttgattcctgtatggggcatgttggctctggggaactgtttaaaatcgaggatgacctcagggagttcctgacggaattttactga

SEQ ID NO: 2828 - DNA, 405 bp, synthetic construct
  source 1..405: mol_type = other DNA
atggagatcacttacaaggatacgcacgacttcaaggaagaggacctgaaagacctcttcctgagtgtggagtggagctcagggcattttccagacaagcttgtcatagccatgaaaaacttcgagaccgtgtattccgcatgggacggcgataagctggtaggtctggtcagcgctatggacgatggcatcatgaccgcctacgtgcactacgttctcataaggccggaataccagggaaaggggattggaaaagagctgctaaaacggaccacagaccactataaggattacttgcgcatcgtggtggtctcctataatgaggagattgagttttacgaagcctgcggctttgaaaaggcagatgacgcgagccccatgttcatcacagaactctggacttga

SEQ ID NO: 2829 - DNA, 285 bp, synthetic construct
  source 1..285: mol_type = other DNA
atgttctctgtgaaagtggatgattatggcgagaccgaggacgacatgcactttgtcacgtatatgatctccggactgagtgaagcggaactggactacctcattgctaatcttgagggtgagctcgccctggaggatggcaacctgttcctgaacatcttctactcaaagcagttcttcccctttgggagcgatgacgcccatttcaagctagacgactttattaagcgggaagagatagaaatgacatacttcatcgcaagctttttggaggacatgaaatga

SEQ ID NO: 2830 - DNA, 942 bp, synthetic construct
  source 1..942: mol_type = other DNA
atgattagcaaagaaacatttgataaggacaaggccaactttaagggcacctaccgtcctctcctaaaggagattgacaatcccacgctgcttcagatagatgagctacacggcattgcaggggcattaagcggcaaaaaccagaacattcacaataatatcctgctgttgctggcctctatcgggaccataattaccatcatcttcttcatctactttgagtgggacataagcgcctttatcatcccttgcgtgctgttgatgtttatcctcatcggtatccacctggtctcaaacaagctgaactatcacgataaataccttgaatacagggtcctcgccgaaagtctgaggctgcagttcttcctctcctatgctggtgcccaggagaaggtgatcgacatcctcccctggttcatcgagcatggggtgccactggttaaagaggtattgggaaccctggatttcactgagctaccgcagaagcgcgagatccgagacaactggattatacaccaaaagaaataccacgaaggggctctgcaaaagagtaaaaagaaaatgcggacccagaaaattgtcacatacgcgtcaattacagtgacaatcgccacctacatcattgcactgatcttcgaatatctcatccccgcctcgacgttcaatctgaatggcgacataattcatcttggcatcaaactggcgatggccgggatgtctgcattcaccctctttttaggaagctattacggcaagatgtccctgtccgaaaagatcgatgaccatgagcggatggtggaactctatggaattattgaggacagaatacgcacggaaggagaaactgacgagatccttagctacgctgctagagagttcctgattgagaacagtacttggtacgcgtatcagtccaagaacaagccagatttggtggtttga

SEQ ID NO: 2831 - DNA, 918 bp, synthetic construct
  source 1..918: mol_type = other DNA
atgacaaccgaactgcagaacgaaatcattcaattgaaagaggagaagaacgcaatcattcttgctcacaattaccagcctaaggagatccaggagatagctgatttcctcggcgatagtctggaactgtgcatgaaagcaaaagagattgatgacaaggacatcatagtcttctgtggcgtggactttatggccgagactgcctatatgttaaacccagacaagaaggttctgatcccagatatcgaggcggagtgtcctatggctcatatgctgacaggcgaacaggtcatcgaagccaagaaaaaatatcccgacgcggccgtgtgcctgtacgtaaacagtctcggagaggcaaaggccgaatccgacatcctctgtacctcgggcaatgtgaaaaaggtcgtagagagcatagaagaggacaccattctctttggacctgatacaaacctaggagagtttgtgcagccattcacggacaaaaagatcattccgattcccggtgacggtcactgctacgtgcacaagctattccataaggaggatatagacgacgcacggaaaaaataccccaacgctgagataatcattcatcccgaatccaataaggaagtgcaggatatggcggattacgtcctcagcactggggggatgctgtcacacatccgagacagcgaaaagcaagagttcgtcattgggactgaagtggatctcatcacgagactggaggccgagtttccagataaaacctactatcccttgcttgagggcgccatctgcaagaccatgaagcttcacacactggaaaagctgaaagactgcctggttaatgaggagcctctgatcaccgtgccggaagacattgccgaaaggtcaatcagcgctgtggagcgcatgttggacgcctccaagtga

SEQ ID NO: 2832 - DNA, 807 bp, synthetic construct
  source 1..807: mol_type = other DNA
atgaccacaaccgaatggctgtaccaaattttactcaatctgctggatttatccacgatcatctcaattattgtaattatcatagccgccgcgataatcatcaagctaggcgaaaaatccctgctcagaatcgagaaaaagtacgagatcaacctgactgcccattatctcctcaaagacatcctgaagtatggaattattataattgcacttgctttgatattgaatctaattgggatagacctccagaacatcatcttgagcctgggaattgtcagtatcgtcatcggttttgccagtaaggacatcgtatccaacttcatctcaggcatattcgtcattggcgataagaacgtccaggtgggggagaccatcgagattgacgggcgaaagggggccatcactaaggtggggttcaggaatacaactatgattggtatggataactttaaggtgaccattccaaactctgttctgagcaccaagacatacaaaaacttccctatgggagaggattacaggcttcgccttgacgtgatcctgccgcacggatttgatatcttcgaatacaagcagaagatgacggaggctatggaaaaatatgagtatatcaataaagacaaagagcccgtgattctggctcgcgagatcaacgaagagggctcgaaagttgaaatcagcttttggatcaacgactacaaggaccgggaccccggcaaggcggtgatcctggaggaaagcaataagctgatttatgactacctcatggatgagaagaatgcaggcatcctgcggatagtgaaatga

SEQ ID NO: 2833 - DNA, 912 bp, synthetic construct
  source 1..912: mol_type = other DNA
atggaaatcatctttctgggcacatcctctgccgtgccgtcaagggagcgaaaccatgcggccattgtcatcagagagtttggcgaggtttttctcttcgattgcggcgaagggacgcagcggcagttcattgaggcaaatgtaagtccaatgaaggtggataaaatcttcatcacccacttccacggtgaccacatcctggggctcggaggactaattcaatcaatgggactgcgacagcgcgaggaggatctcgatatctacgggccacggggactgaaaaaggtgatgaatgccatcacccacaccgggtacttcaagattgacttcaaccttaacattcatgagatcgacgaaggcattgtcgtggagacagagaagtacagaatagaaaccacaaaaacaaaacatagcgtccccaataacgcttattcgatcatcgagaagaaaaaaccgcgtttcattagggagaaggccattgagctgggtgtgccagtgggacccgcctttggcaagctgcaccggggcgaggaagtggagatagacggcaaaataatcaagcccgaacaggtcctcggtcctcctcgcaagggcctgaaggttacttatagcggggatactagaccttccttcaagctgatcgaacttgcaagagacagcgacatcttaatccacgaggcgacctttgaagaagaagaccggctgcatgcgtacgaacacgatcattccactgcaagggacgctgccgacatagctcgcgaggcaaatgtagggaaattgattctcacgcacataagtcccaggtatcaggaatttagcgtcttggagcgcgaagccaaggaggccttcgataacgttgaggtggctgaggactttaaggtgttcaacatcaacagcaaagacaaggagtga

SEQ ID NO: 2834 - DNA, 831 bp, synthetic construct
  source 1..831: mol_type = other DNA
atggacgatatcataaaatttatgctggaggaggacgagggctttggcgacatcacttccaatgccttgattccgcaggacaaggtgttctacgccaagctaatctccaaggatgagggaatcctggccgggattgagatcatcaaggaaatcttcctggaatacggaatcgatattctgtcctctaaaaacgatggggacgagatcaaaaaaggggacattctgctggaaattgaaggaaacgcgcggaagattctgctgttagagcgcactgcactcaacctcctcatgaggatgtccggcgtggccaccaaaacccacagggttgtaagcagtgtgaaggaggtcaacgacaaggttcgcgtagcaggaacaagaaagacagccccagccctgcagaagtatgacaagatcgctatttcaatcgggggcggcgaccctcaccgatacggtttggatgacatggtgttaattaaggacaatcatatcgcagtggtcggctccgtgaaggacgctcttagacttgccaaagagaacgtcagctttagcaaaaagattgaaatagaggtggaatcggccgatgacgcggtgatcgccgcagagaatggtgccgacataatcatgttcgataatatgagtcccaaagaagctcaggatagtctcgatgctctcatcgataatgacctacggaacggtgtcctgattgaaatctcagggggaattacggaggataacatactcgattatgcgcccctggatgtggacatcatatcactgggctctcttacccaccaagctagcagcctgaacttcagcttggacatggactga

SEQ ID NO: 2835 - DNA, 258 bp, synthetic construct
  source 1..258: mol_type = other DNA
atggccgaactggacaacaacattaaggaaaaattgacagaagtgttcaaagaggagcttggcaaggacgatttcgaactcaattatctgattaccgacaacgagatcacgtttttctttggcatcagtgagggaaaggaactatcactcgatgggatcgagaagatttctagcataatcgatgggggatacgagggcaattccatcgtcaatcaggagtaccggtacaaattcaacctggacccctgcagcgactga

SEQ ID NO: 2836 - DNA, 2097 bp, synthetic construct
  source 1..2097: mol_type = other DNA
atggagaatcgctatcaggaacatcaatccgacttcaaatatctcttgatcatcaatgatgatctggagtgtgagataaagattcgccgagaaggcaatgccagtgagaagaacctaaaggacaatattttcacaatcaaagaggccagtgataaggaattagaggatatcggccggatctatgacctgttcgaccagttcgcaatcgaaaatacaagatacgagaaaatccagatggacaagaaggccttcattaagttcgccctaaacattaaacctatcctccgggacaataatgcagagcttatcagctccaaagagattatagaaagcgatttgaaactgatcatggatactgacttgaaggagaatgagttttctctgaaaaaactaaaccgtatcaaatggatcgtgagattaaacaaagggagaattgccctccgtgacttcgacaagcagacagaaaacaataaggaaatcctcataacccggaactacttcttcattctgaaccgaaacgagttcctggacatcaaattctacgcatcctcactgcttaaaaccacagaaaatagcgaaatcctcaagctggcactgtccgaagagatcgatggctttaagttcgaagtgggggagaacctgaagcgcctgataaacccctctagggtgtacgaggtgcctaggaccttaaagggggaattgaggacctaccaaaagattggctattcatggctggtgcagaacattaggtctggctttggttccatattggcggacgatatgggtctggggaagaccctccaagtcttaactgctatcctttactttaaggagaaagggctgctggaggaaagaccgagcctgatcgtcgtgcccccaaccctgatttcaaattgggagcatgagattaggaaattcacccccgaactatcatattacatctatcacggcacaaaccggcgttttccattggaggactacgacattgtactcagctcgtatggagttattcggaacgatctcgaccttttccttgataaggaatggtttctttacatcatcgatgaggcccaaaacattaagagcccacatacccagcagacaaaagcgattaaggaggtgaatgcctacaacaagatagccctgactggaacgccaatcgaaaaccgcctcacagactactggtccatatttgactttacgaataagggctacctcagtagcctcagtgactttaaggacagctatgtcttcagaatcgaaaggctggaagacgagcgatccctggagaactttcttgccatcacaaaaccttttgtgatgcgccggctgaagaccgacgagcagatcaagggggagctgcccgataggattgtcaacgatatctacgccagtctgagcaagaaacagatcaagctttacaacgctgtcctggacggaatctttgaggagatagacgaactcaaaggaatcgaacggcgcggcaccatcctcaagaccataacttccctcaagcagacgtgcaaccaccctgctcagtttctgggcagcggcaaacccaagatcaaagaatcaggtaagatggaactcctgatcaccattctggagaatattatggacatggatgagaaggtcctgatcttcacccagtacgttaagatgggagagattattcaggatcttgtgagcaaaaaactgaaacgggaggttctgttcctccacggctcgcaaagcagaaacgagaaggcagagataatcgaccggttccaggaggatgacaactacaagattttgattgccaccctgaagacagggggagtggggttgaatctcactgctgctagtaacgtgattcactatgacctatggtggaatccggctgtggagaaccaggccacggacagggtacaccgcatcggacaggaaaaggatgttatggtgtatcgctttatcacgaaaggtactctggaggaggaaatcgattcgatcatcaagaccaagttggacttagctgagaaggcgataagcgtagatgagacattcattactgaaatgactacggaagagctgaaacgagcactttccctgagactgtga

SEQ ID NO: 2837 - DNA, 435 bp, synthetic construct
  source 1..435: mol_type = other DNA
atggccgaggacgagaaaatcgaggaaatcgaggaaatcgaggacaaagaggaggaaaatctcccttttgcgaaagctgaagtcgttcgacttatgaaggaaaacctcgatgatgacaagatgataagggagcgggtgaaagtcgagatgaacaagttcctgggcgacattttgaagcaggtatgcgaacagcttaacgattacccgtacactaccatcgagtatgaaatgctgaaggagagcatctatccatacacgaatatcaagcgcattaaccaggagaaagaaagaatactactgcacttaaatgccattaaggccgactgtgatgccctggctatggacgtggaaaagacactcaaactgaaggatgtggcagacgaagacgcattcacccccctgagcgaggcccaagatgaggagatggacgagtga

SEQ ID NO: 2838 - DNA, 516 bp, synthetic construct
  source 1..516: mol_type = other DNA
ttgaatgaagcactgactaagctgctagacctcatgcaggattataacgtcatcctgcctaatgagttcgtctcaatggctaggggaatctccatgattgaatctgtggccaccaccctcgatcccaaaatcgatgtcatggcttccatcgaaccgatcgtcaaagaggtaatggaagagcgaatgaacattaaggagtctctctcaaacaaaaaaggcagtctcgtttactacaagaacatgctgaagacacttcccccactgctaacaaacagcgtgcacaagataaacaatggtgacatgaagctgcgctttgagattgacagaatcgaccatattgtgagcaagttcagtctcgtggtgatcattgccgcccttctgatgagctcctcgataactatgaccatcaaccgggggcccatgttattcgacatgccattgattgcagttctgggctatatagtgacgtttatcctgggggccatcgccgtggcgaattacatctacagccggtga

SEQ ID NO: 2839 - DNA, 666 bp, synthetic construct
  source 1..666: mol_type = other DNA
atgaagcatagactgaatctcgataacaaagaccccaactacattttgctcaaggagatcttcaaaattatggattcccggaagagcaaaagtatcctagcctcctatggatttaagaacctaaatcgcacaatcttcacttttaagattatcttcataagcatgttcttcggcattgacattcccttcatcttaaacgagctgaaatccaaaaaagaacttcgcaagtactttaatatcagcgaggtgctgacggccgaccaggtctataaaatcttttcagaaataaactctgagaaactgataaaatgcctgaaccggatcttgaactcaaggaatatggttaagaggcggggcaagaagacttttatagtggatgccaccccagtggacgtcgatattaatttccacagaaataaaaagaccaaggagcacctggagaagattaatctcaagtggagttacagctcctctaagggttattatatcgggtttaaggcaaccgtggtactggattacgacagtatgaaccctgtgtgtatcctcgtccactcgggagctccgaacgacgcgaagctgttcgaagagattctggaaaacctccagaaacgtcgaatcatcaggaagggggacacacttatcttcgacaagggctactacagctga

SEQ ID NO: 2840 - DNA, 111 bp, synthetic construct
  source 1..111: mol_type = other DNA
ctggatgacatactgacatatcccctcgccgtgttcaataaaaccaagaggatcatgaaggaaaagcggctatacaacagcctgaagatggagctcatgaaaaagaaatga

SEQ ID NO: 2841 - DNA, 132 bp, synthetic construct
  source 1..132: mol_type = other DNA
atgcgggagatccacaaatacacccccaaatccgtggaaaagacagtctatctcaatgtgttcctaggggccctgattataagccagggcttttacagcaagacgaccatccaacagctgagtgagaactga

SEQ ID NO: 2842 - DNA, 348 bp, synthetic construct
  source 1..348: mol_type = other DNA
atgatcgaactgaacaagaaatacgtgtttcacgtgcccctctacaaatacaaagatgaagagctcatcccgattgatatggacgacatcctagatgaactgatagacgaattttatcaaaacggctatgactccctctatatgaccaatatagaaacctactacaagtatcggttcctgacagagatccttatcagcatctttgtcagcacggagcgcctggcaaaggagaaccaggagttcccagacaggattttcaagaagtggttcaagaagaacaataaaattttggagcaggaggccttcgcgtacgagtacaataacaaaatgtttattgagaagctgtga

SEQ ID NO: 2843 - DNA, 600 bp, synthetic construct
  source 1..600: mol_type = other DNA
atgacgaaggatgatattatcactggaaaacaggcgataatcaaaatggactgtccagtatgcggtggcaacaaaacagctaattacatcactcagacccacgagcttgcctatttcggcgagatagtggaatccacaatccagtgcgaaaaatgcggatttcgccacagcgacattatcactaccgagcagaaggacccggcaaagcatagcctgatcattaccaagaagtcactgaacagtagggtggtccgatcccagtctgccaccgtttcactgccagagatcgggatcaaggtcgaacctggccccaaatccgagggttacatcagcaatgtggagggggtgctcattagattcaagcaagccacagaaagtgccctgcggatgttcgacgatgaggagtcgcagaagaacgcgaacgcagtgctggacaagataaatcaagtcctggctggggagttggaaaccctcctactcattgaagacccctttggacagagcaaaatcatggacgttcgggccaagagcgagcccttaagcgacgaagagcttaagaacctgaaaacaggcttcacggtgattgatgatgagcagtga

SEQ ID NO: 2844 - DNA, 948 bp, synthetic construct
  source 1..948: mol_type = other DNA
atgaaaccttatgtgattctcatcggcagcgcttcagggataggcaaatccacagtggcagctgagctggccaaaacattaaacattaagcacttggtggaaaccgattttatcagagaagtagtgcggggaatcattggcaaggaatatgctcccgcccttcactcatccagttacaatgcctattccagcctgagaaaccaggaaaactacaaaaaccaggcggagctgatcaatgcagggtttgaggagcacgcgtcatttgtgctgccagcagtagagagggtcatcgacagggccataaaggaccatgatgacattatcctagaaggggttcacctgatccccggcttcattgacatcgagcagtttacagacaaggcatcggtcttcttcttcatcctcagcagtgatgaggaggaccacaagaaccgatttgtgaaacgtgccatggaaatccggaggggtggaaagcagctcgactactttaaggagaaccgaatcatccacgaccatctgatagagcaggctcaaaagcataacgtgccaatcatcaaaagctatgagattgaaagcaccgtcaagaagatgctatcctacattaacgaaacctgtgaaaccatctatctgaaaaacactgttgacgagttggataaggtgggcgaaatcatcctggaccgctacagcggaagcataaagaatatctcctacccgatcaaggggttcaaagagcctctcattagaaagatagatgtcagcgagatccgggaatacgataagttcataaagaacctgaataagttccccgagaaaaaggaggaacttaaagagctgtacagtctgactgactatcgcgcctaccgcatttgcgccattaataatgaaacgattgagaaaattaaaaatgaccttgataaggagggtttgctcttcaaggaggatatgtga

SEQ ID NO: 2845 - DNA, 1053 bp, synthetic construct
  source 1..1053: mol_type = other DNA
ttgtacagcataacttcagtggaggacctgcaagagctcaacccatatgtgattatcgggtgcggcgggggcggggagaaattctccaaccttgaagggatcgaaacagttggttttctagacgacaaccccgagaagcagggaaaactcttctgtggtctggaagtcgccagcaacctgtccgaccttttcgagtcaactgatgctaatacagtggctgtcatgctgcctatcggcgctgagggcgcagccttgaaatacgccgtagaggccctggccaatggcaagaatgccgtggtgagtttccgctcactcagcctgtgtgaaaacgagtctctgttgaaactggcaagtcagaatgatgtagtgattaaggaaattagtcccagactggacgtggtgcgtgaaatctgtggtaccgcacccgagaaatgctgcgaggtgctgcccaagatttcttacgaacccaaagcgaaagttgtctttgttggggggacatcccaggagtgcggcaagcggaccacgaccaagtctctggggatcgaagccgaaaagagaggcatgaaggcggctgtcatttccactgatgagatgggactggagaagccaaccgtatttaacttcagggccggaagcttgtcggctatggatatccctagcgccattctcagctccatgaaatatgtggaagaaagggacagtccggacatcatattcatagagggtcagtccagcctgacggaggatgggaaccctcatccccgcggactcagcgcttgcatccttatcggcgcaaatcctgacgccgtcatcgtcggacaccggccaaaccacccatatcgggagccacgaggaatcgactatgaggtgaaggctatcgaggcggttgtgcctaccacaaaagtcgtgggattatcgataaaccttaggaataaggatgaaggcatgaccgtggaagactttgagaaggagtacggtctaccggcagcagatatgtacgacggcggcgcctcaaagttactggatgccattctcgattacctcgacgagtga

SEQ ID NO: 2846 - DNA, 285 bp, synthetic construct
  source 1..285: mol_type = other DNA
atgactaagatggaaattgagcttaatgacgagcagctagaaaaagtgaagatactggagagccatgacatcagtgtcggcgatgctatcgacatgctgtttgaagcccgggacagggtgatctccatcattgatgacatcgatgagaaagatctcgaagacgatacacccaacacagaggaggccaaagcggagcaaacccagctgaccgtaaagacgtatgacatagcaattgaagattacaagtcacacatcagctgggccaacgacttcttcaagctctga

SEQ ID NO: 2847 - DNA, 345 bp, synthetic construct
  source 1..345: mol_type = other DNA
atggtggtgcaagagcatatctgcataaacgaagagaaaatccaggagcacagtctccaactaaagagccttgaaagcgatgccgatttcaaagacaagcggatggatgaactgtaccgcaagatcgacaagattgaggaaaaactcgacgtcctgaataacaatataaacaattttttattgcgcaattcacaggagaacaaaaagatggaaattaggctgacaaagatcgagaccgacattcagaaccagaaactggagtcccagcggagaatcgcacgaatgggcatcgctctcaccgccatcacgatactgatcaacatttatttcaagattatgcactga

SEQ ID NO: 2848 - DNA, 969 bp, synthetic construct
  source 1..969: mol_type = other DNA
atgaaaatcgccccaatgaacaaggacaagggcggtgaaaaaattttggactacagtatcctgaaccacaaaggcttcaactcttttgaagagaaaatcaagcgcatcaaagtccacaagccctatgataagatcctgaagaccagtttcaagaagaaccccaatgggtttttggagatcctggaaaagggcgccatattcgaagagttcgtggatagtgagattataaacgcttttttcagggagttgcattctgatattattattcgggtttataagaagcggatctatattattgaatttcagagcagccgtctcaagctcgaggacattctgaggttcgggctttaccgcgccagcatagctcaccaggaaaaaaaggacatccacctgtatgtggtttccaaggagccgataaagagggataaaattgaaaataagtacggcgactactggtttactatacatgtcaaatcgcttaccgacatggattacaataaagcgctgaaccgcactaataacaagatcgagaatgaggaggaagagtttacagaggaggatttcgtgtacctggagatttcccctttaatgactcgaaaaaagaaaaagcagcggcagctgctgaaaagagtggctgagatgacgaataagctggacgggagaatcagccgggagaagcttattgagatcaagtccatccagttcgtgctggcaacggagctcctaaacgacaacgaaaaagccaaaatcgccaaggtgataagcatgcagtcagaaggaaaagaagaggtcttccaaggatacctcacaaaggaagagcgaaagcaaacctatgaagaaggaagagaggaggaaagggaggaaatcgtgaagagcctagccgagctcgacgtatcaccagacatcatcgccaaagcgacaaaaatgtccaaggcagagatcgcaaccctcacaaccaccatcatctga

SEQ ID NO: 2849 - DNA, 510 bp, synthetic construct
  source 1..510: mol_type = other DNA
atggagtaccgcttgccccggatggaggatgaggatgacattcgcgacttcatccgcgagtgctgctacgtggaggaatgctatgtcatgctcaagcaggagctcctgctgtcggactacagcaaatgggtgtcactcatccacagatatgcaagtctcggcaacggaaaatgggggagaagtttgctgcttctggcctatgatggttctcgactggtcggaatcctgccaatcagatacgaaatatccgaggactacgcctttctatatggcaatattggctaccatgtgcggccgtccttaaggaacatgggctacgcaaccaagatgctgaagcacggactggaaatctgcaaggaaaaagggatggcgcgggtaatcgtcgggtgtgacagggacaatctggccagcagcgctgtgataaagaaatgtgggggtgtgcgacttaggacattcaacgactcctacggcgttaacgattattacggaatttatctctcaagcgaatga

SEQ ID NO: 2850 - DNA, 654 bp, synthetic construct
  source 1..654: mol_type = other DNA
atgaaaaccacctcagtgatagtccttttagttattctgggctatgggctgaaggtgactcaagacgtcatcaacggcggcaccagtctgccaaagatcagcctgaaggagttgctcaacttcggggtgaaaggaaccatcgtctacaccttctatctgaccatacaggcctccctgctgggtttgatttccctagccatgaacttccccgaatttgagttggaagagatgatcctcaatcttcacgagaccattgaacttttttttgagcatgacccgatcagcttcatcctctttatcatactgggactgctcattgtctatggaacaatattctttatggagatcgctctggcgattctcgccgatggggaaacgctaaaagccgcattcgacttcaagcgcatcaaaaggacagtggagacaatcgggtggaaggaatacgctgaggactacacaaagatcgtggcggctgtagttatcttagtatttatcaatggctatttccactcttacgggtggatctcgatcattatcggcgtgctgactgatattctggcattcactgtggaataccggggcattggtaacatttacagaggatacaaacagaagataaatcaggagacggccctcgaggatacgagcaactga

SEQ ID NO: 2851 - DNA, 1407 bp, synthetic construct
  source 1..1407: mol_type = other DNA
atgaaaaagaccaaaattattgctagtgtaggtcctgcatccgattccgttgaagtgatgagtgacatggttgagatggggatggattgcgccaggatcaacctctctcacgcgaatcaggaggatattttgaaaatcatagatgtggttaatgaggtgcggaagatatgcaacgtgccgctcgcaatcatgtacgacacaaaagggcccgagttcaggacttctgaatttaagcatggcggtgtgctgcttaacgaaggggacaccatcaagatgagcaagacttgcatccagggtaataaagaggagtttggcgtcaaccataaagaagcaatcgactttatcaacgtgggcgacaaggtgctcatcgacaacgctctcctggagtttgaagtcattgacaagaaagaggactatgtgctcctcaaggcgctgggcgatggcaagatcctaaaccataagaccatcaacgtccccggcgtggacctgaagttggatttcataagtgacgtggacaaggaggacatctccttcgcagccgggcactcctgtgactacctggcccttagctttgtaaactcaggggaggatgtaattgccgcgcgtaaaatcgtggaggacgccggaggagacgccctgatcatttcaaagattgaaagtcgcatgggccttatgaatctggacgagattattgatgaatctgacggaatcatggtggcccgaggggacttgggggtggaggtcccaatggagcacctgcctatcatccaaaaggacatcatcagaaaatgtcgagaaaagggcaaatttgccattgtggcaacagagatgctggcttccatgtacgaaagccccagacccacccgggctgaggtcagcgatgttgccaatgccgttctggatggcaccgattgtgtcatgctctcgggagagacaacgatcgggaagcacccggtccacgctgtggaaatgatggatcggatatgcaactacgtggaatcgaccattgactatagtaagcacaccttctacaaaggaaaggtggctatcagcgatacaatcgccaagcttgtcataggagccagcgaatactcagacatcaagctaatcgtcacccctacactcacgggattcaccgcccgcaaaatcagcaatctgcgctcaagctccgcaattttagcctgctgtccaagcaacgacattgcgcggaagctggttctgaacttcggagtaaaggctgtcattactgacatttatgagaatactgacgaaatgatcgacaatgtggtggatattgctaaaatggagttcgatctgaacaaaggcgatctgatagtggtcacaggcggcttcccattaggtaagactagaaatacgaactccttgaggatactggagatcgattga

SEQ ID NO: 2852 - DNA, 1491 bp, synthetic construct
  source 1..1491: mol_type = other DNA
atggcgaatgagaacgagtggggcagcaatctggcctttgtactggccatgattggttctgccgtgggcctgggaaacatctggagatacccctacgtgctttactcgaatggaggcggagccttctacatcccttatctcattgccatcctggttcttgccatccctctcatcattctagaatacggggtcgtctacaactataagtcctcatttacaaaggctatcgtcaaaatcaagccgaaactggagttttatggttggattctgcccgtggtcacgtttatcatgacaatctactatagcaccatactcggctgggacggaatctacttcatcctaagcttcttcaagggctgggggtcagatccaaatacctttctgactgtttccctactgcagtctgcagatagtatcagtggcattctgaacttcattccagtcatcgccattagtatgattttcatatggctcataatatggttcatttcccaccgtaacctggatgaaggcctcggccgggtggcccgatactttgttcccatgctgtttgttataatgattgtgattgtggcgtttagcttgaccctgccgggggcatccatcggtctcgcggagttgtttgatcctgattggtcccttctgtacaattatagcatatggatggccgcattcggtcagatattcttctcattgagcttggggatgggggctggcttcacctttgcaagctacaccaaaagggacatcgacttgatcagcagtggactgtgtgtggttctggccaacagtctgttcgagaacttcgcggccctgggggtgttcagcatcctaggatacatgtcccttgagtctggcgttgctgtgtcaaagcttgtgagccaaggcacaacactgatctttgtggcatacccaaaggtgttcaacattttaggaggggtcgctttgattttagggccactcttcttcttcaccgtgtatgtggcaggagtcacaagcatcctctcctcctttgaagtgctgtcgatttccatccaggacaagttcgctttctcaaggaaaaaggctactaccgctctgtgcattgtgggcgggctggctagcatggtctttgccactagcgccggcggttatctcctcagcatcgccgacatatttgtcaataatatcatggtgctgttcagtgtgattgtgcagaccatcctcttcgcctgggtattcaaggctgaacggctggtggactttttcaacgcgaaaagccgcttcctgaaactcgggagatggtggcttatcctggtcaaatatatctgccccatcctgcttacggtcatctggatcggagagctctataacctgatcaaaatgggttcgactgaatttgtagtgattttaggcgtactgctcgcaatattattgatctttgcctttattttcacaatccgccccgcaaagacggacgagtggtttaagaccgaagagcggattaagtga

SEQ ID NO: 2853 - DNA, 618 bp, synthetic construct
  source 1..618: mol_type = other DNA
atgggtgaggaagaactgatagaccaatacatgaagcctcacggcgaggaggggatcaagatcatcgaaagcatgaacgaggagcaccagaacatcagcgaatttgcattcgagtgtgtcaacctcggtgcctacgatgacataattgatatcggctgcgggggcggcgtcaacattgaaaagttcctgaatgtgacgaacggacatgtggacggcctggactactcggatgtgtctgtgagcgagagtatcaaacgcaaccagacgtcagtagacggtggcagatgcaatgtaatcctaggggatgtgactgacatgccaattggggatgagtcctacgacctcgctaccgcattctccacaatcttcttctggccgaatttagtcgagacatttaaggaggtgaaacggatcatcaagcccaacggacagttcatgatagcccagggaaccgacggaacaaaccccgaggaccaggagtggattgataccattgctggcatcaatgtctatactgccaacgagctggaagaatatttgcttgatgcgggatttaaaagggttgacgtgtttaccaaggaaaatacctatctgctcgttgtgattgggaagaaatga

SEQ ID NO: 2854 - DNA, 498 bp, synthetic construct
  source 1..498: mol_type = other DNA
atggacttcaataaggaaaaattcaagatggtgctgcagtacatcatctacaaatgtggaattaaaaatacggtgggacggacagttctgcacaaactgctatatttttccgacttcaactatttcgagctgtataacaagtctctcaccaatgaatgctacaggaaacttgcgcggggccccgtgccagtgcactttgagagtgtggtcgaggagttgattgacgagaagaagatcagcttaaagaaccgaagactgccgtgcggcaagctgatgaaccgctatttctcgttggaaaagcctgagatagacctgaaagaggatgaactcgcagtcattgatgaagtcatcaaggatcttagccacatgaacgggaagatgatcggcgagtactccctgaaggatatgcccgtaaagcaggcccatgacaatgggtccatagactacaacctcgtgtttagccgcagtctccaatactcaaaaaggaccgacgattga

SEQ ID NO: 2855 - DNA, 357 bp, synthetic construct
  source 1..357: mol_type = other DNA
atgctagacatcccaaaagaagacccccaggtccgccgattcattaagctcgtgaaggaggagggatacagttatgaaaaagctctggaagaggtgggggccgactatatcgatgagcgggattgggaatacttcggtttcaatcaaagggagggcgattacagggacttttacaacctccggcacccgcctaaggagcatcactacctgagcgggagcaactcatcaagcggctcctcgtccaacaaaagacagtccagcaagtgggatgacctgaagtgctatatgagtgtactgggccccttgataataatcttcgcaatcgccattctttggggagtgtttaaaggcgggtga

SEQ ID NO: 2856 - DNA, 486 bp, synthetic construct
  source 1..486: mol_type = other DNA
atggattccaaaaaaatactggtcatactgggcctcacggttttagccatcttcctggctagttcagtgagtgcaggcgacctgatttcgaccgggggttataacccagatagcctgattatccttgaaggagccgacttcaacattcccgacggattcgaaaggatcgaggacaagagcatcgcaaaccagacacgcaattccggggtcttttcatccatcttgaatcgggaagtgtacgggaaccctaaaggggaggagatagtcatttctgttgtggactttgataattttgatgccaatctgccgatccttagcatgatctgcaaaggctgtcaaaagaaggaactcctcggctaccccggtttcattggcagtgatggaaactccaccaagtttagctacgtattcgacaacaaggtggtgtctatcagcgctccaaatgaggacctgatcaaccaggtgctagtggtcgaggacgcgtga

SEQ ID NO: 2857 - DNA, 123 bp, synthetic construct
  source 1..123: mol_type = other DNA
atggccaagatcaattatagctactccaaaaagtactgcatcattgtgttcatcatgatgtttttcatgaagcggaactatagcaagaagaactacaaaataggcaaaaccgacattctgtga

SEQ ID NO: 2858 - DNA, 339 bp, synthetic construct
  source 1..339: mol_type = other DNA
atgaaagacctgattggcttttgcggtttggactgcgagctgtgccaggcctacatcgcaacaattaatgacgatgacgaactccgggaggaggtggccaagcactggagcgagctcaacaacgtggaaatcagcccggaaatgatcaattgtatgggatgtagggtcgaaggggtaaagacgccattctgtgacttcatgtgtcccatacgccagtgcgcgctggagaacaactatgatacctgcgccgactgcgataaaatggagggctgcgagaagctagtgatgatcttcgaaaacaacgataatgcttacaagaatcttaaacaccattactga

SEQ ID NO: 2859 - DNA, 549 bp, synthetic construct
  source 1..549: mol_type = other DNA
atgtcgaggagatttgcggtaatcgacactgaaacaaactggaacgacgaagtcatgagtatcggtgtgctgatcgcccgctgcaagaactttaaaagaacggacagccgccattacattctccccaaagccgaggcagtcgggggcatgtactccaaatcaatgcgggtgaccagtcacgagattctgacaaagcacaggaatgacgccattgacgatttacgctacctgcttgattccaatggggtggacgacttgtttgcatacaatgcttctttcgataatagacatctgcctgagctgagcgacttctgttggcgagatataatgaaggttgccgcctataaacagcacaacccatccatcccaaaccacatgccctgcttcaagaccggacgactccggcggggctatggagtggagcccatgctgcagatcctcgggatcgaggactactgcgaaagccacaacgcgattattgatgctagggacgagctgaagatcatggagcttctaggctacgatatagatttctatccggaaatctga

SEQ ID NO: 2860 - DNA, 609 bp, synthetic construct
  source 1..609: mol_type = other DNA
atgacggtgatcatgagcacaaacaccatgggctatgcagatttggacctcaggcccgctgagatgcaacgcagcacaatgtacatttccataaacgagtgcccgaactgcggatatgccgaatttgacttctcacgggagcctaaaatcaagagagagtacctggagagcgaggagtatcagagctgcgagggcatcgagttcaaatcggagcgctcaaagccattctacaaggcttatctgattaataggaaggaggaaaacacccagaatgaacttaacttcctgatgcactccatttggtcttgtgacgattccgaagactgtgaaaacgcacggaagctgcgccgaattgcctgccagttgttagaaaccatcctcagtaatatcgagaagcataaagagtgggcggataaggacactctgatgctcatgaagtctgatctgatgagacgtggggagatgtttgatgaactgatcgaagagtacgagacggtgtcctttgaagacacacttctaaataatataaaccagttccagatcaaaaaaagtaaagaaaaggacagtgcccggtacaccattggtactgtcatcagcctctacgggtga

SEQ ID NO: 2861 - DNA, 627 bp, synthetic construct
  source 1..627: mol_type = other DNA
atgaacaccaaggaaaagatatttgatgtttctctcgatctgttttcaaagcggggctacgactcggtctcactgagagaaatcgcagaagaggtgggaattaaaaaaagctccatctacagtcactactccagcaaagaggccatcttgatggatatcttcgaatacttcacagaccttttcgaatatgacgatctgatcaacagtaaagagctggtcctaagcgaagataatgacgtactgatcgaaaaccctgagctgttttaccacatgggctctgaggccatcaggggtatgtttaaagaggagcgaaaccttaagatttggaagctgatcttcatacaaatgcactataacgagaagataaggaatttcttccagaaggaaatgctgttgaagcccctgattttctgggagaactttttcgctattctaaaagaaaaagggattattcgggccgattccaatccgcagttgctggcgaaggagtactatagcttccccatctttctcctcttagagatctgcgccaagtatgacgacatcccagagagctgcctcgacgacttctttaagcaggctgaggagcatgcacgcttccttctcgactgtgtgaaggtgaaatga

SEQ ID NO: 2862 - DNA, 1092 bp, synthetic construct
  source 1..1092: mol_type = other DNA
atggattctaagtttaacatccaagaatatctggctaacggggttgaggtcatcctgaaggatgccttcaaagccaccctgaagaatcccaaggaaggcttatacttggccaagttcgcaaagcacgcccgtaaggccagtgaaatccggagggagtacagcaaaaagggccagaacatcccagttttcctgattgctagcatcacaagttcctgcaatctccactgtgtcggctgttactctagagccaataattcctgtagcgacgaggcgcccttgaaccagctctcagccgatgattgggaagatatattcaaacaggcacgcgacattggcataagcttcatagtgcttgcaggtggagagcctatgattagggaggatgtgatcaagaaagcatcgaaattccctgagatcttattcccaatctttaccaacggcaccatgctgaacgaggattacctcaaactgctggataaaaaccgaaaccttgtacctattctgagcatcgagggggacgagaagctcactgactcaagacggggctctggagtctataaacagctgatggactctatggagacgatgaagaaaaagaatatcgtatttggagcgtcccttacctttacaaaagggaatatctcttccttgctttcaagggactatattgagaagctgcacgacctgggatgcaaggtggtcttcttcattgaatatgtgcccgtgaatgaggaaacagtggacctcgctccaagcgacagtgaacgcgaactgttgctaagtgagctcgatgagctccgcagtgactactccgatatgctatttcttagcttcccgggcgacgaaaaggagagcgggggttgcctggcggctggacggggctttttccatatcaactcccatggcggggctgagccctgtcccgcctcaccgtactccgacattaacgtgtgcgagactagcctcctcgaagccctggagagcaacctgtttagatccctgcgagatggtggtctgttgctggacgaccacgaagggggatgcgtgctatttgagcacaaggaagaagtggagtcgctgttcgacaattga

SEQ ID NO: 2863 - DNA, 414 bp, synthetic construct
  source 1..414: mol_type = other DNA
atgagttttacagacaacctgaagaaatccctgggctttgaagaaggagaatacgggagcggctatacgttcgacgaaggttacaacggggagcccgacccatttttcgagggaattttgattccctataagttcccagagaccaaggccttcatggagatcatcctcatcaaaccgaaaagcgttgacgatatggattacattttcgaccaggtcgtagaggagaacaatcctgtgataatggacctaagcttcatggagaagaaaggggcggcagaatttaagcaagccggcgaaaaactcaaggtcctgcgccagcagtacaatgccgaggctatcctgctttcaaagtccgatgataaaaacctcatcatcgtgacccccgcaagggtgaagctgatacggaaggagtga

SEQ ID NO: 2864 - DNA, 756 bp, synthetic construct
  source 1..756: mol_type = other DNA
atgatcgatacccacatgcatgcagacgcacgcagcagtgaagacttcgaaaaaatgttcatcggcggaatcgatacggccatcagctgctcatactacccctacaaggtgaacaatgccgagattctcctgaaccatctgaatcgaattttgaactttgaacctaagcgggccatggagtatggcctggaactcaagattgccctgggcatccacccggcgaactcgattaaggacaacgaaatcatattcgactccctcaaagaatggatagacaacaaagacataattgcgatcggagagattggtcttgatgagaacactgagctggaaaaggaggtcttcaagaaacagttggagctggctgaggagacaaaaagcaaggtaattgtccacacacccagaaagaacaagctggaagtgctcaaagacatcaaggagatcgccctagagaatatcaatccaaagctcgtggtgattgaccacataaaccttaacaccatcgaggagatcattgatgacgatttcaccatagggctaaccgtccagccccaaaagatggaggttgaagaggccatcgagatcctggacaaatacgactttgacaagtttctgttaaatagtgatatctccaataaaccatccgatcctctttcagttccaaagacagtgaggactctgaaacggctggggtataagcaggataaaatcgataaggtggctttcaaaaatgcagaaagcttctttaacttgtga

SEQ ID NO: 2865 - DNA, 813 bp, synthetic construct
  source 1..813: mol_type = other DNA
atgtattatcacgattacgtcaaggagcaactgcggtttttgaataactcagagattaggctgagaatcttggcatatctgtctaaaaagccattcagtttagcggacttcaaaaacagttcctttgttagctacagctctatatcctctaacgtgtacaagctcaccgatgaagggtttgtcgagaagattgacaaaaacaacttccggttgacaaacatcggcaaaatttacctgatttccctcatggagtttcacgatacaataaacacggtaaataacttctcagacttctggcttgatcatgacgtgcgggccctctccagcaaatatctgaagaggatttcacagctggaaggctctaagctaatccagagccgtcccaccgacatctataagactcacgaggagttcaggaacctatttaaggactccgacatcctcaaggtcatcttcccataccttcatcctgaatacccgcgactgatcaggaccctgctgtccaatgggagcaaaatagagatactcgtgcccagagtaatctgccggcgcttcatcaagagtgtgggagaatccctggtgcgcagctcgatcaagcagaatgccctgtcgatcaagttcattgacgatgaggtgaagctggctctggctatctctaataagtgggttagcattggcctctttaaacgagatggaagctacgaccagagcagattattggtctcagataaaaaggacgccatcaagtgggcatacaatattttcaaaagttacgataaaaaagccgaactggtggaccttcgcagtctctga

SEQ ID NO: 2866 - DNA, 819 bp, synthetic construct
  source 1..819: mol_type = other DNA
atgatcggggatatcaattttgagctcgacagtgagaactttcggatcatgcgtttcttactgagctcatttatgcgaacagatcttctgctgaccctggtgaatagttcttctcgcttgtgttccttgagatcgaacctcggcaagagctccgctacaatcctccacggcgttagcgagcttgaagcctttaacctgatatcaaaggactccaaatattactgcctctcttcgaaaggatttatttacggcctggccctggataagctgtgcaagaacctatacattttccagtcaaaccccgagttttggcagaaccatttcatcgacgggcttccgagcgaatttgtagagaacgcgtatctcattaaggattccgtgtatatctgcagtgacaagcttgacatggaaaagcccatcagggactatttcaagaatatcaagaacagtaaaagcattaagattattctgcctatcttctctgaattatacttggagatgattctgaaaaccgtcggaagcgaccacgacctggagttgatagtggacgaggaggtcttcacttcaatcaagaaatcccggtattacaggcgcatcatacggctatccaaaggtggcaagatcattctgagaaaatacatcggggacctgaatctgttcctgaccttcagcgatgaatttatgagcctcaatctcttcgataaggatggattctttgacgattctgagacgatcttcaataacactccagatggtgtgaaatgggcagaaataatgttcgactacttcctggacaattccaacgtggtggtcctctga

SEQ ID NO: 2867 - DNA, 1713 bp, synthetic construct
  source 1..1713: mol_type = other DNA
atgaatcacgaaaagatgtccaacatagcccgcaagcggggatttctgtggccgtcctttgagatctattccggggtgagcggattcaccgattacggccctctcggggccagtctcaaaaacaacatcatgcagaagtggcggaagcagtacatcgcaggcgagggcttccacgagatcgaaggccccaccgtgatgcccaaggaggttctgaaggcctccggccacgttgataacttcactgatccaatgactaaatgtaaggactgtggcgaagtctttcgagctgaccacattatcgaagaggccattggagaggacgtagagagcctggagaatgaggagatggatgaaatcgtgcgcaagaatgatatcaagtgtccaagttgcggcggcgagctggcaaacatttggaactacaacctgatgtttaaaaccgagatcggtgccaaaggagacaaagttggttatatgaggcctgaaaccgctcaaggaatcttcatcctcttcaagcgattgtcccggttctttaaaaataagctgcccttcggtgccgtgcagctgggtaaagcatatagaaatgaaatcagcccacgccagggggtcatccgcctgagggaatttacgcaggcggaagcggaaatcttcctcgaccctagagacaagacacaccccaagttcagccagattgctgacgaaatcctgtatctcagttcgcaagatgtgcagataaacaacaaggaaaccttggagatcaccgctcaggaggcgcttgatcagggggtggtgtcctcggagacattgatctaccaactgtaccttgcaagaaagttccttaaggaactgggcatcccagatgaggtgttaagattccgacagcacctacccggcgagatggcccactacgcgctagattgctgggatgtagaatgcctaactgaccaatatgggtgggtggagatcataggtattgcagataggggagattatgacctgaaggcacatacagagttcagtaatgaagagcttagcatttacatcgagtatgatgagcccaaactggtcaaaaagaccatcgtcaaacctaacctgaaactgttcggaccagcctttaagggagactctcctaaaataaagacatatattgagaatctcagcgacgaggaggtcattgaactgaaggagaagattgagagcaaggggaaattcacccttgagctggaccagagctttgagatcctcaaggagcatctcttgtttgaggacattgaagaggaagtcaaaggggagcgcatcatcccccacgttattgaaccgtcattcgggattgaccgtatcctgtactgcacgctcttacattcattcaagacggaggaagatgggttcgacaaggaatactttaagtttgctaatgagattgctccaatacaggtcagcgtgttccccttgatgaaccgggacggcctgggcgagatagccaccgagattacacataacttacgtgaagccggatttacagtagacaatgacacttcaggcaccatcggcaaacggtacgctcgggccgatgaggtgggggttccgatagccatcactgtggactacgacacaaaggaggacgatacggtgaccgtgagaaacagggacactgaagagcaggaaagggtgaaaattgaagacctgaaagaggtcattgaaaccaaatacctctga

SEQ ID NO: 2868 - DNA, 588 bp, synthetic construct
  source 1..588: mol_type = other DNA
atggctattctctccgacagggatatcaagaagtacctgaatgaaggcaaaataactatagaccctctcgaggatgagaagcaaatccagcccagcagcgttgacatgaggctaggggatgagttcaaagtcttcaaagtgattagaaaacctttcattgaccctaaggacccagaggacctggcgtcctatatggagtccacaatagtgcccgaaggagatgcattcatcatccatcccaacgaatttgccctggcaaccacctacgaatatgtcaaaatcccggatgacttagtagcccgggttgaagggcgctcaagtatgggccgcctgggagtgaccatgcacgtgactgccggcttcattgaccccggatttgagggtcggatcacccttgagatctcaaacatcggggccatgcccgtggctctgtacccgggtcagagggtctgccagctggtgtttgagacaatgacgtcgccaagcgagttgccttacggccacccagaacggaacagtaagtacatgcgtcagcgcagaccagagagcagccgaattaagtttgattatgaactcaatgagaagtga

SEQ ID NO: 2869 - DNA, 876 bp, synthetic construct
  source 1..876: mol_type = other DNA
atgaggaaaggcttttacgaagatatcagtacattcctggtgaagcacaccttccacacccgttttttcctgtcaaggctaacgaagaagtccaaaattgccaagaaaatcatcgatagacttcttttccagggtgacgaggtgtacgtcctgcccaacaagaatactgtacagaagacaaagagcgccacaatctctgcaaacattgaggtcaaccaatcgttccagaaggacgattccgagtttgtgccaagcgaaatcctgaagatcgccattcgcgaggctagtgacattgtcataatgaacaaatgcctgtgccgctcctctaatgactgtcaggactaccctcaggacctgggctgcatattcctgggcccggctagcaggaagatcgcctccaagtatggacggcgggcgactgtagaagaggcactcgcccacgtggacaaggccgatgcggaaggactctcccacgtgatcgggcgaaataagatcgataccatatggatgcatgtcagccctaaagaggagctgctgaccatctgccattgctgtccctgctgctgtctatggaaagtcctccccgacctcgacaacgatattagcgataagatcatgagactggaggacgttgaggtgcatccaataagcgacaactgtaagatgtgcaaaaaatgtttaggggatgacatttgctttggcggtgcaatcagtttggaaaacgacaagatcacgatcgaccaaaacaagtgtgtgggatgcggccactgtgtgcagacctgcaaattcaacgctattgagctcaattatactcagaaatcagttgattcagttttgaatcggattggggaacttgtggattacaagaaacactga

SEQ ID NO: 2870 - DNA, 792 bp, synthetic construct
  source 1..792: mol_type = other DNA
atgaaatacaaggataaaaaatcagagcgcggaaaagtgaaggaaatcgttgaggacgaggaaacgatcagactcaaggagaacatctatgtcgtcttcgttgagtgtgaatcccctgggaatgtggggtttttagcacggaccatggggaacttcggcttgaataaattggtcctcatcaatccctgcacacttaaggaagaggcttactatcaggccacccatgcacgggacacggtggagaacgcaatgatctatgacactgtgggggagtttgtcaaggacaaaaagatcgacttcataataggttcgaccggcgcccccggcggaagctacaacattagtcgtatccccctgaagcctgaagagctcgccaaaagtatgaattacaacgacaagatagcgattctattcggccgagagggcaacggactgaccaatgccgaggtggacatgtgcgatctgattgtaagcattcccaccgatccaagctacccgatcatgaacatttcccacgccgcggctatcatcctgtacgaaatctttaagaacaggaatgagtttccagtgcagggcctggaagagagcacagccatcgagaaggaatatctgatcaaggatatggaggaactcatcgataacctgaacattccagaacacaagaagaaaaacggcctgaaagtattcaagaacattgtgaatagggctttcattactggaagagaagcccacacactgatcggtattctccgccggctaaatcttaaaataaagcatggggacgagtactga

SEQ ID NO: 2871 - DNA, 1527 bp, synthetic construct
  source 1..1527: mol_type = other DNA
atgatcacagtgtatgtcaagcgcttcgactcggagaaggatgaggagcctcatatcgaggcttacgaaattgaggagtcccccgggatgaaagtgctagacgccttagaagagatcaacagaaaatacaatgcggacattagtttccgtagctcatgcaaggcgggccagtgtggatcatgtggcgtcaagattaacggaaacggcgcactggcttgcaaggcccagataaaggacaacagactgatcgagccactggacttccccgtgattaaagacctcgtggttgataggagctctgccgatgaaaaggtaaagcaactgcagttgtcgctcaactgcgacgatgagactgcccatgagaaactcaatcccaaagatatcaaggacacgaaaaaggtccgcagttgcattgagtgctatacctgtttgtccacctgtccagtggtgaagcactttaaggaagacttcctcgggccatattacctgcggtacctctctaaattcgattttgaccccagggacgagtcagaccggctgatcgaagcgctggacagcgggatgtacaactgtaccagctgcggcaaatgcggctccatctgtcctaagtctattaactcctttggagatgcaatagaaaagctaagagcaatggcttacgctagggatctgggacctcttgatgcccacaaaatgttcagggaaaatgtggtggcaagcgggcgatctgtgagcaagcccgaggagccattcatcgaaacaatccacaagaaatgggacgaggaaggcaaatactatacggatgacgagagtaacgacgaaaacaagaataaagaaaaggtggccctgttcactggctgtatggtagactaccgagcccaggaggtgggatatgccttaatagatgtcctaaaggccaacaatatcgagatcgacattccagagggccaggtctgctgcggcagcccgttgctgagaaccggacaagtggatgctgtccaggagctcgtagacaagaataaggaagtctttaaggattatgataaagtgattacaatctgtgccggctgcggagccacacttaaaaacgaccatccgaaatacggctcaaatctcaatgtggaggacataagcgagtttctggttgataagctcgacaccagtaagatgaagcccctgaacactaaagtgacttggcacgacccctgccacctgtcccgcggccagaacatcaaagatcagcctcgcgacataatcgaaatgattccaggggtcgagtttgaagagctggaactgccttgccaatgctgcggtgcagggggagggatcaagtccgggcggcccgacattgcgttggagcttgctaaagacaaggcagagatggtgcgggttaccggtgccgactatgttacgacaatctgtccgttctgtcagatcaacctgcaggatggtctcaatgccattggtcttgataatgttaagaccttgaacctgatccagctgcttaagatggcttacgatgaatga

SEQ ID NO: 2872 - DNA, 1992 bp, synthetic construct
  source 1..1992: mol_type = other DNA
atggcgtacgatcagttagtgacgagtgaaaaaggagataaactctttctgctcggtaatgaagctgccgtgagaggagcgatcgaggctggcgtatcagtcgcagcaacataccccggaacgccttctagcgagattggcaacatcctcagtgtcgtggctaaaagcgcagacatgtactttgaattttctgcaaacgagaaggtggctatggaggtggccgccaccgccgcagccagtgggcttcgaagcttcacctttatgaagcacgtcggtttgaatgtggcggccgattcattcatgaccactgcatattctggagttaagggcggaatgattatcctggtggcagacgacccctccttgttttcatctcaaaatgaacaggatacacgcaactactcccggctgtcgtccattccaatacttgaacccagtaaccctcaagagataaaagacatgatggtttatggctttgacctctccgaacagtttggtatccccgtgattctcaggaccagcactcgagtgtcccatatgagaggcatcgtggagatgggggagataaacagtccgaaatcaaccacaaaggaagtcaagagcgataagcactggctcaaaggatacttcgtgaaaaaccccagggagtttgtcccggtgcccgctaatgcacttgcaatgcatgagcggttggtggagaagatagggaaaatcgaagatgaggccaatgaaagccctgtaaatgaggttgtctcattcgaatctggggtgctgcagggcaaatacggcgtcatttcctccggcggggccttcaattatgcctatgacatcgtcgctggcgaaaacctgggaatggacatcctgaagatcgccctgtcctaccccacgcccaaagacctgatttacgacttctgcaaaaacctcgagggtgtgttcatcgtggaggaagtggaccccatcctagagaaggacgtcctggcagtgcttggggaaaagaaccttgactgcccagtgtatggaaagatcgacgggactttccccatggttcatgaatttaatccagatatcgttaaggaaagcttcaacaaggtgatctctgatttggccgatgacgaggagctgaaggccgaatacaaggatgagtttggcaaagatctgactggcgacctgatcgagacagtcgagaaaatggagtttagccagagtctgaatgacttggtggacaatatccccacacgcgcgcccaccctgtgcgctggatgttcccatcggtcggcctacttcgcttcagtaaaggcttacgaggagttaggctacgataaggaagatatgatcttcgcctctgatatagggtgctacaccctcgggatcagcccgccttatgagaccgctgactacctgctggccatgggcagcagcgttggcgacggttgcggattcagcattgccacaaaccagcacgtcatgagctttatcggcgactcgacattcttccacagcggcttatctcctcttgtcaacgcggtgcacaataagaacaagttcgtgctcactatcctggacaacaggatcaccgccatgaccgggggtcagccaaacccaggtatccctattgacggcatgggcgatgaggcgcctgccatctccattgaggacatagttgaggccattggagttaaattcctcaagattgtgaacccgcacaatattaaaaagacggtagatatctataaggaagctctggaatacgatggggtggctgtcgtcattgccagatatccatgtaccctaatcaaggggcaaaagcgcaagccagtgatggagatcaaggacagttgcgtcaaatgcctgcactgtgttgagaagctagcctgtcctgcaatatcctatctggatgacaaggtgaccgtggacgaggccctgtgtaaaggatgtactgtatgcattcagatttgcccaaacaaggctattggggtaaaaaaaggtgattga

SEQ ID NO: 2873 - DNA, 639 bp, synthetic construct
  source 1..639: mol_type = other DNA
atggataacattaacagttccagcagcaattcagacaattcggatgtcaattacagcatctacatctccggggtgggaggtcagggaatcatcaagaccagcgtaatcatcggggaggcggcaatgctggagggatatgatgtggtcatgagtgagatccacggcatgagtcaacggggaggctctgtgagcaccgagttgaagataggcaacttcaagtcttcaatcgttgaggaaaataaggccgacctgattctggcctttgaacccatcgaagtcttaaggggcttggataaggccaacaaggataccgctcttatatttaacacgttcccgatcgttccttcgactctcacacagactggcgagacatatcccgatattggtgacataatcaaaaacctcaaggacaattttgactccgtgtaccccgtggagggcaacggccttgcaaaggacgccgggagcattctaagcctgaacatggtcctgctcggggcctgcgtggcaaacgactccttcccactgtcaaaagaaacagtggaaaccgctatgaaacataatctggctccaaagttccacgagatgaatctcaaagccattgagaacgggtacaacgcgattaaagactccctgtga

SEQ ID NO: 2874 - DNA, 591 bp, synthetic construct
  source 1..591: mol_type = other DNA
ttgaacggcggtgttaagatcgagtccaccgatatcagatacttttacaggaatatcgtcaagagtgggaaaaaataccggatcaaacacaacaataaggattatggcgagtttagcaaactgtcagacgccctctacgaaagggactgcctgttttattgcaagttcgactatgacctactggtggaatgtgaccttcccaacaagtacgagaacatggaactgccccctttcccagagcaccgtccacgcggccagattaagggcctgaaattcaataagaaggaacgggaaggagagatagtctttgaccacaaggagcgcaagttctgtgtgatcaggggagaggagcatttcggaaagtacaacacaatggtggaagcctattatgtgaagaagatcctgatggaaaacgattgggacaaagcttgcctcattcaaaacaagagaatccgagaggacatattccttaaccagaaaattaaggcaagcacgccgaaactcaataaatactgccccaattgtgggaacaaggtaaaagaggaggatatcatttgcaaaatttgtgggatacggttagtgaaggattga

SEQ ID NO: 2875 - DNA, 1839 bp, synthetic construct
  source 1..1839: mol_type = other DNA
atgaaagggaatattctgaagaacattgatgagatcatcaaatcggattttaagagtgcattttcaaacccaattgtagtgattgtgctaatcggcatcatcatcctcccctccctttatgcggtgctcaacatctatgcatgttgggacccctacggaaatacggacgaggtcgtctttgccattgccaatctggataacggctccacgttcaagggcgactatatcaacatcggcaatgaactggtcacggagttcaagaataataacgacttcaagtggacattcgtgtccgaagagaacctgcggacgggagtgtttaatggaacatattatgccgggatagtcattcccaaaaacttgtcggagaacgtggtgagcatcgcgactgacaatccgaagcaggccaaattggagtacgtggtgaacgtcaagacaaaccccgtagcttctaagctaactgactccgctgcaaacagaatctacatggccctcaatgcaaagattgtgaaaatcatcgacctggccgcctatgagaagctcggggaactccagaagggtctggcttcaggctcccagcaactctccagcggaggctaccagctgcaaagcgggagcgcccagatatctagcgggtcccaccaggtcagttccggagctaagcaggttaaggacgggaaacagcaggtgagcaccggagccgagaccgtgaaaagcaaggcgtctgatttggatgagggtgcgcagactgttcaggagggctcaaactacataaaccagaaaagcgaggagctccagcaggggtccgatgaagtgcaggccgccgccgacccatcgctaatgcctgacggccctgtcaaagactacgtcgatgccagtgtggaactggcaaatggcagtggcgaactggctaaaggttctagtcagttagccaacgggtctgtgcagctggccaacgggtctgtgcaactggctaacggtagcgtgcaattggctgacggttcagtgcaattggcggatgggagcgttcagcttgctgacggtagtgtgagtcttgccgccggagctcaactcctgagcagttacgcagtccaggcactgtttaccgcctcctcttcactcggggcaaccgccaatgagcttggcagcgttaccggcattaacaaaaccctgcttggaaactacttgtacgccccaatagccctcgaaagggaagaaatgttttcagtgccagattatggttctgacattgccccgttctacatcgtcttatcaatgtgggtaggagccattctgacctgtgtcatgctgaagactggcctgagcaccggtacaaagtattccgctctggagatgtacggagggaagcttgtgattttcgtcatcttaagcatcttgcaggcgtgcgtcaccatcatcggctgcaacattctgggcatccatatcgttaatctgcctctcttcatcttctcttgcatcctcgtatcggtggtatttatgatcctggtctattccatcatctccgcactcggacaagttggaaaagctattgctgttgtgctgttagtgctgcagataagcgcaaccgggggcatctaccccatccagatcatgcacggcttcttccagaccctatattcatacatgcccatgacttacggcattacactcgtacgagaggcccagctgggcacagtgtggtccaattactggcctgctctggccatactgttcgcaatagggattattacagttatagtggcacttttgattaaggtgaaagcggataaggctagccactactttgagaagcgcctggaagaaagtggactgttctga

SEQ ID NO: 2876 - DNA, 276 bp, synthetic construct
  source 1..276: mol_type = other DNA
atgtatgaggataagctgtacgacaaggccgaacgcagagtggatgagaagatcaagttctaccggcatctgtacagctatatagctgttaacgtgatccttgcagtgatcaacctaattttctttaaaggcgactggtggttcctgtgggtaagcctcttctggggaatcgggctcgtctcccactttattaagacctttgtcatcttcaactactttgacgaccaccacagggatagtatgattgagaatgaaatggccaaaatgcgaaaatga

SEQ ID NO: 2877 - DNA, 447 bp, synthetic construct
  source 1..447: mol_type = other DNA
atggataagaaaatgatagtgtcagtggcttttcttcttctgattctcgcggtggccctggtctcggtgtttgatgaaagcaatagcagtgaaagtaaagtaaacttaatcgtttacagcgagggcccaaagtccctgtctgaactagtcaacgaaatcaagacccaggactattatgaaggctacgacaacgagacagttgcctggatggagtccttgggaaataagaaattctattacggggacgggatcatagtgattatgagcgccacggatgcaagcaagctcccctccctctacgtcaccgacgtggagctgttcgagcacttcgagtgcaacgtgctggagaaacggtctctgggaaacgtggagtacccgaaggacgtcctgtatgtgaagaatgtaaaatacatcggcgaggaatacggtaacttctcaggggcatga

SEQ ID NO: 2878 - DNA, 462 bp, synthetic construct
  source 1..462: mol_type = other DNA
atgaaagtacagctcttcgtgtcgaaagatctggaagagccctatgccgagatttacacggataacctgacagacaacattcagaaggccatggtgctgttggaaaacgatgagagtgatgacgatgtggacgagggcaactccatccttgcagtgaagaaggggtccgacatcgtgcttctcgactttgaggacatcttcatgataaaggttgaagacaagcagaccaaggtcttcagccaaaatgctgagtacagcatcaaaaagccactgtatcagattgaggaaagcctggattcagattttgtccgcatttcaaaaagcaccatcgtcaacctgagaaagatcaaacgagtggccccgagtctcaggggaatgatgtttatcgaattgaagaatggcctgaaggacaatatatcccggaaatacctcactgacttcaaaaaggcgttagacctatga

SEQ ID NO: 2879 - DNA, 432 bp, synthetic construct
  source 1..432: mol_type = other DNA
atggagatcattaaacggatcgggatcggagcgtttgtaggctgcttcgtggtgatgcttgtcatggtgctggggacatatagtctgggtccccagaacgtcagcttttccggaacggagatcattaatgccttcttcgggtcaatcgttgtgggatgggcctttgccttcagcggtctcatctatgaaaaggaggacattccactgccgatccaggtcatcttccaaatggtgatcggcttgggaaccctctttgctgtcgcggtgtacctgggctggatgcccatctccctgggcatagggcctataattacttggatagttatcgcaattgccttcgctgccgtgttctggctgggcttttacctctactacaccttcctagcaagggacattaacaaaaagattgaattatctaacgattttgactga

SEQ ID NO: 2880 - DNA, 1140 bp, synthetic construct
  source 1..1140: mol_type = other DNA
atgaagacgattgtgaacggtcttattctaaaaggcctggagctcgaagcaaaaaaggagaacatcctcatcgatgacgatggcactatcctggaaatttccaaagaggttaaagaaggagaaattatcgacgcagataataagattgtctgtcctaggttcttaaacgcccacactcatatcggtgacagtataatcaaggacgaaggggaaggcctttccctggatgaagtggtaaagccaccccacggaatcaaacacgtcgccctggagagtgcggatgacgacgtgctgattgaggccatgcgggagtccatgtgggatatgtacaacatgggggtgagccacttcatcgactaccgggagggtgggttggacggagtgaagctgctcaaggaagctgccaaggacattccaatcacgcccataatactcgcccgcgacagctccttctatggggaggatgcaaactaccatatggtgaagatggccctgaagaaattgctcaaggaatccgacggcatcgggcttagcggctttggtgaaatcagcacaaccgtggcggagattatctgcgagagatgcgagagggaggataaaatttcttctatccatgtcgctgagaacgagctcaatcagatcgcctctctggagaagactggcaagagcgagccgcaacgagcctttgaagctggattcaatcagatagtacacatgaccaatcctaaaaacgatgacgtcgaactgctagcgaggtccgattcaagcctgaccgtctgcccccgcagcaacggagccttggctgtgggggttgttccgctttatgaaatcctgaataaaggcgtccggcccctcatcggcacagacaatatcatgataaactcaccaaacatgttccgcgagctggagtttaccctgaagataatgaaaggagtgtcaagaaaccacattgacgctagagagatcttaaaaatggcaaccacaaatgcagattcaagcatttcgaatctgcccattgacaagtcgtatatcggggagggccagaaggccgaactcatgattgtgaacaagaagagtaataacccttacctgagtttgatcaaccgaacagaggctaatgacatcgtgaaaattatctga

SEQ ID NO: 2881 - DNA, 876 bp, synthetic construct
  source 1..876: mol_type = other DNA
atgattgtgaaagacgtggcctccacagacgtgatccatgttacagtgcccgggagccgagatgaggccctgcggatcatgaaaaaagaggacgtgagtgtcgtgcccgtgatcaagaaagagacgggcaagttagtcggaatcctaacgcgcagtgacatgattaccaacccagacgaagagcagatcgctatgctgatgacccggaatctgattaccgccaagatggatgacgaactgtccacggttgctgaaaagatggtcacaaacgacatccgcagagtccccgtgattaatgatgacgacgagttggtggggattgtaaccagctttgatatagtgtcactggcgatcgcggatatgggaatcaaggaccctgtggagaattatatgatcaagaccattccttcaacatgggatgagactccactgaatgtcgccttcgaagtcatgaagttcttcggcctgaaatccgtcataggactgaactccaacaacaagatgaccggcatcctaactgaaacagatttcattgcagagagcgaaatcatctctgagaggactgagcacagctcgagcgtaggaaccgagggggacaaatggtcctgggacagtaccagcgttctctacattgagaaaaaccacctgaagtttactgacaaggtgttcaaggacgtggcatccggtgatgttgtaacggccaataccaagacaaaggtgtcagtgtgcaccgaaaagatgaaatcgcttgatgtggagcagctcccggttctcggcatagaaggcgaacttgtcgggttggtaagggctagtgatctcattaaaagcttcatcataggcttcaacttttctttctcttttatctttactttttga

SEQ ID NO: 2882 - DNA, 1080 bp, synthetic construct
  source 1..1080: mol_type = other DNA
atgaaggccaacccaaagattgagaaggtgaaacagatcctaaaagattacaagaagatagccctggccttcagtgcgggtgcagacagcaccctcctggcgtaccttgcaaaggagtccgactgtgacgtgcttgccatcacatacgacaaccagatctttcctgagggctttttggagtttgctaaaagacgagcagacgaactgggcatcaaacacgaaatcatagaaaacagcttcctgatgatatacgatgtggcacacaatactccgcagcgctgcctcacctgcaggcgcttgatgtatgggagcattaaacaagtggctaatgagagaggctacgatattatcatcgacggcaacaacatcactgacctgatccacgaccggcccggcatcctaatgaaatatgccaatgggatcgagagtcccctcatagatgccaatctggaaagctatgagattcatgatttcctggaagagaacgatattgaatattccaagtccacaacctgcctggccacgcgggtgaaggccaacgaaaccgtcacagaggacaaggtcaaccggattgactactgtgaagggtttattaagagtacgattggtgctgacgtggtaaagctgagggaagaaaagaacatagccaccatcgagcttggaaacaatgattcaaagaagattttggacaaggagaaactcgagatcatcttcaatgagctcaaagaggcccagtatgataagattttactgaacatcgatttcaccgaggacgaggaggagctcattttagactcagagcttcagaaggggaaggagaatctcattctgcgaaagaagctgccattcgacatcgaaatttccaaaactggaaaagtcatcaatgaagctgataatgaatttatctcggatatccaaacaatcgaagagataggatacatcaaactgaaaatcgacaagaaagagtctaagatcttcagagatggaaagattagcattgagaacaacaaaaacaaggaagacgctaaagagtctctggttaagatcttgcctctgataaggcgcgcgaaacccttctga

SEQ ID NO: 2883 - DNA, 642 bp, synthetic construct
  source 1..642: mol_type = other DNA
atgacaaagatcatagtgtatctcggcctgtcgattcaggaggaagaagctaagaccatcttagatgcggattatcgcaccccagttaaaaggggggacatactgaaggcgatcagcgagaagccggacataatcggaattatcgacggcgtcttccaccacacccctgcagtggcccataaggagatcatgaaagccttgaaaatggggatcactgtcgttggagcaagtagtatgggtgcccttagagcttccgaactggatgacctgggcatgattggaataggctacgtctacaaggcctaccgaagcgggaaaatcacgtcagacgacgacgtggccctcagctttgaccccgagcggaatgtgcccatctccgaggccctggtaaacattgactacaagcttgatttggctgtgaaagaggaaatcataagcgaggaggataaggaatacatccacaacattgccaaggacatctattatccaaaacggtcataccagtacatcttcagcaaagtggagatggaagatgaaaagaaaacaaagctgattgatttcatcctaaaggagaaggacatcaagtatctggatgcaattgaagctctcgagtacattaaatccatttctgaggaggaatga

SEQ ID NO: 2884 - DNA, 1260 bp, synthetic construct
  source 1..1260: mol_type = other DNA
atgttcgaggatgttgagatacagttcttcaaaggcactcaccgcgtgcgcgatcccaaggaaacaatcgagatcaacgaaaataagctaaggactgcgggaatcacccgtctcactgaaatcaccgacctggacagaatcaaaatccccgtgttcagtgccattcgaccgactgcacaggagggcggggtcagcgtctacgctgggaagggagcaaccaaggagcaagcaaaagcctccgcgatgatggagggctttgaacgatattccgcagagcgccaggatatagacaacgaaaggacctttgtggacacctacaacaatatcaaatccagccaagaactaaaggccctcgaccctagagacttgcttctgccaaagaatttcaccacacagaatgtggaaaactccaggctcgaatggattgaatcaaaggacataattagcgaggagacaatctacgtgccctccaatgccgtgtttcacccatatattcccaccagagaagtgattcctagtccactggctatttttaaagggaacactaatggtctggcgtctgggaacatcatagaggagtctgttctccatggtatctttgaagtggtggaaagggatgcctggagcctgtttgagcttacgaaacgcaacaagaaagagatcaatcaggataccatcgaaaacgacatcatcaatgagcttttagccaagttcaacaacgagggcataaacattaagcttatggacatcacggctgacctgaagatcacgactgtcgctgccagcgctgatgataccgtactgaaggacccggcactcctcacactgggtgtaggcacccatctggaccctaacatagccgtgatccgcgccttgacagaggtggctcaatcgcgggccacccagatccacggaacccgtgaggacacgatcagagcggatttcatgaggaaatccagctatgaaggcatgaaaaggatgaacaaacactacttccagaaggaggaagatacaattgacctgtcagacattgaggacaagagttcacacagtatcaaaaaggacattgagacgagcattgaggaggttcagaaggtcgggttcgataaggtcttatacacagacctgacacgggaggagattggaatcaatgtggctcgggtaatcattcccaaggcagaactctactcgctggatgaggaacggctgggcactagagccttggagtatgatcgaaaagcccggcggggactggtctga

SEQ ID NO: 2885 - DNA, 1044 bp, synthetic construct
  source 1..1044: mol_type = other DNA
atggtgtcaagtgagaataaagtgcacgatttccacataaaaaatatcctgaagagactggaggagaaagacttggatgcaatgatggtggccaacttcaacaacatctattatctgtctggctacctatctacgagcttcgcattcatgatagtcaaggagaatcctatcatatttgtatctgggatggacctggagaatgccaacaacaattcctctattgatatcatcaaatacgagagtgccgaccagatggtggagtatttgaacgaagaggagatcaaggaccttgccatcgagtcggatctcactgccaacgcctaccaaaaatttaaagactttaacctaactatttcaccagcgatctccatcgaacgaatgatcaagaccgacgatgaaatcgacaaaatcttcaaggctggcgagattgcacacaagagtctgcttgagctcgacgtccgctcgaagcaggaaaagggggctgaagagtgggaatgtgcttacgagttaggctacctcatgcggaagaatggagcaagcaccgaatcattcgacacaattttcgccagcggccccgtgagcagcctcccccattccacaccaaggcaccacaagttggatactccggtgctggtggattacggttgcaagttcgaaggatactgctcagacaccacccggacctttgtctacaacgagaagcaggaagagatttccaagattgtgctggaggcgcatgacaaggctataaaagccgtgaaagagggagtaaaatcctgcgaagtggataaagtggcccgcgacatcattacggaatatggctacggggacaagttcattcatagcacagggcacagcttcggcctggacatccatgaaagccccagtctgtccctgaaggatgagaccattctggagaagaatatgtttgttacaattgagcccggaatctatcttgaaggggaatttggtgtcaggatagaggacatggtcctcgttgataagaaggctaaaatcgttggcaacctgccacctatcctctga

SEQ ID NO: 2886 - DNA, 930 bp, synthetic construct
  source 1..930: mol_type = other DNA
atgtttgtcgaagatctcataaataatctctcaaatttcatcgaaagcagactcagcgacaaaatattaatattcctgcaggagtacttcctgaaggcaggcatattcaccctggccagccagatcattgctatcctgttcatctcaattgtgtttacactgatactggctctcatgattgcattgctcttttcattcgatatccttatggcgatcctcttggccattttcattcctctcttgtcttttattctattcgttttcatcaaatccgagcgacggcgagaggagctagaaaactcaatcccggactttctgcggcagctggctagcatgctgcgggtgggcatgagtcttgagaacgctcttgttgacttgtccgagcatggcaacggcccattgtatgacgagctgcgccgtgtggtcgtggagatcaggatgggaaagagctttgatgaatccttcaggaacatggcgaaacgcctggactccaaggacctggaacggagttttaagattatcctgaacgctcacaagagcgggggaggtcttgccgacgtgatcagtgatgtcagtgacgatttacgcgctatgctgattttaaaaagggagagaaagtcgagcgtcatgatgagcatcatgtttctggtgttggccagcgttgtagcggccccctttgccctcgggatggtgggggtctattcttcctttatgattgaactgaacagatccagtgccatctgccaactggcccccacggtggccctgatctacctgatcatccactcgattctcgcaggatttctcatagcccttattatgtacggggatatcaagaaaggtgtaaagttctctattccaatcaccgcactggcattcttccttttttacctgatcaatgtgttcggcctatccttcttcggattctga

SEQ ID NO: 2887 - DNA, 225 bp, synthetic construct
  source 1..225: mol_type = other DNA
atgttcagcatctacctcaaaaatgattttaaccggttgttcaaggaagacaaggcccaggggtcggtcgaactgattctacttatcggtggcataattgtaatcgtgctggtgtgcatgtttgtgtataagagttacatggggggactgggcgacgaactggagtccaacgagctggagtcactcaataacagcttcgaagagctctccagcaaattcgagtga

SEQ ID NO: 2888 - DNA, 1416 bp, synthetic construct
  source 1..1416: mol_type = other DNA
atgaaagtattaattgatggagaggattttgacagcggcgaccactacgaagtcaaaaacccatacgacggtgagctggtcgacacggtgccaatttgttttaggcaagatgtagaccgcgccattgatgcagccaaccgagccaaaaaggaacttcaggacatgtcggccaaggaggtgtccaataacctgtattctgcgtatgaggagctcgaatccagaagcgaagaactggcaaagctcatcgtccttgaggctggaaagcctattaagcaggcgattggcgagctgaacaggtcttgcgagaccctaaagtttgccgcggaggaagccaaacgcatctatggggagagcgtccccatcgacgctaccgggagcgtcgatgagcggtttctagcctttacaaagaaagtccctctgggtgtcgtgggagcaataactcctttcaactacccggtgaatctcgctctgcacaagatagcgcctgccattgccgccaagaatgccgttgtggtaaagccctccactgaagctccactggctgccctgaaattggtggaaatcatcgacaatcatttccctaacggggtgataaactcggttacgggctacggcagtgaagttggcgatgcactggttgtgtcagagggcatcgacaagatcagcttcacaggcagcattgccaccggactgtttatctccagccgagccggcatgaagaaactcacgttggagctcgggggaaacgacccactggtcgttcttgaagacgctgatattgagaaggctgtgagtgcggcggtgtccggcgccttcctattctccggacaggtgtgcatcggggtgaagcggatcatcttggacaacaagattgcagatgagttcattgacctctttgtgaaagaggcaagcaaactcaagatgggcaaccccatggacgagtctacagatatcggtccgcttatcaacgaaaacgcctcaatcaacgtggaaactgctgtgaacaatgctataaaggacggggcagaactgattctcggaggaaaccgtaaggactgcttctatgagcccacaatcttggatggtgtcaatatgagcatggacctggttgctaatgagaccttcggaccagtggcccccatcataagggtagatagaatcgatgaggctataaaagtggccaatgacacccggtacggtctgcaggcaggggtgttcaccgaaaatgtgcacagtgcattaagatgtgccaatgagatcgatgctgggtcagtcctgatcaacaaggagtccaccttccggacagatgccatgcccttcgggggcttcaaatcaagtggcatgggtaaggaaggcattaaatacgcagtggaggacatgtgcaagtttaaactgatcgcctttaattgtcgctga

SEQ ID NO: 2889 - DNA, 726 bp, synthetic construct
  source 1..726: mol_type = other DNA
ttgtgggataccgccaaagattacagaattttagtcgctatgcacgcacgggagctgtttcttcggacggttcagacgggctcgttcagagggaactggaataagaaggccacaatagaagaaaccaagaagatggaagctgacctaaaatcactcctttactgctatctcgaaggggacgctctggcgaactgtgaggacgtgcaaaagcttgaggacaaggcgggacgcatcatagagttcctgggcggtgaggattggaaccataaattcatgcagggggcccccaaagacgaaagggagaagacagaggagaacatcgcaaaggtgcgttttttcctagacactatcctgggcctccgaaaccggtttaagttcggcccaattgacgaccctatcatggggatcgatgtaaaggtgggcgagattatgagcgtcagcaagcaccccaaagccgattccctcatgatctgcaacgtaaacattggcaaacgcgccctgaaggtcgtgaccaatgatctgaccgtgaaggaaggcaatagggtcggggtgtccctgctgcctccggcaacattcatggacgtggtgagcgagggaatgttcctgggaatgaatggtagcatcttgaaagaagttcagggagatttgggtaatatgcccaacggaatcccaatggagtctctgaacgagactaaaaatatgattaccgcctttctcgacagttga

SEQ ID NO: 2890 - DNA, 417 bp, synthetic construct
  source 1..417: mol_type = other DNA
atggtggaggttacccagctgtatgatctggacatatatacgctggccgggcagtacgtgggccaggtgcacgatgtcgtgctcaatatccgctacggcaccatcagccggctacaagtgaaagccctggagccggagaagaagtccgcggggtttcgggacatcttccgaggcggattccagttcgtgcctgaggaagaagtcggaaggacataccaggaaggtttgctgaacatagagtttgacagggtcactgcaatcggggacatcatgcttattgatccccaagacctcaaaagacccaagccccctgtagcaggcgaggaaatgagcattcgcccgagacccgaagctccaaaacaggtgccccaggaggttcctcaggaggtcgccccaaagccaaaggaggtaatttga

SEQ ID NO: 2891 - DNA, 762 bp, synthetic construct
  source 1..762: mol_type = other DNA
atgattgtgggcatactgggttgcggcgcaatcgccaacaccatcgttaacgagttcctctcagatgatggcatcgacatcaaatacttctacgacacagacatcgaacgagctgagaacctggcccagatcagcaatggaatagctgtcctggagatggatgagatgctcgacaatgtggacttggttctggagagcgcatcccccatcgccttaaaggtgcacgccctgaacatcattgagaacggaaaggacctgatggtgatgagtgtgggagctctgatggataaagaatttcgccaaaagatccataaggctgcgcaggccaacaatgcaaaggtctatgccccctctggggccattgtcggcctggatggcataaaggcggcatccatcggaaagattaaaaaggcttcccttacgactcggaaatcacccaagagcctaggtcgcgaagtggaagaggaagaaatactgttcgagggcaaggcctctgaagccgtagagcggttcccggtaaacatcaatgtggctgcgtccctcagcattgcctgcaacatggacattgacgttaagatcattgtcgatcctaaggtcgacaggaatgtgcacgaggtgctcgtgcagggggactttggggaatttagaagcagttccgagaatgtcccattcgctgcaaacccaaaaaccagtatgctagcagccttctcagccatcaaattgcttaaaagctttagcgagtgtttctcggtggggacatga

SEQ ID NO: 2892 - DNA, 759 bp, synthetic construct
  source 1..759: mol_type = other DNA
atgaaagactatgagatttacagcaatttgaaggtcccaaagaatagtaacatcattctgcggctcgacggccgtaagttccatagcctagctaaatacctcgcgctgaaaaagccatacgacaataactttgctaagctcatgtctgaggtgtccctggacatttttaaccagttctcccccaaattcatctacacattcagcgatgaaatcagcatcctactggatgagattcctttccttggccgggtcgagaagctgaacagcgtattctcatctatagcctcaagttcgttcacctaccacttactcaacgattttaaggacgacttcaatatggacaagctggacgaagatgaccgaaacgtcatcttccctgtttccttcgattccagagtgatccccattgtcaatgaggacatctatgattatttcaaatggaggcaggatgaggcatggcgcaactgcgtgaacgcctatgggatttgggccctgaagaaggaattttcaccccagatcgcaaatgaaaagatcaaaggcctgaagtccagcgagatccacgaactgctgtttaaaaaagggatcaaccttaatgacgtggacacgtggaaaaagagaggaatcggtatttacaagatagaaaaccaaatagagggatttaacccggttaaagaggagaagaccgtgtcttaccgcagtgaggtgtttgtggattacgaactcgaattgttcaataaggagtatttttacaggttttga

SEQ ID NO: 2893 - DNA, 921 bp, synthetic construct
  source 1..921: mol_type = other DNA
atgggattcaaggatttgatcagtaaactgaacgagaaaaatcactttgaaaaggtgtgcatagaccagaccgtcatcgattcaatcatctattattccaagaaatcataccctgatgagttcttggccatgttcgacggttttgtgaagaacgaggttctgtacatcagtggcctcatctttttgggaggcgagcgcagccacacaagcgccagcttcaacgactggctgctcccacccgatcagaagaagtggggaacggtgcattcacaccctgggctgaacgcaaggccctccggcgctgatctgacaaccttcagtaagtacgggtctttccacattattctttgtgagccttatagtctcgagacaatgatggcgtacgactcgtacgggaacatgagaggcttcgaggtgggcaactttgtggatggcaaggatgacgaaatctacaaggaccttgaggagctgcggaaagagatcgaagaagaggacggagagctcaccccatctatattcgacctagatcaggacctgtcctttttcgatagcgaagaggtaaaaaccaataagtacagccatgagctggaggatgagtttgggaatctcgccttagacaatgatggctcgaatgacttcgatagcaacaatttctccgaggacatcaacagcaacaacccaaacagcaatgacttcacttccaaccgcttttatccctcacggaatgtcagcgacgaagatctggggtctattgaccttaacccgcaggttattcgaataggtggagaaaaggtcaacggtcagagcccgaaactgggcattatcattgaatttagggacgggaagcccatcctaaaaagttatactgtggactctcaagaaaatgaagactcccaagaaaaagaggattccgacaagtga

SEQ ID NO: 2894 - DNA, 1575 bp, synthetic construct
  source 1..1575: mol_type = other DNA
atgaaggccctggtcgcagatgcaattaacgagaagggcatagagaatttgaaggaagtgtgcgatgttgtggtagatactagcatcacgcctgaagaattactagagaccattggagagtatgacgctatcctcattagaagccgcacaaaactccccgcggaagtaatagagaaggccgacaatctgaagatcattgccagggccggggtcggtgtcgacaacgtggatgtgaatgcagccaccaagaaagggatcatggttgtgaatgcccccgaatccacgtcaatcacggtggctgaacatacaatgggcttgatcttgtcgaccatccggaagatagccatcgcggataaatccactaaggcgggaaaatgggagaagaaagcttttatggggatggaacttcggaacaagactctgggtgtgatcgggatgggccgcatcgggtctcaggtggtgaacaggtgcaaggcctttgagatggatgccattgcctacgacccgtatctcccccctgaggtggctaagaacatgggggtggagttgtacgaggacattgaggacgtcctgacccgagctgacataattactatccatgtgccactcacgccagaaaccgagcacagtatctccacagagcagttcaagatgatgaaagacaccgcactcatattcaactgtgcccgaggcggcgtcattgatgaagatgcactgtacgaagctctggttaacggcgaaatccttggcgccggtctggacgtatatgagaaggagcctgccaccaacaataaacttttcgagctggacaatatcgtctgcacaccgcacattgccgcatcaaccaaagaggcgcagagggatgctgccatcattgtcgctaatgaggtgatcaccctgttcaaaggaggcatgcccaaaaacatcataaatatgcctcgcatgaacaacagcgagtttgaggagaccaatgattacctggagctctgtgaaaaactaggatcgtttatcacacaggcgacaagcagcccaatcaacaagctggagatcacctacaaaggtgaaatcaacaagctcccaagcaaagacctattcacacggaccatcctgcagggaattttaaaccccgtcactgaaacggccgtgaatgctgtgaacgccaccacggttgccaaggcaagaggaatctccattacagaagcagtcagtgatgactccgagggctatgacaccctgattaaagttgctgcaaagacaaaggagggacaaatgtctgctgaaggtacttacctccacgaggctaagatcataaaggtaaatggctactgggtcgatgtgaagcctgagggaaacatgttcatcgccaagtataaagacattcccggcagcattggggcaataggcactaaattcggggaagaaaacattaacattgggatcatgcaagtgggccgtgactcaactggtggagaggccatcatgattcttacactggatgaaagaccatctaaggaggcggtgaagaaaatcaaggacctggacaatgtgagtgacgccacctgcctgaagctgtga

SEQ ID NO: 2895 - DNA, 339 bp, synthetic construct
  source 1..339: mol_type = other DNA
atggtcaaattcgaggagtttccaatctccagtgcaaactatattcccggttataaggtggtggaggaaaagggcttcgtatacgggctgaccgtcagggcccgcggcctgggtggagacatcggggcgggactcaaagggatactaggcggagaaataaagcaatacgtgaaaatgatggaagagtcgcgagaggagagcatcggccggtgcattgaacacgctaaggaactcggggccaatgccatcatctcagtcagattggatagcgacagcatctcccagaacatgcaggaggtgctggcatacggcacagctgttgtgattgagaaggagtga

SEQ ID NO: 2896 - DNA, 774 bp, synthetic construct
  source 1..774: mol_type = other DNA
gtggttttgggaaatgctccatttcttgcagacgcttatttcgggcataggactcggctctacaacctggatctgctgagaaatccaaacaatgtcagcaaaatcatagaaaagtcctacgactgcggagtgcgctccatcaacctggcaaataaggaaaacctactcaaggcctttgggatggcctgtgacaacggcgtcgagatgcaggcagtgagcaccattggaaagacagagatggactacgtcatccccgattatgatgaggcccggcgagaggccacctggaaggaggacattgaaaacttggcccagttcgacaactccatcatgcttgtggatgagtttctgatcgacagctacgattgggatttcatcacagacattctcgacgcgatcaacgatacaggcatcccctcggggataatcacgtcattccctttcaaaacttctctagagctgattgatagcccattactggaggacaaaaacctctttgacttctatatgattccggtaaacaaactgggttacatgatggacgtgcctcacttcaagagtgacaagcaggaagagctgaaattgatgctggacaaaatagacaaaaagataatcatcaacaagatcctcgcggtgggcatccagcgccccgaggaagccttcaatttcctcaataccctggattttgctgatatggtgtcagttggcattgccagtgagagggaagctgaagagacctttggtattttcaagcaaaatcttgatttcttttga

SEQ ID NO: 2897 - DNA, 810 bp, synthetic construct
  source 1..810: mol_type = other DNA
atggactacttaaagaagatccccgctattcggtggaaagatggcaaatacgaagaagtggaagagaaaacagtgagcgatgagaatatctatttctatattgatctcctgccgcctcggaagttttccacatatccagccgacttggaggacttcggagtcgggtattgcctcggtgacgggctggtcaactcatacgatgatatcctaagcattgacattgacggcaagcatataacaatcaaaaccaagttcaatcacggcgccgatgaggataacaaggaagcagatgaggaaaagccagacgtggacgcggacgtcctgggctaccagagcgtaatgtctgacagtgcaggaggatggcgtagcgagcttaaaaagatcgagccaatcgaatccgatttggttgtcaatgccagcgaaatcatagagaacatgaaaaggcttaccgctaaggcggagatctggcaggccaccggaagtgtgcacgttgcccaactcgtgtacggtgacaaattcattacgcgggaggacgtatctagacacgtggcggtcgataaggtaatcggggccgcagctaaggcaggattcgacctgtcaaagtgttacgtgacctatagtggccgaatgcccgccgacatggtgataaagatggtgagagtcggtgttcctatcctggtctccaatgctgcccccgccgggtccggctacgaggtggccgtgaaagggaacattactctggttggctttgtgcgcagcaaccgctttaacgtgtacgcttctacttcgaggatcgacctggataaatga

SEQ ID NO: 2898 - DNA, 432 bp, synthetic construct
  source 1..432: mol_type = other DNA
atgtccgacgagaataaggataatcgggtgtacaatctgctcataaccaagggaacagacccggaaggccaatacgaattttacaaggagaggattgacagtcagaaggacttcctgtatgccgagtataacactcaggataacgagctcaacgatgacttgttcgaggaagtcgatgtcatagtattactgtacgggctctatcacgataacacggagatctgcgacgagctgatcaaaaaaagcaaagaactgagcatccccttcctgctagtgcgctcttttggcgttgaatggatcttgcaggaccttgagtcaaaggctgacgccgtggtcggatggaacgggcattgcattgtggacgcaatcaagaccctggtggacgggggtggcgagtggatcaaaccatgtgatattgaagaggaatactga

SEQ ID NO: 2899 - DNA, 168 bp, synthetic construct
  source 1..168: mol_type = other DNA
atggagctcaatagcaaacactacacaatcattcttatcatagcaatcataatcgccgtcattatgacctatatgaccgggatcaagaaccccatcatcatcggcctctgcatactggccattattgtgattctagctaacttgtacctgacgaagctgaaaaagtga

SEQ ID NO: 2900 - DNA, 981 bp, synthetic construct
  source 1..981: mol_type = other DNA
atggccgtaactaataggaatcaattgatcagagaggtgtaccagctgctaaacaaggagggctttgaaacgagcaacatatacgatcagagttgctttgatatcgtggctcgaaagaaactgctcattctccttcttaaaatcctcgtgaacattgatagcatcaacgagtctcacgtggaagaaatacggcagatttcgaatgttttcctagcaagccccatcatagtcgggctcaaatccaaaaaccacatcctggaggaggacgtggtctatgagaggcatgggctcccagccattgggctgcagactctgaaaaatatgattatctacgacgaatatcccgaaatcctcgcagaccggggaggatattacgttcaaatcaatggcaacgtcctcaaggaataccgtgaggagtataacctatcactgaaggatttggccgacctggcgcacgtgtcacgcgctaccatgtacaaatacgagaatggcatggtgcgggccaataccgaaacggcaatgctgctggaagagatcctcaacacaaagatcactctggacatcgacctgttcgagccttatcaggaggacattaagctgaaggccgataccagcaatttgaatcagacacagggtacaaacgctcaaaaccttgccaaattaggcttcggtgtggtctccaccaacaagagccccttcgacgctcttgccaaagcggaaatcgccaccaaaaagaaagacaaccctctgattgctaatctgaacgttcaggacgagcagaacacaaagaccttgaagaaaatggcaataagcttaaaggatctgtccctggtgacctctagtgatccgttctttgtccttgccgacgacaagataaaggatagtattgatggaatcccagtaatcaagtcttgggagatgaaagaatttgaaaactccaaggagttcctcaagctgattaaggagagacgcaacaattga

SEQ ID NO: 2901 - DNA, 1293 bp, synthetic construct
  source 1..1293: mol_type = other DNA
atggagatcttatacttttactcaagttcggtgattatcatggattatttttacataggcatcgatgatacagactctccagatggaatgtgcacaacattcctggcatcctccatcctaaatgagttcgagcggagcaacattaaaattattgattatccccgacttattcgactgaaccctttcgcaaggttcaagacgcgtggcaacggcggggtcagtttcaagctcgacattgatgaggatactgacctggccaaggagatcgtgctcggttatgtaagggagctgtccatgtttgactgtgacaacacaaaccccggagttgtcttctacgagggtgaaatcactgaagagatggtggactacgcattcaaggccatttactccattatcacgatagaggaagccgaagaatttgcgaaccacattggggctgagatttacaagttcaaaaagggtcgcgggatcatcggctcgatcgcggctatttcctgccctctggaggattacacctacgagcttctggcgtacagggaaccttcacggtatgggaccctccgaaacatcgactatgattctgttgtgcggatggataaggaaacttaccctgagacctttgaaaatatcgacggcaagtatttggccatagagccgaagaccccatgccctgttctttatggaatccgctcaaacagtccagaggtgctggagaaggcacgcgaaatggtcatcccaaatgaaaccattgctgacagttgcatattcaagacaaaccagcatacggacatgcacattcagaatgccgaccggatcagcgacatgaagcagtattcctgctaccggataaggggaaccgtcaaggaaaggccccacatcatcgagggaggccatatgtttttcaccctgtatgatgacagcggcgagatcgagtgtggcgcctacgagcccaccaaggactttagaaaaatcgtggccaaactcagagaaggggacgtgatcgagctctatgggggaataggcgagcaaaatacatttaatatcgagaaattccaggtcatcaaactaaatgaatttgtatacagaaaccccgtgtgcggttgtggcaaaagaatgagctctgctgggcgcgggaagggtttcaagtgcaaaagctgtggaaaacgtatagaaagcgacgaaaaggtgcccgagaagatcgacagaaccttgattaacggcaaattctacgaaactccagtgagcgcccggcgccacttgtctaaaccgctgatccgcatggatctggactga

SEQ ID NO: 2902 - DNA, 1251 bp, synthetic construct
  source 1..1251: mol_type = other DNA
atggctatcggggtcaaggagatcaagatcaccgacaccatcagcatcctactgctgcctttgatctatgccttggtacttggtctggccctgtacttggccaagcccatcaagtttataggccgaaagcagtccaaagtagctgaaggggctatggttctctttattggagtattaattaccaaattggcgatttcaagcggtcaggccatagccagtattttccaagtggggcctgctctgctcctgcagcagattggcaatttaggtacactcatcgcactgcctatcgcactcttcttcggctttcgcagggaggtcatcggcatgacaagttccatttgccgggaacccaacctgggagtcatcatcgacaaatacgggtttaaaagccccgagacccgcggcgtgctcgcggtgtttgttatcggctcaatcctggggacacccttcatcagcttcctatccagcatcagcgctagcctgattccgatgcacccatacgcctatgcaatggcgtccggggtgggaagcgccagtatgaacgccgctgccctcgccccgctcatgcatatgtttccaagcatggccacggacctcgaggcctttgccggatgcagtaaccttctttccttctgcttcggtatctatatgtgtatctttgtgtcattgcccctggccgagcggatgtataagtggctgtccccccacataggccatgacaaagaggagacaatcgacgatgagtatgcaatcgaaggggtcaagcacgacaagtacgcatctaaggaagagttaagtagcggcaagattaaaagatgggccacattccttctgatattctccttcaccgtggctgtgggcaattacataggctatcacacttctctcctggattcattcattggcatgatcattatcagcctcataaccattctgggaatgtcgctggaaaggatcattccttggaatattcagtcaatcatttacataagcctgattgggatcatcgtggcaatcccaggcatgccaactgcggatttcattgtgcgttacgtttcccaaatcgatctgaccacaatctgcactgcattcctggcttacgtgggtatagccataggaaacgactgggaagagtttaaaaagattgggtggagaggaatcattatcactctaatcgtcatttcgggaacctacctgtgtagcgcaggaattgctcaccttacgctggtggcgacgggcatggtctga

SEQ ID NO: 2903 - DNA, 2964 bp, synthetic construct
  source 1..2964: mol_type = other DNA
atgggcggtgagattatcaataatgaaaaactgaagctgattttaatcctgacccttattttctccatcttaattatgaacacagtcaacgcaagtgacaatggtatcatcgctgaatacgccgacatctccacaattccaaatgacgaaaaggtgagcatcaacgagaatgactatgatacaaactattacgagctgcctgacaaaaagttggatcacttggagagtaatgacaatcaaaaccacctggaaatgaatgacaagaaactaaatgacgggaactcgaataacgacttcaactacatacaggagttgatcaatagtcacaaggacggagactcaatattcctggaggacaagacctatataggcaacggaagtcccattatcattaataaaaacctcaatatttacggctacggctacaagaatttgtccgacctggacatcaagacaatactggacggcaactccaaatcaaacatctttatcatcaataagggaatccagctcaatctttacgggctcagcctgatcaatgggaatacaagttatgaggatggcggggccatctataacaacggcctactgagtatagatagctgttcaatttcaaacaataacgcgggcggtggggccgtgtactcctctgagggcagtgagattgagatttacaacagtctcttcgagaacaacagcggacttcttgggggcgccctggacctcgagaatgccaacgccataatatccaagagcacgttcaaaggcaaccggtgcaacggggacggaggggccatttacaataacattggaaagctcacgatctctaactccaccttttccttcaacaagggagctagaggcggtgttatctacaataaccatggaaccctctcaatatacgattgcgagatgttcttgaactctgcgagccagctgggaggtactgtgaagaattgggggagctgtgaaatctacaattccacgatcaagaacaacactgccgacatgtacggcggtggactgtacaccttcgagtttaagatgacggtcaatgattgcctgatagagaacaactacgcagacgaaggaggaggcctttttgccgatgcagacagccggctgattgtcatcaattccaccatcataaacaacaatgcgaagattggcgggggcattgatgcaaagcaggcgtatctgacggtaaataactcttccattataaacaacaatgctaagagcaacggcgggggaatctatgccgacaagcaccctgctgaaatccataacacgaacatcaaggacaataacggcaattccgggggcggcgtgttcatcggcgacataagtgcaaagatcagtgattccaccttaaacggcaactctggcgagactgggggagccattttcaacaaagggaaattgattatcgaaaaaagcaccctcaactcgaacgaggccaactacggtggagccatctataatcagaagaacctaaccgtgaacaaaagctcttttgattcgaataaagcctatgaagctgctggaatctataacctgggagacttccttatcgagagctctaactttaccaagcagtctgtgagccacaaagctggagtcatcctgagcgtaaacgggaacatcaagattaaagattccatcttcaagcagaccagcggagccgatgaaggcggcgtgatctttacccgagaggggaatatattcatcgacagctcactgtttctactcaacaacgccctgagttatggtgctgcaattgacaacagcgccatcatgacaatccagaactccctgttcagcagaaacaaggcattcggtgccggtgcaattgacaatgggggagatctgactgtcacaaactccactttcacaaacaataaggtgacaaacaacggaggggcgatcgacaacaacggcaagctgtacatgagcggctccgttctcgtaaacaacaccgctcaaaactacggcggcgccatcatctctaggaaagacacaaatattgagtattgccagatcttggacaactccgctcccgagggggacgggctgtatgatagcggcgattacctgttaataagcaataattggtggggggaaaacaatccaaactttgatgagctcctgaacttcaatattgacgaagacttcaaatggatcgaaatgaattttaccaactcaacccccctgatgcagaaaaaggtctctaacttgaccattagcctaaatgggaaggacaaaaacaacaacagcttcaaattggagaatccagataaactgcctattcttaaatcaagtattcaggtggtgagcgaagacagtaaaattaagtacaacctgaacattgtgaacggttcagcgtccacttcaactgacatgaagctggctaagacagtgaacgcaatcctggataatgagatcgtcagcctggacgttctggaaaacaatgagtcggatgatgactccgaggatagcgacgattcgaacgactccaatgatgagtcggacaacccgaacaattcaaatgataactcggacaatgtgactgacgactcagatgactccaataagtccaataatccgaacaatcatcaaagcaatggcaacaagaataatgataataacaagaattactataacaaaaacggtctcaggtactctaaaatgaaaaatagtcttcttaactctattgatagcaatctggacaatgattatctcaaccttaaagaaaataatgaaaacaatgatgattcaaacagcaataataaggatatgaactattctgacaaaaagactgatctcaacaacgagagttctaacaaggaaatcgatgaaaacgagaccaaattgtttgatatcaattactctttactcatcatccccattgccctgatcctcctggttctctttgcatttcgccgcaagaacaaggacgattga

SEQ ID NO: 2904 - DNA, 1434 bp, synthetic construct
  source 1..1434: mol_type = other DNA
atgattattcatgaactctctcggtttctaatagacctgaaatacgacgacatcccaaaggagagcattgaaaaggccaaactctgctttttagattacctgtcagtttacttcaggggattggagagtgagaactctaaaatagccattaagaccatctataaactctttggcgataacttcaattccctgaacaaggccttcatcaatggcatagcttcccatagcctagatcttgacgacggccacagactggcccaactgcatccgggctctatcgtctttagcagccttctggcactcataagcgataagagcttagacttagacattagtactgagaaattcatcgagtccatcgtggccggttatgaggtagctatcgctctcggaatcctggtgaatcccaaccaccggaatcagggatttcacagcacaggaacaataggcaccattgctgcaggggccgttgcgtcaaaaatcctgaacttgaatctcgagcagacagagcactgcctgggattgtgcacaacccagagcgccggtctcctcgaggcagatcatgctgggacgatggggaaaagcttccacgtgggcaacgcgtgttatggcgggatcatctctgcattccttgctaagaacggttttactggaggcgaatccatcatcgacgggaaagaaggcttcctgaaggccatgtcccttaaaacttatgaggactacctcgacgcagacaacaatgacctcgactacttgcgcatttctaagtttctggaggataacctgggcaagttccacataaatgaggtctacctgaagaaattccccttctgtagacacatccacagctccattgattcaacgctctacctgaaggaatctatcgtaaactcggatgatttcgactcgcttgatagtatcgggttggatagtattgattccattgaagtcaaaacctacaagatagccagtgaacatgacaacttcaatccaaagaacccccaggatttgaagcagtccctgccttatgccgtggccatctcgctggtgctcaatgacctgagtctcgattcaattgacgaactgaaagacgatgggctgtttgacgagaagtccaacaaggaatacgtgcttaaaatcaaagagattatctcaaagatcaatatcatctacgacaaggatttggacgacctggcgccccagatgcgcccttcccaggtgaccattaagttcaaggacaattcacgagacagcatcaagcacaccgtctattacccgctgggtgaggtggaaaacccactgagcgaagaggatatcctggaaaagttcaagctgctaaaccctaagtttaacattgataaactgcaaatcattaaacacatggaggagtatagtatcgacgagctttttagggagctagatctgattgactga

SEQ ID NO: 2905 - DNA, 876 bp, synthetic construct
  source 1..876: mol_type = other DNA
atggatgaaacgaaaaactcattaaaagaattgggcatcaacgaattgcatgatgattacgtgtcccagaagcgatttgaggatggagggcaatataggtttgaagtgcccggaatccagggtccttctgccctcgagtcgctgctgaatgcttgcgacgactttgatctcaccattcaccgggccactcaaaccaaaggaatcatgttcctgttggacgaagagattgaggacatggtggacctcgcggacgacgcaaatatccagctcttcctggccgtcggcccaagggccccttatgacacaagtgctaccgtccagacagaagagggtaagagaataggctatcggctgcgcggctataaaaacctagtctacgccatagaggatgtaaaacgcgccgtgggccttggggtgagaggcatcctattgtacgacgagggcctgctcttcgccctcagtaaaatgcgggagaatggggagctgcctagcgacctgaagttcaagctttctgcccatgcgggctgttccaaccccgctagcgcgaagctgtttgagtcaatcgggctgaatagtttaaacccagttcgagacctccaaatccccatgcttgcatccctgcgtgatgcaatagacattcccattgatgtacacacggaaaacccaaagtccacaggaggtttcatccgccactacgaggtgcccgaaatgattaaggtggccagcccgatctacctgaagactgggggaagcgtcgcaaagcaccacagctgggataccaccgaccaggaggcacgccagagagctaagcaggttgctctgatccgggacctgattgaaaggttctacccggaggcccagatgtctaaactttga

SEQ ID NO: 2906 - DNA, 885 bp, synthetic construct
  source 1..885: mol_type = other DNA
atggacctgattaaaaaagtagaggacgcagttgttaaggccggcagcggatacagtgaagacagactgacggcctatgagaacgcgttgcggctggaagaggaaaagggaaatgaaaacgcggtgtgggctctggaacagatgattgagaacttcaaagtcgctaaagaaaataagctccccctctgcgacgacacaggaatcccccacatcataattgagatcggttataaccgagagatccctaagaacttcttcaacgatattaatgcaggcatcgcgaatggtctggataaactgcccggaaggcctatggcagtcaagggcaacgacatcgagagaatcgagcagtcaaagggtttatatgccgagtccaacatgatgaaaccagcctcgtttcttatcgaagagaaggatgactccacttacgggcggaaaattggcatcgacgatgacaagatacgtattaatgtccttctagaaggggggggtccagaaatccgcgctaaaacataccgcgtgttccataagcgggacagcaatatcgtctttaatgaggccctcagctggctcaaggagtctttgtccatgctggggtgcactccgtcaattccagccattggcataggaagaagccacttcgaggccaacagtctcatgttgagggctatggtgcacggcaacctaaacgatcaaagtgatattgagaagtacatcgcagatgagctgaacaagaccaatatcgggcctctgggccttggcggggtgaccaccgtgctggggtcctttgtaaacatcggataccagcgagctagcggcgtgaggatagtggccgtccgccccgcctgtttcgtggaaccgcgggtgtctagctttgagttctga

SEQ ID NO: 2907 - DNA, 849 bp, synthetic construct
  source 1..849: mol_type = other DNA
atgagtgacgatcaaaagccctacaagaatggtttcaagttcccagagcaaagcattagaacaaaaatcaccgaggtgagccccaaccggctgtccacgcgggggttcaaccaggaggacctgattgagaacctttcctactctgagaacgtgtttttaatattgagaggccgcctgccggatgagaaggaggctaaaatcttcaatcacattcttgtttccttttgcgaccacggtgtcactcccccaagcacacagtctgcccgactgatcgcctcctcgggagcgagcataaacaatgccgtggctggaggactgctgtccttcggcaagaatcacgcgggggcaattgagaaagccatggctctctttcaggaatcaatcagtggccttaacctggaagagaccgaccctgacgatgaaaacaagcgcatagccctcttggccatcgagatcgtaaaccgctacgaaggcgaatcaaaaagagtgcccggctttggccacaggtatcacgacaaggaccctagggccgctaagctgatcgacctcgccattcaggagtcagccatcgggcctcataccaagctagccctggcaatcgaaagcatcctgaatgagaagaaaggaatttgtttaaatgtggacggagcgaatgcaggtctgctaagcgatctgggcttcgacagtgacctcggactgggcatcttcatgatcgggcgtctcccagggctcatcgctcatgcatttgaagagatgcaggaggaagagaaattccggcgattctgcgatttggaaaacatagtctatgaagggtttaaaaacaagaggattgatgatggcgaggaatga

SEQ ID NO: 2908 - DNA, 510 bp, synthetic construct
  source 1..510: mol_type = other DNA
atggaatttttcgatgttatcgaaaaacgatacagcatgcgcggttttgaggacaaagaggtagagcaggagaaactcgacaagatcctgaaggctgctcagatcgccccaactggagtgaacttccaacccttcaaggtcatcgtgatagacacgaagaagtataaggaagagctaaatgcaatctaccccccagagtggtttacacaggcgccaattgccctttgtgtggtggctagcaaggagagggcgtggacccggaaattcgacggcaagaacatcgccgacatcgatgccacaattgtcatgacccacatgattctcgccgccgaagacctgggcctgaacacctgcttcattgctgcattcaagcccgacgaggcaaagaaatttttggcactggatgatgaatgggaacctgtgctgttcactcctttagggtatgggaatgccgagccgagagacaccccccggaaagccatagaggaactcgtcatctacaaagattga

SEQ ID NO: 2909 - DNA, 372 bp, synthetic construct
  source 1..372: mol_type = other DNA
atgaaaccaaaaatagtgcgcgcaagggacaaagaggtaatgaaccaattggcaaagcttttcgaggagtcaaaatacaccgtcaagagccaggataagaactatgtcctgctgaagaagaacaattacgggaaccctctcatccacctaccgttcattctgatcggactgttcttcaatgcgtttgctatcctcgtgaacgtggcctattttgcctacagtgtttttaaaaagtccaatgtcatcttaattacaaccgaaaagaatgatgaagacggcaaccccctggagtttgacgacgtgggcgaaattgaggtgttctacgaccaggagacgtgggataaggccatcgagctcagccggctggaatga

SEQ ID NO: 2910 - DNA, 339 bp, synthetic construct
  source 1..339: mol_type = other DNA
atgagaaagatcatactgctggctttttccgccctgttgatcattctagggctatggaactacatgagtgtgcctaaaccaggtctcgatatcattgcctcatcccttgtgctggtggcagttggctggaccctggcaatgtcggtgtttgagccgaactggattaaggccgcgatcttcatcgacggactggtattcgtccttgtcagcatcacattcctggtcagccccatcaattatgtgttcctcctctttggcatcattttggtggccatagctgttctggcctatctgaggaaactccccgacaacattttacgctacttctaccggagctga

SEQ ID NO: 2911 - DNA, 315 bp, synthetic construct
  source 1..315: mol_type = other DNA
atggcaggcatatcagaagctattacccagatcaaaaaggctgaaagtgatgcggactccctggtagaacagagtacagtcgacgcgaaagcaatgatcgacgaggcccacgtgaaagccaatgaaatggttgaggccgccaagaacgaggccaacgaggaggcccaatcgacggtcttcgacgcagaagagaacgcaaagaaggaggccacctctatcagcagccaggccgacagcgatgtggaggctatcaagaacaaggcccggaataatatcgatgaggctgcttccataattgtgaaaaacattctctga

SEQ ID NO: 2912 - DNA, 2007 bp, synthetic construct
  source 1..2007: mol_type = other DNA
atgtttagaactgcgagaatgcgaaagctgaatgtgataacgctcgacaagtacgctggccccacggtcagcgcactgcacgacgagggcattgtccagataaatgatatttctgagcggattcagcaggaccccaagctcgccgaactgctgaaaccttcaaaagttacaccttacactgggaagctgtccagcctgctgatgaagacaagcgcactttccgatctgctcggagatgccctttcagagggccagtccctgaaggacaccctcatgtctttcataagccccgatctcccagtgcctaaagaagtcgaggatgttgataccgaaagctttatagcttatgctgaatcaaccttaagccaggttgaggctgagaccaaaggtattgaagacaagctggccgccctagacagtgaagagagtaagctcgaaagcaataaaagtctggcatctaagcttaaaaatctggatatggacctggccttgctgagcgattcgaagtatacgagcaccattgtggggcgcatcactgccgagtcagctcagaagttcaaaagtgagtactccaagattacggaggacctcttttacgagttggtgccagatgacgagaaggagtacaatattcttgttgtggtcgtggccaacgagtttaaggatgacatctataccttactgaggaaaaatgagtttgagaagttcgaaactgaggacttacagggccgccctgacagtctgatttcctcttgcgaatccaggcttcaggctatcgaaagcgagcgatcccaagccaaggccgacctcaaagtagtcgccgaaaaatgggacgatgaagtgctggccctcaaagaacagttggagaacgaaaaggagaagaacgaggtgttcgccacatttgctgagaccgacaagactgtggtccttgaagcatgggtgccagagaaaaacctggagcaagcgcaaagcataatcgagactgcgacagatggccacgtgatcatggagacagaagaggttcccgacaatgctgaagacgtcccggtactgcaggagaactgcacctatgccaaaccgtacgagctattggtggaaatgtactcgccactgaagtacaatgaaatcgaccctaccttattcgtagcgattacataccccttcttcttcgggttctgcctcaccgatgcaggatacgggattctggtggcccttataggcttcatcctctatcggggaatgggcaaagtcaaccggaccatgcacgatgggggcctaatcatcatcgccagtggtatatggtccattattctggggctgtttaccaacgggttcttgggggacatgtggactaggatcttgggtctgggacccgctctgcccacagtgatcgactcaatcaacgcatttaagttcccggccacaatcctggtgattgctatcgtaatcggcatcatctataccaacatcgggttcatcctgggggcaatcgacaacttgcgctacggagagaagaaagaagcaatcgggtcgcaaatcgtgtggtttgtgtttgagctggggatcatcctgctcatactgggcttcctcttcccaacgttcggaatgattggaatggccttgggtgccgtcctcatcattgcagcgcttggcatgctcatatgggccaacggcgcatatggcctgatggatgtcttcggatttatgggagatgtgctatcctacgcccggctattggctctctgtttagctacaggcggtattgccatgaccgtaaacatcctcaccaatatggtgaatgacatgattccctttgttggcatcgttctggctattatcatctttatcggtggccatattgccaacttccttttccaggtgctgggtgcaggagtcaacgcgctgcgtctgaactatgtggagttcttcagccagttctatatgggcggaaaaaactcttaccaggcctttaaagcgaagagacagtttactaaggtgaagaagtga

SEQ ID NO: 2913 - DNA, 486 bp, synthetic construct
  source 1..486: mol_type = other DNA
atggtggaaatagccctgggcaccgccctcgccgcaattggcgctggcgtggcaatcggttttgcggggctaggcagcgggctgggacaaggcatggcagcagccggatcggttggcgccgtcgccgaggataacgacatgtttgcccggggaatcattttcagtgccctgccagagactcaggctatctatggcttcttgatcgcgattctcctgcttgtgttttcaggactgctgggcggcggagagggtctcagcacaacggccgggattgtcgctataggggtaggggccagtatcggatttgctggtctcggctccgggatgggacagggtatggcagccgcgtcctctgtgggcgctatcgtcgaggacaatgacatgttcgccagggggataatcttcagcgcactgcccgaaacccaggctatttacggtttcttgattgctatcctgcttatggtgttcggcggaatcttagggtga

SEQ ID NO: 2914 - DNA, 681 bp, synthetic construct
  source 1..681: mol_type = other DNA
atgagctccggggccgacaaaattgtcagtaacataatgagcgaagctcaaggcaaggcagatgcaaacatcggcgaagctcaggctcaggtcgacgcaatcctcgccgacggcgaaaaaagggccgaggccactaagcttaaaatcagtgaggacgctgccaagcaagcggaaatgagataccagcagatcatcagcgaggccaagatgaacgcccgtagggcagagctgggggcaaaagaagaggtaatcgaggaggctttcaataaggccacggaggatttgacaaatatggccaacaccaacgataccgaatatgtggacgccctgattgagatgattaaggaggccgcggtggaaatcggcggcggagacctgatcgttctgctgaaaaaggaggacatcccgaaaattgaggggaaactggagcacatcgtcgggctaataaagtcactcatcaagcgggaaaagccatccgatttgaatgtgattgcgaaggaagtgagccgggagaccgacgtggaaaccactctcgagataggagagcccatcgataccattggtggagctatattaagaacacgaaacggtgagattcaggttaataacacgatcgaatcccgcatgctccgctttaaaaagtcactgcggtcggaggtggcaaagacacttttcgattga

SEQ ID NO: 2915 - DNA, 1155 bp, synthetic construct
  source 1..1155: mol_type = other DNA
atggctgatgagattgctacaataataagtagcctcggcctgtccaatgaggcattcctggcaatagttcttctggcgtttgtcgtgatcggtgccattatcgtgatcgtcgcaacgcggccaatcctggatgtgtacccctatctgcaccctaatgcaagggtacgggcacgcaaaggacggttgtttgatgagaagcagatttcagaactagtggaagccaacaacgttgatgaaatcacaaactatctccgcggatcgcccgactatgccgactacctggataactacacactggaaaaggctctggacatccagctcggggagacctatgacatggtgagcaggatggcgcccaaagagatccagtccagcttcaaagtcatggctaaaaagagcgacatcaataacattaaaagtttactaactgctaagcaagcaggcctgaacgaggaagccaccgccgacctgcttattcctactggttctctgtatgaagatatagagcgtctgaccgacgccgatggtgtaaccggcgtggtggctggcttagacggcactgagtacgcgcccgtattggaggaggctctgccggagtacgaaaagacagggatggtcctgcctctcgaatcagccctggataagtactacttgtccaaattgctcgcttcctcagagaccccatctgatgagaataagcagatactctacagttatgtggggaaccaggtggacgtggccaacatcaaactcatcttacgagccaaggccgatggactggactatgaagccatcagcccatacatgattgatagtggatatcaactgagagaatggaagcttaaggacctgatggaggccgaggacgtgacgggggtgattagcgggctagaaggcaccaaatactcagacgtcctggttgaggtgcttcctgaatacaatgagacgggatcggtggctctctttgagaaggccctggacaagttcctcgtcgactctgcaaaatcctactccatgaaaaagccccttggcattgggccgatcatcggcttcctcagccagaaggaggttgaagtcaagaacttgaaggtcatcgccagagccaagcgcgaggcggacttcccaatcagcaaaattagggagatgctggtgtga

SEQ ID NO: 2916 - DNA, 318 bp, synthetic construct
  source 1..318: mol_type = other DNA
atgagtgacgtcgcgataattggggatatcgacaccgtgacgggcttcaaactaggtggagtgaagcgaggaatcatcgtgaataacgatgaagaagctaaagatgcactggacgagctcctcaacgacgaaattagcattatcatcattacacagaagatagccgacaacatccgcgagcacattaatagacggctgggctcagatgtccttcccatggtgatcgagataccagacaaaagcgggtcctctgagggcggcgccgaccagatggcagccctgatcaagagggttatcggggtagagatggtgaagtga

SEQ ID NO: 2917 - DNA, 1755 bp, synthetic construct
  source 1..1755: mol_type = other DNA
atgattaatgaaggaaatatcatcaaaattgccggtcccgttatcgtcgccgatgggatgagaggcactcagatgtatgaagtggtacgcgtaggagaagccaagctgatcggagagatcatcgagctcgagggcgacaccgccaccatacaagtgtatgaggagaccgccggggtgaagcccggcgagaaagtggagagtacaggaggtccactgagcgtcgagcttggccccggggtgatgggtagcatttttgatggcatccagagacctctggaagtgataaagggaatctccggagactacatcgcaagaggcattgatgtggactcaatcgacaaagagaaaaaatggacttttgaacctatcgccaaagtgggcgacaaggttgtgggcggcgacatcctgggacaagtccaggaaacaagcgccgtggtccaaaagatcatggtccccccaatgattgaaggcaccataaagtcgatagccagtcaggccgaatacacagtgcttgagaccatagccgaaatagaaacggaggatggaattgaggagatccagatgttacagaagtggcctgtccggaaaggtcgcccatacaaggaaaagctagacccggatatcccacttattaccgggcaacgcgcacaagacacttttttctgcctggcgaaggggggggccgccgctatcccgggccctttcgggtcaggcaagactgtgacccaacagcagctcgctaagtgggccgacgccgatatcgtggtgtatatcggatgcggcgagcgggggaacgagatgactgaggttctgaccgagttcccattcctgacagacccaaaaaccggcaatcccattatggacagaacggttctgattgcaaatacttccaatatgccggtggctgcccgtgaagcttgtgtatacaccggtattacaattgctgagtacttccgggaccagggttatgacgtcgcgctcatggctgactcaacgagtcgatgggccgaagcgatgagggagatctcaggaaggctcgaggagatgcctggggaagaagggtaccccgcttatctcgcatcccgattggcccagttctatgagagggccggaagggtcatcacactgggccaggaccccaaggaatcttccgtgactgtcgtaggagcggttagcccccctgggggggacctgtccgagccggtgacgcaaaacaccctacggatctgtaaggtgttttgggctttggatgcatctctggctgataagcggcacttcccttccatcaactggctgcagagctactcgctgtatgtcgagagcattaccaactggtggcaggaaaacgctagcgaagagtggcgcgccaacagggaccaggcgatggtgttactgcagaaagagagcgagctggaggagatcgtccagctagtcggtcctgatgcactccccgattctgaacaggtggtgttggagactacccggatgctcagagaagactttttgcagcagaacgcatacgacgatgttgatacatactgcagcccaattaaacaggcaggcatgctcgaaaccatccttaagttccatgaggccgcaagtgcagctgtgacgcgtggcgcagatgtgaaggaaattgccgctctgacagtgaaagaggacattgcgcgcatgaagtacatccccgaagatgagtttgaggcccgagtgaaggagatacaggagaaagttgtcacacagtgcgctgaggtatga

SEQ ID NO: 2918 - DNA, 1386 bp, synthetic construct
  source 1..1386: mol_type = other DNA
atgaatgctgatattaaaacacgcgagtatacaacagtttcggaggtgtccggccctctgatggtggtcgaaggcgtggaaggcgtggcgtataacgaaatcgtcgagatcgaggcccctaccggagagcatagacgcggacaagttctggaagttaaggatgatgtggcggtggtgcaggtgttcgaaggcaccacagacttaaacaccctcaacactaaagtacggttcacaggcgagaccgctaaaatcggggtgtcaaaggacatgatgggacggatcttcgacggaaccgggaagcctattgacggcgggcctgagattatcccagagcaagaactggatattaatgggaatccaatgaaccccgcctcaagagagtttcccgccgagtttatccagaccggtatcagtaccatagacggaatgaatacccttgtcaggggccagaaactccccatctttagcggctcaggcctgccacacaacgatttggctgcccaaatcgccaggcaggctaaagtcgtgggcagcgatgacgatttcgccgtgattttcgctgcgatgggtataacgcatgaggaggccaacttctttatgcgcgatttcgagagaactggagcactcgaaaaggtcaccgtgttcatgaatctggccgacgaccccgctatcgagaggattctgactccgaagatggcacttacaactgcggagtacatggccttcgaacttgggatgcacgtcctggttatcctgacggacctgtccaactactgcgaggcactgcgagagatatccgccgctcgcgacgaggtgcccgggcggcgagggtaccccggatacatgtacactgacctggctggtatctacgagcgtgcaggacggatcgcaggtaaggaaggtagcattactcagatgccgattttggtcatgccgcaggacgatattacacacccaatacctgacctgaccggctatatcaccgagggacagatcgtcctgagtagggatattcacaggaaagggatctatccccctgtggacgtactgccatccctaagccggttgatgagcggtggcatcggcggcgacaagacgcgtgatgaccacagtggcgtgagcgaccagctctattccgcctacgcagaaggacggaacctcagagacctggtagcagttgtcggggaagacgcccttacggagcgcgaccagtctttcctagcttttgcccaggccttcgaagatgagtttatcacgcaggccaaggatgaagaccgaagcatagtggaaactttagatctggggtggaagttgctcaccatactccccaagacagaactcaagagagtgaaggatgaatttattgagaaatactacccagagtga

SEQ ID NO: 2919 - DNA, 693 bp, synthetic construct
  source 1..693: mol_type = other DNA
atggccgaagaaatactcgaggggattaacccaacccgaatggagctacttgctctgaaagatagagaaaaacttgccgtcaagggccacagtttgctcaagcagaagagggacgctttgattaaggagtttttcgatatcctggaccgagttaagggtgcgcgcgagaatgccgagaccaacctgagtgaggcttacgaagcactaactgaagctcagatcattatgggagacttagctgtgcagaaggcagccctgtctgtgaaggagagcgtgaaagtagacatcagctccagatcgattatgggggtgtccgtccccattgcagatatggagatggagagcaggacactggtggaacgcggctacggcttttcagacacttcaatacaactcgacgaagccgccaaaaaattcgagacagcgcttaagtacatcattgaactcggagaaatcgaaaagacaatctatctcctggcggatgagatagagtctaccaagcggcgcgtcaatagcctggagcatatcatgatcccgcggttccaggccaccatcaagtccatcaatatgaaactggaggagatggagagggagaacttcgtgcggatgaagatgatcagaagcacgattgagaagaacgaagccgaggctctggccaaagcccagctgaaagcagcaaaagccgaagagtga

SEQ ID NO: 2920 - DNA, 2859 bp, synthetic construct
  source 1..2859: mol_type = other DNA
atgattagtctgtcgtttgtctcggcttcatacgctctagactccaatcacctcggggaaaatgatcggtcttgcctcaattcttgttcgtcgctgaaatattccctgggtgataacaagaataacgacttagataatagtgccgatctcaatagtctgaaccccaatagcaataattgcctcaattccaataaaaataattgtaattgctattgcaagaatcagacagacctgaatgatgatctgaacgactcagataactgtcccgacagttttgccaaaaagaccaatatcaaccatgataagcagctgaacgacggggagattgacttctccgagcgcaataatcagatcttcctgataagtcccgaaaacttctccgtgttctttgacgagaataaccgcctgaaggaagattacgggggatgcaccctggtgtttgagggggatttcgctgagctgggcataatcgacatatcatacccttacacccgaatcacggcaaaggaaaacagcttcaagaacactgcattcaagctgtctgcatctgacatcgaactttccaacctaaacataagtctggataaggagtttaaagataacgaatacgccgggattctcgtgctcagcgactacattagcatctacaacattaccctcaactacacggtgcccgccaataccaacgggttctgcatctacagcaaaggtgaaggctttcggaggatcactgatctgtccttaatcaacaacaccatcacctttacaggcaacaacctaaacgaggcttgggactatggcattttccttgataagaccgataatgccttggtgtacggcaattcacttggttcctacttgcccctgtgtgaagacaattggtataacaacgagtatggtgccgtcagcaagatgtccagcgccggctttgtagcgcagagctgtaatgacctcaagctgtcctccaacgaaatcaacacctatgtgacagattccacccagagctcctttgccatggactcctgcatattatacgattgcagtgacctgacggtcgagcggaacactctgtacctggaggacattgacagtcaggacggcaagaacaacaccctgcacggctttgacttgtatctatgtgacgatgcgataattgccttcaacaacatcgatctgttcacaatgggaggcaatgacgggaggaagatcacaagcccattgcaggtgaacgggccaagcgacaacatcagaatcgcctacaacaatatcacaagttccaacttcggttccaactgtggcatttactcccataacttctatggggacactcacctcgagattatcagcaatttcattgatgtggctggcttcgcaaactctggagaatggtcacttctctctggaattgaggtccaggattcagacgacgtcatctggaataatacaattatcgtgacaaatctcggtgacttcaaatataataacaaggtctacggaataagctactcccaaaataggaacaactacaacagcacattcaatgtccaatacaacaacattaccaccaacggttattacgctgtatatctgggtaaggacgattaccccgtggtcaactcgaccgtgaagaacaatgtgttgaacacgtacataaccggaggcaatccggcagtgagcatcgcaaacgacaataaaaacaaccccatcgtaaacaataccgacaacgagtttaaaaacatctttaaaaacagctccttccccaaatggcttaaaaacttcctgagacaggacaccaaagtggacaaggacttttcgtggattaccgatgctatcaacccccagtcaaacggcacgggattttctaacgacactggaaatggcacagggattatagacaatgatgggagcgacactgtaggaaacaattctgaaggcagcgactctatcgttaatggcagcacttccgcgaacggaaccggcaatggcaccagtggaaacgccaccgagccacagaatccgatcgacgacaatcagggggataactctggaggctcaagttccagcgacaattccactggaagccagacagataacgaggattccaatcagaacaacaccgaccctactgacagcaaaccgaccaataacacagatgtcccagtgaaccccaccaacactagcgacaagccagttaacagtaccgagccggtccccgctaacgacacagagccagtgccagccaacgatacagagccagttccagccaatgatacagggcccgttcccgataacaagacggacaatcctgtgaacaatacagaaccggttcaggaggatgccaataaaaccgactcagataatacggagccaatcaacacgaccaaggacaatagcacggagattatcaacaagactgagtcagatgacgacactaaccagactgtgcttaaagacgacgatctggaccctaaagagtcacacgaaaactctcaagacgacaacaagaatcctagtgatgacgaggagaaaagcactcctggggattctggcaatgagctgacggaccccgaaagcaactccgaaagccctcagaatcaagaggaaaactcagagaacagtaatgacgactctagtgagccttctagttcgacagtcggcgattcacactcagattctgcctccagccctggtcttagtgatgcttccagcagcaagaacgcatatgaattggataagcctgtggaggatctcgtgacaaaatcggttgattatatcagcctcgcgggaatctgcattgtgactttgttactgatcctgttcgggtataagcgtcaaaaggacattgaaggcgaagactga

SEQ ID NO: 2921 - DNA, 639 bp, synthetic construct
  source 1..639: mol_type = other DNA
atggtggacgtgggcggaggaattttaacctacatcctagacacccttagtcaaagtctgcagatcccggtcatcatattcctgctcatcttcgctgttggggcgatcatcctgctgggcggcctaatccgggagtatagtcacagaaaaaccatctcagacgcggaaatgaggaacattattgatgctatcaacaaggctaatgacaaatcggagattctgtccattgtcgacagcagcgatattcccaactctcagaagactgtgctccgggagattacagattccgactgggacaatgagtccagggtgggccttgccaaaaagctgatatcttcccgcgaaaagcggctcgaaaagcgcttgtcatacactgacataatcacccgtatcggtcctacactcgggcttatgggaaccctcatccccatgggcccaggactggccgccctggggacgggcgacgtggtaacattgagcaatgccatcattgtcgcatttgatacaactgtggtggggatcggtagcggggccctggcatatgtcataagcaagataaggcgaagatggtacagcgagtacattaacaacatcgatgttctgacggatgtggtattgaacaagctgaataaactctga

SEQ ID NO: 2922 - DNA, 342 bp, synthetic construct
  source 1..342: mol_type = other DNA
atggtgaagatcagtcggaaaaattccttcgacgaaagcagtgaagaggaccctatgtccggcgtcgccaacctcgtggatgccatgttggtaatcgcagttggactcctggtgtttctggtcatcagctggaacatgcagtccatcattttcaacgaggatctatctccccagcagaaacaggaggctattgatgcgatgaatcaggtcattgaggtggaccaggggcaacaacttaatgagacaccagacataagcaactcgtcaggagagggctataccgaaatgggcaaggtgtaccaggacccgaagacggggaagctgataatgatcgaaaactga

SEQ ID NO: 2923 - DNA, 1323 bp, synthetic construct
  source 1..1323: mol_type = other DNA
atgggaaagctgtcatttagcgtagctcaaaggttcggcaaaaagggcaccgccctgccaggtaaggtggcattgaaattcaatcctaacctgcttgaagagctgtccaaaaaatgcgataagatcgtctttatcacgggcaccaacgggaagacaactagcaacaacctttcgacacacgtgctgaaaggcgggttcaatgatgtcctctcaaacctgaacggtagtaatatgattcagggcgtgctgacccccttcattaccgattacaaggattcctacgacgtaggtatttttgaagttgatgaaggctcagttccggtggtgagccagttcatgaagcctgactatttcatcatcaccaatttcttcagagatcagctcgaccgatacggtgaggtcgaaaccacgatcaagatggtgcatgattcaatcactcccgagactgttctcatcattaacagtgatgagccatccctgcttagattcgacgacctgccaaataagaaggtgtactatgggatcaacaagaccaagtttgcgcaggatgacattgatgttgccgagtccattttctgccctaagtgcggaaacaggctcagttatgagtacatctattacggaaatgtggggaaataccactgtgacaagtgcggcattgagaaccatcccgctgactatttcattgaatctgccgacctcatcaacggctcctataattttacagtcctcaacgacaacaaaagggaggaatacactctcaatctgatgggcctctacaatctatacaattccctgggagtgataagcctggctaaggagataggcctggactacaatctgattaaggaacggatcaacaatttcgaataccgtttggggcgcatggagactttccactttaaaaacaaggacctggttttggtcctctctaaaaaccccgtgggcctgtctgaggtatttaacacaataacctacgacgagagccagaaaagtgtgatgtttatcttaaacgactacgcgccagacggaaaggacgtgagctggatttgggatgccaacttcgatcccgtgaatcacatccctaatatggacgcattctattgtgtcggaacccgggccgaggaccttgccttgcgcctaaagtatgccggagtggatgaaagcctgttaaagatctacccggcaaaagaccagtttgacataaacgaggcagtcgataccatatcgaaggaaagcacaaaggcgtatgtgatcgggacatttacggccatgcccgaggctcggaaaatcctagtcaaaaaagaacaagaggggttttga

SEQ ID NO: 2924 - DNA, 777 bp, synthetic construct
  source 1..777: mol_type = other DNA
atggacaacctcgaactgacagtgatgaacatgtactcggacattttaaatacctacggcgacatcggcaactttcgctgcatcaatcagcgcatccggtggagggacatcagtcttaacatccaggagtgtacgatcgacaaggacgatgacttcgagtgggaggacatcgacattatccttatcggtggaggcagtgataacaaccagtccatcgtatctaaccaccttctagagcagagaaaggatctggtcgagtttattgaaaatggcggggtgctgctggccatttgcgggagctaccaaatgttcggaaacaaatacctcgatgtggacggcaaggacatcccctgcctggaggtctttgacatagaaaccacaagccggcccgatcgactcataggggatattgtgatatccaacgccatcccagattcaaataatgtgctgaacaaggattttgatttcaaattgaaggatatggttgggtttgaaaaccatggaggccgcacctaccacaaccacgaccccttgggccacgtgaaggtcggattcggcaataatggtgaagacaaaggggagggaatggtttataaaaacttcctagcaagctatctgcatggtcctttcttgccgaagaacccacacattgccgattatatgatattcaatgctctgaatagaaagtactccatcactgagattaaagacctcaatgacactattgaaatcagggcgcatgagcggatgctgaaacgtctgctcaacgataagtga

SEQ ID NO: 2925 - DNA, 1287 bp, synthetic construct
  source 1..1287: mol_type = other DNA
atggagaacctgcttatcatgggcatcaatacacgtccaatggttaacagcgcgctgaagctggattatagaacctactctgtaagttattttaagacttacgacttcgtgagcccctataatgagaggcacgtgctggaccaggagagtgtcgactcctgcggcttcttcgaacgcaactacagcccccaaaagctactcgatctgtccagggaatacctgttcgacctctcgaaagaacacaattccaaaaagcaggacaacgaaaacaatgaggacatcgatgagatcgacaaaatcgtactgataacgggaatccatgctgacgactttaaaggggagttttccagattcaagaccaagattcggggaaacataaataccaaggacctggacgataagtttcggttctaccaaaagacaaagaacaaatttgacgtcccactcacgttcaaactcagtgacgtcgatgagctgcgggatatccttaagcaatacaacaacaaccagtttatcctgaaaccccttaagggcaatggtggtctcggaattttcctgatcgattacgatagcctgaacgaattgaataatagcaacaatcctttggagaacatctcattcgatgactacatactgcaggagtatattgagggcacaagcataagcagctcagtgctcggcactaatgacgattgcgtgaatctcttcaactcacgcctagtgacagaaaatgatttgggaaacgacaactttgcatatagtggcaacattgtgccactcgatgtgaatagctttaactgtttcaacgagagctttaagggcctggggatcgattccaagcagttgaacaaagagatgaaggagatttccgaggacctgattaggcagttccgactgattgggtcgaacggcgtggacttcattttagaccgcgagaacaacctaaaggtcattgaaatcaatccccgactgcaggggacctatgagttatgtgaagagatcatggacttgaaccttcttgacgcacacatcaaggcctgcgagggagaactggtggaagtgccgaagctgaatggcagatatgggatcaaaaagattatctatagctccaaacaggttaaaattggtaacctcagtttatcaaacgtctacgacgtcccttacgaaggagtgaagatagaggccaatcagcctatcgtaactctgatcgatagcaacaaggatctcaaaaccgccattgggaatataaataccgctgaagagctggtttacaaaaatatctactga

SEQ ID NO: 2926 - DNA, 981 bp, synthetic construct
  source 1..981: mol_type = other DNA
atgaacatcttctcaactgaagagacatattacggcactagaaaagactctccagtgctgctgccttcatacaacgaatatggggacaagctccacatcaaggacgtgttcgatttcgaggagatgctggaaaactacatcatcgaaatggaaattcggaactatagcgaaaacactgtaaagacctacagctccatcatacgaagcatgatcgattatatgagctcggaggagggagtgtacgatggccgcaaattcctagcctgctttaaaaagtatattcgcgacttgaagaaggaccaggacgtgtcacagaattacatttacctcaacacagtggtgtgtaagaagttcctggaatttaatgacatctacttcctggaggacgtgcagaacccgaaaaggaccaagagtctcccaaaatccctgacggagaaggaagtgaaatcgctgatcgatgcagttcaaatcaccgacgaggacagcgagctgaagaaaaaagccaaaatgcgggacaaggtcattcttgagtttctatactctacagggctgcgtattagcgagctcgtcaagctgcagaaaaaagatattgacttcgacgagaggaccatcagggtgagaggtaagggcgaaaaggatcggattgttctgtttgacgaaaatacgcgcgatttgatagataattacatcgaaacccaaaaccagaagagtgagtacctcttcatcaacaagaacggccggaagttaacgcccagatatgtccagatgatgatcaaggagtatgctgagaaagcgggaatcaagaagaaagtaaccccccacgtcctgaggcacagttttgcaacacatcttctcaagaatggggttgatatacgagtcattcagcaattattgggacactccagcctttccaccactcagatttacacaaatgtggatatggataccataaaatccgtgtatgaccatgcccgcgagtga

SEQ ID NO: 2927 - DNA, 1338 bp, synthetic construct
  source 1..1338: mol_type = other DNA
atggggaagggggtggagctcactacaactaaataccttattcacgctcagattaatgccaacggaatcgtcgagaagcctgatgtggtaggcgcggttttcggacagaccgaggggcttctcagtaacgatttggacctcagggagctgcaaaggaccggcaggataggacgaatccaagtgatcatacattccaacggcggacgggcaaaaggtgagatcgtcattccctccagcttagatcgcatcgaaaccgccatcctggccgcatcactggagaccattaaccgtgtgggtccttgcgaagcgtccatagaggtgcttagggtcgaggacgtacgggccgtgaagcgacagcaggtgatcaatcgggccaaagaaatttacatgggcatgatggaaaccgtctcgcccgagagcatgaagatgattgaagaaatccgggaatcaatgcgcgtgcacgagatctctgagtttggggaggagaggctgccagctggtcccaatgtccatacgtccgatgcaatcattgtcgtggagggccgcaatgacgtgctgaacctgctcaagtatgggatcaagaacactgtggcagtggagggagtgaacattccgacaagtgtggctgagcttacgaagaagaggaccgttacagcctttgttgatggcgaccgtggcggcgagctaatcttgaaggaactcttgcaggtgggggaggtcgattacataaccagggcgccccggggcaaggaagttgaagacttggaaaaggaggaggtcctcgtggccctgcgggacaaggcccccaccgagcaggtgatcaataatctggacttcaatctagacacgcaggccaagactccaaaaaacaaagtaaacagaacagacagacgggcaaagaacttcaataagagcgacaagtttcacgggaataaaagaaacgatcgtaaagacaaattcaatgacagaaaggacaagaacggaaaaaacgatcgccgcggaaaagaccgcaattctagaggtcgcagggaccggggcgaccgcatccctgaaagccgaatgaagctgctgaagaacatgctgagagacttagaggggactggaaacagtgagatcctagatgatagcctgaacctccttaaggagaccaaagtcgaaaccctgtatgaagacctgaaagaagacatcccagatgctgatacaattatcttcgatggcgtaatcagccagcgactggtggatattgcccactcaaagggcgttaaaacactcgtggcttttaaatccagcagagtcattaaacggccggacaagctcaagctgataacgctgaactga

SEQ ID NO: 2928 - DNA, 756 bp, synthetic construct
  source 1..756: mol_type = other DNA
ctggaaggcgttatcttggcaaagatcaaaccgaatgatctgctcaaaaaaccaagtaagatagaaaaaatggagctggatcagattgacatcagcaaataccagttttcaatagacgatttggaggggaaggacagttccaactacattctgctcaagaagattctggactcaagctcttcatgccaagtttccgacgcctacgcctcggtatccggtcgcagcggcgtactggacggattaaagccaatgaaccggaacaaggtctacgggcgggtgttcacagcgaagaccaacactaacgattggggcacctccttgatggctatggacaatgcgtctcagggagaggtgctcttcatctacagctacggagataaggccagcgtgtggggagagcttgctagcacctgcgcaggcgagaaaggaattgccggcactatcctgtatgggtatgccagggacatggatgccctaatcgacctggactatcccgtgtacgctctcgactattgtcccaatgccgggaaggctcttgggctaggtaaggtggatatcgtgctggaaattggtgaagacataatcaagcccggcgattttgtcttcgcagatgagaatggggtggtgctgattcctcaggagctctttggcgagacgatggtggcaacattcaacgtcaaggtcaaagagagtttcatcattaaggagctcaaaaaaggcagacttctgtccgaaatcatcggactggaacgatga

SEQ ID NO: 2929 - DNA, 363 bp, synthetic construct
  source 1..363: mol_type = other DNA
atgaaattcctcggaaacatttcacacctggcaaactctggtaagctgatcgccaagtcaagccagaccccacctgccggagctttcgtgtttacgaacgacaaacagaagataggcaaggtatacaatatcttcggcccggtgaagaatccctacatctccattaatctctacaggagcgtcaacaagagagatctagagagtaggcaaggggaaaagctgtttgtgtctacaaagcgggagatggaaaaagacaagaaaaagaagcggagcaacaagagtaaaaaggggaaatattccaaaggcaaaaacaagagcaaacccagcaagaaaaagcgatccaataagaaatcgcgccgctga

SEQ ID NO: 2930 - DNA, 795 bp, synthetic construct
  source 1..795: mol_type = other DNA
atgggcccggagtggagggcctttgaccatgaacagagagacaaacgcacaagggtgggcgcgcccatcacttacacaatccacgataaaggcctcagcaccatgatcgattggaggaataaggacatctacggtcgcgatatacctgcccggaatagagcgcagtggtatcggttgcgcaagtggcagcgaaaaatccgaatctccggtgcgaccgagcgtaacctggctttcgctctgagtgagttggaccgggactcttcccgcctggggctgccaagaagcgtcagggaagccgcatctgtgatctaccgaagtgcagtggaaaacaagctcattcgggggcgctctattgagggcgtggtcgcagctagcctatatgccgcctgccggcaatgtaaagtccctcgtacgctcgatgagattgccgaggtgtcaagggtcagcaagaaggaagttggacgcacctaccggttcctgacacgcgagctgcacattaagctgcccccaacatcgccagtggactatgtgcccagattcgctagtgagctcggcctgtccggggaggtgcaaagccggagcatcgaaatcattgagaaggcaatggaaaaggggctgacttcaggcagaggccccaccggggtagctgccgctgccttatacatagcatccgtgctccttggagaacgaaagacccagagggacgttgccgatgtggccggagtaaccgaggttaccataagaaacaggtacaaagagctaacggaacagctggagacgggagtcactctttga

SEQ ID NO: 2931 - DNA, 2106 bp, synthetic construct
  source 1..2106: mol_type = other DNA
atgaagcttagtattatcatccctacatacaatgaagaggaatatttgcctaaactgattgaatccatcagatcacaggagtttaccgactacgaagtcattgtggcagatgccgacagcaatgataacacccgagagatcgctgaagcttacgggtgcattgtcgtagatggagggctgccggcaatcgggcgcaacaggggcgctgcggtggcgaaaggtgagatcctgctctttctggactcggacttggagttgaccgagcattaccttgaaaatgtcattgaagaatttgaagaggaagatttgggcattgcaatcacccagatgacccccctctcccagaagaaaagggacatctacctgcataacctggccaattggttcatgatcgctgtagaaaacatcaagccccacggtgcaggctgctatggcatcatctcccgcaaggagctccacgacgagtgtggaggatttgatgagaacctgacatttggagaggatactgattatattgaacgggtggctgagataagtcagtttaaagtccttcgcaatgctaaaatcggcgtttccacgagaaggctggaagaggagggactgtacaccctcctgaagcaatacggcaaatcgacggtaaatgatttcaggggcaaacggacaagcgctgaagacctgggatacgagtttggacacgaatcaagctctaagctcgagagtggtgtgcaggagtcggttccaaaactcgagaacggcgtgcaggagtcagtgccaaaactggagagcagtgcggatatcagttctcaaatagaagataactctccatccctcgaagatgaaatcgacattgagtccgaccactatccaataacggctctggacagcacagacatggagcgcattgccgaaaagtccaaaaaccggaagcaaagttcgtttaaaagacgcctcaacgagtttaaggacaaggagtttgagaccaacgagctgatcgagtatgaggatgaatcaggccacattaaacacgaggccgtgggcctggacagccgaaagaagatattctattccatctgtggagaggggatgggccacgccatccgaagcagcgtaatcctagaacacctcaccaagcatcatgacgtgtatatcttctcatccgaacgtgcctataagttcctatctgaaaaattcgacaatgtgtacgagatcgggggattcaatacggtctacgagaacaatgtggtgcggactaaaaagacattcttcaaggcaatgaaggccaatcctacaaacctgaaggaagggtacaacgtgctctataaggaatgcaaaaaggtgaagcctaatattatcatatccgactttgaaaactactccagcatgctcagcaagttgatgaacattcctctgatcagcctggacaatatccatatgatcacccagtgcgactatgactatccgccccaccacaaggctgacatgcttactgcaaaagcagttaccaaatcatatatactgcgtcccaaaaggcacatcattaccagtttcttcttcccacccttgaaacatcccaaaatgactgccctgtacccgccagtcctaagaaaagagataatggatttagagagtgaatctggggaccatgttctggtctaccagactgccgagtctagcataaacctgatggacgagctaaaaaagttagatgaggagttcattgtctacggcttcaacaaggatgggactgacgagaatctgacgtacagagccttcaacgaagacaagatctatgaggacatgcggacagccaaggcgatcatagtgaatggtgggttcaccatgatttcagaagccatttaccttaaaaagcccatctacagcacacccgcccacaagaactttgagcagattctcaacggcttctacgttgagaagttaggttacggtgagtcccacgaggacctggatgtgaagaagatcgagaagttcctggataatcttgatacctaccagaacaacttgaacaaggtggagaagtgggataacactgccattctcgaggaccttgacctgagcattgaaatgtacgccaagaagaattattga

SEQ ID NO: 2932 - DNA, 1059 bp, synthetic construct
  source 1..1059: mol_type = other DNA
atgaatctaaagatcaacaaatatattccctttggaatcattttaatcatccttggggggtctctgtacttcctgagtggcatcgaccaattcatccggccattcacccagcctattctaatgggctccagtaagggtaaggacatactcttcttcgtgctctttgggatcaccatcatcttgtcctccattggagacaatgagaggattcataactatcttatgaacctatcaattcccgaaaagctgaaggacaaggacttttacctgaagctctccttgatcttgttcctgatcactgccatctcaggactggctgtcgaactctacctgagagccagtctggggcttaactggaatacaatcctggtaatcatgaatccgagcctgacgagcacaagctttctccactcccacctctataaatcgatattcgggattatcctggggatcttcctgagccacattcccgctggtatccatacaggcagctccttaagtagctatgcccccagtgtgataagcctgctctttatactgattccaataacgtacatttctatggtcctatctaaccagaggcgaaaggccgcttccagaatcctcctcgcctttaccagcacccttggcataatcggactgattgacggcggcctcttcgcaacccctgccatcgggggcatctacggtatccttatactgatgtacaatgaggagattctggatggcatttcagactttatcactgaaaaagacaaacgcgacggaataaaagagaagctgaacgaggaactgcgcgcgattaagagcatcttcaacaacaaaaacatcaagaaatacttgaagattgccctgcctcatattgcgttgattctcatcatcatcctgcgtttctcggtggcattctatggtgcatgcccagattcttacgagttgattatatctaatggccacgatcttgatctcgatgagtatgacacattaaacatctcagagaatggagatcggactgtggttcacctgtccaatcagtacaacgagatggaactgtttaaatga

SEQ ID NO: 2933 - DNA, 738 bp, synthetic construct
  source 1..738: mol_type = other DNA
atggtgccactgcagttcttcctcttcaccagtgtgggagttgacccatctcttgccatgatggtcagcctcggaaccagccttgccatcattattcccacggccagttctggagcctatcagcaccagaagaagaacaagtccatcgtcagacccggcatacgattagctgtgtttggaatcattggggggttctgcggcggtctgctggcaaacatggttcctacacgcatcctgcagatgatattcgcctgtctactgatctttgtggctctcgatatgctctttggctccaggtccgacggggaaaaggccctgatcgatttcaacttgttgaatggcggtatcgtgggcttttccatcgggatcatctctggattgctcggcgtcggcgggggcgtctttctgattccatcactgtgcatactgttcggattcagcttgatcgaggctattggcacaagctcggtgttcattgcattcaccgccattggggggctcatcagttacatttacactggtttcggggtaaatcccatgccttactgcctgggctatgtgagcctgataaactttgtcgtgatcgtactgttttcagtgccgatggcgactatcggagctaaacttgtttataagctccctgagaaacggctgaaacaaatctttgcaataatcctgatttacatggcgattaaaatgcttggcttcgaccccattagcatcctgttaggtctatga

SEQ ID NO: 2934 - DNA, 915 bp, synthetic construct
  source 1..915: mol_type = other DNA
atgccatcggagaaggtgaaagagtttaatgaaagcctgaaaactaaggagggaagggacaaattcttcaagcagatcttttgtatcgctatcggtaccgtggttggggtggccacatacgccttctgcctttactttaatttggcaatattcggttggaacattggactggcattgtcccctctcactgctggctacgctgaatcaattttggcgaaaaagatcctgaatgagagcacgggggcaatcagcgcctttatcctttttattattactgtcgtctacggcttcttcatttccaactctaccttaggcttcaacatcattaccgcgggaagtgccgtggtaattatccaagcagctatgccaacagctaccaactatctcctgcttgcagtaggagtgggcatcctaacgtacgtcacagggttcctcaagaagctccattctgccctgtataagggttataagaaaatatttaagcgagagcccaaacgggcggagcggtactaccagaagcaggccagccaggtgcacgccttctatgacgaaaacctggatatcaacagtctgggagtgctgataatgaccctggagtacccgcccaaggagttaaatatcatcgagcagaagggaatatatgagaccaggcacatcttcggctccaaacagaaggaagatataaaaagcggcctcgaagactcactggaagaagaggtcattaatagagtcaagctagcccgcgataagacactggtgaagctgatcaaagaggttaaagccgacggctgcaacgggctgatgcatctccacaccacttacgaaaccctcgggacagagaagggcgaccacatcgcccaagtggttatgcgcggcacggggatcgtgattgaaaaagaggaggaggaatattga

SEQ ID NO: 2935 - DNA, 327 bp, synthetic construct
  source 1..327: mol_type = other DNA
atgctgctatcttccacaagtacgctcgaaagcaagaccatactgaaataccacgggttggtgagcggcgagtcactgatcggtgccaacatctataaggatctcttctcgggcgtcagggacgtagtggaggggcggactagcacttatgctgaggagcttgacaatgcgcgcaatgaggcaattgccaccatggaagaaaaggctaaggaatacggggcaaatggaatcatcggcctgaaaatatcctataacaacctgggcggaaccatgggaaacaccattctcgtgacggtttacggtacagccgtcacatacgaggactga

SEQ ID NO: 2936 - DNA, 189 bp, synthetic construct
  source 1..189: mol_type = other DNA
atggtggaaccccacaagcattgtccggtatgcggctcccctatcccaatgaaggagagggtctgcagccccgactgcgagaaagtgctggaaatgaatcagaagaacattcgcaaaagccggatcatgctgttcgccgtgatcgttgtctttatactcgtgtgggcatacttcatgttctttaagtga

SEQ ID NO: 2937 - DNA, 795 bp, synthetic construct
  source 1..795: mol_type = other DNA
atgaccggcctgattgacataggcctcaatctcatgcacagaagttttgacaaaaaccgggaagagatcatcaacaatgccatatccaacggcgtgtcccagttcgtcattactggaacatccgttaaatcaagcaagattgccttaaactacgcaaaggatgagaaatggaatggaatactcttcagcactgccggggtgcaccctcacgacgccaagacctgcaatgagaaaacccttgacgctttgaaggagtttgcgaaaaacgactgtgttgtagccatcggtgaatgtgggctggactacaacaggaactactctccacaggatgtgcaaagggaatggttcgaaaatcaggtgaaactggcccaagagctggacatgccactgtttctccatgaacgcgaagcccacgaggatatggtgaagatcttgtcaaaataccccgagatgtgcgagaaggcttgcgtgcactgcttcaccgggacaaaggaagaggcagaaaagtacctggaactggggtgttatattggcgtgaccggctggatctgcgatgagagacgaggacagagtctgcaggaggctgtcacagtcatcccacctgaaaagatgatgattgagactgatgctccgtttcttatcccccggaacttccctaaaaagcccaaatcgaataagaacaagccggagtatctgccccatatcctaaacacgattgcagagtataaggaatgtgacagcgcagagctcggtgaggcggtcagcaagacgacacgcgagttcttcaagatctga

SEQ ID NO: 2938 - DNA, 678 bp, synthetic construct
  source 1..678: mol_type = other DNA
atgcgcattgtggtggctattggcggaagcatcctcttaaagacttacgatgcccagcggtttcaggagtattccgacattctaaaggacctgagcaatgaacatgagatcttcatcgtagtagggggcggcaaacctgccagggagtacatcggggttgcgcgcgatctgggcgccggcgaggcaaaatgcgatgacctgggcatagaagtcacgcgggtcaacgctaagctgttgttgctggctcttggagactatgcgtaccagaaggtgccccacaacttcaatgaggctcaggaatactcggcaagcggcaagattgttgtgatgggagggaccgaaccagcacacagtacagacgccgtcagcgccatactcgccgaatttgtgcaagccgacatgctgatcaacctgacttccgtggacgggatgtataccaaggacccgaataaattcgacgatgcagagctcatttcagagattaccgctaccgacatgatggatttcatccgaaaccaggatgtgaaggccggaacatacgaatttttcgactttaccgccatccaaatgatcaaaaggtccaacctcgagacggtgatcgccaacggtttcgagccccagaaccttatcaaagcgattaatggtgagaagatagggacaagagtcatcagtgattga

SEQ ID NO: 2939 - DNA, 7728 bp, synthetic construct
  source 1..7728: mol_type = other DNA
gtgagtctcaataaacttaagatcggaagagtgtttatctgtctgtttatccttgtgttcatctcgtgcagcattaattgcgtcttcgcagtggacgatctggcgttcaacgacacatattattctgatctggactctgtgaatggggactactccggttttctgagtgaaggcgacttcaatggaggctcttctgtggtcgttgatggggaaattgactcctccccaattgccaacaacaaaaagaacagttcatttgccctgacgagcaagaaggactcatcgtcaccctctatctccacatcatcaaagaacaataaaaacaacaaaaacacgtcttctctgaaggaaaacaagaccgccgccccctctagccaacgggtgttttatgaccgcgacatcgtgtctgacgaggatgtaatcggacccggtcacgaaaacttggactggattaacctaacacacgtcgacgacagcctgttttcagacaattcaaaggaagatggagccaaaggcagcaagatcgccaccaccatcgtcgcaagcaacctagtgaaatactatctcaacgccagccagttgaatgtcggcttgaaagactccaacggcaactacctctccggaaagacaatcaatttcacagtgggcagcgcttcatacattcgcaccaccaactcctcaggcagatgctccctcaccatcaacctcatgccgggcgtctatacgttcacaatcagattcctaggagactcctcctattcccccagcagcaaaaatgtcaacgtcacagtcctaaagatgcccacgagcatcaccgcaagcaacctggtgaagtactatcacaattccagcagcctcatcgccaccctcaaggacacacatggcaaccccctatccaacatgactgtcacattcaaaatgggatcaaacaactataaccgcaccaccaacacaaacggcaaagccacccttgcactaaacatgatcccaggaaacttctccgtgaaaatcagcttcacccacccacgctacataacctccagcaaaaacgtgaccgtcacggtcctgagcatgcctaccagcatcagcgcaagcaacctcaacatgacctacggcgacggcagctaccttaacgccacactgaaggacgcccataacaaccctttatcaaacaaaacaatccactacaaactcaacaacaccatctataaccgaacgaccaataacaacgggcagacctccctcataatcaacataaaccctgggacgtaccagttcaacatctatttcaacgagaactattaccagaactccaacaaaacagccacagtgaccgtcaacggcattcccaacagcataatcgccagcaacctcgtggcatatgtcaacgagtcacctactatagtcgctaccctgaaggacgcaaacaacaaccctttatcaaataagaatctgaccttcaaccgcactggcacactgacaaacatcctgaccaatgccaacggccaggccacatacaacctaaacggctgcaccggcaacttcaacatcaaaatcacattcaatacaaccggctacgcattcagcagtaaaaccgtgaatgtgaacataaaattctggccctccacaatcactgccaatggtgccacaacatacttcacagacacggtacagctctcagcgtgcctaaaaggagaaaacaacacccctctcgcaaacaagaacgtcaaaatcacatacgccaataagaacataactcgaaccacaaacagcgcaggaaatgtctattacgacttcaacgaaaatgtaggcacttacaacgtaaactttagctttaaggagaactattaccaaaatgcgtcaaaaacagtcacagtcactgtcaacaagatgccaaccagcatcactgcaagcaatctcaacatcacctatcaggacggcagcagcttgatcgcaacactcaaggacagccacggcaacccaattgccaacaagaccgtcaatttcaagatggaaacaaacaactacaacagaactaccgatgccaacggaagggcaactctcgctctcaatatgatcccagccacatttaacgtgaatatcacattctcccacccatcatatcaaacctccagcaagtcagtgacagtaaccgtgaaccctatctccaacagcataatcgccagcaacctcgtggcgtacgtcaacgagtcacccactatcgtcgcaaccctgaaggatgcaaacaacaatcccctctcaaataagaatctgacctttaaccggaccggcacgctcaccaacatcttaaccaacgctaacggccaggccacatacaacctgaacggctgcaccggcaatttcaatgtcaagatcactttcaataccaccgggtatgccattacgtccaagaccgtgagcgtgaacataaaattctggccatccacaatcactgccaacggggccaccacatacttcactgacacagtgcagctctcagcttgcctcaagggggagaacaacaccccgctcgccaacaagaatatcaaaattacctacggcaataagaacatcacccgaaccacaaacagcgccggaaatgtctattatgacttcaacgagaacgtgggcacttacaacgtcaatttcagttttaaccagaactactaccaaaatgcctccaaaacagtcaccgtcacagtcaataagatgcccaccagcatcaccgccagcaatctgaacatgacatatcaggacggcagcagcctgatcgcaaccctcaaggacgcccacggcaaccccattgccaacaagaccgtcaatttcaaaatggagactaacagctataaccgcactaccgatgccaacggcagggccacgctgacattgaatatgatcccagccacctttaacgtaaatatcactttctcccacccatcataccagacatccagcaagtccgttacagtcacggtgaatgagatagcaaccaatctcgccgtaagcaatctcaacatgatctacatggacggcagtcacctcgccgccacgcttaccgatggcaataacaatccgctggccaataagacaatcatctacaccctgggcaatgtgaactacaattacaccactaacaacagcggtcaaaccagccttatgatccacctcaatcccggcacttaccagttcactgtccagttcagcgaaagtcactaccagtcagctatcaagacagtgaccgtcactgtgaaccctatttccaacagcatcatcgccaacaacctgctggcgtacgtcaacgagtccccccacatccttgccagcctaaaggacagcaacaacaatcctatcatcaacaagacgctggtatttaaccggtcaggcaacatcactaacatcataaccaacgccaacggccaggcaagctacaacctgaacggatgcactggcaatttcaatgtgaccatcactttcaatgccacaggctatgccttcagctccaaaacggtaaacgttaacataaagttctatccatcaatcatctcagcgaatggggccaccgactattacggcaataccattcatctgagcgcatctcttaaaggggaaaataacactcctctggctaacaggacggtgcacatctcctacgccaataagaacattacccgcacaaccgacagtgcaggcaacatctattacgattttagagagattcccggaatctacaatgtctgctttaattttaaccagaactactaccagaacgcttcaaaaacagttagcgtggttgtcctgaacccgccatcgccgaatgttaacgtgagcagcggtttctacaacgtctcttacttgctgattaatgtgtcctctaacatctctggcggaattttatattctagtttggataatggaaccacttggtacactggagaggacaatatctgcttcaacctgaccgaaggcaattggtctgtctgctcctactattctttaaacgggttcaatagttccatcgtttacaataattttattatcgacggtagtgctcctcttgtgtgggcgagcaatggatcggggttttacaaacggagcttagacgttaatctcaccagcttggatatcgtggataagaacccggtcatctattacacgctggacgggagcctccctaacaacctcagtgctatttatacgggcccaatccacattaccagtaattatggcttgacaaagctgcagttctatggtgttgatagatttggacataacagttctattgtgtgtgtgaattatttccatggcaattatgtggctaatctgaatagtggaaaatactttgacagtgtacaagacgcgattgatgatatggacacgataaatggtgatgttattgaagtgaataaggacctctcgggagcttgtgatttgaataaaagtgtctacctgcgcagctcatgtctaaacaactttacttggtcccagccgaatatagttatccatagcaacaactctgtgatcgagggctttgacttcgacggaagttctatgcattcggtgattctcgcaggtgtgtcgaattgtgttataatgaacaaccggttctccgttgtggaatatggtatttggtcttcccttagtggttacaacaatgtgatcatgaacaataactttagttcttacggtttgtcaatttccttcatctatctgtctcccatttatgggggggagaatacttatctcattaaagataatatttttaatcactcacgatgcgggatctgcctcgaatcttctttgaacagtattatttccggcaatgttttcataggttccaattacggtcttaaaatcaacgggaacaacaactccgtagtatacaataatcttagttttaattcgtatgcggtgtgttgttttggagacgataacacccttatgtataataatattgtgaataacgtgtatggaatttacggagattattcaaacttgactgtaaacttcaaccggttctacaataacagtgcgttcggcctgtacgcttctggagggccaatcaatgcttgtaacaattggtgggggcataataatctttctgtaagcgaggactacggattcgatatctgcctgcagactgacaatattgactacagttcctacatcattttaaagaattacaagtcctattttgagcttcggaataactttatagacaatgtgtcttgcgtggtggatctgaactggaacaatctcaaggagtacgtgggggagttcattgatggggtaaacgttaagtttgtggacatgaagacggggccctaccctcattggattgctattgaatctggtcaggccctgtacaaaacttcatgcgtgaatcaggtgaataatgtgatcatcagtctggatgatgagattcaaactttaaactattccagtttttcctcttcggtgaggttctatatcaacactacagggttcataagcaataatagcgggaatttggacaactttgttgcgaacgaaaatggatcgtatttcacttttgatgtgattttggatcatgacgtcgattgggtcagttacgtgtggagaaacattggtgattttaaatccgagctggacctgattgttgacggggatattgtttccacctccgttgtggagagtagcttttacaggaataatcttaataatatctcaagcaatgttttcgatgcaattctgctgtataatgattggtactacagtcgtctgaattgggctaaggccgttgtgtacgtttacctgtctttggagtacaatactacggatcttaatgatgttcagtacatctatagtaacgtgaattggggatgtctgagtcctgaaaggaagaaccagctgctcaacgatcacaatattacgtttaacgatgcactgtggaatctgatacagaactcctataacttgtcagatgaggacgtgatttttattaagaatcatcacaaatcgttcaacgactctgtgtgcgtgtcggcgcactactatggaaatgacaacgagataattaacctgaacaatataaataataacacactggcttactccggaggtatggtgattggctcgtggaaggcgccgatcatgtacgttgacgggtcctaccaacactttataggtaacaactcggacaacagtacggacatttttacgtattatcacaattacgggaatggcagtatcgactgggcttactccactaactatgggaacttaactaatggcacgtacgatggcctgatgactttcacgtttgcgaacgataaggttaacggcagtgtgctgaatcactacctgagtgagaaaaatcgtacggacgttaatggcagtctggtgtactccaacgggtttatgaaggcggcctacggcagcttccttgagggtttgctggtgatctatatggatgatttggtggccgaccttgtgtcgtcccggtataatgccagctgggaaagggtcagtcccatggtgatgagtgtgcgcgacgaccatggcaggctagtcatgagcggggagtccgatttctattttggccggaagctgctgtgtgatgatgagaacataatcaagagcttttacttcgcttgctcctccgtgttctcgtccattgaacattacgtgcaccaaactctgttcccagaccgtatagggtatggggtgaccgtcgacttgggcagacttctggctgatggggagtgtctgtctatcgtggatgaaggtcgcttcatctacatctgccccaacgagagcgatgagatttactatttgtgctttgacaagctgacgggaatcctgatggacgcctccatcctcggcaacgacgcttattgctacagtaatcagcagaccgaatgggcttttaccctcggggaggagctgattgataattgtgacttgatttgggactatctgaacggactggatgtggacatttgtgctctcaatgtgtccacccaggacatgctgaaggtgtgttacgggttcaatattctatcggacctgttcacctgcgctctgctgtccgaagtgaatattcttatagaatccattggtctggaggaatctttcaatgccattgtgcccctggtgggagtactggtttcttctttggagaatatcggatcgtacgtgctggatgagtacctgtcgaaccccaagtttctgagcggtgtggtagggggcctgctgtttgaggctggaatgatcgctacatgtactggggtgggggcccctgtgggcctggctttaatgggggctggaaccatatgcacagcatacagctcagggctgatagattataatgacaatgatgggatttacttcaacaccacgctggaaaatcaggccaacttcggattttccatgtcctgtaatcttattagtggaggtattgggggtttagcatcttcttctgctttcaaagctaccgggtctgaagttatccagatcgcaagtaagaacgctgtcatcgactcaaaaggattttatactaccactatttctactaaatacgttgcttatgagggttcaagcaacactgtgagtagatacgtgatcaatcgaatggtaaactctcaaaatcctagcaaaaagatcttcattctcaagggatgtaggaacatcttagattctctgatgcaggactgcatatgggaggagcggaacaaccttctgataaagtga

SEQ ID NO: 2940 - DNA, 567 bp, synthetic construct
  source 1..567: mol_type = other DNA
atgggagtactggctagtgtggctggaggcattttttttgaagccggcatgattgccacctgcacaggcgttggcttgcccgtgggtttggctctcatgggtgtcggtacaatctgcactgcttatggcagcgggctgtttggcatgacagacacgggcaacttctactctaatctaacggatgagaacctggccgatttcggcttctcaatgagcctgaatctcattgggggagggtattccgcagccgccgcgaagtctacattacggactgtgggagggaagtcggtccagatctccatctccaaggcggcattcgccagtgaccagagaggggcatacaccactttccacaccatcagctccaaaacctatatccagaaggtggagaacggggcattcagtaactgcggcgagtacctcatcgagcaagaatttggaaccaccgtgattgaaaacatacgcaaatcactgagggtgcttagcatcgactatgccctgaatttctgttacgactttcttaaagagaactacataaagagcctggatggaggtctctacgtctga

SEQ ID NO: 2941 - DNA, 168 bp, synthetic construct
  source 1..168: mol_type = other DNA
atgaatgccgcttacggtagcttcctagaaggcctgctcgtcatctacatggacgatctggtggccgacgcggcaggggagcggtataacgtcaactggacccgcgtgagcccaatggtgatgtccgtacacgacaacattaaaggacatatcctgcccggcaagtga

SEQ ID NO: 2942 - DNA, 1359 bp, synthetic construct
  source 1..1359: mol_type = other DNA
atgaccaaactgataaaacgagaagttaaaagggagtataacgaggaaagtcctctcaagctgaagatagctaatgccatctccacttttacgaaccctcctatcatttgtattccactgtttctgctcatcagttttgtgctcgcctcgaacgggaatccgttttcaagtagtttcagctttgactggatgctctttgccaaatgcgagatcatttccctggtgtttgcctccgtcctgcctatggccatcatcatctactgggcaaagaagctgaacacggataaggacatcagcaaccgggaggatcgcttcattcccttgatcgtaggggtgctgtcctacctgattggctttgtcatcagctttttcttcgaattgccaaacttcctgacaatcctgctcctgtgttacgccgtgaacacgttcattgtcatgctcattacaagcctctggaaaataagcatccataccaccggactgagcggacccgtcgctgccctaatcatgcttcttggtcccattggtgccttattcgggttactgtaccctgtcctcatctggtctagggtcacccttaaaaagcacacaatggctcaggccatcgcgggcggcattttcgggttcgtattcactgttggtgagagctatctttatatgcgcctgtttaaaatgtccgtgccaggcttggtgccgctcgcggaatgcttctggatcatcttcgccctggtggcctgccccattgtgctgggcatttgcgggttgctggagaagagaggcatcgagtcagttattcgggccaagctattccacctattggctttcatcgggtttgcagcattctacttctacggcccctcgagcgcggtcttgattctgatcctgtccgctatagtgtccgttctggtcacaatatttgccggcgacaccttctcatggtacaagggaatcagcagaggacttgaacgggagaacttatcaatagtgctcagcctggcttgcggtctgatctggatttacgtggcaatgaattacttcaatatagaaagtgccataatcgctaccataattgtggcctttgtaggagcgattgcagagcccgtggcaatcaaatatgcgcgttataagttccccatgaagtccctgctgggcaatgacggaaacaagagcatcgagagctctgtggtggccctcatcgtgaccatgatcattcttctcttgttcactcagaacgtgtttgtttctattgctgtggggttactagtctgtctgatcgagacattcgtaccaaaggaactcgagaatctggttattccagtggcttgtgcaatcatcctcggctttctgcttcactattga

SEQ ID NO: 2943 - DNA, 3789 bp, synthetic construct
  source 1..3789: mol_type = other DNA
atgttgaataagaaaatcatcatcattttaacctttattctgatattgtctatttcttcagctagtgcatctgcagatagtacagatgaaacaatcctgtccgatgattcggcagggctgatcaacctggacaattctaacaataatctttacctggatgacaatcagtttaatttagccaattctaatagtgacaattccaataactttaatctagacgactctaactcagacaattctaacttttacctagatgaagatctggacaataaaatcaatgaaaatatcaaaaacacgaaaacgatcttgaaggagaataacagttcaattgcttccttcagtaaccttagccacattctatccaaggcctcagcgggggatacaatcatcctggagaatgattataagtacgactctgcctacgacagtcaataccagggggggattgaagtcaactccatcaccatcgacggaaacaaccactatatcgacggcaatggcgaggccagaatattctacttggcgtcagacaatattgtcctgaagaacatcaagtttatcaacggtttcaatagtcaagggggagccatctacgcaaaaggaacaaatgtcaatatcactgactgcatctttgaaaacaaccttgccccagataatgggggtgccatctatgtggaagggaatgctagtatcaaatccgttaaattcataaataactctgcaggctacggaggcgctgcatatataaacgactcctccattcttgaggacctgatcttcacaggcaatgtggccaacattgaggggggagctgtttacattgggggcagtagcaatataactaactgtatttttgatggcaaccttgcagacaagggtgccgcaatctttattccagctaaagagagccctatgactccaagtgaggacgttccctttgacgagtcagatctcaactcgacagatatggatcttgactctaccgatatggatgataactctaccgattacaatttcaccgatatggatgataactcgaccgattacaacttcaccgacatggatgacaattccaccgacatggacgattaccccgatgagagcgacgaagacttcccagatggaggcgattatgtttttcccgattggtgggaaggtgatgaatttgagtacgatggaattgaatgcatcaacgtgttcataaccaattccactttcatcaattcaaatgatttctatcgcggagccatcttcagcgagcacgacaataacatatccattgacggatgtctttttgagaacatgagctcccagtatgctccggccatctactgtaacgtcatggtaaacatactcatcaacaatacgggcttcaagaacctccatgcaaacggcaccggtggggccatggcctttctggataatgtgtatgcaatcgtcgataactgcagcttcaaaaacatctcctcctcgaaaaacggcggcgccattttttatgattccaacagttgggggcactcctctccggtgtcactcattgtcctgaactcaagcttcctgaactgctccagcgactatgggggggccatagtggtgctgggcggcggcttcaaatctaaagacagcagcttcatcaacaattctgcacggtacggggccggggcggtgcacgtctatacagattatgacattcttgtttacgacacggtgttttacaacaaccgcttgaatgaggacaatacttcatttggcggcgccctctttattgactctgccgagaaggcgatcataaataacacccgatttgtcaacaactcaaatgacgctatctacgcctatgaatcgcgaataaaaatcaacaacagctatttcgaaaacaacgatgaatacctgcgcagcatctataccgaaggactgatactgggtgacaacaagtacaatgatgacacactggtggatctggactatgaccctacatatatcattatcgggaccggagaaggcctgaagctggatctaatcaataacacaatagacgtgacgacaattcctagcagctttctggccgctgactggggctggatgagccccttcaagaatcaggacttctccggaggctgctggtgcttctccacctgcgccgcgattgagtcggcattgctcaagagtacccagaagacctatagcctgagcatgcagaacatgcagaagctctccacagagtattccaaatacggcaacaaccatattgtagaggctggatcgaccattgtggccctgcattacgccctgtcctggatgggggtattccccgaggagtatgacacctttgacatgattgggaaactcagcaggcagatcagcaccaacgagaccattcacattcaggatgcagcattcacctaccctagaagcatctcctatgatattgaccaaatcaagcagactatcatgaagtatggcacggtgaccagtgacttctacgcggtgaatgaggcgccaaacttcaatgagaacacgtcagcattctactgcaacgagacggacggccgggacgccacccacgctgtagctgtggtgggatgggacgacaactatccggcaagcaacttcctggtcacccctcccggcgacggtgcctggattattaaaaacagctacggtgaggagaactacgaccacggttacgtctacgtgtcctactacgacacagtgttcaatattgatggcggggtggcctatctctttgaaaatacggaaaactacactaaaaactaccagaccgacattggaggggacatattcctcgtgaacgacagcgatagctactcctacaagaacagctaccagtcaataggagacgattacattagtgccgtgggaacctgtttcaacgatgctgacgaggactatactgtagagatctacgtgaacaacgtcttaaaaactagccagagcggtaaatcgccatttcgggggttccatacaattaagctggaaaaccaaatccaagttaagattggagacaatttcactgttgtaatgaaaacccactcagtgcccatcgttaacacaagccgtatgcatttcaaggccaatgtgtcattcatcgacaacggcaccgggtggaaagacgcgagcgatgacaatgcgaccgtgctcctgaaggtctataccatggagacgctaagggagaatctcacagaccgcatccccacacggatcgactgtaagaacatgacaacaacagccgtggccgctgaggacggcagaatcggcaagtactttgtagtcttcctgaaggacgaaaacggtaccgccctttctaacaagcccatcaagataggtttcaatggcagggtctacgacaggaccacagatgagaacggaagcgccaagctccagatcaacctggcgtataagggcacctacacattcgctatcggtttcctcggagacaacgattatctcggcgcctttgaagtggctaagatcacggttaaagtccagactcctaaattagccacttcaaataagtcctataaggcaagtgctaagactaaaagcttgacggccacctttaagactgctaatggaaaagtggtggctaacaagaagatcagtttcactgtgaatggcaaaacttacagtgccaagaccaactccaaaggaatcgccactgtgaaggtctccctgaacaagaaggggacttacagttttacggtgaagtttgctggcgataatacatttgctgcggttagcaagaagggtaaattgactctgagctga

SEQ ID NO: 2944 - DNA, 1245 bp, synthetic construct
  source 1..1245: mol_type = other DNA
atgagtgaggtctcctcaaaggaactctatgagtttaagaagacattaaaagagctcgccgagaagaaaggcaaaggaacggaactcgtgtccatgtatgtgcccccagaaaagcaactgagtgatatcattaagcagatgagggacgaactgggccagagcgccaacatcaaaagcaagtccacccggaaaaacgttcagtcggcgattgaggtaatcatgcagagaatccgtatgattacaaatgaaaacaaggatctccccaatggttttgtgctctttgtgggcatgattcctaaaggcggccccggcacggaaaagatggagacagtagtgatcgagccgccggagcccgtgcagacctattggtacatctgcgacagcacattcttcctagagcctttggaagacatgatcgcctcaaaggaagtctatggcattgcagttatcgaccggaacgaggcaaccatagccaccctgaaaggtaaacgcataaagattaccgcccacctgaccagtggagtgccagggaagcacaaggcagggggacaaagccagcgcaggttcgacagggtcatcgagcaattggcccatgagttcctgaagcgaatcggccagcatatggatgacgacttcctgccaatcaaggatgagttgaagggaatcgttctgggagggcccggatacacgaaagaggatttctacaatggagactacatgcactacgagctgaaggacaaagtcatcacaactgtagacacttcctacactggagagtttgggattagggagaccattgacaaggcttcaggggcattggaagagttaggggttataaaagagaagaagctggtccagcggttctttaaggagcttcgagatgacaacggcctgtattcctacggcgaaaaggaagtgagaacaaacctccaaataggtgctgtggatattcttctgctctctgaagacctgaaaagcaaacggcttaccctggattgtcaggcttgcggcttccacgctgaggtgacccagaaggaaggtcagaaagtcgaggatctaacctgccctcagtgtaatgataagatgaaaatcacaaaagaggaggatctcattgaggaccttagcaatatcgccgaagacctgggcactgaagtggaaatcattagcacggagaccgacgaagggatgcagctgtacagagcctttgggggtatagcggcgatcactcgctacaaggtgaactga

SEQ ID NO: 2945 - DNA, 654 bp, synthetic construct
  source 1..654: mol_type = other DNA
atgagtgataaggaggtttatggcatagtattgtctcaaaagcttacaaaggacaacgtcaacatgggggtggtcatggggaccgagaagttcacgctgaaaaggatagagctcaatgaagatgtgcggctgaagccccaggataagatcctgattacaaaagacagcgaggagctcaaaaagaccgatcagaaactgagctacgatgacctgtccaacgaggagcagatcgaagctgaaaaggcaattcatagtatcgtgattgccaatgagaacaagtacgtgggatttttcaacaagcaatccaaggacggaacccagcttcacttactggaaggcatcagccgaaagaactcaatgaaaatcatagaggagaaggaactgaacggcgactttgaaagcttcgaggacattgacaatcgcatctccttcattgacgactcggaagacctaatcgcgaaacgcgtcctgtatgaactaagcgaactcaataaggtgaaaaaagggcggccaacttacctgtttgcctccgtgaaaaggtcatctaaaaaggaagttctggagttggatgagtttgaggatgatgacagtttcttcatcgaaaagctcaagagagagggcctcgtggagcaggagggtaaacgtatcagatga

SEQ ID NO: 2946 - DNA, 426 bp, synthetic construct
  source 1..426: mol_type = other DNA
atgacggatctgaacacttgctctaatgagaagctctccttcaaatataacgacaaatgggaattggaagccatcccactggaaaacaatcctgactgtattgctacactgagctacgaggacggcagcctactgaatgtaattgcgttccccagtgagcttgagtcgttagacatctttaaggaagttgtggaagcaagtctgcgcgatgatggggccgagatcgtctcctctgagatagcaaacgtgaacaagcggccgtcaattcagattcattccaaggtgaccacccccgaaatcagctttcagatgttctcagtcatcttcctggaggagggattcctttacatcttcgagctcagggccgtgagcgagatagtccacgaatttatggagatcgtgaaaagctttgagatcctcgaatga

SEQ ID NO: 2947 - DNA, 804 bp, synthetic construct
  source 1..804: mol_type = other DNA
atgatcatcaaggccgggaaaatcaacaaagcccgtggcaacatagtgctcacgattgggaaagaggatgtcaacaagcacaatctggaagacggcgacttcattatcctgaccagtgatgagtacgaggacctcaaggcctcctctgagattgaggtgtctacaatggaagtgattcccgatgacgaggcagtcatcaaattggaatacgacctcaaggaagctaaaagcaaggaaaagatcctgttctccaaggtggaggagctggagaagctcaatctggagttgactaccgaattatccaagattgagaaggagaattacataaataaaacagtactcaccgactcagaatcgggttctctccttgaagagatcaaaaacgtcaacgataaaaacgaggagctgaatagtgaaataaagaaactgaacaaggacctcaaggaatcagacgaggagagaatcgaactgctacaagacatgaacgtcttaaaaaccaagatgagctttgacgccggggagattagccggctgagggagagggagtcgaaataccgcgaggttttggagatcatcctaaagagtaataagaacatccttgacgaagcggtgaataagactgtgacagctaccatccatgagataaacaaggagctgtcacagacgggactgatccgcagaatccggggccttactattgttcgagagcctgaaatcagcaaggagtccatttccagcaacgcatataaacagctggaaggagtgattccggatgaatatttcctggatagcccagatgaatga

SEQ ID NO: 2948 - DNA, 504 bp, synthetic construct
  source 1..504: mol_type = other DNA
atggggtactttcggggtgagataatggaagagatcaccttcaatgaggaggggatcaaattcaagtatctgagcaattggagggaacaggccaaagagtccgtcggccccaattgcatcaaggcattggttaaggtggtggagggcaagccctccacaatcacagtgtacaaaaacgatgccggagacgccaaggctgtggcccaactggaggagccgttcaatgaatcattcaagagtcagggctggaacattgtgaaatctgctattctcaacctcaacggcaatcctgtcttcaacattgtgtccgacgcgcaggagggggataccattctggaaaacaacactagcgccatcataaacaatggaaagatgtacgtatttgagctgatgcactttaaagacttcccatacgcatataacgattatctaagtatcatggactcgcttgaatttgtcaacgaagaggagatcgaggagacggaagaggaaagcgaagaatga

SEQ ID NO: 2949 - DNA, 423 bp, synthetic construct
  source 1..423: mol_type = other DNA
atgtcaaatctcttccagaacgaccagctgagttttaaatacccaaagaattggaagctagtgagcgatgatgagatcgaaggctgcctcgccatcttggactccgatagcaagcacagccgggtgatgatatttaaataccccgaggagggcctgtcactggaataccttaaaaacgctattgaggacattccccgagaggagagcctcaaagtcatctcgtccaacctgacaatcttggcgaacaaggaaacccacgagttaattgcagaagataccagtcatgagccacctctgagaacgcattccctgacaaccatccacaatcgcgacgcctatgggttcaacttcatgggatttggtctcgacaacccggacgaagaggggttccttttcatgtataggactctgaagtttgaatga

SEQ ID NO: 2950 - DNA, 612 bp, synthetic construct
  source 1..612: mol_type = other DNA
atgactctgaaagaagagaaagacaaggtgcggaagtcaatctacgacaatctattcaacaatggattctccaaccgaccaaatggtgactacggcaaaatccccgactttaagggctcagatattgccgctgagcttttatcgaaaaccgaagagtggaaatccagcattaccatattctccagtcccgatgccgcccagacgcccgtcagatatctggccctgaaggacaataagaacctgattatggcaagccctaacctcacacacggctacctcttcctggaagggcagaacatcaaggaaatcgaagaggcgtctacgaaggagggggcctttaagcactgcagtaaaaaggacatcagcaacataaatgtggaccttgtggtagagggctctgttggagtggaccggatgggacataggatcggcaagggtaaagggtttgctgatatggaaatagaggatctgaagaagcgcaacatcatcaataacaccactcctattgcaacaaccattcacccattgcaactcgtgaaccacattccgactgagagccatgatcagagaatcaacatgatcgtcacaacccgcgagatcattagggtctga

SEQ ID NO: 2951 - DNA, 546 bp, synthetic construct
  source 1..546: mol_type = other DNA
atggccgatctgaagggtacaaagaccgaggcaaacctagccgcagcctttgctggggagagccaggctcatacaaagtatcagtatttcgcaagcaaagctaagaaagaaggatacgtccagattcacgacatatttatggagacgtccaagaatgaaaaggagcacgctaaaatctggttcaagctcttgcacgacggagaggtgccagacactatagcgaacctgaacgccgccgcagatggcgagaacgaggagtggactgcaatgtacaaggagtttgcggaaacagccaccgaggaggggttccccgagatcgccggcctgttcaccatggtaggcaatattgaaaaagaacacgaggagcggtacagggcccttctcgcgaatgtcgaaggcgaagctgtgttcaagaaagaggcagaaatcgaatggaaatgcatcaactgcgggcacatcgtgaaggcccctgaagcccccttcatttgcccagtttgtaagcatccgcaagcctacttcgaagagcgcgctaccaactttaaatga

SEQ ID NO: 2952 - DNA, 159 bp, synthetic construct
  source 1..159: mol_type = other DNA
gtgagtaagaaggaagataattgtcagatagacgactgctcaagcgggacatgcgccccagtctccccctttagcaaagagggcattctttttctgattttcatcatcgtgctcttcatcgtactgttcttcctactctggaccaacggactgatctga

SEQ ID NO: 2953 - DNA, 429 bp, synthetic construct
  source 1..429: mol_type = other DNA
atgagcgacatgtggggcctcaccgtccggggaatttgtgaatacaatgacaagatcttgctgctaaagcttcgctccatctcggcccacgacccatgcaaatgggagattcctggcggcaaggtgaaaaagtgcgagtacttcgacagcgccttaaaaagggaatataaggaggaaaccgggatggacataagcatcgacagtctgtaccacgtgattcagaagaactatactgcctgcaagacgggagagaaaatcaagtccatacagctgatcatgaaagtgtcaacaaacagtgatgaggtcctcattagcgatgagcatgatatgtacgggtggtttacaaaggaagaaatcaacgatatgatcaaaaataacgagctgactcccccggcaaaggcggctttctgtaaaaccctgctcgtatga

SEQ ID NO: 2954 - DNA, 507 bp, synthetic construct
  source 1..507: mol_type = other DNA
atgagcatgctttccaactaccgcctaaaggaactgctgaaaaaggagtcggaaatgactgacgaggagtatgagctatttctcaacgaatttcggaagagtgagctcttcataccaatccaagtggacctcgattccctggacctgaaggacgtacagctgaatgagatcaaccacatcaatcaggagatcaacttccgactgaaaagctacgagagtaaggacaaaaaacggaccatcccgcttttcaccgacgagcatgagattgaaagactgaagatgaacacaacggtcggctcattgttcatgagggacctgtgcgagtcaattatgcccatccgcgacagctttgaccagataatcattaaccctaaaagcgaaaagtcctttaagatctctgtggatgagttcttggatttattcgatgaggatagggaatttgaagacctgatgaaggagattgaaaatgatgaagagttcattgagatgatgaaaaaggaactctga

SEQ ID NO: 2955 - DNA, 405 bp, synthetic construct
  source 1..405: mol_type = other DNA
atgaccctctcggacaataagaagcttaagaaattgctgaagtccaaatctagagtgaaaatcgaaaacaatccgaacctcttttacaaggagttcttaaagtcaacgctctttgtgcccgtgattgccattaacgaagacgagaacctgaacgatggcgacacactggacctgcagatcggattcttcgatgaggaaaatggcgaccggaacatctatatctttaccgatagcaatgagatggagagggcagattataagataacaagtatcgcggtaaacatgaaagagctaagtgtcatcctgtcccagtttgacatggacttcgattacattgtcattaatccatatgggcctgacagctacaagatagattacgacgagttcaaaagccgcactgaatga

SEQ ID NO: 2956 - DNA, 480 bp, synthetic construct
  source 1..480: mol_type = other DNA
atggattttaaacgggaaaaatacatcgaagtgttaatctacatcatcgccaagaccgccaacaagaagaatgtgggcaagacagtcctcgcgaacatgctgtacttcatcgactttgactactatgaactgtatggtgagagcttgaccggagagacttatttcaagacaatcaacggcctaaagccgaaacacttcgatgacactctgatagacctgattcagcgagacataatctatctgaaacgcgaggctgattacgacaacaagctgaagaaatactacattgctaggattcccgacaacaagctgtcaaaaaaggagtactttgtgataaccgatgcactcgatagattctccaaccttagcgccagcaagttcaattacattctctccaaggacattccatttaagagtgcaaaaatggatgggcagatcaattatgagtgcgtattccatcggcttgaaaaaacgaattga

SEQ ID NO: 2957 - DNA, 723 bp, synthetic construct
  source 1..723: mol_type = other DNA
atgatatgtccatcctgtggaagtgaaaacaaggaaggttctaaattctgcaaaaactgcggcgaaaggttgacggatagttctcgccctaccagcaccaacgcgtccgcttcatctcaatcaaagagcaataagaatcttctgattatctgcgccactatcattatctgtgtggccgtggtggccggggctatcctctttatgtcgggccagtccacggattatgaggtggcaagcggggaggcgactaacgaccacagctcctctgccctcaacagttacgactcctccaactcaaatgatgaaagtcaggacgactccgcctcagcaagtgaagattcgagcgactcggccgatgagtataacaagaatcacaagtggggaaagtccttccaggaggcaagcgagtatttccccgaggcttctgagacagtcgttacacacgtgttctatgaagccgacattgacggaaatggctttctgaccgacaacgagtttaaagactttaagagcctagtcagcttcactcgaaagtacgcagctgatgtaacaaacaatgactacgtggacacccccgacctgtgggagggcgatggaagcgttcggacacgctactgcgccgatcatgggagaatcgccgtgggcagtgatgacaggtgcccgtactgtgctaaaaaagggcaggactcccgtacccggagcggttcaaccagatacgtctga

SEQ ID NO: 2958 - DNA, 849 bp, synthetic construct
  source 1..849: mol_type = other DNA
atgaacgaaatcattgataattacaatgtgaatgaaaagatcgagatcgacaactttgaactggaggacataattagcttgggcgtgaacaatctgaccattgcggacgaagaggagttcttcaaactcctgaaagaggcccaactgttcattctggtgcaattgaacaaggaagaagtctttgacgtagacaatcagaaggtcgtggaggtcattaagccgatccctccactgggcttcaacttcatgacactaactgtcaatgaaaacgagcggtcaattgttgcattcacacgaaaggagatcatcaaggaaatcgggctgaaggctgaccacattgtaatgaacatgagagaccttgccaagattctcatgggcctcggagataccttctcctccatcataatcaatccccagaccgagcattcaataatgatcagcatcaacacattcttaagcctctttatggagaaacccaaaaatccatttatcgggagtcttgagcagactctcgacaaattgaaaaacgattatgtggaactggacaaccactacatgtttttcatccgcagcgactacgagtttatggagaacgaaagtaaagatggcgtctttgtggcaaagatgcctctaagggcctcgaccgatcctaacttccaggccaaccttccaatactgcacaagctgatgatgatggaaggtcagaaggtgctctacacggggaatccgaacgaggagcagaccgatttcgatgtgctgatcgctcccggaactgagtttgaaaagtactatgatgaggacggagacacgtccgtttggcggtgcgtgaaacagcccttctatgagtga

SEQ ID NO: 2959 - DNA, 429 bp, synthetic construct
  source 1..429: mol_type = other DNA
atgcaagacgaaccaaacaaaaaaataaacagagccaaggatgacgagaacttactgttcgcccggggagaagtcattcgactgatgaaagaccacctggacaaggacaagatgatcacagaaagggtcaaggttgaaatgaaccggttcctgagtaatgtgctcgtagctgtgtgtgaggaactcaacaaatacccctacaccaccattgattacgagatgctaaaggagagcacgtatccgtatacacgcattaagcagatcaatcaggaaagggagagaatcctggtgcacctgaatgcgatcaaggccgattgcgatgcattgggcatggatatcgagaagactcttaagctcaacgagtccgacggggaggactcagactttgtgcctcataccagccgcgtgaaagaggacgatggcgagtga

SEQ ID NO: 2960 - DNA, 1446 bp, synthetic construct
  source 1..1446: mol_type = other DNA
atggacaatgaatttaagatcaactatctgcttaacatactgaaaaccacgccaaaggtcgtttccgacaggatcataaaagatcagacaagattgaattttagaaaggattattatgacctgaaggaaagcattgataattttctggagcacgacactgatgatcgcttctacatcttgcccggcctccgaggagtgggaaagactaccatagtcttccagctttacgactacctgaccaacgagaggaacattaactcaaatcacattttatacctggatctagaccggttgaaggaccagggaccattcaatctcctggagtatcttgacattttcataaaggacatcaatgaggaagcctatctcaacaactggccactgtttattttcatcgatgagagtcaatattccagcaactgggatcatgtcgggaagatcatctttgacgactataagaacgtatttatcatcttcaccggttctgacgcactgaaccttcagagctcgatggactctgcccgacgcagcctgaagaaggaaatctatcccctaaactttgcggaatacctgtacctgaaatacggctgtgaaattcctagaggcatcagtgattccatcttcaatgccatcctcttcaatgattttgagaatcttatcaaagacgagcgctacattcaactgaatgtgtacaacaagttcaaacgggatattaacaagatttgggacgaatacatccagtatggaggattccccttaagctttgctcgaaagaaccacgcttcaatcatccaactcggtctggacatgaaaaatcgcatagtagagaaggacctcgacatcgtgctgagtgtgaactcacagacgcggctaaacacctactcgctcatcaatatcctcgctctgcagaagcctgggaccctgtcctacaacaaattggcaaagaacttggagatctccaaaaagaccgtgggcaacctgttgaacgccctggaatgcacacagatgatcttccacatagagccgcacggtgccattacaaaaagaaaccgtaggccctggaaatactacttcctgagcagccagatgaaagcggccatctaccaaaattccggccaggcaactaaaacaaaaggggaatatatgggcattctcacggagaatctggttggatcactgttattcatgatgaaaaacaaacggaagcaggattttgggattttctatgaggaggaaaaggagagggctgattttctcatcaataccattgatggtcggataatcccgattgaggccggctacggcaagaagggcaagaggcaggtgataaacagtatggaggaccatgggagcgagtacgggattgtggtgtccaacaagactcagagcattaaaatcgaagagaatgtcatcttcctccctcttaagacattctctatgctgtga

SEQ ID NO: 2961 - DNA, 693 bp, synthetic construct
  source 1..693: mol_type = other DNA
atgactgaaatagattggtttaaatttgaggatcgcgactacgattttcccttctacaaaaagaacccccacattagtaaaatgggctggctcgtgctgttctttgtgtttatcattggaagcatcctgagtatgagcgataagctttcctattcaattctgtgttgcatcgtctttatcgtgccagtattatatttcctcgactgggactataaggccatatttagaaagccgtcgctcaaggacattgccctggccgtggcactgtttatcggatatctgatctacgctatcattatgggggcgatcctcgaaagcgttggtatagtgagcagcggcatcattgaccctggaagcatagactggacagtactaattaagagcgtctttagcctgatgggggaggagtttatcaagttccttccattcatcttcttcctcagggtgctgtacaagtacacggataaccggaaactgagtgtggtgatttccgtcgcgttggtgatggccatgtttgcatccttgcatgcttacaattgggtcatgttcatctacgcactgttcatacagggcttcggctcaattttcgagttcttcgcctacatcaagaccaaaaacatcattgtttcctacatcacccactattgcacagacgccttcatcttcgctatgctactgcttgggttgggttga

SEQ ID NO: 2962 - DNA, 1593 bp, synthetic construct
  source 1..1593: mol_type = other DNA
atggataaagaaacaaaagaacggctgggagaaatccgggctgcgatgaagaaatacggctttgataagattttaggcgaaagcgctaagaacaggatacgcggcaaagatgaggaagaagagagcctgctgttggatagtgaagtgccagtcaagttcagattgatgctgcaggaactggggacaaccttcatcaagctaggccagctcctaagcaccaggcctgacatggtaggggaagatatcgcaaacgagctcgccaacctgcaggacgacaaccctgccattagctatgagcaggtgaaggcaatagttgaaagggagctggagggagacatcgacgagctctttgccgaattttcacatgagcatctggcgaccgcatctatcggtcaggtgcacgaagctaccttaaatactggggagcacgtggccgtcaagatccagaaagagggcatcactgacaagattgatctggatataaggataatgaaatacattgccaaccgggccgatcggctgtccggcgagcttaagaaggtgaatctccctggagtgatggaagagttcgaccgcagcatccacaaggagatcgactactacaatgagtttatgaacatgcaaaggatcgagatgaactttgtggacaatcccaatgtccacattccagcgacctatcccaaatactgtacgacaaaggtccttacgatggagtttattgccggggctaaactgaatgacgtttatgcaagcgaaggggacgagtttgacaagaaactgcttgccaaaacggtgattgactcctatctccaacagttgctcattgacggattcttccatggagacccacaccccggtaacatcatgatcctggaagataatgtgttgtgctacttggatcttggtatgatggggacctttgatgaggacttcaaacgcaatctcgccgaggctatcctgctcatcatggatcaggacatcgacggcgtgatcaaccaattgatgtacatggacatcctggactatgacattgacaccaagccgctcaagcgagacctaaacgatctgttcgggagatacttcggagtggatcttaaccgattcgacggcatccttggcgacctgctgaaactcatgcaggaatatggagtggtcctgcccaatgagctggtgacaatggctcgtggggtctccatggttgaggcaatcgcacacaacctggaccccgagattgatatattcgaatccctcaagcccatcgccaagcgaatcgcccgcgagcgcctagatcctaagagatacctcaagtcgaagaaatcgaacataattctgtatgagcatatgttccgtgccttgccacagctgctgactagaacagtccacaagattgagaacgaggagctccagttccggttcgaagtggatatcactgataaggtttctattgtagcgttagtgtccgctcttatcgtgggttcatctgttgtgagtttcggtccaagagcctttgatatgccggtaatttcaattatcggctacataattgccatcatcctgagtatcgtcggcatacggaagtttgtcctgaaatga

SEQ ID NO: 2963 - DNA, 498 bp, synthetic construct
  source 1..498: mol_type = other DNA
atggacattaggaaagtgattggaataatcctgatcattttggggctgatctttgcgatctacccagtgtacagcgcccaagcagtctcgtggattgccggagtagctctcatcgcctttggtattggcctgatcctcgacggattctccatctggagcatgatggctggcgttagcgcggctaagatcttgctgggcatcattgcggccataatcgggttcatgttcctatacaaggtggacgccctgtccttcattattgcctatcagttctatatcattggctttatcctgatctttgtcggtctgcttgggatttttatcgcaatagatggaataagtcgggccacagccatactgacgttaatcctggggataatttgcattatctgtgctttcttctcacttagccagcccctctacaccgcagtgatcgtgggcatctgcatgatcatggaggggatcaccttcctcgcaagtggcatcattgatgaatga

SEQ ID NO: 2964 - DNA, 795 bp, synthetic construct
  source 1..795: mol_type = other DNA
atgggacttgcgaaggaggctagggacctggaacgggaaaacaaatatgacgacgctttcgagcttgcggaagaggctaggaaattagaaaaaaatggaaaatatgatgaggccattgaactgatcctgaactatctggaccaaaaccctcaatacaagacgattgactactaccacttcgcaaatcccatagaggagatcctatttaacgtgtacattgaggacatcgattcagtgaagacactgaatctggaagagtgtctggagctgatttatttcaccctggccagagcatatggcaaaaagggggacaaggagaaggaagagaaatacctcaagattgccaacaagatcaatccggtctcggccatcatcctgctccgcctctgcaagtactgccagtccatcaatgagaacgagaagatcaaggagttggcccccgacatcatgaaatactcctacaacagcaagatactgatagagagttacctcacactcgccttttcctacttggatgataagcaggagaaagaactctataaccatctcatgcagttttaccttactgtagaaaccgggaccgacttctgggatagcataaaggaagatatcaaataccttgaggagcacgagattcaggtgggcttcaatccagaaatgttcagcatcctaaaatatttgattgccctgcacacaaaacagggccgggaagacactgcaaagtatttcaaggacatcttgtatttaatggaggagtttaccaagtctctgaacgaactgcgatacgatagttga

SEQ ID NO: 2965 - DNA, 1014 bp, synthetic construct
  source 1..1014: mol_type = other DNA
atggattgcatcaaaaacggaataatgggccagattgtaggtgatgcgctgggtctgcctgtgcaattccagccacgggaagagcgggacatagaccccgtgactgatatgatcggggatggcgcgttcgagctcccagctggcagctggtcagacgacagcagcctgatcctggcaacaatggatggcctcattaagagtctgaatggagacaatgtggacagtacaagcctcaacgatataatcgactgggaaattatcatgagaaactttagtgactggcttaatctaggggagtacaccccatacggattttccttcgatatagggggagccacaagggatggcatctacaactatgacgacggttgggagcccctggaatgtggtggcatcggcgagcgcgacaacggaaacggctccttaatgaggatcttgcctattgccttctttatttattacttatccaaaaaatatagtttcatcgaagaggacaagatgacggccgttcataatttgtcgtcactcacccacagacacaagcgcagccagatgtgctgcgggatctacgtgaacatcgctctggaatttattgataatttcgagaatgggaagtgtctagaccttgaggaactgatatcctctggcattaacaaatccaaggagtattacttcaacgacgactcattcgaggaagagttgcaccattttgatcgagtcttctcgctgaacatccagaatctcccgcgtgatgaaattaagagcggtgggtactgcatttcttcccttgaggcaagcatctggtgtctgttgaacaatgagaactacaaggacaccctcctgactgccgtgaacctgggatacgacaccgataccacggcctgcgtcgtcgggggcctggcagggattttctatggctatgaagatatccccgctgactggatcactcagctcgccaaactggactacatcgagaatatgattggaaagttttctcaatctcttatcgattga

SEQ ID NO: 2966 - DNA, 408 bp, synthetic construct
  source 1..408: mol_type = other DNA
atgtatgatttgacaaagatccagaagacgttcaacgagagggtattcagccgattagacgacgagattctggaaagaaatggcattgataaagatgaggaactgatacgcgaagagctgtttcggcagagggaaatcatcaccgtgccatttggacatattgaatatttcctggccattgaggacgaaaaggtcctactctacgtggagaaggcaagccgtatgggctcccacaacatctgcatcatcgacgatgatagttacgaatgtatcgacgtgtacgacgggtatccgcccgagctcaaggagagataccttgaccacctcaagcgcatcaagaagacccggaaccggttcgaggagaatctgaaaaaactgtcagaagagaaaagcataaaggagaaatga

SEQ ID NO: 2967 - DNA, 966 bp, synthetic construct
  source 1..966: mol_type = other DNA
atgcagttcgggaattatgcggtggagatcagcagcgagaatgagaaccatctgatcaactacctgaaattcaataacttcaagtacgaaaaagatctggaaaactgtagcgagaaagaggaatatgtgattgtcatcaacatcatcgagagaatttactacaagatcaagaattatttggctggccccatactctctgaaaaggacttcctggataagatcaactacaataagtacagcattcacaaaaaggcatactcaaacgatggcaatcttatctacgagggttacaccatctacgaacagggctacggggaaatcgcctatggtctgggcacatcctactttccaaacggcaataaatgccacgagggtgtgtttgaacgtaaaggattgctggagggcaaggaattttactcaaacggccagttaaaattcgaggggacctatggacggtgccgcggttatggaccacactatccgagttttggaaactactactcgaaggacgggcaactgctcttctccgggaagttcaaggtcactttcggcggggtcggctatcccatgatcaaggaacctaagtacaagctccttgagaaaggcaggccacggtacatactcaaaaaagatgaggatatcacaaagctaatagagaagaacaccaatattgagaacaagaagtaccctatgacttttgaggaatttgaagagaaggtgctagaactcttcttcgaataccatagcgacgaatttatagagattctgaagaagagattggaggactataagaagattgagcctaactttatgaaagccctgtacaaacactcctgttgggtgtatgacagtccccacatctatggagacacgtgcaaacttcagttcgagaaagagcggctccgacattatcccgtatatcgcctgagggtgattgttgggctggaggacggattcaggggatga

SEQ ID NO: 2968 - DNA, 567 bp, synthetic construct
  source 1..567: mol_type = other DNA
atgatcagcattaatattaaagaaatgagaaaggagaaaatctatgaaggccgggtaaagatgggtcacggggggcggggtacaatccgtctgcataactccaatatcggagaccaattatacgtgatttttccatcctacggcaagaaggaagacaaggatgggaacctggaaattgatgagattctaaggaagaccgttgagctgggcaaggacggcaaaaataacatcgatttcaacagggagtaccggggccgcaagtgtatcatcattaagagggaaagtctgataaaactggagttcgccaaatggaaaataatctatgatggcatcgtcaagaaatcgttcaatggacaggggcttatacgcgtgaaggacatgttcctcggagagagagcatttgtggtgtttggggaaagcctcaacgacagtaacgagaacattatggtgtcagttaatgagatccgcaacaagggaatccaccccgacaatgaccacacgagccgagtcttgctttctaaggattacgtgaactgcaaatgcctggtggtcctccaggaggcgtga

SEQ ID NO: 2969 - DNA, 1491 bp, synthetic construct
  source 1..1491: mol_type = other DNA
atgagcaagattcatctgtccaaatccaagtactgcaaatgcgtccaatgtgaaaagatcctttggctcggccggtacaagcccgaggtggcagcggtggaggataaggagacgatttttgagaacggccgaaaggtgggggagcttgccaaaggcctctttggagaatacgaagacatagaatttgacataaccctcactcagatgatcgagaaaaccaaaaaactgctggaggaaaaacccaatgtcatcaccgaggcctcattcagctatgaaaacaatttctgcagcgtagacatcctcaaaaacgatgaagatggagtggaactctatgaagtgaagagctccacatcgatcaaggagatatacctggatgatgttgcgttccagtactatgtattgtcaagcctgggcctaaacgtgaagaaggctgctctggtctatgtcaacaatgaatacatcaggggggaagacctggacattagccaatattttatcatcgaggacattactgagattgcaatggcaaagcaggatgaggtcagggccaatatagagcacatcaacaactttatggaggctcacgatcgagacaatgagcccaatatggagataggaatgcactgttgcaatccttactcctgtgatttctgggcatattgtactaaggaattgcctaagccaaacgtgtttgacatttctggaatgtataagtcccagaagttcgaaagctacgccgaaggcaaggtcagttttgaggacctccgcagtgccaacatcaacccaagatacctggagcagattgactttgaactaaacgacagagggcccaaggtagaaaagcaggccatcaaagacttcctgaactctctgaagtacccgctgtactttattgattacgagtcctgcaattatcccatccccgagctggaggggaccaagccttaccagcagattcctttccaatactctttgcacattatcaaagaggagggcgctccgctggaacataaggagttcctaggagacatcaacgacaaaaacatcatccgtaccttcgccgagcatatgataaacgatctccaggaagacggtagtgttatcgtgtacaataagtctttcgaatcggcccggaatcgcgagattggagagatgtacccagacctgaaggggcagatgaaccggatcaacgacaatatggtggatttgatggtgccattccgccagaggaactattacacgaaggagatggagggctcctattcaattaagtatgttttacccgctttatatcctgatgatccggagcttgactacggcaacctgcccagcgttcacaatggtggtgaggcgtcagacgccttcctgaatctcaaggggaaaagtccagaagagcaggagcaaacaagagaagatctgcttaaatactgctggctcgacacatatgccatggtgaaaatctgggagaaattcaaagaagtggcaaaatga

SEQ ID NO: 2970 - DNA, 348 bp, synthetic construct
  source 1..348: mol_type = other DNA
atgaagctgcggaacctccatctggactataaagatgagaatggagacctccgctacgagcttcgaaacggggcccactccatgaaagatgcagaaggcttctctcccgaggagttttactccagtctggacaatgtgatcagagtgcttagccccaacaactcattccggccaattgaagcctaccctagcaataacggaccgaaggctctatttgggttcctgttttatttcttgaagggtatgggctgcaaaaagggcctgcagaaggagtttgattacctggagcagttcatcgactatgaaatcgacctcttcatgatagtcaacttcctgagggaattatga

SEQ ID NO: 2971 - DNA, 756 bp, synthetic construct
  source 1..756: mol_type = other DNA
atgcccctggacatcattgaggacatatggaagtatacaaccaacaacaagacatttctgttaatcatactggtgctcttctacctgttttgtatgttcatgcagatcttcgatgagatgaggatctcctatgcactttacctgtcaatgataccttacattttcattgccggctacggaatggccataactaaggacgtaatcgacaatggaaagcgcctccccaaaatcctcatcaaggacgtcattgttttggggatcaaatccactgttgtgttcatcgtctatctgtctgtgcaagggatctttttcagtctagtcagctatctctgcaattttccaatcattgatgtggaagacctattgctggatttttttgaaacagcaccgctgctgtttcaccacaacctcgtgaacacgctgatctttattgtggtggatttcgccgttttctacttcaccatgttcttcatggagatgggactggctaaacttgccgacaccggcagattcttggatgcttttaatctgattaagattaaaaagattatcgatataatcggctggcgactctacgcgaagcattataccgtcattatctttcttctgtgggtgttcagcttgctgatcgacgtagagacgccattctttgtgcttgactacatcttcaaagtctttctcggtttactcctgttcattactcagtattggggcataggggccgtgtaccggatctacaaaatcaagaccaactga

SEQ ID NO: 2972 - DNA, 294 bp, synthetic construct
  source 1..294: mol_type = other DNA
atgattagcagcgaagaaaaggagaagatcaaatcagatatcgtggagaaagtcaattcagtcctcgaaaaatataatgagtcgttccggatggacaaggtaacggtcctgaacagggccgaaaccgtgaagttcatgggaagttacagggtgtatgagagacggaactactgcagcgttagtcgcgagatcaattccttcctgaacaagtacggggacgtggagataaaatccaaaaagattcgagacagcggcatgaagtttacaaccgtgtcctttaacttcgagctatga

SEQ ID NO: 2973 - DNA, 822 bp, synthetic construct
  source 1..822: mol_type = other DNA
atggcagagaatgagataaagctattcaacgacaaacagatccgtactaaatgggatgaggagatcggagactattatttctccgtaatagacgttatagccgtccttacagaaagtagcaatccaagcaggtactggtcagagctgaaaaagaaaatctgcgaggaacagggccagccattcgaaaatatcgaaaggctgaagctgcccgccaaagacggtaaaatgagactaaccgacgtcgccaatacgaagcagctcctgcgaatcattcagtcagtgccctcgccgaaggcagagccttttaagcaatggctggcccaggtgggatctgaacgcctcgatgagattgtggaccctgaattagggatggaaagactgaaatccacctaccgcaagaagggttactccgaaaaatggatctctcaaaggatgagatctattgagattcgagatgatctgaccgccgagtgggaccgggtcggggtggaagagggcttggagtacgctattctgacaaatgagatcagtaaggcatccttcggcttgacgactcggcagcataaaaactataaaggcttgaagaaagagagcctccgcgacaatatgaccaatgcagagcttgtgatcaacatgctcggggagctggctaccactgagatcagcaagacagagaaccccgggggatttgaagagagcaagcacgtggctaagcggggaggcaacattgcgggcaacgcccgcaaggagctggaagctaacacagggcggaaggttcttagtaaggccaacgcgaaggataagaacctcctggaaaactga

SEQ ID NO: 2974 - DNA, 294 bp, synthetic construct
  source 1..294: mol_type = other DNA
atgatcagcatcgaagagaaagaaaagattaaaagtgagattgtagagaaagtcaatagtgtcctagaaaagtataacgaatcctttaggatggacaaggtgaccgtcctgaatcgcgccgaaacagtgaaattcatggggagctatagggtttacgagcgacggaactacggctctgtgtcaagagagatcaactccttcctcaacaagtacggagacgtggagatcaagtccaagaagatacgggatagcggcatgaaatttaccacggtgtcgttcaatttcgagctgtga

SEQ ID NO: 2975 - DNA, 786 bp, synthetic construct
  source 1..786: mol_type = other DNA
atggacaatcgcaatatcctcatcattattggcatcatagtcctaatcgctgcagcggggattattctagtgatgcttacaagtgagaattatgaacgaatggagatcgtgccaaacgggacaagcatcgacgttcccctgaacaagaccacctacgacggcgaatttcagtcggcgcgggtgtggcactgggacaagggaatacttgtcacatacaatagccatgaggataaaaacattctgagagtgagtgaactgggcatttacacgctcaataagattatagaaacgggagaaaaggaaaacatcgatggattcaccagctatgtcataaatgccgatgagatactggaaatcgagctgttcgacgccatcaaactgcactacaccggcaaattctattgcattcctttagctaacggtactaccggcgacgttatcatcatctgttccaacgacagggacgaggcagttcacatggccaaatcaatccagtacaagaatgtctttccggtaaacagcgatttcaataacaccatcgaaactgtggagaacctgagcgagtatctggagtccacagtgaacgactacgcaaacagcaccgattttgacaacgccgtgtccactgtggagaacctcactgggaatctcgagagcagcgccaaggattatgtaaatgatgccaacctgagtgacgtcaagacaaccgtggaagagaaaacgggtattaacatcgatgatgctaagtccgacttggagcaatacatcgggaagttgacatcatga

SEQ ID NO: 2976 - DNA, 231 bp, synthetic construct
  source 1..231: mol_type = other DNA
atggcagagctcatggacaagatatttgtagtgatagggtacattctggcaatcctattcccaattgtcggaatcatcgtgggcgcgctcctgtatttcttgaaaaaggaagatgccttctaccagacacacgggaaatacataatcatcgtcggcattgctatgattgccattaacatcctgcttatcgcctttggcatcattaccatcccgcccgtgggacaggtttga

SEQ ID NO: 2977 - DNA, 861 bp, synthetic construct
  source 1..861: mol_type = other DNA
atgaacgaaagtcaagacattgaagaaaccaccaaggtagacaactcgcgtctggaggaactgctccagctcttcaaggatgaccccagtcctcagaatgtgcaggagttgggtgaggaaatcaagagctcacagctatatctgcccgttgtctactcccaaagcatgatcgaagatatcctgtctggagatgtgggggaagttcgggaatttaaggagcctgccggcttcgatataaacttcctcaccaataacaggggagagaaggccattccactctttacaagcgacagaatcatggaagaggcggggctcagatcctctgtgattgtcatgcatgtggaagacctggtcgactcccttcaggggaccgagaacacttaccagctagtgacaatcaatccgatgactgaaaccggcatcgacatgcccatcctgacctttttgaacatgttcaagaaacgcgagatgagtgaggaggagaagcgcttccttgaatctatgaatcggatgttagaggtgctggaaaaccactcaatagcccttgaggagaagacggcattctttaaccgaggcccccaggactttatgaaagaggtggctgtcgatggggtctttgtacctaacattcctttcagcgtgagcacaatcaaggagttcgaagaggatgtttccccatacctgaacatcattctgatggacgagggaaaaaggatagtctacttcggagagcccacggaggagaatccgtttaatgtactgttggcaccaggttgtgaaattgagatggtggaagaggtggacgagttcacaactgtgtggaaatgcggcaatcagccattctatgatggcatgaaatga

SEQ ID NO: 2978 - DNA, 144 bp, synthetic construct
  source 1..144: mol_type = other DNA
gtggccaaagccaccaacaaatacagaggggactacatcacaaggctgaatgagaccaagtatgtcgaatttaacatcggcaacgcacccaaggctatgatattcagccggtgcgatattagcaagggcggacgcgagacgtga

SEQ ID NO: 2979 - DNA, 321 bp, synthetic construct
  source 1..321: mol_type = other DNA
atgtccttccccacacagatccggaatgagcaagaatttcgcctggcacttctgcattttctgggcgatattaatgtggggctcgtgtataccaagaagtttttcaaggagtttatgggactggacaatagcgtccggcagatactagtgaaccagatcaagaacgcgttgaagaacccaggttgcggcaagttcatgagtcacaactacaagggggaaaaagccgttagggtagacaagcgatatagactgcacttcaaatacgataaaaaagagaacctcttcgagctcgtcagcttctacaagaaagactaccagtga

SEQ ID NO: 2980 - DNA, 1332 bp, synthetic construct
  source 1..1332: mol_type = other DNA
gtgagtaatgaatgtctcagatgtggctatgccaacgaggacaatgaaaaattctgcatcaactgcggtgccaagcttatggaggctgattcaagtattccagacgatataatctcgtgttatttttgcgggtataaaaaccatgaggacaacaagttctgcatcaagtgcggcacgaggatacatcacgaattgccctacgaaaacgaactgacggagatttacactagatacggcgatgtggtggacttcaacaaagtttcctacaatatttattacaaatacaacctccctcaagactgttttctcctaaacagcgagcttaacaactacgaaaagtatcacgaggagtatgatatggaatgtcccttttgccatcagaactccttttccgtgatagacagcgacatcagtatcgggagcgtgaaaattacggagttccacgaagacgagtaccactgcagcagctgtggtttggagattaagctgtgcaagaaggatgataaaaagattcccgggcgccgctacctgatcgccaatatggacaataaggagcattggatctggaagaaatacggcaagactccgctgtacaaatacgaactggacgaaatcttcaatggagggctcagtgatgacgacaaggcaaggctactcagcatccacgcggattataatcgaaaggccattaagatagtcaatcggttcagcatctatgtttctgtgaggtttgctgcagagatcctatcggaggaggagaactctctcaagccaattgacaccaccttctttctggatgacgacgaggaggcctacttcatgttcacagatatcgactacagcaagcctatggtccgttactccacttttgggcagtcccagggtacctacgatgcagtcacttacggccagtctttcgataacgcgttttcctatttgaatgggcgctcattctatgccgacacaatgggatatttttccaccagcacatactcttcaaccgtatcgtatgaaaaggtcaaggtggtagacaggggaattttactgttaaccaacaaacggctgatattctcaggctccatccacagcctggatatcgacatcgacaagatcctgaacctggttcacgaccgccagtcccttatgatccacgtcaaaggacggagcaacattgtgaaattctctaatctcgatagtaacacattctatctgaatctggatggcagacaactgagcctcaactttacaggctacctcctgcggaccctgattgtgaagttcatgagtccaaagaaaaagcgaaatctgttgaaatcaaaaggaagcctttga

SEQ ID NO: 2981 - DNA, 318 bp, synthetic construct
  source 1..318: mol_type = other DNA
atgaacataagtgagaaaataaaagagatgcagggggatttgggcaagtatcatgctctagagaaaaaggaaggagagtgcggcctggaaaacctgattatgctcattctgaatgacgggggccagttcggaccgggcaaaatcatcggtgaaagctccgagtttctggactttatgttttacaagcggcaagggccaatcttctctctctccatcaagaaggaacaccttagcggattctcaattttccacaaggccatcgacgatgagaaacaggcagcggccaacattggcatccccaaggccctgtaccagtga

SEQ ID NO: 2982 - DNA, 324 bp, synthetic construct
  source 1..324: mol_type = other DNA
atgaacttcagtgagaaaatcgaggaaatccaggggaaagtcaagagctacaatagcgagatcaaaggcatgaagaacattccctcagaaaagatgatcagggtgatgatggccgaaggagaaatacttgagccatgcatgatcattggcgaaagcgacgagtacattgatctgatggtggtggacctggacaaggggccggtattcaccgtgtccatcaaaaaggagcggatagttggatttggcacattccacaagcctctggatgagctcgcctatcccgaagaggagctaaacgcggtcccagctgcattgtacctctga

SEQ ID NO: 2983 - DNA, 309 bp, synthetic construct
  source 1..309: mol_type = other DNA
atgcagataatagaaaaagtggagaaggaactggagaaactgggcctgacagtggatacggttgccaacgaccacatcattgaggcgtgcgtgaccaaggtctcattggaggacaacctcagcaaagtaggtatcgatttcgaccagatcgagaagaagctttatccctactccaccttcgtcattcaaatgattcagcatctcgatgaagggggaagtactgaagacatgatccgggccttcctaatcgaggctctgaattacagcctggaattaggcgacgcatttgggatctctctcgaggagtga

SEQ ID NO: 2984 - DNA, 249 bp, synthetic construct
  source 1..249: mol_type = other DNA
atgaacaaacagaacgtgttcgcactgatactgctaaccatcatcctgctcagcgtagtggcggtcagcggctgcatcggaaagagctctgataattcagccagcgactcatcgggggattccgatgattccagtaactccatttttcacagtggcagcgacagcgacgacgatgataacgatgacaataatgacaaggacgacaagaacgataacgacaaagacgacaaggatgatgacgacgactga

SEQ ID NO: 2985 - DNA, 639 bp, synthetic construct
  source 1..639: mol_type = other DNA
atgataggtgacgatgacttcttcatgcagaatgccgactatcactatggagctagcgactcagagaagatgtacggaaggggctatgatggctcttcagactatgttccaagatacagttcaggaggcagctatgggtcctcctctggggcagagagcagcgaagacggtagcctcggaaagtactgtctcatcggcattttgatcgtgcttgggatcgttgtctttgcgaacatcggcattcccgctattactaactccctatccagtagtgtgacagtggatgacctgaatatcacccgctacatctactcgaaccagtacaacagcaaaatcaccaccgattatggataccagattacatacaaggagcgaagctatggccagcatgccacgaatgtgattttctattcgaaaaacgggaaagtcctgtataatgacagccagtacatgggcacttgctacctgggggaagtgccgtacatcatctatttcgatggcaaggcagactacgccatcttcgaagtatacaaaacccaatttgactccggtgagtgcatataccgggaacgggtggacgtcgataacaagaacgtgataaaggagtttattaattacgatacactgtacgatgactga

SEQ ID NO: 2986 - DNA, 786 bp, synthetic construct
  source 1..786: mol_type = other DNA
atgaaatactgcaagatatgtcgtaaggaatttccccgagacctcatgttctgtccggagtgcaactccttcttagagcctgtaagccactcgaaaacccttgacgaagggattgtggagcacggaatcaaccggatcatcttctttgatacggaaacttccggcctgaatcctaactactgcaagatcatcgaactgggaatgctcgtcattgaggacgggaagatcatcgaggagtatgataagcttatcaatattggggaacgcatagatagcacaatcacaagaattaccggcatcactaacgacatgctgatcgatgagggcgtgagtgagggggacgtcgctcaggacctcaaggagaaactgatctcaggcaccctaatgatcgcttataactgccagtttgacttgtccttcgcctacggtctgctgaaaagacattaccctcacgaggcagaggcaatcattgaggatgtgaaatggctagatccaatgaccgtttttaaggaccgcaaggcctacccccacaagttcagcgatgccgtggagcattacgacatcaggaatgtgaacttccatagggcgattggtgatgccaaaggcttgtatgaagtgtgtctctcactgaaggacgaacgggacgacctgggagaatatataaacgtctttgggtataacccacggtacggaattaacggcctcaaattccccttcatagaatacaagaaacactattacaatgatagtatggttagcccaaataatattctgcccaagatttga

SEQ ID NO: 2987 - DNA, 948 bp, synthetic construct
  source 1..948: mol_type = other DNA
atgaaactggaaaactttaaatacgagaccaatgacaataatttgattaattattatgaaattgacaacgacaatcccatactgcttatcatccacgcccaaagcacaaactcaagtagctattctgatgtggtgaaggatcttagcaagaggtttcatttgatcctggtggattgctacggccacggcaaaagctcccacaacagggacaagtacaacatagtcagtcagggggatgacctaattgattttatcaagtcgaaaactgatgagaagatctctgtactgggccactcctcaggtgggctcatcgcctgctacatctcttccagaagtgacctgtgtgacaacctgatactggaggaccctccactctttagcagctctggagagaaacggttcgactattacaactaccacgacctgtccaccgtctgccataacttcatcaatcaggatgaggagaaggactttgtctattactacttcatgaaccagtatatgtggaacttcttccccgaaagctcgcgagaaaagatccggaacaaatccggagcaagtgcactcaaataccgcgaaaaacatccagataagcccttgaaggttcgcttctggccgaagaacgtgttagaggcctttaatggtatggaggagtatgacccttacttcggagagaacttctataatgactccttcaactgtgatatcgactacgctgagctactttcaaacatcaagtgcaaaaccctgtttctcaaggctaacacgaagatcggggaagatggcattatccagggcgccctgactgatgatgacctcaatcaggtgatgaatctgattgagaatattgaggttgaatacttcgactgtggccatgggatacacaacgaaaagaagaaagaatttgtgaaagcggtgatcggaaccacaaagattttcacaatttga

SEQ ID NO: 2988 - DNA, 3282 bp, synthetic construct
  source 1..3282: mol_type = other DNA
atgatgcggaagacaattttcggtgttatatttatcgtgtttattctgttcagcatttctacggtgtcagccaacgatgctcaagttgacatgctgaacgatgctagtgatgtggaactgaaccaggacttgaatgcgcagcccatctcatcgaattgctacgataacaaccagaatctgaaggctcagcctatttcggactgctctgatgagctccagaaatctgacgacgatctcaagctgtccgaggggggatcaacaagtttcaagcagctgtgtgaggatctgaataagagcgacggcgagttcaacctaacgcacagctacaaacacgatgagagtgacgaagagaatacagcggtgttttatatggagaatctggtgataaatggcaataataatattatcgatagcagcaaatcaaatttcaactttaaattttccaatgaagctaacatcaccatcaatgacttgacgttcacaaacttcaacaaatccctctttgtgatcagtgacagccaattgaccttcaacaacgtgaactttactaattgttccagcaatctgtcattgattgcgatcatgtttccgagcaatttgactataaacaactgtaacttctactcaaattcatttgccaattatctcgacggaccctttaacaaattagagatctataatagcaactttgatgggaccaactgtctggattctgctattaaagagaacaggggccagctcgtcatcgaaaattccagcttcgagaacttcaccggggttcatggaagcataataaactacaagggggactatttctctattaaaaactccaagttcatcaattccaattcaaacttcactggcggagctatcattgtaaagtatttccccattgcctacgaggagggagattcatttgtctaccgtcactctaatgacatgctgatcgagaactgcacattctacaacctttcgtcttccagcaacggaggtgccatccatcttgacctggattcaggctctgaagggatcgtcgaaactttaattgtcaagtcttccaacttcacagactgccactccaagtttggaggcgccatatccatcctgggcgggtacctcaacatctcctattccaacttccagaacaatagcgccagcttcgaaggcggggcgatctactccagttggaccaacgcaaagatcgaaggctctaattttacggccaacgaaggaagtcagaacgccggggcattatactttgacaagggtaaactgaccatcaacgactgtaagttcattgataacaaggcgctgaaggaacgggagcgcactgccaacgctatctacgctcatgacgtggcggcctatttctccaattccacttttgacaacggaggagtgtcggtgtatgcagactttgcaagcgacagcaaaattgagaacgtggacaaaaatgatgacatcttcctcatggacaaccacgattacatcgtttcagtggaaagcaagggaataaagctgaacctcaccggaaatgagattaatgtcgacagcctcccctcccacttcgacgcccgagactggggctggacaacttctgccaaaattcagggagacaatactgactgctgggctttcgcaagtatttcctctctggagaccagctttgccaaggcctcgggggtgttatacaacctcagccagaactatcttcaaaagctccaactgaagtacttctattcaggagacaagagaaacagcttgacaggcttttcgtatagcggtccaggctatgctcttagctggtacggggtgttgcctgtggacaatgggtatgatgaccgcggcatgatcgccgacactgaccttgaggatgaaagaatccacgtgcaggatgtgctgtttattgataccggcagggacgacgcggtggaattgataaaatgggccatactgaaatacggcgctgtcacggtgcagcgaggcatcaacgggccttacggggaactaccaaccgaaggggacgacatcgccatcatgagtcatggtacccatttcatctcactgattggctgggatgataactattttgaactggaggagggggatgacgatccgctccacaaattcgcgtggatcactaaggactccctgtccggtttttcgacggctgactacacaaaattcgatgccatagacaactacgcaattgtcccccagagggctgcagttgcctacatcttcgaaaatgacattgactatcacgtgaactatcagaccgacctaacgggactggtcgggttcgatgccaattacaactactactccaacgagtttgtgtcgaagtatgacgagtttatcggcgccgtaggcacctacttcaacgagtcaggcatcgattactcctttgatgtgtacctaaatagtgagaagatgcttagccaaagtggggtgagcgagttcgccggtttcaggacaatcaagctggatgaatatatccacataaaagcaggggatgtgtttaaggtcgtctttaaaagcaactccatccctttccaagcttatagccgccagcattacattgaaggtatgtccctcgctagcgccgacggtgagagctggagtgacctggcacctctcaataagaccgtatgccttaaggcctacaccgtgaaggaggacaaggaggtgagtccaagccgcgcctccacgaagatagattgcagtaacatgaccaccacggccgtcgcaagtgcagatggtcggattggagagtacttcgttgtcacactgaaggaccagaacggcacagtgatcgccaataagccaattaagattgggttcaatggccgggtctacgacagagtcacagatgaaaacggcagcgcaaagctgcagatcaacctcgcatacaagggcacttacaccttcgccatcggcttcctgggtgatgagaactacctcggagcatttgaggtggccaagatcactgttaacaagcagagccccaagctggcaagtcccaacaaatcatataaactgaccgccaaaaccaaaacactgaatgccagccttaagagtggcaatggaaatccagtaagcgggaagaagatcaccttcaccgtcaatggcaaaacgtatacagcgaccagcaattccaaaggagttgctactgtgaaggtaagcctaaacaagaagggcacatacagtttcactgtaaaatatgctggtgatgatacctttgctgccgttaccaccaaagccaaacttacaattaaatga

SEQ ID NO: 2989 - DNA, 1146 bp, synthetic construct
  source 1..1146: mol_type = other DNA
atgacaaaactgggcatgggcatgatgaggcttcccctgttagacgaaaacgatttcaaaagcatcgattatgacgaagtaaacaagatggtcgatctctacatggaaagtggattcaaccacttcgacactgcattcgtctatcacgagggaattggggaagagagcctgcgcaagtcggtggtcgagcggtaccctagggactcgttcaccgtgagcacgaagttgcctctctttgtgatcactgaggagagtcaactcgagggtctcttcaagcagcagctggataattgcggtctggattactttgactattacctactgcacaacgtgagcggtttcacggaaaacgcctggaagaacgtggacctgtattcattcatccagaagaaaaaggaagatgggtttatcaagcatattggcctgagtacacatggaaactccgagttcctggacgggattctgagcaagcaccccgaattggagtttgtactgctgcagataagctatctcgactgggaagatgaggcaatcgagtcccgaaaatgcttggaagtagccaagaaacataatgtgaaagtgatgatcatggaaccatttaaaggcggattcctggctgacgttccacaggaggccgagaagattatgaaagactacaatcccgacaaaagcgtcatctcatgggcgatgcggtttgtcgccaatctcgatggcgtgtgccttgttttcactggggcgtccaactccaaacagctcgaggagaatattgaggagtttaaaaatgctgatccgctgaacgacgatgagatcgagattctaaaggaggtgtctcaaatcattaataagaacatcacagtcgactgcaccaaatgcagatactgtgtggacaattgttcaagcaacattgatatagcaaagctcttcgacatctataataagcacaagctgcttgatacagatgagtggaccccccacggcaacgcttacttgaactactccaagcttccagacgtgggcattgcctctgactgcaccgaatgtgagatctgcatagaggagtgtccgcagaagatcaacatacctgaagttttaaaggacgtggccaagacctttgaaaccggcatctacggatttgggaatgaatga

SEQ ID NO: 2990 - DNA, 201 bp, synthetic construct
  source 1..201: mol_type = other DNA
gtgagcgaaatacccgttgccccagtggtgcgcatcctcaaggaggcgggggccgagaggattacagatgacgccaagaaagcctttgctgacgcagtggaagccagcgctgaggagctggctaaaaaagtcatcaaggccgcagcacacgcgggccggaagaccgtgacggtagatgacatcaagttcgtctgcgaatga

SEQ ID NO: 2991 - DNA, 2208 bp, synthetic construct
  source 1..2208: mol_type = other DNA
atggggttccttgataatgtcaagaaaatctttgatagcggtgaaaataaagaggtgaaacctcggaatggtacgggcaaaatcgataaggtggaatctgtggagagcaaaagtaactatgtgaacttcaatgaaaaggatgagcagcaacaaaattcagaggacctcatcaacgacgaaatcctggatgaatcaacctccaacgagacgagaaacttcacatacctaaataatctgatccatagtggcgtgaaggagatcattttggattcggatatcgtgtatgggaacgaggatgaggaatccaggcatggcattaaactgaacctggataaccttgttattgacggtaacggctacactatcgacgctctgcgagcaagcgagatctttatctgcgatgctaggaatattgtgataaagaacattacactgaagaatgggttctctcaccaggctggggccatcaacaaccagggagagctgactataatcaagtcttcaatcaacaataacgaaggaaagctggccggaggcattttaaatctgggtgaactgaccctggacgaaagcgtcatcgctaaaaataaggcagaacacactggaggcatacttaacttcttcgggaagcttagcatcactaaatccaccctcaaagagaacatcggcattggcaataaggcgatctctaataacggcggggaattgaccataaataagtcccggatcattaataaccagattgacaccaagactaattttgtgaacaaagccaggacagtcttcgttaacaaagccattaaggcgcgccgtgacgcggttattagcaatgggggttatctgcggatcagtgactctgaaatcctgagtaacgagagcaagtacataattttaaacatcgagttcagccgcatctataatacgatcttcaaggctaatgagtcccagtatatcatttacaatgacaactatgaggataacggattgagcagtctggggatctttaactgtaagtttatagaaaacaatgccaaggcatccatagtctacaacgacggaaacttgtgttcaatagacaatgccctgtttgaaaacaatgccagccacaaaaactccaatattattacaaataaaagtaaccttacactgaataacctgaaaataaaagacaacggaaaaaacatactcaacgacgattacattttcattagaaacctctcgccacaaatcgaaagtaaaattattggagaaggtctagctgagaatatcaaagatatcaagccccaggaggagaagtttgattttgggtatctggacaagaagatccatgataacaagaccggggagatcatcctcgaggaggacattcgattcgagaactatgaaatggattattacgagggcggaatcgagctggacatggacaacctcgtcatcgacggcaagggacacacaatcgagggggctaagaaatcacgcatcttccttattacgggcaagaacatcaagctcaaaaatataatttttaaaaatggattcctgtacaaagactacgacaacctcatgaataaccagggaggcgccctaaagaccaactcgaattgctccttgactgtggagaattgtaagttcctcaataacttcagtcaggacggcgggggcgccatccacagcaagggcaacgtagacattataaagagcatcttcaccagcaacaccgtaaaaatgtttggcgggggtggagcaatcaataatgacgggaatctgagcattcgcgagtctaccttcaccaacaacagcgccgagcggtacggcggggctatttgcaataagggagagatctccctgtttgatagcacactcacaaacaacattgccaaggtgcacatttttaagacctcctacggtaaaggtggagcaatctataacaagggcaagttgactattagcaactcctcattatccaaaaacacagcccagatcagcggtggcgcaatctacaactggaagcataatgaaagatacgagccgatcattacaaagcagaggggcagtgaagccatgtgctacgagggggagctgataataaccgaatcaaccctctacaacaacactgcggaggagtcggacggcgccatctacaacgaaggcaagatgaatatcaccgattgcgacatcaataacgactccaataacaagaacacgtga

SEQ ID NO: 2992 - DNA, 1407 bp, synthetic construct
  source 1..1407: mol_type = other DNA
atgaccacgttaaaactgacccgactcaacgaacccaacattgaaaagctgtacgagatgaaatccgccctcagaaacatcctggaagagggggatttcaaaaatctcaacaccatactggacttccaggacaaggacggtagcttcaagctattctccacctaccgtatcccctcagatgcccgcgtggacttctgccatgagccaacttacatctgcagttccattcttatgaaggcctaccttacaggtgattctgaattgcggcagaagattgaaactccactcatccacggtctggaacggtgttgctgtcgaaacctgactggccacgggtacgattcgctacaaggacagatcgacgccctgaacatctttatgaaaggggggcttagggagtttattgatctgcaccccgacctgaactcaaaattcacagaaatgatcttgaacatcatggtcgaatttgatgctcgcgaagagcaaggcatcttcaaaggcacctggggcgaagactacaaggaggacatactcaagataaacgagtacttcagcacgagaaaagtgtttgtgtatggtactctcatgaatggagagagcaaccatcacttcctggaaaacagcatttgtcttggcaaggctgccattgaggggtacgacatgtataatgtaggcggatggtatcctgcgattatacccggaaattcacggatcattggggaactttacgaagtgccggagaatgacatggcgagtatagacatgctggaaggggaggggagcctgtacattcggaagtgtgagatcacaacgggcaacgagttggcatacatctatgaatacgctcaggacaccgaaggactcgagaagatagactcgtggaaggattacgtctggtacgtgtcctatggcagcaacatgctcgaggagcgcttcctgtactacatcgagggaggatgcttcgaaggcagtgcctcctatcgatacccttgcgaagatcccacaagaccgctggagaaacgcgccatcgacatcccatacgacatgtactttgggaattattctgggagctggcacggaggtggagtgtcctttttggataccgagaaggaaggccatgcattgggcactgcatatctgattacaagagagcagtttgagcacgttgcagctgaggagaacggcggacgccccccaaatggtaacggctattggtatgagaatatcattaatctaggggagatggatggctttgagatgctgacagtcaccaataaggatctcagggagtataacaggccttctgacgaatatctggagaccttagagcggggcatcagggaaaactggcctgatatgtctgaggaggacatcgatgactatctgaatagttgcatcagggagtga

SEQ ID NO: 2993 - DNA, 1059 bp, synthetic construct
  source 1..1059: mol_type = other DNA
atgaagcaccgcctgaatctcgacaataaagaccccaattacatcctgctcaaagaaatcttcaagattatggatagcagagaatccaaacgcatcttggtctcctatgggtttaagaacctcaaccggacaattttcgcttttaaaatcatcttcataagcatgttcttcgagattgacatcccattcatcctcaatgagctcaagtccaatcggcggctctgtaagttccttaatatttctgaagtcctgactgcagatcaggtgtataagatcttttcagaaataaacagcgagaaacttataaaaagcctgaaccgcatcctgaacagtaggaacatggttaaaaggagaggaaagaagaccttcattgtggacgcgacccccgtggacttagatattaacttccacagaaacaagaagacgaaggagcatctggagaagattaatctcaaatggagttattcgtcctccaagggttattatatcggattcaaggccactgtggtgatggactacgactcgatgaatcctgtgtgcattctgatccatagcggggctcccaatgatgccggtctttttgaagagatcctggagaaccttcagaagagacgaataatccgaaaaggggacacactgatctttgacaaaggctactacaggtataagaactaccagatcggcatcagcaaatacaaaatcattcctttcattttcccgaaggaaaagttcagccgcacccgactggatgacatcctgacatacccactagccgtctttaacaagacaaagcggatcatgaaggagaagcggttgtacaacagtctgaaaatggagctgatgaagaagattgatagttgggaaaaatttaaaccaatcaggggcaagatagaagattttttcaaattactgaaacagggcctgaacatgcgtgagatccacaaatatactctcaagagcgtagagaagaccgtttacctaaatgtgtttttgggcgcactgattatatcacagggattttactcaaagacgaccattcaacaattgtccgagaactga

SEQ ID NO: 2994 - DNA, 2427 bp, synthetic construct
  source 1..2427: mol_type = other DNA
atgaacaatgagacaaacgctttcactggaaacaacccagaattatacaataggctcaagagtagcatcaacaacgcagagagtattgatatcatagtttcttttctcatggaatctggggtgaaactgattatcaacgacttaaaggaggccatttccaaaggcgtggagatccgcatcctgactggaaactacctgaacatcacacaaccgcaggccctgtatctgctgcgcaaggaattgggatataatctggacctccgcttttacaatgttgccaataaatcctttcaccctaaagcctatatctttcacaatgaatcagacagtgaaatctatataggcagctccaatctctccaagggggccttgaccgactcgatcgagtggaactaccactttaaaaggtcaaaaaacctcgaggacttcgattccttttaccagaacttcgaggatcttttttacaatcaatcgaccattgtggatgacgaggctctgcgcgattactccaagaaatggaccaagcctcggttccccgtgaaagaggctgaaagtattgaagaatatacacagacccctagcgagaccctatttgagccacggggcccgcagatcgaggcgctgtatgctctggagcggagccgtgaggagggctttgacaaggctttggtagtggctgccacaggtattggaaagacgtacctggctgcattcgattcgatcaaatataaaaaagtgttattcatcgcacaccgggaggaaattataaaacaggccgccaagtcgtttaaaaatgtttttccaaccaaaacgattgggttcttttacaaccagcataagcaaaccgacaaagacatgatattctccctggtccagacattgggaaagagcagctatctgaacgacagctacttcaagagagatgaatttgactacatcgtggtggacgagttccaccatgccgttgccaacaattacaagaagatattggactacttcaagcctaaattcctgctgggccttactgcgaccccggaacgattggacaacagggatgtatttgcactgtgcgactataacaacgtctacgaaatccggctgaaggaggcgatcaacaaggggtggctggttccattccggtattatggtatctacgacgatacaatcgactactccactgtcaacatgaggaacggcaggtatgatgagaaggatttagaggagaagctgatgatcaaccgccgtgccaatctggtgtaccaccacttcctgaagtacacctctaaaagtgccatcgggttctgcgcctcacggaaccatgcagaatatatggcgagctatttcaacgagcacggaatagctgccgcgtctgtctactccggcgagcagggggagcactcccagaaccgccagaaggccatcgatgatctgagagatggcaaactccgaatcatcttcactgtggacattttcaacgaaggtcttgatctcccctccatcgatgaggtgctcttcctaaggcctacacagagccccacaatattcctgcagcagctgggcaggggactgcggaaggacaagggcaaaaagtacctcactgtcctggactttattgggaactacaaaaaggcgaatatggctcccttcctactgagcggtaaagactacgattcaagaacccttctgcgagaggctgtcctggactttgagtatcccgaggactgtttcatcgactttgatttccagttggtggatctctttaagtaccaagcaaagagtgaacttaaggccaaggatagggtggtcattgaatttaattctgtaaagacggagttggaccaccgtccaagcagagtggaactctttctgcatatggatgatgccatcatcggcgcaatgaaaagaactcccaagattaatctcttcaaggattacatgagtttcctcaatgacaacaaagaactcatggacgaggaggaggagtttctaaacagccccgcacatgagttccttaaggccattgaaaacacgaatatgaccaagagttataagatgcccatactgcgagccttctacaacaatgggagcatcaagatggccatttcagatgacgatgtctacctggccatgaaggagttttacgactacggttcaaatggggtggacatgctgaaggataaaagctctagagactataagtcatggtccaagaaagactacgtgaatcttgcaaagcgcaacccaattaagttcctcaagaaaacccatggcgacttcttcattgacaaggaaggattcgctttggcacttgctgacaatctagaacagttcatcaatctcgacagcttcaaacgccactttgaagacattattgaataccggacccttagctattataaggatagatttgagaaaaaacaagtatga

SEQ ID NO: 2995 - DNA, 579 bp, synthetic construct
  source 1..579: mol_type = other DNA
atgagtgaaaattactatgactccaacgcagacgactttttcaacggaactgtcaatgtggacatgagcccccagtacgaggactttctcaatgaaattccgaaaaacggccacatcctggatgccgggtgtggttcaggtagggacaccctggctttcaagtcattagggtacaaggtgaccagcttcgacggcagcattgagatgtgccgactggcaagcaaccacaccggccaggaggtcctccatcttcagtttcaagagatagatttcaaagagacgttcgatggcatctgggcgtcggcgtccctgcttcacattccaacaagtgagatagatgatgtgttgaaacggctgaaaaagagcctaaagaaaggaggggctttctatgcctccttcaagtacggaagctttgaaggggagcgcaacggacggtacttttatgacctgacagacattactgccaaggaactcttcacaaaaaacggcttcaatatcaagaagatctggtttacccaggacgccaggaaagagagagaagatgagaagtgggtaaacatcctggccatcaaggattga

SEQ ID NO: 2996 - DNA, 630 bp, synthetic construct
  source 1..630: mol_type = other DNA
atgatctgcccaaactgcaacaaattctataatgataattttgccttctgcccacactgcggtgcggagaaaccagagcccctcacgtgtcctaagtgcggatttaaaagtaatgaatttaagttttgcccgaagtgtggcgctgagctgaagaaaagcgccattaaaaaacccaccaagacctgtagcaactgcgggcatgagaatgcaattaaccggaagtactgtgagagatgtggcacggacttccccagagaagagaacaggaggttcgagacaaaaatcgagcagcccaagcgcatcctgctggactacgtgaataaattccagatcgaggaaaatattaaaaaggaaattataaacgatattaacaatgagaagatcactaccaagactgagatcaccatacgggtccgccaggcccaaaaggagaagaaggagcaggacaagatccggaaagagaaagaggagaaggaaaggatgctcgaaaacgaatactaccgcaactccgagacaaacactcagtatcacacctatgatgacaagcctgacgtgttctacggagggaacgagtatcgtgaaatcgaagaaaacacactaggcgaatacaattactaccgagaatattga

SEQ ID NO: 2997 - DNA, 540 bp, synthetic construct
  source 1..540: mol_type = other DNA
atgacagaatacaccatttgtcccgcctgcaaacggaaaaacagcattaaagagaagtattgcttagactgcgggcagaaactaatagaagaaaaggaaaatgaaatcatcagggatgataaactcgagattccaaaggataagatcatccttctggatctgaactacactctcatcagcaactcctggaagatacgccacgaggagttgcctcagaagatcctgaagcgccaatatgaggacgaattggtggaaaaaattaaggacaactatgtgattctcatcacagctagtccctataagaccagctttgactcactgaagcatattgaagagaataccgacctgaaaatctctgagtcctactggaatttcggcaaacgacctcccgagctgaaggagtactggctgaagaaagcggtcctgccaagtcacggcgatgactcaagcaagtaccttgcactcgagtccaacaaggacacgcgggagatgtacgccaggttcggaatagaggccagaccgaagtcggacttcatctga

SEQ ID NO: 2998 - DNA, 837 bp, synthetic construct
  source 1..837: mol_type = other DNA
atggaatattatctccagcagctgacaaacaaccacttggagtacctgttcgagctcaaatttgttaccagtgaatttgaactgcccggcttggctgacgacatcgactgcaagaaactagaggagtgcgggaagaaatcagagtccttacggattgacggactaggattcgacaacaaaacaaacagctttgtgattatagagtacaaaaatcagtatgataagtgcgtcattgatcaggcgaagtgttactataagaatctcctcgacaagaaagaagcatacatcgaaaagtactacgaaaagttcggcaaggataaagaggtggaatttgacttcgataagacccgtgccataattatcggcccggagttttctgagcaacaaaaaaacagaaaagatccagattttgacttcgagctgtacacagtatcgctgtgcaagtacaacaacaagatttaccgcgccctgtacaagaaggtggactcaaatttcaagcgggagctgtacttcagcagcgaggatttgaaaataactcgctgttccctgctggagaacaagagcgacaaagtgaagaagctctataaggacttcgagaacatcctgtttgaacgattcgatgacgacttcattcttgatatcaggtacatcgtggacggggtctccattaccgccgaaaaatctagcatctgcctgctccgggtcaataaaaagagtatcaagatacatttctatactgacgagcttgaagatgaaacccttaatcacgagaacatctgtgatgtgatcgacaacatcaatacgatctataatcagaagaggagaaataagaaatga

SEQ ID NO: 2999 - DNA, 561 bp, synthetic construct
  source 1..561: mol_type = other DNA
atggaaaatcccgtcgatattacggccattgacggtatcaagcggatctcaaagtcctatgacattgataccagtgagtactatgatgacggactgtatatcagctggataagccttatcaagtccaaaaacgacactgtatgtccagactgcggctctaaactgatgccgttgaccctctgtcccagcgaagagatgatggagctggatgagatgggcttcgatctggagaaccataattattactgccgaaattgcgactacgagctctacatcgacgttctaaacatcgactgcgagaatcaccctatagaatgtgcgtacctctactataagctggacgaaattacaaaatacattcggcacaacgaatactccgacgaattgaagtcgaagatggactactttgatgacgaggagttcaacgcattcatcagtaagctgaaggaggtcgattacatctacgaggacgaagaggggtatgtgaaacttgtggatgatgtggaaaaccactggtttaggcattacataaaatataagcgcttatgcagagagctgtga

SEQ ID NO: 3000 - DNA, 120 bp, synthetic construct
  source 1..120: mol_type = other DNA
atgtccattgacaagctacttctggaaatctacgaactcatcgaaagcgaggattatgagaagagcctcgagctgtgcaaccagatactggagttcgacgagaacaataaagacgcctga

SEQ ID NO: 3001 - DNA, 1500 bp, synthetic construct
  source 1..1500: mol_type = other DNA
atgcgcatgacccccagtagtcactccagcctgaaaaaggcttttttcaaaaagaacacctacggcggcatcaccatgaataagatcaagttgaccaggcaagacgaacccgattttgacgagctgtaccgcatgatcggagaactgaaagacttcctgaaagaggatatgggctctcgaaactggatgaagaatctcgagacgatcttggatttccaggacaccgatggcagcttcaagctatttacaagctacgaaataccatccgatgcaagagtggacttctgccacatgccaacatacatatgcacagccattctaatgaagtcatatctgattggtgattctaagttaagcaaaaaaatagacaggcccctcagacgaggactgaaggcctgttgcatgcggaacctcatggggcacggctatgaggcactggaaggccagatcgaagcactcaatatctttatgaaagcggggctccgtgaatttatcgatctgtatccggacatgagtagaaaattctccaagatgattagcaatatttgtgggtcgaattttgaaatgctagagagcctgaggaacgctttactgggcccctggggggaggactacaaggaggacatccttaagataaacaagtacttcaacacacgtcgggtatttgtctacggaaccctcatgaatggtgagtcaaaccatcatttccttgaaaacagcaactgccttggggccagcactgtggagggctaccagatgtataatgtgggttggtatcccgccattgttccgggagatgggatgatcattggcgagctctacgaagttcctcaagaggacatggctcggatcgacatgttggaaggggaaggcagcctctacattcgcaaatgtgaaatgacttcttccaaatccctcgcctacatctacgagttcctggaggatactgaagggctggatcggataagttcctggaaggattacatctggtatgtgtcctatggcagcaacatgctgtacgacagattcatttgctacattgagggtggatcatatgaagggagttcctcgtatcgaatgccttgcgaggacacttcagcccccgtggaagtgagagccgtcgagattccacatgacatgtactttggaaattactcggggtcatggcacggaggaggtgtgtccttcctggacaccgagaaagatggccacgcgctgggcacggcctatctgatcacacgggagcagtttgagcacgtcgcagctgaggagaatggcgggcgctacccagacggaacgggcaactggtatgaggacatcatcagcttgggagatatggacggcttcgagatgcttacagtcaccaacaagaagcctagggagcagaacgagccatctgaggaatatctggagacccttaagcggggaattagggaaaactggcctgatatgtctgaagaggacatcggtaggtacctgaatagttgtatccgcgagtga

SEQ ID NO: 3002 - DNA, 843 bp, synthetic construct
  source 1..843: mol_type = other DNA
atggtgaattacggggacgatagtttagagaatccggatgatatcacgttgcccttctttgcatatgggatctttaaacctggcgagattgcctactcgaacatcaagaagtacattggcaagaaaaatgaaaaaactatcaactacgctatgaaacagagggacggcgtaccaatcctcctgcccgaagagaacaacggaaagacccacggttatatcttcaagtttaatgataacgaacgggcttatgacacaataaaccataacctaagcaataaactgtatgagtggggcaccattgaacaaggaaagatcaacgtgctgtttggaaaggaccccgacatcggcagtgacgatattgggccagactttgaccgagagaactacaaagggaaggacgacccctttttcaaggaggcgcttgccatcaaacagtacgtcgagtcaaacgatttcactagcaaagacgacttctacgatctgcagaggtattacatcctgctgtggagcgcaattgagcggtgctgtaaactgaaatacaataaggagtccgacggtaagaaccgggaggagttcagcaaggaaaaggagttcattgacgccctcgacaagtgcgacgaaaccaattatcgcgaaatctacaagacagatgatttgacgcctagaaaattcgacaccgatgagccaaagtggtgtatcaactactactatactctcagatgcaacattgtgcaccgtggcaaatccaatgtcaatcgcgatatgggactgcttctgcaggccaccaaggatctactcaacatattcgagcacatactcgacgaaacattcaaggaagagtga

SEQ ID NO: 3003 - DNA, 414 bp, synthetic construct
  source 1..414: mol_type = other DNA
atgaagaaaatcatcctggggacatgtatcctcttcctcttgatttcagtcgcatacgcgggcactgtcgatatattcaccgcccccagccccttgcaaccactgggcaatagtggtttcggagatggacagggccataatatacagatctttgagtttacggaaaacctgtacaaaacctggttcgagaatgataccgactacgtggtggagaagtatgaaggaaacaacggtctttatctgtatgccgatgacgaaaacgactgcgggattctcgagattgttgagaaggacggcaagaagtacatcgtaaactcctggacgccgaaagggcctagcgaagctcagaccgtggtggagaacttacacgactttaatgagctaaaccacctgactccaatcacaacactgtga

SEQ ID NO: 3004 - DNA, 954 bp, synthetic construct
  source 1..954: mol_type = other DNA
atgaatattgattacgacggccacaacagtaccaatcccaacaataactcgatcgtggaaaacaacaacaacaatcagctaagtcttcaagttcctcagaaatatgaggactatgacataattgaagaactccaatgctttaattgcaaccaacataccttcatccagctgaacaaaaagtcccttctctcaaataaggtggtgtactactgcacgaattgtggaatgtccttcgagaagcagggcaatggcttcaagctggtggacatatccgacaaaagcaaccgcatgtgggagctgtacaacctgaaaaccctgacttggcccgagtgggagagaattgccaatggaggactgtctgataaggaccaggcggagaaggacaagcagctcgccatcgaaaaacagaaggaattggaactccagcgcaaaaaagatttggagatcgtagtccaggagctggccaaaggagaagtgaacttaaagccagtcagcagcccagttattctgaaaaagaatgagactgcttaccttagtctgcccaacatcacactaagcgagcctcgggccgtgagagtgtctaagtcagggggatatggcacttcataccggtttgctaaggggttcagtgtgcactctggtgtgggggagagccgaagcgtttctcatgatgaaattatggcaattgataccggcacatttgtcatcaccaacaaacgggtgatcttcgtcggcaataagaagtcggtaaacatcgacttgaagaagatactctccatgaccgtctacaaggatggcatttccatccagagggagaataagcagaagatcgaatatttcacaaaaacaaaccgtcactccatggactttacgatcgacgggaggacccacagcctgccgctcgagggttatttcattaaagcaatcatactggggcagatcgccaacctgtga

SEQ ID NO: 3005 - DNA, 849 bp, synthetic construct
  source 1..849: mol_type = other DNA
atgagaaaggaacggatcaagagctacctgggaattatattcgaccttctggtgattttagacttgattctaatcttcatcagcctgccgatccaaggccttcacttgattgactacgcagggtttgtgcgagcctttgacctgacaatctgctttctcctactcatcgagtttttttacggactctacaaatccgatgctaaagccaaatacttcaaagaacatttcctcgacctcatcgcttcaatccccttcgacttgatcgtatttgccctcttcggtagcagctccattatccttaacctggctcggttcctgcgtttggtccgcgtcgtgagggtgttcagggcggtaaatatcgtgaagaagtatgggctggaaaaggttattcgccggacccacgcagataagatctttattgtcatagccgttatagtggtgatcttcacgatactcctaactctttcgggtcacgagaacatctccgacagtttttattttgtcgtgatcaccctcaccactgtgggctatggcaatgagggatttaacgagccactggcgaagttcgtgacactgtttctgattattgtcggcgttctggtcttcagcaccatcacgggggtaacctcatccttcttcatagataagatgctggaagagggcatcagtgtggatgagaacctgcatttcataaatcagaagctgaacttccacgaaagggagatggaaaaaacaagaaaagaactggccgagattaaaaaggagctggagaagagcaatgagaacagtgaagagctcaagcaggagatcagcgagttaaaagagctgattaaagaaaataacaagtga

SEQ ID NO: 3006 - DNA, 1044 bp, synthetic construct
  source 1..1044: mol_type = other DNA
atgttttgtcacaactgcgggagcgaaataagtgatgatgccaatttctgcgtaaattgtggtgccaagctaatccgactggatgaagagaaagctcagccgagcaaatcctcgagtcgaggcctgtccaacaagaaaaccgacgaacagaaggagacatcctccggcagaggacttttcaacaagaaaacagacgagcaaaaggaaacatcctccggccgcggactgttcaacaagaaaaccaaggagcagaaggaagccatcaaggaaatcaagtcttacacgaagggtaattacaagcgctttaggcagatcattccccggtatggcatacttgcaatggaagtatcacatacgaaggtgttcaatggaataatcaaaacaatcagaaaagaaattgagaacgagaatctgacggccgatcagattgagggaagagtctttcagctgttgacagaagagtatggtgagcctatgtcgcaggaagaggctgatgagctgttcaaccaacagaatctccaaacaaaactcgaaaacgagaggaagttggagcagaagttcggggttccatttcaaaacagggtgtggttcaaatgcactgtggaggagatgcggcacagcactttcaccaacaccaatgaccgggacattgtggacggatacgtctttgtcgaggacacttttttggagatcgttaaggaaagtgtgttcctgaagtcaaaaatggggactcggaaaatcttctacgacaacattgcaagcatcgaccatgatgccaaaggcaggctgaacctgagcagcagtctagaaatctacctgaagtcatctgaccgtgtgcagctcaagcacgtgaacaaagggatggtggacctcgtcaccgggaagtataatgagtacatggagaacaagattaatgacaacgcggagaacgtcaccaatggcaccaatagcaacgtggatgagctgatgaaatacgcggatctctatgagcgcggcctcctgacccaggaagagtttgaacagaagaagaaagagttactttga

SEQ ID NO: 3007 - DNA, 678 bp, synthetic construct
  source 1..678: mol_type = other DNA
atgaaaattaatctgaagagagtcatcttgggaattattctcatcctcatctgcatctcctcagccagcatcatttccgcctacagtatcgattctatggaaatccagggcggatgcattagcacaggcagcggcctggaagacaagacttacgccaccatctacgtgggggaggaatacacgggagcggacgtcctgatacagatatattactcccgggacggtagccagttaaacccgggaaacaaggtcccaaaaacagtggactctctagggtgcatcgaggtgcccagtgcaaatgcatttaaatactacccagaccttgctgagatcaatctctacgatagcgatgggtatctgattgactcaagggacgtatccctgagcatccacagcggagagcaaaccttcggcgacttttatgggtcgtcctcctcaagcagttcctactcaagttcgtcctcaagcggcagctccagttcttcaggtgacggaagtacaactacctaccacagcggcacctcgaacagctatgtggggaactccaacacgggcaaattccatgctcccggctgtgatagcgttgataagatgaagcctagcaacaaggtgtatttcagcagtcgcgatgaggccataagccgaggttattccccctgtgggcggtgcagcccttga

SEQ ID NO: 3008 - DNA, 732 bp, synthetic construct
  source 1..732: mol_type = other DNA
atgagattgaagatcatcctcaagagcaagaagaataggctcaagattccttttaattataatcacatcgtctccgccataatctacaacaagattgccgatataaaatacgcggaggaactacacagcagcaacagctataagttcttcacatttagccagctcaatatccataagttcaagcgcatccactccggatttctcagccagaacggcaaaatagacttcctgatcagttccccggacgactacctgatcaagagtcttgtggagggcttcttgaacgatctgaccattaatttcatcggggaggacctcctgatcgagaaagtcgagctgctaccagtgcccgactttgaagaagagattaacgtaaaaacattaagccccattatctcaagaaccaagaaggaagtggacggcgaactgaaaatctgggatctggcaccaggggaccacttcttcaaaaacttagagaacactcttatctacaagtacttggagtttaatggactggagtccaatgataaaaacataaaaatcttctcagagatgcggaacgtgaagcggaagcgaatcattattgagaaaggggataaacaaacgtatcatagggcatacatgatggatcttattctcaagggggacaaagaactgctgcgcttcgcttatgacgccggcctgggtgaaaagtcgggactgggttttggcatggttaaggtgattaactga

SEQ ID NO: 3009 - DNA, 2160 bp, synthetic construct
  source 1..2160: mol_type = other DNA
atgatctctgacctcgtggatttcggcaagtggctggtcgagaacaacgaggacggtatcggatacatggtgaaggaggatgactaccttctaaagattacgtataataatgaaatcgacgatttcgtaatagatggtatctttgagaacgacaatgagattgttctgggtttctacgaaaagtctatctttaacgacatcctgccgactcctagaggctcaagcgaccagaacatcaccattgccaacaataccaacctcatgggattttcacctttcctgctgaacctggacagtgatttcctcgggcgaaagattaaaccagagaattatgataacgaaagtgattattataaagtcgggagcgagcggttcttgaaaaagaaggcagggggcaagttcaagctggaaaagacactggacaagttcacgcgatcccttgatgacaataagaataacaaacaatttaataacgacataattaccaaactatttgacaatcccaacgagctttttcttaagaacattccctcccagtacgaagacatctttatccaggaattttttaacaacctctcaaaggaggaatacatcaaaattataaacaagttctataaattcctggatatgaataagaacgacatcctggatagggtcataaagtttaagctggaagagaacgtgagctccagattcttcatagtgggcgtgtttggagactacagggacctgatcaacgacctgtgctttctgtactgcaagctgatcaagaccagaaacaagcacatagagaattatgacggggggatctgcagcatcccaaattgtaacaaccattcaatcacctacccgtccatccagttttatgctgccgacaaaaaattttacttcaactatagcaacaacattgaaaatagcagcctccggctctgtgatttatgcaatcggtacatgctctttgcgttcgaaaaactgaaagccaactttaagggcaacatcctggtgatcccaaagacttacgacggcgactactcggaatttcttgagatcatccaggaggataatgatttcgaagtcatcaatgagttactcgaggagaacagtaaaaaatttacatatgacttcctaatatatactccctccaatgctctgttgaaaatagagaagtatattgacaactatcaggctttcctgaccaaatttgacgacatcaatctctataactacggaaatctcaattatttgtacaacgaggtgctagtcaacgacgagagttccctcgatgaggaccgtatcattattaagatttcgaacctgttcgatttccaaatcattttcaaggagctgttctatgaagtggatgatgggcgccttaaatatcccaagatgaactatttctaccaaatctacaacaaggagctcaccggtgagaacggcatatttaacggctttagttcaaaaacagtgaacatattttccaagtataaagataatattttcagcttcatttacgaagcgaatttcgacgcactgaacaaaaacatgattaatacaattgtgttaaattccttaaccatctttcagaaaaattcgatcaagaagagcattcggttcgagattgttaaacgcctgaactactggttcatgttcaaaaaagagtttttgggagatacgatgcttctgaatgagaatgtgcttaagttgcgccagatattcggacaccctaatattactacgggcgaaaacaacaatgaaaagattgaggtagtcttcgacgacgtggagaaaaagcaggttctggatctgattaaggaggacaatgccatcaaatactacctgattgggcagctgatcgcatacatcgacgatttcaagtacagtagcggcaagaagagggaggttttcaccaattttatcacaaatgcccacaggaacaacatcaagaagctctttgccactgagatcctgcagaagaatgtgttctacatcaaccagatgaacaagaagggtaagttcctgttcaccatgctagaatctgattacgggtccctcttcaacgaggaagatctgagctacgaagattacatcctcttgttgtttaccggatattacacaacaaaattcttgaaaaaaaactacgtatacaatggcgacgaatga

SEQ ID NO: 3010 - DNA, 960 bp, synthetic construct
  source 1..960: mol_type = other DNA
atgaccgaaggaacccccgtcagaaactactaccagggaatctacctgacggaaacgataatgggcaacccaaacggggattttatagacaattccccacggaatgtggatggggcggtattcacgactgataagtgcattaaatacaacgtaaggaaatatatccacgataccctggagaacttcggtgagaaagaaaatatcgtgttcttcttcccccgccttatagactcaacaaatgaggaagatatgaagtttaaaactagggaccaggtgttcgaacacttcaaaaactttgaggagatcctcaaggtctcgcctgatgtgcggatgttcggtggcacatttagcgttgataacaacgctaagcagatctatgggcccatacaactgtcctacggcctggacattaatggagcacagatcatccgacatcaaattggcgccccattcgctacaagtgagggaagccagaaaactgtggggtctgagagcgttgtggacgacgcaattattgcctacgacatcacaatcaacccgaataattataaggacctccttctggaggacgatctcgaactctttaagaaagccctgtgggagggcaccaacctgcgcaagaccaccagtaaaaagacagactccaagctgctcatcctgatcaagtttaagaacgacagcgagaacgataaggtggatgccatcaatatgggggagttgaagcagctgatctccataaagggcggcaagtctaaaaagatggacgaaaatactatttgtttggactgcgaaaacctagtgaaaaaaattaagaagtatgagaagtacatcgagtgtatcgatatttattgcgatagtgacgacgtcgaattgaatagcctggagattgacggagagaacctaaaggacaccaacattaaagtcaacatctacgaacctctctcattacttagcgactga

SEQ ID NO: 3011 - DNA, 864 bp, synthetic construct
  source 1..864: mol_type = other DNA
atgaaaatcattgaggttgatatttggagttcctttggttgttttagcaaacacttctccaacacaggaggggtgttgactcatttaatcccgccaaagacaagcatcattggcatcatcggagccattctgggctacgatgtaaatgactatgaagataatgatgacgggaccaaaacgtataagattgagtccttgaacaatataaaggtctctatctatcccctgttcgagttcaagactaagcgggtgatatttaacctggtgagcgggaccaacctggacctggacattaaaaacattaatcaggacgtactcatctccccccgctataagttgttcatctcattcccttcagaacttgatgaggttgaggaactcttcctgaacagggtcaagaataataaaaccatctacaatctgtatatggggcggaacgaatttcccctgaatctagagtttgtcagggagatcaacgctgaaaagcacatatttagcaacgacaatagcgacgagttaaaatccatcaaggtgtacggctcactgaacagatcttccatcaaaagcctgaacctctcttacgaggataacgattccaaagtcgactctgatgcactcagtctcataagttcacttctgatttcgaacagcgccgacggtgtgcgacacctgaagagtttccatgagttcaccatcaaggactaccctatcaaacgcgagaacttcacagactttagctacagcccagtgtccttttacagtagcaagaagttcggagagtgcttcttctctaacctgcagcttaaggacggcgaaatcgaactagtgaatattggcgatgacaagtggctctcgctcatatga

SEQ ID NO: 3012 - DNA, 2826 bp, synthetic construct
  source 1..2826: mol_type = other DNA
gtggtgatcagccacctgaattttaatgaaaatgagagtgtcattgagatcaacagcgactatttcaaggtctacgctcataagaatgagctctttaatgagcacatcagcaagacgctgaacatcttcaagaccatcaaatccgagaacattctgatcaacttctatgactggttcaaggaccaggggtatatccatctcactttcgaggagttcaacttcctgatcgaggagtgtgtccgtttccacgacgtggggaagctgagcttcaacttccagttgaagcggctgaataagaacaaccctgccaagaagaaggagcagattaacgtgctcaagaaatttggcctggactctattctgaaccagtttgagggaaatcactccctgagcggcgccttgtctttcctctcaaaatactacgatgtgctcccaaaaaatgaactattctttcttatcctggcctatgttattataggacaccacacaaaccttaaagacattgtaagtcaggatgatttcttttataaggagttcgaagaaaaccaggcgcttagcactactttaaaattcttcgcactcttctttgggctcaaccagtccacaatcaaccagaagttttttcaggagatcaacgatatcggcttcgacttcctggagaacacgataaaccactacgatagctccttctcctttttctactcctacatttactctctgctgatcagcgccgactcactagccactagtgaatacaagaactcgaccgaccaaatcgattacagcaaattcaatcatagaatatcagataagctgttcgcccacatgtacaaaagcttctacaacgtgaagcataaccggaaccttctgaacgagacatttaacctgaatgacatctgcccggaggatattaacgtgctccgcaaggcgatgcttttggaaagctcagaaaccctgaataacgctctcatggacgatgataagaagatctttttcctgaatatgcccaccggcggcggcaaaacaaacaccagcatgaagctagcattggacatggtaaaaaatacagacgctaatcggattatttacgccatgcctttcatcaacattattgagcagaacttcgatgtcatctgtaagtcctttggtctgaacgaggaagaggggaatatccggcagatatattccgcatctgagaccatcttcaacaaaagcgacgaagagaccctagaaataatcctgagcgacgatttttttaattatccggtgatttgcacgacctttgtttccctgtttaaccccataataaagaataataaaaaatacaagtaccgtctgaacgcgctgtccaactcggtaattattcttgacgagatccaatcgctgccactgcgcaactgggtgagtttatactttatcattaacgagctgagcgaaaaatataatatctatttcctcatcatgtccgcaacgttgcccagtttcgacaagctgaaactcgaaaacattagggatgacgacaattttctgaactacaacaacgtgagcctgatcaacaaccccgagaagtattttaaccacgacttgttcagcagaaccaacatcaatggaggcatcaaaaaacttggaataaatgacgactgcagtatagactacttcctcgaaatcatcagagaaaatttttcccaggactataacaagggacttatcgtcctgaacaccattaagtcaagccgcttgatttatgataagttaaaggacttttctcaggagtacaacttcgatattgacttgctcaactccagtatcttgcctaataggcgaaagaatatcatccataaaatcaaccaggaggacctgtcaaactatatcctcatcagtacccagagtattgaagctggagtggacgtaagcttcgacttcgttattagggatttttcgatcctcgattcaatagagcaagtgcgaggcagatgcaataggtccagggaactcaacgacaagttccatgattctaacatcaaaggtaacgtctacttaattaatctcgaggatgataatagtaatctttataaatacatctacaaagatgtggaacttaagacacgcattaaggaaaccattaaccttttcaatgaagggtttgagctgaatgacgacctgaactaccagtacagtaacatattgacttattatgataatgttagcttagatataaatgacgtgcacgacagcatggaccagtcattcctacggaatgaccggcgcaacatcgtgttctggaataaaatgaagtattccaaaattcagaaaaagaaaggcattcacattatcctgaatgatctgaagcagtactctatctttattccactcgatattaagatctacgacgatagcttaaatctggacaagacaatagaggacatggatctgaacgagctgcgagagatttacgacgaatttgggaaacactttattttttcactgaacgagatcttgtttatgaaggagaatagtgatttcctcatcgaaggcgactatgtgatcggggaggaggtcctaaaccacttccaaacgatggtggccagagtcaaagatgactacaaccaaaagctgctggttgagaaggtcttctcatctatcctcagcaattttatcatgaatatctcctttaataattccgatcttgaggaacaaattaaggaactggataaagaatcctacttctacatcctcgagaagaacatgatcggtgactctgaggagcatttctattcggaagaatacggtttcaactttaagcccactataacaaatatactgtga

SEQ ID NO: 3013 - DNA, 507 bp, synthetic construct
  source 1..507: mol_type = other DNA
atgagcgactatatgaaaagcatcaacgggacccaaattaactactacttcatttgcaaaaccaagctttggctctttagccacaatatccagatggagcaggagtccgataacgtatcactgggaaagcagctccacgaaacatcctataagaaagaaaaggagttcctgatagacaatctaataaatgtcgacttcatcaagaacaaggaccccattgagatccatgaggtgaaaaagacccaatcgatggaaatatctcacgaataccagctgctctattacatgtactatttgaagaaagagaaggacatcagcaacacggtgggctacctgaattaccagaacatccggaagcagatcgaaattgagctgactgaggagaaagaagaggaactggagacagttttaaacgatattaagagtatcgtcgattccgatgtgccaagtccgaaaaagtcaaggatctgccgcaaatgtgcatatttcgagttttgctttgcctga

SEQ ID NO: 3014 - DNA, 969 bp, synthetic construct
  source 1..969: mol_type = other DNA
atgagcaaaaagaattattacctgttaagcgagggaatcctaaagcgaaaggagaacaccatatacttcgtgaacgaaaaggggagcaagcctcttcccattaacaagatatactcgatgtatgcctatggccaaataaccatttcctcacaggtgatcagtctgtttgccaaagaaggaatccccatccacttcttcaactactacggctactacaatggcagcttttatccgcgggaatccctgctgagtggcgaccttctcatcaagcaggcagagcacaatattgatttctcaaagagactgaagctagccaagctgttcgttgaaggggcggccaaaaacatcctgaaagtgctggcatattacaaaattgagaacaacattaagaacaccttaacagagttgaacgaatcttccaaaatcacagaagtcatgaatgtcgagggtcgaatccgtgcagagtattatcagtacttcgatgacatcctgccagatgagttcaaaatggaggggagatccagacagccccctacaaatatgatcaattcgctcattagctttggaaatagcatgatgtacgctagcgtcatcactgagctgtacaacacgcaactgaaccctactatctcttacttgcatgagcccgctgagcgcaggttctcactcgccctcgatctgagtgagatattcaagccaattatcgtagacagggttattttttacctcgtcaacaagaagatgataaccgaaaaggactttaatcaggaccttaactgctgtctcttgaacgataagggacgcgccacttttgtgaaggaatacaataagcggcttgagacgaccatcaagcataaagacctgggccggaaagtgtcctatcagaggttgatccgcctcgaagcgtataaactgaagaaacacgtgtttggtatgaaagagtacgacccattcgtgatttggtggtga

SEQ ID NO: 3015 - DNA, 267 bp, synthetic construct
  source 1..267: mol_type = other DNA
atgtacgtgattattgtgtacgacatcaaagtagagagggtcaacaaggtcaaatccttcctgcggcagcacctcttttggatacaaaatagcgtgttcgaaggagagcttacaaatagcgagtataaggccgtcacggacggcctgttgaacatcatcgaggaggacgaagatagcgttatcatctaccagctaatgatggaagagagtctgacccgcaacgtgctgggggttgaaaaggcatcagtggatgacgtgattctctga

SEQ ID NO: 3016 - DNA, 702 bp, synthetic construct
  source 1..702: mol_type = other DNA
atggacgagtggaaggtcggggacccttccgattggggagaccatgttggggtgccagacattccctatatgggctacatcaacgatgatggctatgaagaggactactccacattccctgaggaaaacgggggcagcaagcccaaaagcctgggctctccagaggaagatcacggcaagatattgttagtgaaggccaaggtatacctgaaatggggaaacctggacggtgccatgtcatgcatcaatcaggccatagacatcttcaagaacagcagacggatcggttactatgagaatagtcttcacgtgaaaggcatgatttacgagaaaatggagcaatatgccagagctctctttttttaccacaaggcattcaaagtcggagagtgtgtgagcaatgctttcgatgaccgaaataaactgattgatggagacaagatagacatcctgaaagagcagttcaaggactatcgcaccgcctacccctttggctcatctctgaagagggatgatttcattatctactgggacctcgcatggcggatcaacgaggatagttccgacacggaaaaactcgagctcgcgttggaggtgattgggttcgtcaagcgcatggcgccgtcgatcgaatttgtggggagggaaaaggaactgtacgaaaaccttgaaaaggagattctagagaagatcaacaaatga

SEQ ID NO: 3017 - DNA, 180 bp, synthetic construct
  source 1..180: mol_type = other DNA
atgggcgagtgtccgtactgtggtaaggacgtggacttcaccgaagtctgcccacactgcggggccgatctgtccgagttcgatgacaggtgtcccttctgcggagtactgataagccgggcggcactcatctgccctcgctgcgggagcgatgtgtacgaattttggtatggcgactga

SEQ ID NO: 3018 - DNA, 480 bp, synthetic construct
  source 1..480: mol_type = other DNA
atggatcgaaaggacatcatcatcataatactcgtgctcattatcatttcactgttggccctgggacttcataaccaccaggttacggaccaggggaccgacctataccggactgtgaaagtgtctcccagcttttcgctggatgtgccactgagtagcaacttaacaagggaaaacgtctccgaaaacatgtatattgtaaacgactaccaaaacgatattcagatcatcagtttcaatatgaagaatgcctctaaaatggacctgatcgaggacggctaccagtatctcaaaagagaggagtcatacaagttcggtgcagaggagatcattaagatatccaaccataccgtgtggcacaataaggatgatggcagctacattgccttcttttccccgaacaatacagaagacaatatcatgcttgtcactcacgacaacatcaccatggctcgcatcctgagcagcgcgcggtattga

SEQ ID NO: 3019 - DNA, 1206 bp, synthetic construct
  source 1..1206: mol_type = other DNA
atgacaagcgagattatgatcctgacaccaacggctgtggtgctcgccgcggactccgccgtgaccataagcgacataaagacttatgacggagccaacaaacttttctacctgagcaataaacctccaatgggagcattaatatacaatctcgccgacttcgtcgatattcccatcgaaaccatcattaaggagtttcgacgcaagattgatggcaaggaggatcttagcctgattgaaatcaaggatgagttcgagaaatatctgcaccagataatctccaagtcacggtctacgctcagtttccaggagcaattggattattttatcgaatttattcaggaagaattgtcttacgtcgatttcgacgaatttaaaatcggcctaaaagacgagcttagcgattttgatattggtctgctaggcgacttcaaggatgaggtacagtcacagatcgacttgtacgaggataagttcagtctggcccttcccgacgattgcaacggtctggatgaagaagacttcatatcggacctgaaaaagctcttcatctgcaatatgttcctgatgcccttcattggcatagcaatatccggcttcgagaaggatgaaatgttccctagtttcatccactttaagatcaattacttgtacgatgaggaatttcttctgagggacgtggaatttgggtcaatcggggatgaggaagttatcttaaaggccctggctcaagatgacgtcattaacaccttcctaaattccattgactcaaagaccgagagggcactcgaggatttttttatcgagttcaaaaattttctgtttaactatatcgaatactgcattaagagcaacgaggacattagtgaggagaacgaaaacttcctcctggagaacatcagcgacatggagttttctgacgaaaaggtgcggaatatctttattgggttcatcgagtgtctgaaagccaaacagaagaagccaatcctcgactccatttctgtgctgcccaaaggcgagctctccaacctggcggacagcctgatcgggatcacttcgctcagacgcaaaatcgaagacgaggtagagacagtcggaggaccgatcgacgtggctattatcaccaagggggacggcttcgtttggatcaaatgtcatgactccttcgataaggacctgaaccctcagttctttgacagtaactga

SEQ ID NO: 3020 - DNA, 177 bp, synthetic construct
  source 1..177: mol_type = other DNA
atgcactatctagaaaagtacaaactgaagtccttccggaggaaaccgaaggtctttcgcagaaagtacaaccccttcccagaggggttcgtggagaatttcgtgcgaaaaagctttggcgagatcctggattcaaagatggacaacagtaaccagctcagcaaggaagacaaatga

SEQ ID NO: 3021 - DNA, 333 bp, synthetic construct
  source 1..333: mol_type = other DNA
atgaacctatacaaggacatattctacctggcaggcttcatttgccatcagaaaccggagcggagcttccacatttcccactgccaactgccattctgtgccaggtgctgtggtatcatcatatcagtgatcgctagttttatcctcgcacagtttgtagccttccccatgaatgccctggcttttctgctctttgtccctatgattgtggatgggcttgtgcagaagtataccgactacgaaagcacaaacttccgcagattcatcacgggcttcctctttggattcgcgtatgtctatgttttctacatgtttgggctgaacgccttgtga

SEQ ID NO: 3022 - DNA, 681 bp, synthetic construct
  source 1..681: mol_type = other DNA
atggagtatgaaattcagggcggaaccttccctattgtagtctgcacactgcaagagggagagacaatgaagaacgagacgggcgcgatggcttttatgacttccggtatgaaaatggacaccaacacaggaggcggcctcctaaaagggctgggacgcgccttatctggggataccatcttcctgaactactttacggctcagagggatggcgagcaggtcggattctccgcctgtagtcccggccggatcatgcctataaggttggatgggaccaatacgatcatcggccaaaagaatgctttcctcgccgccgaagacagcgtggacattgacatccactttcgaaaaagtctcggcgcaggtctctttggaggagagggttttgtgctgcagaagttctccgggacaggagttgcattcctggagattgacggggaaattatcaagaaggaactggccccgggcgagaagctgctaatagatcccggccatctggccgccatggaggaatcggtgggctttgacatcgaacgggtcaagggcgcgaaaaacatccttttcggggagggtctcttcttctcaagacttacagggccagggaccgtgtggctgcagaccatgccaataagcagcttggctcgcgcacttgtgccctacctgccaaccactactgaatga

SEQ ID NO: 3023 - DNA, 252 bp, synthetic construct
  source 1..252: mol_type = other DNA
atgcggcgcattgacgagctgaccatagagatcgatcagacgagcttagagcttgagcaaaccaaaaaagaactgagcatcctattcaaggagctgaggtcctttaagaagaagattgagaacggcatcgaaatcgacagaaaggaatatgaagactgcgtgttcaacaataagctgttgcagatgaaacgaaggcggctgattacacacctcaaattcctcaacaaggagttttacgaaatcctctactga

SEQ ID NO: 3024 - DNA, 861 bp, synthetic construct
  source 1..861: mol_type = other DNA
gtgaagattttgaaaacttggattgagaaacttgacatcattctaagtatactgattgtgctggacatctcatttctcacagctagcttcctgttggatttgaacacaacctatatcaatttcatgcttctgttcgacaccacgttatgctggatcttaatcgtctccttcatctttaagctgctcaattcggatgacagaaaggcctatatgagggagaattatctggactttctggccagcatacccatggaccttgtgctgctccctttcagttcattgcatatcagcttgataaacatcgtgatcctcgttcggttcctaaggctgctgctgctctttaaggagtcctacaagtatgtcaagaagttcttcaaggccacctcctttgacaaagtcgtcgccctcttcatcgtgatcgtagtgggcagcacattcgcgcttgagtactttgatcccgcaatcccaaacctctactacagcctgtggttcgtatttcagaccattaccacagtggggttcggtgatgtgattccggaaagcccagtgggacagctgattgcgctgggcctgctgatggtgggggttctcatgttttcaatcttcactgcaagctttgcttacctctttaacgaaaaggtgttccgagaggaaaatgaggacttccacgaaaagataaacacggtccgcgagaatcttgccgaaaacaaggaacgcgtcgaggagatcagacaaagtactctgtccaccagcgaagagattgctgaagttaaagagaagctaaacaaatccgaggagaacatcaaaaacctggaagagcggatcgattacctgatagatatgattgagaaaaaagaatga

SEQ ID NO: 3025 - DNA, 579 bp, synthetic construct
  source 1..579: mol_type = other DNA
atggatttcaactttcaccggattgccaatgagatcgcaaagatcccagatgagaagatcaaagacttgtcgtgggaagatagggtcaaggagctcctgagcttcagacaatactataaccagtatcacgaatcctatggcaaggattacttggactttctggaaaaagccaataaggaaggggacctggagaaaaaggaggacctcatttacttctttaaaaaggagacgctaacaaaggacattaatctggacgggctgaactatctgtttgtgaacatcttcctgaaatatggttttgaatacctcgactacaacgataccatcaacaatctaaaggacaaatacgatctgaacttcaagcatgactggatcagtctccttagcaaggaggacctgtccctgttcgagtctataaatctcctgaattatattcagcgcagcgactactgggactacgagcacatgcccttgtcatacgctatattcgatggaaccatcgataacatcctgaagggcatggaaaacaatctggacgaggacaacctcgaacttcttgatgtgttattaaaaaaatga

SEQ ID NO: 3026 - DNA, 1413 bp, synthetic construct
  source 1..1413: mol_type = other DNA
atggctgtgtataaatgtagcgtgtgcggatacgaatatgacgaagagaaagagggaaagcctttcagcgagttggaacgttgtcctgtttgcaagcagccggccagtgtgtttgaaaaaattagtgataattcaaccgaatccgactctaactctaacgaaatctcatctaataacgaaaccgccagtgagctgtcttacccaaccgaaacgtcacggacagacagctctattgctcacatgtccgacatacataagatggctgtggaggggacctccatcattgacgcgatgtccacacggttgccaatgcccagctgggatgacattctaataatggcgaaccagttgaacccctttcccctggaagagcacgctgatgtgagtacgactacagtcatcggcaagaatgccctgaaacccatggttctcgaaagccccatctacatctcccatatgtccttcggggccctctcctacgagacgaaggtggctcttgcaaagggttccgccatggcaaagacggcgatgtgcagcggcgagggaggcatcctgccagacgagatggccaacagctacaaatatattttcgagtatgtgcccaaccactatagcctgactaaagagaacctgatgaactcggatgcaatcgagatcaaaatcggtcagggcacaaagcctggtatgggaggccaccttcccgccgagaagatcactctcgagatagccgagctgagggggaagcctatgggggaagacgtgatcagcccgtccctatatggggagatcaaatcaaaggaagacctcaaagaccttgtaagtcatttacggaaagagtcagaaggcagacctattggcgtaaagatcgctgccggaaggatcgaggaagacctggagttcattagctacgcagagcccgacttcattacaatcgacggccgcggaggcgctactggtgcaagcccaaggcttatacgcgatgcgacatcggttccgaccatctacgccctggccagggctcgcaagtatctcgatgagaataatctggacattgatctggtgataacaggaggcctgcgagtctccagcgacttcgccaaggccctctccctgggggccgatgctatcgcgattgcaaccggggcactgattgccgccggatgtcagcaataccggatctgcggcagtggcaattgcccagtcgggatagcaactcaggacgaggccctcagaaaaagactcgatatggataaggcttcgaagagagtctttaactacctgaatgtcagtaatgaggagttaaagacctttgcacgaatcaccggtcacgacgacgtgcatgatctgtctgtggacaacttggccaccttcaacagcgaaatctcagattacaccgatattcgccacgtctga

SEQ ID NO: 3027 - DNA, 3894 bp, synthetic construct
  source 1..3894: mol_type = other DNA
atgggctttaagagacttaaaagacttttttcaagcgacaacgataatgaaatggagaagaatgaagaaaaaaataaatccggcgaagaaaccttctatgaggaaagcgatgagaaggctttttatacagaatacgatgatagtggctttattttagacaataactcggacgattctttcaacaatggttctgacgatgacctgtcgctgaatgatggtctgaaggaggacctgaatggtagcgacgacaatttatctctgaacaacggtttcgaggaggatagcttcggttctgacgatgatctgaccctgaacaaccagccgtcctcaaacagaaacttcaattatctcaataatctaatacatagccaccagaacgaaatcaacctggactcagacatcgtcttcgacagccagatggacaacacctaccttgaaggaatcaacctggatatggataatctgacaatcgacggcaatgggcgtacaatcgacgctcagaagaaaagccgcatctttaacgttttaggagagaacatcagattcaccaacatcaccttcaaaaacgcctacagcaacgaggacggcggggccatcagcattggcaattacagctctgtgtatttcgaaaactgccacttcatttccaatgacgctggagagaacgatgggggcgccataagtattggagagaactccatctgtaccattaaggattcggttttcaagcagaacaaggccgattccgggggcgccatcgtgaacgaggggacgctgaagatcatgagttccaacttcgagtataactcctcccaagtctttggcggggccatctacacccatcacagtaaggtggagattgcctatagcgtcttcaaaaacaatatctcctctagcggggggggaatatacgtgctctttgactgtgacatgattatcgaagagtccctttttattgataacgctagcatgtctgaggggggcgcgatggccaatgagtacggcggcaagatcaggatacacgaatccctattccgcaacaaccatagcctgattggcggcgccctctgcaataagggctccccagtggatgatggtaagaatttggtgagtgtatctgactccaagttcgaatacaactctagtatcgagaataatgacacaatctatagcactggcgtgctgaagctcgagggcaacaccttcaacgaaaatgaccgtattcttgccagcaataatcctgagatcatcaactccaaatacgtggaagccactgaagacattattgacctcgcaaaaagtatcgattattcgattgcaggggaaagcaacctctttgaattgctggattcagacattcgaaatttcaattatcttgagaatctgatccgatcgtccggtggagagattatcttggattcagacatcatcttaggtgatgacgaggactacactgacggaattaggctgtcaaatgagaacctgagaatcgatgggaacggatattcgattgacgcgaaaagtaggtctaggatcttcagtattagccaatgcaatatcacttttgaaaacctccggtttaagaacgcttattccgaaggcaatggcggagccatctactctgtaaacagttttctcaccttcaagtcttgctctttcgagaataactccagcgacaatggaggcggaatcagtacggaaaacagcaccaacgagtttaagaccttgagcaccgaaaacaaccgtaacgagttcaagaccctgctgtttgaggattgcagctttgaaaacaactccagcaggagtggaggagccatctccacagagaacaacgatctaattcttaaaacgtgcctctttgatcggaacgaatctaacctgggtgcagccatcatctgccagaacggcaaggtccggctcgacaactgcgggttcaaggagaacattgccagcgacggagctgccatctactattcttcacttcccataggcacttacataaacgacgattcagtcaattttctggagatcaatgactccgtgttcgaggctaaccggctgaccggcaccaatttgactgtaagcattatagactgtgactgttcaatcagtttcaactcactgtccttcaaggacaacaagttcgattacggggacctcatcaatcaaaagtacttggagaacaaaaatagcataatcaaatcctccaaattcatagggaacggtggaggcataaccgcttcgaacctgaaggtcatctcgtgtgaatttatcgacaatcgctccaacgcattcagcagccaggagtacttctatgatgggtcaagcgagattgaggactgtacgtttaaaaacaaccattgtgccatctcaagccacgagagcagcctcaagattaaagacgcacggttctacggaaatgactcggcaataatgaatcgcggcaaggcgtacatcaatgactcccgctttagagataactctatggcaatcgagaactctgccaattcatacatgttcgcctcaaatctgaacctcctggataatgcttccggggagtcccacgatatgataaatcagggtcacttgagcgtgatcgatagcgacttcatcaattgcaataagactctgaacctgatttgtcaagaggacaacgaggatgcggttctggatattgaaggctgcagcttcaagacagatagcaagcggccaatctccataaatggcggttcatcgagcattctatattcccgctttgaattggaccagtccaaaattgctatcttcaacgattcaaaactgaacatcgatgcactcagcttcaaggattacgagggcaatgacctggagggcaaactgatatacaacaacgactaccttaagagcaagacacgcgacatcctcgataagatcgacagtagcgagagtgccattacgaaatacgcctacgagacactgcccgcggactggaaaggctttgactacctgataaacctaattaaagaatccaacggggaagtgaagctcgattgcgatatccttattaatgacattgaggaagactactacggcgggggaatcgagctctttgaagacggcctgacaatagacggccagggccacacaatcgacgccgataatctcagccggattttctatgtggtgggcaacgacatcgtcctaaagaatatcaagttcatcaacggattcgagcccttggaccagctgttcaaccgaggggccggagctatctatattgttcatggggcatccttaaaaatcgtgaattgtgagttttaccagaacagtagcaagagtttcgcaggtgtaatcgccaacaagggggacctgacggtcattgattccatctttaggaataacttttcaaaccgggcaggagcattcctcgaatcaaggggggagtcccacttcatcggctgcaggtttgagggaaacaatgctaaaagcgctgggggcgccatagcggtgagtcagaagggcaagacaatcgtggaaaaaagttcctttaaggaaaatgagctgagcctgaaaggaagttcttcagggggggccatttccaactcaggggagctcgacgtgattgatagtgagtttattaaaaataaaagcgcagcttcaggaggcgccataaattccagctcgcacgctatcttgagtgttcgaaaaagtgtgttcattgagaacgcctctttccttggaggtgcaatcaacgcggacagatatggtgatttgattgtgatggatagctgctttaaggccaatgcggctgcttatagcagtggagccatttatgacagcactgatgagtctggggttcatggatgtgaatttctgactgaaagcgacaaggtcaagtacgcgctggaggactga

SEQ ID NO: 3028 - DNA, 1527 bp, synthetic construct
  source 1..1527: mol_type = other DNA
atggaggaggaatacctgactgtgacgaaactgaattaccacatcaaacggttggtgaactccgattcatcgcttaaaaacgtgtatgttcgcggtgagctctcgaattttaaacgctatcccagcggccacctgtacttcacccttaaggaccaaaacagtgaaatcggcgggatcatgttcaaggggcctgcaagccggctaaagtttgagcctaaaaacggcatgaaagtgctcatcaacggctacgtggacgtctaccccaagcagggaaactataagatctatgcgcagaagctgacagaggatggaatcggcgatctgtatatcgcctatgaacagcttaaaagaaaactctctgcgctgggctggttcgatgacgaacacaaacaggaaatccctaagtttcccaaaagggtcggtgtggtgacagcttcaaccggagctgccatcagagatatcgtcataaccattaagcgaagatggccattatgcgagatcattctctttccttcattggttcaggggaatatggcgccaaaaaacattatcaagcagatcatattggccgacaatgagtttgatctcgacaccctgatcataggacgcggggggggaagcatagaggacttgtgggccttcaatgacgagaccctggcaaaggtgatcttcttcagcaaaacgccaatcatcagtgctgtaggccatgagatagattggacaatcagcgactacgttgccgacctgcgcgcagccacacccactgccgctgccgagcttgcagtgcctgacattaacgagatcgagagcaacattaagaatctggatgacaggctaaacaaggtgattgacaagcagttcaatgaaaataaggatagcttcgaaaagctagtcaaccggaacctcttcaaaaaccccgacctgctctacaacaagaagatcatgtacctggatagtgctaagtcccgtctggccgtctgttccaagaacatgatttatgacaataagattcgggtgtccaatgtcaaaagttctcttatattcaagaatccaaaaatgctctttgagtcaaagtcaaacaagtacaatcagctgaaatataacctgaactccagcgggaaaatcttaattggcaaaaaggaaagcaaattggacaagtacaggaatagttttgtcttcaagagccccaacaggctgttcgaatccaaggccaataggtactttaaggtgcgaactaaccttgaatacagttcgataaacctgctgagagacaagaaagacaatctgaatgagattaaaaaatccaaccccattaagaacccgcaatccattctcgagccgaacgagatccgcctggataagtatattgacaagttggatgtgctgaacccactcaacaccttaaagcgaggttacacggtatctcgggttgatggaaaggtggtttccaaggcaaaggatgtcaaaaaggacgacattctggaggtggaatttgacgatggcaatgtaagcaccaaagtgctctga

SEQ ID NO: 3029 - DNA, 252 bp, synthetic construct
  source 1..252: mol_type = other DNA
atggagaacatcgagtacgtggaaagcaatatcgaaaatctctccttcgaggagagtctggctgaactggaacggatcgtaaacaggttggaaaccggcgaggtgcccctggacgacgcgattgatgagttcaataaggcaatgaagctagttaaaatctgcgacgagaaactcaacagcgccgaagaggccattgccaagatagtcaacgagaacaaggaagtggtggattttgaagtcgaggaggagtga

SEQ ID NO: 3030 - DNA, 735 bp, synthetic construct
  source 1..735: mol_type = other DNA
atggtgaaatttgagatcaaatcccatgacgggcccggacgatacggcaagctggatggtatggagagccccgttatcctgaaggaatctgatttgaatatggcgccagatgagtcgtcagcctatgacatcgagagggaaatcgccgaatggtccgttaacgaaaccttaaagctcgcccgggaatatgaggacaaggacatcgccgtgattcacgggagcaaatacatagatctccgcgtcaaatgcctgaaggagctggaagagatgggctattccggcttcatcatcgccaatgcagatgaccttttgctgcatccccgcgacctggtggacttgatcgtagagctgagacggaacatgaaatcaagcagtatacttattttcccacacgcggaggcacaattcattcctctcctggcctatatgggaatcgacgcattctttgatgacattggcgagtactacagctacctcaacgtgctaatgagccctaccaagaactacgacctgaaggtctatgaactctatgatctaactcgcgaagagctggaggaatataacaagaatacaattgactttgtgttaagggaagtccgggagcacatgaaaaacgggagcctcaggaatcttgtggaagagagatccgctacgagtccgcagtacgcttctgctctgcgtatactggataaggagtacgccgactacctgctcgagtacagtcagctgtactga

SEQ ID NO: 3031 - DNA, 447 bp, synthetic construct
  source 1..447: mol_type = other DNA
atggttgataaggacctggtggtgccaaggtatctgaaccagttgatggatatcgtcaaaagctacgaaatgtacattcggtcgaacatcaaagacctggacatcaccatgggggaggtacccatactactggcaatttatgacgatgagggactcaatcagatagacctggtcaagaagttccacgtgactgaagccaatatttccaagacgacaaaacatctgttacaaaaaggcttcattatcaaggagatcgacagtgacaacaacactaagaaacttctctatgtgacagaatttggcgaggagatctgcaaggagctgattgaattttacgaggtgtggaagaacgagataatctccgatgtgccgaatgagaacctcagcatctttagccaggtcttggataccttcaccaacaattcacagaaatacttcgaaaagtga

SEQ ID NO: 3032 - DNA, 1077 bp, synthetic construct
  source 1..1077: mol_type = other DNA
atgtcggtgctggatcgacttaaatccctaatcgatggggccaaggaggatatcgacagtagtttaacgaaggaggccgagtctattaaggaagcggctgatagcatgcagacaagttcagaggaggaaatcgagaatataagcgattctgagactaattctgacgaggaaacctcaaaagttgaagacgccgaggaggaggtaatcattcctatccatgcagaagaggccgaggacgctcctgaggaggaggcggaagaggtgccagaggaggctgaagaggcccccgaggaagtggaggaagccccggtggaggaggctgaagaggagactgacgaggaagtttccgtggaagagattaccgaagaggcccctgaagaagaagccatagaagaggtgcccgaagaggaagtgtcgttggagacggaggaaattattgaggagccctccgaggaagacagcaccgaggacgaagagccttccgaagaggaagcctcagaagaaaacgaagagagcgacaacatgacactgctgaaagagaatgatatatatagcatggatgacatcgataaggaatttacccagaagttcatcgatgcgggcattgaaactgtggaccactgcttccagtgcggcacatgcggcggtggatgtccctccgggagaaggactccgtaccgggtccggcagatcgtaagaaagtgtctgctcggactcagggaggaggtcgtctccgacccagcactgtggatgtgcaccacctgctacacgtgccaggaacgctgtccccgcagtgtcaagatagtcgacatcattaagatggcccgtaacgaagcagctaaagcgggatatatggccgacgcacacaaagcaacaggcagcttcgtgatcaaattcgggcacggggtgccaatcaacgacaagaccaaggagctccggaaggctattggacttgacgagctgcccccaacagtgcatagctacccagatgctttggaggaggttcaaaagatctgtgcagcctgcgagtttgataaactgatcggctttaacatggagaccggtgagctcgaatga

SEQ ID NO: 3033 - DNA, 885 bp, synthetic construct
  source 1..885: mol_type = other DNA
atggagatcgcatatttcctgggttgtataatgaacaaccggtatccagggatcgagaaagcaactaggatactcttcgataagctggacatcgaattgaaagacatggagggcgcgtcctgctgtcctgcccccggtgtgttcggaagctttgaccagaccacctgggccacgattgctgcgcgcaaccttgccattgcagaggagatgggcgccgacatcatgacagaatgtaatggatgtttcggctcattacgggagtgcgaccacctcttgaaagagaaccccgccaagaaggatgaaattaatgctatcttggccgagacgactgacaagcaatacaagggagagaccaaggtgcgacactttgcagagatactgtacaacgatgtcgggcttgacaaactgagcgaaatgttcaccaaggacctcgggattaatgtagctgtgcattacggctgccacttcctaaagcccaccgccgaagtggggattgaagagtccgccgaaaacccaaccatcctggatgaacttgtcgagatcacaggcgctaagtcggtggactacaaaaataagatgatgtgctgcggtgctgggggaggcctacgcgccagagacattgacgtgacactgagctatacaaaagaaaaactcgatgccatggctgaggcgggggtagatgccatcgtggaagtttgcccattctgccatctccagtttgacgtcggccagactgaggtgaacgcaaagtacggaacggatttcgcctttccggttatgcacttagctcagctgtacggactggccatgggcctgagtgcggaggaactgacctttgatgcacagctcatcgatgccgctcctgtcctggagaagctggcatga

SEQ ID NO: 3034 - DNA, 270 bp, synthetic construct
  source 1..270: mol_type = other DNA
atgttcatcgcaatcttgggagggatatttagattcaaggatcttcccgaagagtacggcagctacgtgcagtttaaagccgctattgaaggccgcgatgaaatcaaggacaacgacgagatagccattctggacattacaggcaccgggagccaccatgtactattcctggaccggtataataacatcaatgagatcaagaaagaactcagggaggcggatgccaaagtgaacgtcaccacgctgaagatcctggagggacacctctga

SEQ ID NO: 3035 - DNA, 528 bp, synthetic construct
  source 1..528: mol_type = other DNA
atgagcgatttgcctatagatcaaagctggttagtgatcgctaaccttagcaatgacctgcacaagcggggaatccaaattcccaaacagatcaacagtgatctcgggctcgtaaagtcccagattggcttttacaagaaagacccaacccatccagacatgatcaacgagatggcacgcgccgagatgtccttgaatcagatacagggcatcctgctgagtttcgctgagaatattggggaagactactataatgaatggctggacaagctaaacagagcgaacctgggcgagaagatctacgagacgcccagcacccagtccaaattcctgatcaacgcccctcccggattttcgtatgccaagatgactctgaaaaagccactggccgaggacagggtgcaggaaatcgccgaatactacggtctgattcttgagtttgactcagatgtcacaatagcactctatggggataaacccgacattcaggcggcactcaaggagatggccccgttcttctcagaatga

SEQ ID NO: 3036 - DNA, 717 bp, synthetic construct
  source 1..717: mol_type = other DNA
atgaaaattctggccattagtgatatacacgggaaaaggtccgaaaacctgatcaattacctaaaaaaggaagacatttcgttagtgctgattgcaggagacatcacagactttaaacttgaagggtacgatgacccgctggacttcgtcaagcccttcattgacgaactggtcgaggaggcggatgtagatgtgtttgctattccaggtaactgcgaccccgccggaatatgtaacgctatcaaggagagcgggccggatgagaagcctgcattctgtttgcacaatcaactcatcgcctatgaaaatgtggtgataatggggtacggcggatctaaccccactccattcaacacgcctggggaaatcgatgacgataagatctatctccacgtgtacgagctcctggccgagtacgactatattggcaacgattccatcccccgggtaaccatcttgctgacccacgcacctccttatgacaccaaggccgacactatcgagagtggcgctcacgtgggctcacagggcgtgaaaaagcccattcatgagtttcagccaaacatcaacatctgcggacacgttcatgaagcctgcagcatcgataaggttggcaatacaaccattgctaacccaggtatcctggaagagaatcatgccgtccttatagaggtcaacgaggacgcgagctacaatgtggagatcgtggagctctga

SEQ ID NO: 3037 - DNA, 1152 bp, synthetic construct
  source 1..1152: mol_type = other DNA
atgagctatcaggaaaacaatgctagtgacaaatctctccaggataaagacatgaaagcgaagcagcgccaggacaggatcgtgaagaccagcattataggaattgtggtcaacctaatccttgtggccttcaaggccacaatcggcattctcgtaaattccattgctatcacgctggatgccgtaaacaacttgactgatgccctgtcctccattatcacgatcattggggccaagcttgccggcagggccccagataaggagcacccttacgggtacggccgtattgaatactttgcctctgtaatcattgcagctatcgttctttgggcgggaatcaccgcactgatggaaagttggccaaagatctttaaccccgatgtgacaagctataccacagtgtcactggtcatcgtcgccgtggcagttgctgtcaaattcatactggggcgctacgttaagaacgtgggcgaggagatcaactcacaggcactggttgcctcgggcagcgacgcgttcttcgatgccatcctgtcgttctccactctgattgcggctttagtctccatcttcttccacatctctctcgaagggatcttgggagtgatcatttccatcgtgatcattaaagcaagtatcgatatgctaaaggaaactgtggacagcatgatcggagaacgggtggacagcaagctgagtcgggatataaaggaggctatttgtgagtttcctcaagtctacggagcatacggcctgagcctgcataactatggtcccgacagcatggagggttctgtgcacattgaagtggacgacagcctcacagccctggagatacataatttgacccgactcatttcaatgaaaatcttcaatgagttttccataatattgaccgtcgggatctacgctagaaacgacgacttcaaggatatcagaaatgacctttatgagatcaccagcaaatatgacgaggtcattgaaatacacggctttctggcctacccggaagagaaactgatcacctttgacataattgtggactttgatgccgaccgggaggaggtgaaagataagattttagatgagatcaagtcactccaccccgatttcacgtattgcatgatcgatgactacgacctcagtgactga

SEQ ID NO: 3038 - DNA, 915 bp, synthetic construct
  source 1..915: mol_type = other DNA
atgattatcgttcgcggttctgtgaacaggaaagagtacaccagccggttctcaaagggcatcctctcccgatcactgattcggagcgaactgagcccagataaggcatatgaatttgcctcgcgaatcgaggaggatctgaaaaacaagggcgtcactgaaatcacgacagatgagattgccgatatcgtggtgaaactccttgacgaggaggaagagaaaagtgtctccgaacggtacctcaattggagaaaggtccgtgaagctaaagatcctctaatcatcttgattggcggggcatctggagtgggcacctcctcaatggcgttcgagatatccaacaggctggggattaagaccatgataagcaccgacatgatccgcgaagtcatgcgaaagattgtaagtgaggaccttagccccgtgatccacgagtccagttttttagcctatagatccatgaaagtggcgccacccccagagttcgacttcgtactggctggttttaaagaccaggtggccactgtaagcgtcggggtggaggctgttatcgaaagggcactcaaggagggcatcagtattatcatcgagggagtgcacatagttccgggatttatccgcaaggaactgatggaaaaggataacattgtcatgttcacactgaccctcagcgacgaggagatgcacaagaacagattctactcgcggtgcggggacatctggaataacaggcctctggaaaagtatatggggaactttgaggccatccgcaagaccaatgcctacctggaagaccaggccagaaaggagggcactcccataatcgacaatattgatgtgataacaacggtggacttcattattgagacattgacggagacctacggaggcatgaaacatgtgcggaaagactga

SEQ ID NO: 3039 - DNA, 369 bp, synthetic construct
  source 1..369: mol_type = other DNA
atgagtaaagatgtgctgacagtggagctcgatgaagctaccgtcttcgcattcgagaaactgatgaaacataagataagcgccatgcccgtggtcgatgaagacggcaagatggtggggattgtcactgcaaccgacctcggccacaacctaattctggacaagtaccagtatggtacgaaggtaaaggatgtgatggtgaccgatgttgcgtacgtatcatctgactgcacaatcaaggaagccatttccgtgatgtttgagaaagccccaggagacagcatcatcaaccagctgccggtcttggacaatggcgagctggttggaatcatctccgacggggacataattaaaatccttaaggagtga

SEQ ID NO: 3040 - DNA, 2028 bp, synthetic construct
  source 1..2028: mol_type = other DNA
gtgctcctgatgaggaagaagatccttttcctaactttgatgatactcatctgctttactttgaacagcgtttgtgctcagagcctggataatatcaactacgctaatgatggatttgacagtgatgagatgatcaattgcgacttgcacaaggattcatcgcagaagtccctgaaatcaaatgctctctccaacaagaaaaccaccaatacggtgaagctgaccgatatgaaaaaggctgaaagcaatgatgtgaagcagacaggcgctgcaaaagccagcaatactaagagcacaagcaaaagcacaacgaaaacaaatgcgacaaaaagcaatactaccaagagtaccgccaccaagaccaccgcaaattcgagcagcacgaagaaggccacgcagaacacaaccaccataaacacccagacgctggccaaatcttcaagcagttacatggcctatgttgagaagaacgctaagctccaggaaccaattacgatcagcaagaagaaatacaagtctccggagtacttgtatctggtttctaaggctgtaagcaatatttccaaaaccaaggtggagatcaaagacaagctcatcacaaactactccaataccgactgcaagtcagttaacggcaccattaataagactgaatacgtacaggtcgcgaagaaaacagttagcttcatcgagaagaatcaccgggctcctaattggattgcctcatctaaaggcaacatcccacggaaccagctcattctggtctttagcaagtgcctggaccagtataacaaaagcggcaaactgcccagctccattaagctcaatgacttggacctgaacaaaatgaagcagaagattgacagctccaagaaggtcaacagtaccagcactaagaagaccaacacaagcagtactaagacaaacagtaccagtgccaagaaaaccaacacaacctcgaccaaaaagaccaatcccactgccacaagcacgaacaataacaaatccctcgtcgagtccacgttagattcaataaaatctatcctgaacaatatagagaataaactgaatcccaccaacaaggtgctgtctacaaccggcacgaagaagaacacagtgaccgtgaactcttccaaggtcaatgtgcaaattagcagttcttcaacggtcaatgtgaaaatcagcgcgaaagacaatacaaatagtggaaagaacacaaattctgggtcggccaaaaaaaccaacactacaagcacaaagaagaccaacactacctcgacaaaaaagatagatacaaacagtacaaagaagactaacactacgtccaccaaaaacaacacctcgtccgcaaagaaaactaacactacgtccactaaaaacaacacaagctccgcaaagaaaactaacactacgtcaactaagaacaacaccagcagtgccaagaaggtcaacacatccagttccaagaccaacaccagtgctaaaaacaacacctccactactgccaaaagttcttcaaactccaaatacctgtcgacgtctgtcctgaacgacaaataccttggcgaatctctaaaaaagtatctggccgtgggtaagaattgccaggtaaccaacaaggccattaaaaccctcgccaacactcttacctctaaacttaagtccgactataagaagggcgagaagatcttcaattgggtgcgagacaatatcggatacgaaaagtaccgcaacaccaaaaaaggtgcactaaagaccctgcaaacccgcggagggaactgtgtggatcatgcccacctgatcgtggcattatccagggcagcaggacttcctgccagatacgtgaatgccaacaactgtaagttctcttcagggtatgtgtcagggcatgtgtgggctcaagtcctggtgggcaatacatgggtggtcgcggacgcgacatccaatagaaataaatttggtgttgtaaagaactggaatgtgaacagctataaactcgtggggaagtactcctcaatctccttctga

SEQ ID NO: 3041 - DNA, 1674 bp, synthetic construct
  source 1..1674: mol_type = other DNA
atgttttatgagaagaatttgatcaagaaaaatcctctgagagtggatatcaggttcggtctcgtctacccaaacgtatacaaaactgctatgagctctctgggctatcagatcctttacaattacgttaatcttcgggaaaacacatactgcgagagaatcatctacccctcgtaccgcagtctcgagaccaacagccccctgggggacttcaacatcgtatcattctccctgcagtatgagcaggactatttcaacattctggagatcctccgtgacgcaaacattcctctgaggcgggcggaccggaccttagaagacccattgataatcgccggcggcccatgcgccacggccaacccgcttcctctgtctgacttcatagacatttttgtggtgggggaagcggaagctgtcttgaacgatctaatcgacaactataacgagaataaagacaaatttacaaataaaaacgaatttctctccacgttcctggacattaagggcctatatatatctgaatttaataacaaaaccgacattgccttgcttgatgagatgtctgatgcctaccacataacctgccctataattaccgagaccgacgataaggaccttatcccggtctttagtaactcaattctactgaatgtgtccagggcctgcacacgcggatgccgattctgcatgtccagctacctctaccgaccactgagggagacagatctgcagcagctgttcgatattgcagaagaagcccgtcaaaacactggactgaataagatcagcctcataggtgcagcggtgagtgactactccaaggtcaatgagctcactgaagggctcaaggatatgggttttcaggtgtcgacacccagtatgagaatcgaatcaatcacccgagaaacactcgtatcgctccgcgagagcggccttaagaccctcaccatcgctcccgaatccatctaccacctgcgcaaaagaatcaataaggacatctcagatgatgacgtgttccgggtgatcaaagacgccgtggacttaggtttcaatctcaaactgtattttctgatcggcctgccctacgaggatgaggacgacattaaagagctggcatgcctgatgaagcagattgactccatgaagtacttgatcgactcaaatctgaacgagtccattaaaaaggaggaagttctgactaaacataagagtaaatcctctggaaaaaaaagcaagtccaagcaacggaaaaaggcccgggtgagtatcaagttcagcgtcaaccctgtgattcccaagccgcacacgccccttcaatgggaaggctacgacatgaagagaatcaagtcaaagataaaatatctgaagaagaacttaaagggcttggacattaagtttgacagcggaaagatgggactcattcagtacgtcctatcctgtggggatagggatatcggcgatctgctggaagagagcctgaatcgcaaaatcagcattaaggagtggaaggaaaacgctccaagctatgagattggggataacctgccctgggattgtatcaacgttagtgtgagcaaggagttcttggagtctgagtatgagaagatgaaaagcggagagcagactccatggtgtgaggatggctattgttacgggtgtggggcttgcaactga

SEQ ID NO: 3042 - DNA, 1116 bp, synthetic construct
  source 1..1116: mol_type = other DNA
atgttaaacccggctaaaagagtggaagccatagagctgagtcagattcggaagatgttcgaggtgaccaatgagaatgccatcaatctgggaatcggcgagcctgacttcaacgtgcccgaaaacattcgcgaggcgatgaagaagtcaatcgatgatgggttcaccaaatacacttccaacaaaggcatcatcgagcttcgcgaatccattgttgaaaagctcagtaaagacaataacatcaagacagattctgagaacataatcgtgaccaccggggcaagcgaggcactctactgctgtgctcaggccctatttgagaagggagacaacgtgctggtgccaaaccccggctttctctcctactactcggttgtgaatctggcggaggccaatattgtagaagtcacaactccgatggaaaatgagttcaagatgaaggttgaggatgtgcaggaaaaactcgacaagaataccaaggctctgattataaactctccatccaaccccaccggggcggtcatggataaagaggatgtcaagggcattgccgacttggcaacagaccatgacttctatatcatcagcgatgagatctacgaaaagatcatctttggccggaagaactacagtcctgctgagtattgcgacaatgtaatcacccttaacggttttagcaaatcgtacgctatgacgggcctgaggataggatatatggccgccaacgaggagatcacggaaaacctccttaaggtccaccaatactgcgtggccaatgcaacgtcaattgcccagatgggagctctggaagccctaacagggcctcaggacagcgtagaaatgatggctaatgagttttcacgtcgacgggacttgatagtctccagcttgaatgatatgggttatccaactgtgaactgtgaaggggccttttatgtcttccctaaagtggaaaggcccatggacttcgtgaaaaaggcggccgaggccggcgtcattagtgttcccggtgcaccattcggcagcctgggagagaaccacgtgagaatgagctacgccaactcctacgagaacattgaaaaagcaatggacatcctgagggatctggagtattga

SEQ ID NO: 3043 - DNA, 915 bp, synthetic construct
  source 1..915: mol_type = other DNA
atgaatagagaggaacgagaccgcataggaactcgtgcgtccgcagtggccattatcggaaacatcctcctcactgtacttaacatctcagtggggctgatgagcggaagttacgctctgatctccgagggggctcacacaatttccgatatcgcgacatctgtcattgcatacgtgggattcaagatagggagccggcccgccgacaaagagcatccactgggccacggcagagcagaagccatctcgggccttatcatcgtggtcttcctgtcgatcgtcgccattgaggtcatccaaggcgctttccataagctcttctttggcggggctttggaagtgccagatcccatagccgtggtcatggcctttgtcggtattctggttaacctcttcatgagcagctacatcatccgcctgggcaaaaaggctaggagcccggcgattgtagccgatggaaagcaccagagggtcgacatctttgcctcactggcaatcttcattggaattatggtgtcccagtacggctaccctatgctagacccaataatcggtatcttcattggggcattgattgctaggacggccgtgattgtagccatagacaacctaaacaacattatgggtaaattgccttccgatgagctgatcaaggaaatacgcgacgtggccaattcagttaccgatgtctgtagtgcccatgacatcaaggtgaattattttggcagctatgcgaccgtggccctccatgtggagctgccgcctgacatgagcctgcgggaggctcacaaaatcacccaccgggttcaggacaagatcctggaaaatgtggacatggttcaggcagtgcacgttcacccctgccccgagggggtgcagtatgatcacagtcaattacttgacgaggattcttga

SEQ ID NO: 3044 - DNA, 2349 bp, synthetic construct
  source 1..2349: mol_type = other DNA
atgctctttgtcatgatcgcgggggtatctgccagtgatattatggatgcatcagataacccaaacaatgatgactcgatcaacctagtatctcaggagtccggtaatgatcaaatttctaatgaagccatttccgtgtccaactccctgagcgctaatgatgattcgtacagtccggaatcggaaaagatcagctctaaaataaagacttcaaataatctgagtgcgtcaaacagcacaaaaaccactactaaggccgccgcggccaaaacgacgaaaactggcactagtctccagccatctagcaccagtatctactccggccagtatctggtcatcacactgaaggacaagaacagtaaggcgttgagtgggcagaaggttctgattaacatttccaaattcaaaaacacatacacaaaaactacagattccaaaggccaggtcaaattggctgtgaatccagttggcagctttaagctggtggtgtcatacgctggaaatggaaactactcctcttcaaagtattccgggaccctcaaggtgtcaaaaagtgatacaagtctcacggtggccagcacttccgttaccatgaccactcccttagttgtgacccttaagaataaaaagaccaatgaggccttatccggcaaaaagataaaattcgttatggaccgcgtgagctactcaagaactaccgacgccaaggggcaggcaaaacttaaggtgaatatgaaatatgtctttaatgtcacagttaaatttgacggtaccggcaacctgaaatcgtctaaggtgaccaagaccattaagcccaccaagatccccgtaagctttgtctactccgccaactctgtgaaatacggccactccatcacagtcagtctgaaaaacaacttgaacaacaaaacgctctctggcaaaaagattgtggtcaagacaagcgactctaaaaagtcaacaacaaagacgaccagtagcaaaggaaccatcagcgtgcccatcaattctgtgggggatgtcacggtaagcctgtcctacgccggtgacagctcctataaggctgcaagtagcagcaagaaaatcaagggactgaaggattccagtaaaatcacgagctccacggggaccattcctgttggggacagctataccgtgactttaaaggattcgagcggtaaggccctgtccaataagaagatcgtcttcactttcgacggaaagtcatacaccaagacaaccaacagcaaaggccaggccagcttggccatctctaaagggcccgggacatattcggtgaacgtgagttacggcggcgacagttatcatagcggaagcaagctcagcaagaatgtcaagacctccaattcaatgattagcatcgccaacgtgattaaggctgcaactaccctgcgagcgcacgttgactataccaaccggtttaacaagtcctacgtggtgaccatcaatggactcaagtattcgccggacgaatttgcatacatgatgtctcaggctatagtcaagatcaacaatggccaaaaaagcgggtatgtgaccttcaagaaccttactggagactacgactccaaaggtagctccataaacggcaatctgatgaaaaagaactacatcagcttggccaacacactcattagcagcgtgaacaagaacaataagatacctgcgaacatctctaccaatctgggcaagatcgaagccaacctttatatcttcggtctcgctaaggccctgcagttctatggagaggagaaatacctgcctaaatacctgatccttaaaaacagtttcattaaaggctcatcctcaacgactgtcactcagaaggcaaagattctaaattgcaaggaggccttcaacgccacggagtttgagaaatacttgaagacaggcggaaagtcggcccttaactcagcgatcgtcgctaaggcaaaatccctcaccaaaggtctgaccagcgataaggccaaggccaatgctatattcaagtacgtgagggacaaggtgtcctacagctactactcagacagtaagaaaggagccgctaagacatataagacaaagtctgggaactgctgtgacaaggcaaacctaatcgttgcaatgtgcaggtctgtgggggtatatgcaagatactctcacgctcagggctgtaccttctcaagcggactggtggcagggcatgtatgggctcaaacatatgaccgggctacccagacgtggtataccgctgacgccacaagctcccgcaactccctgggcaaaataaacaactggaatactaagaaatacagtcaagccaagaattacgtgctgattccattctga

SEQ ID NO: 3045 - DNA, 453 bp, synthetic construct
  source 1..453: mol_type = other DNA
atggcaaagtacaagcgcgtggctgtgggcggaacattcgacaagttccactacggccacagaaaacttatctccaccgccttcgagattggggaaagtgtcgagatcggagtaacctcaaatctatttgccagcaacaaaggggatgtcgactcctgcaacacgcggatggctaacctcaacgcgtttctgagcaagtcgcacgacaatttccatatctcccggctcgatgatgcctacgggccgaccatttatgacgaaaacttcgatgccatagtggttagtgaggagactgagccaaatgcaataaagatcaatgagatcagggaaagcaaaggcatgaagcccctggacatcgtcgtggtgagctttgtgctggccgacgacggaatccctatttcatctacacgaatccgccagggtaaaattaaccagaagggcgaattgatttga

SEQ ID NO: 3046 - DNA, 975 bp, synthetic construct
  source 1..975: mol_type = other DNA
atgatttttattcaacgagatggtgccgagtccaggaaactgtcttacgacaacaaagtgtgtctcgcttgcggtatctgtgcagacacatgcccaaccgactcccttgccattgccgacgtgctcgccatcgctagagggcaggccgagggcaacaatatcgtgttggaccaggatacatgcgtgctgtgcgggctgtgcagctttgcatgcccattcggggctctggaatttgatataggcggccaagatgccagtgaattgcccaactatcccaagtggactcacgaaagctcaatcagtcaggatgactgcgagttttgtggacgctgctacaccgcatgtcctcaggatgcaatcctattcaagagagagctgcccgataggaacgcgctgctgaagggggagatctccatcaatgaagatgactgcatctattgtcaggtgtgtgccgaaatctgcccagccggcgccataagtctcacggcatctgacggcaagatattagacacaatcgaagtggatgaggacaaatgcgtatattgcggagtgtgtaagcgtgcgtgtcctcaggaggccattaagaccgtatgttcaacctgcatgtacagcgatgagattgagaagatcgctatcaccggcgacatattcattacagaggactgcattaactgcggatggtgcaaggagatctgtcctgttgacgcggccgaggtcactaaaccgttcgatggggagatctccgtcacggaagaggactgtgtcgcgtgcggatcgtgtatagacatttgttcatgcaacgctgtgagcctccaggacaatgttgccgtgttcaatcaagactactgcgtcctgtgcggcgcatgtgcccgcctctgtccccaggaacggatcgctattaaccggaccgatatgaaactgactaacatcagcagcgcttcctggaaagccaacctggaaaagctacttaattga

SEQ ID NO: 3047 - DNA, 204 bp, synthetic construct
  source 1..204: mol_type = other DNA
atgaaagaaacactgattaaggagttcaaagacttgaaagaggagacgggacaggccagcgtggaactgatactcctaatcggctccatcctcgtgatcacaattatctgcgggacttacgtattcaatgtgaacagcaagataaacggccagtttaatcaaaccatgaccaaggcacggctgttccttctgaacaaggtctga

SEQ ID NO: 3048 - DNA, 237 bp, synthetic construct
  source 1..237: mol_type = other DNA
atgaatcgactgcccagggaaaccgtatttgagcagataaaacggaacttcgtccaattgaaggatgagacgtctggccagggggctgccgaatacattctcctattcggcggagtgatcgtgattgcccttgcaggtctgctcatctatcgctcatacttcagcaacaacaccagtgggctgaacgcgacacaggacatcaactccatcagagacaatatgagcaatgtgctgtga

SEQ ID NO: 3049 - DNA, 2094 bp, synthetic construct
  source 1..2094: mol_type = other DNA
ttgtctgactccctggatttgttcacaggggttctgctgacagccattggtttagttctgatttatggaagtataatctaccgtctaatcgacctcgtgttaatcctgggtgtgctggtcaccctattcgggctgtacaaactgctgccagctttctttatgcggctgctcagttccagaaaatcaagctcacgaaataagctttccaaggccaatgtgagccaagattcgcttctcaaggcaggaatcgaagagataaacaatttcctggacggcgaggacaacaaggagaatagtaaatctgtcttaagagctccaagggaaagctcactagatgctcctaaccagatgacctttgaagaatatatgagcaagtccaagaccgattatgcaaccaattacagtccgaaggaggtaaagcctatctttaaggaccgggacgtggacgaatccaagcaggtgctgcgcacaaagcctgtcaaagaggaaaagagcaaattcaagctgccgtcatttaagcggaactcctccaagaagccaaaatccagaaacttcgccttccgcaaggataaggacacagagcgaagcccagacaagctctacttcactccaaattacgaaaaccccatgatggtgagccctaagcccaagaagaagtcggagaataaactgaggctatctgacagcccaaagcggagcaaagagatctccgaggccctggcaagtgtaggcacgactgaaacagtctacgacaacaacgcttcagacgacagctatagctacatgcccaaggagatggacgatgaactgatcgtgcctatcgatgagatcgatctggatggcccccaggaggcccctatctacacgctgtcccagagcgagaacaccctttacaacaacgtgatttacgacgacgtcgattcagacttctacattaccccaatccatgcagagagcaacgaagacaactctcctgatgaagagggggactatggggagggcggagacctctatctcgaggtcgagcccgaggacacctcgtatggaaacgatctttacatcgagacagagccggaagataattattacggcaacgacctgtacatcgaaacagagccggaagacaactattacgatgacgaggacatttatatagagtcatacgaggaggagcagagctatgaagatgatgatggctacataaccgttgaagccagtgacgatgacctgcccattccaaggccaaaggagatcagcacgccccagagtcttccccgccccacttcaatcgcttctactaatcccatttctaaaaaggaagttgggtccaacctgtcccggcctcacaagaaggtgtccacccttcccaggccaagcgtctctagcaatctgcagcgcccccacaaaaaggcagaatctacggacgccgtgtcagtgaaagacgagtctaaagccgccgaggcaagtattgctaaacctaagcccatcgccaaacctaaacctgtggctaaacccaagccgaaggaggctcctaaaagcgatgagcttataagcaaagaggaactcgatcagatcatccaagaccccaaggataacaccattcagatcgaccccaacaatccagagtccctgcctatcccaaagctcctcaacagttatgtcgtatgcgagaaaggaatactgacctctcaggaagccttcgaagaggtggccagtcattccagtcaagagattttgttggaagcgccgacaattaaggatatgggggaacgattcctctcaagcatcgcggatattaaaaccagaattatcgtgcaggaatttgatctggccgacatctcgtacgtgttgttgctcagctcgctgattaaaaaaggagttgagatcaaaactttgccgatggtaaactcctttaacctcatcggcgacgactctcacgcgctcatcatttccaatagtatggatgaggacgactttgaatatggtgcggtgtacactgataagccctccatagacaacattaaagagctgtttgaatcctcgtggtcaatagccaatgatctcgacatcggcaatttaaatgaaagcgagtga

SEQ ID NO: 3050 - DNA, 714 bp, synthetic construct
  source 1..714: mol_type = other DNA
atggagatcagatggcttggtcacagtgcctttgagattatcagtgatgaaggcgtgaaaatactcatcgacccattcatcagcaataaccctacctgccctattcctgtagaggactttgaggccaacatcatctgcatcacccatggtcactctgatcacttcggggacgctatggaaattgcaaacaatactaacgcgacactagtggcaaatcatgaaatctccctctttttgggggaacagggatttgactgtgtgggcatgaacactggcggaaccgtttccattctgggaatcaatatcaccatgcttgatgccaggcactcctcgtcaatcgactttacagaggaggtccggcccggcggagaccccggaagcttcctgataaccctggaggatgggacgaaaatcttccatgccggcgatacaggcctgttcggcgacctggaaacggtggtggggaacatcttcaagcccgacattgctatggtgcccataggggaccgcttcaccatgaacccattccaagccgctttagcaagcatgtggataagccccaaggccgttattccaatgcactacaatacattccccgctattgagcaggacccggccgtcttctcaaactttgtctatcagctcaatcctaacatcgatgtcgtgattatgaacccgctggagacttacgcgccagactttgataaggaatga

SEQ ID NO: 3051 - DNA, 687 bp, synthetic construct
  source 1..687: mol_type = other DNA
atgagagaattgaacatggacgagataaaaaacgctgagaagatcgagtcctttgaccaggtcagcgccaagctgaataagaccgagaaagaagagatagtgattgatgagatggacattgttttcctgctcgataaaagcgggtcaatgtttggtatcatcgatgacacgctcggaggctttaacagcttcattaaaagggaaaaggagaaggaagtgaaaacgcgggtgactctggtgcttttcgatcacaagtacaaggtcctgtacaccagaaaaccaattgaagaagtggaagagctgacagaggaggactattacgccgacggctgcactgccctcttggatgcaattggaaccaccatcaatcgaatcgagaaggaggtctgtgatgaggtgctttttgtaatcaccacagacggcctggaaaactattccaaggagtacagtagagaggacgtaaagaagctcatccgaagccataactggaatttcatcttcattggggcggacatagactcttacgaagaagctgccagcctgggcatccccagcacacgctctgccaactatgagaaaagtcgccgcggcgttggttcactgtacaggagcgtgtcctatgcaaagcggctacggtccagtggagaatcgttagacaaagtcaattggaagagggggctggattga

SEQ ID NO: 3052 - DNA, 663 bp, synthetic construct
  source 1..663: mol_type = other DNA
atgacaactgtggcggaaaccgtgtataaatgtcccctttgtggattcgcccatacgactgactgcatgacaagcacctcggcctttggagcgccagatctggatgggcggccttccccgatggcccgactgacaatctacctcttcattaaggaatgtccaaattgcggctttactagctatggcttccccgagcacacgagtgtgtcaagagagttcatccagagcgacaattacttgaactgcgataatatagacttcaagaccgaacgcgctaaactgttctacagggtctatctaatatcaaaggaagaagggatgatgaacagggcactgacagacctggtccactgcgcttgggtatgcgatgacgacgatgatgaggagaactccatcaagctccggctgctcatcaacgacctgttcaacgagttatatgactttaaaagtgacgaggaggactacgcccatttgattaagctggacttcatgagacgtgggcacctcttcgatgagcttatcgaggaggttcgccacaagaccttcagcaaatccttttacaataaggtgaaggactttcagatggagaaggcaaaaaaccgggacgccggcaaatacacctttgatgatattgaaggctatgaagagtacaagtacggttga

SEQ ID NO: 3053 - DNA, 2010 bp, synthetic construct
  source 1..2010: mol_type = other DNA
atgaaaagtatgaccaatgtagacattaacattatatgccaggagctgaatgagctgttggccggagctagagtggacaagtccttccagcctacaaaagacacagtggtgatgcgcttccacaaggccggaacaggccggatggatcttgtcatccaggccgggaaaagaatccacatcagccaatatcccctggcaaacccccagagtcctcccagctttcctatgctgcttcgtaaaagggttaagggtgccaatgttgtgagcatccagcagcacaactttgaccgggtcgttgagatcaaaatgaagaaggacattacgtacaccctcatcgtcgagctctttgccaagggcaacattatcctgttaaacgaggagaacgaaatcctcctgccactgaagcggaagcagtggagcgatagggacatcagcagcaaaaaggaatacgtcttccctatcgagcacggaatcaacccaatgacgatcactgaagatgagttcaaggaaattatcaagtctagtgatgatgagattgtgagaatcttggcgaaaaatggcctgggcagtttgtatgctgaggagatcatgctaaactgtgagataaacaagaagacactttcctccgaacttaccaaggaggacatactggagatttatggagccttgaagaaagtcttcgaaggcctggagaaaaaagagtttactcccatgattgtgaacaaccgcaaggagatcgaggagcttaaaaaacagaacccagacaagcaatacaaggtcaaggaggacgtagtggccatacggctgcaccagtacgaaaacttcgaggaggaatccttcgacagcttcaatgaggcctgcgatgagttctactcctcgaaggtaaagcatgaaatcacagacatccaggaggccgtgtggaacaagaaggtcgggaaattctccaaaaggctggaaaaacaggaagagacgctgcgcggcttcgaaaaaactatcgaagattcccagaagaaaggcgagctcctatttaccaattacgtccaggtggaaaacatcttaaatgtaatcaaggacgccagggaaaaggactatggttggaaggagataggaaagaccctcaaggatgccaagaagtctggaatggcggaagcacagatcttcgaatccatggaccccctcggtaacatcaccttaaatattgatgggattagcatagcccttgattcaaagaagtctattcccgacaatgcggaggtctactatgaaaaggccaaaaaggctaagcgaaaaatcaaaggggccaaaattgccattgagaacacaaaagcccagttgaaggacatggaagagaagaaggaaaaggcaatggctaacatcatggtgccgcaaaagagagtcaagaaaaacctcaagtggtatgagaaactcagatggttcgtctcaagcgacggaaccctggtggtgtgtggccgggatgcaggcagcaacgaggcagttgtgaagaaatacctcgaacagaatgacgtttatctgcatgcggatatacatggggctccctcagtggtggcaaaaatttcatcggataaactgaataacaatctgctgaaagaactgggcatctttgccgcttccttttcaagtgcttggagtcgtaattacggcacccaagacgtatactgggtggagccagagcaagtgtctaaaacccccgtgtcgggggagtttgtgccgaagggggccttcataattcggggcaaacgaaactacatccgaggggctaagctagagatcgcaattggaattgtggactatgatggggaaaagcgcattatggctggcccggttgatgcactgaaggcttacactgaaaagtacgtgaccatcaagccaggttatactaagaaagagaagatcgcgaaagagatcctctctcgcataaatgaggacaatattattgaattggatgacgtggttagggtgctgcctagcggtaaatgcgactttgtctga

SEQ ID NO: 3054 - DNA, 273 bp, synthetic construct
  source 1..273: mol_type = other DNA
atggacacaacggttaagaccgtcagtatccaccttgtggccgcagtggtggcggctattatcagcaccgcctttactctcggctggttcggttttaaaaataacgtctttgccttcgtgatcggggtagtgattctgtatttcattggacagtactgcaaaaaggcattcggcgaagagataagcgggttttccacatggctctgggatggcatcctacccttcggatttttctggttcatcctgtggaccatattgactaactacctgtga

SEQ ID NO: 3055 - DNA, 8640 bp, synthetic construct
  source 1..8640: mol_type = other DNA
ttgaatcgaaatagcaaaatcattctgatttcgctgttcacactgctcttgctggccatccccgcgggcttcgcggccgatattgaatcaaacagccacaataacctggatgattcaaatacagtaaattttgagattaacgccaattccaaggataccaacctggagagtaacctcaatactggcaatttagaaatgaatagtaataatacgaatctggatatgaacagtaacaaggcaagactggccatgaatagtaatgccagtgacctggaaacactcggtttgacacggggggagtttgagaacgggtcaaacaatccctctctcgagtattcatccaattcactctcagacaatagcaataataaatatatatccccatctagtgataaaaacacttatggctccaacaaggtaggtgacggtaacgtgaacatctactactttgacgctagtgctagtgacgacaccggtaacggctcgttagaaaggccttataagaccctcaagaataaccggatcgtggaaaactccattaattatcttgccaacggagtatacaacctcgatgctacaattaacaaaaataacatcagctttattggtgccgactcttcaagaaccattatctcctacgctagcactgcctttatcaccaacaatatcctaaactttgaaaacatcacattgaaaggactgaacatccagaacagagggaacctaacggctcggaacaccatcttcataggtggaaaagggtattgggatcgatcttacaacaatattttcggaggggcaatatacaccccccagaacgagaactacacgaccataatcatcaactgttccttcataaacaacaccgcagactatggcggagcaatctatgcctgcggcggcaacgtgacggtggagaactcctccttcataaacaacactgccgagaggtttggaggcgccatcgcctctgagaataccctgaccaacaatatacgcaatgtcgagtttatccacgacgtgtcacttaacgatgcagggggcggcttgttcatctcattcacccagttaaacggcactgacttgcacttttacaattgcagcgcagactttggcggtggaattaccgcgctgtactccaacgtgtccctcaataggttcatcggcaaggacaacaaggcaagatacgatgggggggcgatctatcagttctactgctcgttgctcattgaaaactccctctttgcgaataactctgcaaacaatggtggaggactctatgtggacaattcaaactccctgaaggtgacaaagtccaacttcacacagaacaacgcaacagagaagggaggagcaatctattcactgtggaacaccctggccgaaggcaactccatctccaacacccgcttcaacaacagcttcagcaacaacaatgccaagaactactctaatttctatgagggcaaggatgtcaacatgaggatcggcagcggcaatgtcaccctataccatcgtaacgagacggagatcgatgagattcccagctattacagtctgatagatctgaatcaggtcacgtccataaagaatcagcagtccggtggcaactgctgggcatacgcctcaatcgccgccctcgagtcagccatcattaaggccggcggcgaggcgctggacctttcggaggagtctatgaaaaacctgatagtcctcttttcagactatgggtacccttggctcaccaataacgggggaaatggggacttcgccaacgcttacctgacctcttggctcgggcctgtcttcgaggatgacaatccaggcgatgacagatcatacctctctcccgtcctcaactccagaatacacgtgcagaacatccagtacctcggccggaacaactacaccgacaacgaccgaatcaaggaggcgattatgaaatacggcgcagttgctacaagctattatatggacaactcctattacaactacaggacttccgcatactattgtccgtcagccacgagctccaaccacgcagtggccattgtcgggtggaatgacagctactccaagagcaacttcaaaaccaccccccaaggagacggggcctggatcgtgaaaaacagctgggatactaattggggggacaacgggtacttctacgtgtcgtactacgacatcctgatctttccgctggggtctatggactggggccatgcgtacgtcttgaacgataccatcaagctcgacaagaactaccagtacgacatttcagggctcactgactatttctacaatgcctcctctacagcatggtacaagaccaagcatactgctgatgaggacgagtacctggctgccgtgtccacctacttcctgacaaccacggactacacaattttcataaaagtgaatggcgaagagctctacaatcagagcggcaacagcgagtacggctaccgtaccatctacctaaacgacttcattccactcaaagcgggagacgtctttgagaccatctttaagatcaatgtgagtggagaaacgggtatcccagtgtctgagggctctgccttcaacaaggtcctttatgatcggaaccagtcattcgtgagctacgacggcattaactggctggacatttatgatatctattggacatataactccgacgtgtacgggtcgcactactatgtgtctgcagcactctgtctcaagagcttcagcttcattaatgaaatcggaaccaacctgaccctggagtttaattacagccttgataacgagggagaccggatcagtccagtgaatatcatcgctcacgtcattaacgagtacggtttcaatctagacaacgggcaggttaaattcatcatcaacggtacagaaacaatcgcagacctgatcaatggatacgcgaacatcagttggaacttcacagatattgaaaatgaggtttacgcccttttcgagaaaacaggatacctcagtagctccgctaatgagactgcaacactgtccgagaagtatgtcaccctcgacctgaatactctgctgagtgaagacaagctcaccatcactgtagacagctctcgcaagattaatgagactctgatactagagatcaacggggaaaagcacccctttaacctctcggagggccacgttgtgtacgacttgtacgatattgaagatatagactacttaattcgggcctacctgaatgacacggggttctacaactgcgaagagaagagcacaatctttcggctgaatacagaaattacagagatcattgcttcgaactttacaaccgatgattatagcaatgccatctatgagataagtttggttgacagtcagggtattgggatcgccaataaggaaattctttttaatatatctggcaatttgacgaataataacaacaacaataacaattttaacaacattatatttaacctgactaccgacaacgacgggaaggccaggattcctatcaaccttccaggcggaaatttcacaataaacgtccaatccaaagggaactacctttattcgtcagctgaagtggccctgaagctcaaggtcaaggataaagtacgcctagacattgatctcaacttgaacttcaacgatctggaagtgatcattgagctgaacagatcactgaacgagactgtgaacttcagcttcgccggagaaagctcaatcatccgattagaaaacggacgagctagcgttaatttcacagggctcagcaacaacaattacacagcaatcgcttatctcgagaacgacatcgattacctgagtaacatcgctcagaagacaatagaaatcaacatacgaaacctgataatccaggccgatacaattaacactaccaaccgttactatggcaattatacaatccttctcacggatgaggaagttaatgaggtagccaacaagacactgaatgtgaagatcggtgaagaaagcttcaataaaacgtccgataacgatgggaaggtgatcatccctctggatttaggcattggcgaatacgaggtgattatcagcttcaatggcgataaggacttctttaaagcgaatgcgacgcgaaccatcaccgtgttggaaaagctatttgccaatatcaccgtttccaccctggtggatgaggccacaatagacatcattatcgataagaagatcaatgagactctgaatatcagcatagaccagagcgagtatcccgtgctgttcgagaatggaaccggccagctgatcctcgacggcttggaagagggcaaccacatcgtcaccattgatctgctcaaatacctcctgtttgaaagcaaagagttcgagatcgacaaatccataaatctaagctctgatgactttaactgttacgagcacacaaacagcacttacaccgtgctcctgaccaacaatggcaaagccctggccaacaagaccattcgcttcgtcctaaacgacaccacaaccattcggaacacagatatggaagggaaagccagtattgacattgatctgagcccaggagtctatgagctgaacattacttattatgatgatgagcggagcgtgatcaatacagtctacgtgttgtccaacataaccaatagcacagatcctaaattcaatgtgacccttgatatggacaccgttctgagtcccgacaagctaactatcaacgtaaactgctccaagaagattaatgagacgttaattctcgaaataaacggggatcagcactttataaacctgaccgacggattcgtaagctttgacttgtatgagcttgaaaagattgaatatgtgatcaccgccaaactaaacaacaccgacctttacagatttgaagacaagtcagtgaacttcgagcttaaccaggaggccacagacattattgcttccaacttcaccaccggtgactacagtaatgaacgctatgagatcaccctggtggactccgaggggattggaatctccaataaggagatttcgtttaacatttccaacagtctgatgagcaatgagaattatatcatctttaatcagactactgacaatagcggcaaggctagcattccaatcaacctggctaggggaaattacacaattaaagtccagttcaaagaggactacctgtatttagcttccgagtctactgtggatctgaaagtgaaggaaaatgttaagattgatatcgagtttaaacaaatgatcaatgacctggaggtcatcattgaattgaacaagactttgaacgagaccgttaacttctccttcgcaggcgagagctctatcatcagactggacaacggcaagttctccatcaactacaccgggctggcgaacaataactacaccgtcatcgcttatatcgaaaatgacaccaactatcatagcaacattgctcaaaaaacaatagagatcaatatccgcgagcttatcatccaggccgataccattaacactatcaaccgttactatgacaattacagaattttgctcacggatgaagagggcaatggaatagccggtaagacccttgatatccgcatcgctgagggaaactatattgaaacgagcgacaatgacggaaaaatagtgattcctcttgacctggggattggagaatacgaagtgaatatcctttttaacggagacaacgagttctttaaggcgaacgtaaccaaaacaatcacggttctggaaaagctatttgcagacatctccatcagtacgctggtggatgaggctacaatagacattattatagataagaagattaatgaaacccttaatgtaaatatcgaccaaacttcataccacgtaatatttgaaaatggcaccggccagttgacggtagacggcctggatgaagggaaccacatcgtcaccatagatgttctccggtacctcctgttcgaaaacaaagagttcactatagatcggagcataaatctgacttcagacgactttaactgttatgaacacaccaacagcacgtacactgtgagccttagcaacaacggcaaagtcctggccaataagaccattaagttcatcctcaataatcaaatcatcctcaggaacactgacagcgaaggcaaaacttccatcgacatcgatctcagtccaggggtctatgacttgaatatcatctactatgatgatgaacggagccggaccaacacaatctatgtactgtcgaatattacccatagcacagatcctaagttcaatgtgactctggatatggacacagtgctcagtcccgacaagctcaccatcaatgtgaactgctccaagaagattaatgagaccctgattctcgatatcaatggaaaagagcagatcctgaacctgaatgacgggttcgttagcttcgacttatatgagctggagaagatccaatatgtcattacagccaaacttaacaacacagacctgtaccgcttcgaagagaaaacgatcctctttgagctgaaccaggaatccacagacataatagctagcaacttcactacagacgattacagtaacgcgatttacgaaattcgcctggtggattcctacggcctggccatagccaataaggagattttatttaatatttcgaacagtcttatgagcaatgagaattatatcattttcaatcagatcaccgacaactcaggaaaggccagcatccccatctaccttcccgggggagattacacaattaaagtccaattcaatgaggacgacctgtatctgtcttccgaatctaacgctcacctgaaggtgaaggacaaagtgaggatcggcatcgagtttaatcaaaacatgaacgatctcgaagtgatgattgagctgaacaaacccctaaacgagaccgttaacctgatcttcgcaggggaatcctccaatgtcaaactggagaacggcaaggcttctctgaagttcactgggctcgcaaacaataattatacagcggtggctcatctggaaaatgatagggattacattagcaatatcggcgagaagaccatcgagatcaatcttcgtaacttgatcatcatcgccgactcaattaaaacgaaaaatcattactgggacgattataccatccttctgactgatgaggaggggaagaatgtggccaataaggcactgaacattaagatcgacgccaacagttttatcaaaactagcaataatgatggaaaggtgattatcccgctggatttaggtctggggatgcacgaaatcaatatcgcatttgatggagacaatgagtttttcaagtcaaacattactaagaccatcaacgtgattgaagagatctctgtcaatgtcaatatttccactttagtagataatgccttaattgaccttaagttctctaaagaccttaatgagaaaattgacgtcctgatagatcagaacctgtatcctgtgtctctggagaaaggtgccggacagattagggtcaacggcttggaggaaggaaagcacatcttgaccgtggatcttccagaatacctcctgttggaaagtgaagagtttgagatcgacaagacaatcactcttatctcggacgacttccgctgctatgagcattcgaacagcacctacacggtggtgctggagaacaatggcaaagctttagctaacaaaaccatcaagtttgacttgaataagattgtgaccatccgcactaccgataacaacggcaaagcctacctgaacattaatttgagccccgggacgtacaagttgaatatcgcctactatgataacggccggaataagattcataatatctacgttctggctaatactagtggtgataataagacaaacgaaactaattcaagtagtaacactaaccccatcaacaaccagacaaataacacgaaccctacgaataacacaaagccaatcaacaacgaaacaaacaacacaaaccctaccaacaacactaacaccaccaacaatactaatacaaccaacaatcaaactaataacaccgacccggttattgttagaaaggggactaatatactctgtcagaacatgattacaactgcattcgacagcaaagtggacggccgcatcggtaaatacttcgttgtgacgctggttgacgccgactacaagccgatggccgacaaaaccatttatattggttttaacggtaagaaatacattaggaccactgattcttcaggtcaggctaaactgcagataaacctggcttatgaggggagctacacctttgccatagcgttcctgggagacgatgactataagggcagttttgtggtggcgaacatcaaggtgaacaaacagatcccgcagctaaaatcgtcggataggacgtatagatcaattgccaagactaaaacactgactgcatccatcaagaccgcccaaggcaacgctatcaccggcaagaaggtcatatttactatcaacggtaagaaatacacggcaataatcaacagcatcggtattgctagcgtgaaggtgagtctgtctaaaaaaggaacctatagatttaccgttcagtccgaggctagttctacgtatgccagcacgaaggtcacgcataaattggtgattaaatga

SEQ ID NO: 3056 - DNA, 1818 bp, synthetic construct
  source 1..1818: mol_type = other DNA
atgtccagtatgtcgagtgtggccgggttatccaaatacatcagaacattgcctaaagccaaaagcacttttctaatgatcatcgtcttgagctttatcataggcgcggtgctctttttagtcaagcccatgagcctcggaagcggtctggagaatttcttctacggtggtgcctttggatttgtggtttacgggctgcccgctatcatcactggtgccaccgatcagaaatgggtgagcaccctaaaggggataaacctcaagatgaagcattccatgttccttgccctggttagcatgaccatggccggggtaataagcatcatcgggaccatcataggaaatatcctccacttcgacctgtttatcaactccatcctgtttggcatagtaattgcatttgcattcaatatcttggtaatatggagcgtgactcggatcaggctcatcaaatccgtgctggttgccatcattcagcccctgctcatgattggagtcctgattatcacaagctttctgaacaacctcgaaagcgtctttgagctggggatatttaccaccttcttcaaggttatcatcgcaagtgctgtcttcctgctggccatctattcgttcatttctatcgtcgaatccccaatgaaaaagaacttaggcttcggcgctctggagatcctcagtttcttcattagccatatgaacgaaggctccaagagcattgaagagctgttcgacaatgctggagaggctattgacacacttgtgggggtctgcagcttccggaagcccgacggggatattaaggccctgttcatttcgccttgcgtgcaccctggccccctaggcgacattggtgggtcaaatatgccgacaatcctggccaacagatttgattcgtttgccatggtggcgcacggaccatccacccacgacttcaatcccgtgagcagcgatgagatcgttaaaatcgagtcatcagtgcgtaccgcactggaaaatatggaatacagctcaaaggctagccgcttcgtccggtactcccacaagaaagccaacataggcacccagttcttcaataatggatgcgtcatgctctcaacattcgcaccttccgggagcgatgacatcgagtttgcggtggggctcgccacgatgattgaaagtcagaaggagctggaaatcgacaacccgattcttgtggactgtcataactcattcaatgcagagaagggaggagtgctgccaggtaacccagagctcttccagctactggatacaatcaaactgattgaaaaaaaagacttggagcacgagattaaggtgggctgttattccacagaccttgggggctttggcaagcacgaaggaatcggtgatagcggccttaaaaccatggtcattgaggtagacggccaacgaactgcttatgtgcttttcgactccaataacatggaacttggctatagggagaccatattcaatgccgttgaagatctggagattgatgagatagaggtcatgaccacagacacgcatagcgtaaacaccctctccgcaggctacaacccagtgggaactgtggaaaaggaaaagatcattgagtatgtgcgcgaaagtatcattgaggcgattgatgacctggagactgtggaggccggcacgaggacggagcgcatcgaaaacttgaagactttcggccctaacaactcaacagagctgatctctacgatcagcagtatcgtgtctgtgagtaagatagctgctcccttgatctttattatggccattatctttgttttcatttggatctacctgttttga

SEQ ID NO: 3057 - DNA, 531 bp, synthetic construct
  source 1..531: mol_type = other DNA
atgatagaactcaaaactccaatcacagacgatgacattgacaagctgaaggccggagatgtgatcaccatctctgggcagatcttaaccgcgcgggaccaggcgcataagagaatccttgagcaaggagcccccttggacataaaaggcgctgtgctcttccacgcaggccccattattaaggaagagtcagatgacgcccagaccaaatacgagatggttgctgtaggtccaaccactagcatgaggatgaacccgtacgaggccgatgtcctagacatgggtgctaagattattatcgggaagggcggcatggatgacacagtgcgagaagccctgaaacgcaacaatgcagtctatgtggttgcaacgggaggctgcgccgcactctacgtggataaggtcaaggagataaaaggagtggactggctggatctgggcatgcctgaggccatctgggacttggatgtggaatcctttgggcccctgatcgtcgctatggacagcgatgggaacagtctgtatgactga

SEQ ID NO: 3058 - DNA, 3978 bp, synthetic construct
  source 1..3978: mol_type = other DNA
atgcgactgagatattttgccatcattagtcttattcttctgatctttctggttcccgttagttttgccagtgaaacgaatctggatagcatcgagctgaatgatttagctgactcttctaccgagatagatgacagcactgatctgaaccaggattatagttctaatcaggatctgagtctgaaccagaacagtgactccaacctgagcaatgaacaggagttatattcgaacaaactcagtgagaactctctagattcaaattcccagagttccaacgacttatccaactccttatacctctcgagcaacggagtgcgcctagccgatttgaacagtagctttgcccagttcaatacaagcctcaacgattccaatacgatctatgtgaactcatcctatattggttcggatgagtttggcactcaatcgaatccttacaagaccgtgctggcgggcatcaatgctgcgacgactgatttaaataacgtctatattgcaaatggggtttataatataaacaccacaataactgtgctgaaatccatcaacataatcggggaaagtctgaatgtgatattgaatgcttccaacgaaaacaacatcttgtcagttaaaggaagctctgtcgaggtctcaatcttcaacctgacattccgaaatggctatgctaataaaggaggggctatttacgtggataaatcttccctcaacattattggaagcctctttgacagtaacattgcctacgtcactagcgacaacggctacggtggggctatctacaataacgctggctttctgaagctctacaacaccacattcaaaaacaacaaggtggtagcagcctacaacatagtctctgaaggttttgggggtgcaatctataacgagcttggtgaaatgacggtgctgaactcgaagttctacaataactcaatcgacatccggaacatatccaaaagctcgtacggtgcgggaggagcaatcttcaaccgtgccggatttgtcaccatcttcaactccagcatcagcaataactcaatctacaccaactactcacttggaggggctatctccatctgggccagccgcaacgtctacatcatcaattccaccatcaacgacaacatcattagcggaagttacggcttcgcctctgtgatttcaaacaaggggaccctcctgcagatcgaaaactccacaatcagcaacaacaatatcaacgctagctcggtggagaacagtactatctacaacatcaacggcaatttcaacctgatcaactccaagatggaaaacaataagatcaagacaattaagaccaacctcctgatgtgccttgaggatcagcttattgtgaacagcagcttcaatctggcaaacgagttgaaaggcctcaacatgacgtcccttccttcccactacgacctgagggaggaaggcttggtgactgccgtaaagaatcagggaagctctggcgcctgctgggcatttgccttctactctgcaatggaatcataccttctaaaggtggagaacattagctacgacttctctgagaacaatatgaaaaactgtatgggcgacggcagcgagaacagtaccgactgggatgacggcggagcatacgtggtagcacttgcttatcttctccggtggagcggggcgatcaacgagaccgacgatcctttcaatgcccgctccaaagtgtcccccaccaatctaacgagggtcaaatacctcacggacgcactgtacatacccctgcgacttggggcgctggacaatgaccaaatcaagacggctatcctaaagtacggtgccatattcgtgccagtgtattcaaacatcattaaagccaattccaaatcaggctactccgatatccagtatatctgcaaccacgccgtggctattgtgggttgggatgacaactattccgccagcaactttaaagacactcccccgggcgacggcgctttcatcattaaaaacagctggggcaccagcgggggagaacagggatactactacatttcctattatgacgctagctttgccgcttccatcgagacatctgctgccgtggcggtgacaaacgttgtaaatacgacaggtgagtaccggaacaactactactacgacaccttcggcaatacctttgaaaccataggctacaattcggacaccatttggtttgcaaaccagtttacggccatcagtgacaatcctctgaatgccttcggcctttatacctatggggattccacctatacagtgaacatcacggtcaacaacaaatcagtttacacatcgagcggaaagatagtgggggcaggcttccataccatcaagctcagccggtacgtgcccctgacaaagggagacacattcagaatcatagtaaagctgacaaccccctccactctgttccctctcgccgttgagaccaactacagcggatttaccccaagggcaaagtccgactacaaccagtcattcatcagcccagacggtaagacatggtatgacctccggaacagcagcaacaacagggctgtgaagttctatgaggacatgtatttctatacattaaagaatgccagcgtttgcctgaaggcatataccgccttcgccgatgagctcgaattgaacctgtcctcaaacagtcccatttactacacgggagacactattaaactgaatctcacggtcactaaccgtggggatctggccagcaactcatctatcgcggttcctctggacaaatcttatagcatcgtgtcctacaagatatccgagaacaatgggaataagtcatatgatattcactacaacggttcaagcttcaacatggctagtggcatttggtccattccgtacctggagaatgaggagtctgtgagcctgatcttgagtctgaagatgaatagtaataatgacgttaacattaaagtcagcgccaacagctcgtcatgcagcgtaaaagacaatgtctatgccaacatttctctcaaatataagattccaagcaagttcgccaacattccatccatcaatacaactgctcgctcgtatgggctcctgaactttaccttgctcgatataaacaataagcccctcgcaaataaaaatgtgaatctgttgctcctgaagctggatgatgaggaggatgaagaccttagcctgaatgatactaatctctactattcagacagtagcatttctaatgcgtcggtaatctccaatctgaccttaaaaaccaacggcaatgggattgtgcagtacaaactgaatcttacattgggagaatacctattcaagctggcatttgatgaggacaagaattaccaagcgagtgactacaactattccctgaacataaccaagcgcaagagtactaagatcctgtgcaaggacatggtaacctatagtgtcgtggcagaggtggacggcagaagcggcgaatacttcaatgtcacattgactgactgtgacggctacgctatggctgataagtttatccaaattgggttcaatggcaggatctacaacagaaccactgactccgagggcaaagcaagactccagataaacctgaagaatccaaatgcctacacttttgccatctgtttcctcagcgatgatgactattatgcctcatttgaagtggctaaaattactgtgaataaaaagaaaatgtccctgaatgtgccgaataaggcctacaaggcctctgaaaagagtaaaattctaacagccacactgatcgaaaacaataagaagacagttgctaacaaattgttgacctttaccgtcgatgggaagacctattcagccaagactaatagcgccggggtcgccagcgtcaaggtgagcctgagcagcaagaagatttatagtttcaccgtcaaattcgccggagatgactgttacggttctgcgaccaagtccgcgaaggtgattatcaaatga

SEQ ID NO: 3059 - DNA, 6198 bp, synthetic construct
  source 1..6198: mol_type = other DNA
atgaaactgaaatacctgatgtttattggcctgctgcttatagggctactgatcatccctattagtttcgctggggatgcagacagttactctgcatactctggtgattctattagtctggaggacgacaattcttatctcgaaagcaacacagttttaaaggattctaaaaattcattacaatctatcgacgacgattgcttgatcggcaacaggactctggatgatacaagttattctgattcaacgaactccgaggatctgacaaaccctgatagcactaaccccgactctaccaatagcgaagatttgactaacctagagagtagcgcaaataccgactcatcatcggaaatcaaaacaataaccaagagtctaaatgaccagaataccaacataaaaagcctgaattacgatgagtacgcagactacatcaatctaaacaaccagctgataaactacgactttgccatcagcgactccaacacaatcttcgtaaacgcctcctacaccggtagcaccgagaatggaagtcaggctagtccctacaagtcaatctactctgcctacaattatgcattcggcctgtcctcggatacacggacaaacgtgtatatcgcgaagggggtgtacacagtgacacggagaatgaccatcaacaagaacctaaatctcattggcgaggactccctgaatacaataatcgattgcaatgggaatggtgccttcttcattagtcctcgacggagctatactaccgtgtacagccccttgctaaacatcttcaacctcaccttcacaaatggacgctattccagtggaggggcaatctacattaacgaaagtacagttaacttcgtcaacgtgatttttaagaacaaccgagcggaagcttcctattacgggtctgtagaagggggagccctatataacaacaaaggcttcgtgcgaatctacaactgcctgtttgaaaataacaccgccaacgatacgtcagatgcatgtggcggcgctatctataacgacatgggtgagatgaccattatgggctcccaattcataaacaacacagctaaaggagagaatgctgccgggggcgccatttacgacttttcagggattctggtgatcttcaactcgacaatcagcaagagtagccttctctccaactatagcatgggcggggggctggctagctggtcaagccataacatattcataatcaactccacctttgacagcaatgagggccatggaaagtacgtcttcggctctgcaatcgccaataaggccatcatgatgtatatcgaaaactccaccttctcaaacaacctggcaaatggaaccagcgacaagaacggaacattcttccacctgaatggggtccttgacttcgacaacgtgaatttcaccaataaccgtgccatcaatccaaaagaggacatcttgatctgtctcgaggatcagtttatcatttccgaggcttttagccaggaggatattgctgaaatccttagtgagatggaactgagccagctgcctagctcctatgacctcagggactacaatctggtcacttcagtgaaggaccagaagaacagtgggtcctgctgggccttttccactctggccgccctggaatcctacctgttaaagtatgaaaacacaagctatgacctgtccgaaaacaacatgaagaatctgattggagcctacgggctgaacggcaccgactggtatgacgggggaaaccactatatgtcgcttgcctacctcctgcgctggagcgggcccgtaaatgagtcgcaggaccccttcaacgatacaagccacaactcccggacattcacaaacatcgtgaagcaggttgaggatgtcttatatgtcccattgcgactgaactatctcgatatcgatcagataaaggcagcgatcctgaaatacggcgccctgtatacgacattgtgtagcgatgattccttcgacaacaacccggactactactgtgacgtcatctccatttccaaccacgccataaccatcgtcggttggaatgacagttactcggcagataattttgcggtgagacccccaggtgacggagccttcattatcaaaaacagttggggtcccagtgagggctacgatggctattggtacgtctcctattacgacaagacacttgccggctacggctatgacgccatcgctgctatggcattcacgagcgtggccaacgcctccacctataagaacaattaccagtacgacactctcgggaacaccttcgagtcaatcggctatggctgcagcactgcctggatcgccaatcagttcaccgctctgaacaacaatcccttggctgctttcgggctgtatacctatggcagcagcagctatctggtgaacattaccgtcaacggcatctcccggctggttcaagaggggaatgtcaaaggtgccggataccataccatcaagctggatgatgttgtggagctcctgagcggggacatcttcaagattattgtcaagctcagcactccagattccaattatcctgtggctatagagtctaaacgcagcgactatagcagtcgtgccaattccaatcctggcgagtccttcatcagctttgatgggcaaaactggcaggacctgtacgaagtgggcgacatccttaagttctacatgtatatgaataacaagacttttactgagcctaacatctgcctgaaggcctacacgatcggtccatctgatgtgcacctgcacgcgagggcaaatgcaaccacgtacacccagggggatacggtggagattaagattaccgtatccaatgaaggcgctaccgtgaatgacctgaacatcagcatgaagtggaacagttcatttttcctcaagagtttcactaagctgaatggtgagtttgatagcacaaaaaagatttggcactttgacacattctccgagggccagagcagcaccctcaccctggtcttcactatgaggggcaacaacgatgtggccagcctgagctatgactacaactattcaggcttcaatccaggtgatgccaacacgactcaagtgttaaatctttattatggaagcctcaccaaatttgtcgaggtcccgaacgtcagcactagcgtgaagtccggcgacgtggttgacattcaattgactgaccttcagtctattggcatctccgacaagcagatcgttatctccctgttagaaagcgacaacgaatacctcttcgagaacgtcacgttaataaccaatggcagcggtcaggcagggtttgtactggacctcctggaaggtaattacgtgttcctggcctcctttgcaggagacgactcttacatgtcgtctaacgtgacctttaatgtgtcagtatcaaagagcaacactagcattagcttggataacctggacccttccaatatcactgtcttttcaaaatctggggatgtaatcaacttcaccctctcggatggaatcaacaatctctctgacaagaacattgttatcagcctcattgaaagcgataatgactatctattcgagaacctcaccttaattacaaatggcagcggtcaggccgggttcgtactggacctgctggaaggaaactacgtgttcttggctagctttgcagaggatggatactacaaggcctctaacctgacattttacctaaacgtgctcagaagggcttcgagcatggaatttgattcctctagcctaatttacaacgggtcaaactggatcagcttgtcccagtcaaatgatctgatagaatttatcctcagcaaccagaccggtcctctggccgataagacgatcatcctcacagttgaagatcttaactcagttgacctcgccgaaaatccactgatttataacctgactacgggcccaaatggaattgcctcattcaaccttaacctcactaaatccaattacgaaatcattgccagctatctgggggacgaatgttactcgccctgtgagttcgggttcaatctgagtgtgcttaaaagaaacgctcctcatatcgtggctgacgatatagcaataaactcttccaacccctaccaggcgcacctactggacgatgatttcaatcccatcgcaaatcagtccctgctgtttgcgttcgctaagaaggacagtcaggacctgttcaattactctgcaatcacgaacgaaagaggaattgccattatcgatctgtcagacatcgagagcggggactacaacctgcttatcgcttttgagtccaatgacctttatgacgactctattctcgagattgatgtttctgtagtgaacgatagcttaaatggcgacaacggcacgaacgacactggcaacgggacgaatgggaccgacaacagttccaaaatcaacaccctgtttaaaattgacatgtcggacctgaccgtatcggctaatgtggacaagacaatcgaatttgcgttactcgacgagtcacttaatccactcgcggacaaaacgctcaatttgacgattgttgatttggacgaggatactgagctgattacagactctgatggcattgcgagttgcgtgctgaatctggatgagggggtgtacgaatttgtccttagtttcagtggagacgagaattactctccctctcgcctgatcttcaatctttccgtgagcaaagcagataacggtaccagtccgggtggagataacggtactagccccggtggggataatgctactaacggcaccgaccccagcgggggcaatggaacggcccctattaacgacaatggcactaatggaaccgaccctagcggcggcaacggcactagcccgggtgataacggaactgaatcatctaaaatcaataccctctttaaaatagacttgtccaatttgaacatctttgccaatcttgagaaggtcatcgaatttgagctcttggatgagtcccttaatcctctctcaaataagacagttggcctcaccataagcaaccttgacggcgtcagtctgattaccgacagcaacgggatcgcctcctgcccgattaacttggacgagggagtgtacgagtttgctctcaaattccttggagatgacgactactcagagtcggctatgatcttcaacctctcagtgtcgaaacgcattgcccagctgttgtccggggagactctcatcaatctgagcagtgagaagagggagtatgacgtgtacctcgtggatgataaattgagtccattggccaatgagacaatcctgtttgccctcagttcaatggatggccaagtcttgttcaactatgtggtaaagaccaacgatgaggggaaggccagcctgtccggcctggccaaactcaatgagagcaattacattgtcaagaccgagttcgcgtccaacgacttctttgagggcgctgaactaattaagaccataactttaatcaaggatgcgccaaacggagacgacgctaatgacaccaatggcacaggaaaccagacggataatggaaccgacaccggaaacaaaacagacaatggaaccgatacaaatggcaccaacggttcggatgtgccggtttcccgcaaagccacaaagatcatatacgaggacatggtgacccaaagtgtggttcccgacgtggatggcagaattggagactacttctacgtcacactggtggacggcaacaacaatcccttggcaaacaaggaagtgaaaataggatttaacggccggatctacaaccggactaccaatgccacgggcggagtgaaactgcagataaaccttaaaatgcccttcacttacacctttgcaatctgcttcctcggtgacgatgactataacgcatcctttgaagtggcgaagataactgtgaataagaagaagatgagtctgactgcgccaagtaagacctataagtcaactgccaagaccaaagccctgacagccaccctgaaggacaacaacaacaaggccgttgcaaataagaagatcacgttcacggtcaacggcaagacatattcagcgaccacaaactccaaaggagtcgcttccgtgaatgtgagcctgtccagtaaaaagacctactcatttaccgccaaatttgccggtgatgcttgttacggggctgtgacaaaatcgggaaaaattacgattaaatga

SEQ ID NO: 3060 - DNA, 318 bp, synthetic construct
  source 1..318: mol_type = other DNA
atggcggacatcggcgaagccgcagagaagaagctgaaaagccggatcaggaaactgaaaaagtgcaacaaggatgaagaggaaaaggtgaagttcttcaaccagctgggcctcagcttcaccatcagtctgcccacgaaaaatccggagaagcaggaggactttataatgctatacaccacacctgaaggacacatagtccatgctgagtacagctactccgaaggggaggagtttgcctccatggacattccagagaaggatttgaaggtgatcattgaatcattctcggattatgagctcaaacttctggactga

SEQ ID NO: 3061 - DNA, 1143 bp, synthetic construct
  source 1..1143: mol_type = other DNA
atgattgtaaacaatagcctcgacgagctgaagaaacgggaaagcgcccttaagatcatcaggtccattgtggagaacgagggccgcagctctctgtacgacgtcactggactgtcgggcggcttcataagcagtgaagaggagctggatctcctggagacctatgtgggccctgccatcttcgaggacgagctccaggtggttgcgaaggagcatctgggcggggagaaggcacttgcagtaaaccgcacctcctcaggcatcctcgccagtattctgtccttggtgaaggagggagagcacgtaagtcactttttagcccagtaccctgcccacccgtcaattccccgctcatgcaacattgtgggggctgactatgacgaatatatagatctaaacgaatttaaaatagaggacaatacaagtctagtggttgtgacaggctccaccatggaccaccaggtgatagatgaggacacgtttaaggaagtcattgatatggctcacgataaggacatcccggtgctggttgatgacgcgtccggtgcacggcttaggacggccgtcttcaatcaaaagagggcctgcgacctgggggcagacctcgtggtgacaagcacggataaactcatgccaggtccccgaggtggattgatggctggaaaagaggaactgatcgataaggtcaaggtcaaggcaaaccagttcggccttgaagcccagccccctctcatcctggccatggtcaatggcattaaaaactacagcgaagacaatctgatcaatgcaatctctcgtaaagacaagttctacgatatggtgtcgaaggactacgaaatgtttgaaaaaaccccaactggggtgatggtcactgaagatgctctgaaaaaacaggtggacgccttagatattgagacagagctcagcgagaaagacttgagcttcctatgggctatgattctgctcaaggacgaaggaatcatcaccatccccgctgtggggatgccaggggcctctgcgaccgttcggtttgacctgtccacccaagacgttatcgatatgaacctgggtatcttgcatgataaggtggacgattcatttaacaagttcttcagacagctgagcagatgtggaaaagtctga

SEQ ID NO: 3062 - DNA, 912 bp, synthetic construct
  source 1..912: mol_type = other DNA
atgaaacgcgagatgatcaagctcctggtgagctacgacataatttccaaagaggaagccgagaagattgattcaatcaacgatgaagccattgaagagtcaatcaaggagctggggtttggaaaaactgagcacattacgaaggaaaggatatccgagtttctcgaaactgaggagctcggggaagagattctatgcttccggaaggtcttctcgaccaacagtatttccaaattcctggccaaccatggcgccaaggaagggacggtactgatttccgagatccaaaccaacgctagagggcggtccggcaagaagtgggaggctccagacggcggagtttggatgagcatgattttaaggccggatgtcccccccgccaagataggcttgatcacactcgcaaccggtgtggcaatagcgagagctatccggtcatttgacgtggacgcgaaaatcaaatggccaaacgatatcctaatccacggcaataagatatctggtgtgcttactgaggtcattgcaacattcaatcagatcgaatatgtgatcgtgggtgttgggatcgacagcaacctgaagttggaggacttcagtgaagacatccgagaaggcacaaccaccttggaagaggagatccctgtcaaagtcgatgagaatgagctcatcggtatcttcctgaatgaatttgagaagatctatgacatctacctgaatggggatgtggaagagattcttagcgaatggcgtgccctgagcgacaccataggcaaatacgtaagcatcacccagacagggggcaagacaactcagggatacgtggtgggaatcaacaaggagggaagtctgattattgaaaaacaggacggaaaccttgagaagattatctctggcgagctgcgcacgctgtga

SEQ ID NO: 3063 - DNA, 1494 bp, synthetic construct
  source 1..1494: mol_type = other DNA
atgtttgagaaggttctgattgccaacaggggggaaattgccatacggattatgagagcctgccgcgagctcgacatgaagagcgtggcggtctactcagatgcagataaaaccagcctgtacactaactatgcagatgagagcgttcctttgggaaacccctctcccagccagtcttatttaaatattgaaaagatcattaatgcggcacttgacacaggagccgatgccattcaccccggctacggattcttggccgagaatccagagctcggacgccagtgtgagaaaaacggcatcaagctaatcgggcccaagggggagcatattgaaaagatgggcgataagatcacttccaaacagctgatgaaagaggctggcgtcccggtcatcgaagggacccctgagggaatcgatgacgtggaagaggctaaggaaatagctgaagctatcggctaccccgtgatcatcaaggcgtccgctggaggcggaggtatcgggatgagagccgtctattccgaggaggagctggtccgggcacttgaagccacccagtcggtggccctcaaaaactttggagacgcgaccgtcttcatcgaaaagtacttagaaaagccaagacacatagaatttcagatactggcagacgagtatggaaacaccatccatgtgggcgaccgagagtgctccatccagcgaaggcaccagaagctgctcgaggaggccccgtccccaatcatgactgaggagctgagggaaaggatgggtgaaagcgctgtgaaggctgccgaatatatcggatacaacagtgcaggtactgtggagtttctctacgacaatggggactactacttcctggaaatgaacacccgcatccaagtggagcacccaatcacggaaatagtgacgaacacggacctaatcaagcaacagattaaaatagcctgtggggaagagcttgaatacagtcagagtgatatcacagtcaccggccatgctatcgagtgccggatcaatgcggagaaccccctggcagacttcgcccccaacccaggcaagatcacaggttaccgctcacctggcggccctggcgtacggctggacagtggtgtgtatatgaactataccattcccacattctacgactcgatgatttccaaactggtgacaagcggcagaaccagaaacgatgccatcaatcggatgaaaagggccttgagcgaatatattatcctcggcgtaaagaccacaattccgttccacaaggccatcatgcgcaatgagtcatttctggcaggggacctcaacacccacttcgttgacgagcataagaaagggattgaagaggagatggagaaggtaattctggaggatctggagcgagtgaatcgtatgaaatctacttttatgcctgggaaaaagatagctgccatttctgccacagtgggtacgtacttcaatgctgcacaagcccagcagatgaaaaagaaatga

SEQ ID NO: 3064 - DNA, 120 bp, synthetic construct
  source 1..120: mol_type = other DNA
atgattagtatcaaaatcgtgataaaccccagctttgacatggtgaagagcaccctcaaggaaatgatcaagttctccctggagctaatgaaaattttcatcatggtcctgttcgcctga

SEQ ID NO: 3065 - DNA, 831 bp, synthetic construct
  source 1..831: mol_type = other DNA
atgatttttaattattccagtgttatcatgaagattcggaagaagaaacagctggagatgatcctgcaaaacgtgccctcgcacccaaacccaaaagtagagctggagcagtactcaaccccatcctctattgcctccgatctgatatggaatgcatataccttgggagacattagcgacctgagcgtgttggaccttggatgcggcactggcatattcgcaatcggctcttggctgatgggggccggctacagcctcgggctcgacattgaccctgagagcatcgcgctcggggaaaaaaccatcatcgacctcattggcctaaaccaaccgagtgacgtagatgtcttcaatatcaacttcatcgtgggagacatcaaccagtacaactcaatctccgaactcctgaatgataagagtattcagagcgatgaaaaatacgacaagctgatcgaatactacaatagcaacagcctgggggatgactcgaaccttaataactccaacgacggtttgatgaacggctcctttgatgagaaggacttcaagttcgccacgttattccagaaccctcccttcggttctcaggagcggggaacacgccacgccgatagaaaattcatggagtttgctatggccagtgctgaagtgatatactcatttcatatgaaaagcacagaggagtttgtgatcgattattacaatgaccttggcggggatataagccataagttcgtctataatttccccctgcccaagatctatgactttcacaagactgagtcaagggatgtcaaagtggtggttctacgagtcgaaaactttaagtga

SEQ ID NO: 3066 - DNA, 816 bp, synthetic construct
  source 1..816: mol_type = other DNA
atgcagaacagtaaagtgtccgtctttataccgaacagctttctcgctgagaccaaggacctaaagctaaaaacctctaaggtgggtctcatcggccgagccctggcggtgttcgaggtggatgaggtggtgatctataaagatctgtctattccagacagcgaacagactgacgacggggatttcattgcagaagtcctcaattatatggacaccccccagtaccttaggaaaaaggcaattcctatcaaggccgaattgcgccacgttgggatactcccgcctttgagagtgccacatcacccaactggcaagcctgagctgggcgattaccggcagggattcacggtaaaacgcaataagaaagggaccttcgtggacatcggtatggataagctggcgttttgcaaagagcaacttacagtaaacaagattttctcattcaagattacgaagtttgctaaggaggtaatcgtcacccccgacgaaccagatgacatttactggggattcaagacattaagcaccaataaaagtctgaaaaacagcctgaagctggttaatcccgacctggttgtggaaaccacaaggtatgccgagacaatcgactctatctttaacgaactgaaaacaaaggtggaaagctccaaccacatagccattgtctttggcggcccctactcatcgatcagtgagaacgtcgagtcctccaagtgggagacggtgaaaatcaacaccatccccaaccagggaacagagactgtccggaccgaagaggctgtgatcagcactctcgccatcttcaatatactgtga

SEQ ID NO: 3067 - DNA, 1011 bp, synthetic construct
  source 1..1011: mol_type = other DNA
atggtgagacatcaccagccacggaaagggtccgtggcattcagccctcgtaagcgcgttgcgaaggagacacccagaatcaaggcgtggccaagtaatgaagaaccaaagctgctgggacttgccggctataaggcggggatgacacacgccatggtggtggacaatgataagaacagcccatcccatggaatggaggtgttcacgcccgtcaccgttctcgaggttcccccccttgtgatcttggggataagatcatacgaaaaaactgctcacggactgaaggctatcactgaggtgattgccgataacttggacgaggagctctcgaggaaaatcaccctccctaaggactacgaccaatccgaagctattgcaaaaatacaggatgctctggagaagacggaggaggtccgcgtcctcgtccacactaatcctaagatggccagcgtgcctaagaagaaacccgaaatctttgaatgcgcactgggcggcagctccgccgaggagaaactaaactacgctctgggcattttagggcaggaaatcagggccagtgatatcttcagcgagggacagtatgtagacgccattgcaaccaccaaaggcaagggagtccagggggtggtgaagcggtggaacatccgaatccagtatggcaaggccatgcgcagtggaaaagggcggcacgtgggttctatcggtccatggtctccggagcgcaccatgtggacagttgcacaggccgggcagatgggataccataagagaacagaatttaataagaaagtcattaagatcggcgacgtgtcagaagtggatgctgtgaaccccgctggcggcttcattcgatatggcctggtcaaaaacgactacgtcctggtaaaaggctccgtgccgggtcccaccaaaaggctggttattctcaggcaggccatccggccgaagaaggccgacgatgcagcgcctcaagtgaactacataagcacggcctcaaaacaaggtgtatga

SEQ ID NO: 3068 - DNA, 765 bp, synthetic construct
  source 1..765: mol_type = other DNA
atgaaggtgaatgtttattcgattcaaggggaggtcaaagaggagatcgaactgcctgccatttttaacgaagagtacagaccagacctgatcaaaagggccgtcctttcagcgcagtccgcacgaatccagccatgggggaatgaccccatggcaggtaaacggacctcagcagagagctgggggtccggtagaggcgccgccatggtgccgaggataaagaccggcgccagagcagccttcgtgccccaggctatcggcggacgaaaggcccaccccgtacgtgccgctaagaaccaccatgagaaaatcaacaataaggaacggcgctttgccatccgcagcgctgtggcagctaccgtgaacgaggaattggtggccggccgcgggcaccgcatcgagaacctcgagcaggtgcccgtaattgtggaagatgatctggaaactgtcaagaaaacaagcgagacccgggagatattcaaggccctgggggtgtatgatgatgtcatcaaggccaaggacagcaaaaagataagggcgggccgaggaaagacacggggacggaagtacaaatccggtaaaggacctctcgtggttgtaagtgaagacaaaggcattggactaggcgcaagaaaccacgctggggtcgacgtggtggcggtcgacaacctgaatgccgaactgcttgctccaggcacacatgcgggtaggctgacgatttacactaagagtgctgttgagaagttaggcggactcttccagtga

SEQ ID NO: 3069 - DNA, 261 bp, synthetic construct
  source 1..261: mol_type = other DNA
atggacccatatacaatcattgtcaaaccccatgtgacggagaagactatgaatctcatcgaccagaacaacgagctgaccttcgttgtccggagaaccgccacaaaaagccagatcaaaagggcgttcgaatttctgtacgacgagaaggtggtacgcgtgaacactcacataaccagcaaaggactaaagctggcctacgtcaagctcgctgaagagggcgaggccgaagatgtggcagtgaagatgggggtgttctga

SEQ ID NO: 3070 - DNA, 726 bp, synthetic construct
  source 1..726: mol_type = other DNA
atgggaaagcgactaatacaccagcgtcgaggcagaggaacacctgctcatcgggtggcctctcacaggttcaaggacaagatccaatacagggcttacgatgaccttgagaaggaagggagcctgaaaggcaaagtcgtgaaaatcattcacgacccagcaaggaccgccccgattgctctggtcaagttcgagaatggggagaagcgacatatactggcgcctgagtcaattcagattgatgatgaaatcgagtgcggtatcagcgcccccatcagctttggaaatacattgccactggccgaaatccccgagggtacccctatctacaatattgagaacagacccggagacggcggcaggtttgtcagatcctcgggaacctatgcctcactcataactcatgatgccagtcaggccgttgtggaactgccaagcggggaactcaaatccttcaacccaaggtgtcgcgcaagtatcggggtggtggctggaggcgggcgcaaagagaaacctttcctcaaggccggcgtcagatggcatgcgtataaggctaaaggcaagaagtttatgacagttagaggcgtggccatgaacgcggtagaccacccccacggtggcggtaaccgccagcacccagggcggccgaccactatcagccgccacgcaccccccggacggaaagtggggtccattgcagccaagcggacgggcaagcggcgctga

SEQ ID NO: 3071 - DNA, 411 bp, synthetic construct
  source 1..411: mol_type = other DNA
ctggctcgcaagatatttaaatacagaggatatactatcgaggagctcaaagaaatgtcccttgacgagttcattgagctgctgccagcacgccagcgcaggagcctgaagagaggcttcctccctcgacagcagagcgtgttggataaaatgcggaagatgcaaaagatggataagaagggtggcaaaccgctagtagtgcgaactcactgtagagacatgatcgtcattcccgaaatggtggggaccacgttcggaatctacaacggcagggactttgtggaggtcacattcacccctgaaatgctcggctgcttcttcggtgaatttgcccccacaagggcccgggttcagcatggagacccagggatgggggcgacccggtcaagtatgtttgtgcccctgaagtga

SEQ ID NO: 3072 - DNA, 468 bp, synthetic construct
  source 1..468: mol_type = other DNA
atggccaaaaacaaatacgcctataacaatccagatgcggacgaatctaagacagcccgggctatggccaaaagcattaaggtgtccccaaagcattgtgtggagatctgcagtgccatacgcggcatggacgttgccaaggcaaaagcatacctgaatgatgttatcgacatgaagaaggcggtgccttttaagagacacaaccgggatgtcgggcaccgtaaaggaatgaaaggctgggctgcggggcgctaccccgtcaaggcttccaaggcaatcctaactgtgatagaaaacgccgaggccaatgctgaatataaaggtatggacgtcgagaacctcaagattgagcacatcagctcacacaggggaatggtaatcagaggcgccaggccccgggcattcgggcgagtcacgcccttcaacacaccgaccacccatattcaggtggtgctggtggaggcttga

SEQ ID NO: 3073 - DNA, 756 bp, synthetic construct
  source 1..756: mol_type = other DNA
atgatagaaaaagatttcgttacagaggggctcagacggacccgaatagacgagtatctagagaaagaactggagcgcgcaggttacggcggaatggagatacaggtgactcccctgggaacaatggtgattgtctatgctgagcggcctggtatggtgatcggtcgggggggcaagaccgtcagggccatcacccaaagcttgaagacgaagttcgacctggacaacccacaggttgaggtaaaggaggttgccgtgccggagctcaacgccagaatcatggcttccaagattgccaatatgctccagcgaggcatgcactttcgcagggtggcttacagcacaatccgtaaaatcatgggcgccggcgcccagggcgtggaggtgacaattagtgggaagatccgcggatcacggtctgctgtggcaaaattcaccgagggatacatcaagaaatgcggcgaacccgccaccagattcgtaactgaggggtttgcgacggcacctttaaagcccggggtgctgggaattgtggtcaggatcatgccacccgaagcaaccctgcctgataaggtggatatcattgccccagttgaagtggaggagccggtggtagaggccgcggaagaagacgtcgaagagatcgaagaggaagtcactgaagagattgaagaagtcgaggaggacctggaggagcttgaagaggagcttgaagacctggaagagttggaggctgcggaggaagatgtcgaatga

SEQ ID NO: 3074 - DNA, 207 bp, synthetic construct
  source 1..207: mol_type = other DNA
atggcaatcctcagaagcaaggaaatctgggagatggaaatagaggacatcgaggaaaagctggtggagctgaaggcggagctggccaagaacgtgtccaaaagcgcagccgccggggtaaatgagaaccccggcaaaattagggaactcaaacggacaattgctcgcgtcctaaccatcatgaaccagaaacagaaggagaattga

SEQ ID NO: 3075 - DNA, 345 bp, synthetic construct
  source 1..345: mol_type = other DNA
atgtcaaagatctgtgacgtgtgtggactccccgaagagctgtgcgtgtgcgaagagatcgcgagggaggtgcagtctgtaaaagtgtttacagtgcggcgccgattcgggaaactaatgaccatcgtcgaaggcattgacgaacacgatatagacattaaggagctgaccaaaacactgaaagccaagtgcgcctgcgggggcacggctaagaagggtcagattgagcttcaaggcgatcataaggcaagagttaaggaggtcctcagtgaaatgggattcagcagcgacactatcgagatccgggactccgataagaaatacaacaagaggagacgccactga

SEQ ID NO: 3076 - DNA, 336 bp, synthetic construct
  source 1..336: mol_type = other DNA
atgataagctcaaataatatcttctaccatgaactcatcgggctggagctgaaagtcgtggactcgtccaaccccagcctcatagggctgtgcggtaccgtgattgatgagacaaaaaagacgctccttatcgaggtggaggaaaaagtcctaagtgacgacctgggcagcaatcaacagaaccactttaacctgatttataaggagaagctgattcagaaggacgtgtccgtattccagttcaaggtgccagatggaaccatcgttgaaatcgacggcaagatcttattgaaccggccggaagataggatcaagaagcgctacaaaaaaatttga

SEQ ID NO: 3077 - DNA, 321 bp, synthetic construct
  source 1..321: mol_type = other DNA
atggttgggctgaacgtgaaggaaccagaaacaaaatgcgacgaccctaactgcccgttccatggtaatctgagcgttcggggacaggtcctggagggggtggtgaccaccaataaggcagagaggactatcacagtcgagcgcagtttctacaagttcatacgcaagtatgaaagatacgagaaacgaaaatcccggattaacgtgcacaagcccgattgcatcgatgtggaggtgggcgacgccgtcaaaatcgcggaatgtaggcccctaagcaagacgaaacactttgtactcgtggaggtcaagggcgacgattga

SEQ ID NO: 3078 - DNA, 399 bp, synthetic construct
  source 1..399: mol_type = other DNA
atgaagccgacaacctcaagcgtgacaaaggccctaccaatcggcgccagactgcagtgcgtggataacacgggtgcccgggaaatcgagattatttccgtcaagggatttaaaggggtgaggaggaggctcgatgtggctggagtaggcgacatggttgtggccagcgtgaagaaggggaccgctgacatgagacgcgaagtcgtcaacgccgtggtggtgcgccagaagaaagagtaccgacgggcggatgggctccgtgtcaaattcgaagacaatgcggccgttatcatcactcccgagggagtactgaagggttcggagatccggggccctgttgccaaagaggcagctgacaaatggcccagcgtcggcagtgcagcatccatactgatttga

SEQ ID NO: 3079 - DNA, 342 bp, synthetic construct
  source 1..342: mol_type = other DNA
atgagcattcagccccggaaacaaagaaaggccctctatacggcgccactgcacatacgccggaaaatcatgagcgcaaatttgagtaaggaactcagagcagatattggcaaacgttcactacccatcaaggtaggggacaaagttcaggtggtgcgcggagacttcaagggccacgagggaaaggtggaatctatcgacgccaagaggtacaaagtgaccgtggaaggcgtcacactgaacaagcctgatgggaacgctgtctttcttccaatccatccgtccaacctgatgatcatagaggccgatctgaaggacgagcgaaggattaaggaggagtga

SEQ ID NO: 3080 - DNA, 735 bp, synthetic construct
  source 1..735: mol_type = other DNA
atggcaaagatgggcagcagaaagcatctgaaaagatataacgccccgaagacctggcctatccatccaaaagaagatacttggacagtcaagcctgcccccgggacgcacgccatcaatgactcattgcctctgctcgtgatcatccgcgatatcctggggatagccgataacagcagggaggcgaaaaggctcatcaacacaggtaatgttctcatagacggacgcgccaagaaagattacaagtttccagtcggattcatggacatactgtccatccccaagacaggggagaattaccggatactcctggacacgaagggccggctaactctgcaccccatctctgctgaagacgctgagttcaaattagctaagatcgtaaacaagagcaccatcaaaggcggaaaaacccagctaaaccttcacgacgggcgaaacgtgattgtggaagaagacaactactcggcatacgatgtggtctgcctcaacattcccgagcaggagattaaggaaaacttcgaatttggcgaggacgtggttgtgctggtgaccggtggcaagcacacaggagagctgggcaaaatccaggaggtcattgtagaccagtccagtaaagcaaataccgtcattatcgagaaggcgaataaggacaccttccttactctgaaagattatgcctttgtgattgggaaggatgaaccagccattgacctgttggaggtgaatcaatga

SEQ ID NO: 3081 - DNA, 522 bp, synthetic construct
  source 1..522: mol_type = other DNA
atgaacccaatgaacgaagtggtcatagccaaggcaaccatcaatatcggggttggagaggccggcgaaaaactgtcacgcgctatgaccctgattgagaacatgacagggcagacccccgtgaagacatactccaaagtcactaacccagaatggggcataagaaaacggcagcccattgcctgcaaggtgaccctccgtggggagaaggctgaggatgccatcaaaatggtgctagatggaatcaacaacaggctgaggccaagtcagttcgacgcacagggtaatgtgtctttcggcattcgagagcatatcgacattcctggaatgaggtatgacccggacattggcatattcggcatgaacctcagcatcacgtttgaaaagcctggttaccgcatcaaacggcgcaaaatccaaaagaagagcattcccaagcggcacagaatcactcccgaggaaacgatgaagttcatggaagagaattttaatgtaacaatcgcggaggaggaagagtactga

SEQ ID NO: 3082 - DNA, 153 bp, synthetic construct
  source 1..153: mol_type = other DNA
gtgattgtcctccccagaaaatatggcaaggcctccaagaagtgcagtcgatgcggagaccacagcgcgatcgtgagccgctacggcctgaacctgtgcaggcagtgtttccgggagatcgcaccaaaaatagggtttaagaaatacaattga

SEQ ID NO: 3083 - DNA, 393 bp, synthetic construct
  source 1..393: mol_type = other DNA
atgaccctcatggacccccttgcagatgccctaacaaacatccggaataacgagcgccaggtgaatgaccactgtacgattagcccagcgtccaaactcatcggacgggtgctgagcacaatgcaaaaggagaattacattggcgaatttgagttcatcgacgacaacaaggctggcaagttcgaggtggagctggaaggtaacattaaccagtgcggggtaataaaaccgaggcatgccgtcaagaaagatgaatttgagaagttcgaaaaacgctatttgcctgcaaagaacttcggcatcctgatcgtcaccactcccgaggggataatgacccacagggaggctaaggaaagagggatcggcggacgactgctggcctacatgtactga

SEQ ID NO: 3084 - DNA, 534 bp, synthetic construct
  source 1..534: mol_type = other DNA
atggtcctggctgcagctataagggaggagattgaaatcccggagggcgttgaggtgataatcgatgatgagatatccatgaaaggccccaacggcgagatttctcggaagttcacataccccaatgtgactattaagaaggaagacgatatcctagtgctcgaaacggccttcccaaaaaagaaggacaaaagtatgatcggaacgacacgggcacatctgaacaacatgatcaaaggagtgaccgaagggtttacctatcacatgaaaatcgtgtacgcccactttcccatgaccgttaaggtcgagggagacaaggtgaccattgacaacttcattggggagcgccaccctagaagctcaaagattgtaggcggggccaatgtgcaagtaaaaggtgatgaggtgatcatcacaggagtcaacaaagaagacgtcggtcagactatggcgaatctggagcaggccactaagatccgcggcaaggacccacgagtgttccaggacgggatctacctcaccagcagggaatga

SEQ ID NO: 3085 - DNA, 345 bp, synthetic construct
  source 1..345: mol_type = other DNA
atggtgatcctgatgagcaaagatttcaagcgccaggagtatgcccggtacaagaagttgggaaccaaatggaggcggcccagaggtaagaccagtaaaatgcgtaggtacgaggcaggaaagcctgccatgccatccatcggctaccgcactccgagggctacaagaggccttcacccctctgggtacaaagacgtgctcgtatataacatgaaggacctcgaagcgctcgacgcagagacggaagcggctcgaatcagcgcctccattggcaaacggaagaaggccctgatgctggagaaggcctcagaactagggataaaagtcctgaatcgccagctgtga

SEQ ID NO: 3086 - DNA, 447 bp, synthetic construct
  source 1..447: mol_type = other DNA
atgaatctaacaacccagaggagactggcagcctccatattgaaggtgggcgtgaaccgggtgtggatcgatccggaggaagtagaagaggtgtcgcgggccattacacgcgacggcgtcaaacagcttatagatcagggtattatcaaagctaggccaaaaacggggattagtagctatagatctaaaaagctgaaggagcagaagaagaagggaaagcgaaaaggcaggggctcagtcaagggagcaaagaacgcgcgtacacctaagaagcaagtttggatgaaaaccatccgggccctgagaagcgatctgaaggagatgcgggacactggggaaatcgaccccaccacctatcgcaagctctacaagatggctaaagggggagccttccgcagcaagtcctacatgaaaacttacgcccgagaccacgacctcatcaaatga

SEQ ID NO: 3087 - DNA, 582 bp, synthetic construct
  source 1..582: mol_type = other DNA
atggccagcgggtcaaattacaaagtggctttccgcaggcggagagaaggaaaaactgacttcgccgctagggcgaagttagtggatgtggacaaggcacgactggttgtgagaatctccaacgctaattgcatcgtgcaagtgatcaatgtcggcctcacaggcgatgagacggtcgtaagcgcccacagtaaggaactgaacaagctgggctggaaaggcggaaacaagaacaccagcgccgtatacttgaccgcctacctctgtgggaagaaggcgctcgccgcgggggttgagtacgccatcgcagacattggcctaaaatcccccattaaaggagctaaggtgtttgcagccgtcaagggtgctgctgacgcagggctggatgtgccgtatggcgagtcgatcataccaagtgaagaccggatcaatggagagcacattgccgcatatgccgagagccttgatgaggacgaacttaacaagaagttctcccagtatctggcacgcggtctgcagcctacagacctgccccagcattttgaagagattaaaaacaaaatagatgaggccgaggtctga

SEQ ID NO: 3088 - DNA, 642 bp, synthetic construct
  source 1..642: mol_type = other DNA
atgtcgtttaatatggatgattgggagcccaaaacgaatttagggaaggaggtgaaagcaggcaacattaccgatattgatgagatcttcgaaaagggtctcccaataatggaacttgaaatcattgacgccctgctgccggacctggaagaggaggtcatggacgtaaacctcgttcagcgaatgcacaaatctggccggaaagtgaactttcgggtgatagttgctgtcggcaaccgtaacggctacgtggggttgggacagggtaaggcgagggaagtaggccccgccatccgcaaagccgtggataacgctaaatacaatgtcatcaaggtacgcaggggctgtggagactgggggtgcgtctgcggaagacaacatacagttccattcaaggtgacagggaaggcaagcagtgtgaaggtgaccctgagacccgcgcctgcaggtgtgggcctggccatcggggacgtcgggaaaaccattctcagccttgccggatataaggacgtgtggtcccaagccagcggccagactcagaccactgtcaacttcgctaacgccgtgttcaatgctctgaaggagtcctgcaagatgaaggcatcagagcaggacctaaagaatatgggagtgatccagtga

SEQ ID NO: 3089 - DNA, 459 bp, synthetic construct
  source 1..459: mol_type = other DNA
atgtatttggtgattcgtgtaagggggacaactggggtgatacagggcattgcaagtaccctggagatgctccgcctaaacagaatcaatcacgctgtcctggttgaggaaaacccgagctacaaagggatgctgcagaaggccaaggactacatcacatggggagagatcgatgccgagaccctcacggagataattgagaagcggggacgactggtgggcggagctcggatcagcgaggagtacctggcggaaaacaccgattattccagcttcgaagaattggccaatgccttacttaacggtgagctcaaagcgcaagacattaatatgaaacctgtctttcggctgcatcccccaagaaagggatatgagggcatcaggcactcgatcaaagaaggcggctcactgggttaccgcggggaagacatcaactcccttgcaaagaggatggcctga

SEQ ID NO: 3090 - DNA, 444 bp, synthetic construct
  source 1..444: mol_type = other DNA
atgattcgcaaaggcaagaagatcaacaagatgagaggtagtaggagcaacgggggcggctccgtcaagcgccgaagaggagcaggcaacaaaggtgggaaagggaaggctggagcgggcaagcaccattggagcaccactgtcatcgagaaccggtattactttggaaaacacgggttcaagcggccgcagaagaccatccacaggtcatacccagtaaacctcaatttcctgaatgataaggccgaggagttcctcgagaaaggaatagccacgaaagacgaagacgatgtgattgtcattgatgtgacagacctaggctacaataaagttctggctacaggctcgcttgacatacccctggtggtgaagagccctgccttttccgaagcagcgatcgagaagatcgaagaagccgggggagaggccgtggagttgttctga

SEQ ID NO: 3091 - DNA, 1371 bp, synthetic construct
  source 1..1371: mol_type = other DNA
atgttcctcgagaattttaagcccatatttcagctgcttcctgaggtgaagactcccatccatcgccaggactttagggaaaagctgaagtggacggctatagtgttagttctgtactattttctaactctgattcccttatacgggctcagccccgcggccgtggaccagtttgcacagctgcgtgccgtgatggcaggcagcttcgggtcgattctgacactggggatcgggcccatcgtcacagcgtcaattgtcctgcaactcctcgtcggggcaaagatactagatttggacttgaccttgcacgagcacaaggccatgtttcaaagcacgcagaaattattggcgattatcttcactatatttgaagcaggcgtgcttgtcttcacaggaagcctggtggccatcgacccatctttctacccaatcatgctcctccagctggtgattggagctattatgatcctctatctcgatgaggtggtgtccaaatggggattcgggagtggcgtcgggctattcattgctgctggcgtagcagagaccattatcgtcggcacatttaacttcttgccagcctccgctgccagcaccactgctagcggcatccttccggcgtttatccagtcaatcatcggtggagcaccgaatttccagatcttgataccattgatcgctaccatcgtcgtgttcctgatcgccgtatatggtgagtccatgcggatcgagatccctatttcccacggccgggtgaagggacacggtagaatccgaggggccgtgggcaaataccctctgaagttcatctatgcaagtaacatgccggttattctcacctccgcgctgctggttaacgtctcccttattgccagtctcttccagaaacttggcttccctatatttggagaggtgtcaggcggaagggccatcagcggactggccttgtggctcaccacccctaacagcataagcgtcctgtttaccaatccccttagggtgctgttctacgccattgtgttcctgggctgctgtgtgctcttctcatggctatgggttgaaatcagcggctccctgtcggctaaggaagttgccaagcagctctacaactctggcatacagattcccggttttcggagtagcaaacgccaactgtatactatcatgaagaaatacatcccagctctgacaatccttggtggcctgttcgtagggattctggcatttattgccgacctgaccggagccctgggcggcggtacaggggtactgctgacggtggggattgtgtacaagctctacgaagagatcgcccaagaacagcttatggagatgcatcccatgctgagaaaattcttaggaaacgattga

SEQ ID NO: 3092 - DNA, 558 bp, synthetic construct
  source 1..558: mol_type = other DNA
atgaagctggtagtgttaacaggcatcccaggaagcggaagtactaccgtgcttaaaaaagcgctggaagaggttgattatctgcatctgaactacggggatattatgactgaaatcgccgtggagaaggggcttgttgagacccgggacgagctccgaaaactgcccgcagacacccagaaagagatccaaaaggcagcaggaattagaattaaggaaaagtcggaatccgaaaatgtcatcgtagacacgcactgcaccataagcacccccagcgggttcttgcccggcctgcctaaatgggtcctggagggtctgaatccagaccacttcgtgctcatcgaagcctatccggatgagatcagggtgcggcgcacaaacgatgacacaagacagcgcgatgctgagtccgctgaagccattcagctgcatcaggagatgaacagggccgcttcaatggcctacgccacactcaccggcgcgactgtgaagatagtctacaaccacgacaatgagctagacgacacggtcgccggcctcgtggagtttttgaagtga

SEQ ID NO: 3093 - DNA, 609 bp, synthetic construct
  source 1..609: mol_type = other DNA
atggcgtaccagggaagttttcttctagggatctcctggttgcagccagtgttcgatgcaatgaacgccgtcctgaatcccctggtgcagttggaccccacacctaacaaccctgtactcaccgtctttgtgatcagcgccctcattagcctgctcacagttaccgcacagaagttactggtggaccaagacaagatgaatgagatgcaagctaattccaaggccctccagaaggaactcagggaggctcaaaaaagcggcgacgccaagcagatcgcaaaagttcaggccaaacagacggatatgatgcaggaccagagcgaagtgatgaaaatgtcattcagacccatgattgtcacaatggtgcctatcctgctgatattcgattggatgtggcaatccgccatacgctcgctgattgtggtattcccgccagcggtgtattattgcaccctgacgccaatcttccactcactaggccagatgctttacggcggtaacattactaccatcccctttggggtcggctggctgtggtggtacttcatctgtacttttggaatgagtcagatcattcggaagtttatgggattcaagaacgggttctga

SEQ ID NO: 3094 - DNA, 267 bp, synthetic construct
  source 1..267: mol_type = other DNA
atgcctgcaaatagattccgaagcagaagttacaagcgtacaaataccaagacccccggcggcgtcaacgtgctcaggtataagaagaaaaaacccagcaagcacgtgtgcgcggaatgcggcgctgtactacacggggtgccacgcggacgcccgttcgaggtcaacaagctggccaaatccaaaaagaggcccaaccggccatttgggggaaacctgtgtcctgaatgcacgcggaagcatttcaagcaggaggcccggaaatga

SEQ ID NO: 3095 - DNA, 519 bp, synthetic construct
  source 1..519: mol_type = other DNA
atgatcattacaatcggtggcgtggcaggcagtggaaccactacggccgcaaaggtcctgtctgagaaactgggggtgccgtacatctcagccggggccatctttcgtgagatggctgaagagcacgggatgacgcctgtggagttcggcaaattcgctgaaaacaacaccgacatcgataaggagattgataatcgccaggcgaaactcgcagaggaggctgacgatcttatcattgaaggaagactgtccgcatactttattgatgcggacctgaaggtgtgcttcaccgccccactagacgtccgagccaaacgcgtatgtgaaagggaaaacaagtcggttgagactgcccggctggagataatcgctcgggaggagagcgaagccataagatacagggacatccataatatcgacatcaagaacatggacatttatgatttgataatcaacaccaatagcttcgaccccgagagcatttccgaaatcattatcacaacactcaaggtgatatga

SEQ ID NO: 3096 - DNA, 168 bp, synthetic construct
  source 1..168: mol_type = other DNA
atggccgctatagaggtgggcagaaagtgcatcaagaccgcgggccgggaggccgggaaagagtgcgaaatcgtggcaattatcgatgaaaacttcgtagaagtcaaaggagacgaggtgaagaataggcgctgtaacattaaccacctggagcccatcatggaatga

SEQ ID NO: 3097 - DNA, 2514 bp, synthetic construct
  source 1..2514: mol_type = other DNA
atgatcctggtgttcaagatgggcattttcgacaaggtgaagtcagcttttgagagcagtaaaaacttcaagtacctggatgacttgattcatagcgggctgaacgagattgttctggacgatgacatcagccttagtaagaatgagaaaaacaagtactctaacggcattgagatcgagatcgataatctggtgattgatggaaacggccatgccatcgatgcccaggggaatggtagcatcttcctgtgcactggtaaaaacatcgtggtgaagaacatccatttcaagaacggcatccactccaatgggggtgcaatagaaaaccggggggagctgactatcatggattccacctttgacggcaataacgcctccctgggaggggcggttttcaacgacggccctaaactaatgatcgctaagtccaccatcaccggaaacatcgccaaagagggcggcggggccatctataataacgatggcgaggtgtatatcagcgaatccatgatcaacgagaacgtcagcagttttcatcagtatagcggcggagcaatttacaacaagggcgagttgactattgagaaaagcaccctcatcagaaaccacgccagttttggcggagcaatagggaatattggtcagctgaacattatcgactccacaatcagcaacaatgaatccagtggtgacggcggtgcaatttttaacgataacgctagcctgagcatttccaattcaatgattgaggctaacgtctcagatgggttggaaggcgggggggcgatctacaacaaggagggcgagcttaacattaccggatctgtcctgaagcagaacgaactggtcggccagataggaaaggggggcgctatttataataatggcggcaacctcaatatcgccggttcaagcctctgcaaccactccataaacttttttgggggtgcgatctataacgacggcggcaagatcaacatcgcggaatccaaattcaatgagaactcctccaacaggaatggcggggcaatatacaacgaaggtgaagtgaatatccggaagtcatccatcaagaaaaacaagtcggacggcggggtaatagagaatataaacggagatttcaagatttttaattgcgaatttttctcaaacgaatctcaaggaaacatcatattcaatcaggattcattagagattaactacaccgactttaaggataaccgatcgaagtcgatgctgctgaacgatggagtcaaatccaagatgagccttgttaaaggggagatcaatggtaacgacgttaaggacacacttatcctcaatgaaggaaattctctcaccatttctgaaactgtgtttgagaacaacttgatccccaacggggatgccatcgtcaacagcagtaatctgattctgacaaacccaaagataaatgacgacaatcaggaaataagaaaccaagggaacctccttttaaaaaggtcctctctagatatcaaaggcaagatcaatggggaggggaagattgaaacagatgaccattccaatgaagataaatttgacttcgggtacctggacagcctaattcacggcagtcccgacaaggagattgtgctggataaagacataaaactggaaaattacgaggtggatttctacgaggggggcatagagctggatttcgatgacttgattattaatggcaatggcaagacgatcgacgctcgaggaaagtcccgcattttcacaataagtggaaaaaacatcacgctcaagcacattacattcaagaacggacacagttacaaaaattacgacaacccgttgaataacaacggaggggcaatcagaatcaatgccaatgccaatctcacaattaccgactgtaaatttttagacaacctctcagaggactatggtggggtgatctattataacggctctggagacctcgtactcaccgcctcaacaatgaaaggcaacaccgccgagaacgacggcggtgccatcttcagtagcggcgaggtgaaaataaacaaaagcaaatttatcaacaacagcggaaacaatggcggtgctattgcaatcgtaaacagtaatgataaggccagcgtcactgagagcatcttcaatgaaaacgccgccgattcgaagggaggagccatctggttccataatagtaatattgcactggccgactgcactttcaatgacaactatgctacgtgtggagcggcaatttaccaggaaattagcaagggcagcatcagcaattccacctttaagaggaacctatcatcgtacgcctactggcacgacggaaagctggtgacgaataagaaccacgctatcttcatcgacaccggttctggactgaacgacttcaatcaagaccgggacaatatcatcaactgtgatttcattgacaacaataataatctttacgctcagaaacacgatctgatcaagtctcgcctcgatgagcacttggctctgtggaaacgcaatctttga

SEQ ID NO: 3098 - DNA, 834 bp, synthetic construct
  source 1..834: mol_type = other DNA
atgctcgaggtgcggaacattaaatactcatacaataaggattatcaagcactgaagggagtgagcctcaaggtcgaagagggtcagatggttgctcttcttgggaaaaacggtgcgggaaagtcgaccctgttcctccatttaaacggcatatacgaacccgacgagggccaggtctttatcaaaggggaagagttgaagtatgacaagaagtccctgctgaaattcagacagaaggtgggaatcgtcttccaaaaccccgatgaccagatctttgctccaactgtcgaagaggacgttgccttcggcccgctaaacctgaagctgcccatggaagaggtgcaaaaacgcgtgacggaggccttggcacgagtgggcatgagcggctacgaaaagaccgctcctcaccacctttccggcggtcagaagaaaagggtagccatcgccggaatcctggccatgaaaccagagattatggtgctggatgagcctacagccgggttggaccctcagggggtgacagcattgagcaatctactcaaggaactgaatgatgaaggaatcactgtcataatcagtacgcacgaggtgaacctggtacccacctatgcggaaaaggtctttgtactggtggatggggagctggtggccgagggcaccccaaaagaaatctttgcacagccagaaattctcgagcaggccaatctcgaggttcccattgtgacagagctcttccaggagcttgagaaagagggctacgacatgaacgatgactacccgctgaccattgacgaggctaaggagaagttcctggaactgttaaacaaaaattga

SEQ ID NO: 3099 - DNA, 693 bp, synthetic construct
  source 1..693: mol_type = other DNA
atgaaatttgatatggattatattgctcaccacaacgagctcagcgaagcaaatccttattataaactgtttatcaccatcattttactgattgtcactctcgctctcgacaacctgtactttgacattttcatgttcatactcttctccatcataattcttggagttgcgaagatcaacatccgctcttacataaaattcctgaccattccaatggccttccttatcataacatgcctatttctgatcttcttctttggcagcggcaaggtcatctaccagaccggtttctttggaatcgtggtcaccgacgactcctggcattacggtctctacacgtttttcagggtgctggggtgctttcccatcctaggcttcctcgcccttacaactcctattgccaagatcttccactgtctggaaactcttaaggtgcccaaaatcgtgattgagatcgggctgctgatgtacaacacaatcttcatcttcttgaatgagattgatgtgatgcagaaggcacagaagacgcggctcgggtataactcctactggaatagtttgcagtgcctgggctcgctggtaagcaatatatttctgagatcactggaaaaaagcgagaccttgcaaaacagtttagattcacgaggctacgacggagagctgcccgtgtatatcccgccaaaggaggaatga

SEQ ID NO: 3100 - DNA, 288 bp, synthetic construct
  source 1..288: mol_type = other DNA
atggagcggacaacccttattattctggccgtgatctgcgcgataatcttcattgcaccgctagtcatgtacagcggcctgggtgaggatgacggatactttggcggagccgacgacgccgccggcgaggctatcgaggaatctggctttaaaccctggttctccagcatatgggaaccaccttcaggggaaatcgagagtctcctctttgccctgcaggcggctatcggtgcaatcatcattgggtatttcttcggctactggaggggacaggggaaggaagagtga

SEQ ID NO: 3101 - DNA, 666 bp, synthetic construct
  source 1..666: mol_type = other DNA
atgcatattatggagggatatctgcctttgacatggtgcatcatatggttcgtcgtgagcttcatcgttgtcgcgtacgggatctatcagataaaacagattgtcgatgagacacctgactccaaggccctgctcgcggtcagtggagcattcatgtttatcctgagcagtcttaagctcccttccgttacgggaagctgctctcacccgtgtggcaacggattaggggccgccctcttcggccccgctgtgactgctgtgcttgccactatcgtcctcttgttccaagccatcttacttgcgcacggcggcctgaccaccctgggggccaacatcttttcaatggggattatcggccccttcgtggcctggctcgtgtacaaggcatgcatcaaggccaacatttcgtcaaccattgcaattttctttgcagccttcctcggggacctgctaacttacgtggctaccagcttccagctggcttttgcattccccgctccctcctttggcagcgccctgacaaagtttctcgtgatctttgcagtaacgcaggtgccactggccattggtgaaggcatcctgaccgtgatcatatgggaccggctgaaagcttacaagccaaaactattggataaactgggtgtactggctccaaatgaagcctga

SEQ ID NO: 3102 - DNA, 687 bp, synthetic construct
  source 1..687: mol_type = other DNA
atggagaaaggaaaattatacggggtcagcattggccccggagatccagagctcatcaccgtaaaggctatgaacatcataagtaaatccaagtatattgccactccccacactggaacaggggaatccctggcactgtcaatagtgtcccaggcgatcgacttgtccaacaaggagatcatgctcttggagttccccatgacaaaggataaggacatactcaccaaaagccacaacgaggctgccgaagcaatcatcaaggtgctggacagtggcgaggatgtggcaatgctaaacctcggggacgtgaccatctactcaacgtttgactacactaaggataaactggtggagaggggctacgacgtgcaggtaattccaggtgtcaccagcttctgcgcctctgcctctgagcttaagatcggcctgacaacgatgaatgagcctctccatatcattccagccagcggaattgacatcaaagaagctctgaagatgccgggcagcaaggtcttcatgaagatcgggcggtcgatgcctaagctgattgaagccattgaggaactgggtcttcaagacaatgtgtatgcggtggaaaactgtggcctggaaaatgagaaggtgtataaggggctaaaagagtttgatgaaaaaatgggctacttcaccatcgtcgttgttaaatga

SEQ ID NO: 3103 - DNA, 1140 bp, synthetic construct
  source 1..1140: mol_type = other DNA
atgcaagataaacgactggtcaaccagcagttattgcggtgcgggtacacaacaggaacatgtgccgcggccgctagcaaggctgccactaccatgctctttgagaaggagcgcgtggattcagtctcgatcacaactccaaatcagacgagccttaacatagatgtgctaaaccctcagctgactgacaagaaggcatgctgctgtatccaaaaggacagcggggacgatccagacattaccaatgggatactggtcagcgcagaggtgtccctgaccgaatctaagggtatcaatatcgacggaggtaagggcgttggcagagtgaccaaacccggtctggaccagccggtgggaaacgccgccattaactcagtgccccgcaagatgatcgaggattccctgaacgaattggccaggcattacgactacgatggaggattcaacgtcatcatcagtgtccccgaaggtgaggagatcggcaagaaaacattcaacccggaacttggaatcgtgggaggtatttccatactgggcactaccgggatcgttgagcctatgagcgctaaggctcttgctgattccatcaaagtggaaatcagcgtaatcgcagcagagagcaacgagtccattctcattttcctcggcaatttcggaaagaaattcaccgaagaggagctgaaactgtcgacgagccccggcattatgtgcagtaactttatagatgtggccttggacagttctgttgagtatggctttaagaatatccttctgattgggcacattggcaaattcgtgaagctcggcatcgggctcttcaatacgcactcccacaacggggacggccgtatcgaagcattactgtcatgtgccctggaggccggggccgacctggagaccctaaaggccataaacgcttgtgtaaccaccaatgccgtcctggacatcttgtatgaaaaggagctcctggacaagaccatggaaatactgaatgacaggattcagcatagaattgataaacgggtgcctccagaggcgaacattggctttatctgctttgcaaacagtggggagtacgagggcatcctcttcgaatctgataatgcgaaagaactcatgacaatttggaaaactgactga

SEQ ID NO: 3104 - DNA, 756 bp, synthetic construct
  source 1..756: mol_type = other DNA
atgattcattttgtgggtgcaggcagcggtgccgttgatctgataacagtgcgaggagctaacctcctgaaagaagcagacgtaatcatctacgcagggagcctggtcaatccggacttactgaattacgctaaggactcctgcgaaatttatgacagtgctaaaatgactctggacgaagtactcgacgtgatgtttgaggccgaaaaggaaaacaagatgacagttcgcctgcacacgggcgactccagtatttatggcgctatccgggagcagatggacagactggatgaggtggagattgactacgatgtgtgtccaggcgtctcaagcttctgcggggctgccgcctctttgaaggccgagtataccctgcctgatgtcagccaaagtgtgataatcactcggatggcaggaaggaccccagtgcccgagaaggaaagcatcgccagcttcgcagagcacggcgccaccatggtgattttcctcagcacagggctcctgaaggatctctctaaagagttggtcaaggggaggtacacggaagacacccccgcggcgatagtctataaggccacctggcccgatgagaagatcatgcactgcacggtgggaactctatacgaaaccgccaaggagaacaacgtgacaaaaacagctctgatcatcgtgggagatgttctagactccgagtactccctttcacgcctttacgccgatgacttttcgaccgagttcagacaggcgaaaaaatga

SEQ ID NO: 3105 - DNA, 1023 bp, synthetic construct
  source 1..1023: mol_type = other DNA
atgaagatttcaatcatcggcttcaccgacaacggcatggaaatcgcctataaacttagcaactccctatcagaggacaacaacatatccttcactcgatgtggaaaaggagagctgtctatttggaccgaagagcacttttcggattcggacgctcttatcttcattggtgcgataggcatcgccctcagggccatcgctccttacatcaagaccaaaaccaaggaccccgccgtggtagtagtggacgagctgggacagttctccattcctatcctcagcgggcatatcggtggagccaatgaactggcactccagatcgccgatattttaaacgccatcccagtcattacaacagcaacggatatcaacaatctatttgcaatagacacgtgggcgaaaagccaaggcctcaagatcctgaacccagagtgcatcaaactggtgtcctccaaattgctgaagggggaaacaatccacataaaatctgactaccccatccaggggaacttgcccaagaaggtccagatcaacgatttagaggattctaacagtgactatgacgtcataatcagccacaatgattacagttacatggagaacaaggatattcttctcctcatcccgtcaataatcaccatcgggatcggctgccgcaaggatataagcttcgacaacattgaacgctccgttctgaatatcctggataaggagaattatcatatcctgtctctgaatgccattgccagcattgacaagaaggctaatgaaaaggggattctggagtttgcaaggaaatacaacctgcccttcaatacttacagtgctgaagagctgaacagtcttgagggagacttcacaaagagcgaatttgtgaaaagcgtggtggaggtggacaatgtctgtgaacggtccgcagtgattgagagcaacggcaacctcattagacggaaggacacctgcgatggtgcgggcgtgactgttgctttggccatgattaatccaattctgtcatgggactga

SEQ ID NO: 3106 - DNA, 732 bp, synthetic construct
  source 1..732: mol_type = other DNA
atgaaatgtgtgagcgttgtagggattggtcctggaaacgagctgtatctgagcattgcagctaaggagactcttgaagattccgacctgattgtcggctacaagaaatatgtggagctagttgaggaatacttgcccgagaaggagtacctctacaccggcatgacaaaggaggtagaccgatgcaagatggcgctggagaaagcaagcgaaggcaattgcgtatcggtggtctgctcaggggacgccggagtgtacgggatggccggcctggtttatgagctatctgtggattatcctgatgtggaaatcgacattgtgccaggcataagtgccgtcctgagtggttccgcggtgttgggcgctccaataggccacgattttgcagtgatcagcctgtcagacctcctgaccccctgggaactcatcgaaaagcgcttggccctggctggagagggggatttctgcatctgcctttacaacccgtccagccataagcggaaggattatcttaaaaaggcctgtgagatcttactgaaacacaaaaaggaagacacggtgtgtggttacgtcagaaacattgggcgggaaggggaggaataccacatcctgagcctcaaagagctcaaagacactgaggtggacatgttcaccaccgtcttcatcggcaatgccaacacaaaggttatcgacaataagatggtcacacccaggggatacaagggagtgtga

SEQ ID NO: 3107 - DNA, 759 bp, synthetic construct
  source 1..759: mol_type = other DNA
atgcacaagattgtactatttggaggcactacagagggaagactgttgactgaatttctctctcaaaataaggtgccatccattgtctgtgttgccaccgaatacggggagaaagtcttggattatgagcccccagtgatagtgcagcctaaacgccttaagcccggccccatgcggaagctcttccaagaggagcagaccgagtttgtcttcgacgctacacacccgtacgccacggagatcagcaagcacatcaaggaagcctgtgacgaaatgggcatcgagtacatccgggtgctgcgagaatccattgagatcgagggtaccacgaaagtgtccagcatggacgatttgatcgattatctgaaccagactgaaggtctgattttctcaagtatgggggccaaggaggctgaggctttaaccgcgctagagaacttccctgagagggtctatctgcgcatgctgccttcgcccgaagggatcggccattgcctcgatctggggtacccgatgaaaaacctttgcggcatgcagggaccattctcaaaggagttcaacatggcacagttcaaggagatcggtgcagacatactcgttacaaaggaaagcggcaatgtgggaggatttctcgagaaaaccgacgcagcgaaggaatgcgggatggaggtagtggtgctgagcagactgcttaatgaagaaggcattagcgtggaagaggccaaagacgccataatgagtaaatgcctgaggcgttga

SEQ ID NO: 3108 - DNA, 1188 bp, synthetic construct
  source 1..1188: mol_type = other DNA
atgaaggaaatcaacatcatcggaatgggaatgtccgagaagaccctcactcatgaagcgctggagctcattcaccatgcagacatcctgattggtgctaaaagactcatcaatgagtttagcaaacttaacaagccgagtttcaacgcctatctgagcgacgacatcctgaaaataatcgaagaaaccgatgccgagaaaatcgcaattcttgtgtccggagacgttggcttctacagcgctgcggagaagctgacagacgtgctaaaggactacaatcctaacctgatcaccggcatctcgtccgtttcctacttcttcgccaaatgtagtcttccctggaaggatgcaaacctgatcagctgtcacgggatagacacgaatatagtgtcatcagtgcgaagaaacaggtatacctttgccctgacgggcaagaacattccagaactgcagaatgagttggtgaaatatggcttcggcgatctcaaggtgtgggtgggagagaacctcggttcagaggacgagtttatcaatgactgtcgtattgatgatttatgtagtcgcgagtacggcagcctgactgtcttgattattgacaaccccgatttcgattctaagtcacgcacaggcatccccgacgaggagtttatcagggggaaagtccccatgacaaaatccgaggtccgggccgtatgcgcatctaaactcagtatcgggcctgacgacatcgcttatgacattgggtgcggaaccggctcggtaaccatagagatggccctgagcgcctacaatgggaaggtctatgccttcgataagaaggaggaggccattagcctcctaaatgaaaactgcatcaaattccacattgataatgtggaagcaatctgcggactggcgccagactgcttgaaggggcttcctacaccggacgtggccttcatcggtgggagctccggcaacatggatgaaatagtgaactacctctaccaattgaaccccaatatgcggtttgtcatcactgccataagcattgaaaatgcaatggctgcgctggactccttaaaggatattggaatagaggctgaaatcgttcaggtggctgtctctaaaggcaagaagattgctgacctgcacatgctgattgcccagaacccaatctttatcatcagtggtgatgccaacgaatga

SEQ ID NO: 3109 - DNA, 1362 bp, synthetic construct
  source 1..1362: mol_type = other DNA
atgaataggttcctgatttccgggaccagcagtaattgcggcaagacgacaatcacaatggccctgctcgccgccttcaaaaaccggggtcttgatatcgcttcattcaagtccgggccagattatatcgaccccatgttccaccggaaggtgtttaacgtaaagacccataaccttgatccctacttctgcactgaagagatgctgtgtgagcagtttattcgcaacaaaggaaacgacctgagcataatagagggggccatggggttttacgatggaattggggtggaaggaagagccagcgcttgggaggtggccaaatccatcaaggcgccagcggtgctcatccttgacgcaaagggaatgagcaatagcgccgccgctatcataaagggcttcaaggaatttaaagaagacagcatggtagagggcgtcattttcaataatatcagcccaatgctctatcccctcctgcgagacattgttgagagcatcggcataaaggcgtacgggttcctgcctaggcgggaagagtactcaatcggaagccgtaaccttggactgatcacggccgatgagattcaggacataaaagacaaaatcaatgggttaagccagctggctgaagagtacattgacttagacggcttgtacgaactggccaagtcggcccccgagctgaagactaatgattttataggcgaggtgctcaccgactcccaaaatgaggaaagtgcagattcaagtaataaaccacgcattgccgtctctcgagacaaggctttctgctttatgtatgaggaaaacatcgagatcctagaggatctagggtgtgaagtggtgtatttcagcccgctggaggacaagaaactgccagataatatctccggtctgtatctctgtggaggctatcctgagctctacaaggaggagttgtccaacaacaaggacctgtgctcatcactgaaagaaattatctctaacggtatccccaccattgcggagtgcggcggctttatgtacctgcacgactccatcgagaatgtccctatggtgggcttcatcaagggaaactgcattaaaacagataaactgcagcgctttggctatattgaaatcaaggcattgaaggataacctcctctgcagcgaaaacgatagtatcagagtccacgaatttcactactacgactccgagaactgtggggaggacttcatggcaaagaaagcctctaacggcctggaatatctttgctgtcacggttcggacagtttgtacgctggttttccgcatatttacctacccgcaaaccctgacttcgcacggtcgttcgttaggaatgctagaaactggaagcattga

SEQ ID NO: 3110 - DNA, 639 bp, synthetic construct
  source 1..639: mol_type = other DNA
atgaaaattgagctggagcaggtcgagccggctgaaatcgaaaatcgaagtatggagataatcgagagcgaactgcctcacgaaattgaccccaaactggcccctatcattaagagggccgtgcataccgctgccgatttcgactacgtggacaacctctgcttctcagaggacgtggttgataaggccctggaagcgatcaagaacggggcctgcatcgtcaccgacactcaaatggcaaaggccggcatcaataaggccgagctgaaaaagcacggcggtgacgtcttctgctttatgagcgatgacgatgtgagagacatggctaaaaagaatcactccacgcgggcgagagcatcgatggacaaggcgagccagctggacaggccactcatatttgccattggaaacgccccaacagctttgatacgtctgtacgagttgatccaggagggcaagctcaaaccagaacttatcattggagtccccgtggggttcgtaaacgtggtgcagagtaaagagctcattatgcagtgtgatgtgccctacatcgttgctcgcggccgcaaagggggaagcaacgtagcagcagccatctccaacgcacttctatatatcttacgggatcaaatgaagtga

SEQ ID NO: 3111 - DNA, 789 bp, synthetic construct
  source 1..789: mol_type = other DNA
atggtggataaaattattttagtggtgtccttcggtacaagctacaacaacaaccgggcccttaccattggcgcgatcgaaaaggatatcgacgaggccttccccgattacgagatgagacgagcatttactagtcagatggtaataaacaagctgaaacggcgcgatgacctcgacatagacaatgttcaggacgccctggagagggcagtgaatgacggtgtcaagacagtcattgtacagccaacccacgtgatggacggcactgaataccacttcaaaatcaaggacaccgtcgacaagtacattgataagtttgataacatcacaatcgcagatcctctgctcatcacggatgaggactttgaagacctcatcagcagcataactaaagacgatgagtcaagtgatgaaaccgccattgtgtatatggggcacggctctccagccgagtcgaatatggtgtataccaaattgcaatccatgctgggagaaaagggcttcgaccactactatataggcacggtggaggccaagccggattatgacgacgtcctggctatggtgaaggaaggagactacaagaaaatcatccttaagcccctgatggttgttgctggagaccatgcgcagaacgatatggctggggacgaggacgatagctggaaatccatgttccaagacgaggggtacgatgtggattgcctaatcgaggggctggcccagtctaaagacatccgcgacgtctatatcaagcatgtgcagaaggctattgacgatttgtcatga

SEQ ID NO: 3112 - DNA, 393 bp, synthetic construct
  source 1..393: mol_type = other DNA
atggaacgggagagctactactttctcctcctgctaattgggcttgtgatctgtgctggtgtcttctacttccagttcaactatgccacccccacatacctgatattcaacgcgacggaggtcaacgagggaggctccttcacaggggtcctgaatgatgcttacggcttccctgtggttaataagacaatcacctatcacaagccaggatacgaaatggggactttggtggacgtgcagacggatgacaccggagagtttgtgatcgaaaacgcccaatacctgccggacgccggcgaggacaattattatggtgcattcacctttgcaggggacggcaaatatcagggatgcagctttgatggcaacatcactgtaattcccaagaaatga

SEQ ID NO: 3113 - DNA, 669 bp, synthetic construct
  source 1..669: mol_type = other DNA
atgtctaatcaggatgaagagaactatatggacgatgagctgctccttaatgctcgaaagcctaaaggtgagctgggggagaagctaattgagaacatgaacataaaccacgagtcccttgcacagtggagcctcaatcacctcgagatcgataaggatgatttcattttggatattggctgcggcggaggagtgaatgtggagaggttcctgaagatgacagacaacaaggtctttggtctggactactcagagctcagcgtcgagaaatccatcgaactgaatagggagtcaatcgatgacggcagatgcgaaataatccaagggagtgtgtccgacatgcccttcgaagaagggattttcaacatcgcgaccgcctttgaaaccgtgtacttctggccggacttcgtaaacgacctcaaggaggtccatcggatcttaaagaaagacggaatattctttattgccaacgaagccctgccaaacgagtacgacaagcggcagcagcgcatcattgaattgctggagatgcacatctacagcaaggaagaactggaggacagcctggagaaagccggctttagtgacgttaaatgctttatcaaggaagccaaagactcgttcacgggcgatgatgcatattggatctgtgtgatcgctaaaaagtga

SEQ ID NO: 3114 - DNA, 963 bp, synthetic construct
  source 1..963: mol_type = other DNA
atggacgattatttaatcaaatcaaagagtgaaacgaaccctgagtacggctgcaacccatacgaacggcctattgaggagcacattgccaaaggcataatcaacttggacaagccttcaggcccgacctcccacgaggtggactcgtgggtgaaaaggatcttgggatgcaataagaccggccacgggggcacactcgatccaaaggtgacgggggtgctccccatcggcatcgacaacgccacccgcgtgagccagctcctcctgccagcaggtaaggagtacgtgtgtcttatgcacctgcaccgcgaaataccagaggaccaggtgaaagggattttcaatgaatttaccggcaagatttaccagacgccccctgttaaaagcgccgtcaaacgagaactgagggtgagaaatatctactactctaccatctatgagattgaaggacaggacgtcctctttaggataggctgcgaggccgggacatatgtccggacctactgtcacgatatcggtgaggccctgggctgcggagctcatatggctgagctgagacgcactagagtagggcccttcgatgagcgaaacaacgaccttgtcaacctgcatgacctgacagatgcttatcatttctatctagaagacggagatgaagagcatattcggaaggccatccagcccatggaggtggcgagcagtcacctgccccagatcttcattaaagactctgcagttgaggcgatctgccacggggccaagctgggggcaggtgggatctgtaagctatccaaggacatccaaaagggcaatcttgtggcgataaagagcttgaaaggagaactggtagctgccggaactagcctgctgagttcccaagagattatgaacgcagattccggtctcgtggttgacacaaataaggtctttatggatactggaatctacccgaaaggctggtga

SEQ ID NO: 3115 - DNA, 183 bp, synthetic construct
  source 1..183: mol_type = other DNA
atggatgacaaggagaaagtgatcgaggcattcaaaaatagcgaagagccactcaacgccaaaaaagtgagtgaactaagcggcgtggagaagaaggaggtcgacaagatcatgaaagagctgaagaaggacgaaaccattgtatcccccaagcggtgctactggacactggcggaaaagtga

SEQ ID NO: 3116 - DNA, 552 bp, synthetic construct
  source 1..552: mol_type = other DNA
atggtgaaaaacaataatgagagattcgaacttgatctgtcgaaaaacgaaacccctgagtttagcaatgaggagatcttgagcaaaatgaggcggggcttcaataaccagtatgtgtgctttgagtatccgttcctgtggcagaatatgcccattgacgaagaggatgagtttacagacataatgctcttcaacaaggccaacaacgcaattgtgaaaatctcaacgcagccctgtctcatcgataacatcgacgatctgaaggaggagattgaaaaggacctgaagagcaatggctgcaccatccaacagtccgctatggaaaagatggaaacccaggacatttgggacgtcttctacaccactaaagaagggctagaggtggagcagttctctatcctgaaggataacaacctctacaatctggaattatacaccaaaaacaaccgcgaccaggccactgtcaagtcctttgtggacgttatccaaacattcacaatccttaagccaacgtacaaggtagatggagacagttatgagaagatagagtga

SEQ ID NO: 3117 - DNA, 339 bp, synthetic construct
  source 1..339: mol_type = other DNA
atgtcagtgtttgactatatctgccaccgccgacccgaaagaagcttcttctacaagggtcggcagttcccagtatgcgccaggtgcaccggattctacatctccggcatagccagcattatcctctttaaatactttccgctgcctaacactctaaccacactcgctattggaatcttgctgctgatcccctgtgcaattgatgggacaagtcagttatttgagatgagggagagcaataatgtgctccggttgatcacgggcctgctgggcggggttgggcttatcatgatatacgaagtggtcctgaacttcgtcttcctgaacttcatttattga

SEQ ID NO: 3118 - DNA, 144 bp, synthetic construct
  source 1..144: mol_type = other DNA
atggatgggatggaccccgaagactacctgatctacaactactatttcgaggaggaggagaataacggcctgagcaagaacgaaagctgctgtggagtgctcatggtcctcatgattctaacaatccttctgaccgtggcctga

SEQ ID NO: 3119 - DNA, 504 bp, synthetic construct
  source 1..504: mol_type = other DNA
atggcccggagggaagagaatacatttgatttcctgggactgttcacggaagaaataggcggcaagaagaacaagagtaacggtgcaatcaaattccagaaggacaaactcttcatcgagaaacggagcagattgaacggaaagctcaaggacagctacgaaatcagttacgacgaactcgattcggaaagcatcgatcgccccgctatcaatagggtggagatcaaattgaaggacaagaccatatcactgaagaccctggaccacgagatgctggacaactttgaagacaagcttttagacattgtggaggggcctaaacttgccgtcgaagattctcccgtagcgaacgctccgtacaatgccgcagagattaaatccgattccaaaattggggagatagatattccagaccagattcgaaagtatcatgagctctataaagagggcatcatctccgaggaagagtttgagaacaagaaaaaggagctgctggacctatga

SEQ ID NO: 3120 - DNA, 867 bp, synthetic construct
  source 1..867: mol_type = other DNA
atggaaattaagtccatcccccaggtaattaaggagatccaagagctggtcgacaaagaggattacgagtcagcctacaatatagcaaaagacaatgtggatctgaacaaggaatacacagaaggggaatatgtgtttaagaacctgctggaggagcttttgttccaggttctgatccagaaggagatcaagaagaagatccccatgattctggactacagcagcctgtactccaattacggcgaagtgctgattcagctggataagattgacgatgctaagaagagctttgaactttcgcgcaactacaatccaatcaacattaaagccaacttcggcctgggtgacctgtacaagatggaaaacaagctcaatgagttctataaactcgccatcgagagctttaaaatcgcctattatcccaaagaccttgcaaagagttttagaaacctctcctactacttcttaaagatagccaaagaggagaatgctgatgaaaacctgaaaatagcgatccacttgaagaagatcagcaaagactatgatgacgaatcagagctcgccaaaacggagttggatgaaataaatggaatcattagtaatttcgataaagagaccgtcgaagcgcttgagagcacagacttgaaggaatgtcgaaacgagctcaagagcaaggggctcccgtatgaggctggaattgagatcatcaccatctgcaagaacctaggcttccagctggacgaggctaagaaggtcgtgccagccttatattacttcaacatagcatacgacctaactaaagaccctgacatcaaactcgtgattgatgacctgaacgagaaagtggagaggcggctggatgaatga

SEQ ID NO: 3121 - DNA, 450 bp, synthetic construct
  source 1..450: mol_type = other DNA
atggaagacgactttaagcacctggtgcgcatatccagaaaggacgtggatggcaacaagacgatcgaacaggcattgacacaaattaaaggggtaggactctccctctctcggtcaatctgcctgacgctggggttaaatacaaccgataagattggttacatcagcgaagatgatgtgaccaaaattgaggacctgctagagaatccccagaactacagcatcccggattggatgcttaaccggcgtaaggattatgccaccggcgacgacctgcacttgatcgagtcggacctggacatgactcttagggacgacctgaacagaatgaaaaagacccgatcatacaaaggccggcgccatgaggttgggctcccagtgaggggacagcgaacaaagagcaccttccgccacagtagcactgtcggcgtcagtcggtccagaaggtga

SEQ ID NO: 3122 - DNA, 537 bp, synthetic construct
  source 1..537: mol_type = other DNA
atgggacatccgcgtaaggccaggaaaaagtatgacactccacctcatccctggaacgcagaacgaatcaaaactgagaataagcttatgagcaagtatggcctgaaaaacaagaaggagatctggaaagcggacacccttgtgcgcaaatacagcagggaagcacggtacctactcgggttcagccaggaccaggtgcaggtggagaccgaagagttactcgggcacttgaaaagaaccggaatcctcgatgaagctgcccacctggaaaacatcctggacttgacggtggaggatatcctgaggagacgcctgcagacaatagtgttccaaaagggtctggcgcgcacagccaaggaagcccggatgtttgtagttcacggccacattgctctgaacggcaagaagattaactcgccctcatatgtcgtcaaacggggagaagaggaggcagtggggttctaccactcctccccagtcgccaagcagattgaggagtacaataaggccgctagtcaagccggcgagaatcagtga

SEQ ID NO: 3123 - DNA, 393 bp, synthetic construct
  source 1..393: mol_type = other DNA
atggcaaaggacgaaaagtggggaatagcgaatatttacagctccttcaacaatacaatcctgaccgtgactgatattacaggcgccgagaccatttgccagtggagcgggggcagggtggtccgggcagaccgccagcagtcaagcccctttgctgccatggaggccgccaaccgggctgctgaggacgccaaggaaaaaggattcgtcggcctgcacatacgagtgagggcgcctgggggaaacgggcctcgcagtccagggcccggcgcacaagcaaccatccgtgccctcgccagagctggcattaaaatcggtaaaatcgaggacatcacgcccatcccgcatgatggtactggacgcccaggcgggaagaggggcagacgggtatga

SEQ ID NO: 3124 - DNA, 849 bp, synthetic construct
  source 1..849: mol_type = other DNA
atggagattgacgtcaaaaaacaggacgaaaactctatggttttcatagtccgggatgctgaggtgccctttatcaatgcaatccgcagaatcgccatgatgcgggtaccaaaattggccatcgaggatgtgttcattgtcaaaaacgattcggctatgtttgatgaggtgctggcccaccgcttaggcctgactcccctcgtgtctgacctcgaaagtattgaaggccttgtcatgagagaagattgtgactgcaaccacgacgaaaacggaaactacgtggataagggggagtactgccctcgatgtagcgtgtccttttccctgaatgagaccggtcccaaggtagtgtacagccgtgacctgaaaagctgtggggactcaaggatcaagccagtatacgacaccataccgcttctgaagctcaaagaggatcaggacgttgaattggaagccgttgccaagctaggcatcggaaaggaacatgcaaagtgggtgcctacaaccgtttgcgcatataagcagtatccggagatcacgttcaatgaaggggaggatgtggtctaccaagtggcggacgcatgcccaaggaatgtgctggacgctaaccgcgacgatggagtcatcgaggtcattgacattgagaactgctcactctgcaagacgtgcgtcaggacagccaaggccgccgggtccaagttcatcaatgtgggatatcgggagaacgatttcattttcaagatagaaactgacggtagcatgccccctaaggaggtgctgctgaaagcgtgtgatgtgctggacgctaaaaccgacgagtttatcacattcagtgagggcggcagctga

SEQ ID NO: 3125 - DNA, 366 bp, synthetic construct
  source 1..366: mol_type = other DNA
atggccagggagataaagaaaactaaccccaaccttatcgcgctaatttacaacctgcggaaacagtcttatgaggaaggcgtagctatctggaaggatgtggccatcaaactcgagaagccggcccgcaaccaggcggaagtcagcctgtcccacatcaacaagaataccgttgagggagaaaccgtggtcgtgccaggcaaggtcctgagtgacggcaaattggaccataaggtgacaatcgctgcactcgggtttacgaaaaacgctgaggccaaaatagaaaagttcgggtgcgaagccctctcaattgcagagctggccgaggcaaatcctaagggaagcaatgtgaagattatgctgtga

SEQ ID NO: 3126 - DNA, 429 bp, synthetic construct
  source 1..429: mol_type = other DNA
atgatgattatcaacggtgagggccacatcctgggacggctagcttccgtggtcagcaagcagctcctggaaggcgaagagatcgtcgttctcaacgctgaaaaaataatgttgacggggaataaggattgggcctacgccaagtacaagcagagggtggaccgcgccagcatctcaaaccctcgggacttagggcccaaatatccacgcagacccgaggatattttccgtaggaccgtaagagggatgctcccaatgaagaaagcaaaaggtcgaaatgcgtttaaaggattcaaggcatttgtgggcgtgcccgaggagtacgccgatgcggagctgctgacaatgccggaagctgagtataacgacattaagaaaggcatggaactgggagagatcagtaagcttctgggcgccaagttcgactga

SEQ ID NO: 3127 - DNA, 399 bp, synthetic construct
  source 1..399: mol_type = other DNA
atgaaagtggtgcacgccagcggcaagcgcaaaacagctattgcgaggggtaccatccgtgaggggaccgggaaggtgaggatcaataaggtcccgctggagctctattcaccagaactagcccggctgaaactgaccgagcccctcgagctggcaggcgaagtggccgacaacgtggacatctccatacgcgttaacgggggaggcgtgatgggccaagcggaagccgcacggatggtaattgctaaaggtcttgttcagtggactcaggacatggatttgaaagaggtctacacgcagtatgataggacaatgctggtcggagacccaagacggagcgaacccaagaagtacggcgggcctggagcccgagctcgcaagcagaagagttacagatga

SEQ ID NO: 3128 - DNA, 171 bp, synthetic construct
  source 1..171: mol_type = other DNA
atgataccaatccgctgtattagttgcggcaaacccgtctccgcatacttcgacgaatacaacagccggctggccgatggagagaagagcaaggacatcctggacgatatggggattacacgatattgctgcaggagaatgctcatctcacacgtggaaacctgggagtga

SEQ ID NO: 3129 - DNA, 219 bp, synthetic construct
  source 1..219: mol_type = other DNA
atggctgcaaagaagagcacggccaaaaaactgacacggtttgagaaggcaagggtcctgggggccagagcgatccagctgtccatgggcgccaagcccatggagcacaaggagattgaaaagttcatcaaaaacagcaagagtcttgacccgattgacatagctaccctagagctggaattgggaatcctccctctcgatgtgcgcccaaaagaatga

SEQ ID NO: 3130 - DNA, 1248 bp, synthetic construct
  source 1..1248: mol_type = other DNA
ctggattcggtaatcgaggatgtgcgggtgagaaaaattttagatagccggggcaacccaactgttgaagtggatattatcacttggaacgggtttgggcgcgccgccgcgccaagcggggccagcacaggttcccgcgaagttgtatccttccctgaaggaggggttgatcaggtaatcagtgaggttgaagacttgatctcttccgaacttatcgggatggctgccgaagacattgaggacatcgatgaggtcctgcgagagatcgacggaacagacaatatgtctgcaattggcggaaacaccagtgtggctgttagcatggctgcagcgaaggcagccgccatgtcctttggaatgccactctacagcttcctgggcggcaacttcgtcagtgaaatgccatatcccctgggcaatatgatgaatggcggcgcccacgccggtccaaatgccccggacattcaggaatttctggtggtgcctataggtgctaaggacgtggaggaggccgtcttcgccaacgtggctgtccacaagaagctaaaagagctcctctctaagaaagaccccgatttcaccggtggaaaaggcgacgaaggggggtggatacccaatatcacgaatacgcaagccttagagatccaggctcaggcatgcgaagagacacgagacgagcttggcatcctgatcaggcccggtctggacatggcgtcatctgagttttgggacagcgaaaaggaaaaatacgtgtactcccaggacaatattgagagggatgtgggcgagcaagtggagtacgtcaaggacctgattgaaacatacaacctgttctatgtggaagatccctttgatgagaatgacttcgagggattccgtgagctcacctcgaaggtgggaaacaaatgccgcatttgcggtgacgacctctttgtcacaaactcacggctccttaagaagggaatcgatgaaaaggcagcaaacgctatcatcataaagcccaaccagatcggctcactgactgagacctatgcgaccgtcaaactagcgaaggaaaacaatgtcatgcctgtggtgtcccataggagtggcgagacgtgtgatgagaccatcgctcacttggcagtggccttcggcgcccctatgattaaaaccggggcaatagggggagagagaatagctaaactgaacgagctgattagaatcgaggccgagttgagcaacccgaagatggcccggctgttctga

SEQ ID NO: 3131 - DNA, 192 bp, synthetic construct
  source 1..192: mol_type = other DNA
atgagcaccgtgataatcgatgcaagcaagtgtgagaacgccgactgtggcgaatgtgtggacatgtgccccatggagatcttctccctcgacggggataaaatcgtaacggatcacgaagacgaatgcaccctgtgcgaggtgtgtgtcgacatgtgcccaaatgattgcattacaattaaggacgagtga

SEQ ID NO: 3132 - DNA, 597 bp, synthetic construct
  source 1..597: mol_type = other DNA
gtgtccgatctcctgatcccactagataattacctcgctgccgggttacacattgggacgcagcagaagactcatgatatggaaaagtatattttccgggtgcgctcagacggcctatatgtgctggacgtacgtaaaaccgacgagcggctgagggccgtcgcgaagttcctggcaaaatacgacccggatgacattctggtggtggctacccgccaatacggccaggcccccgttaagaaattcggcgagataaccgggtgtaagacaattcctggccgatttataccaggtacactcaccaacccaggatatgccaaatttatcgaacccaaagtgatcgtcgtcactgaccccagaagcgatagtcaggccatccttgagtccaagcaaaacggaatccctgtcgttgggctgtgcgatacagaaaatctgctggcaaatgtagatatctgcgtgcccagcaacaacaagggtcggaaggccatcgcgcttatatactggttgctcgcaaggcagatcctcagagagcgcggaattttgggcgaagacgaggacctggacctggagccttctgactttgagcttaagttctga

SEQ ID NO: 3133 - DNA, 897 bp, synthetic construct
  source 1..897: mol_type = other DNA
atggataacataaaagacaagaagatcaatgataagattcagaagcagctcgctaatgagtcagtcaacgagcttctgagcattacaggaatcaaaagcaatgttatccaacctttaacagtagaatacgtggatgtggcggacacccgcatcgcagattatgtcggattggaagaaaatgactccatccggcttctcgagttccacaccggcgcacccaacgaaaacttggactttaaaatgttcgattattcttccatgatttataagaaataccggaagcccgtgaacgccgtcgcgatttgtacagaacgaataaacgagccagaaggcaagctggagtggggtgaccgcaacaaatactattacgacatcgtgacctacaaagatatcgatggggagctggagctgaatatcattaggaacaagaacaagttcaatcagaagctctcgtcactggagatctttactttaaaaatgatcctatacacgtccttcgacaagaaaccacacgagataatgctggacgcctgcaaactaacgaacgaggctaacctgaatcagtacctgttggatgagatcaaaaagtttcaggaactgacctgcagaaaaataatcgatgaacaatatcatagggggattgccgacgtgatcgccatgaaaaataccctcttttacgaggacctgaagaagagtgaagaacggggcatacgtatcggagagaagagggggattagtattggtgaggacaagaaggagttccacatgagaatccatatcattaaaaacctgctcggcaagattagcaatagcgacctggccaagtctctcgacatcagcgaggaagagcttgaagagttcattaaggagaacaacctgactccgtccaaggactga

SEQ ID NO: 3134 - DNA, 246 bp, synthetic construct
  source 1..246: mol_type = other DNA
atgatcaactgggcggccgaaatgaagacgatgaaaaacacactcttctacgaagacttcaagaagagtgaggagcggagcatcctgattggggaggataaaaaggaatttcacctgcgcatccacataattaaaaacctgctcggcaagatcagcaacagcgacctggcaaagtcgctaaatttctcagaggaagagcttgaagagtttatcaaagagaataatttgacccattcctccatttga

SEQ ID NO: 3135 - DNA, 849 bp, synthetic construct
  source 1..849: mol_type = other DNA
atgattcgggaagctgtcgttgccggtacattctacgaaaataacgtcaaatatctgcgcgagagcattgaggactgctttacacaccggctcggcccaggagaaattccaaagctttccagagtaaacaaggagaaagaggtcaacgccatcatggttcctcatgccgggtatgtctactcagggccgacagccgctcacgcatacagcaagttggtgcaggacggctatcccgagaccttcgtcatcatagcccctaatcacactggctttggagaacacgtgtccatcttcaacgagggctcatggattgtccccaacggggtggcagatgtggacgatgagctggcaaacgcgatcataaatcaatccaactacgcgaaggccgacttcctggctcataggaacgaacacagtatcgaagtacagatccccctcctaaaatactttgatagcaatttcaagatagtgccaatctgcatgatggatcagtccccccaagcatcaatcgaccttgccaattctattttcgaggcggccaatgacctgaaccgaaaaatcaccctgatcgacagcactgacctgagtcattttaagagccaggaaaagaccattgagcatgataacctcgtgtttaatgaggtgatcaacggaaataccgagggcctgtaccaggtggttaaaaaagagcagattactatgtgtggctacggtcctacgatggtaagtatggagtattgcaagaagttaaaccagaagaacttcgaactgctccagcactcgacgagcggcgacatcaccttggattacgcttccgtggtgggatatgggtctggggtgtggttctga

SEQ ID NO: 3136 - DNA, 984 bp, synthetic construct
  source 1..984: mol_type = other DNA
atgagaaagatgtctgtggcctccgctcccggaaaaaccatcctcttcggagaacactccgtggtgtatgatgagcctgctattgcaggagccgttaacaaaagggccagcgtaaagattcaagagagtctaaacaattacagcaccctgaagtcctacgacctgggctttgaagtcatcctgaacacacggagagggacctacaaactcgtaaagggcaagccaggcatcatccggtacattttaaatgcaatgggcaaattccacgaccacagcaacatcgacatgacattgggactcaacctgcccataggctcaggactgggctcttcagcagctgtcactgtggctacaattgccgccctgcatgactaccatggggtgcctataaccaaagaaaagctggcagaggaggcccacggggttgagcaggacgttcagggcattgccagtccactggataccctggtgagcactaacggagggcttgtttatctctcccgcgaaaagcgcatcgtccgcttcgacaagcccctcgatgccccttttgtcatcggctttaccaataagtatggcaatacaggcaagatggtgaagcatgtcaggcacctgaaggacaattatccggagctgattaacccggtaatcagcactatgggcaagattgcaaacgaggccagaatcgcgattcttaagaacgacatcgataggattgcggatttgatgaacctcaatcaggggctactcgatggactgggcgtcaacacatacgagttatcgcgaatgatctacacggcccgggaaaatggtgctctggctagtaaaatcaccggttccggtggaggggggagcataatctcactttgcaaaaatagcacggtggacaatgtggccaatgcgataaacaaggaagacagtacgatcaaagtgaaattctccggggagggtgtgttggtgaaccgacgttcgcccccattcaactga

SEQ ID NO: 3137 - DNA, 816 bp, synthetic construct
  source 1..816: mol_type = other DNA
atgatcatcctgaaaattggcggtagcatactcaccgaaaaggattctgcagagcctaaagtggattacgctaacctgaaccgcattgcagaagagatccggcagtctctctactcagacgaaatgagcaatgacctgattgacgggcttgtaatcgtccatggtgccggctccttcggccatccacccgctaaaaagtaccgaatcggggagccctttgacatggaagactatctctcgaaaaagataggattctctgaggtccaaaacgaggtcaagaagctgaactcaatcatttgccagtccctgatagagcacgggattccagctgtggcgattccgccaagtgcattcatcacaagccacaacaagagaatctatgactgtaatttggaactgatcaagacctacattggagagggctttgtgcctgttctctttggagacgtggtcctggatgacgaggtgaagatcgccgtcatctccggggaccagatcttacagtacattgccaaattcctaaaaagtgataggatagttctaggcaccgatgtggatggggtgtacacaaagaatcccaagactcacgatgatgcggtgcacatcgataaagtaagctcaatcgaggacattaagttcctggaatccactacaaatgttgacgtgaccggcgggatggtgggcaaagtcaaggagcttctcgacttggccgagtatggcataagcagcgagatcatcgacgccaacgagaagggagccattagtaaggccctgcagggtatggaagtgcggggaacgaaaatctccaaggaatga

SEQ ID NO: 3138 - DNA, 1053 bp, synthetic construct
  source 1..1053: mol_type = other DNA
atgatatccgacagaaaattggaacacctgctgatttgcaagaactacgacgtctcctataacgataaaacgaccggctttgaggacatcgagctcatccatagggccttgcctgagatcaataacgacgatatagacctgagcaccgaagtatttggcaagaaactggattcccccctgttcatcaccgcaatcactgggggacacaaggctgccaaggatatcaataaggagctggcgattatcgccgaaagccggaatatcggtctgggtctcggaagtcaaagagcagctatagtgaaccccgagctcagggacacctatgatgtggtccgggagaatgcgcccgacgcattgatcctgggtaacatcggcgccccacaaagcgacctggcaatcgacgctgtcgagattctcgacagcgacatcctggccattcacttgaatccgctccaggaatccattcagcctgaaggagatgttgacgccaggggatacgtcgattcaatcaaggagatctgtaagacagtggatgtgccagtgatggcgaaagagacaggcacaggcatacgcgctgaagacgcaatagagcttgagaaggccggggtcagtttcattgatgttgagggcgccggaggaaccagttgggctgctgtagagacctatagagctgaagacagataccttggggagctattctgggattggggcatcccaaccgccgtcagcactgtggaagtggtaaattcagtggagatccctgtggtgtcctctggggggatttcgtttaggacgcgatgcaagctacgcgctattgccctcggcgcagatgccgttgggatggcgctgcccgccctcaaaggagcctacgaaggtcaggaggctctgaaccagatggtgaaccggttcaacgagtctttacggattgcaatgttcctgttaggggccagcaacctggaagagcttaaacgctcagacctgatcattaaaggcgaaactaagcagtggcttgaagcccgtggctttgacacaaagcattacgcccgacgctga

SEQ ID NO: 3139 - DNA, 1350 bp, synthetic construct
  source 1..1350: mol_type = other DNA
atgacagtggaagtgatagctattggtgggtacgaggaggtggggaagaacatgactgccgtcaaggtaggggaagatgtgatcatattcgatatgggcatccacttagaccgaatatccatccacgaggataccgatatagaccggatgcacagtctggacttgatcgagcgtggggtcattccagatgacacgctgatgaaggatgtcgacgggaaagtgaagggcatcgtcttctcccacgggcacctggaccatattggagcggtggccaaactggcgcacagatacgatgctcccatcatcggaacgccctacacaacagccctcattgagaaacagatcaagggcgagcgcaagttcaaggtaaacaaccccatcagaccactcaatcccggcagcaagatcaaactgtcaaaggacatcaccttggagtttgttcagtccactcacagtattccacaggcggtgttccccgtgttgcatactagcgagggaataattgtctacgccctcgactttaagtttgacaatcatcagaaggtctctccccctcctgactataacaggctgcgcgagcttggaagaaaaggagttttggccctgattgtagagaccaccaacgcaatcaactacacagaaacgcggacatactctgaaaaggtggcacgaatcatcctggaagacctgatgaagagagcctttaaaggccaaaaagaaggaatgattgtgaccaccttcagcagtcatatcgaaaggattcaaaccattgcagacattgcaaaggacagcaatcgggagatcctgttcctgggccgttccatggaaaggttctgcggcatcgcccagaacctcggaatactgaaactgccacagaatgcttacgtgtatggctcgccaaaggccgtcaacaaggcgctgatgaaagccgaggacgatagggatcagtacctcctggtcaccacagggcaccagggggagccggatgccctccttccccgaatcgccagcgcacggactcccttcaatgtgaagaaaggcgataatgtgatatttagcgctcctatcattcctaacccgaccaatgccgctaaccggcatattctagagagcaaactgaaggcaaacggtgcccgcatctatgcaaacgctcacgtgtcaggtcacgccggcagggaagaccatagggacttcttaagaatgctacgccctaaacacatcattccggctcacggcgagcttgagatgctcgtggcttatggtgagctcgctgaggaagaaggctatcgcatcggaaacaacgttcatatccttcggaatgcccaagcccaggtttttaatggtgattga

SEQ ID NO: 3140 - DNA, 996 bp, synthetic construct
  source 1..996: mol_type = other DNA
atgagcgacgtgacggatgtgctcaaggagtacagcgccgatgtcatcaaaacaatcgaggagaatctggctcccgttcaacctcaaaacctgcaggacgcctgcatctacttaaccaaggccggaggcaaaatgttgaggcccgccctcactctgatatcctgcgaagcggtgggtgggaataaggaggatgcgttgaagaccgccgcagccatcgaactcatacacacatttagtcttatccacgacgacattatggatgatgacgacatgcgccggggcatgccctccgtgcacaaggtatgggacgagccactggcgatcctggctggggacaccctattctcaaaggccttcgaaatgattatcagcagcaaggaggagaacgctcatccggaacatgttgccaacgcccttgccacggtcgctgatgcatgtgtgaaaatctgcgaaggacaggcctccgatatgagctttgaaggggactttgacgtcaaagaggccgaatactctgaaatgatttataaaaagacaggcgcactgatcgcagcagcaaccaaggctggagcgattatggggggcgccgacgagaaggaggtcactgccctgtacgaatacggcagaatgattggtattgccttccagattcaggatgactacctggatgtgatcagtgacgagaaggacctgggaaagcctgttggcagtgacatcgccaaaggaaaaatgaccctcatggtggtcaaggctctagctgagtccgatggtgaggaccacgaacggctgctggagatcttgaaggacaacgactgttcacaggatatggtgaatgaggccatagatctcttcaacaagtatggctcaatcgattatgcttataatctggccctcgaaaacgtaaacggggctaaagaggctatcgcattcttaccagactctgatgcaaaatcgatgcttattgcactggcggactttgtgatagcccgatccagctga

SEQ ID NO: 3141 - DNA, 873 bp, synthetic construct
  source 1..873: mol_type = other DNA
atggggtttaaagacaaggtgttgtcctcgagcaatcaattcaactactataaggacaactacgagaaactgcttaatgagaataagcagttgaagcagaagcagaaccagctgatcgaagagaatgagcagctgattaaggagtttgagctgaataagcaaatcataatcaataaagagaatctgagcaccgaaagcaactactgcccctactgtgggaggatctccaattttgaaccttacggggtggtcaaacgcgaaaaggctatgtgtccatactgcaagtctctggagcgacacagattaatctatctattcttcgagcgcaactacagttcaattttcaaaaacaaggacatcaagcttctgcactttgcccccgagagaattttctacaactatttcacccagttcgaccatgtggattactatcctgtggacattgacccggaaacatacgcaaaacggggcctgaagctgaaaatgaaggtcaacatggaggaggttccatatggcgatgaggagtttgacttcatctataacagtcacgtcctggagcacgtgccaaatgactttaaagccatgggcgagttatatcgtgtactcaagcaggatggagtctgcataacagtggtgcccctatcaggaaacgaagagaccctcgaaaaggaagagtataacactcccgaattgcgggagaagcactacggaaacaaggatcatctccggttttacggtctggatgtgaagcagaggctggaaagcgttggcttcaaggtaaaagtttccaaactggaggatctcaaccttactgaaaaagagattgaactcttcaacgtcaaggaatctctcatcttcgtgtgcacgaaatga

SEQ ID NO: 3142 - DNA, 660 bp, synthetic construct
  source 1..660: mol_type = other DNA
atggacttgccctcaggagacaactacgagaataccaccgtgaatgaagccattcggcagatcaatgatacaaaccgcgacctaactgtgctgttctataatagtgaggacaatagtactgtcgcccgggtagaatttgagtttaccatcaatgatttcaaagccaccgccaccgagcagactgtggcgaacagaactgtctggtacaacgaggaaaacgggacgtacatggccttcctcggcaactcagtgacccatgacaacatcatcatcatcacaaatgatgtggagatactggaacacctcatctcaagcgtgaagttcattttcctgaacgaagacggcactgttaattccacatctgatatggtcaacaaccagagcattaacgtcacgggcggtacggcgtccaatggaacggatgcaagtgcatctacagccacctccaacgttagcagctccaactcccaatcgacaggcaatgatggatattactggagcgggcaggatcaggactacattaaggagtacaccgacagcaatggcatccagcacatagaccgccgaaacgggccgaatgaggcttacgacccaaacacccaaaggcactataccgatggtgtggaggacacagcagcttataaccaggactttaactga

SEQ ID NO: 3143 - DNA, 573 bp, synthetic construct
  source 1..573: mol_type = other DNA
atgatagagaaggtacggttcgaccagatcgccgatatcttcacgggagtccgagtcaagaggtatcagaaaggtaaagggaccaccgtggagcggcccatcctaaagaaaacatactccgagaacagtagcaaactggacctggagtatgaggaggtgtcggaggagatccatgagagattctactcccaggaaaatgatattgttattctccttgcaggaagtaaagtgagcaagatcgaggaggcgggcatcatcattcccatgtattacgctgtggttcgcgtcaaggaaggctacgatgtggattttatctaccacctgttgaaaagcgacatcttcccgagggaactgcacaagatcgaagaggggaccaccctgaagattataaagacaactcaccttaagtctatttacctccctgtgccagacttagaaacacaaataaactatggcaaactgtttaacttgatggacaagcgcatcaagctgaatatggaactggccgaactcgagaagcagattgaaaagtcaattatcaacgagatgctcctggaggaaaaaactttttga

SEQ ID NO: 3144 - DNA, 1905 bp, synthetic construct
  source 1..1905: mol_type = other DNA
atgagcagccgcctgggacgccaactatgggataaatatgaggaactgcgtacaaacagcatggttggtttcctgacagatgaagatttccagaagtactttctgggtttcataacctacaagtatctctctgagaacctggaattgtacctcgacaaggaattggagaaggacgacctcaagtttgaagaggcctataactttgagaactacggcaaggtgctggcgaaaaaagcaatctataacctaggctactttattacaccgaaccacctatttcggaatgtcattgcctcctacaaccagggtgcagacattagtcgcgaattgaaatgggccttcgcggaaatcaacagttcctgtaagaaaaccgaaagtcaggaagactttgagaacctctttgaaagcgtgaatctccaggccactccattaggaaaaaagcaggaggacaggaatcgggtaatctacaatatattgaacgccttggacagtgtggacttcggcttggacgagttcaacagctcactctcgttaatcaaccattacagcgagcctgctcgagagcttggcgtgaacctggacgcgctggagaaggagcttctgagcgatcccaataagaatatctttctggacgattctcccctgaatgaaagttctagcatcccactgaacgaggctccattcgaagagtacgcatccatggaactgttcctggacgacattgctcctgttgaagagttcgattcgatggaactgtcaaataaagagaatattgtcacagggctcgagaacccaaatcatcccaacagcttagtcaatgagggatggaatgacaggtcctatgacagctaccgcattcaaaagcagtattccataggcgacgcctttgagtacctccttgacaagttctccctaaacgcctcaaaatccgctgatttttacactccaaacgatgtgtcagtcctggtttcaaagctggtggccaccaacaaacgcgccattgacagtgtgtacgatccgtgctgcggcagctcctcaatgctcctggagctgaacaaacacgtgtccctgaacctgatctgcggccaggaagtgaatgcctattactacaatattagtaggcagaacatgatcttacacaacattcactttaaggactttgacataaagcagggagattccttggatagccctcatcacatcgggtatgataaattcgatgtggtggtctctcagatccccttcaatgtaagttggaccgccaagaaaagcttcctcaatgaccaacggtttaaggagtacaatgcactcgctcccagggtgaaggcggagtatgcctttatccagcacatgctctatcatttggacgatgacgggattatggttgtgatcgctcctcacggggtactgttcagatccgcctcggaggaatcaatcagaaagatcatcgtctctaagatgaattatctggatgcagtcatcgggcttccgagcaatatgttctatagcaccaacagccctgcatgtgtgctgatattcaagaaaaacagaagatatgatgatgacgtactcttcattgacgcttccaagaacttcaataagataaaacttcggaacaatcttcggaaagaggatatcaacaagattgtgggcacgtacgtcagcagggctgaggtggacaaatactcccgaagagtcagccttagggagatcgacgagaacaactgcaacctgaacatcccccgatacgtggacacgtatgaggaagaggaaattaacatccaggagatctacaaacgccgggaggaagcctcgcgtgagctgaaggaggttacttacgaaatagatgagctctgtaaggaactgggaattgagaatcccctgatcaacaatatcttcgaatga

SEQ ID NO: 3145 - DNA, 921 bp, synthetic construct
  source 1..921: mol_type = other DNA
atgagcaaaacttatatatttggacataaaagtccggataccgattccattactagcagtctggtaatgtgtgacttagaaaacaaactcgggaatgcggacgtcgtgtcgtgcaggctgggaaacctcaataaggagactgaatttgtgctggactacttcgacattgaggccccccaattgattgagagcatcgaagatgatgccgaggtgatcttagtggatcacaacagtcctagcgagtctgtggacaatatcgaaaacgcaaagattctcaagctggttgaccaccacaagatcgcttttgagacctcctaccccctgttcattcgcaccgagcccgtcggctgcaccgagacaatcctctttaaactgtataaggagaacggcctcacgccagacaagaccatcgcatccctcatgctgtcagcaatcatatcggacacactgcttctgaaatctcctacaacaacggaggatgacaagcaagcggtcaaggaacttgctgagatcgcccagattgattacgaggaatacggtttggaaatgctaaaggccggaaccgacctgtcaagcttctcaattgaagagatcctcagcctggacgccaagcagattgacttcaaggatgtcagatccatcgtaaatcaggtcaacacggcagatatcgacgacgtgatgacaatgaaagatgatttggaggccgggatgaataaaatcatagaggatgaaaatctagaccttttcatgctgctgatcaccgacattgtaaacagcaactctcaggtgatcgctctcggcaaagacgtgtgcctggtggaaaaggcctatggggtgaaattggaggacaacactgttcttctggagggcgtggtctcccggaagaagcaggtggttccaataatgaccgaaaacgcttga

SEQ ID NO: 3146 - DNA, 354 bp, synthetic construct
  source 1..354: mol_type = other DNA
atgtcaaagttttgtccgaaatgcggttgcgaaaatctggatgaggcctctttctgcctggaatgtggcgcttctcttccaagcattgaggaggtgaaggaacggtcttcgcatggggctggaacgagccaccagagcacattttcctcaaacttgaatgaggaaaacggcttcaaccaggagaccagtagtttcagtcagtccaactccaactccaatgaggcaagcaacagcagcaagttcaaaaacgtaataaacgaggcgaaccccgccaataatgacaaccaagactacgccatctgttgcctggtcatctttgtgctgctactcatcgcattcctctgcaatttttga

SEQ ID NO: 3147 - DNA, 396 bp, synthetic construct
  source 1..396: mol_type = other DNA
atggaaataaacgacttcggccatgacctggacgagtctgcacagttcctcgtgcagaagctcttgattctccacccgtgggatgaagaatgggaccttagcgtcaccgccaatttggtgcccttctataaggagaagatcgacatacagatcagtaagcagggaaaatgcgatgaggagttttttgataagctgatccgattctcctcaattcttgatacaaaccaggtacggctgctgttcatggaacaactggtgggtatgccactgatcctggatggcaaatacctaaacaacgacgagcgcattgacctcctcatcgagagcttaaatgggaggctgaaaagagtcgacaatgggctgtacctatttttcaaccacgaggaggaattttga

SEQ ID NO: 3148 - DNA, 1170 bp, synthetic construct
  source 1..1170: mol_type = other DNA
atgatctacaggaaactaggcaagacggatttggaagtgtcaaatataggctttgggtgcatgagactgccccataaagagcatttttaccagatagatgaggcagaagctagtaaaatgttcgattatgccatcgatcacggaataaactactttgacctagcctattcatttcattctaaaaacaaaaacctggggggaaatgcagagccctttgtgggtaaatacctggctgagcggggaaaccgagaagacatggtgatccagaccaaactccccggatggctggttaataaaagggaggacatggacaagttcctcgatttgcagctcgaaagactgcagactgattacattgatgtatacatgctccattcccttaagatcgacttctggaacaagctgtacggcatggatgtactggaatttctcgacagcatcttagaagacggccgcgtcaagtatgtcggtttttccttccacgatgacttggacgtcttcttcagcatcatggatagctacgacaagtgggatgtgatcctcacgcaggtcaattatctggacgaggactacaaatccggccttggcggtctggagtttgtgggaatggccgggctgggcaatgttattatggaacctttaaggggcgggagcctcatcacaaacatccccgacgaggttcaggccctttgggacactgccgataagaagcgcaccccagtggaatgggcactggagtacctttgggacaagccactggtaacctctgtgttcagtgggatgtccaacatggagcaggtgaaggagaacattgccatcgcggaaaactgccagccggattgtatgagcgagcacgatcgacaaatactgaaggacgtggctcaagtctataagtctcgggaagagattccatgtacaggatgccggtattgcatgccttgccacaaccgcgtggacattccccactgcttcaagcagtataacattgcgaaatcgttgaattacattgacaagaccgccgctccatacttctggctggtgaataaggatgagagagccgacagctgtacattttgtggggagtgcaatatccaatgtccgcagggcatcgacatccctgcagagatggagaaggtcttcgacttcttccacgaggaaagtcagtattga

SEQ ID NO: 3149 - DNA, 828 bp, synthetic construct
  source 1..828: mol_type = other DNA
atgaaccacgacgagctaataaacctggacgcaatcgactgggaagaagtgtggcagaagagcctgaaaaagagttttaagaaggagaagaactgggatgatatagccaaagatttcggtcagtggctagaaaacgacgactatccggacgtcttgcttgaagagatgaggattgatgaagaggacaccatcctggatatcggctgcgctgagggaaccataagcaggaagctcgcgaagaaagccaagtcactgactgggatcgacaaatccaaattgatgctggaggaactgaataagaaagccgaaaaggagcgcatcgataatattaccacgatccaaatggacatcaacgaactgaattatgaggagatcggcgactacgacatcatcctcgcttcccgctgcctcaatggtatttacaatataaagaacacactgacaaccctgaacgagatcgccaacaagtatgtgtacattacggtattcgggtcgaaaagccataaatacaaaaaagagaagtgcgagattgcaggaaaaccctttaaggcaggcactgactacatggtcctggtgcttcttctcaaaagtctgggaatcgaagccaatgtggtgcagttagagtgtaagaatctcaaggaatatcgggacttcgatgaagccatcaacagatctgtgtggcgttttggggagttggaggaagatcgagagattgcgctgagacagtacttcaaggagaccctcgtcaaaaatgaacggggcaactgggttaacccaaaggacaagacagatttagttctgatttggtggaagaaggaggaggagtga

SEQ ID NO: 3150 - DNA, 825 bp, synthetic construct
  source 1..825: mol_type = other DNA
atgacgaagaagattatcattgaggatgagaacgagatcgattgggaccagctgtggacggcgaagatggacaagaagggagaccgaggcaaagactggtctaaggccgccgaaaagtatagtgagagggccagcaaagataactacaccgaacaattgatctcaaagatgatcatcagtaaagaggacaccgtgttggacgtgggctgcggagaggggagcgtcaccatccctctgagcaaagaggtcaaatccattactgccatcgacgcaactgacaagatgctggagatcctcgacgagaagatcaagtctgaaggtattgagaatataaagacaatcaaagaggatatcaacgatgtaaatctggaaaaatacggcaagttcgacattgtgctggcaagccgcgtcgtcaacggcataaaaagccccaaaaaggttttctccaactttaatgaaatggccaacaagtacgttttcatcacacttttcggaccaaacaattggaaattggagaaggatttccacgaatacctgtcgaaggagtacaacggggctccctcatataccatcctgctcaatctccttgcagagatggggatttacgcgaatattataaacctcgatgtggggccggtgagaacttataagacaatcgaagaggccatagataatggcaaatggaacttagctaaatttagtgaagaggaacaggagaaactgcccaagtttctcaacgaggtgctaattcgggataatgaaaccggtctgctatccaactccgaagacaaaccagactgggtgctgctttggtggaagaagtga

SEQ ID NO: 3151 - DNA, 816 bp, synthetic construct
  source 1..816: mol_type = other DNA
atgagttttcagattgacgacccggaggacatcgattgggcgtacttctgggctaagaaactggagagcaaaaaggacagggccaaggactggaataaggccgcgcccaactttggaaagtctgcaaagaaggacgattaccacacaaagattatagaaaggatcaatgtcagcaaagaggacacgatcctggacctgggctgcggcgacggaagcataacaatccccctcgctaagaaggctaaatcagtcactggcgtggattctgcatataagatgcttgagatcctgaacgagaacgccaaaaaggaaggaatcgaaaacattcgcaccctggaagaggacttatcaaatattcgagtcaatgatgtgggcaaccacgacatcgtggtggccagcagatccctgaatgggatcattaacatccgggagaccatctccaacataaacgagattgccgacaagtacgtgtatatcaccctattcgggccaaacaattggaaaatcgaaaaagagttctttgagagcattgataaggaatatgtagagtttccatcgcacagatacttcttcaacatactggttgacatgggtatctaccccaatgtggaaaacctaaacatcggccataaacgcgagtacgaaaacattgaagaggccctcgaaagtgggaaatggcggttggagctcctggacgacgaggaaaaggcacagctttataaatatctcgaggatattctggaggaggatgataatggtaagctctccaaccctaatgataaagccgattgggttttgtactggtggaagaagtga

SEQ ID NO: 3152 - DNA, 495 bp, synthetic construct
  source 1..495: mol_type = other DNA
atggatgggcggctggacattgacagttttgagaaggccatcaacggcttaaataagaacctatacgacgtcggagcactctttcaggcgaatatgccgcttctggcctccgaagccagccaggccgctaaggagaattgcgtgaacaagatggcagaccgagtggacgaacgcctcgactccttcagagaaaactatggatattacaacgacttctacgagaaactgaaagagaacgtgaaaaatgacaccatagaaaaccccgaggagtatgatgtgttcctcgaacacgccagcaacacttttccaaagtacattgatgagttgggccagaccatcgatagtctgtctggcatccctatcaggacagaaaagtttgattcaacgatgagggagctggggtcgatcattgagaatttccgcttcgacttcaaacggaccctgacagtagctgatgtttacaaggtccagaaggagatgaaaagccaagaatga

SEQ ID NO: 3153 - DNA, 264 bp, synthetic construct
  source 1..264: mol_type = other DNA
atgaaagccgtgtcttatatcaagagatccaataaccgctacgtactcgtgatgaacatgaatggaaaattcaagatgccctcagagatcgccagcgaaatggacctacggatcaaccagataagtgcagtccttagcgatctgaaaaaggaggacattgtgacgtgcataaatgaagaagagaaggttggcaggctctacaagctgaccgacaaggggctggaggcttacaaagtcattaagacaaacgaagagatccagtga

SEQ ID NO: 3154 - DNA, 1671 bp, synthetic construct
  source 1..1671: mol_type = other DNA
atggacgagttagaagagattgttttcaagcacgccctcctgaatgccgccaagcataagggatcggcaaaccctggagcggtgatgggctcaattatgagcaatgagcccgaactgcggccccgcgcaaaggagatcgggccgatttccggtaagattgtagcccaagttaacgccatgtcgcctgaggagcagaagactaagatggaagagctcggagtggaagtggaagagaaaaagaaaaagaaagaggaaggcctgcccaagcttccaggcagcaataagaatgtggtcatgcgtttcgcccctaacccaagtgggccactgcacatcggccacgcacgcgccgccgtgcccaacggtgaatatgtgaaaaaatgtggcggaaaattcattctgcgcatcgaggacacagatcctaagcggatttacgagcccgcctaccagctgattcaggatgatttgaaatggctgggtatcgagcctgacgaagtctattaccagagtgaccggtttgagatctattatcagtacgccgaagagctgataaagagaggggcagcatatatgtgtacatgtgacgggggggagtttaagaagcttaaggacaactgccagccctgcccatgccgcgacaatagcgtcgaggagaatatggagctgtggaaacggttccccgagatggaagctggagaggctgtgctgaggattaaaacggatataaaccacaagaaccctgccatccgtgattgggtggcgatgagaattgttgaagaggagcacccccgccttgggactaagtaccgggtctaccccatgatgaacttttcagtatccgtcgatgaccatttgctcggcatgacccatgttctcagaggcaaggaccatctggctaacagcgaaaagcagaaatacctttacaaccacatgggctgggagattcccgaatttatacactacggtcgattgaagatggaagacatcgcactgtccacctccaaggccatggctggaatcgaagagggcacctacagcggatgggacgacccaaggttgggtaccctcagggcgatagctagacgaggcatccagcccgagacaatcacccaactgatggtggagattggcatcaagatgtctgactcagccatcagctggaaaaagatctacgggctgaatagaaatctcattgaggagaaggtgaacaggtatttctttgtaccgggccctgtgaaaatcgacatcgccgatgtgccagaggacattctggggtgggaggtcatccggccgctccacccagactttgaggaacgaggcaacagaacgctaatcttcgacaaggaactatatattccgaaagccgactgcaaagatgggattatccggctgatggacgctgtgaacgtggagatcagtggagaggacgtcaagttccatagcgaatcctttgaagatgctcgagaggtcaaagcacgcatcatccagtgggttcctcttgatgcgatcaaggctaaaatagtgatggacgatgcctctatagtggaagggctctgcgaaaaggactgtggtgatctgaaagtgggcgatatagtccaactcgaaaggttcggattcgctaggctagatgagatcaaagatgatgaattaatcttctacttcgcgcacaaatga

SEQ ID NO: 3155 - DNA, 447 bp, synthetic construct
  source 1..447: mol_type = other DNA
atggataaaaagctcgcagtgatctttatcgggattcagggaagtggaaagacaagcttctacaaaagatacttcccagactttgcccacgtcaatctggacacgtttaagaaacgcagcaaggaaagaaaattcttcaacatgtgcatagaggaaggaaagtcctttgtggtagacaacacaaacccgactaaattcgatcgccagcggtatatccccaccgcccgtgagaatgggtacgagatatggggctacttcttcaactcccctttggaagagtctatggaaaggaacaatcagcgagagggccttgctaggattccccgggtgggtgtcctctcaacctataagaagctagaagtgccagagtatgatgagggctttgacaagctgttctacgttaagatcaaagacgggcaatttgtggtcggcgagctggaggaatga

SEQ ID NO: 3156 - DNA, 2289 bp, synthetic construct
  source 1..2289: mol_type = other DNA
atgaaggaggttaccgctattctgctcgttattatcgccctcattgggatcatctcaataatcattgtgaaattgtattaccgggagaaagagaaggatcatgataaagagagattagaggagttcctgaacagtagcgattacaattccagcattgaaagtcacgagaagatcagcagtaggcaaaaagcggagggctctaaaaagcctcagaaagtccagcgccgccgccgagtgcgcaaggtcccgaaggagagccagaaccggaatgaaaacctaagcgaggcacagatttacgcgaacacactccaaaacgcctccaacaacgatctgtttgtggattatgacggtgataataggggagcccagaggacccggaaggtgagacgggtggccaaagctgagacagccgaaaccacccaagctaacggcactgccgctctgttaagacagagggcagaggcggctaaggcccgcgagcaggctcctaggaccaaggtcagaaaggtgaggaaggttaaatcccaagaggacacagtgcagaaggttcagagaactccagaccgagtcaaggaacagatgaacaaggaagagaaagtgaagcccatccaggagcctattacaaaagagcacaaggaaaccatcaacagcgtcagacagggtgaaagtgaggtcaagccccgtcaagtccctatgacgaaagaacagaaggagttcatttcatcggaaaccgccaagaaactgattgttgaggatgacgacggggctgtgaaagtagttaagagtatcaaacccgctgaggacatcgaggaaatcaaggagagcgctctgattgagaaggcggaaactactgaagaggcgaaggtgaaagtgactgaagagacgcctaaggtagaagagaaggctgaaacggctgaagaagaggcccctaaagtggaagaagaagtgcaaaccgaggaagctccaaaagtagaagccgaaccagtccaagagactaccgaggaagtgaaaaccgaggaagcccccaaagtggaggcagagccagtccaggagacgacggaggaagtgaaagctgaggagaccaaggtagcagagaaaccggcagaagaggttgcggaaaaagtggaggctccaaaagcaggaaaacccgcagaagaagtggccgagaaggtagaggccccaaaggccgaggagatcaaagaagaggtgaccaagcccgccgaagagcccaaggcagaggaagtgaaggcggaaacgactggggagatcaaatcagacgcccccaaggtggaggccgaacccacagaggagcccacagaggaaatagaggtcgcagaaccgaccgaggaacctacggaggagcctactgaggaaatagaggtggcagaacccacagaagagcccactgaggagatagaagtggaggccgtggacgattacatagaagcccttgagacagagggcgtgtatcaggacgacctccacattctcctaggtgaggagaagatcgaggacgaaggccctgagaacgagtttgtcacaatcaattccgatcggcagtcaagctctgggggaaacgacatattccgggacgccataaactccatccgcaagttccggggagcaaacacccagcagcataaggtggaagagatcaaagaggaagtcgttccagatgactacatccacaactttgggaacggcatcgaagagatcggagacacaatcacaatcactccgatccgtgaggacgagatcgacgacctggcctataatcagccgaatgaggatgtagacgaaatctataaggaggtcaatgaagaagaatacaataagaccattgactccgagctggatgaggcatacgaggatgttacagatgagacttccgaggaggaggccaacacctacaccgtggaggactataagcagatcgagaaggaggaagaggagaaaaaggcccgagaagaaaatacccagaagattctggacctgaaggggattgaatccaagaagcctcgctcatcgaagaaggagtctgtgtctacagagcagccagaagatcccgcccagaagcaactggtcttcaccgagcagaggagcaatgttgaagaggtgtatatcaatggcaagttgattgaactcaaacttggccagaccgtaatgtttaaccacaacaatgaaacgtactctagccagatactgaagttgaaaccaggattcgtgggcgtcaaataccgaggcaaaaaggtctggattaaagccaccgatgtgaagcgggtgctttga

SEQ ID NO: 3157 - DNA, 1233 bp, synthetic construct
  source 1..1233: mol_type = other DNA
atggtgaaaatcaacgagaattaccttttgctgcagaacagttatctgtttgtggaagtgaacagacgcgctgagaaatatatggaggaaaacccagataaggatgtcatcaaaatgggaattggggatgtgaccaagcccctgaccccaacggtcattaaggcattcaaggacgctgttgatgagatggccgacggagagacattcatggggtatggtcccgagcaaggctacgactttctggccgaagccatcatcaaaaacgacttcaaccggtggggcgtcgatttagaccttgatgaggtcttcattagcgacggggccaaatgcgataccggtaacatacaggagatttttgaccttgacaatgtcatcgctgtgactgaccccgtgtaccccgtgtatgtggacacaaacgtgatggcgggcaggtcgggcctcataaaggacgatggcatgtacgcgaatatcgtgtatctcccatgcacggaggagaacgactttgtaccagctctgccagaggaagatgtagacttgatctacctctgtttccccaacaaccctaccggcaccaccctgacaaaagaccagctagctaaatttgtcgaatacgccaaggaaaatgacgccctcattctgttcgatgcagcgtacgaagtattcataacagaggatgacgttcctcacaccatctatgagatcgaaggggccaaggaggtggccattgaatttcgcagcttttcaaaaacggcaggattcacagggacacgttgcgcttacactgtcgttcctaaggaaatcaagataaagacctctactggcgatgagcagtccgtgaatgctctctggaacagaaggcagaccacaaaattcaatggagtgtcctacccggtccaaaaggccgccgaggcagtttacagtgaagagggccagaaggagattatggaaaacattgagtattacctggagaatgcccgaatcatccgcgaaagcctaagtgatatcggattgaatgtgtacggtggagttaactccccttacatttgggtgaagacccctaatgacatggagtcctgggacttctttgacctgctgctggaggatgcaaacatcgtggggaccccgggctcaggctttgggcccagcggtgaaggatatctgcggctcactgccttcaatactttagaaaatacgaaggaggcaatgaaccggatctctaagctgagcttctga

SEQ ID NO: 3158 - DNA, 681 bp, synthetic construct
  source 1..681: mol_type = other DNA
atggaggctgactttagccttgtgaatgagaacgatgatttgcaggatctgttctcgaaatacggcgctctggcactggagaaacaggaaaacctctccaagctggtgggcgatagcgagcccgaactcgatatcgaaaacggcatagtcaagttcggggacaaggagtttcctattcaacttctagggttcctggacccagatgaggacacgtggtcatgggcctgggacaatgaggaaatcggtttccccgaagagctcattgaggaggccaaagaagtaaaggaatttggcgaagatcagaatatcgttcagttcaagcaaagtatgtttgccgccagcttcgaggaggcccacatcttatccatgacagtgtcttcaatcttcggagacgacgcatactgcggagtgaactatggaaacttcgtcttctttgtgaccataaaaagcgacgagattccaagttctgagggtccggaggaattttccaacatcttcaacgaatttcaccgccggtttgaggtaaatcatctgaaggcgttggagtcctatgcaatgctgaaggggtatgaatacaaataccgagacgacttcgcgctggtgaagatcggcgacaatagggtggtcgtcgggctcaccgagagaaaaaacgttcagagcatcaagttcattctggcctga

SEQ ID NO: 3159 - DNA, 627 bp, synthetic construct
  source 1..627: mol_type = other DNA
atggatagtgaactgatcgaggagataagctttgagattcagctgttgctcaagatgggcttctacaacgacgaggagattttagagataatcgacgacgaatttattgaagaggacattcccaaggagaagcttctggaaatcttctccaatgtcaaagagaacttcgactgtccaaagagcgattcagaggactttttgaacctgaaagaggcgtttctgaacctatctaaaaaccacaatatactcacgatccataatgccggttacgacatcgaagagggcatccaggactcgtttgagctcttcacccaccttcgcaacaataaatatgaggtggaagggttctgcttctacagctttgaggatatcgaaatcgcaattgaggaaaacagcctgctgatcgccttcggcgatttcgagtttgacgaagacaaagggctcaagatagctaagacagtaaaggatgagctagtgtccaagggattcaatatcaactgggacgaatcaatcgatgagaggattgaaatcgtggacttcaattggcaaaaggcctacgaagatcgggattattccatggacggagcactgagtgactatattgaactgaacaacctcgaggattga

SEQ ID NO: 3160 - DNA, 669 bp, synthetic construct
  source 1..669: mol_type = other DNA
atgaacgcgcgctcctttgagatcatcgaagaggccatttcaaacggggtgtggacttggcttgagctggattgctacagcaattcactctacctagagttcgaacggctgcaactgttgtctaagtccattgtcaatccatttaagccggtacaggaaagcacctacaacgattataggggcgaactcgcaatccgatttggcacaaacatctatctcgctattctttacgatgacgaggactctttcgactttctggaccttgaagaggatatcctgaatagcttcctcaattcggatgccaagttaagcgataacgacagctacttctatcgccagttcaaaaaggaaatacggggattcaagttccaggacgaggactacagcagtaatctcaccaaaaaatataagaaggagatagtgctggcccagctgcccaataaaaaagatagttatgactttctgctgagcttcgagctagacaactttgcaatcatcgtgaagggagacattatttcctgcttcaacgatttcgagtccttgagtgatggcgacataaagagagcttccaacgactggatcttgtactatctggattactggatcaaaaaggggacggaagaggagtacgacgaagacttcctgtgtgagaacatttcatttgactga

SEQ ID NO: 3161 - DNA, 543 bp, synthetic construct
  source 1..543: mol_type = other DNA
atgaatcagcttagaccaggctacaactttttagccactcacgaactgtttttcgatgagattcctcatcagagggccattcacctggcaaactacgaatttttctggaacatcctcgacgagctgggcccgttcggaacagaagagtcataccttgccttttgcgagctatgcgattggctaatcgataaccccaatacgcccataatagaatgtttccgatggatactgtccagctgggacattgaactcgaggattttgacgacaaggtcattgagaacgagaatatcctcaagattatctatgacttggacttctatgaggatttgatgatgctggacttcaccatcatcagcaccgggttcggccagctcatcctgcaagggaaaatcgacgctgacgtgaagaacatcattcagctctccctgctgcggcagatgaactctcacgtgctggatgagtatctgggaagtaatatgcagtacaaatacgaacgctacctgtatcttcaaaagctgctcgacatcttggaagaggcgtga

SEQ ID NO: 3162 - DNA, 1020 bp, synthetic construct
  source 1..1020: mol_type = other DNA
atgacctgtagtatcctggtgggaggggcctggggcgatgaaggcaagggaaaatgcattacatacctgtgcgatacagacaaaccggatatagtggctcgggcaggagtcggtccaaacgctggacattccgtggagtttaatggggaaaaatatggactgcggctagttccatcggggtttgttcaaaccgaagcccagctgctgattggcgccggagtattagttgaccccgaggtgcttttccacgaatttgactacctgagcaaatacaacgtgcgcgagcgaacccttgtggaccccaggtgcagcatcatcgaacctgagcacaaggagcgcgatcaggcttcagagcacttggccaaaaagataggaagcacaggcagcggttgcgggcccgccaactcggatagggtgttgagaactgcaaagatggcgaaggagattccagagctggccgactatttgacggacgtgtctctcgcagtcaacgacgcgctcaatgatggccaggacgtcttcatcgaaggctctcagggcttcgccctctcactctactacggcacctatccttttgtaacaagtaaggacaccacagccagcagcttcgcagcggatgttggggtcggccctaccaaggtggatgaggtcatcaacgtgttcaagtcctatatctcccgtgtgggggaaggtcccttcccaactgaaatgagtcaggaggaggctgagagcaaaggcctggaagagtacggtgtagtgacgggaaggcggcgcagaatcgggtactttgatatggagctggcaaaagagtcatgcagaataaatggggctacacagattgccctgacctgtgtggacaagctttacgactgtgcccgggtcagggactatgctgaactctcccaggagaccaaggacttcatctccgaaatcgagcaggagacgggcgtgccggtcaccattatttctactggccccgacctgcaagacactatcgatctccgaaaggaactactgtga

SEQ ID NO: 3163 - DNA, 1185 bp, synthetic construct
  source 1..1185: mol_type = other DNA
atgcggtgtgttggtacggtggtgcgcggaatacgaacacccattattaaggagaacgacgatctggccactatcgtggtagattcgttgatggccgcaaaagagagtgagggatttgagtttagggacaaggacatcgttgcaataacagaggctgttgtagcaatctccgaggggaactacgtgacggtggatgacgtggcggaggatgtggccaagaaattcccaagcaaagaaatcggtgtgacgaatcccatcctcagcagaaacaggttctcaatcatcctcaaagggattgcccggggcatggataagattaccctgcttagcagcttccctgccgatgaagtgggcaacggcatattagacgaacgagctctggatgaaagcgagtttaatctaggaagcgtcatcactgaagaggactacgaaaagaacttcagttcctggattcacccctttaccggcatcaacatggtggatttctatagggaattgatcgaaagcgaggattgcgaagtggaatttgtcttttccaatgacgtaaagaccattctggactataccaacgacgtcttgacctgcgacatccatacacggaagaagaccacgaaaatgcttaaggagaaaggcgccaatgtgtatggactccatgagattctcgtggagcccatcggcgattcagggtgcaaccccgagtacggcttgctcgggtccaataaggcaacagaggaacgcttaaaactcttcccaaaaacaggagataaactggtcaacgaggttcagaagagactgattgagcttaccggcaagcagatcgaggtaatggtctatggtgacggagcgttcaaggaccctgtcgggaagatttgggagctggctgatccagtggtttcaccggcccacacagccgggctggtgggctaccctaatgagatcaaactcaagtacgtgagtgataatcaattcgctgacctgcacggagacgagctgaaggaggcgatcaaggaagagatacgccagaaggctgaaaacctaacaggccagatgatcaccgaaggaaccactccaagagtcctgactgacctgatcggttccctttgtgacctgaccagcggctctggcgacaaagggactccggtcatattcattcaggggtacttcgacaacctggccaatgactga

SEQ ID NO: 3164 - DNA, 384 bp, synthetic construct
  source 1..384: mol_type = other DNA
atgaaagatatcattaacccaaatgtggagatccctgatgagcaggtagcaatggcctttttccgatctgtcagatgggttaacggggtctactgtcccaagtgcaagagctacaatgtgaataacagaggaaaccagggcaggacgcgccggtatgtgtgcaaagactgcgggtcgaatttcaacgactttagtggtacaatcttccacaagagcaagataccgctcaatgtgatgctgtatatcctgttcaacctggatgagaaaaccaccactcagctgtccgaagagcttggctacagccggcaatgtatctcacgcatttccaaattgtttagggacaagctactcagcaaccccgagtttttcgacattgaagaatga

SEQ ID NO: 3165 - DNA, 948 bp, synthetic construct
  source 1..948: mol_type = other DNA
atggataagaaaacactcgctattatagcgattatcgtgatagctctggtcgccgtgggtgcttactttgcaaccagcggtggaagcagtgacaatgtagtccggatcggccacttgccatcagaccatgacaccgcactcttcgtggcaaaggagaagaagctgtttgaagatcaggggctcacggtggagctaacacaatttaacaatggtggagacttaatgactgctatggccagtggagatattgatatagggtatgccgggatcacccctgtaatgtcttccattagccaaggagtgcccgttaaagtggtctccggggcccagattgagggaagcgcgatcgtggccaataagaacagcggcatcacgaccgtggccgacctaaaaggcaagactgtcgcaacccctggggaagccacaattcagaacatgctgctcacctcggccctgacacaggccggcgtctccactgattcagtggaatttacaaccatgaaagcggcccagatgacagacgccttgaaggcaggccaggttgacgcaatgatcatctgggagccttactcctcaattgccgtgaagaacggagacggcgtactgatcgaaaacagttctgagatcattccaggccacccctgctgctgtgtggtggccagggaggacttcatcaaggaccaccgcgacagcctggacaaggttctcaaagctcatgaggaggccacgaaattcaccaatgaaaaccccgccgaagcggctaagatgctgccggaggacatcgtcccagatcaggagctgcaggctaaagtgatcgcagataccgttttcatatccggccttgatgctgagtacaagcagaaggtcatggacttcatggctctggaagtgcaattggggcttctgaaacagccccttactgaagagcagatcttcgccgatctgtga

SEQ ID NO: 3166 - DNA, 744 bp, synthetic construct
  source 1..744: mol_type = other DNA
gtggaaatcaagaaaaagtttcttccatttatcctaccggccattctgctgattatctggtacctcattacagatgggttgcatctgatcccttactatatcctgccgagtcccttgaatgtgtttaacgcggcatggaccctgataactaacggaaaactcttcatgcacacctccagcacactgataaaggtgttctcaggtatcattctggcatctgtagtggccattcccctcggcatcatcctcggctggtacgagacccttgaccggctgagctccctgatcataagtatcctaaggcccatccctcccatctcatggattccattctccattctttggtttggtataggactctccagcgccgtgttcgtgatcttcatcggctgtgtgttctcagtgctggtatacacaattgacggagtgaaacgaaccgataacgtcttgatcgaagccgctcagacgctgggggcaaacaattgggacatcctgcttaagatcgtcctcccatccacgctgccctatattgtcagcggactcaaggtcggcgtgagcatagctttaatgtgcaccgtcagcgccgagatgatcgcttcgagccgggggttagggtatatgattctgactgccagtcaattgttccagcctggaactgtggttgttgggatgattgttattggcataatcggcattctgtttgactacggctttagaaaagcgcaggagcgcatcttctggtga

SEQ ID NO: 3167 - DNA, 762 bp, synthetic construct
  source 1..762: mol_type = other DNA
gtgttcatattggcaattgacataaagaacgtctccaagtcatttgttactaaagacaaagatttcatggccctgaagaatattaatctccatgtggacgacggagaactaatctgtctcttggggccctccggctgcggcaagaccaccttactgcgaatggtgggggggctggagaaacccgatgagggagagatctatgatcggggagagcttgtaacaggtccttccaaggaccgcggcttcattttccagcagtatagcctgttcccctggctaaatgtgctcgataacgttatgtttggactgaacctgaacaaagacacaagcaaggaagagaatctcgctgctgccgaaaggtacctggaaagggtcggcctggccgagtttaaatacagctacccccacgaactgagcggggggatgaagcagcgagtggcgatcatccgctcactgctcaaccacactcctgtgctgcttatggatgagccattcagtgcagtggacatgctgaatcgccatagtcttcaagagcagctcatcggcgtgtggaaaagatttaacaccacgattttattcgtaacccacgacgtcgacgaggccgtctacttggccgacaagatcgtgattatggataagaacccgggcagaatccaagatgttgtggaggtgccacttgagcggccaagacagagggaatcgcgggagtttctggacttccaggatgaaatcgaaaagctgctcggtgtctgggagccttga

SEQ ID NO: 3168 - DNA, 801 bp, synthetic construct
  source 1..801: mol_type = other DNA
atgatcgggctgagcatcgccggatttgacccctccggcggggctggaatcagcacagatatgaagacaatggctgcccatggcgtgcacccctgttccgtgatcaccgccctaactgcgcagaacccaaaaaaagtgtttagcgtgcaggctatcgaaacctcctatattagacagcagatcgactccatattcgatgagtaccccatcaagtactcaaagacgggcctcctctactccaaagagatcatccagctggtcagtaaaaaggtcgaggaactgaatttgcgcatagtagttgacccggtgatggtggcaagttcgggtgggcaacttgcaaagaaggagatggcaaattcactgaagaaatacctcttgaaaaacgccctgcttgttactccaaacgtcaaagaggccgaggagctgtcgggaatcagcatcaaatcaatagaggatgctaaggaagccgcctataagattggagaatgctgcaatgtaatgattacgggtggccacctggacggcaacaatgtcatttacaataagcaaaaggatgagctcagcattctgaagcagaacttgatcaagaccgataaccttcacggcaccgggtgcagtctctctgccgctatctgtgccaacctcattatactgaacgaaaaggacaaagacagcaaggacgagaacaacctagagattgcaatcgaacggtctaccaaattcatttacgaagcggtgaagaaggggaggtatggcacattaaatcctaatttcaacagcaatctggacttcctgaaatga

SEQ ID NO: 3169 - DNA, 705 bp, synthetic construct
  source 1..705: mol_type = other DNA
atggataagatttatgcaataatccctgtcaaccaatttgcaaatgctaaaacccgcctgtcgcccttcctcacacctgaagaaaggagggatctattgaaggccatgctcaaagacattacagacacactcaagcccattgtagacaaggtcgtgatcatcagcagagatgaggaggtgctggcctacgccgaagagctggagcttactacaattgtcgaggaggagtacaaaaaatccaaggctgttaacagcagcgacgacaaccccttaaataaggccctgaaacaggcgatgaagtggagtcggaagaagacccgaaaagtgataatcctgccatctgacattccattgatcggaaagaccaacgtaaagctcctaattgaccaggcaaagaattttgacttcatcatcgtgccctcaaagggcggaggtacgaacactctgatcataaagccactggcgatcgacatgaaattcgaggggtttagcttcaacaagcacatcgaagaggccaagagaaagaaattggttccgattgtgcatgattcattctatatggccctcgatgtcaacaccacggaggatcttggcgaaatcatgcttcatggcaatgggaccgaaaccaaaaaatacctggagagtctggggatcaaggtggagtcctcccacgaccacgaacggctgaaagtgactcgcgattga

SEQ ID NO: 3170 - DNA, 1407 bp, synthetic construct
  source 1..1407: mol_type = other DNA
gtggagaatttcagtgaatggttccatgagatcttagagaaggccgagattacagacagtcggtacccgattaaaggcatgagcgtatggctcccttacgggttccaaatccggagagcctgtctgaacatctaccgcgacctgctggactcggaacacgatgaggtcttgttcccactgctgattccagaagaggaactggcaaaggagggcatccatgtgaagggctttgaagatgaggtctattgggtgacccacggcggtcagaaggagttgaacgagaagcttgccatccggcctacaagcgagacggcaatgtatccgatgttctccctctgggttcgctcccacattgacctgccaatcaagcagtaccaagtggtgaacacattccgatatgaaaccaagcataccaggcctctgatacgggtgagggagattaccacctttgccgaagcccacactgtgcactcaagcccagaggaagcggcagagcaggttgaaactggaattgagatctataaagagctctttgatgagatgggaattgcctatctcatcagcaagaggccggtctgggacaagttccccggtgctgagtacactatggcctttgatacgatcatgcccgatggaaagaccttgcagattgggacggtccacaatctgggccagacctttgcaaagacctttgagataacctttgaaaacaaggagggcaaccacgaatacgcctaccagacctgctatggcatctcagatagggtgattgcagccgcgattgccgctcacggagatgaaaaagggctgatcctacctcccagaatcgctccaaagcagataacaatcattccaatcatcttcaaggatggaggagaggaggtaatggctaaatgcctcgaaatcaagaaatccttagaaagcaaagggatcagagtccaaatggacacacgcgacatacgacccggtaagaaattctttgactgggaattgaaaggcactcctcttcggttcgaacttggtcccagagacctgaagaacaatgtagctatcctgggccgccgtgacaccggggaaaagatagagataagcctcgaggatgacctccccagcaaggttgaggaccttctaatggagattgaagaaaatctaaaagccaagtcctggaaagcccaggaggataaactcatcactctggagagtctggacaatgtgggcgaaattgtcgatgaggagaaagtggtgaaattctactggtgcggagaagaggaatgtgggaaggagatcgaagaggagacagaggtggacattctgggcatcaacgaggagaacataaaaacagacaagatctgtccccattgcgggaagcccgcaaagcatgttgcgctgatggctaaaacgtactga

SEQ ID NO: 3171 - DNA, 1044 bp, synthetic construct
  source 1..1044: mol_type = other DNA
atggactctaaaaaaatccagatgccccgagaagtacacattggccccaatgttctcgatgaagtgggggaaatttgcaaggacctgcgtctatttgacgaggcccttgtagtctccggctttcacacatttgacgttgccgggcagcagaccgttgacgccctcgaaagttctgatttcggggtggacgtcgtcaaggttaaagatgcatcggtcgagagtgtggagaaggtgcgggagaagatcgccaacgcctcggtggtcctgggcgtcggaggaggtaagataattgacgtggcaaagcttgcttccacctatgagcattcctacttcattagtgtgccaaccactgccagtcacgacggaatcgcctcccccatggcctccattaaaaatgacaagggatcaatctcaaaaaatgcaaactctcccatggcggtggtggccgacactggcataatcaacactagcccttttagactaatcgcttcaggctgtgcggacatcgtgtccaactacaccgccatcaaagattggcgattggcttacaggctgcggaatgaaaagttcagcgagagcgctgctgcccttagtgagatgacggctaaactcattatcaactcctccgacagcatcaaggaaggcctggaggagagcgctagaatagtggtaaagtcactgttcagcagtggcatggctataagcatcgcaggttcaagccgccctgccagcggttcggagcacctcttcagccatgcattggatcggatcgccaaaaagccagcactgcatggggagcaatgcggggtgggaacgatcatgatgatgcacttgcacggcggggattggagagcgattcagtctatcctgaagaccattggggcaccgacaaacgcctccgaattaggactggatgatgatgagataatcgacgccctcacaattgctcatacactcaggccagaaaggtataccattctgggtgacaacggcctgacccgcgatgcggccatcaagctggcgcgcaaaacggaggtgatctga

SEQ ID NO: 3172 - DNA, 441 bp, synthetic construct
  source 1..441: mol_type = other DNA
atgatcactctcattggtaagaaactggcaaaggaaggagagagctttatattctacgagcccgcggaggaatgcagtacctgccgattcaaagcctcgtgcatagattccctagaggaggggcataagtatacaatcacggaagtcagagatgtggaacagaagtgtccgattcacgaggatgagaaggtgcaggtggtggtcgtggaaaagggggagaccacaatcctgaccgattccaaaggggtctttgaaggcagcagcttcgagtttaatcggcaaggctgttcaaacaaggactgcgactttagggacatgtgtttccctgaggagatcggaaaaggcgaaaaatgcgtttacattaaggacctcggcaagttcaacgactgcccacgcggaaactctctgatcaaatgtgtggtaaagatctacgacaaatga

SEQ ID NO: 3173 - DNA, 669 bp, synthetic construct
  source 1..669: mol_type = other DNA
atgagtcaaatgaagaaagattgcgggtacgctgccgcagagctggtcaaagacgggcaggttctcgggctgggcaccggttcaacaaccctctatttcatcgaaaaggtcgggatgcgggtgagagacgaaggcattgaggtgatgggaatcccaacttcctttcagtcgtccttgcttgcccgcaagtggaacatcccaatcacgagcctggacgagcacgagattgatctggctgttgacggtgcagacgagatagatccggacttcaaccttatcaaaggcggcggcgccgcacatactatcgaaaagatcgtggactactccgccaaggaactggtcatcatcgcggatgatagcaagctcgtgaatgtgctcggggccttccccctgcccatagaaattatcccagtgagcctcaaccctgtgacaaaggccttggaggacatgggaggggaagtaaatattaggatgggccaggcgaaggatggacccgtcataaccgacaatggcaacttcatcctggacgtgagctttggagagatcgacaatcccatttcaatggagaaagagctgaacaccctacctggagtggttgagaacggactgtttacagaaatggtcgataaggtgattattggtagtaaagatggcgtaaaatacttatga

SEQ ID NO: 3174 - DNA, 1335 bp, synthetic construct
  source 1..1335: mol_type = other DNA
atgaaagtggtgatagtcggtggcggagcgggagggatctccacagcttccaatctgcgcaaactggacgaagaagtcgagattgtggttttgacgcgggataatcaagtgtcttactctccgtgcgctattccgtacgtactgtccgaccgcatacactcatttgatgacatcgtgatgcgcacagtggacgactataaggcaaaaaacattgacgtgatgctggagacggaagtgactggggtcgactcggctaagaagcagatcacctatagcaaaaacggtgttgtgcagaccatgaactatgacaagcttgtgctagccactgggggatcgccctttgtcccccctatgaagggggtggacttggacggcgtattcaagatccggacgctggatgacggaaagcaagtgaaggaatgggcggaaaactgcaaaagcgctctggtgaccggcgccggtttgatcgggattgagatcgcctacgcatttaaaaagatgggcctgaaggtaaccttatgtgagatgctcccacagatcgttccacggagcctcgatcccgatatggcgaagatcctgacggactacctgatcgaagagggaattgatgtggttctgggccagcccatcacagagcttaaaggggaagatggcaaagtcaagaaggctgtcttcgaggacggcacagaagcagatgcagacatggtgatcctggctacaggcgtgagagccgagcttaatctcgccaaaatggcgggctgtgactgtgggagatgggccatccttgtgaatgataggatggctaccaccgtacctgacgtctatgcagttggagactgcgtggagtcttacagtgctatcctccggtcaaacactgtgagccagttaggaaccaccgcagttcgtcaagccaagaccctggctcagactctcgccggcaagcgctcaaggttcaaccctgtgctcaactccatggttagcaaagtcggcaaactggagttcggtgcagtcggcctgacccgaagctttgcccagcagaacagcataaaggccgtggtcggaaaggttgaggccctcacaagggccaggtactatccaaatgccaagcctatgaatgtaaaggtcatctgtgatgcagatggtacaataattgggtgccagataattgccgaggaacgagtcgccgagagaattgataccatgacattggccatcactcaggagctaacctgcttcgaactcagtaacatggagttcgcttacgccccccccgtgtccatggtgactgacccactggtgattgcggtggaggaagtcagtaaaaagttcaactga

SEQ ID NO: 3175 - DNA, 2076 bp, synthetic construct
  source 1..2076: mol_type = other DNA
ctgacaaagatattcatcagttgtgccctgccctacgccaacgggccctgccatctcggtcacctccggtccacatatattccagcggatatctatgccagatacaaccgtatggcggggaatgatgtcttgatggtgtgtgccaccgacgagcacggaactccaattgcagtgaaagcagatgcggaaggcaagaaacctatcgaggtcgccaagcgctaccatgacatgatagcccgggacattgaaagctgcgacatcagcctggacaactttgcacgcacaagcgacgagctgcactataagatctcacaggacttcttcctatacctgtacgaaaaggggttgatctacgaggaagccattcagcagctttactgtgaaaactgtgagaagttcttgcccgaccgatacgtggaggggatctgtcctgtctgtggggctgaggcccggggcgaccactgcgagtcctgcggacgggctttggagccgaccgagctgcttgagccacactgcctcacctgcggaaatacgccagtgataagggacagcacacaatatttcttcaagctcagccatttccagaatcaactcgaggagtatattacaaccaacgagtacctgcctcccaacgtccgaaactacgcgcagaactggctgaaggaaggcctggaggattggatcatgacccgggacatgaaatgggggattccagtgcctctcgaaggcgctaaaggaaaggtcatctacgtgtggggcgaggccttcatcggctatatttcctctgccgcggcatggagcagaaggacgggcatcccctgggaggactattgggacggccacgtggttcacttcattggaaaggacattatctaccaccattcgctcttttggcctgcgatgctgatgggccatgactgcaagttacccgatgacatttttgcaggggaatttctgtccctcgagggccgaaagatgtctaccagtaagaactgggttgtctgggtgtccgactttgtaaaagacttcgaatcagacttgctgcgcttctacctaactatcagcgcaccgcttaacaaagacacagatttcagttgggacgactttggaagaagggtgaacgatgaattggcagatataatcggcaacttcctgcacaggacttttacattcactcataagttctttgacggtaaggtcccggagtatgccaatccaagtgaagaggacctcgaatttgaagctgagattaaggagctgccggctaaagtgggggagcttatctcaagcatgaagtttagggaagggctggttgagattctcaagaccgccaaatctgccaataagtacttcaatgaccaggagccctggaaggccgtgaaagaaaacccacagaaggcctctaactgcctgtacctctccaaccagttctgcaaatccctagccattctgctgaaaccttatatccccaacaaggcagatgccatctgcgatataatcaatattagtaaggaaaacgtgtgggatgatgccagcatattcctagagaatggtcacgagataaataaggccaagccactctttaagaagattgaagataaggttattgaggctcagaaggaaaagctgtatgctaacctcgaggattcagaggagactaaagacgataaggacaataaaaaagataagaaagacaagtcgaacaagaataaatccaataaagacaaaaaagataaatcgaagtcaaatgatggggaaaaaatggatctgatcagcatcgatgaatttgccaaagtggagatccgcatcggaaagatcgtagagatcgaaaagatagagaagtccaacaaattactgaagacccaaatcgacattggagataagaccatccaggtgattgcaggtcttggcaaaagatacgctcccgaggacctgcttggcaaaaaggtccctgtggtaaccaatctgaaacccgctaaattgatgggtgaactgtctgaaggaatgatcatggctacggagagtgcagctatcttaacgcccgacgattgtgaaatcggcgagctgcttatgtga

SEQ ID NO: 3176 - DNA, 1578 bp, synthetic construct
  source 1..1578: mol_type = other DNA
atggatgaaagcctgatgataacagagtctgagaaatttcttaatcagattgagagggagaagttagatctcaccaatctgaagtctgacttcagtgacttggagtcatatctggaggtgtacgaacttttgaaaagcaactttgacaagctccaggacatgaaggaaagtatggacgagcgcggttatactgccccattccgtagtctcaaccggtacggttcccgggtgagtgaggatgtggactacgaggaactaggggagctgaaccgccacaacactattttccgcaacaatgcctccgctaaaaagaacagcttcgatagggtaaaatacgccatcgccgcgcaccggattgccctgggcaaccttgaggagtacgccaaaatcagatgcaaggactgtcagaagagctacaaggttagcacattcctggaaaactcaaagacctgcaaatgtggaagcacggattttgagctgaaggtgaaccactccggaatccatcggctcgagatcatcccttatctgcccttgtccggcaattatatggtgctgctctccagcctgtccgggtggggcagggactccttccgcagaatcttgaacatactgcagcagaaacgaaaaggtgtcgtcaagacggtgactcctatcatccgcataaaggaaaacggcagaaccatcactaaacgagtaaaccttgatagtgagttcgccgattgctatgaagaggaactcagacgtatatatggcaagggagtgcgcatagaaaggcttgaatttcacagtacaaagcccacaatcgttaacgataagtacacccggaccaatctggccctggcttatgtcaagcatgcggaagacattgtgtcaagacatgaggaagagatttttgaggaaaacatcaaggacctcaacaacctgaagacctacgatgagcttatctactcagtcaatctggaaaaacctgaatacatggatgaggatgacctggactcttggagagagcaaaagatccaggacaatctcctggaattgggcctcatggacaaatacgggcacctggataagcaattaaagaaagacctaaaggaaagggagagaatcaagtcgaaaattttcgccgacatcgcaccaaccctgattctgtgggacatttccaaatactacctctgcacatcctatgaccgccggaaaaggtatggctctccattcccgttcattcggaacgatttagaccgccagcagcggaaggtgtttgccaatccccatgctaatgtcgtcgggctcctgagggagaaggagaaaaagcacatgatagcaattgacgagatggatctcctgctgtacaaaaagttcaaattggaaaagcgaatcaagaacacgaattttaagctgaattacgcagcactaggacccgcgatcgtgtttgctaattcggactacaacattaaggaagtttcgagggcttataaagtgggagagaaaagcgtaaaacgagagattatgaatatcaagagctttcgtaagccgaacagcaaaaaatcacgggagttcctaggcaagatcaaggggtga

SEQ ID NO: 3177 - DNA, 708 bp, synthetic construct
  source 1..708: mol_type = other DNA
atgagttatgattttgatgacttcgacgaggacttcgatgatgacgagtttgatgagtctgaggattacgatgactttgacgaagatttcgaggacgatttcgaggacgattttgaagacgacttcgacgactttgacttcgatgacgacttcgacaacctcgactcaaaaagcaaggaagatatcgacatatttgatgaaaaaccccttgaaaccgacagcgggtacgaacgcaccgccgtggaggtgcacgtctcgagtcccctgagttcacgcaagttagtggagcttatggacacgtatccgtccctaaagaggatcacttgtcccaaaagcatttatgatagaatgagctcaaagtacatcaaaatcctgaaggaagatttgaacatcacagtggagatcaagtacaactggggaaagaaaaaatacacaaaaaaggaagtcgattcggtcattgaactgttcaacgaggggaagcgaagcggtgagattgcatcccagctggacatgcctatttccaatgttaactatatcaaatccaaatacagcgaccggatcaatgtaaagcattacaagaagaaatatgatgacgagtgcagactgaggataaagtccatgaaggaggacggcctcaagccaaaagagataagccagaacctgggcattccagtgcggtctgtgtactacatcctcaataagaagtga

SEQ ID NO: 3178 - DNA, 14790 bp, synthetic construct
  source 1..14790: mol_type = other DNA
atgaataataagacattatttatcattgggctgttcatatgcctgctgttcaccatacctatggtaagcgctgctgatgctgactccaacttaatcgataattcagtgatcggaacaaacatcaactcacaggcaatcacaacatctgacgcaagcatcgaccactcgagcaatgccaatgccatcaacacgaatattaatagcgatgacattgtgtctaataacaataacaataactccatcattgacattaacgattccgacattgagagccagaaggacggctcaagtaagaatattatcaagtcgaccaacaaaaacacaaatgactccaacaacgaaactgaggacaacatcctcgtgactgatatcaatctgggcaaaaataataaaaattcaaatgataaaaatatcctcagcgctaatgccctaactgccgatggaactggtacaactttcggcgacttgcaatatatcattgaccaagatacaaccggtaccattactctcgataaaaattataaattcgagtctggcaccgacgacgcttatctcgatggcatcacgataaacaaggccattacgataaatggcggaaaccataccatcgacggagaccacctggctcgcatctttaacattaatactggatctgcctccgacattgttgtgctcaatagcatccatttcattaatggtatggcagatggcagtggcgataatgccaatggcggcgcgatttatattggttcgccaacgaccctgaattacattaccgccatcaattgcacagcgactgggaacggcggtgccatatatgcccatgcagacggcaccaatattgcagcgaactacctatacctatataacaacactgccgtgaacggcggcgcactgtacgtgtatggcaacgattatacagtcaccgtcgtggacgcccgatacaatagcgccagcggcaatgggggcgccatgtatgcatacggcaactccttccacctgaacaaggtgaacttcatcaacaacacggcatacggcgaagattcagaggggggggcaatcttctttgcccacaattctgatgattccattgtgaacaactcctactttgcaaacaactctgcaaatcgcgatgggggcgcaatagtgtgggatcaaggcgcacacttcggcgaactgtataattccaagttctacaacaatactgctaaccacagctcaggcgctgtgcgttggagtggggagaatggcaccattgacaactgtagttttattgacaacaaggcgtatggaaccaatttagaaccgggtgactttgaccagggcggcgaccagattcttggcggcaatggcggggcgatcacctggctcggttctgtgggtattatcaggaactccaacttcaccgataactacgccgaggccaatgggggagggatgttccttatagctttcgacatcaatgaccccaactccatctgtaacgacacccatatcatcaactgtaacttcattagcaacgacgccggactcaatgggggtgcattagactgggacggtaaggcgtacaacgggtctgtgtctgggtccaagttttataacaataccgccgcccggagtggaggcgcgatcttctggaaaggcaatggaggcatcataacacagtctgactttaagtataactctgccaatgggactcatctggtgcagcccgaaggattcctgacccctggcgggaacggcggcgcggtaatcatcacagggtccgacgtgaatatcacatattccaatttcactaacaacagtgctcgcgctcggggcggagcggtttacttgcagctcaataacaataccatggttttgaatagttcatttgagaataatagtgccggcaccaatggtggagcactggacttttatactggggcggaaaacggtaaggtaattaactccacatttctgaataacaccgctaaccggagcggcggtggtatatactggaatggcgaaaagggcgtcattaatggctccatcttctatgataataaggccctcaatcagggtacatacgtgaacggaagccaaattaccgatgggggcgacggcggcgcgatcatttggacaggctcacacgggacgctggagaatagcacctttaagaacaacaacgcgactaaccggggtggagctattttccttgagaagcataatctggaggaccctaacgactattgcaagaacattacagtgttgaattgcacatttgagaagaacagcgccgggaccaacggcggtgccatcgactggtttgagggtgccgagaatggcaggattattaactcaacattcaccgaaaactacgcccggagatctgggggcgcggttttctggaatggcgtgaacgggactatatccaattcaacatttacccttaacgaggtcggtctggaaggtgccgacacgggaaccggcgagacaattcccacgggagatgacgatggtggagccatcaagtggacaggggcaaacggcttgattgaaaactccatctttcgcgaaaataaggctttggaagggcgggggggagccatttatctggagaacaacgagaacgggacggttaacaactgcaccttcgaattgaatagtgcctttacaaacgggggggctatagactggcacgagggcgcaaagaatgggcagcttatcaattccaccctgacaaacaacacggcgggacgtagcggtggggcagtttattggaatggacacaacgggacaatcaacggaacaaacttcacagacaacaaggcactgggaactcaccacacggagggccagacggaaggcggagatgggggtgcaatcatctggacaggctcctatggtactatcgagctgtcgaacttccataataacagtgcacggtggaggggcggagcaatcttccttcagaagaacgtgcatgaaggggaagagcattgctataatacaaccgttaagaatagctactttgaggagaactttgcaggcagtaacggtggggctatcgattggtctgcaggcgctatgtatgggaaactgatcaatagcacattcataaacaacactgcggagcggagtgcaggcgccgtttactggaatggcctatatggggaaatcctcaattccacatttgaaaacaacaccgccatagggaacttcactcacgacgtgcggcccgaggtggacgaaacctacactgtgatcggaggcaacgggggggctgtggtgattactggaagccatgccaagatcgatggaagcaactttacattcaacaccgcaacaagactcggcggggcaatcttcttccacgacaacaccaacgggaccataaacaattccatctttactaacaacacggcagggctcaatgggggcgcccttgacttctacgagggtgcgcgagatgggcaggtcctcaactccacctttatcaacaacactgccaaggacggaaaagggggcgccatcaactggataggcacaaatggcaccgtggatggctgtgacttcataaacaacacggcaaacggatctgatgatgagtctggtgcaggtggggcaatcaacgtcgatggtattaacacctacatcgcaaattcaacatttaccaacaacagctgctgggacgatgggggggctatctgttggaatggtgacctgggtaagatctacaatattacctgcttcaacaacagcgcgataggcaaggaccacaaatcgagcggcgggaccatcagtatttatggttcaaacctcacaatggacaaggtgaacataacactcggtacagtgtcctcagtgaacgacgacaaggtttccaaaggtggagggatctttgtgacagggaactatgtgaacatcaccaatgccgagtttacaaactgcagcgcattggccccgatcgacgattcctctgccggagcactctacattatcgggaacaataccaatgtggtgaatgcaacattcaagaacaacacggcttatgaggacggtggcgccgtgtacattctcggggaaaactgtaccctgaacaacacactgttcctcaataacgtggcccacaacgacggcggagccatccagtgggatggcaacaatggccgcatctacaacctcactgccgacggaaactatgccgacagtgcaagtggctcctctaaaggagggaccctcactattgagggcaacaatacagtgatccagaaaatcaatatttccaattcctatgtggatagcgaccacgacctcggagccggcaagtcgacccagggtggagcgatattcctaaccgggaatgactgtaacattacagatgctgtgtttgacaactgttctgtcaaatatgtggccgatgaatcatcggggggagccatgtacatcatcggtaacaataccaacgtggtcaatgccaacttcacaaacaactcggccgtggaggacgggggcgccatatatattgacggggactattgcaccttgaacaatacggtgttcatcaacaacaccgctcacaacgacggcggcgctgtggactgggagggtaactatggccacgtttacaatctgactgccattgacaaccatgcagatagtgcacatggcagtagcaaaggcgggactatcctgctggaaggggggcattgcacatttgaccagctgaacatctcaaactcctatgtcagcggtgaaacctacacagggacaaagcctgtgcaaggcggaggcatagctatctccggtaatgactgcaacatttccaattccgtctttgacaattgttctgtgagatatgaaggaaccaattccagcgggggggcattgtacatttggggtaacgatacccatatcgcgaactgtaatttcacaaacaactcggtgccttccgacgggggggccatctacgtgggaggcagcgacgtgaccgttgtcgattcaaacttcatcgacaacaatgcctcccagtcgggtggcgctatcttcttgacggacaataagaacagtcagatcaatgggagcaccttcaagaacaattctgcgaaagtgaacggtggagcgattgacttctatgcaggtgcagaagacggtctcgtatctgcgtgcgagtttgttaacaacacggccggcgcctccggcggctccatttactgggaggggacccgcggggtgatcgagtactctagctttgatggaagccgggctcttggcaatcagacaagcgatgccaacaatgggcggggaggctcgatcatttggctcggagaccacggcacaatccgtggctgtgactttaatgacagtcagtccgctaaagagggggcgacactgtatgtggtgggcgaccttattaaggtgcagcaaagcaactttaccaactctcaaaccaataccagtggtggcatttacatccaggggtcagaaggcactataagtaattgccatatggagaacacgactgctaaggagtccggtggagcactttacgttaaaggcaactacatctacctgctggattctgacataaacaatgccacctccgttaataatggcagcgccatttacattactgggaacaccacccacatagagaatagcaatgtcaccaattgcagctcaagtagcggaaatggaaccatcatgattgccggctataagaccgtcatggacggcgtcaatgtagacaacaacaaagcggtgtctgctggcgccgtgctaattagtggatcgcagaccaaaatcagcaactcgaacttcacccataacaatgcctccaaggatgccgggggcataatgatcaatgggaccgacaataccattacaacttcaaatatctctgacaactacgccaaagagaacggcggagggatctactacaccggcgatagaaatacagtaagttactcgaatatcgaccataacagcgcgaacaatggtgccaatgtctacatggctatcaaagctaaagattgcaagcttatcggctccaatatcacaaacgccaaggcccgaaactttggtggtggagtggagtggtgtgagaacagcgaaaatggactgattcaggactgctacttctataactgtactagcactgcccacggaggcgctatccactggtaccccggcaaatatggggttatcgacaattgcaccttcgtggaatgccatgtcgcgggcaccaaaaacgggggggccatatatgccggtgcaaacacgaatgtgaaacccgttggaacagttcttagcaacagcacattcatcaactgcaccacaggcaccaggggcgctgtcaactggaacagtcaaggggggctcatctacaataacacctttattaactgtggtgtcgccaacacatctgtgactacatcttgggggggtgcccaagctctgcagattgagaaagggaacaacacgcagattatcgcctgcgagttttataactgctccggcatcgggggaggaggcgcattgagagtccagggtgacggccatagtgggtacaatattacaattgcgaactgtacattcgacaactgtaacaataccggcctggcggggggcgtctatttatccgatatggctcgaaatataactttcgaaaacaatacctttaccaacaactccgcccccaatgtgggcgccttcttcatggaccctaaaacggtcattgttagcttcgtgaacaacacatttattaataactctgccacgggctcaagcggttatgcgggggccgctcagttaaccggaaatctcgaagtcatcaattcgacattcatcgagaactcagccgtgagtaaagccggcgccattaatgctgtggaggattatgacggaaacaacaacctggccatcatcggatcaactttccagtacaacaaagctaaagagggctctgccatcaatgctatcaacctggacatgactgacacagttttactggaaaaccaagcagcattcgataagtggacaaaccagcgcaattcaagagctaacggccatgtatctataaacggtacgtttgtcggcaaagacaactacttgaacgggatcaaggccaatggagccactttcgacaatgtcacatattgcggggtcaatggcggagggctgtatgaagacactgtcaccaacaccgacgatgtaacttccgctaagtccaccaatgaggttcaccagttaatagtcctggagatttatgactataataataatctcgtggataccaagaccacatttactgatgagaatgggaaattcaacttcgaatttgacatggaaaacccccaggactacagctacaaggtgatccaccctgaagataactattacactggcgcagagtactcgattggaaaggccatctctaacatcacaatcaaaagccagaacatcactcaccccgaggatgagaatataacctttaaggtaaccggaggatcgggaacaccgaccggcaatattaccgtctttatcaacgataccgaggggaacgtgatctttaatgatacaattatcctgaactccaccggggaggcaaagctgttcttcccaaggctcaacgccagcgaatactacatagaagccaagtataacggggataacaactacctgccggacaatgacacgtccatcttccacgtgaatatggccgagtcattcatcaaaatcggaatcgagaactacacctataacgagactaggaacatcaccatcacagtgccatacatagagtcaggcaggatctccgttatcgtcacgaatgagaacttcacgcagctgtacacagtctatgtgaacgaaggaaccgaagaagtgcaaattcaattgcctatactggatgcaggcgtgtacgacatcgaggccatattccacggaaacaacaattactatccaagccaaaataccaccaacttcacggtgtttaaggctgcgtcaatcatcaacatcacagccgacaatgtgtccgggggagtgcgagagacggtggatatccacatcgatcctgaggtggcaacgcagaatataaatctgaccgtgtatgatgctcagggtaatattgtggatcagtactatgacctgggtctgcacgattcccggatcacgcagattcttacactccttcccaaagggaagtacaatgtgacggtaacttatccgggagacaagaaccataatgcatcgtcaaactcaacaatcttctacgtaaccaatgatctcttcccaattgagatcaatgccactaatatgacctatggggacgaccagatcatcaacatcaccgtgcctgccaatgcagacccagacaagctctacattaacataaattgctccgattggccgggaaataagactgtgacggagctgggactgacgattgatgagaatgggttaatacagatcgacacgacgaacactaatttatttgccaataagatagatgccggcaattacaccatcaatgtgtattaccctggggacgatgacttcctgtccaactccagcagtgtggacttcgaagtcgccaaggctattccggagatgaatgtgacgccaactaacattacatatggaaacctggaggatattctcgtcgagattgcccagaatggcaacgtgaccctatacgtcacgagcgaaaacgaccccactctgaacatcactaagatcgaggtggaaatcattgagggtaaagtctactggaacgtcaatgatacatacctgccagccggcgaatatatggttgaggcaatattcaatggaaaccgcaattacgagtctgtcaacaaaaccgaaaagttcaatgttaccaaagccatccccaacattgtcatcgatgtcgatgacatccatgtgggggacagcgaatacatcaatgtgaccgtcgaaggcgtcgaacacggcaccaccccacagggcaacattaagatcattgtccgcacaatcgatcagatcgtggagctgaatgccacgggccagtacaacctgacactggatgatgaggtgcagggcaatggcataagtgtcaccgtcatttattacggcgatgataattataattacacagagaaaagcgtttactacgatgtcactaaaaaagaaacttccatcaatgtgacaggagctacgcctatttcatatggaactatagaaaaccttctcgctgaagtcaacgaaaccggcgtgacaggaaccattaccatttatgtgaacagcaccgttgacggatttatcaatcagacccatgtagcgacaatcacggttgacgacgcaggcaaagccacttgggatatagatcagatcatcctgcccgtcggttcatatgacgtgactgcagtttactctggggatgacaaatttgaaggtagtgtcagcactgtcaaagtaatcgtggtcgagaaggctaccgattacgacatcagcgtggaggccaataacaccgtttatggaacggatcaggtcatcatcgtaactgtgcctgacaatgccaacggtactgtgaccataaccatagagggcactgaaatcagcctgacctcacaggtggaaaacggtaaagcagtctttactatcccaaacgacctagttgacttcctggaggtgcacgacaattataatgtcactgccacctataatggcgacgacaagtacgccgccggagtcaaggccagtgacctgttcaatgtgaccaaagctgaatctcacattaaagtggttgcagaagatatcgattacactcagatcgaaaacattactgtcatccttccagatttcaacgcgaccggtaagatcgtgattacaattgtgaacaagtctgacaccactcagatcgtcagaactttggaggtggaccccttcactaatactacgggggttatctatccctttgaaggactcttggtaggtaattacacagtgaaggtcgagtactccggagaccacaactataataacagtgaaaacactaccgactttgaggtgcgtaaggttgaccctaccctaactgagaactcaccggatatcatctacggggccgacgagaacataacggtgaccatcaccggcgctacaggaggtgtggaccccaccggaaccatccaggttattgttgacggtgtcaccattgacaccattacgatcggggataaagacctggaatttattgtgaccaagcctggagtcgacccacagcacaatatcaccgtgatttacagtggcgacagcaactataacccagtgaccattaccggggagtttgctgtaacgcagaacaacactatcgagatggaggaggtctcccctaacattgtgtatggtaacaacgagataattacaatcactctgcctaatgatgccacaggcaccgtctatctggtggtcaacggaacttattacacccctattgggattgatgagaaccaccaagctgtatttaccattgtcgccccaatcgtaggagagtacaacttcacagcttactactccggagatgagaactacacagccaacaatataagcggcgcattcaatgtaaccaaagcggatgttagcctgtcagaatctcacactgccacaattacctatggggctaacgacaccattactgtcacaattactggggtggagggccctgagggagtgctggccccaactggcaccatcaaggtgttggtggacggagaggaaatcggcaatgtcaccattggggatgacctggtctttaactccatcaggccatttgtggacccccaacacaacatcacaatcatttacagcggagacaataactacaattccaaagtcatagacaacaccgtgctcgacaccctggttttcgaggttatcaagaacaacaccctggagatcagtgaagactcgccagacatcttctataccgagaacgagaccataactgtgaccattgctggggacgccacaggtaccatcacggtcacagttggcggagagcaggtgggagaggtggtcactatcactgaaataacagaggatgacaaggtgttcaccttcaacattacaaagcctgagggcggagtatatgatgacctgaccgtggtctacagtggagattccaattatgactccgctaccatcaatggcgagtttactgtctcccctatcgaccctaatatcaccgaggacagtccggatattgtttacacaaacaacgaagttatcacaataactgtgcctgagggggctaccggcaatctaacggtgactgtcaagaacagcaaaggggatacagtggagaccaaaaaattggtgatagggacggacgatttggttgtaactatcgagaagcccgctgtagacaactacactttcacggtggactacacgggctgtaccaactacactgaaaagaccattacaggcgagtttaaggtaacaaaggcctcaaatgagattacagtcgtgtcgaccaatataacctacggacaaactgaaacaataaccgtcacagttcccgaaggggcaacaggcaacgtaacaattaccgtgggcacatacacggacatgctggaaatcccagaaggcagcactgaagtggtgttcactattcccaaaacagccgccgatgagttgctgagtgtgagtgataactacattgtcttcgctaactactccggcgacagcaactacgaatccgtggtggccaatgccccgttccatgtcgaccccgccaacactacactcactatagaggtggctgatatcacctacggggaggacgaaataatcaatgtgaccgttaatggagtcaccggtggagacattcccactggatttgtcacaatcaagctcaacgggaccgacattgagttgaccaagccggtagacagtgaaggaaaggtacaattcaacgtgtcaggacttgtggtcggagaatacactgttaacgctacatttgtttcaagctcaatcaattacaatgatagcaacaacacggcgaagttcaatgtcacgaaagccgatgtgaaggaggccaacatgaacatcaccgctattaacatcacgtacggcgacgacgagaccataacggtgatcctgaatgagaccaacatcaccggaaacgttaccattaccatcaacggcacggagatcgagaccaaggaattggtggacggtaaggtggtcttcaccgtgcccgatttagaggtaaacggatacaacgtcgtggctaactactccggcgaccataactataacgcaatacctatcggagccaatttcaacacagactttaaggtggataaggctaacgtaaccgtggttgtgactcccgtagatataatttacaaggagacagaggagattaacgtgactgtgactggggtgttcatcaacgacaatgtgaacgacaacctgaccggcaaagtgaccatctacatcgatggcgttgaaaatcaaactaaggatattagtgctgtggacgaatacggcatcctgcacttcagtgtggagggattggctgtcgggacccataatgtgacggccgtttatcacgatgataggaactacaatgataacaatgcaaccgaggactttgaagtcatcaatgctctgcccgaggatatgaaggtcatcccccagaacatcacttaccacatccagacagagaccattaccgtggatctgggagaagtcctgaacggaactgtccagctgtacataaacgacacacttgtcgcgacatttgaggttatcgaccagagaacagtaagctacaccaataattccttagctgtcggaaactacaccgctaaggccgtgttcacggcaaatggcgatttcgtgaacgctagtgcaaacttcacggtgtctaaggccccggtgacggttgacgtggtggccgaggacagtgtgtacggcgaaacccagaccattaccgtaaacgttgataataccgttcccgataaatacaacctcacagggaacgtgagcattacaattaatggggtggactacggcaacaagacggttgatgctaacggacaggccgtgtttgagataaccggcttggaagctaacgataactaccaggtgatcgccacctactacaacgatcccaactatctcgacaatacagggcaggacacctttaaagtcagcaaggccgacgtcaaggatgtgaataaaaacattaccgccatcaacattacttatggggaggatgagaccattaccgtcacccttaatgaggataacattacgggaaagattaccattacaatcaacggcactgaaattgagactaaggagcttgaggatggtaaagtggtctttacagtaaaggacctggaagtgaacggatacaatgttgtggccaattacagcggggatactaactataacgcgttcacaatagccgacaacctcaacacggactttactgtgggaaaagctaattcaacggttgaggtggaggctatcccaagcattgtgtacggcaacaacgaaaccattaccgtgagcgtgccaatcagaaaccacacagggacaattaccctgacaataaatggcagtgactatgtttttgtaaaacatctaactgctgaggatggagatacaattgtcctcactaatgtaagcggccttgccgtgggaaactacaatgttacggtaaagtatagtgatgatagaaactacaacgatagcgaagcttctgcactgttcgaagtcactaaagcgacgcccagccagatcactgtggaagcgcagaatatcacgtacactgaggatgaaatcatcctcgttaccgtggctgatgagaacgcgacaggcagtgtgaccatcaccattgacctcggagactccacttacacaaacaccaccaacctggatgagaatggacaggctaagttcaatgtcactggtctggtagtaaaccactacacagttgtggccaattactctggagatgcaaactacactggccagacggcctcggccccctttcgcgtggataaggctgcttcaaatgtgaccatcgatgtggcgaacatcacgtatggcgaaatagaatatgcaaatatcactatccctaactacaacgccagcggtcgagtaatcatcaaagtggatgacaaagcctatgatatcctcccaatcaacaacaatactcctgttaaactggaactggatgggctggctgtgggcacgcacacgattgacgtagagtacttcgatgacgacaattacaataagtctgtcgcccacgtcgagtttaacgttactaaagccattatcccagttgatccggctaatgccagcagccttatagtgctacccaccaatattacgtatctgaacaatgagaccattgtggtcagcgtgggagccaacaatgctacaggcaaggtgacgataaccatcaaagacaaggatggcaatcccgtggacatcgacccatctgtggtcacaagcaagaacatcacagaggaaggtagccaaagcgtcaccttcactgtgcccggccttgcagtgggaaattacactgtcgaggttgattatacagatgacgccaactacgaaaacgcccagaccagcgctaagtttattgtggacccagccaattcaaccgtaaccgtggaggcggttaacatcacctaccttgataacgagactatcacggtcacggtgcccatcaccaatgctagcggcacagtggtaattaagatcaatggcacccaaaaggacgaaaggactgtgagctga

SEQ ID NO: 3179 - DNA, 8160 bp, synthetic construct
  source 1..8160: mol_type = other DNA
gtggaaggattagctgtgggcgagtataatgtgacggtcgagtactccaatgacccgaactacaacaactccaacgcatctaccctcttccacgtggataaggccaacattcccgatgtgccaaataccgaggggcttgtggtgattcccacaaacatcacatatctggaggatgagtccattacagtgaccctggatgtgcccaacgcaactggcaaagtcaccatcaacatcaatggaaccgacatcgagacgaaggagattggcggtggcactgtaacctttactgtgtcagggctggcagtgggcgagtataatgtaactgccaaatacacggacgatccaaactacaatgatgtcaatgcctctgcactctttaatgttagtcccgctgcctccaatgtgactgtggtgcctacaaatatcacatatctggagaacgagaccatcacaattagcgtgaacgtcactaatgccacagggaccctcgtggtcaagatcaacggcacagaagtgaacacaacgacatttacaggggaggataagccaaccattgttgttaccgtgcccgacctcgcagtcggcgagtacaatgtcacggtggagtacatcgacgaccccaactacaacaactccgatgcctctgccctgttccatgtcgacaaggccaatatccctgatgtcaacccagacaccggcatcgtggtggtgcccacaaatataacatacaatgatgatgagacgatcaccgtcaccgtgaacgtcagtaatgccaccgggaaggtgaccattaagattaacgacaccgacatcgtgttaagcaagaacatcacggaggacggctcccagactgtaacattcaatgtgcccgggctggtggtcggcgactataacgtgactgcagaatacacagacgacgccaactataatgatgtcaacgcttctgcactgttcaaggttgaacccgcggcctccaatgtgactgtggtgccagtgaacattacgtatggtgagaatgagacgatcacagtcagcgttgacatcaacaacgccacagggaatgtcaccattaagattaacggcaccgccgttgaattgaccaagaacatcactgaggaggggtcacagactgtgactttcaacgtgccaggtcttgcagtgggcgaatataatgtaactgctgtgtaccacgatgatgtgaactataatgagtcgaatgccagtgccctcttcaacgtgaagaaatcagcgccagtcaatctgaccgtcacggcgacgaacgtgacctatggcgagaacgtaaccgttaccgtcacggttcccgatgacgctacgggcaacgttaccatcaccatcggagattacacagacaagaaggagatcactccgggatcaaacacggtcgagtttaccgtacccaacctggaggtgaataactacgttgtctacgcgaactactcgggggactccaactatgagagcgggatcgtgaacgcccccttccatgtggacaaagctaattcaaccgtgatagttgaggccacgaacataacctatggagaggacgagacaatcactgtgactgtcccgaacaataatgccaccggatgggtaactgtcagcgtgaacgggagtgaaatcggctctaaaaagattgggaccgacggaaaagcaacattcacagtcaaagacctggaggccggggaatatgaagtaaccgtgacatatgatggagacagaaactacaatggaaacaacaacctgaccagattcacagtcgataaggctaacatcaccgaagataatataacggtggttccaacaaatatcacatatctcgacaacgagaccatcgccgttactatcggcgtgaacaacgccacaggcatagtcaccatcaagataaacggaactaacatcgagctcagcaagaacattacggaagatgggtcacagactgtaaccttcaacgtccccggcctggtggtgggggactataatgtgactgcagaatacacagcggatcacaactataatgacgtcaacgcttcggcactgttcaaggttgagcccgcctcatctaatgtgaccgtcgaggcggtaaatatcacctatcttgataatgagacgatcacggtcactgtgccaatcactaacgcatccggtaccgtggtcattaagataaatggaactcaaaaagacgagaggaccgtatccggagacaatccaacctacaatattacagtggggggactggctgttggcgagtataacgtgacggtggaatactccaacgaccccaactacaacagcagtaatgccagtaccctgtttcatgtggacaaggcgaatattcccgatgtcaacccagatacaggcatcgtggtggtgccaacaaacatcacctacaatgatgacgagacgatcacggtaaccgttgatgtgccgaacgctactggaaatgtgacgatcaggatcaacggaacggacgttgaattgactaagaacattactgaggatgggtcacagtctgtgacattcaatgtgcctggcctcgtggtgggggactacaacgtgactgttgagtacacagatgatgctaactataacgacgtcaatgcgtctgccctgttcaaggttgaaccagctgcgtccaacgtgacggtggttcctacaaatatcacatatcttgacaatgagaccatcacaattagcgttaacgtaaccaacgccacagggactgtggttgtcaaaataaatggcacagaggtgaacacaactacctttacaggggaggacaagccaactattgttgtcactgttccagacctggcagtaggcgaatataatgtcaccgtggagtacaccgacgatcccaattacaacaacagcgacgcatctgccctgttccacgtggataaggctaacattccggatgtcaacccagatacagggatcgtggtggttccaacaaatatcacatacaacgaagatgaaaccatcaccgtcaccgttgacgttcctaatgccacaggtaatgtaaccattaagattaacggaaccgatgtggagctcaccaagaacattactgaggatggcagccaatcggtaaccttcaatgtccccggcctagttgtcggggactataacgtgacggtggagtacacagacgacgccaactataatgacgtcaacgcttcggccttgttcaaggttgagcccgctgcttccaatgtggccgtagtgcctacaaatatcacatatctcgacaatgaaaccatcaccgtaaccgttgacgttcctaacgccacgggtatggttaccatcaagatcaacggcactggcgtggagctgacgaagaacatcactgaagatgggtcacagacggtcactttcaatgtgccagggcttacagccggggaatacaacgtgacggcggtttaccatgatgatgtgaactacaacgaatccaacgccagtgcattgttcaatgtcaagaaatccgccccagtcaacctgactgtcaccgctacgaatgtgacgtatggagataacgtcaccgtgaccgccaccgttcccaatgacgccacaggcaatgtaacaattacaatcggagactacacagagaagaaggaaatcactcccggatcaaacaccgtcgaatttacagtccctgacctggaggtgaacaactatgtggtctacgctaactactctagtgacagcaactatgagagcggcattgttaacgctcccttccacgtagacaaagccccgtcacacgttgaggtggatggaatagacatcaattacacggacctggaaaccatcacagttacggtgagcgacaataatgccactggatttgtcaccatcacaatcaacggcacggacattgagctcaccaaagaagtgtcggcaggccaggccgtttttgacgtaaaagacctcgttgtgggagagtacaacgtaacggccgtataccacagcgatagaaactacttgaacagcactgcgtccgacacattcaaagtggataagtcagatgtcaagaacatgaccatcagtcctgtaaacattacctatggtgaaaacgagaccattacggtacggatcactgacaataatatcacagggaacataaccatctctgtcaatggcactgagtacggtcccgttgaacttgacaacggtgtggccgtctttaatgtgccgggattgattgtgggtgattatgaagtgactgccagctatagcggcgattccaactacaaccctgcaagctcaaccgagacatttaccgtggacaaggagaaaccaaatgtgcacgtggtctctgaaaacatcgactatggaaagaatgagacaattactgtgattgtggatggatttaatgtcaccggcaatgtgaccatcaagattaatggcacagagatagcaactaaagagattaatgacaaaggccgtgcagtctttgtggtaccgggcctccaggccggggagtatgaagtggtggccatatacaacggggatgacaatcacgaatcttccgaaggcagtgacacctttacagtcgccaccgtcacgccaaacatggatgtggaaacggaggacatcgactacggcgacaatgagactataacagtaacccttcccaaagatgcgaaagggagtgtgaacataaccattaccgacgagaatggcacggtggtgtatgaaggtgaagctcagctcgaagatggcaaggctacggttgacgttcccggcatcaccccggggccctacaacgttactgtcaagtatcctggagacaggaactataatcccaccaacaagacagtccgcttcaacgtcgacaaggtagtgcccgatgtcgacgtcgataccgtgaacattgattacggcgacaacgagactgtgactgtgacagtgaaccctgtggacgggggcgtcacgcccaccgggagtgtaaatgtcaccgtcagagactcggatggtaaagtggtttatgagggcaatgtggatctggttgccggcaaggctaccctggacgtccctgatttaggggcaggagattacacggtggatgtccgctatggcggtgactccaactacgacgattcaacgggaggctcaagcttcaatgtagccaaagtctcccccgatatggacgtgcaaactgaggacattgattatggggacaatgagactgtgactgtgaccctgcccaaagacgcgacaggcactgtgaatgtgaccattaaggataacgacggcaacgtcttttatgaaggggaagctgagcttaaagagggcaaggtgactgttgatgttcctgggctgccggccggcgattacactgtggacgtggcctacggcggtgacgacaattacaacccagtcaacagttccgatagcttcagcatagataaggtcagtcctgaagtcgatgttggtacggaaaacattgactatggtgacaacgagactgtgaccgtcacagtgaacccggtggagggaggatcggctcccacaggcaccgtgaatctaaccgttaaggacagtgacggcaaagtggtttatgaatgccaggcagacctggtggaaggcaaggctacggtggatgtgcctggtttgccggccggcgattacactgttgaagtggcctacggcggggacgagaattacaccgctacaaactccaacggaaactttgctgtgggtaaagtgaaccccgacatggaggtggatggtgaagacattgactacggtgacaatgagaccgtgactgtgacccttcctaaagacgcgacagggactgtgaatgtgaccgtgaaggacagtgacggcaatgtggtttatgaaggggaagctaagctggacgatggcaaggctaccgtggatgttccggggttgccggccggggactacacggtggaagttgcttatggcggggatgacaactacaacccagtcaacagttccgatagcttcagcatcgataaggtggcgcctgaagtcgatgccgacaccgaggacattgactacggtgaggacgagcctataaccgttaccatcgaccccgtggagggaggttccactcctactggcactgtcaacgtgaccgtcaaggataaggacggcaatgtcgtgtacgaagaccaggtggatctggtggatggaaaagtcaccctagacattccagatctggatgccggggactacaccgttgatgtggcctacagcggggacgagaattacaccgctcggaactccagcggaagttttacagtcaacaaggcaaaacccgagctaaacgtagactccgaggacatcgattatggggacgatgaaaccatcaccgtcagcctcccagaggatgcaacaggcactgtaaacataaccattacagacaaggacggtaaaaccaaggtgttcaatgatgttcctattgagaacggcaaggctacaattagcgtgcctgatttggatgcgggagactataatgtcacagtggactacccgggagatgacaattacctggggagcaaagctacctcaagctttaaagtggtccgatccaactccaatatcactctggagaccgagaacatcacctacggtgacgaagagcctataactgtggacgtgaatccagtggaaggaggagtcacccctaccggtaccgtcaacataaccatcacagataaggacggaaatacgaaagtgttcaatgatgtgcctcttgagaacgggaaggccactgtggatgtgcctgacctggccgctggaaactacatagtggatgtaaaatactccggggacgggaattacgacccagacagcaccgagggagcatttgaagtggcaaaagcagtgcctcacattgaaattcacgtttacgacatctactatggcgacgtggaggtgctcacagtcacatgtgatgcccccggcactgtggacatcactgtgaatggagtcactgtaacagtacctttagatgacggatatgataagcgggtgttcagtagtatcgtgcgggcctacagcgggaaggccaccctggaccttgtgaacctggccgttggcacataccctgccaaggcagtctataacggaaatgaaaactacacttccgtctctgacaatgacaccttccatgtatacaaggagaataccactaccaagatctctgtcgatgatatcaagctaggtgaagacgcagtgattgatatcgaagtgacccatgaggacggctcggagaagatcaataccaacataactgtcactgtcgatggaaaagattacactgtggagctcatagacggaaaaggcaccctgaccatccccgacctggatctcggaaaacacactgtcaaagcggtatatcctggaagccacaactacacaaacagttcaaacgctaccagctttaaagtgacaaaagttactcccagcttcgatatttcaaccgagaacatccaggtcggagatgacgaaaccgtgaccgtgacgctcccagacgacgcaacaggaaccgtaaccctgaccattgacggcaaagagtatactgccacagtggagaacggcaaagctacatttgtgattcccgggatcaaggccggcgaacacaaggtcaacgttgcctacagcggtgatgacaagtacgcccccgctaaacgcagcgacagctttacagtgagcaaggtgaaacctgacatggggatggacgctccggaaatcaaagtgggccaggacggggttatcaccgtgaccgtgccagaggacgcaacaggtacaataagcatcaccgtggatgggaagacctacacggcaagcattaaggatggcaaagcggtgttccacatctccggactgggtccaggcacacatattgtcaaagcctactactctggtgacggcaagtacctagctggctcggtcgacggaaccatcgtggtcgagcctaagaacggtacatccccccaggataagggcaaagcgcatgggggaattgatctggaaagcaaaaagaccggtaatcccatattagttttgttcatggtattgttcagcctgattctcatccccatcaaaaggcgacgcgacgatgacgaagaagaggagaatgaagaccaaatcaatcggatagactga

SEQ ID NO: 3180 - DNA, 1026 bp, synthetic construct
  source 1..1026: mol_type = other DNA
atgagcagcctgatcagcattccaactctgcctctgattgttatcgccttgatctgtgggattctgtcgtttatcagtactcggttggttatgccttggcttattggtaagctggagcaggcggaaatcattggaaaggacatccacaagtcctcccgccccatcgtcgctgagatgggtggtattggcataatcttcggattcatcatcgggatctttgccggaataattctctttccagtgctgaccttccagcttgtggtggtccttctggtggtgctgctggtgggaatcatcggcatggtggatgacttaattgtactgtccagtaaagagaaactattccttctcttcctggccggcataccactctggtgggttgcccctcccaatgtaggcctcctctatatgatcatgattcccatagccgtctctatcacgtcaaacttgaccaacatgctcgcaggcctcaacggaatcgaaagcggcttgggggtgatttcaatgaccagcttaacaataagctgcatcatcctgggaaagtacgacgtggctattataagcatgacaatgcttggcaccctgctagcattcctctactacaacaagtatccggccaaagtgttcccaggggataccgggaccctgatcattggggccacaatcgctgcaattgcgtttattggccgggtcaagctcatcgccttcattgtcctgctacccaacattatagatgccgcgctgaagttctacagtgctggcgtcatggaacgacaacagcacaatcccacgcagctcaatgaggacggcaaattagtgaggcccgagcaaggattcaaatcccttatccgcctggtcttgagaaagccggtggatgaaaagactgctgtgatgatgatctggggaataggcatcatctttgggattctgggtatcatcgttgccctgctgatgcctggggtaacgcatgaccagacatttgcacagtttatccacctgaaagactatttctactacttgggctga

SEQ ID NO: 3181 - DNA, 141 bp, synthetic construct
  source 1..141: mol_type = other DNA
atggcccggccaatcagcccaacacccacgctgtacggcgaagacgcacgcagatttctcaagaaaatgaacgagcctccgaccgagaaagaaaagaagttctggaaggaggtggagagccagaggttcgtccccttctga

SEQ ID NO: 3182 - DNA, 225 bp, synthetic construct
  source 1..225: mol_type = other DNA
atggatagccagtacatcaaggacaattattacttcgagacccttaacgagagccacaacctgaacaacttctactgtgaggatgaggaattgaatgaatttctgaaggaggacgccctgaaacagcaaaaacagaaactcaacctgacaaagctaattatctgcgacgacgaaatcataggcttcgtgtccctgctccggtggaacaagaataagaggtattga

SEQ ID NO: 3183 - DNA, 507 bp, synthetic construct
  source 1..507: mol_type = other DNA
atgatcaaaaccgacaataaaggacaaatcaccgtcgagctgctcttgcttctgtccttcactttcataagcatcattgccctgacaaacatcattagcgatgcgaacgaggtaaacatcgccatggctgcagcccggaacggcgccttcgaaggagcttccagtaacggcctggcgatctaccccaaggatacctttgacaactattcaaaggacaagcgcaaggaaggcctgttcaatatgaaaaacattaagatcattaagattgcccagacctttaaagggaaggacaacttcaacaaaacgaggattcagctaaaggtgtacgccagctcaaagatcataaaaacaaaggaagagaaggagtctgcaggggatcggataaactacaacatgagaagggcaatcaccaattcctttaaaacggaaaatatcagcaatcgactcttcaatccagccttctcggacagctatagttttacaactgctaatgtggagtgggtgtga

SEQ ID NO: 3184 - DNA, 465 bp, synthetic construct
  source 1..465: mol_type = other DNA
atggactccaaaggtctgatcaacattgagcttttattttgcaccatcatcatcgtcatgattctgatcgtgaacttcccgatcctcgagcatagcatagacagcgcaaatgatatggatgaaaactcccagggccggttccttctgaactcgatatcaactagtatcgaccaggttaattccaataacgaagggttctccaagaaaatcaagctaccacaatctgtggacggaaactattatacgatcctcgtgagcagtaatgagattattttggaatttaacaacaagaaggggaaagccaaaatccagcccattaatctggtcgattcaaagaacaggacactgagcaaggcgcagctgtacaatggcggaagctacattattaaaaagaccctcacaaacaataatgagagccacatctacaaccagagttctataataatcatgcaagtagagggctga

SEQ ID NO: 3185 - DNA, 1344 bp, synthetic construct
  source 1..1344: mol_type = other DNA
atggtgattgtttcttacctgaacccactgtcctccgagggccaaaacatagtcagaggcctcagtagtctggacgacatcttcgccccaaacgatgatttaatcgacattgtcattcatagccctcgtcagaccattagtaatcaggaatacgtgcccgagactctggccgacttggccatcaaccgcatcaaatggtatatcgataaaaagaacaataaagatttcaatcccagcaactacgcctatttttttaatgaagagatcgctgaatacgacactatcgcattccacatccttgcccaggctgttgcaagccaatttagggcggggtcccgggagatcaagctctttgtcgaatcctatggactgctggtggaggacagattgatcagactcctcgaaaccgaaaaacgagagcttgttgaagagatactcggggactttctggtgcaggacggcatagaatgggccttcctgaaggatctggtggccagcaaacggatctcccttacagacctcgtattggataatggtaaaatcgtcctggacagggaagagttcgtgtataccttcggcgatgagttcactgaccgctcgccagagcgcatctatgacatcctaattggagacggcctcaaggaaatgatcgtgtccaagctgctcatccaaaagtcagaggaatacgtagcccatattcaggatatgctcagaacaattgagccccacccggccatcgtgcgactgggcgagatgcttggcgagacaattacagagctgatgaccaaatacagcagcttctatgcagctggaggagcctacgggaatatggaaatcggcaagctcgtgagggaggcattccctccctgcattgctaacaccgtcgagggggtcagcagcgggggacgcaacgatgctatcgtgctgctgcttacgagttttgtgtcatacgcacggctataccccggaatattcggtgcggatgccagtgtaaaggtgagcgacattgactcaaacctgaacatcaccatgaatgagatactgcctttgatatacgaggcagcggataactgtacgcctcccttgttcgaggaccagccacaggagaagatcaacatcacttcaaaattaggctttgggatgcacgagacacccgagctggagcacgaaggtgagaccaagtggtacacgcctatgagctgtgaaaagattaagatgcacctgccgcagctgtgcaaggagaataaggattgcgctaagattaacaatccattaagctattactcgcggatgaggtggattctatccaagaaaggtggggaatctaaatctgaggaagaatga

SEQ ID NO: 3186 - DNA, 2484 bp, synthetic construct
  source 1..2484: mol_type = other DNA
atgcttaacagaaaggcgttgatcttttccttgattgtgttatttatgctatccatcagcgctgtttcggcgagcgataataccttcaatgagggcaccgggctgaatgaagacattgctgacttaaacgatttcagtgatttgaatagcaatttcaataacggacttagttccaacgccgtgcatggtctcgacgatgacagcaataacaacttaagcagcgaaaacatgatttcctccagtgatgatgagaaacaagatgatctggaggggagcgacagcgattccattaaagacaatctcaattcaaactctatcaaagaccagaacaactctaactctagtacagccgacaagtccaatacaaaaatccaaacgaaaatctctgccaaggacatcaatacatactataaggaaaaatcaagcctcgtcctgtacctgaaggataataaaaaccaggccctctccaacaagacaatcaaactcagcctcaacgggaaaacatacgctcagttgaccgataaactgggcaaggcctcattctctctttatggcctgaaaccaaattcatatgacgcgaagatagaattttatggggacgacgattacaagaagtcggtgcggactgttaaagtcaatgtaaagaaagtcgacatatccatcaatacaaaggacttctccacatatctcaacagcaacatcttcttttcggtaaaggtcctgaacaagctgactaaaagtcccgtggaaggcatccggattcagttcaatgtgtattcatcacagaaaaactataaaaactactacgccctaagcgacaaggatggcatcgccaccctcaagaagaacctaaaactcggctcatatgatgtgtacacctacgtaaaggacgacggccaaaaggactatataaactaccgaaacaccaaaaacaaggtctcaattaagatctccgcgcctggagagatgggatgctcatccatctatatccacgtcaatgagaatgaaagcgctgtcgccttccgaagggattccacatatgccgctgacttgtacatagtcgcccagaagtggcatggccgtaatgccgtgaagcagtacaagctgactggaacctacttcttccatgcgatcgtcacttccgacgggtggctggtcggcactgggggagcagacaatcccacaatcaacaagaagattgagagcctggcaggtcagatggtctcatccaataacatccaaaactccaagcttaacaccatcagaaaatatgagcggtcacttggcatcggccacttcgcaattgtggaccccaaaggaaactacgccattgtgtggaaaagcgggtatgtgaagggaaagctgaagaatggccaatacattgatgtgcccaattcaagaggcatgtttcgcaagggcagctacaagagcttttccaaggacactgcaactgcagccctgaggatcgcagccacagaccgatttggagtaaaccgcagggacatcacggtgttccattataagagaagcactaagaactaccagacaagcgcacaggtgaaagcctacgctgccaacgataagggaaacctggcaggccggcgcaccggcggaaaaagcgataacatccactacaaaaaaacctacatcagccgctccaagctgccgggaacgccaaataaaaagctcctgggaacccacagctttggcaagatcgacaccctgataaagacccagaccaaggtttcagctccagccctcactgccaaccagaatcagaccaaatactttaaggtgactgtgaggaacaagaagacaaacaagaccttgcggggcgtgaaaattagccttaaggtgtacaccggcagcaagttcaagagctacgctgtgacgaccaacaaaagtggagttgctaacttcaacaccaaggctctgagtgcaggaacgcacaatgtgaccataagccaggccaatcacaagtacatcgtttctggaagttctaagattgtgattaagacggttaaaaagaacaatactgtgaacagcactaactcttccgtggtgaacggttctggcgtaaacgggagttccagttctaacgcgagtgtgaacaacgcttctgagcctattaataattccaccacagacaacagctccgagaataacggttcggcaggcaacagttctagttcggacagttccgtgggtaacgggacggcctccgatgggtatgtcgggaatgggtctagttcggatagctctgtcggtaatgggactgccagcgacggttcgatgggtaatagtagcacctcagatggttctgccgggaatgggtctaacttcgcttcggtgctggatgtttctgcagctatcaactctgactccaacgttggcaatgactcccagagcaattccaaaacggagacaaaactgagttcaatgaaaaccgacattctgacaagttttataaaactgattaactga

SEQ ID NO: 3187 - DNA, 294 bp, synthetic construct
  source 1..294: mol_type = other DNA
atgaacatgagctttgaggaatatgccgtgatggctatcaaccaccatattgaagagaggaataagtacctgaaaaaggagatcaaggccaaggaggaggagatccaggcaatagacgaaaaaatccaggcgaaggaggaagagatccaggccattgatgaaaagattcaaacaaaggaggaggagatccaggctaaagaggaaaagatcaacaaaatacggaaactcttcaaggacttctgcgaaaacgaagacgaggaagcaatgaataccattaaaagcatcctactgtga

SEQ ID NO: 3188 - DNA, 1107 bp, synthetic construct
  source 1..1107: mol_type = other DNA
atggtgaatctgaaaaagctgaatcagatctcaaccgaaaataacaatacagtatcctactacgagacagaggaaggcaaggtgtataaagtattagtggatgaaaacggagagctgaagaagattgcctgtgaagagtttccttttgagccggccaagcaattcaaaaaggagaaaattaataaggtgcatgaccgcatcttcaagttcattgcggagaacaacattcaggcctttctgaatgtcttcggcctgaagcatatcatattcaagcaattcctgaatgtggaaatcttagatcagacgctgaaccaaagctattgcgacttggtgattgaagctgaagacggaaagatctacattatcgagtttcagagctcgggccccgccaagaaggacaagatacgtttcggggactaccagacgaccctgcacaggaaaaagaaggggcagaaggtcatcgttatcatgattaccatcaatgatgatcccgataacgacgaaccatacggctatgacaaggagtatcgctacaggatcaacaagcggagcactacttgctttaacacagagaaggtgattaaggagctcgagtttaaggctgagaacgattgcttcgacgatgaggcatatgtcaaactgcagctactctactatatggaatccaatggtgatgagcgaaaaaagctattgaaaaagggtgtggaaataaaaaacaagataaagaacctctccactgaccggaaggttggattgacactgatctacatggctctggcggtccacaactttgaagaagaagaacttgagcggttcaaggaggagcttaagatgaacatgagtatagaggagtacgcagtgatgggcatcaaccaccacattgaggagagaaataaacatctcaagaaagaactcgaagaaaaagacaaagagcacaaaaaagaactcgaagagaaggacgaggagatccaggcaaaggacaaggagcacaagaaagagatccaggccaaagatgaggaaatcaacaaaattagaaaactgttcaaagacttctctgagagtggggacaagaaagccatgaacacccttaaaaccatcctcctgtga

SEQ ID NO: 3189 - DNA, 492 bp, synthetic construct
  source 1..492: mol_type = other DNA
atgctgagtgaagaagagctccgacgcctgattgaaagcctgacaataagggagatcatagagccagccttggacaactggaccaggtacgaatcgactgggaagaccgtgatcgaccttaaaagcggccgggtctatggaatctcactaaaatcaaatgagctgttggagctggaccacgacaacaatcacattgagctctataagattgaatcccatgaggacctgttcgatgaggaggacctcctgagcgaggacgaatacaatcgctttcaagagttcaaagatagaaaggagctggaagatgaggactttgatgactacgatcccgagcttttaagcgaattttgcatgatggaaagtatcgatgagaaggaacggatcatttccatcctgattgaagactaccaggagtaccacttcaacaactatcaggacttcgagcattccatcatcctcaactactatgatgaggatgactatacgtactga

SEQ ID NO: 3190 - DNA, 993 bp, synthetic construct
  source 1..993: mol_type = other DNA
atgtatgggccgtcaagccttgcagaacgacgcatctattaccgggaggaatggtcggataaggaccttcctgacttcatcgcccaaggcatcaccaaacgggaatttggtttcgaccacctgggcaatgggcccaacgatagatataaagtcttcaaagggacagacaccctacgcagattcttaagatacaagacgccctttgctgcctacatttcagtggccttctaccagaaccctcgaaaaaggggcggctgggaaaaggcagaatacatctttgacatcgacgccaaggacctgccaatccgatcctgcaattgcgacggagtgtgcgagatatgtcttggagaggccttggaaagggtcaacattatgctggacacactgaagggcgacctgggcctaaagaacatacatctcatctatagtggccgcgggtttcatatccgtatcttggaccccgatatgatggaggccgacagcgatctgcgcgctgaggtactgaaatacgtggctggagctgaggtgccacgggcgcagtatcctaacattgtccccggagccaagccactgaacttcgagcacttctccatccctatcgcataccctgcggtcttcacaaataaagttaaatataatattttccacctgaggggggatgagaccattgatggaataaacaataggctcctgaaggatattataaaaaaccgggaatttctgattgacgacaagtggggtctctttaaggaacggatcggtccacgtagatacaaagatatggtgaatgcgatggccagggtgaacctcgccactatcgatgccaaggtgactatcgacctcaaacggattttgcgcctgccgagttccctccacagcaaggtcagcatgaagtgtgtggaggtgaaaaatcccgagaccttcgatccattcaagcacgcagttcccaagtttgtatacgagagaaaggatgaggagattgctcagaactga

SEQ ID NO: 3191 - DNA, 399 bp, synthetic construct
  source 1..399: mol_type = other DNA
atggacaacaaagcgataatcggcattgtgattgcactgatcgtcatcgtcctggcctgcttcgcttatgtgacatttaacgggaatgcacccatttccctgaacgtgactgaaaatattacaaacaatacggacacaagcgttgacacgacagacaacgccaccctcgtatcgcaagacccaaacaatgattctgaggtgaaggacatcgctaagaatgtcagcgaaagtatatcagagcagaataaggccgtggccgattccggagacaccctacacaaacagactttcaccgttagcgaaaacgaaaccggccagaacgagggcatggagcctggaacctacgtgatgtactacactgagaacgatgggccgatcaaagtgcagaagatcgattga

SEQ ID NO: 3192 - DNA, 303 bp, synthetic construct
  source 1..303: mol_type = other DNA
atgtccaaacgggtgctagtcagttttgcacttatcttcatttgccttttctctatcagcgcggcctgggctctggatatggactcgagcgacctcaataagaatatcggcacgaatctggagaataactttaacacagattcaaacaacaacctcgacagtaatctgaacagtaacttcaacagcaacctgaacagcaatatagataattccacccaggaattagacctgagcaccaaaaacttcaaggccctctcctctaattcctcaattggcgggggacagatcgccctgttgatatga

SEQ ID NO: 3193 - DNA, 4473 bp, synthetic construct
  source 1..4473: mol_type = other DNA
atggacggctcttattccaacctaaccaatctcaacttctatacaaatgcaaccagtgagaacagtaactacctgacacccatctacatcaacgaggccagcgacttggtcattgaaaacaacccaatttacatcgactacagcgacggatgcaactacaacctagcggggatctacgccttcggtgcctccaacaacaacataatcgggaataaccggatatccatctatagccgcagcctcagcaacacctcaaaacactacatttacgggatcgacttctcgagctattcctccaacgcctactcgaaagacaacgcgaagggaaatgacatctcatcaaacaccatagatatcatttctgactattatgctaatgccattacattgtcctgtgctgtggacaccactctggagtcaaacagcctccacttaaaatccgattcctttgtgtacgggatggttgccgagtattttgactttgggaatggactgaatccatcaaacaactttaacttcacaaaaaacacaattgaggctagctcaaacatggtatatgccatccaattcttcaacgtctttgatgtgaacattaaggagaacacaatcaaaaccaactccaacggtagttacgggatcagtgcctatgagtcttataatcacgatataggatacaacaatctgttcgtgaatggcaacgacgtgtcaatgattgggactaactttgatgccataggaacgggccacagtggaatctactacatgcgcgactcccacgatttaagcatccatgacaataatgttctctccaattactctctcgggggagattacgccatccgcttcgatgccagctccagcgagaatataaatgtgttcaagaataacctgtcctctaacaacggaaagtacctaggaaacgatgcagtgaacggtaacgtgacggttagcgaaaacaatcattattatggggataatgatcttggcactaatgacctgcggatttttgacatctatgtggacctgaatggaaacgacaataagggggacggctctatcggaaagccattcaaatccatcagcaaagccctgtcctacctgaagaatctcactaacatttacggtagcagtgctagctcgagttccaccacgaaagtgaaaggcatcattcatctaggggaaggtaagtataatggctacggaactaatcttagaatatacattacaggtttggatgtggaaatctttggatcgggctacaataagaccatcattgatggcgtgtcgtcacactggttctttgacatctcagaagactctagcgtttctataaaaaacctttccctggccaacggcgtgtaccgttataatgatggagggttgatccacaacaaagggaatctatacctggagaattgtatttttgacaacgcaaagatgtcgcccagttcggcaatcatctataatgacggcattctgaatttaaagaacaatctgatgaatatgaccgctaatggctaccatatatataacaatggcttcattgacggtctgtacctgaacttcattggggacagcctgagtgaagatgagagactcctgaataccgactccctaagcttcatattaaccgcatacgttcatgatgacaatgggaaccctataacgggaggctatatacggttctttatcgagggcaaggagatattagtcaacagcagcctcattgagggtttggctaaactgtacaccttctcttccttaaacggcatcatcaagatctcaggatactactcaaacgcatacaccaacctctttgtcaatattgggaaggtcaacagtagcatcatcagcgatacaatcaaagtgtatgtgaactacagtgctaatgagtcaaaatcagacggttcctttgagaagccgttcaagagtataaatgacgcattggacgctctcaacacctgcatcgagccggtgaccatcacggtgcttgatgatgaaacgaccgagcagattgacgactccagactcaacaggaataacgtcattacaatagaatccattaacaagaccaacatctcaacgaattggacctttaaatcagacgccaacatccgactgaaaggtctgattttcgatggctatggcctggtgaaggacaacacctatctcacaatagacaactgtctgttcaataatacccccgctagtgcgatagtgtctacaaacggtagtttgacccttcttaattctaatttcacaaacaacaatgtaaaggacaaccacaccttctacaccggctttagcacccccgtaatcactactagcctgtgggacattcagtacgattatgataagggaggggccgtggacaattccttctccaacctcactattctcaactgcaatttcgcttttaatgaggcgtacaatggcggagccatcttcaacaaccagagcgatctgcacatttccaactccagcttcacatctaatcttgcattcagcgggttttatgaaaatccccgagccattgactttagcaatgccatggataaggatcaggaccggaacgtcgctagcaagggtggggccatcttccagtatctgggcgaggaagtggtagtcaccgacactggctttctgaacaatactgcggggggctatgggggggcattctactcctcgggcatctacccttataggaatgacagttccagcatcattgagggcatcccattcatcgtgtatgagacagaggatggcctgatggataactttggaaactacgcggataatctgctgtctccccaggacatctactttattaactgcaattttgattcgaatgtggccccaatcaggggaggggccgtgtactgcatcaacaactcccaaacccagtatatctcctgtaacttcggcaacaaccttgtgtacacttacaatatgtcccagctgtttggaggcctgaataagaacagccacaggaaatggatttttgaggatgaattggaccaggtctacagcatcttcttcaccgccgtaaacaacggtggagcgatccacgatgagaatctcaagatcattgacagcacattcacggcaaacaccctgcaaagcggaggttccatcctgctcccttccgtcatccgctattccgccgatgtctacacgttgccgaaaaacactgctggcgccatcatcactaactccggcaaggggggcgaatcagtctatgtggccgacagctccctgctcacatcggaggacagcaaatatattggaatcaacggctggacaggcaccagcaccggcggttcaatccggagaatcatccatgaaaacggccaagaaactggcactggcggcaacggtagcggaacaggaggttcgggcaacgggtcagggacaggaaagggggcctacggcaattcactctcttggagcgatatactgagcgcattgggcggtgacgctcgaggcatcgctattaacggcgagggaagcagctttagcgatttcattagtggtctgatcaacgggaagtcctcttcaaactcaagttctgacagtcaggataatggttctggctcttccaacagctcgagccagaaccccgttaacgggaccatcccctctaatagcagtagcgacagtcaggacaacgggtctggcagctccaactcgtcttctcagaatcctgtgaacggaacaatccctagcaattcaagtagcgacagccaggataatgtttccagctcttctaattccagttccaccaaacctatggacgattccaacaagacgaactccaccagcgatgtgccggctaatgacacagtgaacgccactgacgggagttcggactcttccatttccgaaaaccctgtaaacgggacggcctcgaacgacaataactcctctgacgtcaacggcggcgcttctgatatggacgacgataacatttctaatctgacaaacagctcctctgagattccagttgacactaacatcaacgatactaacaattcatctagcgaaaattccaattctaccacggacttggacgattctgaggacaaaagcgacgtggataaggatgataagagcgaaagcgacgatgtcggactgagcgataatcccctcaatggagatgtttcagagagttctgacagcccagatagtcccgatagtcctgacagttcagaaagttcggacagtccctcaagtccagacagcagttccagcgactaccagtccagttccagcgcggcatctcccggagacagttcaaatagtccttcctcctcatcttcttcaagtgcatataagatttacgaagaggagattgatgacaacattcttgaaaagaatgttgaccttgaaaatcttctgataatcattgtcctgttcctgggcctcatcatcctggggtactacaagaagtcaaaagaggatgaggataactga

SEQ ID NO: 3194 - DNA, 6606 bp, synthetic construct
  source 1..6606: mol_type = other DNA
atgagttactttaataagggacatatatggaatattctgctgatctgtcttctcatcggaacgctggctatgatgggttcagcaagtgccagttctgctaaccttgacgattttagcaaccttgcttgtgactccaattcatataacgatctgagtgtgggcttcgaatccgacgctaatagctacaacgacctgagtgtgggctttgaatctgatgccaatagctacaatgatctgagtgttggcttcgagagcgatgccaactcatacaacgacttcagcacctacttcgagtcggattctaactcatacgacattagcgatagcttggtgaactctaactctgatcgtttggtcaactccaatggccttattgagttcaacatctctgctcctaatgacattcaacttaacgacaaagctcctataaaaaactctcttaaggaatacgacgaacgggtattttatgtgagccttgacggtaatgatttcaataatggcctcagtcaggaaaacagctttaaatccctgaacaaggctctggaaaatcttcatgatgcgaataagacaaccatatacgtgttcgagggcacgtttctcagtgaaaatagctacgatctattctttgagggggttgggaacagtcagatgatctccattatcggtagcggggtgaataagacaatcctggacggggaaggtttgcacaggctattcaacgtggataatagcatcaacctgacattacgcgacctgacctttgtcaatgggtttgactttagttctggcggagccatttacaataagggcaatctgactcttgtcaacacttgcttctacaacaataatgtctattcggaagacgcctaccagcacgtgagcctgcttagcggcggagctatagaaaatgagggattcctgacaattgagaactcttcattcatcaaaaatagcgtgggtagcgttttcaaccagtacgcctatggcggagccatttgcaatcatggcaacctgaccataaacaattccattttcaacaacaacagcctcgagacctacattgatttgaatgagaatagctatttccggaagtggaacgctctccagacagggggcgcgatagcaagtttttcagatggtgcgctgatctcaaacacagagtttagcaatcacagcatttccatactgaacaagtacccgttcgttcagaagaccttcatgaccttctcagctgggggagctgtttatattgagggcaacaaccacaatttcatcaactgcagcttccttagcaacgacgcagacaatggtggggctgtgtacttcaagggtaacaatacctgctttgactactgcgacttcgacaataactccgcttttatgggtggcgccattatgacaatcgactacaatctcaatgaggcgtggatgccgactctcaagaacctgacctccaacaaatattctaacctgaacatttccaactccaacttcagtaacaatcactttatctgcaccgactttggtataggctaccgtattagccccggtggcgcggctggatactttaaaattgataacatcactatcgacaattcgagtttcacaaacaacggggtgctggaaaactgcaccatcttcgtttcctcgcgctgtgggggagcagtgttcctttatggtcaggactccaaggtaaacaattctagtttcgtccacaacaatgttgaggtgggcggagccataatgaattacggatttgatacaaatgtgtcaaactctaaatttatcaataactcggcttgttatagcgatggcggggccatcttccatagcattggtgatctgttgattgataactgtgatttcgactacaatagggccgtgaagaatgggggcagcattcaagcaagctacgactacaccaacaactatctctttgagcagaaatcactctataacaattccagatttaaaaattcggctgccgaatacggcggggcaatattcgacatgggcaacgcggttttatacaacgatctcgagtttatcaacaatagcgcctcctatgggggagccatctataaccaaggattctccaataccttccgaaactccaccttcgtcaacaactcggcctttagcgaggattactccaacggaggagccatctacaactacgggagcaacgccctgtatgagtcctcaatcttcataaacaacagcgcagacatggaagggggagccatttccaacttcggggagagctgcgtggttcagaacaataccttcaatctgaataaggcatttaagggcggatctgtttacttgagtgggcaagggggcagattccaagacaataatgtcttttcctcattcgccatttacggcgggggcctgtataactcaaacatcaatctcatctgcctcagcaactcgttcaacaactgcagtgccaatgtgtccgggggcgctatctataacctcgtctccacactggagttatatagcaactcaatgaatgactgtaaagctaaactgtctggactgggcagtggaaactacgtattcacctgtgccaatatctcgtatctcgtcatttcatttgcaaataacggaagcttcaatattgtggacaacaagggtgtgttgctagttgctaacatcagcgacaatatgggcaaccctattaccggagggaactttacctttatcttgttcaatcaaaccaaccaggatattgatctcataggtagttccggtagctccagttctaattctagcaacccaagcaatctagagagcagcatcataggggtatgtgatgtggtagagggacaggccttcctcagatacgatacttacctggaacttggctcccgatataccatctcaggaacctattcatatgcagccgaacccgtcctgacccaggtggccaacctgaactcagttctctccacaaggatgtacttctcctcaaacatcaccgatgacatggtgaattttggagagggcttcaactatgagatcatcctgctggactctaatgacaactacattcctaacgccgaaatcctgctgtatgtggatgcggtctattccaagtcggtgtttaccaatgaatttggctatttgaagggtagtgtcaacaacttaacctcaagcgggaagcatttctatagcttcatctatagcggcgacattttccacaaccgggccagctacgacctgaactttactgtgttctacaataactcctactattacgacgacgtttccatcagctttcgcgatctgatctattcatttgtctacacaagtcctaacagtgagattccttttgagtttttgatcagccacaacgacggcgttccactgggcaatgtgtccacgccccgttattttgtcgcttacgaaaacggcatcccactcgccagtttctcgtgcaccgactatctgggggtgtgtaaagggcaggaagtcctctattcaatcatagagctgaacgggaagctcgcgaaaatcttccggacgagccctgaggggattttccagatgctgatcaagcactcagagaggggcctctatgagtataggatcgcctttcttggcgacctggtgaagcactacgactctagcacccataacggcatcagcaatgaagacactttctacaatccctgcaatatttcattcctgatgctcgtggatgatgagcagtccactatcccaactagcctgaactacaacggtcccaacaagattacagaagtggattttgcgtactacaactttagcctgagtgagaacagtaagaatcccctggccaacaaggagatccgcgtctacgatgatggaaattacctcgggtcaagctacacaaacagcaagggcttcgccgaatttaacttcccgcagatgctggacaagggcaagcacatcatcagtttcgtctacgtcgcagatggggactataaaagtgcctactccatcttcgagttgaacgtcctcgaaaacccctcgaaagacaacgtgagctttttcaacaaaagttctttaaacatcacgggagccaacaacaattttacagcccagattaaggactcacacaacaacaacctatctgaaatggtgataaggctatcgattctgttcaatggtagcgacaataagccctacatcaagaactacactgcagtaagcgataaaaatggtgtgttttcgatccccctggagctcggggctggtagctacctgattaaatgttcttttgctggaaacaagcattattggaagtccagcaagaccttcaaccttactctgaataaggtgcccaccttattatttggccagtccagtgtggaagtattgaagaacgacacttacctcacggtgatcctgtctaccaatgacttgaagagtttatccgactccaaaatcaagtacctcgtatttgattcaaatatcactggcctgaacctgtcctacaatgattccagtgaattaataagggacatctccaactatgcatacacattctatgccttcacaaatgagagcggcatctccaagcttaagatcaatcttccagtgggcagttattacctggtgagtctcttcgaaggggacaaatggtacgacgagtctagcctgatcaccaatcttacaatctacggaagttcatcacggttgattgcaaacgagaacgtcattgtgaaaaaaagcggatactacacggtgaagctcgtcgacggcaatggcaaccctatccaggggcagacaatagagattacagtttgcaacaagacctacacgagattctctgattccaatggggaggcgcgactggccattaatctaaactatggcaactactccatccaatctaagtttaacggaactctcaattattccagctccatcgtggcctcacgactgtatgtggtggacgaggattataagtatccttccatattgactgtcaacagctcggacatctatcgagcctttggctactacgatgtggtactgtcggatgtcaatggcaatcctctgccagagaagagcattattgtggaagtgaacggcacaggctttaacattaagacagataataatggattggctcacttggattacaatttcacggtaggcagatacaatatagtgtcccacttcgtgggagacggggactatcagtatagcaacgtcgggtccatcctgaacgtcgttaacgagaatgcggccaacactctgctaaattcaagcatctactgggtattgaaaggaaaaggcaataattatacggtcactttgactgataagattcagaacccgatcgaaggccagataatcgtcttttccatcaatggccgcgagtactcacggactacagacaagtacggaaacgccaatctggccataaacctcaatcccggaagctacgacatttatgcattctaccgcggcacggatgtctactacagcagcgagacctatagtaagctggttgtgctggcgctggagaatgagaacgaagggtctaacagcagctccgccattggctcttccaattccagttccaataatgactctgatgtagattctaccaacacgtctaattcaggtaattccgagactaacctgacgaacggttctagttctggggacagcggcattgataatattaacgggagcagttctggggactccggaatcgacaacattaacggtagcaacgccagcacaaacatcagcaactctaccggcgcaggtaacgattcctccagttcggggctggacaacattaacggctccagctccaacattagcaattccactggatctgacaataactcatcgagctcggggatcgggggcaacttgaccaacgccactgtgaacgatggaacctctatctcaggtaattcctctgtcactaatggttcctctaacctgtcaaataatgacactataaacaaaagcgacaagccggtgatcattcccaaacgcacggtgacaaagattatttgccataacatgaccaccaccgcagtttcgaaggctgacgggcgcgtgggcaaatacttcgaggtgagtctgatagatgccaacggcaagccacttgccaacaaaagaatcctaatcggattcaatggcagaaaatataaccggaccacaaacgctacaggaggggcaaggctccagatcaacctagcctacgaaggaaaatacaccttcgcaatcgcgttccttggagacgattactatagcggttcgttcgaggtggctctcattacagtgaacaagcacagtccaaagctcgacgcaagctcaagagcctacaagtacagtgataagacgaaaagcttaactgctaaactgctctctgccaacggaaatccaatcagtggcaaaaatataatctttaccgtcaatggcaagaattatgcggcaaaaaccgactccaaaggactcgcaagggtgaatgtttccctgaacaaaaaaggcacgtatacagtgaagatcaaatttatgggggacagttcatataaatccgcttccaagaagatcagcctgcggatcatctcccccagcgaacggtga

SEQ ID NO: 3195 - DNA, 8754 bp, synthetic construct
  source 1..8754: mol_type = other DNA
atgaaaaacaaggcaatgtttctgatatctgccttgctgatagcagttattctatcgctcagtgccgtgagtgcggcagatgacgctattgcggctgatattgatgacatcgacgactcaatcgaggtatcctctgttgatctctccgccgacacagaggatataagctatacggacgtctcctttaatacaagcaaggataagaacacactttcctcaaatattgtagaggagggagatgggtcatggtacgtggacagtaaggtggaaaccactggtgatggtagtcagtccagcccatataagaccataaaagaagcctttgatgcgtcgggtgggaatggtacgatctatctcgccagcggtgtgtacaacaccaccaacgataggagtttttcactggctttggattcagggaataacctgtccattatcggtgctggcagcgatgagacactgattgatctcctctctctgtccaacaattttatcaacgttcgcaatgggaacaacttctacctgtcgaatgtgaagctcatccgatcgggaacgactgccattagtggcgccaacataactatagaggactccgtgtttgccaattcctattattacggcggcgccccgattctgtctctgggtggcggggacaacaccatacgaaactgcgtgtttgttaacaattccgctggaagctggtatgggtcaggtgttgccattctgaatggaaatgccaatgtactgttcgacaactgtctctttaagaataataccaacaccaacggagggtcagtgttctataccacgtcatcgaacatcaagctgactctgaacaattgtaatgttacagaatgtcccgtggcgttctacgcgtcctatttcggaaatgtggtatttaacaacagttatttctacaataatgatgtgacacggctgaacaacaggtattgcgccgtgttctacagcaccgatcccgggaatctaactattgattactgcaagtttgagaacaataccggcgtcgacagtgcgtctatcatcagcgcctacagcagtaaccgacccctgaatttaaccgtcaccaattcggagttcattgacaataagatgggtaagaatagttacggctactacacggtcttcaataacatctacatggggtcttggggcggtaatctttatctgaaaaacaacactggttcattcggaaatctcagctttgtgtcaattagctctgccaacattaattccgagattaacctcatcgtgctagacaacacaacatacgacatcaacgcaatcgagatcaatgtgatcggcacgcttaccgatgatatgggaaaccctattaacatgagcggtttcgatttatacttcaacgacacgctggttgggtcgcagctgacttttgactcgggggtgaacaattacacattcaaggaagcattaagcgggtcctatcttgtgaaatatgtctataactccacagctaatttcactaacttcaaccaaaagacgtcagtgatgaacatctctccattggagaacattgatgtttacgttgctactgacgggtcggatgagacaggggatggaacagaggcaaacccctatgcgacagttgagaaggccttggatgtggcgtccacggccttgaatgccaatgtctacatcaaagctggcacctacaaatactacagatacagggccatcgacaccgcaaatgggattcttaacattatcggctatgacggggacgtgactatcgatatgaataatgaaaccgcattttgcaatgtttccaacaggtctaatgtatttatttccaacgtggactttgtaaatggatattcccaatatcttgttgataactatggaatcatcaactcctttgggaacttaattctgagtgaatgcaagtttagtgataacaacgggtactattacataatttctgggcagagcacaatcgatagctgcacatttgagaataataagttccagcaacaaaattctgctaggattctgttcaacccagcctatgtgaacaatgtcacgttctacaacatcactgccatcggcttcagtgccaacagcctgaatcaaaagtacgacttgactatagagaattgtaagttctacgataatgccaggatactgatttcaaacgggaatgtgactatccgctcttctgagtttgccaatctgtcgaatcagcgggccctcgagacgcagggcgtagttgtcctgtccattgatgattgtacctttaaggattccgatcagtcagtgatttacctgtatgattacgcctccacgactattgcaaacataagcaactccaaatttatcaatatcactcacgagaatcccgtgtacgtgggcaacggtcaggaaatatatctggagaataacgaggtgtccgatttggctgctccttatgtgtatatacgcagcgggtatgtggccagcccgataaccattttggtgctcaataatgagaccattgagcaggaaagctacggtgcgacattaaaggccaaagtgctggatgatagcgagaatgctatcagccttaatagtttcgtgtttgatttcaatgacgaacagatcaacggaaaactcgtctatgacgagatggtcgccaagtccatgggcatctatgacggcacgtacttggtgagtgccagttccacaaaccttttgaacccaattctgaaaacaggggttctgatcatcacgcctttgatgaataaagagctgtatgtgtccacgggcggatcagatgaaaccggtgacggaaccgaggtgaacccctatgctacacttaaaaaggccatggatgaagcggtcgcattcaataacactatccacgttgcagagggcgtatatgctattgacacggcattggagatcgacaccaacacggcaatcgtcaatattgtgggaagtggggaaaatacagtttttgacatgaataatgaaattaactttatcaataccatttctgccaattccatcatcgagctcaaagatcttacactggccaacgctaagtcccccgccaatgcaaaaggaggctttataaccaacctcggtaatttaactgtgaacaacgtgaacttcatcaattccactgcgaataacggggctgccattcgaagcagcgggaatctgtctgtgactgattcctacttcgagaatacggtggcttccagtaatgggggggccatctggagtaatggcggcaataactatgtgttgaacagtatttttaataagaccagcgcttccaattacggcggtgccctgtatagcagaaattatctttacattaaagataacactttcatagatacaagtgcaagtgctgcgaaaaatatctatgtgcagtctaaagtggagggaggcgttgtgctgacagtgatggataattcgacttggactataagtaccagtagcgtgactttcaacgccactcttaccgatgagaacaatgaccccatctatgcatcaaacattccagtatccttctatctggatggaatcaaagtcgcttcctccagtattaatggcgagaaggttacggccaacgccaatctcaagatgaacggggagcacatcgcatctgctagcctcggaacggctgaggacatcactgtaaaaacagccacagtgagctttgtgaatgatgctgtcgcacatgacgtgtatgtctccgccaacggggatgatgaaaccgggaacggtactcaggagaacccctatgcccatatctccaaagctttaaccgtggtggagtccctgaacggggtaattcatattatgaccaacctcactaatgtgccggtcaattccattgacggtttctacaacctgaccatcatgggggaaaataatgagatattcatcaagaacagtacatcagggttcgttatgcttaacagcgggtccctgaacttgcttaacctgcgcttcactgaagcaaattatcctacttacttcattttcacccgggctggctcaagcctgtctcttgagaactgtagctacgagaacgtgtattaccccaaggacggctattatccagttttcattgacagctcaagcgatttcttaagcctgaaaaattgtaaggtgattaataatgtgtttaatctgagcgatctctcaagtggtgtcatccggtcaaaatccaacaccacctttgaagactgcgtgttcgcaaataactcttacaccaataggaatggggctctcggcggcaacttcctcttattctctaataatcagaaggtcttcctgaaaaactgcatttttgataacaacactgccagactgttgaacttccaaagtacatctgtggtggataattgtagcttcacggaaaacaatggaaccttgattacggcaagttacccaattaatataactaacaataactttacttcaaatgatctggtgagtagtttgattggtgtgtcaggcaatgctgagatcaccaacaacatagtgaaagaaaacacggccagtgcatttgtattcgcatctggaagtgctatagtcaacatccacgacaatactctcaatctcggcgacatgccctacgtgaacctgactgggaacactaagatcacagggtccacatttacattgactgtgaacgataatgacacttacgagattgaagggcttaacctggcgttcaatgctagcctggtggacgctgacggcaatatcatttacggaccactggtatacttcaccctgaacggcagtgacattatctcggccaatttagtccccattgccattgcaaacactaaatttgggggagaaggcgagtttattgcctcggcacggactgatgccatgtacgactcaagtgaatggacgatcaagacgtcggtattcaacatcaagcaaatcgctgagaagatcatttacgtggacatcctggggagcgatgaaaccggtgacggttctgaagaaaacccatacgctagcttggagagagcagtgcaggatgccggggggctgaataatatcatatacatccaacctggcgaatatgataacatgactctgggcagccagtatgtgcttatcgacgatcagacactgtccatcatcggtctatccaacgaagtggataaggtcattattaaaaaccttgataatacatttgccgacatcgcttacgagtacgggaagtactcgaacgaccaattcacactggccaacatcgagtttgtggacagcagcctgagcaccgatctgatccgcaccaattacgtcaacgcggttttggttgaaaacgtggtctttgacaatataacggtctccaatttaattagaggggattcaactaaccttgtactgatcaactcaaccattaatgccatttccagcagttgcgtgctcaatacagaaaacatcactgtgctggactcagtaattagcaatgcctacggataccggatcttcacgatcggggctcggcatgccgccgatctgaccatttataactctgctctgatcaataactcttacataggtgccctgatctatgagcagtggacttccaccaaaacgctcgagaacaactggtggggctataacaccacggaagacgatctgatggccttcaccaatgtggagatcactaactggatcgtagccgaagtcacccccagcagtgacagcatcaacatcggcgacaatgtccagttcgacatcctcctgaagctcaacgatggctctgaattaacagatgttctcccaacccgtattgtgaccgctattgcagaaaataccgagtttgatgaggatgaagtggaaataatcgacaaccaggctactatcactggcaccgtaaccggaacgggtgacattacaatcaccatagacgagcaggactttgtgttccctgtcaacggctatgttgcctacctgactgtggacaatcttgcagtgaacgtgggcgatcctatcaacgtgtgcgtcctattgcaggacgagttcggaccgctggccggtgagctggttacaatctgggtcaatgaggttgagtataacgataccaccaacgacgacgggatggctatcttcgaaatcgatggacttgaaaagggaaactacattgtgaccgcttcctttgccggagatgagctctatgacggaacaagcgcggtcggcctcatcatggtttcagatgccatcctatccatcgacattcccgctgtggactacggcagccccatcacgatctacgccactgtggaagacagcgaaggaaaccccctgtccggtttggtcatcgccaccctggacggtgtcgactgcaacatctatgtggatgcgggagaaggatcaatcacaatccctaacgagctctttgctggcgaatacttggtgaccgcgaagctcttaggggaaaacaacgccatggacactgcactgctggttgtgaacccaattgaggctgagctgatcgtgagtatcgacaacattacctacaataaccctgttgaagtcgagctgtcctcggagtacgcacttgacggaattgtcatcctcaccatcgatggcgtggactacgctatcgagatcgaggatggcgaagccatcgccctactgcctatcctgctggactcaaaggattacgaggtgactgcaaaattcattggcgaaaactttgacgtggaggacgcgaccacaagctttacagttgaagcgatcgagactgctctgacgctggaacttgagaacagcacaatcacctacggcgactttgccatcgtcaaggtcagcctggtggatgagctgggaaatcccatggacggtattgtcaccctcactgtgggagaccagaccggctcccttgcggttgttaatggagagggcactgtgtctgtgccatacctggccgcaggcaactacactgtgacagccaaattcgagggctctgcaaacttcatttacgatgaggacagcgcaagcctggaagtcactgccgacgacaatgtccagtttgatatggacgtaatcggcaacagccttgttataagcctcgttgatggcaacgacaaccccatggatgccaccgtaaccgtcacaatcgacggcgagagccaggacgtcactgtggaaaacggaatcggctttgtctacgacctcgaggctggcgaccacacagttagcctagactatgacggcgatgccgaccacgcctctgcaagcatggaggacgaggtgacaatactgcccgacccggtcgtgcccgtgtctgccaacgcaaccatcgagttggctgttgtgggcgactacgtggaggtcaccctgaaggacctggacggcaatccaattgctggcgctgacctggaggcggacttgaataacttcctgctctccaccgtcaccacagacgatgacgggaaggcgctggtagacctctacggagagcctaacttcaacttcacagtgacggtagtctacaccgacgacctgggctccagcgtgagcgccagcctcaacaacatctatgtggagaacgaaaccacagtcatcatctacgagaacgtcacagtgcctgtgaccgctaacggatcaatgtcggtagaggcaagcgaagacgccatcaccgccacactcacggactccgacggcaagcctctggcaaacgcgacagtcaccgccgtcatcgacggagtcgagaccaacttcacaaccgatgagagcggcaagctgactgtcccgattgatgaaaactccacggtggagctaagctacaccgacgacaacggcgcatcagtgacctatacaaccaaggtggtcaccaacgaggtgccagtccccgtccctgttcctgtcccggtgaccgtgaacggaaccatcgccctcgccaccgaagatggcaagtcaatcgtggcaacactcacagacagcgacgggaaagcaattgccgacgcagaactaaccatcagcgtcaacgggcaggaatccacagtgaaaaccgacgccaacggtaaggccacagtggacgtggaaggcaacacaacagtggtggccacctacaaggacgccaacaacctcaccgcaaccggctacatgaacctagtggtcatagtcaacgagaccataatcaacgaaaccataattgtcatcccgaaccgtacagaaaccgttatcgattaccagaacatgaccaccaccgtagtcgccagcgcggacggacgcataggcgagtacttcacagtggtcctgagagacgacaagggaaacgctttggctgacaagccaatcaagataggattcaacggacgcgtgtacgaccgggttacagacgagaacgggagcgccaaactccagatcaacctcggatacaaaggcacatacacctttgccataggcttcctcggcgacgacaactacaccggggctttcgaagtggcaaagatcaccgtcaatctacagactcctaaactaagcacgtcatcgaaaacctataaggccagcgcgaagaccaaagccctcacggccacccttaagacagtgaacggcaacggaataagcaacaagaagataagcttcaccgtgaacggcaaaacctacagcggaacaaccaacgacaagggagtcgctacggtaaaggttagcctgtccacaaaagggacctacagcttcacagccaaattcgctggcgacgaccagttcgcgaaagtgactgccaacggcaagctgaccattaagtga

SEQ ID NO: 3196 - DNA, 843 bp, synthetic construct
  source 1..843: mol_type = other DNA
atgagtaagggatatcccaacttttacgaccgcatgatgaagaacattgcctcctatgatctgaagtcattctttctgttctttggactggactgcatcccatatttcagcatagccaatgaggtagtggacggcgggctgaatctcagcttattggatctgcctgtttgtacctccaaaggcatcgtcaacttcgaatttcagttcgatagggacgaggcggatgacaggcggttcatacgctatggcgttcagctgtacgagaaatacgggtttcccgtgatgtctgtcgtgatcgactttaaggcccaagaggatgagccatttccaattgaaatcagcaagggatgcgtgttcacgatatacgtcaaatcgctgaacgaaagaaacccggacattgtgctgaataatatcaatgacaagctcgccatcaacgagaaacccttaggaaaagacctcacaggtctcaagctgcttccttttttggacttggacagaaagatcgaactgctggacaaggctaccgaagtccttttctccctggataagaacctggttggcctacgtgagattaagcatcttatgagggtcattatgttctactcccaccagtggaactacgaggagaacttggaccggcttgggcgctggtcaatcatggtggatgatctgagtcaggacgctgtggtgcacttcgggaaggtgaatcggaagaaaggtcgagaggaacgaagctacgaagtggcaagatacatgatcgatgatggcttcagcgcagaggacgtgtctaaatatagtcggctcgatctcagcattgtaaaccagctaatgctcatgaaatga

SEQ ID NO: 3197 - DNA, 3375 bp, synthetic construct
  source 1..3375: mol_type = other DNA
atgtcacgaaaaagcaaagagaaatacgagtgggactacagcacctactccaaggtggaccctaaggtacgaagctacttcccctttgccaaggctcggccccagcagctggagacaatctccgaaatccatgaggccatcgagaaaggctacaagtacatcgtgctggaggctggaacaggtaccggtaagtctgcaattgcagccacccttgccatgtgttacggcgacgcctacatactcaccatgaccaagcagttgcagcgacagtacacaaaggactttgaggactacgacttcgccttggtgaagggcagaagcaacttcgattgcctgaagtatatggaggaggcaatcgaggaaagctgtgacatgggccgctgcgtcctggaggggcacaagtgcagctataaggtgaaccagttcaacctctacaagaaagacccgggggaatgttgcccatacttccatcaaagggcgattgccctgaatagtgacatcgtgatcacgaactattcctatctcttcgccgagctgaacttcaacaacgacttcaaggccaagaggctgctcatatgcgacgaggcacataacctggagagcaaaatcatggatctgatttcccttgagttcacacggcgccagctaaaggatgaggtgggaatcaatctctctaaagagacgctgaaggaccttgatgagaagggctacacatcctggctgcagttcatcaagcgagtctgtgaaaggtacggggacaagagcaaggaaacaaagaaggccctcggcaagcgaaaaagcctcaccctgcaccggcgatccgaaaacctcaaaagaagactggaggactttaagcggtttagtaattacattgccatcgacccggacaattggattatggattatgacccccacagccagaagttgtccttcaagccgatacgcattgacaagtacgccagcgaggtcctcctgaagcacgcagacgtgtgcatcttcatgagcggaaccatcctgaaccaccaccagttcgcgaaatggctgggtatcgaggaggatgaaatctatcccatccgtcgtaaatcgccatttgatattcggcgcaacccaatccggacgtactcaggctttgacatgacctatcgaaacctggggagttctgccaaaaggagcgttcctgtgataagggagatcttggaaaggcacaatggggagaaagggatcatccacaccgtgagctaccagtgcaaggagtttctaaaaaaggaactcaacaatccccggcttctggaccacgagactaaagaccgcgaaaaggtgttggaaaagtttaaaaagtcagatgagcccttggtattaataagcccatccatgaacgagggagtggacctgccgggcgacctgtgcaggttccagataatctataagatcccatatcctaacattagcgacaagcagactaatatcagaagaaagaaagaaaagatttggtatgactaccagactgccatcaatctcgtgcagacctacggccgcggaatgcggtcagaggacgactattgtactacgtacttcattgacagcaggataaagagttacttgaagcgcgacagcattcgcaataatctgattcccgacttctttaaggaggctgttgatgtggaggccgctgagattgagaaaaaccccattagaaaggcttcggatgcctctgctattgctaaatatgaggggtcagaattttcggatggttctgataatgataaaaacttaaaaatagacgactccacctctaaatctcaaaaggacagtaaaaacactttcaaaaagtcggatgtgcggacaaaatatgctttaatgaaaaagggcaaagacctggcacgtacaaacaagaaggaagcgatcgccttttacaaatccctactcatgcataaatgctttaagaatgattattacccataccggaagcttgtcgtcctttatgacaagacaaaggactataaaaacgagctcggactcatcaaattcttcttcaataggggaatccactgtcctagactctactacttctggtttttaaacaagcttctgaagctctctgaacgtggcctgattactaaagaggaaattaaagagctggaaaaagagtatatgtcaaagggttttaaaaacaaatccgtccaaagcagcagcatgataattgcagatcgtatcgaacactactatggggatacatacgtgctcagtgagcacaagttcaacaataagttaaagtccaaggagattattgaagagggaaaatactttgagcggaccggcaactaccagaaggcgattgacctgtactcagaggcgatcttcgaccgccatttcaataattactcattctatcaaaggatatgtttctccttggaagagctggaggattatgaaagggaactggaatacattaattcttattttgacaatgacagtatcaaaaagtcggaaaccagtgaaaagtggttcaataagagattggataaagtcaatgggctgctggaactcaagaacaacgagaaaaacatatcttctgaggttaaatcttccgatgaggatagtattctgaacccctccaatattgatctgatggaatacgatgattccctgagtctggaagacaacatccaaagaaagatggaactgaaagagcacgccatggaacttcgcagaaataagaattattcagaactcatctcttttttaaatgcactgactaaaaactcctactttgagaacgactactatcctttcaggcatctctgttcaatctatgagcaaatcaaacattactctagtatgaaggattcaattaaggacatgctgtacgcagatgtttatctgactgactatcagctagtatggctaaagagcaaaagggaaatagtggatgctcagatcggccttgatgatgtcctattcaaccagtggatcgaccactacaagagccatggggcaagaaacaagtccaaggccaacagccccgtgcctcttgccgaccggctcatcaaaaaagatgaaaactacaacgttagtacttcggaggaatttgacttcacccagaagaaatacgaactgacggaaaagggaagatcactggagcggaagggcagatatgaggaggctgctgagttctacatggatatcattaaagagaagaagtatcaccattatgacttttacaaacgcctttgcttctccctggatgagatccctgattacgaacgcgaattgaaggcgatcaagctgtattacacctgccctccaatctttacggatgataccagtgaccggtggtttgagaagcgcttggagaaggtcaattccaaaatctga

SEQ ID NO: 3198 - DNA, 498 bp, synthetic construct
  source 1..498: mol_type = other DNA
atggggaagatcacaaacaggaaagaggccctgagcaagcgcgaccagatcgaaaagcttcaaggggaatcctttgaaggtgacgataacattgactggttcggcagaatcgaggagatagtgattgatgacgattactgcatctaccagatcggcaaatattcaaaactaagtaattattactacgatgacttcgaggaatactctaaggagtacggccaggagaacccgctgaatctgtgctttgaggagataatttcctatctcagtaagatcgtgctcggcgactttggagacaacgtcaaagccgaatgtattggcaagggagggatagttgaggtgaacggtctgaacttccaccccgtctcccggatcgacattgctgatttgaatggagaatcgttcgtgtatctgtatgatgacaatgatctcattgcacgaatcccattctttgacatcaccagctacaagatcacggcgcctgaagagagcgtatga

SEQ ID NO: 3199 - DNA, 165 bp, synthetic construct
  source 1..165: mol_type = other DNA
ctcggggtgaactgcattcgcgtagtcatcgacaacgcagaagagagcatcacaaaggtggccaaggcccacggaaatggcgctctcgtgctagttcccaaacggtggatcggcaggaaggtccagataaccctgctggaggaagaggataaactgatgttctga

SEQ ID NO: 3200 - DNA, 603 bp, synthetic construct
  source 1..603: mol_type = other DNA
atgaacagttgcgccgtggatgtgaaggagaatagtattgagtccgccatgggcatcaatacaagcgaaagcgatagctttcagctgaacactatcagttcggttgacataggagacaaattcaagtcaagcggagcaaccaactatctggaaagcattaaagcttggaaaaacattgagaagattatcgactgcctggtccccagcgatttggaggaggtgtttagcatctcttcaaacaataacttcaagatcaattgggatgagaaggcgctctatgacgtgttatacacgaacgaaagctccatatttgtcccactaggctgtatggagcaggttggcaatgggtattacatcatgaaccataaggatatggtctatagcaacccggatgacttcatccacgaaaatggtgtgtacggtctcattatccggttcgacaacaatatgatccaatccgagtacgcctactgcgagtacaattccgggctgtccctcgacggagagaattgtgacttcgtgaaaatggacttcatatcaggggaagacaccgtagaaaactacattttcgattcgctgaacggctttaacctttttaactga

SEQ ID NO: 3201 - DNA, 417 bp, synthetic construct
  source 1..417: mol_type = other DNA
atgtattactataagctggagtccttcgactacgatgagcattggaccgcattctatgtgtccaacaaaaagtattccgacgatgaatttaaaaagatcgtgaaggatgcctacattgagacatgcaagcacattagcgaaaaccaaaagccagtaagcaaattcaactatatgatcgattcggtcatttttgatatcctccaggaaagcgacaaagacaagagccagccctgccactacttcaataggatactgaaagaccggcacgacctaatcaacctggacgattgtttggacagtaaactcgaatttgtcgagcagaatggcggcaacgacaatctgcgcgagttctacgacaagagaagtgagtacatacttgtggggatctcagatgacgataacaagggatacatctga

SEQ ID NO: 3202 - DNA, 1257 bp, synthetic construct
  source 1..1257: mol_type = other DNA
atgaacaaatacattaaaaagtggaccgagtcgagtctgatcctgaagatcatcgggggactgatcatcggctcggtgctcggcatcctggtccctcaatacaagctgatcggacttccaggagagctcttcgtgacggcgctgaaggctattgcccccattctggtgtttattctggtggcgtcagctctatctagggctagcgagggcataggcagccggtttaagaccgtaatcgtgctgtatttattttcgactttcctatctgctatggtcgccgtcactggaagctatctcttcccagtgggcatgcatttgactgacgcgagtgatgtggccgcacctggcggcctgggggaagtcataagttccatgctcctgaagatctttgcaaatcccttgcagtccctgtctcagggggattacttgggcatcttattctgggcgatcgtaataggactctgcctgaagaaaatcgctagcgacagcacactggatgtgttctccgacctcgcagatgctaccagcctggccgtaagggggatcattcagtttgccccaataggtataatggggcttgtctttagtgctgtgtccgagagtggcctgagcattttcatccagtacgggcagttggtcttattgcttgtgggctgtattgccacggtggcctttgtgacagacccgatcattgcagcatttgcccttcgccgcaatccttacccgctcgttctcacctgtcttaaggaaagcggcataactgccttcttcacccgaagctccgcagcaaacattcccgtaaatatgcgtctgtgtgaaagactgggcctggacaaggacttctattcaatcagtattcccctcgggtccacaatcaacatggagggtgccgccgtgacaatcaccgttatgaccctggccgtgtgccacaccctgggcatcagcgttgacctgcccaccacaattgttctatgcatcatctccacgttggcggcttgcggttcctctggtgtcgccggaggttctctgctccttattccaatggcttgctccctctttggaataccttcagacattagcatgcaggccatcgccgtgggcttcatcattggagttgtgcaggactcatgtgaaactgccctcaactcaagcggagatgccctgttctctgctacagcagagtaccacgaccgggtcaaaagaggggaagatatgaacttcctaggggagttcgccaaagataaggcaaaacaatga

SEQ ID NO: 3203 - DNA, 1473 bp, synthetic construct
  source 1..1473: mol_type = other DNA
atgaactacgaatttatactaaatgatctcaggccctctcaggaggagattgatgcagtcaacaagacaacagagaaagtgatcagctttctgaacaagacctgcaaagaggagaatatccccgcgcaggcgtttgcagtaggttcggttgctaaaaacacttggctgagtggcaaatccgatatcgacatcttcatacgctttcctttgaaaacggatgaggccgtgctgaaggaaaagggcctttatctgggatataaaacgaacgacgccctgaaaggaaaggcatccgagcactacgcctcacatccttacctgacctgcctgatagacggaatcgaagtggatatcgtgccctgctactggattgaagatggtagccaactgaaatcggcagtggatcgcaccatcctccacacccggtatatacagaagcacttgaagaagtcccaagaggatgaagtcttgctgctgaagaaattcatggatgccgtgggcacatatggctctgagtttaagacaggggggttcgccggctatctatgcgaattgctcattctcaagtacagcaccttcgaggagaccctcagacaggcccaggattggaagttccataccaagatcgatctggagaactatgggacctcagacaataagctcttcaagaatgacccccttgttttcatcgacccaacagacaaaaaccgtaacgtagcggctgctttaagaattgagagaatgctggactttatcatagcctctcggaactacatcaatctaatcgacagtttagaggacgccgatgagaacataattaaggaaaaagtcctgaagtacttcagcccccttctgaaggagcgcttccaggacaagagtgtgaaagaaatctccgatgacatcctcgatgagttcaaagaccgagagactcaaactctagtcatcagtttcccaatcccagagatgaatgcagacgctctccacccgcagctgctcaagacagtggagtcaatctcccataagctggaatctgaagacttttcagtgtacagctatgactactggactgacgaaaaaaatctcgtcatcttcattattgagctgaacgtattcaagcaaagcaaatactacgtgcacgaagggcctaaggtgtggaataagctggcctttaataacttttccgccaaatggtcccaggagtctctttatcacaaaggggaatttattgtctttgaccgagagcggcagttcgtgacggctaaggaattggttaagcacttgctggaaaaggacaacattcacgagattaaggttggaaagaacctgcgcaaagctatcagcagcacccataccctttgtgagattgatgagttcctggaaaatatcgaccagttcatttgtgacgaagccgaccagagggagtttcttaacactctcgatgacctgttaaggccgggccagtacctgaaacggtga

SEQ ID NO: 3204 - DNA, 465 bp, synthetic construct
  source 1..465: mol_type = other DNA
atgaatactgaaaaggaatttaacacgaccgtgtacaattacgaccgcctgggagacctcctgttcatttttcaaaagaaccacaagacctatcttaacaatctcctggcagagtacgacctgaatctcatccaggtactgtgcattttgaaaatcgattcggaagagaatctgaaccagaaggacctgagcgacagtctgtatctaacaaaaggcgccatcaccaaagccataaagaaactggagagcaacggcatcgtcatcagggagaaatccccgatcgacaagagacataacgtgcttgctctctcaaagaagggggaggatctaattccaatcataaacgacattaaccaggattgggaaaagcggatgggtttggatgagcttagccccgagttcttgaagacattcaaggccctggcgttcaaatccgcagagctcaacaatgaaaaattagtgtga

SEQ ID NO: 3205 - DNA, 414 bp, synthetic construct
  source 1..414: mol_type = other DNA
atgaagtttaacaagagcctgatcgcaattttcgtgatcttgattgtggccttcagttccatatctgtcatagccgcggaggatgcggaagatgacaacccctatcataatggcgccgtcatgaacgagcaggaacccggcagcggcgaggacgatgacaacccttaccacaacggggctgtgatgaatccacaggagccagaatcggaggacgatgacaatccgtaccaccacggggctctcatgaacccacaggaacccgggagcaccgacgatagtcaggccgccggttcatctcaagcagacagctcaaataaggtggctcttagcaaataccctacaggaaaccccctggtagttctgctgatgtccctgtccatcatcggactaggcacgctccgggtgaggaaatga

SEQ ID NO: 3206 - DNA, 939 bp, synthetic construct
  source 1..939: mol_type = other DNA
atgagcataaaaaaggtggttgtcgctgggggcggcgtactgggcagtcagattgcttatcaatcggcattctgtggatttgatgtgacggtctggctgcgctccgaaggatcaatcgagagggcaaaaccaaagtttgagcggctcttgaacatctatctgtccacattagaagccatgaagactgataagagtgcatattgccggggcctcagcaaaacagccgacctaagtgatgaggaaattgacagcctgaaggagcaggctcaaaaggcttttgacagcctgacactaactaccagctacgaagaagccgccgatgatgcagaccttgtcattgaagcaatcgccgaggacccgaaccagaagatcgccttctatgaggaactgagaaaatacctcccagaaaagaccattctggtgacaaactcatctaccttgctcccctccatgttcgccgagcacaccggacgccctgaaaagtacctggctttccactttgctaataacatctgggcgcaaaacactgcggaagtgatgccccatcccggcaccaaacaggagtacttcgatgcaattgttgagtttgccgaggacatcaatatggtgccgatcaaggtgctgaaggagcagccaggctacgtactgaactctctcctggttccattcctcagcgccggtcaggccttatgggcgaatgaggtggccgatcctgaaacgatcgacctgacttggaggctggcgacaggggcccctaacgggcccttccagatattggacgtcgtggggcttgtcacggcctacaatatcgtgattatggacccccgatccaatgaccctgagaccacccagggaaagatcgctgccaagcttaaagagaaaatagacgctggtgagaccgggatcaacgcaggaaaaggtttctacgagtatggctga

SEQ ID NO: 3207 - DNA, 684 bp, synthetic construct
  source 1..684: mol_type = other DNA
atgatagtgagtgtgattggcggaaccggtccccaggggttaggaatcgctctcaggctggccattgagggggtcgaggtgattgtggggtcgcgcaaggaagaaaaagccctcgatgttgttgccgaagccaaagagaagtacgcggactatgacctgaacataaaaggtctggctaacgaggatgcagctaaagaaggggacatcctgatcctgacagtgcctctcgccgcgcagaagccgaccgtggaaggcatcaaggaattttgcactgacaagattgtacttgatgctaccgtcccacttgagaccgcaatcggagggaagccattcagattcatcgacctaatggagggttcagccgcggagcggacggcaagcatactggatggcaccggagccaaggtgatctgcgccttctgtaatataagcaactctcacctatccaatattcccgaagacattgactgcgactgtttgattgccggcgatgacaaggaagctaaggagattgccgcagagctcatcaacaagatcccaggcgtccgcacaatcgacacaggaatcctggagaaatcccgaatcattgagaagatcactcccctgctgatcggcctgaatataaaatacaagagccattacggcgggctccggatcacgggcatccctaaattggatgagtga

SEQ ID NO: 3208 - DNA, 1497 bp, synthetic construct
  source 1..1497: mol_type = other DNA
atggttaagcgaatccctgacgaagagcaaataaagttgggcatcagaactctggattttaacatccccgaggaccatatcagccggtttgtggtggacttcattgacgagtattatcccctccttggaatcaaagagaataagaagaagaaagggcgtgacagttttcccgtgaaggagatgcttaagctcctcatctacgctaagatcgagcatattgacagtatgcgcttccttgcggacatggtgaagtaccacgacgtatataaattcgtggggaatggtatttgcccttccgagcgaagcctgcagaggtacagggaaaagtacggcaagtattacaatgaactgctaaaagcaaccctgaagaaagctagcgacgtggattacactgatttcaacgaagtctccattgacggaaccatcaagaaagcatacaattcaaaaaataaggtgatcacagaaaaagagactgagatactcacccggtacttcgaagggggccgcgtgagtcaggaggagctagataaactccacaagccggccagggagatcctggagaacaaaaaaatcagcaaccaggaaaaactgtacctcctggatgacatcaaaacgcagttcacgctgtcgggtcagaaatcagtgccagtcaccgacatcgaagcacggtggatgaaaagcaagaagggcaacagccaaattagctacaatatccagtctgcagtcgactacgataccaaaatgatttgtgccattaacgtcgtacaggccccgacggaccactaccagttgccaaagatcgttgataaggcgattaacaacacaaacgtgatcccaagattcgtactggccgacacaatctacctgaatgaggagagcctctcatatctggcggataatcaaataaatggggttataccagatagaaagcagtccaaggagaagatcggacgcctgaacaagaacccctaccacaaggatcacttcaaatacttccccgaaattgacgcctttgagtgccccgaaggccagattatgtactttttcaacaaatacactgagaaaaatgatgatctggacaagcctgacaaaatcaagcggttgtattccaactatggtgcttgtaaggcttgcaattgccgggagaactgcctgtcctccacccagacccaccgcactatcaccgagtatggcgggagtttaaagaaagccatgtgggaaaagatggaaacagaggaatataaggaggaatatgccaaaaggtcatcggtcgaaggaccttttggcattttgaaggaacaattccatatcgagagcgaagtggtgataggaaagacaaagacagaggaaagaatactactggacgccgtggcttataacttaattcgactgtttaacctcgaacaggagatcaagaacgataaggaggatattgttgacttctgtgagaaaatttctgtccaggagaagcttgaggtccgcgccaccatattttga

SEQ ID NO: 3209 - DNA, 903 bp, synthetic construct
  source 1..903: mol_type = other DNA
atgaatattattaaaaatctgcctctggctataaccggtctgatcttggccatcctttcactcggaaagatattcgccgacttctcggccatattcttcataatcggctctattctgatatttatggtgctgctcaagctggttttccacttcaacgactttttcaacgagctgaacaacctgatccctctgagcacattcggtaccttctcaatggcgctcatgctttggagcacctacctcaaacccctgttcctgccgctcagtcaagatatcgccttcgtgatatggatcttgggcatcatcatccacctatccatcatcttgttctttactaacaactatgtgctgaacaacttcaatattgaagatgtctatgctacttggtggatcgtctacattgggatcaccatggccgcaattacggctcccgcccatggcctcagtaaatatgggttcattttctttggcatcggattcattctgatgatcccaacacttgtgctggtctcctaccggtacattaattttaaacagatcgacgaccagaataagccattcatctgcatctacgctgcaattttaagcatcctgatcgtgggatacgtgaatgcgatgacgattaacggcacttttctaagcattatctacatcggggccgttattttttatatctttgcaattatccaggcattcaagttcatcatcatcgaaaggttgaagttcatgcccagctttagcgcctttacatttccatttgtgatatccgcaatagccaccggggaggcctacaagttctttggacttgatattctcaactatctcttttatattcaggcgtttattgctctgattctcgtaatctttgtcctatacaattacctgaagttcttaatgaactga

SEQ ID NO: 3210 - DNA, 510 bp, synthetic construct
  source 1..510: mol_type = other DNA
atgaacgcgattttcaaaagaaaaagcatcaggaagttcctcgataagccaatcgaggatgaaaagatcgaaaggctgctgcgagccggaatgcaggctccatcggccatcaacagccaaccctgggaatttattgtggtccgggacaaggattccatcaagacaatcgagaatatgagcctctattcaaagccggccaaaaccagtacctgctgcataatcaccctgttcaacaagaaatacactgacaagttcgatgactactgttgggtggagcaggatatgggagcatgcaccgagaacatcctcttgcaggcagtggaggagggcctaggggctgtatggctgggcacataccctaatgaggaacgggtgaactatcttaaagagcactttgacattcccgacaatgtgtacccctactccgtcattgttctgggctaccctacggaggactaccatggggaaagtcgctttgacgaaagccgcatacactatgagacttattga

SEQ ID NO: 3211 - DNA, 522 bp, synthetic construct
  source 1..522: mol_type = other DNA
atggacttactcgatgtgatgcttaaaaggaggagtgtcagacgatatacagatgaggagattccggaagaaaagctcaacaaaattttgcaggccgggatgcttgctcccacgagccgcaaccggaagccatgtagttttctactgatcaatgataaggattccctggtggaactggcaaacagcaaagagcacggggcagagctcctgaagggtgcaaagcaagctatcgccgtaatcgccaatccaaacgtgtcagacacctggattgaggactcgtccatcgcgctggccttcatgcacctaatggccgccgagcaggacgtcggaagctgctgggttcagatgcatctgagaaagtccaaggatggccagtggtcagaggaactggcccgggagatcctggggcttgacgactacttccgcatagtgggcatattggcgctgggaatggctgacggccagcctaaaccccacagcctcgacgaaattgacctcaatgatgtgcatatcctgcactga

SEQ ID NO: 3212 - DNA, 576 bp, synthetic construct
  source 1..576: mol_type = other DNA
atgaaagcaaatgagaaagagaccatccgaagctttctcgccattgaacttgacgaaagcctagtgccgccaatcctggacgtccagggggatttcaaaaagactgacaccaagatcaaatatgtgcccgctgaaaacatgcacttcacactgaagttcttcggaaacatcgatgaggatatcgtcgaggacatcagtggtgccgtggaaaagataattaagaactactctagttttgaactcaagatcgagaactgcggctgctttcccaatcagaaggtaatcaaggttctctggttagggatagacaaggactccaagataaccgacctgcaaaaggagctggataaagagttcaaaaagcttgggttcaaaaaggagagaaactacatttcacatctgacaattggccgggttaaatcccctaaaaacaagaatgagatcagggatgtgattgaaaagaacaagaatatcaaaatcggctcgatgaccgtgaaccgggtctgtctgaaaaagagcacgttgactccacagggacccatttacgagaatattcgcgtgtttgacctggaatga

SEQ ID NO: 3213 - DNA, 801 bp, synthetic construct
  source 1..801: mol_type = other DNA
atgacaacaaatatcgggaaaagaattaggctggagaggatcttcaacagaaaaaccggacgcaccgtgatcgcgccaatggaccatggggtgtccagcgggccaatcaaaggtatcataaatatggataagaccattgaggaaatctcccagggtggcgccaatgctgtgttgatgcataaggggattgtggagcaaggacaccgggggtacggaaaggacataggcctgattgtccacttgtcagccagtacctccctcagccccgatccaaacaacaaggtaacggtaacaactgtggaaaaggccattcagcttggcgccgatgcagtgagcgtgcacgtgaacatcggctctgagaacgaaccggagatgctaatggagctgggagaaatcagcgagacatgcagctattggggaatccctctccttgcaatgatgtacccccgaggccagaaggttgagaacgaacacgatgttgagatggtcaagcatgccgcacgtgtcggcagtgagctcggcgtcgacattgtcaagaccaattacacgggggaccccgactcatttagggaggtggtggaaggcgctttagtgcctgtagtcattgccgggggtcctaagatagacactgatcgggaactgctggagatggtgcgcgactctctggaggtgggaggcgctggtgttgccttcggacggaacctgttccaggcgcaggaacccggcaagatcactaaagcaatctcggaggtcgttcacaatgacatggatgtggaggaagctctgaaaatcctcaaatga

SEQ ID NO: 3214 - DNA, 1107 bp, synthetic construct
  source 1..1107: mol_type = other DNA
atgtccccgaaaacatcatgggacgataagaaagagctgatcacaactgcactggaatccggcatcgaccatgtgctggaccttgaagacagtgagaacatccggaaagtgggcaacttcaacatcatttccacggaggaagacgctgatgtatacttagttggaatagacggggaaggagacggcaccctggagctgaaagacaacctaaatgagtcatccgacttggcaaaagcaaaggaggccaaaaacagtggaaagacagtgtgtgcctacatcatcatcacagacaagctccacgagcagttggccgtagtcctgggtaaggtggtggattacattatcctggttgggacggactggacagtgattcccctggaaaacatcattgcagatcttcagaaggaagacgtcaagctcctggctgccgtgagcaatgctgatgacgctcaggttgccatggaaacgctggaggtgggcactgatggtgtcatattcgaggcccgtgactttgcacagatcaaggacatcgctgggctgatagacgagctttcaactgaaagctacgaattaaaggacctgaccattaccaatgtggagccagtaggctcgggcgatagggtctgcatcgataccaccaccatgatgcgccctggagaggggatgcttatcggctcctacagtaaggccatgttcttcatccacagcgaaagcctggagagcgaatatgtggcctcgaggcctttccgcgtgaacgctggtcccgtgcaagcctatgtgatggttccaggtaacaagacacggtacctctctgagttggtgactggcgatgaagtcctcatcgtggataaagatggaaaaaccaagaccagcattgtcggcagatccaagatagaaaaacggcccttgctcctactcgaagcggagtatgatggcatgaagatcaagagtctggtgcagaatgcggagaccataagactggtcgatgagaatggagagccaatttctgtttctaacctcgagaaggggatgaaagtcaaagggtttattgacgacagcgcccgacactttgggatggcgattgatgagcagatcattgagcaatga

SEQ ID NO: 3215 - DNA, 1266 bp, synthetic construct
  source 1..1266: mol_type = other DNA
atgaatcccaaagaattatttgctgagtctaaaactattatcccaggcggggtgaacagccccgtgcgggcctttgagccttatccattctttgtgaaagaagccaaaggcagccacatcatcgatacagagggcaacgactacgtagaccactgcctggcctacgggccgattctactgggccatagcgacgatgacgtgatggccgacgtgtacaatcagatgaagatgggaaccgcttacggcgcgccaactgaaaatgaggtcaaattggctaaggaggttatcgaccgggtgccatgcgccgagatggtgcgcttcgtgaactcagggactgaagccacaatggcagccattcgcctggcaagaggctttacaggccgtaacaagattgtcaagttcgaagggtcctaccatggtgctcacgactatgtcctcgtgaagtctggtagcggcgctgcatgcctcccggattcggcaggaatccccgaggacaccacgaaaaacaccctgagcgtgcccttcaacgatgttgaggccttgacgaagctgattgatgaggaaggggaaaacatagcttgtatcattgtcgagcccgtcatgggaaatatcggctgtgtagagcctaatgttaaatatctgaagttcctaagggaaatcacagaggaaaacgacatcctgctgatctttgatgaggtcatcaccggattcagggtctcccgcggaggggctcaggagtattacggggtgaagccagacctcgttacctttgccaaggtgttaggcggaggattccccatcggcgcctatgcaggtaaaaaggaaatcatgagcctcattgcaccggccgggcctgtctaccaggccggcaccttcagtggaaaccctatatccatccaagccggtctttccaccttgaacaaactggactatgagttctacggaaaccttgcgcgaaagggcgattacctcagaacgaacatatcagatattgttgaagacctgaaccttgacctgcaggtggtggggcttgctagtatgttccagatctatttcaatcccgagcccgtggtcaactacgagatagcgaaaaagtcagatgcaaagcggtttctggtgtacttcagggaattgctgaagaatggcgtatttatcccacctagtcagtttgagtgcaatttcatatccggtgctcacacagaggaggatctcgacaagactgcccaggggattgaaaatgcgctgaaggtggcctggcaactctga

SEQ ID NO: 3216 - DNA, 714 bp, synthetic construct
  source 1..714: mol_type = other DNA
atgaaccgccggtcaaagctaataatcgcgattctgatagtgatcataatagggatcgccgttatccttttcggcagcatgtttggtggcgaaaaactgtcgtcaggtgataaagacatcctggtttgcgcgattgacgaaagcgagcctcgaccaggcatgggggcagtggatatggcctttctggtccacatgaatgatggaggaatcaccaattacactcccatttatcctcatggaatggtccacccgagtatcgccgagcccgaggagtatcaggctatgggcgcaggggaaaaactgctcttgcacgactgcttctactgggaggacaaacagcagtgcatgcaatacgcaaaggagattctggaatacaatacaaattattcctgtgatgccgtgattgccgtgaacagtcaggccatcgataacatcatcagcgctgccggtaccttaaagtacaacggcgaggaagtcaacgcatccggcatcgatttcatcagggaggagcagaacaccatgggaatgacaagaggagactctgtgatggtgatcgtgaacgccctcatgcaggcggctaaggacccagacaagcgggacaagatgattaatgctgctgtaagcgagtatacggccggcaacattgcaatgtaccccgaagggtccttcatggaattgctcgctagcaagggcctgcaagccatgtttgggtga

SEQ ID NO: 3217 - DNA, 639 bp, synthetic construct
  source 1..639: mol_type = other DNA
atgaaccaaaaggactactggaacagcatcgcagataaaaaggaatttacaacgccattccaccccgaaatcctggagaattacctgaacaaagatgattttattgtggacatcggctgcggctatggcaggaccctgcgagagctcaaggataacggatacagaaatctgagaggctatgacatttcagagaaaatgatagaaaggggaaagaacgaaaatcctgatttggacttgcggataaaagatcccgacaccatcgatcttgatgacgacagcgtagatggcatcattctctttgccgtgctcaccgcgattatcgacgacgaagagcagaaggccctcattgatgagatctaccgggtgctaaagccgggggggatactgtacctgaacgacttcctactcaacgacgacgaacgcaatctgaagcggtacgatgagtacaaagacgagcttggagtctatggtgccttcaagctgccagagggagctactttacgccatttcgacgagtcttacatcttcaagctgtttgacagtttcgagaaaagggaatatgagcgtcagatctatcccacaatgaatgggcacacttccaacggcttctattacattggggagaagaacatcggttga

SEQ ID NO: 3218 - DNA, 1239 bp, synthetic construct
  source 1..1239: mol_type = other DNA
atgctgatgaatgaacagacgaaactgtctaaggaccattatatgatttttggcttaagttgggccgggtgggtgtttgatttctacgaccttgtcctatttacctttttgattagccagctccaatccagcctgcacatcaacgccgaaatgctggcactgtgcctcggccttagcctatttgctacaggcttaggggggatcatttttggagcactgggggataagtatggtcgcaagaaggtgttggagtggacaattctggtctactcgatagggaccctgctctgtgccttctcctggtcgttctattctctggttctcttcagattcatcactggattgggcgtcgggggcgaatgggctaccggccagatctacatcagcgagacctttcctgacaacctcagggccaagtttggagctttcatgcagagtggcgctcccgtgggggtcatactagcttcaatcgtgggtggaatgatcagccccattattggctggcggatgacatttttggtgtccatcattccggccatcaccattatcctgattcgaagatatctgaaagagtccgatgtctggattaaaaataaggacgattttgtgaacaaaaacatttttcaggagttcaagcaacttgtgtcaaaagaataccggaaaatattcctgatcagcttggtactgtgcatattcgggatgtctgcctattggtttacctattcctggctgccaacctacctggccgaggagaggggcctcgcaatggttacgacctccctgggaatcatcctgattcagtgcggtgactttaccggctacacgacctttggttttgtggctgagcggatcggccgccgtccagccttcactatctacagtttcatcatggggatcagcattgccatgataacgatatgttggaatcagattgacaaggtcccagacctgatcatggtattcatgttccttacaggcttcggaacaggattctttggaggattcggttctctcttctcagagctcttccccacaaagatccgcaatactggagttggcactgtgtttaaccttgcaaggggggtgcagttcatcactcctatgataatcactttcgtgggggcctactacgacctgagttacggcatcgcgatcgcggcaatcttcgcgttcctcgtgggcatttggatttgggtattccccgaaaccaagggtacagccatcaacgatctcgattga

SEQ ID NO: 3219 - DNA, 543 bp, synthetic construct
  source 1..543: mol_type = other DNA
atgaagattatagccttattggccagtccacggaagggtgggaactgcgacgtcctgatggatgaaatgattaggggagctgaggagaatgggcatgaggtggttaagtacttcctggagaagtgtgacatcgccccatgcaaggcatgcatgttttgtgctgagaatcctgactgcgtgcgcgaggacgacggaaatgaaataatcaacgcactagtagatgccgatggcgtgatctttgcaacccctatctactatggtcagatgtcagctcaagggaaactcattatcgatagattctatgccatcggacagaaccccgacaagagccttggcggcaaggcagccctcatcttcacagaaaaccagcccgagggcacttacaaagactacattgaactgacgaaattctccccctttacctttatgggatatgatgtgatcgggcacgtggatgcgggcagcgcgggcccggccgggattgtcgccgaagagcagaaagacaaactggaagaggcttacgagctgggcaagctcttctga

SEQ ID NO: 3220 - DNA, 789 bp, synthetic construct
  source 1..789: mol_type = other DNA
atgattaatatagtagccggcctgggagaaaacgagaacatcatcttggcctcaaggcagctggaatcaatagatgacctgaatatccagcttgtggacaacgaggacgacctgttcgacgccttcaaagactccaacgtgggtgcggtggtcagaggctccctaaaggcgagtaaagtcatcaaattaataaagcaatataagtctgactgcgaagtgaaccgcgccacttacgtcaacacatccaatgacccgaacttcaacgactcctatgagtttctgctgtcgcctgttggaatcgatgaaggcaagaacattgacgagaagatcacgctggccatccagtcagccaattttattcaatctctcgggaagaccccaaagatcgccgtgttggctgaagggcgtaaggatgactatgggcggagcgagagaatcgataagagcctgaaggagagcgaagagctcactcgacttctggaggaacggttcaattccctggacaattttgacaacagcagcgaggatgtttctaagaactaccagatcaaaaactactacattctccttgagcaggcaatcaatgataagttcaacatcctcctcgcaggtgatgggatttttggaaatataatgttcagggctctggtgctgctagataaatggcccagctatggcgctgtcacattgggaatcgatgagattttcattgacaccagtcgggatcagaccgtggaaggctacaaacgcagtctcgagctcgcatacaatctggctaaattaaaatga

SEQ ID NO: 3221 - DNA, 765 bp, synthetic construct
  source 1..765: mol_type = other DNA
gtgcccccccaatttctgtataagatctatgaaaagcgcctaatgaatgagctggaccctgatcggatgccgaggcacgtggctatcattatggatgggaaccgaagatactccagaatgaaaggtgatatggaggttatcaaaggccacgaactgggagccgacacgctcgagaaggtgttggactggagcatagatctcgggatcgagatagtcaccgcatacgccttctcaactgagaactttaacaggccagagcatgaagtggaaggcctaatgaggctgtttgtggaaaacttcaaaaaaatcgtggaccacgagaaaattcacaagcataaggtccgcgtcaaggtcgtaggcagaattgagttgctcccagatgacgttcgagaagcgattaaggaggctgaagactccacaaagcagtataatgaaagactgttcaacctggccatcggctacgacggccgtctggagatagtggacgccatcaagaagatctacaagaaagtggaggatggagagatttccattgacgacattgacgagaatctggtcagtgaaaacctgtacaccgcaggtcttgaagaccccagtttaatcatccgcacaagcggagaggagcggctttcggggttcctcctgtggcagagctcttactcagagctttatttctgcgatagcctctggcctgagctgcggaaagtggattacttgcgagccatccgcgactatcaggaaagggatcggcggtttggggtatga

SEQ ID NO: 3222 - DNA, 762 bp, synthetic construct
  source 1..762: mol_type = other DNA
atgatagatacccactgtcacatagattttgaagaatttgacgaagaccgcgaggagctgatcaaaagggctcaggacaagcttaacgccgtaatcaactccggatacagtgtggaaagcaacaataaggtgctcgaactgtcaaaggagtataaggacttcatctacccaacctttggctttcatccggtgtcctctcaaaattctcccgaagaggagatctccgcggcccacaaccagatcgtcacccatctggatgacattcttgctgtgggtgaggtgggaatggacttctactactgcacagacaaggccttaagggctcgccagcaagagatcttcatggggttcgtggagatcgcaaacgaatacaacgttccattgctgatccacggccgggactgcgagagaaaaatcttcaatctcctcaatgactatgatgacattcctaaagtcatttttcactgctatgggggcagtctgaaggtagcaaagagaatattggataaggatgactactacatgagctgttcaaccatggtgtgctacagcaagcatcatcaggagctgttcaaaaacattcccctagagcgtattctgacggagacagacagcccttacctggcaatgacaaaggaggagcggaacgagcccgccaacgtggtctatgcggttgagaaactcgccgaactgcacgaaactgatgtctcggaggtcgatgaacagactgaaaaaaatgcccgatatgtgttcgatatttga

SEQ ID NO: 3223 - DNA, 681 bp, synthetic construct
  source 1..681: mol_type = other DNA
atgaagccctacgtgatcctaaacgcggctatgacgctcgatggaaagatcgccacaaagacaggcagctcggagatctccggcaaagaggaccttgagcgggtccacgagatccggaagaaagttgacgggatcatggtagggataggaactgtcctggcggacgacccaaggctcacagtccataagattaacgctcggaaggaagataatccgatccgcatcgtcgtggacaacaaggcaaggactccactgaacttccgaatcctgaatgatgatgcagagaccatcattgctgtgtcttccatttgtgatgagcgcaatgagaattgcgatgaagaggccgtgaaaagagccaaagagctggaaaaaagagtgaacgtgttttattccaccggggaaacggtggacctggtagaatttatggaatacctctacgattacggaatcaagagtatcatgctggagggaggctcaacccttaactttagcatgattcgtgacggtttgatagacgaagttaagatatgcattgcccctatgatcgtgggtggcaaggacagtaaaaccttcttcgacggggatggctttgattatatgaaagacgccgtccagttggagttaattaacagcttccccctcggcaaggacttcattatggagtataaggtgctgaaatga

SEQ ID NO: 3224 - DNA, 147 bp, synthetic construct
  source 1..147: mol_type = other DNA
atgggcaatatggccgaagcacggcgaaagatgcatgaacgcgacgagaggatcaaaaaggagaacaagagcgatgtgaagaagataagaaacttctttttcgggtgttgcgacaacaaagagaaaaagaaggtcaaagagcactga

SEQ ID NO: 3225 - DNA, 645 bp, synthetic construct
  source 1..645: mol_type = other DNA
atgcacagcctgttcagtgatggagagctattgccttccgagcttgctcggcgcgctctggtcctgggacatgaagccattgcaataactgatcatgtggactactcgaacattaacacaatccccgagatcagcgctgccatcgacgacatcaattcaaattgggatatcacggtggttctgggagccgagataacccacgccccgaccgaaagcatccctgccctggcggagaaggctcgcgagctgggggccaagatcgtggtggtccacggggagactttgaatgagcccgtcgttgaagggaccaacttcgccgccgtaaactgtaaggaaatcgatatccttggccaccccggtctcatcacgaaagaagaagcagagctggccaagaagaacgatgtggcgctcgagatatccgcacgaaaaggccactgcctcggcaacggtcacgtggctaacattgcaagggaagtgggaaacgacctggtcatcgatacagacacacattctccagacgacattattacctttgagcggagtatcgaaatcgggttaggcgcgggcatgaccaaggaggagattctcaaagccactattgacaatccaagaaaaatactgaagaggaatggcatcgaaatttga

SEQ ID NO: 3226 - DNA, 1059 bp, synthetic construct
  source 1..1059: mol_type = other DNA
atgatctccgtattcgtgccgagccatatcactggctttttcagtattcacgacaatccagaccctctcttgaagggtagcctgggtgcaggggtcctcctggataagggggtgattacagagattgatttcaaagagaactttgatctcggcggggtgaatgataacgacctcaatctggactcgttgaacagcgacgagctgctgattatcatcaacggcaagagagacgagtacaacgaggtgatcatcctcaaaaccatccatctaatgaaaaaagcattggacaaagaagacatttccctgagcggcgtggtcatcaaccagatcatccaggtgcccatcggatgcggattcggcacctcagcggcctcagcacttggtgtggctatttccatcaatgagctattcgatttggggctttcgctggaagagtgtggccagttcgcccacctggccgaagttgaacttggcactggcctgggggacgtcatcgccgagctgtcaaagggaatcgtcctgcgcacaacgcccggggctccaggatatggggaggccaaatccatagttcctcatgagaagaccggcttcggagtctttgagtccctgaatgccgatttttacataatcaccaagtctctgggtgaaatttccaccgccagtatcataagtgatcccaagcacaagaagctcataactcaagtgggtgagaaaacggctgaggagtttaacaaaaaggacgatggaattgtgataggcagcaagttcaaaaacaagttcaacgtagctgtggacagcgaatttaatgaggaggaaaccattaaaaagtttatgaagtcttctcttttctttgcccggaagacaggcctcatcagcgacgagctcctggaactggttcacaatctccacggaaaggtgataggaagttctatggctatgctagggaacacattattcgcaattgccacggaggagcagaaattaaagctggaagcggagtactatggggaatttgatttctacaagctggaaaccgaaggcattaggatcatcaaatga

SEQ ID NO: 3227 - DNA, 534 bp, synthetic construct
  source 1..534: mol_type = other DNA
atgatccgcctgagttatgacatgcaggtgtatcgaaaagacttaagagaagtgctaaaacggacggacaatgtagttgaactcggctgccacgtgggcaagacctccgagctgattctgtacaaactgaccactggctctctgattgggatagacaatagtccggaggccgttcagcccttggagaggctctcattccatcatgaaaactttactcacattatcggggatgtgcgccggcacgaggtgcttaaggaagtcaccgaactcataggccagtgcgatgtgctgtccattgacctgggtggtggataccacccagacacggtctttaaagtgtactacatctgggcgagcaccctgaagccaagggatgtcttgatcagaaaccagggacttatcgacttcgtcaactcggcaatcacaacagaggatatgatctccgagcacggctggctggagagctgtggggaccagggaatcccccctcaaattaaggagttcagcctctggacagataagctcgatgactga

SEQ ID NO: 3228 - DNA, 717 bp, synthetic construct
  source 1..717: mol_type = other DNA
atgaaaagatccaagaaactgatcatagccatcctggttgtcatcctgctgggccttcttctcgccatagccggatacttcgtggggggccccgacctgagtcaggaaaacaagacaattctcgtcctggctgcggataagtacgagcagcctaacgggggttgtgatatggcgtacctagtgcgactcgagaatgggagtttagctaattacactccggtgtatcccgggggcatgtaccacccatcacagtcggctcccggcaacctgcagggcaatatgctgctccacgactgcctgtggaacggagttgaagacggtatgcaatacgctaaggagatcgtggccttccataccggcgtggaagcagacgccgttgtagtcctctatgacgagggcgtggacaatgtcttggattccatccgccctattgagattgatggagagccaaccaacctaagcgcaactgacatcatccgggaaaacgataactatgcaggttataaggggaacgagggggtaaccggaaccatgagcagggcagacgctgtgatggtcttggtgaaagcggtgtccaaacaggccaaagatccagccaagaagagcgccatgctccacgcagctcttgacgagtacacgaagggaaatattgtgatgacgcccaaaggatcattcacacggttgctggccacaaagggcctggaaagctttgcctga

SEQ ID NO: 3229 - DNA, 1329 bp, synthetic construct
  source 1..1329: mol_type = other DNA
atgaaagagtacaaaatcgcgattatagggggtgggcccgccggcatgatagctgcaatcagagccgccgagatcctgggccccaatgccgtgtgcattctagagaagaatgaaagcctgggcaaaaagctgcttctgacaggcggaggccgctgtaacataaccaacaacactcctatccacgatcagctcaactattacaataaaaacaaaaacttcctcaagcactcactgtacactcttccacaggacaagctactggccatctttgaagagaaagacctggaatttcaccaagaggacaataaaagggtcttcccagacagcgaagatgcccacgacatcctggacattttagaggaataccttgaggagttaggggtagatgtgtataacaataccccaattaatgctcaagacatcgagcatgagctgaatgagaggatggagcccgtgttcgagatcgaaaatgaaaagatcagtctgaatgcgtcaaaaattatcgtatctaccggcggcatcacctatcccaacacaggttcggatggggatggatataaaatcgcctctcacatgaatcataccattaccgacatcaagccgggacttgtcagtttcaatattgatgactttctgctcaagaccctttccgggctcactttggagaatgttgaagtgtcgtttaaggacaagaagaaaaagatctctgttaaaggggatatcttgattagccactttggcctgacaggccctgccattattgatttgtccaaccggttgctcgaaaaatccgacctgacggtccttgacgacaagctcaacctcaagagccgcgatgaaatcgaggaattggagctcttcacaaaccggattacaatcgacttcactcccgacctcaccgaggaagatataaagaaccagatcacgaaggacagcccgaagaacggcaagatggcgatcaagaactacatgaagaaatacctgccaaataacttcattgattatttcctgatgaagatcgacatcaatcctaagaagacgatggcaaacattactaaaaaggataagaacaaattggctgaaaacctgaaacgacatgtgtttgagatagaatccctggagatggacctggcaaaggtgaccattggtggagtcaaatcaaaggagatagatgccaagacactagaatccaagtatgtggagggactgtacttcgcaggcgaggtgctggaggtggctggacctacgggagggtacaacctccagatcgccttcagtaccgggtacttagcaggtcaggaggctgctaacagcctgaaaaacgaatga

SEQ ID NO: 3230 - DNA, 1323 bp, synthetic construct
  source 1..1323: mol_type = other DNA
gtggattacctgctacgcgatcttcgccgaacccattacagtaaagacgtaaatccagacatcagcggggaggaagtgattataatgggctgggtccatgagatccgagacttgggcgggataatctttgtgatcatacgcgaccgggacggcctggtgcagattaccgcacccagcaagaaagtcgatgccgagatcctggaagagctaagggccctgcgtaaagagtctgtagtggccatcaaagggacggtgcaggaggcaggcaaagctccgaacggcgtggaaattattccaatcaagacaactatcctcaaccctgccaaacagcccctgcccatggaccccaccgaaaaggtcaaggctgagattgataccagacttaatagtcgcttccttgacttaagaaaagcgaacgtgagcagcattttcaagataaaggccaacatgtttaaggcagtgcgccagtacttcgacgagcagggcatgattgaaatcaatacgcctaagctggttgcttctgccaccgagggaggaacagagctgttcccaataacatactttgaaaaggaggctttcttgggccagtcgccgcaactctacaagcaaatgatgatgggagctggcttcgacaaggtatttgaaatcggccagatatttagggcagaagagcacgacacactgcgacacttgaatgaggccgtctcaatcgactgcgagatctcctttgccgatgatgtggatgtcatgaacgtcttggacggcatgattacccgggttctccagtccactaaggaaaattgtgcaaaagagctggaaacattagaatacgacctcagcgcgatccctgaaggaccattccccgaggtcaaatacgacgatgctgttgatattatcaactctaaagggatcgatatggagtggggagaagacctgtcccgggaggcggagaaagccctgggagacactcaggagggtttttacttcctgaccgattggccatccgccatcaagcccttctatgccatgccctatgaagacaggcctgaaatcagccatgctttcgatctgatgtacaagaacctagagatctcctcagggtcaatcagggtgcaccaatatgacctgctcgtgaagcagatgattgagagggacctcaaccccgatggattcggcagttatctcaaggcatttgaatatgggatggcccctcacgccggttggggggtcggtgccgaccggctggcgatggtgctgaccggtgtggagaacattcgggagactgttctcttcccaagagatagacacagacttacgccgtga

SEQ ID NO: 3231 - DNA, 1281 bp, synthetic construct
  source 1..1281: mol_type = other DNA
atggaaattctacggtatgagcgagaaactgccgatgagctcatcaagaggtcgcaggctgacatcaatgaaatcttgaacatcgttcaagacatcctctccgacgtaaaggagaacaaggatgaagcggtgaagcgctacactgccaagtttgacagatgcgagttagatgatctgcaggtgtccgacgaggaaatcaagaacgcttatgataatctggatactgatctcatagacgccctgaaaagggcttcccaaaacattgaaaagttccacaaggcccaaatcccagaggagtggtccatggaagtggccaagggtatcacagccgggcagataatccgtccgatcaacagcgtcggctgctacatcccaggaggccgggctgcctacccaagttccatcctgatggaagtgattccggctaagatcgcgggagtggagagaatcatatgttgtacccctccaggagccgacgggcgcatattggacgccattcttgtagcggcagacctggcgggagcagatgagatctacaagtgcggaggcgcccaggccatcgctgcaatggcctttggcacagagagcatccagaaggtggagaagattgtggggcccgggaatgtctttgttaccggtgctaaaaagcttgtctatggggatgtggacatcgagtttcccgcaggccctagtgaggttctgattctggcagacaagacggcgattccagaataccttgcccacgacttcctatcacaggccgagcacgaccctgaggcatcatgtttcctggtgaccgatgacgagaaaatagcagaggaaagcaacgacctgattgagcgcttcactaaggaagctgtccggaaagagattattcaggagtccctggaaaagcacggacatataatcctctgcaaagatatggaagaggccattgaatttacaaatacctacgctcccgagcacttgatcatttcaacggaagacgacaacgccatcctcgataaaatcaaaaatgccggaagcattttcctgggcaaatactctcccgtggcagccggtgactacggctctggcaccaaccatgtgctgcccacaagcgggggggctaagatgtacagtggcctgagcaccgaaagcttcatcaaaaagcctaccgtccagaccataacgaaagagggtattgaggagctctcgaagacagtcatccccattgcagaatatgagggcttctatgctcatgccaatagtgtgaaagtaaggttagataaaaacgagtga

SEQ ID NO: 3232 - DNA, 306 bp, synthetic construct
  source 1..306: mol_type = other DNA
atgtacaaagacgaaatgattcaactgcaccagtttctggtctatgtcctaaaatatctcgacaccgataacaacgcccacgagtacattgaggagtacctggctctgaacataagcccccatcatatccaccgcacaaaggcggagcacaaacaggcaatcttcgtgctctcaaacacgatatccgaggtgatcttgcacaaggaagaaggctccatcccaccgaatgtaagcaatgcactcagggaccttgtgagacggtctaaaaaggaactgaaggccgccgaggccgctcagagtaagtga

SEQ ID NO: 3233 - DNA, 1389 bp, synthetic construct
  source 1..1389: mol_type = other DNA
atgtctacccgtaaagtggtttgtctagtggatggggagcattacctccccgtgacccggtctgctgtaaactccatcaatagcattgaccatatcgaagtggtggccctcgttttcatcggcggaactgaaaagctcaaattaggtgatgaggaagagtatagcgaactgctcgacacgcccgtctactttggcaaggacaaaaaccagatcccatataaactgatcgaagatgtcatcaaaaagcacaacgccaatattgtgatggacctgagcgatgagcccgtgctggactatgacaaaaggtttaagatcgctagtgtggtactgtcctgtggggtaatttacaagggggctgattttgaatttgagccactgacccaatatgagataatgaaaaagccttccctaaagattctgggcactggaaagcggataggaaagaccgcagttagtggctatgctgctcgactcattgacaagaataactataacccatgcatcgttgctatgggtcgcggcggacctgaagagcctgaagtcgtgcacgggaatgagatcgaaattaacccggagtacttgcttgagcagtcgaacaagggcatccacgcagcaagtgaccactgggaggatgccctgatgagtcgggtcctcacaatcggctccagacgctgcggcggcggaatggccggcgatgtctttgtcacaaatatggacaaagccgcgaaaaaggccaataagcaggatgcgaaatttgtgatcttcgaaggaagcggtgcagccattccccccattaagaccgacaaatccattgttctggtcggtgccaaccagccaatcggaaatattctcggatacttcgggccctaccgcataatgctgggggacttggtgatcctgacaatgtgcgaggaacccatggcaagcaaggagaagatcaaggaaatcgaggacttcatccacaagatcaaaccagatgtggatgtgatatctacagtcttcagacctaagccattgtcagacattaacggcaaaaaagtgctgttcgtgaccacggcccctgaagcggttagggacgtgttatcaagctatcttgaagagacgtactcctgcgagatcgtggggctgagctctcatttgtcaaacaggcctctcctgcaggaggacattgagaaatacaaggatgacgtcgactgcatagtgaccgagcttaaggccgctgccgtcgatatcgtcactaaggaggccatcgaatccggcatagagctggtatactgtgataacatcccggtgcccataagcgatgactacccggacctttcagagtctattctaaaggtggtggacggggcaattgaggagttctcgttcaatatgctgctggactga

SEQ ID NO: 3234 - DNA, 1062 bp, synthetic construct
  source 1..1062: mol_type = other DNA
atgatgtctcaagattcaaacaagaatgatataaattcatacgatttcccaagcagggtggagaaggctttaaaactgattcacacagactccttcaaagcactcgattattttaatgagattctggatgactttttcaagttcacccctgatgagatcaaggaaaataacttaagttcccttataataaacagtctcaacggcaaggggtcgatcctgaatgcatttgataaaatcgatgaggccgaagaatgcttcgacatggtactgaacgactttgacagccaggacttcacgtccctaatcaacaaggccctgattctgagaaagaagggccacttggaagaatcgctcgactactacgacgagatcgccaaatactacccggacaagaaagagcttattctggcgatgaagagtgaagtctatggcgaactcaaaatcaagctctctgataccgatctggatgattatagcatcgaagctaaggacctgattgggcgtggtcttgcatcccacgagaacaagattgtgcttgaagccctggattactaccagaaagcgattaaagccgacagtagctgtaagtacttggtcctgagcctgatggatgatgttaaacgggagtttttcaagctctttctctacgaggacatcgacatcgaaaaggacgagatctcaaagaaaaagggcgctgtgttgcattacctattcattcagaacaatctcttctatgcctacatgctaaatgaggagatcctggaagaaaacaagaatgacttgtttgccctgaacgcaatgggaatgatattcttctatctcgacgactgcgacttgtctatccgctatttcgaccgctgcaacactatagacgagaagtatctttacccatacctgaataaggccatcgccctcgctagggctaaaagattcgatgaggcgaaagagtccttcgggaaaatcaagggactgcccaacctgatccgggaccccaacgaggaggagctggacatttttaaacgaacaatcattagcaacagcatctattccctgggattttga

SEQ ID NO: 3235 - DNA, 441 bp, synthetic construct
  source 1..441: mol_type = other DNA
atgtcgcacgtggaaaagtcattagagctttttgaggccaagtttaactgcgcccagtccgtgttctgctccttttcaaaagagttcggcctggacgagaagcaagccctcaaaatcgccgcttgtttcgggagcggtatgcggaagggcgaagtctgcggagcgtgtagtggagcattgatggtgcttggtctgaagtacgggcagagcgaactcggcgaccgcgatagcaagctgaaaagcgacaagaagtgcacagacttcctagaggaatttgagagagccaacggctcctacatttgcaacgaactgctggggtgtgatataaggacggaaaaaggagttaattatgctaaggagaataacctcttcatcgagttctgtcccaaattcgtcgagagtgcaaccctgatcgtagagaagattctgaaagaggaatga

SEQ ID NO: 3236 - DNA, 1080 bp, synthetic construct
  source 1..1080: mol_type = other DNA
atgggtgatagtttgaaagtgatcatcgatgcagcgaacgtggctcactaccagaaaggggaaaatagcaaggctaaactgaagaacatcaccttggccgtgaaggccctggaacaggggcaccatgatttcctgattatagccgacgcctcactgcgtcacaatattgacgataaggacactttcgtccgcctggttgaagatggaatcatcgacgaggtgccgatcggaaacgtggccgaccactacatcctcgacctcgcgtatgatgagaacgccaagatcctatccaacgataaatttcgggacttcatgagtgaatttccagacatcaacagcatgaggattcctttcagcataaaggacaatgagctgatactgggcaagacaaagaaaccaaaaaaggtgaaaaatctcctgcagaacatctgcgatgaaatcttaaatgagctcgagcgcaagcggtgggtggtttataagggcaaggagaccacgaagttcacccctctcaatgtggcaaaacaagccattctgatcctggaccagagcgaaagggacgatatgtcctctaaaatcgaaggcatattttcaaagcttccgatgtttgacaaggtcatggagatggtggacgacgtagagaccagcgtcccttacgtgattttcgtactcgtccatcccaaggactacaaggctgccgtcaaggacgcaggcaatattagcgtcactgtggcagataggttacgacttgttcacaagcccttgattgctgtgagaaatgacctctttattaagccagggtacttcggactaaacattgtccttacagatgaggtggaagatatccctccattcaacatcgagattcagacgaacacctacgatgaggtattcatcaagaagaatagtagaaacatagccagcacaatcgctggccggctggggtcctggaagttcccctttgttagcgtgaagcccaacatgattctggaaaaacccggtgagtttgagatctatctggagaagaactccaaaaagaaaaagaaagataaatcgaaagacaaagacaagaagaaaaaatga

SEQ ID NO: 3237 - DNA, 1203 bp, synthetic construct
  source 1..1203: mol_type = other DNA
atggctaataacagtgtcctcagacgtatcgtgtctctaattaccaagcacaacatcctttcgatagggactaagtactttcctacgacagagctggaaacagagtacgtcgatatgttcaattatacacaaacaatgctgatggagatcgacaaagcgaatatcacgacagaaagtatcttcactaacctagttagggatgtgggccgggaaaatatccccgaaaaccacagcttttacgaactgcttcccgctcagaacaagatagatgaatacgccctcgttagcaagatcatcatgggaagtgaccggtacatgtatgtggagctgagcgagccttcctacatcatagattacttcaccgacattatcctgagggagaacggggagatcattgagcgcagcgaaacagagatcgtgtcacgactgatgtctaaaaacgacgccatcagaatagccatcaagctggtcgggattggactggataacaacattcgggtcagggcagcggccggaatgactggcgctgcagccattgaaagatccatcaagttcaataaggaggtgggcgatgtgccgggtgtggccttcaccaaacttggaggggagtatgcccttgttctcgacaccccatttaaactgggtcagtctgaacatgcagagtatcagcattacctattcatcgacatagtggactccacgaatttcatctcaaagcacggcaaaaacaaactcgttgagctgatgaccagcgtcaaggagtttatggaaaactgtgaagggcacattgagggctaccgcgaaggtggagacgacctgatcgctcggttcccatccaaaggagtggccatccgcgcaggccttgactgcgcctggttcatcttgaataatggcgccaaggtcaagatagggattggacgaagccgcagagaggcgggcgagcgggcaaacattgcggagggtattaaagggtttggggccttgactctcatcgtctttgatctcgcaaacggcctgtatgcctattatgtgccctcagacttttccaggaccctgtgcgagctgttcaccaccaagaaaggcaagctggtaactgctttcctgctcgtattcattctgtgctatttattggctgtgctcggctttggcctctacggaattttggtgtttattatcgtagtggcttactacaccttaaagtga

SEQ ID NO: 3238 - DNA, 306 bp, synthetic construct
  source 1..306: mol_type = other DNA
atggccaatgagggtggcggacacctcaagactattctaatgattatcatcctcatagcttttatctgcggtcttgcactgggcgtcagtgtcatcatgggcggggatgacaactcccagaccgagagcgagggagtgcactacgtgaacgtgaccaaaaacattactgaatataatgagagcgggaacctgatcgaaaccgaggatggcacacatatagagttctcgtcttacagcgacaatgtaacggaaggagaaaacgttacagcctacaactcctcaaccgacgcggggaatctgttctga

SEQ ID NO: 3239 - DNA, 1194 bp, synthetic construct
  source 1..1194: mol_type = other DNA
atgtgcctggtgaatggagtgcgggctgcagggagccgccagggcaagtacggcctagcagttatcgaaagcaaagacagcaatgcctcggccgtattcacatcaaataaggtagtggcagctccggtgattcatacaaaggagatgattaaaggcggtaagataagtctggtcgtggccaacagtggaaacgcaaactgcttcactggtgaggacggaatcgtggactgtgacaagaccattgattttgcgtccgggatcacgggaatctcaagatctgagattgctacggctagcaccggtgtgatcgggcgaaagatgcctatggacattatattgccactggtggaagagtccatatcgaaactagagcacagcaatgaagcatctacagatgcggcaaaatccctcatgacgactgacacctaccacaagcagtttgccgttgagacaagtattgacgggaaaaaggtcacaattggtggggtcaccaagggagtgggcatgattgcccccaatatgggaaccatgctttgcttcctggctacagacgcgagcatctctgcggaatatatcaacaaggccttaaaaacagctgtcaataaaagcttcaacatgattgtagttgatggagatgagagtaccaacgacacggctatcctgatggcaaacggcaaatcaggggtggaggtggtcaacgatggcgagatcaacccagatttccaggaggccctggacttcatctgcattagcctggccaagatgatggctcgggacggcgaaggggccaccaagtttatcgagtgtaaggtgaacggggccaaggatgaaaatgatgccattctcgctagcaagtcagtcatcagttcctctctggttaagtccgctatctttggcggagaccccaactggggcaggatcgtggccgcagtgggctactccggctgcgagatggaccagaatatgataactgtgattatctccgatgacaatggaaaggaagccatcctggtcgataagggcaaaatcttggccttcgaaggtacccccaacctcgacctggccgaaaaaatcatgcaggagaaaaatataaacatccttgtcgatctctatcaaggggacgcctctgccaccgcgtggggctgtgacctcacctatgattacgttaaaataaacgccgagtacactacttga

SEQ ID NO: 3240 - DNA, 642 bp, synthetic construct
  source 1..642: mol_type = other DNA
gtgaacgattacctgaacaactccgatacgaatgacgcccttgtcaaactccctgcaaagcaaataggaaagaatgagatcggcaccgtgtcaatagagggcccctatgggaatacctcctctcccgttaaagtggcatacattctagggcagcacccacgcgaatttagcgctcacgacgccatctactacgcgttacaaaacaacagtaatgaacttaactactcatactacgtgtaccggatcaacgtcaccaacgaaacagccgactttgagcagagcaggatgaatgggcagctgttggcacaggagttcgtggtaaacgatagcattaacaagagctatgacctggttatcgacattcactcgtccaatggaggctatatccaggacccctatatcttcgctcctgtctctagcgacctgctggcatacgatgctgccaataacattacaaaggccttgccttatgtcacttactatgagccagcgagctataccagtccacagtactctactattcccctcgaagagggtggaatagcctccatcatcttcgaaatgagaggcaatccggacaacagtctcgagcatcaggctgatgacttcgtaaaggccgtggataaactggtgctgaactga

SEQ ID NO: 3241 - DNA, 1185 bp, synthetic construct
  source 1..1185: mol_type = other DNA
atgattatcaatggaaaacgttccctggcacacgttgagaaagtagcgtggataaagccaatcgaaggagccgacaatattgggctgatcggcgtccttggctggacatgcattgccaagataggggagtttaaggagggggaccactgcgtgtacatcgagatcgattcaaaggtgcctgagaaggaatggtccgagttcctgagagctaaaaaattcaaaatcaagacgatgcgcctgggaaagttcaaggtgatctctcagggtctcgccttgcctctggacaagtttgatgtggaaatccctaaaaaagtgggcaccgatgtgaccgagctgctggagattacctattccaatcccaaggacatcaagcggaaaagcgatgggcccaataaatacgaagagatggctaggcgcagaaaggcactgttcaggaagccctgggccaaatggctgatgaaaagggaatgggggaagcgcctcatgtttttcatcttcggtaatgagaaggacggttccaaaagcttcccgaagaagtttgagtacgtgcacaaaaccgaccaagagcggtgcgagaacatgcccgacgtcctcaaggacaagaccccattcatccggacacagaaatgtgagggcagttctggcacattcattctggagctgactaacagcagacttggaaaaagggaatacgagttttatgtatgctcacgcaacttgcgggtctttgaggatgaaaacacggacttttgggatgtggcagttaaatatgacatcgagaacaagctgaaggattatcttgaaaagcacaaggactgctcttatgtcgcctggcagggagaagtctgcggaccaagtattcagaacaacccccacaaactcagcgaaaatcatttgttctgtttccatatgattgacagcgaaaagggcatgtttgacatccgggaggcgaaagagctatgggacgagtacgaaatagaatcggttcctattgatgaggaagagtatatcctcccagatgactttgaggagtttaagctaactgccgatgggttctacgacccggaggtgtgtgaaggccagaagaaatgtcgaagagaaggcttcgtgtactacaagacaactgatcccaacttcagtttcaagaacgtgagccgaaagtacctcttaaagataggcgaatga

SEQ ID NO: 3242 - DNA, 612 bp, synthetic construct
  source 1..612: mol_type = other DNA
atggggaacaaaacgggacttctccccgctaacggccatcgcatccagggtaggtccagcgagagcttcctggacgctcgggaaattatcatggaactaggactggaggggaacgaagtgtttatggacgccggatgtggggacggacacgctgcaatagaggccgtcgacatattggatgatgacgcaacaatctatgccgtagacatctacgagccgtccattgaggaccttcagaaatttgcagttgaaaaggggtacgataatctcatccccatatgcgccgatatcccagattacattgacatcgatgatgatacagtggacatgatcctgctgattaacgtgtggcacggcttcaaggccacccggcgaatggacgaggccatcgaggagctgaagaggatcttaaagcctgggggcaagattgcgatcatggactacaagaagcaggaagcgaaacacggtccccccataactgtgagaagcagtccagaagatctggaagaggtcttcaaagagcatggcatgtgcctgttctcgctcaatccagacaccggcgaggacattcctcaaggcaagtcacactatttgattatctttcagaaatga

SEQ ID NO: 3243 - DNA, 390 bp, synthetic construct
  source 1..390: mol_type = other DNA
atggataacaaaatcaaagccggcattgccctggcgatcatcgtgctcgtggccgtcattggcttttcattcattaacgagagcaacaatgtcgtaaaccaactgtcacccctgaccgagagttttgactactccatggagccgatgacaacttgggatgattctaaaaaggaatactccttcaatcagaacatcagcagtgcaaacggtaaggactacaaggacatcaccatcgacattttgatgtataacgacggaaaatcccttgataagcacaccagcacaataaatagcactaaggacgggtcgttcaatctaaagttcacgcagcggctcgaaggggagccagacgaattttactataatgtgacaaaggctaccgagatatga

SEQ ID NO: 3244 - DNA, 1029 bp, synthetic construct
  source 1..1029: mol_type = other DNA
atgttcaaggtaagcaaaagcatactcatcgtgtgtctggtgtccctgttcctcctggttagccaggcgagcgccgccgactcgaatggcttgagcatccgcgatattaattcagtggatgaaaactacaatctggatgccagttacctggactccctccaggacagtaatggcatgcactccgactccagcctaaacagcaatggcctggacgataagtcaaactatgacaagacttcaatcagtcagaaccagacatcctcgaacctcaaggacaatgatctggataataatgatggagagagcgagattattgaggaggaagctaaagacacggaaggtgtggtgatggctggggacagctacagctgcggtcccgcttcccttgcaactgccctgaaccggctgggcttgaacctgagcctctctgaggtatcccagcataccaacaccagcaaggacggaaccaacatgcaatccttaatcgacgccgcagggtactacaatttcagcgcagtgggagtggagatccaatctaaagacctggcggaaaacagtatagtccacttggacattgatggagctgaacactggactgtcgtgagcaaggtcacggaggagagtgtctttctggccgactcaacaagggggaacatcaatatgagcattgatgagtttaactccctcttcagcggcaaggcaatcctcttaagtgaattgaacaagaccaacgtttcaaatgtgatatcgaacaaaaacattaaggttctggatcagtcccagtgccttaacgttaaggggaaaggctgggtgcgagtgcttgtgggttacaagaccgagtggcggtacggcctgatcaacacatattcatgggtgctaagaccaaaagtcatcaatgggcacgtatcctattctgcctgggaatatgtgaaggtcaaacatcttagttggggaaagtataaggtcaaagtcccgatctacaaatacaagtacatcaaaaaccagtatgaggtgaaaggcaagaagtga

SEQ ID NO: 3245 - DNA, 879 bp, synthetic construct
  source 1..879: mol_type = other DNA
atggaaagcattaacctcctggtagaagccctaccctacattaagaaattctacaacaaaaaggtgatgattaagtatgggggccatgcaatggtcgacgctgacgccatggcttcaacagctcgagatactgtgctccttaaatatgtaggcatgcagcctatcgtggttcatggaggcggtccagagattaccagatccatggaaaaactaggaaaagagccgaaattcatcaaaggccttcgggtcactgatgaagagacaatagacattgtgaagatggtgctcgtggggagcatcaatacagatatcgtctcgcagatatgccaccacgacggcaaaggagcaggcctgtccgggaaggacaacaagcttatccaggccagcaagaccatgcacgagattaaggatgacgacaccggtgagatcgagcagattgatctggggttggtcgggaaggtggacaagatcaacccggagatcctggagatgtataccgaaaatgactacatccccgtgatcgtccccatcggcattgccgaaaacagcaagacgctgaatctcaacgcggatactgtagccggtgccatcgctagtgaagttgatgcagagaaactgataattctgacagacgtgccaggggtcttgagggaccccaacgacccatcaacgctcattcaaaagatccacattgatgaggtgcctcagctgatagaagagggcataatcagtgggggaatgatccctaagatcgagacctgtgttgaagccctgaataatggtgtgaaatccgcgcatattttggatggacgcataaagcacacgttactgatcgagatctttaccaaggacggaatcggcaccatgatctacaagtga

SEQ ID NO: 3246 - DNA, 735 bp, synthetic construct
  source 1..735: mol_type = other DNA
atgagaaaagtgtttgaaagcatcatcgaagctcttaagtacccattccgggattggaaaaacattatcgtaattggctttcttctattaatcgcttctctcggaaggaagctgccttttcccgaggacccccagcagactgttgtgtttataggggccctcctgatacttttcctgcagaccggatacgggtcaaagatcgtgtacagcggcttgaagggggagaacattcctccgaaactacggcccatacccaaactgatttgggaaggttttaaaaagatcatcatcatcatcatctacgtccatattatggtcattttcattagtgtgggaaaaacccagctgagcgctaataatatcccaattgccataatactctttgtgctggggggcggaacttatctcttgatggtggggggtctcttgaaccgctatttccaccacggcaagtttattaaggcattctatctgaaggagatcattgccatcattaagaagatcggcttctgggacatgatatccatcgtcatatgtgccatgatctctcaaacactgacgatctccacattcatcaatctggttaagggcatgttcaccagcattgagctggtgctgtgcatcattgcgttcttcctcgcaccaattgccctcatgtccaccaagcgcctgatctcactgaaccttcgaaggatcttaagttcggacgaagatctggagaaatttgcgttctga

SEQ ID NO: 3247 - DNA, 744 bp, synthetic construct
  source 1..744: mol_type = other DNA
atgggaaaactggatggtaaggtggccatcatcaccggagcaacctccggtatgggtagggaaagtgccaagctcttcgctaaggaaggggctaaagtggttgtctgcggacgaaacgaagaacgggcggccgctgttgtggatgacatcaaggccgctggcggcgaagcgatatacgtgatcgtcgacatggcaaacctggacgaggtgcccaagatctatgaggcaaccatggatgaatacggcacgattgacatcctattcaacaatgcgggggtgctgagcatgtcgccattgatggacctgactcttgaggagtggaacaaggtgtttaatgttaacgtgacatctgccctcgtcctcacacagctgtgcgtacctgtgatgaaggagaagggcaaaggaacaatagtaaatacctgttcagtcgcatcctttggcgctcaccatggcttcgccgcatacgtggatagcaaacacgccatgatgggcctgacccgctccatggcatgggagttaggtcccgagatccggtgtaacggcatcgcccccgggcttatccacacggccatggtggatagcattggcggcccgggagccctgcagaatatgattgaccagtgcccagtcaagagatgcggggaagggcaagacattgccgagctggctctgtttttggccagtgacgagtgtactttcctcgatgggcagattattaaatgcgacgggggattcgagatatga

SEQ ID NO: 3248 - DNA, 1485 bp, synthetic construct
  source 1..1485: mol_type = other DNA
atgctgaacattaccacatttcttgatgctaatgcctgccgcctcgagaaggaggtcttttattatccaaaccgggagctcagatacaattcaaaagagctgctgaccatcgtatcgggcattggacagagcctgaaggataaaaatatagaaaaaggcgaccgagtgctcatctacttgaacaactctcccgaatacctgttcagtctgctggccatatggcggatcggtgcaattgcaatccccaccaacagaatcctaacctctgccgaactggactacatgattagtgattccgacgccaagctgattatcacagacgacgaagcacgagaaaccatcaaggacctcaaaatcaacagttacatcatcgaggactgtgagagctttaaagatagcgaggtcctgcctgccgaggaaaccgagtgggacgacctctgccagctccaatacacctccggcacaactggcaagcccaagggctccatgctcacccacgggaactggttcacggcaatccacaatgcctgtgacgtattgacgtataaggaagatgacactttcctctgcatctaccctatggctcatgttggtattctgtgggcgattgctgcgctgagagccggcgccttatgcattactatggacttctttgagatcaacgagtacttacggctgtgtgaagaggagaaggttagcgtgctctctgggatgccccccgttattcacaccttgacgaacctggaagaggaaaaacgcgagaacctatccacagtcagagagatcatcagcggagggggcccactgcacaggaagatctggaaaaagttcatgggacagtataatatccccatcattaacgcttatgggttgtccgaatcaatcgtcatcggcacaggcactgtaataaggcctgaggactacgctaccgcagaccggtacgaaagcgtcgggcaccctgtgtgcttttccgagctaaagatcgtggatgaggatgatcctaacaaaacactggataaatatgagcatggggagatcgcgctgcgcggaccggccatagccaagggctactggggcatggagaaggaaacaaaggaatcattccttgaagacgggtggttcctcacgggggatatcggttacatcgatgaggacaatcgtttgttcattactgaccggaagaaagacatgattgtgatgagcggatggaagatctatccgaccgaagtggaggaaacccttataaaatacccgaaggtcgatgagattgccattttcagcataaatgacattcataggggagagcttccagtggctgcagtggtgtggaaagaggacgaagatcccgagggactgctggaatactcgagggaatatctggcccgctataaggtgccacggaagatattcactatggatgagctgccacgagtgaatggttggaagcttttacgcagggagcttagagagatgtttagtcagtga

SEQ ID NO: 3249 - DNA, 999 bp, synthetic construct
  source 1..999: mol_type = other DNA
atgataaaaattgcccggattgatggggacggcatcggcaaggaggtgaccgaggcaggcgtggctgttctcgaatccctggacttgaacatcgacttcgtcgaagctgaggcaggtcgagagtgctttgataagaacgggacaaccatccccgaggagaccataaggatcgctcgtaacgccaaggccaccctatttggcgccatcacttccacacctggcgagaaaagcccgattatcaccttacgccaggaattggatacctatgccaacctgaggcccattaaaagcttcaagggggtggactgcctctttgatgatctggacttcctcatcgttagggagaatactgaaggactgtacagcggaaaggaaagactggaagaggataaggccatcgcccaccgggtgattacaagaaaggcgagcgaacggatcagccgcctggcgtttcaagaggccatcaagctgaataaggaatcggtcacttgcgtgcataagtccaatgtgctcaagaaaacggacggcgtattcaaagactcattctacaatgtggcaaaggactatccacagataaaaacaatcgactactacgtggatgcaactgcaatgtaccttttaacgaagccccaggagttcgatgtgatcgtaaccagcaatctctttggcgacatcctgtctgacgctagtgcgggtcttgtaggcggattgggccttgccccaagtggtaacattggagacaagcacgggctcttcgagcctgtgcacggatctgctccagacattgccgggaacaacatctccaaccctattgctatgatcctgtcagttagcatgatgctggaatacctgaatgaggattatctggcaagtaaagtcaaaacggcctgtgaaaatgtcctggagaaggggaaagtcctcacacccgacctaggtggaaacgctaagaccatggatgtggccaacgaagtcattaaagagatagagaaactggactga

SEQ ID NO: 3250 - DNA, 468 bp, synthetic construct
  source 1..468: mol_type = other DNA
atggagaaaagtatagacgagctgattctcgacctgaaggacgaggacgactttgttcgagaagaggccatcggctcacttgaattgaaaggggaggaggccgtctgtcccctcattgaggcgttaggccaaaggaacaaggatattaaaataggagccgcgcaggtgctcgcagctatcggggacaagcgcgccatcccagcacttgtggccacgctgggcgacagaaacaagttggtgcgcagagaagccagcaccgcactgacaaccatgggagatgaagctatcgaacccgtgattgccgagctggacaaccctaaatggcgggtaaggggcgcggcatgctgggtcctgggtgccctggatgctaaggaggctctgccgaagctggaagagctactcaatgatgaaagctccttcgtgcagtacggggccaaggatgctatcaatcggatcaacaatggatga

SEQ ID NO: 3251 - DNA, 363 bp, synthetic construct
  source 1..363: mol_type = other DNA
ttgggcctgtatgagcacgacttgaatgatctcctgaaaagcctggaggacaagggacttgtccactatgagggttcctacgtgcagctgagggatttcgaaggggtaataaacaccgtggacagtaaagaggacgttttaacggcggaactgaatcagaaagagaaaaagtcctttgaaataatcaagtcactcgccgatgagaacaacctcgtgagccgctacgagatcgagggcaatctactctacggcgatctgaagctgacagacttccggatgtaccatatcattctgtctctcgaaaacaagggacttatcgaagcagtctacaagcacaacggggactattacaagattctgtga

SEQ ID NO: 3252 - DNA, 792 bp, synthetic construct
  source 1..792: mol_type = other DNA
atggataaggccaaagtgaacaacatcattttaaactacaacctggagggcgaaggccgaaccatcgtgttcatccacggactctcagacagcctgaactactggcgccccctccaggagagcctcaagggggattaccagaccctgtcattcgacctcagggcgcacggggagtccggtgatgatcggaaagagataaccatcgacctctaccagaaggacctgtattatctgctgaattatttgaacatcgaaaaagcggtactgattggcctctctttgggaggcaatgtggccctggactttgcaatcaaccaccctaagatggttgacggcctgatcataatgtccagtttctcggagttcagcgaccatctcaacgagatatttgacagctttgaagaggccatcgagcagggcttcgaagagttctttgatgtcattctaccatacacgctgcccgaggatgtcctaaagaagcacgaggtggaattggaatacgtgaagaaggaaggggccaagactgccaacattgagggaatcaaagccgggatcaaggcaggatacagtttctccataactgacaaattaaatacaatcgacgctccgacaattgtgattgcaggtgctgacgatgagctgacagacctggagcttcaacggaaaatctatgataatattgacaattctgaaatgatcattcttgaggacaccaagcataatgtccttattgggaaaaatataagcagaatcctggatatcattaacgaatttatgctgaagatcgaatga

SEQ ID NO: 3253 - DNA, 495 bp, synthetic construct
  source 1..495: mol_type = other DNA
atgcgaataagtatgagcctgccaaaaaagctactggcggagttcgatgaagttctgaaggatcggggctaccagtcccgttcaaaagggatacgggacgctctgagcgattacattttaaggtatccctggatgaacgaaatggaagggaaccgcgtaggagtgatcacagtgatctatgaccatcattttacaggagtcatggaaaacctggccgacatccagcatgactgcatggaggagatcaacgccagcatgcacattcacatgacccacaagtactgtatggaggtcatcgtcgtgaacggcaatgtgacgcacatcagagagctcgccgagcgcatgatgaggcttaaaggggtggagcacgtgaagcttaccagtactgcaaatggcgagtcactcgacagagagccgggtttggaacactcccacagccactcgcattctcatctgattttcttcctcaagaatttcttttttctgttctcctga

SEQ ID NO: 3254 - DNA, 936 bp, synthetic construct
  source 1..936: mol_type = other DNA
ttgatcctgatcactctgagcttccttagagactacgagcggctggccgtgtttaaggaagcaattgacgagtttgctatttctaatctggataaggatttggattgttccaactcaaatggcgacattaactcggacgacgataagaagctagactgctctctggcgtacgatctgggctgtggtagcggagtgctcagctatctggcgagcgattacttcgacaagatcatatccattgagcaaaacaggtccattttcaaatgcgccaataagaacttaaagtcgtttgacaacattgaggctataaaccagaacgtgttggattttgacttcgaaaactaccccaaggccgacctcatcatctgcgagatgctggacacggccctaatcgatgaagaggaagtgcctatcctcaaccactcaaagaagtacctcaaggaaaacggaaaaataattccacaggggataataaactcagccgaacccgttttcatgaatatcgattatctccagtacgaggatgacgagtatcagccaatctacgagatccttggcaaaagtgtcatctacagtgagtttgaatttctggacgacattgacgaggacttctcttgtatcatcgagtttgaaatagacgataaatatagcgacaaaaaaacagatgcaagcttcgaagtcgacgatcggtgctccgataaaaccgactacttcaacaagagtaatgataagattaaggtcaatggaattaaactgacaagcttcaccaagctgaacgagaacatcatctgcgggcctactccgatgcttaatcccgctatgctggtgccattcgaagagatcgaggtaaataatggggacaaaatccgaatccgcctctcctatgtgatgggtggcggcgtcgagaccattaaaaccgaagtgttagacgtttga

SEQ ID NO: 3255 - DNA, 525 bp, synthetic construct
  source 1..525: mol_type = other DNA
atgctgaatctggatgagatcagtgagaacatcgacttgtttctcgaggactgcagcagcctgattgtactcgggatcggcaatgacatacggggcgacgacggtctgggcccctacatcatcaaccaactgactgatcttaaagagaatctaagcctaaaggagccacagagcttagaaaacgtccacttgctgaacgggggctcggtccccgagaacttcacagggcttatcaaaaggattgacccatctcatatcataataattgatgccactctcatgaatgaagagccgggatttattaaaatcgtgaacaaagaggacatctccaatgtgagcatttcaacccactccatgtccctgagctatctggtgaagtacctggaaatcgaaatcgacttcaagctcatttttataggaatccagcctaaggacatggacctgaccttcgaattgacggatacaatcaagaacagttcagataccctcgttgatctgctcttctccaagttccttaagatttga

SEQ ID NO: 3256 - DNA, 1140 bp, synthetic construct
  source 1..1140: mol_type = other DNA
atgaaagttctctttatcggttcgagactgtatgatgacctcgcttaccatgtggatgagctgggcatcgagagcataataacagagtcaaacgaggaggcccctcacctcgaccttgcaagcaaatactacattgtccccagaggaatggataagcccatggaggtggccattgaagagaaggtcgatgccattatccctctgatcggcatagaccccccattaaaggacctggccatcatgaaggagaaaatcgaaaaggaaaacaacattccagtgatctcatccaacttcaacgctgtggacatcgcgtccgacaagattaaaaccaaggagttctttaagagcatcgggttgaatgtgccagaggccaaggtcctcaataaggatgacttctccaacgagggggagttcctggagaaactcgggttccagttccccatcgtcctaaagcagggcgaaggacagggcggtaaagacatttgcataacaagtcagtttgaagatgttctccagtactttgaaagcttcaatcaggctctagtggaaaacttcatcgagggggcggaggtgtccattgaagtcatcggatggaatggggaatacttgcctctggtaccggtatacaagggggacactagtctggagggcatccacccgattaagcgactgcgctacggcccttgtgactttgaggcaatcgacaacgaggagttcaggcaattagccaaaaagatcgccgtgaacctgggctctgaaggaaccatcgatatggatcttatctactcaagggaagagaacaaggtctatgcaattgaaataaacacacggccaagcggcaccaggtatctgtcctacgccaccacgggacttagcccactggggctgctggtggacattgccgctggaaactttgatgtgaaagacttggaaaacaaaatcaagcattattacagtctggagatccccataggtgactatgaaggtcctgcacccaatgagcccgttaaggagtatgtaaatggcaatttcattgtgcacggcccgaaagggtatcaacggattactatccgcggaaatacgcgtgaagagacctacgaaattgctaaagagctcactggcaatgattaccggtcttga

SEQ ID NO: 3257 - DNA, 1074 bp, synthetic construct
  source 1..1074: mol_type = other DNA
atggacctgaattatatcatcgtactgtttgtgctcacatttcttgccaccgtggccttcacctactttgtcagacatactctgcgggatgccgacgtgtccgatagcccaattgtcagtgagcacaggcacaaagcagggactcccaccatggggggaatcgctttcctatttgccattctattcattgtgtctatctactaccggaacacaaacatcctcatagcctcctttatcatgctcacaggaggcgtgatgggtcttttggatgacctattaggtcttaagataaaggagtatcaaaaggtcgtgaagaatgtgtccgacagtgttgttcccataggcctgctggacctgggcccaggcgaggaggcacgagtgaccaccgacaaagctaaaaaacaggtgtatggctatgtggatgaaggaaaactggaaattgttgcggaaattccaatcaaatatgagccaagcgaaaagaccaagatcatcgtgcagctcctgcctggcctgttcctggcactgactggggtggtgacgaccctggggggcttcacgttaggcattctggcttacccgatctgcattatcgctattttgggttcaatcaacagtatcaatctcattgacggaatggatggattggcggccggcatcgtggcgattgcctcgttctcatgctgcatttacgcgtacatctgtggaaatatggatatgattcctgccttcgccatcttaactgggatatgccttggatttctggtcttcaaccgctaccccgcaagcatcttcatgggcgacacaggctcctttgtgctcggtacaggatacgccgtggctgtcatcctgggggacattccttacttcggggtgctggctctggccgttccgatcgtaagcgtaataataagcctgatgcacagggcacacattataaacctccccgttgagcccttgcatcacaccttgaactataaggggatctctgaggtcaagatcgtcctgagctattggctcctcacggtcctggtctgtgctatcggcatccttgcaaagctctacatcttcgcctga

SEQ ID NO: 3258 - DNA, 1620 bp, synthetic construct
  source 1..1620: mol_type = other DNA
atgagcaaaacatacttcctgaatgagttggcggatagcatctcctctcagaagaccttctcaatcgctcagctggccgatgccatcggaggcaagatctatggcgccgatgactacaagtctcccaatggttttacaggcatctttgagaccctgaacgaagctgtggagggagacattgtgattaggcattggattaacgggaaaggtgtggaaatcgctaatgacaaaaacgtggcatgcattattaccctaactccaaaggaggacgccctggaaatggcttcaaagctcgccttccccgtgattgtagtggataggatcgaatttgcaaacgcatttgcgctgaagtggactattgataacctttcccctaatactcaaagggtggtgataagtgggacaaacggcaaaagtaccagttcccatctgatttaccacattctgaaccactgcgggtacaacgtcttcacgaatactgatgccaaaagtgaatttaatacactcatcgaccctatggtggctaagctcatctccgagcaggtgatctcgaagcaggacttcgatgttcgcaagctggacagcgtcgccgacctaaagaacctggatagcgagggtaagccgataaataaaggcgcctttgactatatcgttgtggaggtcagtgaggtgcagggctggggaagcgaccttatgaaagatcacgcccaaattatgtcgtcagcaatcaatccggacgtaggggtggtcacaaatgtggccatggaccatatcggcttggtgaacaacatcgaagaggtgttccacgagacgtccgggcttgttaaggctataaacaagggaggagtggtcctgaactacgacgatgagaatgtcctggcgatgaaggatcttgccaacgacggggtcgacatattcttcacgtccatggaaaaggattcaatcctcaacaacgactatgacaatgacaagaaggtttatttcgacagaaaaagcaacgcgatagtgtacgataacaaaaatatcctccgctatgatgagctgccctttaccggagagcacttcatcagaaatattctcagcgcaatttccgcttgtattagcctggagattccaatcgaagacatctgcgaaggggtaaaaacctataatcctttaagccggcggttcacacgtttgtacgatgagccaattgttattgatgacttcgcccacaaccccgacggaatcaaaaacaccgtacgagccgcatatgacttggccgagcagtttgacaagggtgatctgtacatcgcatgtgccatcagaggctcgaggggtgaaaccttaaatggcctgaactcagaggccctggctctggtcatcaaggaactgcgccaccgaaacgacgatgatatcgaaaaggacgaaaatgtcaagaaacgggagatatacctaatcctttctagcagctgtgacctggtcgaccatctcaactacgtggaggactttgagcggggctatatctccttcagcaacttggataaggagcacataaaatacatccatttcaataagctctacggcgctctcgggtacattatgaaaaaatgcatatggaagatgatgctctattgctga

SEQ ID NO: 3259 - DNA, 1854 bp, synthetic construct
  source 1..1854: mol_type = other DNA
atgggggagttcgtgtttagttttttagaggatcaatttcgggacatctatctggactgcgcaaggatggataagaatctcattgagggagacggtgtggagtccattctgatcgcagggaggatcgcggagaagataacaaaagccatctttgtctttgaaggcataaaagataacgaagataatcagtatttgaggatagaaaagctttccaatgccaatatcctgccaaacaacattaaaaacgacctctcccagattcggatactccggaacaacgtctaccacaataccctgaacagtgacggaagcggcgggtttgcttcctacaacgcccccaaatatgttcagagcggagggttgcgcgactataagaccggcttcaatgaaatcaaggaatattctaaaatatctaaacagaactcgaacagcaactcgaactcgagttccaatagcagcccgaataacgagttcggcagtgaattgacggccgcgcgtgaagcccataagcttgtgtttaatgtctgtgtctggttctacgtaaactacagcggcgataaggacttcatccgacccaaatacaagctgagccggagaacccaagatgctgacttcctcatccgactcaagtcagcaatcaacgacggaaacgactttattaaactgcgccaaaacaatccaaacaacgagatcatccagatactcaatgagatttacgtcaagaaggcgcctcaggagcccaaagaggagcaggtctacggcataaacaacaaggatatcaaaatcagacagcctgatgttccttattcaaagtgcttaggcatcagctacgacgatgagctattcatgtggcatgcagagcacggggggaaggacctgggccttttcgagtcttccaaggaagcttatgaggcaagggagatctatatcaattccatcccaatgccccggaaggtgaatggagcctattcaaaggcaagaggcatttcattcagccgcatccagaagctatggagcgccagcgtgaaggggcagattatctcatatcacggaagcgaagctgaagccatcatggctcgaaagaaatacctgaagtctcataacctggtggacattaaggtgaaggacggatacaagacaatcaccctggaagagaaggccaaattggaggagaagattagacaaaagaaggaaagttcaaaatcggatatcaagacaatcccgagcaattccaacacaaaggacgagatggagaaggagaacattcagaagatcatggatggcgtaaagaagcttaaggacgatctgaatgagtctagcgcttctacttacattaagtccagttcactgagctcacagtccagcagctctgattcagtgtcaagttactccggaagcaaatccagttcgctgggttccacttcttctagttctaagtctggttctctgaactcgaaatccacgagcaacgaaaactcctctttttacgacattcacaacatcggttccggagataaaactaaaaagaaagtgaaaattgtgaatggcagcaaagtccaggccagccagaccaccaaaaaagtaaaggtgtcagctggcaaccgcgtttctaaaaaacacaaatccagtagcaagaacagtacggtttccaataatgccaatagttccaaaaagtctaaaagcgtggccattaataagaaaaaatccagtaagtatgagggtgtgttctacgaggacgggctgttcatgtggagtgccgaggtggacggcaagcacctcgggctcttctccagcgaaaaggaagcgtacgaaaaaagggaagagtacattaagaacaagtcaaataataactga

SEQ ID NO: 3260 - DNA, 594 bp, synthetic construct
  source 1..594: mol_type = other DNA
atgagcaagtttaagtactgtcctatgtgcgcagagccacgggccgataattcaaagtactgcagcaaatgcaatttcgaatttctcacgggaaagtatgtgaaagtccaagaggaagagataaaaatcaccgaaaaggtctcccaggaggagtttgtggaatctaaccagctcatccaggacacaagtctgaaaatcaacgtgttgatcagccggtacctcaactattcactaagcaataagttcaatgagaacctgccgctgagtataattcgcgaatacatctccagctgtctgaacagtaaagtgccatctgactttgatgacaactacctccaatccctcgacgcgctgctgaacgatgagggctataaaaattctattaaccttttcctgcagtggatcgacgagaacagatcccatctgcccgggctggtacttaaccagtacatgattccccaccagaacaacgttaataggattgaagagatcctggatttggagttagagaagaatgaggataacgacttgttcttcgaccttctaaataagttcctcatctcggaaaaggagttcatagaacgactgatttga

SEQ ID NO: 3261 - DNA, 189 bp, synthetic construct
  source 1..189: mol_type = other DNA
atgccggtggtccgcattagcggaaacccaaatataagtgtagagaccaagagggagatggtcaagaaagtgagcgaaatcgttgcggaatcctacaacctgcccattgagacaataacggtgctaatcgaggccttcgaacgggaggacatcggcgcagggggcaaactcctgatcgatagagactga

SEQ ID NO: 3262 - DNA, 837 bp, synthetic construct
  source 1..837: mol_type = other DNA
gtgatagagattagtgacaagttctatgacaagacattcaagctgttcagatacaaaaactttgagaacttatgcagcaattgcggcatcttcatagaatttgacgggttcaacgacaaggagctggtggatgatggcggcataacgtacatcatggatatttcaatcaatgataaacgcggatacagcgtaatcatcgaatttcagagttctgtcgtcgatgaggcggatattgaacgctttatgaagtatgccactctcacatacatccagtacaaaaaacccgtggagatctacgtcctctccaccgtggaagagaagaatcgagtgatccgccgacggtggaacttcttcaacgagttcaccatatgtgtcaaatcgctgaagagcatcgatggagacaaagttctgaacagtctcaaaaagaaaagccggttcgacgaggactttactggagatgacattgtcgatttgctgaccattatttttatgaaatccgtaaagaccacggttgagctattgaaggagatctgcctcctggtgaacgaaatcaacgcccttgacgaaaaggaactgtatgacatcaagaccttccttctgatgtatgtgaaaaagttcgtggaggacaagcaagaggcaagaatcctcgaagagttgataggtatgcggaacgacctgtttggcaggacatgggcatccgtgagaaatagggccttccttgaaggggaagctcgtgtggtgaggtgtatgtttaatgaaggtatcaagattgaggagatctctaaaattgttggcctggaggagtcccagatcctaaagatgattgggtcaagctga

SEQ ID NO: 3263 - DNA, 1131 bp, synthetic construct
  source 1..1131: mol_type = other DNA
atgtggtacgacatgaaacgaagacgcttttacttgatcctttttataatcctcttgatcctggccgctatagccatcattggcacattttcaagcttcagtgatgtttccggatacgacctgggaagtgatgacctatccattgccgtgaccggggatgtgatgttcggtcggaagatgcccggcgtcctagattccggcgctagcccattcaggaatgttgaaaacgttacaaagagtgcagacatcctgcttgtaaactttgaaaacccggcgacatattcaaccaacccagtgaaaggggacgtgcctctgaaggccgaccctaaatacgtgcacctgcttgctgaggccaacgagattgtcatcgcctctcaggacaataaccatgcattggattacggggatgaaggcctgaacgacagcatcaaaaacctcaaggatgctggtatctacgtgattggcgctggaaacaatctctctgaggcatctaaacccgtcgtcatcgaaaagggagatagaaaggtaactgttttaaactatatggatgcggataactttgcagaatacgccagcatcatgcccccggccacggctaactcatcaggattctgcgcctatgacagcgagctggcacgtaaacaggtggctgaggcccgcgagaacgaatccagcatagtcattgcctacatgcactatggaaacgagtattcgcggagccccaatgagtatcagatcaacatgtcgcacgaactgatcgacagcggtgcggacattgtgatcgggtcccatgcccacgtgacccagggcgtggagatgtaccacggcaagcctattttctataatttggggaatttcatcttcgaccagtccaatccagctacccaccggtcttacttcctcaacctggacctccatggtgacaattgtacagtgacgctctatccaactgtgatagtgggctacctgccccaattcatggatgccgacagtgccaaggcactgctggcagagctctaccctcagtgcgaccagcttaaggtcaacgatgacggcactgcgcagctgacctttaagttagggaatattaccgataattccacgcaaagtaatgacgtaaggctgtactga

SEQ ID NO: 3264 - DNA, 459 bp, synthetic construct
  source 1..459: mol_type = other DNA
atgctgggtgagatcgaacttaagaaactctttccagactttgaggatctggtgcaacccagcggcatcgatctagagctggatgagatattcatccagaaatcggagggctccctcatagacaatgagaagaacctgcctgatattgaagcgatggaagggcccatctacacgctcaagccccacacagcctatttggcaagcattagacggaaggtcaagattcctaaaggatacacaatgttatatctgccacgaagcaccctgcttaggtcattcatttccgttcagactgccgtgggggacccgggtttctatgggaccctgatgttcatgatctacaaccatggcgacttcgaatacaaaatcaagagtggagaccgcatcgctcaggccgtagtctttccagtggaaggctctggagagtacaacggcagttaccaggaggaggaaatctga

SEQ ID NO: 3265 - DNA, 1146 bp, synthetic construct
  source 1..1146: mol_type = other DNA
ttggtggagataagcattgtgattcccgtctacaacgtggagaagtacttaagggagtgcctggacagcgctgtcaaccagactttcaaagatattgaaataatatgcatcaatgatgggagcaccgacagttccttagatatcctgaaggaataccaggagtctgacgatcggattatcatattcaatcaggaaaatcagggtccaggcgctgcccgtaacctgggcatcaacaaatccaaaggcaaatacgtgtatttcctggattctgacgactatctggaactgaatgccttggaaaagctgtacaatatctgtgaggaaaagtcactggactttgtactcttcaagctgctcaacttcaatgacaaaactgggaaaaccttccaaacaaagtactataatatggccttcctcaacgaccggatcggagataacgtatttagttacaaggacctttacgattgcgtttttaatttggcagtgtccccacccgcgaagctctacaagcgcgagctgatcacagacatcgattacccggaaggcatcatctttgaggacaatgtgttttttctaaagaccctgctcaaggccaaaaggatctacttcctggacgagtttctctacaaccgccgcaggcgggatgactccctgaccagctcagggtcggacgattattacgatattattcctagcatgaattacctctttgacatttgtcgagacctggatgacttcgaactcctgaaggaaggattgtactataaaaagttcaaggagctttatattagattctccaaggtcaatgacgttcataaagaggagtttttcaacctaatcagagaggactgcctaaagcacaaggaagagatcgatgaggacatagccaacgataagctgaggaagcgaagcaagttcatctatgagtctgtgcttagctcagatgactataaggagtttcactatcggatcagactgtatgataagaacaaagagattaacgacctgaaaaaggaaaacaagtcgcttaaaaacgagaacaaaaagcttaaaagttccaacaaaaagctcaaaaaggaaaacaagcacttcaagagtacgaaggcatacaaggtctggaaaaaatattctaaaatcaaagactga

SEQ ID NO: 3266 - DNA, 987 bp, synthetic construct
  source 1..987: mol_type = other DNA
atggtcgagatcaccctgggtcttccaaaggggagcctcaacaatgtaaacagaggcaacacatatcaattattcgtggatgcaggttatgaggtgagaggatacgaacccggaaacgagtcctacgaaataaacattctgaacgacagtgagatcaaagccttcctgacacgcccacagtcgactccggtggagcttaacaggggcatggtggatatttccatcgttggcgaggactgggttaaagaggagtccgtcctgagcgataacgacatcgttaaaatcggggacctgaattacggcgaaacgcggctgatcgtggcgattccgaaagaatctccttacgacagtctgagcgaattttttcgggccaatgctgatcgagagcgccccattctggtgttcacagaataccccaacctcacccgaaagcacatcatggaaaacgaggcgtaccaggagatctatggggatgccgtgcccttcgtccaggtgaggggactgagggacggcgacaataagaaggtgcaagtgattaacagtgacggagccactgaagtctacatcgccaaaggggctgacctgatcgtggacaacacccagacaggaagcagcttgagaaaggccgggctcaaggagcttgagaccatattgcactccagcgctggcctctatgccggcgtctcatgtaccgaagagaagatggtaaaggctaaaatgatttatgaacagctgctaggtgcagtgacggcccgcaaatactttgacgtcaagttcaatatagcaaatgaggatattgagaaggtgtcgaattatctaatcgagaacaagttctgcagtcatgagccaactgtaaatcacggctcaagcttttcccagatcaatgttctcattcctaaaaacatcttccctgaaatgctcgatgggatcaaggaattgggagcatcctcaatcatacggagcgatgtcaagcagtacgtgatttga

SEQ ID NO: 3267 - DNA, 1224 bp, synthetic construct
  source 1..1224: mol_type = other DNA
atgaaaattacagtggcgggtgtaggttatgtagggctcagcctggccgtgctgctcgcccaaaaacacgatgtgactgccatcaccacgaccgagtcaaaggccgaaatgctaaaccagttcataagtcccatccaggacgatgagatagaacggttcttcaaggaggtgcgggaaggcgagagaaccctgaatctccacacgacaactgataaagctgccgcttatggggatgcggatctggttatcatcgccactcctacaaactatgacgacgtgggcaatttctttgacacctccgcggttgaggacgccatcgagtggaccctgaaagtgaatcctgatgtccttatggtcatcaagagcacgattcccgtcggctacacagaatcggtccgggagaagtacgggattagaaacatcatcttcagcccggaatttctgcgtgagtcaaaggctctctacgacaacctccatccaagcaggattgtggtcggctgcgacgacgaccagatggaagagggtcagatgtttgcagatctgttgctggagggcgctagagaagaggagaaacgcgcaaactccctggaacaggacatcccaatattgcttacacacctgaccgaaagcgaggccatcaagctgttcgcaaacacttaccttgccgtgagggttagctacttcaatgagctagacacgtacgcccagaccaaaggccttgacacccagatgattattgacggagtgtgcatggacccgcggatcggaggccattacaacaacccctccttcgggtatggcgggtactgcttgcccaaggatacaaaacagctcttggccaattataaggatgtgcctcaaaccatgatcgaagcagttgtgcacagtaactcagtccgcaaggagtttattgctaatcagattatttccaggaaccccaagactgttggggtctacagactgaccatgaagtcgaacagcgacaatttccgagcaagcgcaatacaagatgtgatgaaatccatcaaggctgagggaatcccaatcattatctatgagccaaccttagatgatggaagtgaatttagcaggtccgaagtggtaaatgacattgagcgattcaaacgagagagtgacataatcctggctaaccgcttagactgtgatgtcctgggagatgtggccgagaaggtgtacacacgcgacctctttcgccgggactga

SEQ ID NO: 3268 - DNA, 927 bp, synthetic construct
  source 1..927: mol_type = other DNA
atgctgacatccgttcagaaggagatactccaaactttaattaacctgtaccagaacagtgatggcaagtccatcaagggagaggacattgctgaggtgatgaatagaaaccccggaaccatccgtaaccagatgcagtcacttagaagcctgagtttggtgaaaggggtcccaggaccacgcggtggctacaagccaaccattgaagcgtatcataacctcaacatttctgtaagcgactccaacgccaaggttcccgtatataaagaaaacaaaaaaatggacgacgtttcggtggccaagattgaatttacaagcgtgccccaccccggggagtgcgaggccgtaattaaggtcctcgggagcattaaggatctccatctgggcgacgtgatccgcgtcggtccgacccctgtgaacaatctggggcttatcggcgagatcgtcggacgagacgatatggacaatatcctcctactggatatcagcacaattcggagcatccctaaaaacactgtgttcgacatcgcatccctggacctgatttacctaaagccaggagattcaatcaaggacgccgcatacctcttgtcccacaatcagatcgatggcgctcctgtgataaccgagggggtggccataggcatggtgtcattaattgatatcgtcaacgccttggcggaaggtaaggaaaatgaggacgtccgggacatcatgtctaaaaggctgttctttatcaataaggacacactgatagccaatgcagtctacaaaatgtacaaattcggcatcagtaggctgatagtggttgatgacgagcacgctcccatcggcgtggtgactcggacggatcttatcgaaaccattacgaactttaagaatttcccgctgctgtataacatggagatggatgaggaaatggagtga

SEQ ID NO: 3269 - DNA, 936 bp, synthetic construct
  source 1..936: mol_type = other DNA
atgaaagtgaatcagattagcatcaaaaaagatatgaaggtaagcgaactcatggaggagtttaagggttctggcgtacttggggctggccgcgtggcgcgggcgtccaatctgctggtcaacatgataaacgaccccgatatggacatcttcatgagcatggcagggcctttggtgccaggaggacttagatacatcgtcggcgacctcattcgaaacaaacggatcaaggtgctgatcaccagcggcgctaacattacccacgacctgctggagtcctttggaggtaggcattaccgggacttggggtttaatgatgaggaactgaacgacgccggaattggcagaatctctgatgtttacacccagagtgaggactttgaagtcttcgagagcgagataattaagattttcgagacaatctccaaaaagatcgataacgataaggataacggaatcatatcgattcagaggctgctgaaagaagtgggttccctgatagaggacgagaactccattctacgtctcgcttatgaaaatgacgtttccatatttgcgcccgggctgatcgacagcatgttcggcctccagttatggatgttcacccaagaccacaagctggtcgtggacgctgtgggagacatgcattacctctcggaccttgttttcgaatcagataagatcggggccattatgttgggaggcggcctgcccaagcactatacacttgcaagtaacctactcaagggcgggatcgattcaggcctccagatcactatggaccgcccggaaacgggtagcttaagtggcgcccctctggaggaggccaaatcatggagtaaggccaagcacgggtctaatctggtgacagtggtcggggatgcaactgccctgttcccactcatctatgcagccgccttggataaaatcgactga

SEQ ID NO: 3270 - DNA, 540 bp, synthetic construct
  source 1..540: mol_type = other DNA
ttgtttaacccgataatcgcactatcatacatctcttccggtttcttcatgaaaatcagcgacgatgagtatgatgagaagaacaacaaaatcctggccatcatcttcggaatcgtctgcggggcgttcacggctctggcatcgagtatgagcacagatgctgcctgcatattcattgcgatactcattggcaacatcctggcccagaaggtggacggcatccaccatgtcgttaccatgctctcctttttgattgtgctggtctttctcggcctccccgccttcagtcgcccatccattctggtcgtaatgatttgtgtggctggcgccctaatcgatgagaagggaaatgacaatgagatcctctatgaaaaaagcaagttcctgatgtacttctttgactacaggttcgcccttaaagtggttattcttgccctggctctgtttgggctggtggacatttggacctttgtgtacttcttatgctttgagatcgcatatgaaatagcacgggtgctttttgaaaagttcatcctgtga

SEQ ID NO: 3271 - DNA, 648 bp, synthetic construct
  source 1..648: mol_type = other DNA
atgaaagtcaaaaacaatattatcctggctatggacctgatggatctggcatcggccgaatcagtctgcgagagtatcaaccagtacatcgacacgataaagatagggtatcccctcacactggcagagggacttaagacaatcgggctctttaaggagaactttggctacaaagttatctgcgattataaagtggcggatattccagccaccaatgaaaagatcgcaaacctcaccttcgatgccggtgccgatgcaatcatctgccatggctttgtgggcccggacagcgtggaggcctgtaaggccagtgctgaagaccacggtaaggaggtattcctgctaaccgagatgagccaccctggagccatcaggttcttacagaaggatgccgacgatattgcccggatgggcgtggaaatgggaatctccaattacgtggctccctccacacgccccgacagactgagcgagattcgagacatagtggggaaggacagcttcatcatatctccaggggtcggcacccaagggggagaccctaaagagacgttgaaatatagcaacgctcttattattggccggtccatctacaacgcggaggacccagaaactgctactaaggacattattgattcaatccagtga

SEQ ID NO: 3272 - DNA, 771 bp, synthetic construct
  source 1..771: mol_type = other DNA
atgatttttgcagccatcctggccggcggggtgggaaacagaatgggcgaggtggataagccaaagcagtttctaaccctgggagacaagcctatccttatccagaccgttgagaagttttacctcaacagccgcatcgacgaagttattgttctgtgtcacaagtattggctgaaccatacaaaagacttgattgaagattacattccaaatgcagaaaacattgtggtggtcgaagggggtgagctgcgcaacgacactatcatgaatgctgtgaaatatatcgaggacaatcacgagctgtccgaagatgacatcatcataacgcacgactctgtacggccctttgtgacccataggatcattatggaaaacatcgagaagacccaggaagtgggggcatgcgatacggtgattcccgctacagatacaatcgtggtctgccacgacggcaatatcatcagcgacattcctaaccggaattacatgtaccaaggccagactccccagtcgttcaaaatattgaagctgaaagaatgcttcaacaagctctcagatgaggataaacgaagcttatccgacgccgccaagatcttcgtcctcaatggagaggaggtggcgatagtcaagggggaggtattcaacataaagatcacctatccgtacgacctgaaagtggcgaacacaataattgacgatgccaaactcaatatcagtgatgccgagactggcgagtacaaggtcaacctttatgacttcggtgaggaatga

SEQ ID NO: 3273 - DNA, 1023 bp, synthetic construct
  source 1..1023: mol_type = other DNA
gtgattaacatagtctatcgcctggtggcgcctaagctcctggaggaagtttatacagagctcaacctggacgttggagtaatcgtaaggcctaaatatctctcaatctgcaaagcggatcaacggtactactacggtaagagagtcccagagatcatcgaaagcaagctgcccatggcactgatccacgaggccgtgggcactgttgtcaaggacaacacaggcaaattcaatgtgggggacaacgtggtgatgattcccaacattccccgggcccgcgacaatataataagcgagaactacatcccgtccagcaagttcagatccagcggctacgacggcttcatggaagagtacgtgtctctcacagaagacaggctggtcaagcttcccgacgacctgaacatggaagtggcttcttttatcgagctgatttcggtggccacacactcaatcaagcgattcaagcagttctcccaccagaagaaagacgtgctaggagtctggggggacggcagttttggatacattacgtccctggttcttaaggtgatgtttccagagagcaaggtctatgtcttcgggatgcaccgtgaaaagctgcatatgtttacgttcgtggatgaaaccttcctggtggatgagatcccagataatgtgagtgtggatcatgcctttgagtgtgtggggaaagccagcgcaaacaacgcaatcaaccagatcatcgacataatcaatccggagggcaccatcgctctattgggcgttagtgagttcaatgtatccattgatacccggaccatcttggaaaagggaattagagtattcggtaccaaccggagcgcccgcgaagactttgtgtctgtggtcaatctcctcgaggaaaatcctaatatgatccactatcttgagtcgttgattactgagattgttgaagtgaacaccttaaatgatattaaaagggcttttgagtcagataaaaacctgcgattcgggaaaactgtcataaaatgggagatctga

SEQ ID NO: 3274 - DNA, 1011 bp, synthetic construct
  source 1..1011: mol_type = other DNA
atgcatgagtacgagatcagtattataatcccaacctataatagctcaaagaccatcgaacggaccattcacagtatattaacacaggattttaaaaactatgagatggtgtttgtggatgatgcaagcaatgacgatacagtaagctgtatccaagaaaccctggcggacaaaaaggtcaattatcagcttattgtcaataagaacaacaaggggcccgcctactgccggaacaggggcgtgttcgctagccgcgggaagtatatcgtcttcgtggacagcgacgacctcatccaattcaaccatatttcctcgctgcacaattacgtgaaatcagacaatttcgactccgccttcactaaaggaatcaagataaataaccaggacgagcttatagacttcaaagtggataagtacgacggcctgatccacttggctcgtaaaaacaaggggatcgtgcgggccaaggatctgatcaatctcgagctgcttatgaaaattccgttttccttcgtcctcctgatttacgacaaggagatcatcctcaacaattccctagaatttaacgaagactatagatatggtgaggacactgacttcgccctgaggtacctggcaaactgcggcaacgttcgggtgattgataaatacacgtacttttactaccaggaggaggattctatcagcagacaggtctcgctcgataggttcgaaagcgtaaagctgttcgagagtctggactcctatttcaaagaagatgacctgcgagagaagctcgtgcactcaagaatccctcgctttattttcggcaacatgaactacttcttctacaatggatacaacagcgaagatgtgtttaaaaagatggatgttcttgacttatttaacaagctccgccagtttaaggtgtttgagaaacgagactggaagttctacctgaaggttaggttgttcctgttgaaccacagactgtattataagctgtggttgcgctttaaaaacaatctatga

SEQ ID NO: 3275 - DNA, 213 bp, synthetic construct
  source 1..213: mol_type = other DNA
gtgaatgatctcaaaaagctgtatgtcttgcttgcaatcctgattgtgatatacgtaggaataaacttttcctacaacgggctggacaccatcaacacactaactcatgtgaacctggacctcggccccagcatggacaatgcgaacgatgccaatcacattaagatcggcagcagttcattcacgaagctgagcaaaatcttcacctggtga

SEQ ID NO: 3276 - DNA, 1008 bp, synthetic construct
  source 1..1008: mol_type = other DNA
atgaccaagattctggtgactggcggagcagggtttatcggtagtaactttataaagtatatgctggataagtaccctgattacgaaatagtgaatctcgatgctttgacttactgtggaaaccttgaaaatcttgaggatattgaagataatccgaattactccttcgtgaagggaaatatcatggatgaaggtctggttgatgttgtggtgagcagcgtagactacattgtcaatttcgccgctgagagccatgtggaccgcagcattgaagatccgcagatcttcatcaagtccaatatcatcgggacgcaggtattgctggatgccgcctataaataccagatcaaaaagttcctgcaggtctccaccgacgaggtgtacggctccctgggccccgaaggctatttcaccgagacaactcccctccaggcgaacagtccatatagtgcgtcaaaggccggcgccgacctcatggtgcgggcttatggggaaaccttcgacctgccaatcaacattacaagatgctcgaacaactatggcccctaccagttccctgagaagctcatccctctgatgatttctaacgcattggaggataaggagcttcccatatacggtgacgggaaaaacattagggactggttacatgtctacgaccactgctcagcaatcgacctagtcctccacaaagggaagattggagaggtctacaatatagggggccacaacgagaagcagaacatcgaaatagtgaaactgattctcaaggagctgaacaagccagagagcctgatcaaatttgtgaaagaccgactaggacacgaccggcgctatgccatcgactcaagcaagatcacggaagagttaggctggaaacccaagtacacctttgagacaggaatcgtggagacaatccactggtatctggacaaccaagactggatggaaaaggttaaatccggcgagtaccaagagtattacgaaaagatgtactctaaaaaatga

SEQ ID NO: 3277 - DNA, 564 bp, synthetic construct
  source 1..564: mol_type = other DNA
atgggcaagtttaagatcgtgaagagtgaaatcgagggggtctttaccgttgaacctaccgtgtttgaagacgagaggggctacttcatggagacctacaatgagaacgacttcaaggcagaggggattgacctgaccttcgttcaggacaaccagtcaaagagctccaaaggtgtccttcgcggtctccacttccaatatacgcagcctcagggaaagctggtgcgggtgatcaaaggggaggtcttcgacgtgggagtggatctaagaaaggacagccccacatatggcaagtgggtaggggagatcctctccgaggaaaacaaaaaacagctgttcatcccaaaaggctttgcccatggctttttagtcctgagcgatgaggcggaatttgtgtacaagtgcacagacttctacaaaggagacgatgaggggggcatccaatggaacgatcccgaaataggaattaagtggccattgggcaatctgaaggaggaagatataattctgtcggaaaaggacaaactctggaagccgatgaaagagactcccactgatttctga

SEQ ID NO: 3278 - DNA, 873 bp, synthetic construct
  source 1..873: mol_type = other DNA
atgaagggcattgtactggctggagggtctggaacaaggctgtacccaatcacaaaagcggtgtcgaagcagttgctgcctttgtacgataagccaatgatctattatcccatttcagtgcttatgcttgccggaattaaagagatactgataatctccacgccaagggatctgcctatgtacaaggaacttctcggggacggtgagaacctgggcataagcttctcatacgaagcacaggagaaccccaacggtctcgccgaggcttttataatcggcgagaagttcatcggggacgataacgtagctctgattttaggcgacaacgtcttccacggacatcgctttagtgaaattctgaagagagccatgaacctggaagaaggcgccgtgattttcggttattacactcagaatcccgaatcctttggcgtcgtggaatttgatgatgagtggaacgtgttatccgttgaggaaaaacccaagaacccgaaaagcaattacattatcccaggcctatacttctatgacaatgacgtgatcgagatcgcgaaaaatgtgaagcccagcttccgaggtgaaaaagagatcaccagtgtgaacgacgagtatctgaagcggggaaaactcaaggtcgagcttctggggcggggcatggcttggctggacaccggaacccacgacggcttgctcgaggccgcaaactttatcgagaccatccagaaacgccagagcgtttatgtcgcatgcctcgaagagatcgcattcatcaatgggtacattccgaaggagaagctgctcgaactagccgagcctttgaagaagactaattacgggcaatacctcatcaagctggccaaaatgaagaaatga

SEQ ID NO: 3279 - DNA, 1482 bp, synthetic construct
  source 1..1482: mol_type = other DNA
atgaaccgcttttggaacgacctcatcctgccacttttctacgagttcaagcccgaagtcattgtggagatcgggtgtttcaaaggcgaaaacacaaagaacatcctggaatactgctactacaccaacagcaagctgaaagtgatcgatcccaatcctgatagcagctttgaccccatctccctgaagaataagtatggcgacaagttcgaatttctcaaggaactgagtctgaacgggcttaacctgatcgaggattatgacgccgtccttattgatggcgaccacaactggtataccgtgtataacgagcttaaattaattgagaaacgattcgatcagaataatttcccgctaatcatcttccatgacgtgtcatggccatatgctcggagagacctttattataatccagaacttatccctgaggaatttcgccacccttacaagaatttggctatgtttccagacaaaaatgagttgggagatatcggtctgaatccgacttttaacaacgcagtgtttgagaacacgcctaagaacggagtcctgacagccatcgaggacttcctggatgaaactaatctgaatctgtccttcttctgcctgaacgcattctacggattcggggttttgttccccagtcagagctgtgatgaaaaaacaatattgcaaatcttttacgatagtgatgtgatagggcttttagagaagacttacctcaaactgcggtttacgcaggagcacattattaagaataagaatatcgaaatcaacaacctgaaagacatgaataacagcctgaacaaaaagaatattgacctgactggcatcaattctaatctggagaaagagctagacaaactcaacaacaccaagacagagatcgaaaaggagctcgacaaactaaacaacaccaacattgacctgaaagaaaagctcatcatctcaaccaataaccagaaggagctcgagaagctactggataacctcaaggatgacaagacctacctcgagaacgagctgaaggatttaaacaacaccaaaaccgagatagagaaggaactcaacaaggttacaaacgataagaccaacctgaagatcgagctgaacaacatcaacaacacgaacatagagctcgagaagatagtagatgacctgtgcaatgagaagtcctccctgaaaaataagattaatgatctcgaatacgcgaatcagaggaccctgaagactatcgagaatttgaacggcgacatttactcaaagacatatgaaaacgacagcctgaaagaagacaacttgctcctgacgaagacaaataaagactttctcgaggacattaagaatttaaacaatcttaactacgacttggagcaaaaaatattgaatctcgaggaagaaaagaactctattctgtcgtccaaaacctggaagttcggtgccccctttaggaaaattagcaatattttcaataaaaattga

SEQ ID NO: 3280 - DNA, 1521 bp, synthetic construct
  source 1..1521: mol_type = other DNA
atgacgtacaaggtgagtatcatcatcccagtatataatgccgcagagtttattattcgagacacgctcaaatccattgaaaatcaaacaatggatttcgaggatattgaagtgatcctggtgaatgactgctcaaccgataacacagcgaaagtgatcaatgaatacgctaaagagcacgagaacattgtgccaatcaacctgaaagagaacaacggtcagccgggcattccccggaacatcgggattacctatgccagcgccgactatcttatgtttcttgaccaggacgatacctttaagaagaacgcctgcgaaactttgtacaataaaatatcaacggagaatgttgacatggtctgtggtaaccacaacatcgtaagcaatggccggtcgaacatttgcttcaacttcgattgggccgaggaggatgagattaagatcaataagattgacgagaaccccaacttcctcactatgggagtggccgcgtggtctaagatccttagaagggagtttgtcttggacaataatctgaaattcaccgaaggcgttggggaagacatcttcttctccatcagggcattgttactggcagaaggaattattctgcttaagaatttcatcgtggtggattacctcgtgcgtggggagtccctgtcacaccaggtcaacgcagaatatctggatgagttttgcgagttttacctgaacttctttaattactgtgagaagaacattaagaacgacaatttataccaccctctgttcaacggcaggctgaaccatgtcctctccatgctgttcttcgctgatctgtactttgatgacctctcttgggtcctgatcaagattcatgaattgtttaagaaggtggctgagaagccattcgtgtttgaggacacctcttaccggatcttctttgacacactgataaaggacgagtatcctttcgaaaatagcatcaatatctacagcgccattaaaagtaatagggagcgcaagtttgacaagggagtaaaatatctagaacaggaggccaagctctacatcgacaacgggaacggattcaacgaaaaggatagtatcatcgccaactacaagatctatgagttcaatgaggttgagtttaacctagagaacttcaaaaacattaaacgaatccgcttcgaccccatcacttggaattttattaattgtgtcattcacgagataaaaacaaacaatggcgacctgctctacgaagctataaactccatcaaccgcagagaattgtatgggctaaataaggaagaacaatcaagcaacagaaatagcaaagagaatatacggtataaaagctccgatgattcttcggctgagggcatcgcggacatattcctgaccaccgatagtcagtaccttctgtacggcgacttcaacaacctcaagtccatcaaaataaactttgaagtcaacctcatcgataataacgaggtgagcaagatcgtggagaatctgatagaaaactatgaccattga

SEQ ID NO: 3281 - DNA, 1704 bp, synthetic construct
  source 1..1704: mol_type = other DNA
atgagtataaagaataaattcctctctctgttcaactcatcatcgaataactccgattttgagaatctgaataactactacaagaaagtgctagaggacattgagaacgaggatatatcgggctatgatcgaaacctgaagtattacaacgacctgaaggactgtgagcttttttcctcggaatactatataaccaaccagggtctggagctttcagaggaatacgctttggcccactacctcaacgaagggtataagcaaagccggaatccaagccctgagtttaacaatgacaaatacctcagattataccccgacgttcgcctagcgagccttaacccgctcgcccattacgtgctgtatggagaaaaggagggccggcggttgcctctgagcgaatatgaagaactggagaacgagatagtgtctgtaaagaatctgatttaccagaacagggtgaccgacaacctggtcttgcttcgggataaagtgtccaaaggcaagaaagtcaacgtggtgttcgtgttacctgcaatgatgtttgtatacaaagacctgtacaactattttgacaacgacgatatgttcaacgttcagatcgtgttggttccccaccgactggggaacagtcaaaagattaccgatgtggccaaagataagcactatcagattttcagctacctcaaggaaaaacagtacaatgtgattgatggctacgacttcgagaagaatgagggcatcgatctcgtctcaacttgcaatccagatatcatcttctacgtcttgccttacatgaggatcttcccgaagacgatgaagatcagcaatctcccatccaacatactctatgcttacatcccatacggggaatttgtggaagacaacctggacgatctgttctttaatttcggatggaacgagatcgcttggaaaattttctgttccaccgaagagtacctgattaactctacggaaaagtccattgtcgggtcaagtaatgtagtcctggcaggttctgcgaggatggacagcctgatcaattttgaggagtctgacgaggactacaagtggatctacagcaaagaggagaataagaagagaatcatctgggctccccaccatacactggcaagacccggtatggatgacagcctgtcctattccacattcgatgagaactttgaatttttctacaactacgccaaggaccaccccgacatcgagtgggttattaggccccaccccctgcttaaggaagtgctcagtaacatcaacacaaacatgcgcgtgcagggaatcgccgacgaaaactttgcggacgattatttcttcaagtgggagagtctgcctaacgcccgcttccatgaggaaattgactatttcgacctcttcgccactgccgatgcaatgatcaccgattgcatcagcttcaaagcagaatatctgtttgctaacaagccaggcttgatcttaaataaaacaggagtggaacttgacggctatcagggagagattactgatgcctggtataattgcgatgggagcgactttgagaagatagaggaatttatcgaggacgttgtagtggggggaaatgattacctaaaggagaaacgtgaggaaatcttcaacaaaaacttcaatgtcaatctcggcagtgcctccaaagtcatttttgactatattaagaatgagctgacctga

SEQ ID NO: 3282 - DNA, 3039 bp, synthetic construct
  source 1..3039: mol_type = other DNA
atgaaaaagaacaactttaataaaaagatcactttcgtcgctaattacttttggactagcatcaaggaaggtagcaagtccaactcttactttaattacgataactacctaaaaaaataccctgatgtcaaggaatctggcatgaaccccttcaaacactatctgctgcacggcatcgatgaagagcgctccacgaactttgacgagaatatcaattcatactccctggtggaaaattccgatctgtttgactacgagtattactgtgaaaaaaacaacctgaaatttgactcctatagtaaagcattgatgcattaccttgagaagggatataagaagggctacaacccaagtataaagttcaatgccgaagaatactacgaggtgcgtcctgatgtgaaacgagctgatgtaaaccccctcgttcactacttgaagtatggaaaaattgaagtaacctcaatgaccgagaacctgaaccttaaagagtaccagctcgtgaaaaattcgaacctgttcgactataactattacatggagaagaatcacctggacctccggaacgaaaccgaggcaatctatcattatttggagattggatacaaaaagggatataacccgagcaacaagttcaatggggaaatttacttcaagaaaaatccggatattgaggagagcggctggaacccccttgttcattacctgaaatacggccagaaggaagagcgcaccgataagtgcgacaagaacctgaaggaatacagcctggtgaaggaatcgggcctgttcgactatcaattttataaagacaaatacgatctggatttaaactcctacaagcgcgggttaatccactatctggagttcggttacaaaagaggatacaaaccaagccgaaatttcgacggggaggagtaccttaagcgctaccctgaggtgaagaaagccggattcaatccattggtccactatttgaagtacggggtgaatgaggaaagaataggcctgagaagaataagctttaaaaatttcaacaagaactacgatgttgaggccatcctggagaatatagataatgacgttacaatcctcctgaacgttgaggactccaacaacctgaaggagtgtattgagaacattaagagcaccacgaaagactacaagattatcctcatccacgagaaccttgacgacgaggacctggagtatataaagtccaacaacgacatagagcttttgcggaggagcccccacgagtcattcatcaatgccctcaacaatatactggacaacgccaagaatgacatcatctttcttaagaataacatcagaacctttgagaagtggattttcaaactgaccgtggccgcatacagtgatgaccgcatcggattcgtgagccctatttcaaattatagcactgtgagcctaataaacatcgaagaagacgagaagtcgagcgagtttataagtaacatctcaaagcgggattatgaagagtctccgctgccaaatgactcttgtgtctttataaaaaaggatgtctttaaggagctgaagttcgatgaaagctccaacgaggagaattggttcgctacattcatagacagaggcttggagaagggatggaagtccatcttggacgatagcacctacgtgtactaccagttcaatgaggtagagccccagcaagcagacgagtatgactattccacgccctacgtcctcgaaaataggccctcagtgaagttcatcaactctgatgcatttaacaacagcttccagaatatccatgagtatgctgatgataatcttgaagagaatatccaagagaagaccaggaagaacatcctatttgctatgcattatgggggaggcgtggaatttacagtgaaggatatcgttaatgcgatcaaaaatgactacgagtgttacgtgctgcgagccttcaagaacaagatgaagttgtataaagtgttcaacgactattttattagcatcaaggaatttaacatcaaatatccttggactcccaagatgatccacagtgacgagtacaaacagatttacttctatatcctcattaactacaacattgacattctggaaatcgatcatctgctgctgcacacatttgacctccaggagcttgcaaaaaaactggatatcccaatcatcctaaccttgcacgatttttattacatttgcccctcatacttcctcctcgatgaaaacaacaaatattgcggtggttactgtggggatcagcctcggaactgcagtaccagggtcacttggatcgatctccctgccaacatcgtcgaatggaagaatcaatggcaggaatatatgaaagaactcttcggcatgtgcgactacatcctcactgccacagactttactaaggacatgttcctggagcactacgacagtttaaagagtgacgacatcaccattatagagcacgggcgtgacctgattcggtacgacaataactatacagtgccaaacatttaccagccgattaagatcctcatccctggcgtgattgggccccataagggcttagatttcatcaaagaactcaaaggcttcgatgacgacaatcgcctggaataccacttcatcggccaggtggatgatgaactcaaaagcatgggcatttatcatggtccatacgagcgggaagacttcgcgaagtgggtgtttaaaattaagccaagcttcatcggaatcttctcggtctgcgccgagacatactcccacacactgaccgaatccatatgctctggggtccccgtgttagcctcgaaccttggtgctctgaagacgaggatcgagagccaggggggagggtggctggtcaatattgacgacgcggaagagacatatgaacagattctggatatttccagtaagaaagaggagtataaatttgtaacggagaacctcaaggacatcaggatttccagttcagaagagatgggcagcaagtacaaggagatttatgacaagctaaccaagaaggaagataaatga

SEQ ID NO: 3283 - DNA, 801 bp, synthetic construct
  source 1..801: mol_type = other DNA
atggaatttataaaatacaaatcgcagttcgaaaaaatgattgacaataagatcatcggtatgccggagttgatcgactccaatataagctttaaaggtaaaaataacatcctctgttgcaacaacatcaagctggaaaatatagacatcgatttcaatggcaataacagcgtgatcttcctagggagcaatctaggcgtcaatagtcacttaacaatttttaataactccacactgttcctgggcaagaacaacacctgcggatcgagcatttccatttccgtggcagagaatcagaaccttatcattggagacaactgcatcgtggaaagtgatgtaaagatccgcacttcagacaattacccaatctacaactatgaaaacagtaggattaaccactcaaatagcgtttttataggggataacgtgctgctcggggagtctagcttcatttccagaggcgttaaaattggctccggcagcataatcagcccatgtagttttctgccccctctgtttaaggccttctctaactcatatgtcctcgggaatcccggacggatcttgaaggaagacgtgtactttgtgaatgatagcatcaacgattataccatcgaggagattaaaaactcctcaatcaatgagaacgagagtggactgtttgatttcgtcgaaaaagagacgctgagccttgacaagattgacaacatcctcaagaagttcaacagcgaggactctctcgacttcattcaaaagctgttcctgcagaacaagcataagaaccgattcttcatcgagtga

SEQ ID NO: 3284 - DNA, 1326 bp, synthetic construct
  source 1..1326: mol_type = other DNA
atgaagaagccaaaaaccaaggcgcagaaggaaagccgagagaagaagcccaataaccttaaaagtgattgtatgaagaaaattttgtacgtcctgcactctggcgtgacaggtggcactttcctgacaaacaaggacttgatgaaaaatgtggagaaggaatttgacgtgtatttgctgagtgctgaaaacaagttcctgaagctctttagcttctccaacaacaagttaaaactcattcggaaatatcacagaaattacggaatcaacgtagaaaccgaagagacggagacaaacaacatctcatggagcgcaaaggacttccacaattcctggctaagcaacatctatttcgaaatactggtgaattacaacattgacattgtccacattagacacttgatcaaccatagtttcgacctcccgcaggttgccgaaaagctgaacataccaattgttctttccctacacgacttctacttcctttgtccattttacaccctcttagatgagaactacaattactgcgcaggtgagtgttctcacaacaagaaaaactgctattgtcctatggacagcctgagcgacataaattccaaagagtttatctcagaatggcgggtgaacgtgctgaaaatgttcaattacataaacgtcttcgtcaccacgtccttttttgtcaaggatctgttcctgtccatctactcgaatgaggatatcatcaacaacaacaactttaaggttattgaacatggcagggatttcccaaagctgaagaaacagatgttcgagatccccagcagcaacaagccgataaaaatcctttgccccgccaatcatctcaacattatgaaggggtcgcagctgatcaagcgcatcaaggaggaggacaacaaaaacctgatagaatttcacttcctcggaaattgccacgatgggatcgaagagtacgggttcagccacggcacgtttgaacgtgatgaatttcataagaaggtggaggagatcaagccttcattcgtgggaatcttttcaatctggcctgagactttttgccataccattaccgaggcctggagttgcggcatccccgtaatagggaccaatatcggagtgatccaggaccgcatcctgaaaaataaagggggctggatcgtggacaggaataaccccaagaaagcctatgagtacatggctgagattttcgagaataaggaggaatacctcgagatcgccaataatatcaaaactatggacctcaaagatacaaagatgatgagcattgagtatattcaaatttataataacctgctggagattaaatga

SEQ ID NO: 3285 - DNA, 2007 bp, synthetic construct
  source 1..2007: mol_type = other DNA
atgaccaaggtgagcgtaattatcccaatatacaacggggaaaaataccttaaggaatgtttggactccgtctgctgccagtcactgaaagacattcagattatctgcgtcaacgatgggagcacggataagaccctttccatcctgaatgggttcgccagtaaggacaaacgcatcaaaataatcagcacggaaaaccggggacagggttcagcccgtaacaccgcactcaaagaagcccagggcgagtatattagttttgtcgatgccgacgattggatcagtgaaaatgctctcgaacttctatatttccacgcaaagtcaaaagacctggacatgctgtttttccaaatgatcaactacatggacaacagcaaaaactacgttgagactgaattatataatcacctgtgctttgagaggaatgcaatcgatgaagacaccatcttcaacttcaacgacataaaagaatttctgtttaaaataccagtgtgccctgtttctaaactctataaaaaagaatttctggactcaaacgacctctatttcccagagggcatgttctttgaagacaacgccttcttttacaactcgttgtttaaaagcaactgtctgggatttctgaagaagcatctctactatcggagacgccacgccgactccgtgactcagaccttcgataagaggaagtttgacattgttaaggccacaaacaaggtactcgacgtgtttctcgaaaatgaccaatacctcattttcaagaaggaactcattaatcacacgttctccatgctgctggaatggttcaacaagtcccccctagagctgaaggatgagttttataggctgatcaagagggacttccggggctttaataatctcaaagaggacttcaagaacaatttgaaagaggagtaccttctgatctttgatatctccgacaagaacaagtattacttggatttcctgagcgagtacaagctctccagcgctgattatgatattttcgataaggaacgatacttccacctgaacagtcaggaatacctcgaatataagtccaacaagagcaacaattacaaaataagtgtggtcatccccatctacaacaacgagacattcatccatagaactttaatgtcaatcgagaatcagtcctttggactggagaacattgaggtcataatggtgaatgataattcaaaggataataccgagcttgtgatcaatgagtattcttctaagtatgagaatttcaaagctatccacataaaggagggaaccgggagccctggaacccctagaaacatcggtctctacgagagcacttcagactacgtgatcttccttgaccatgacgattattttgagattgatgcgctagagaaactttacaacgccatcaatgaggaggactgtgactttgtctatggcacttacgcaagtgtagatgaggacctcccgacaaagattatctacccaaacgaactgcatggctactttaagaatatctacggcaatccccgatctatagctttcccgccccctagcatctggacgaagctgttcaagcgaagcttcctgattgagaaccggatcatttttccaacaatcttgggtgaagacgccatcttcatttctaaggcgttattcagcgctgacggcatcgattacctatgggatgatttgatttgttaccacaccctgaacaaaaagtcttttacaaaaaacgtgagctacgactatctggtgcagggcttcgtgtcggaagagtacttgtacaatatctacaacgactttgagtcccaatcctatgagctgaaggagaacagcaccattccctcggagaagtccagtgagaacattgagaaaatgaatttatataaaatccggtctgaagggatactggacttctacctgaatcagttctatcgcagcgatctgaacgacgaggatatctatagaattttccccattctgagtgacttcgtgtcgacacgcatttga

SEQ ID NO: 3286 - DNA, 771 bp, synthetic construct
  source 1..771: mol_type = other DNA
atggccctgatcgagaaaaacgaactcttcctgttggaggaaatcgtaaagaagaactttgcagcgaagtataaggactcgattctggggatattttggagtattctcaagcccctgctcatcatgatcctccttacaatcatattcagtaacctgttcggcggaagcattgagaactacccagtatactttttatccggcaagattatcttcgatttttttaactctgctacaagcgtcagcatgatgagccttaaaggcaatataaacattctgaaacgcactgctgcccctaagcatattttcacgctcgccggtgtcgtgtcagaatttctcaatttcctgatcaccctgataatcctgattggtgtcatgattgtgacccggtccccattttacatattggaatccatgatcgcaattatccccattatgtccctgatcatcatgatcaccggaatcagcctgattctagcggtgctgtgcgtttacttttcagacatccagcacttatggggcgtcattacactcatgctgatgtatgcctctgccatcttctatcccatgaacataatccctgagccgttccacgggatcatgatccttaatcccattttctgggtgatcggccagttcagaatcctggtgctatgggggaccattccaagtaggatgaatatgttgaatctcgttcttctgtctgtgatcatcctggtgttcggaatcatagtgttcaagaaatttgagaaaaagattactttgaaattctga

SEQ ID NO: 3287 - DNA, 1467 bp, synthetic construct
  source 1..1467: mol_type = other DNA
atgaatcagaaaagggacgaactcaactctaaacaaaacataaacctggacagcgaaaatgagatttcctcatcagaaattaacctgaagaaaagagacccccagaacaaaagcgacctgatcgcgcagcaacgcatgaaagccaaaagggaactcatcgagcgctacaatatgtctgagagtgaggctgagagtactctcaaaagcatagaaaataaggtcatgcagaagaaaaacaagaaaatcacgaatgagaaagagattgagatcaattccaataaggttcggatggatgacaagaactgttccttggagaacagcgccggtgtgagcgagaacaaggacaagaacgatgaggctataaaaatacaaagccaaaattctcagattgaaggcgagtccgaggaaatcatcccagagcacgttctggagcgccagaaccccaataagattgataacagtgattacgaaatcaattctgtctccgacacactgcctgtcatcgaggaaggggaaagcaagcctattcagaatgccgaggacgagatcgtaaagaaggagctggtggactcggtgagcgatgtggtgccggttgtgggcgagaaggaggaaaacaatgaaccgatcattaagaaggacgattccagcgatgtcgatgacgtcttgtcaagcataattccagagtatcaccagaaatcctccatcgaggtcaataatgtgtcattgagtttcaacattgaaaacgacaagatcgacaacctgaaggaatacatcatccgtaccctaaagaggaccaaagagaaaaagattaaatttcatgcgctgaacaatatcacttttaaaatctacaagggcgaaaaggtagggattattggatataacggggccggaaaaagcaccttgctcaatgtgatcacaggcatctatgaacccgacgagggaaacgtgaaaacatatggcaaaatctcgccactgctgagcctcggtgcaggtttcgattacaactactccggacgggagaatatctacctgaacggcgccgtgcttggttacgacaagaagtttttagaaagcaaattcgatgaaatcgtggaattttcagagctccaggacttcattgatctgcccattaaaaactattcgtcaggcatgcttgcaaagttagggttcagtatagcaacgattgtcgaacctgacatcctcatcatcgatgaggtgctgggcgtaggagatgtgaactttcagaagaagagtagtaataagatcaagagccttatggacgggggaaccaccgtcctgctggttagccactccattgtgcagattcgagagatatgcgacaaggctatatggatcgataagggggagctaagagagttcggcgaagtgaacgaggtttgcgaccattaccttaaggatgcccagaacgccactaagaaccaggtgaaggacatccggttcaactga

SEQ ID NO: 3288 - DNA, 2454 bp, synthetic construct
  source 1..2454: mol_type = other DNA
atgaactataaaattagcatcatcattccagtgtacaacgtggaaaattacattgaaaagtcactgaactccatcatctcacagtcaatcggtatcgagaacctcgaggtcatcctcgttgatgataactctacagataatagtgcaaacatcatcaagaaatatgtgagcaaatacgataactttaaaggaatatactgcgacatcggctccgggttctgcggcaggcctcgcaatattggtctgagctacgctacttccgagtatataatgtacctggatagcgacgattggctggaggagaccgcctgtgaggtactgtacaataccatcattaacgagaatgccgacatcgtgtgcgggagtcagaccaggctcgacaatgagggcaacagaaagttttactatcacctgtgggtgaccactttgactgatccgaatgaggactacaacactcgaatgaagacaacacaggagattatcgacgaccccaacttcaagctggtcgttaccgatctggataaaaaccccaatattctgggacatgccaatgtctgggggaagatcttcaagaaggacctcataaccgaaaatgaactcagctttccagaggacatagtggcacaagattccgtgtttctgctgaactccttcttcgtggctgagaagattgtgttcattaacgacataattgttcactacaacaaccttcgttgcgacgacgacgacaaatccgcgtcctacgtcaagactactaagaatctctttggcagaatcaaggcatacgacttgatggacaacatcagcaaaaagttttcaaaggaagaatttttctacagatatctgctagtcggcaaactgaactactggttcaacagctttctcatggacagcaacattagcacctatgagattaagcttctttttaaaaagtattctcacctgtttagtaattgttataaatttaacacaaacctccggaaggatatcaaaaatattttcaaagagatcgacgagggaaattacgatattgccgcatcaactgtgtccaagctgcagtccaaatccttctccgccagcgagaacaagattaaggtgtcagtaattattcctatctataacaatgaaaagttcctaagcaagtgtttggatagtgttatcaaccaaaccttgaatgaaatcgaaataatttgtattgatgacgggtcttctgacaattcgattgaaatactgaaccagtacgtccttaaggatagccgtttaaagattatatctcaagagaatctaggggccgcgacagcaaggaacaatggtctgaaaattgcaaagggcgaatatatcgcctttctggactcagatgattggttggagctcaatgccttcgaaaagttatatgagaacataaccacgaacaacagcgatctcgtcctgttcaactctattgaacataaggagaacgctaacctcaaagagcgcatccatatcaagaatgattcaatccccgactacaactactacaccttcaactataattataagaaggacctggtgatgaacggatatctggacatctggtcgaaaatgtacaggaccagcttcctgaaggagaacaacatccagttctcaaaccaccagatcttcaacgacatccagttccacataaaaacgatgctgaatgccaaaaaaatctcgtactgcccagagttcttgtacaattatttaagaattaatcacccttcgcttcaaaataaccttagcttgggcaacgagagcttcatccttctggacataatcgatgaaatcgaggactacctgatcgacaatgaattttacaatgaattaaagtcgaatttcatccgctttaaactgacggagttggagagtacgctcgagaagctggaaaatccgtatcgaaacgaatttttcaaactgattaagaataacttcaagaaaatgcaattgacagaataccagcggaaagaactgcccccagagaactaccagttttttaatgacgtgctgacctacgattcattcttcgagtatgccttaaaaaacagcgagaaggaacgacagaagctgagcaatgccctggcggatagcgagaaggaccggcagaagcttagcaatgacttggaaaactccggaaaggaacggcagaaactgagtgatgccctggtggactccgaaaaggagcgcgagaagctcagtgacgctctcgagagtagcgagaaggagcgcgagaagctgagcgatgctctagagtccagcgagatcgagcggcagaaactctccaatgctctcgagagtagtgaaaaggagaggcagaagctaagtaacgacctcaaaaacagcgaaaaggagcaggaacttatcaaaaaagagtttacaagctccaactcctggaaagtaaccgaaccccttcggaagatccgcagaacaatcaagaaatga

SEQ ID NO: 3289 - DNA, 1599 bp, synthetic construct
  source 1..1599: mol_type = other DNA
atggataagaacgagatattcactctgtggattcctgacaatgacgacaacaacctaagccagttggcccacctcagcttaaagagctttctgttgtgcgattatgatgtgatcctttatacttacgaccacattggcaatgttcccaatggcgtgtgcattcgagatgcaaacgaaatcctggacaaaagcaagattttccggtacaagggagggtttaagacgtatagcggcttcgccaacctctttagatacaagcgtctctacgaatacggtggcacatggctggatttggacctgctcctgatcaagaggctgagcgatgaagacatcatcatcgggtcccagacacaggaggacatctactccaatccgaacaacgccctgtttagattccccccaaaagatcctctgataaagaccatcctcgattattccgaaaagaggggttcagacatcaatcatgccgagacagggacgttactgcttaagaaactcttggcgagtgaatttccagaatacaaccagtatctcaagcacttcaattattcaaatatcgtgaactggaacgatgtgggggactatcttgaatcgccggaaatattcttaaagtgcctgaataccaacgagatctacggattccacctattcaataccttcttcaagaagtttgtagagtttccaaaggactcgttcttcaccacgctgaaagacatcattctgaactcatccacaagtgaagagtatgcatttaacctcatgaaatacaacatcactacccaaaaacaatacattggcataaacgagtgggatctctcttacctcaacatcttcaaggatgcgttttccaaaaatgaatttaagtacacaattctaattgactcacagaatcttaaaaagatggagatctacaacatcatccgcgccatcttcagtagctatggactggagagcgagaaggacattcagatcatcatatgtggaaagagcgacatcggccatgataagattaaattcaaagacaacgtcatcttcttggcttcggacttccaagacatgaaatactatctgaatgactatatttttggggagcatatcttccccattaataaacccgtcatttttaaagaggagtttttcaagaacaacaatttcacttccgacgtcgagcaccacgtgctgaacaacagcaactccatcctgaatgtactgaaccgggaaagctataagttgtgtctgctggctaacatagatgtgttcaacctggacatggacgtgcttaaaaccctgaacatgcggataaaggaggttgacaatagcttaatctacgattacagctttagggacgatgatgtcctcaagctcatgaagcttgtggatcagtgcgattccaagtctttcctgaacgtgaagagcgagctgtcaaacctgaatattaaatttctgtcccagaaaaccagttaccactacttcagtgcctataagaatattcttaattctaacagttacgatgagtttattttgaaagagcataatgacaaactccagtgtctgaatgcattttacctaaaccgcatcaaccctcgctacgactattga

SEQ ID NO: 3290 - DNA, 999 bp, synthetic construct
  source 1..999: mol_type = other DNA
ttgctggacgccgacgagttcatcattagcgacaacggtcagaacccccgcgagatcattaagaagatcaatgagaattactactatctcatcaagtggattacctacgtgcccacaaataatgacgactacaacataaagtttattccaaagaggatcactcacgtccgggacgaaagtttggagcagtattacaaggtgattgtcccgaaaaaggtggtcaacgatttcaatgttcgggtggaaatggggaatcacaacctgaaattcgacaacttcaatagaaatgagctcgtgaagaaagatctgaacctgaagattgctcatttcccactgagatccatagagcagtgcatctctaaagttagcatcggctggcccaacataatcgccatcaacctatataacctcagctggggcttccattggaaaatgctgtttgacaaaatcaaagaagagaatgatatttcgcttgatgaccttgaattttttgcaaagaactacgccttggtaagcacatcagatgatattctaatcaagaaccaacccatcaacctcgacttctgcgataagatagagataaggtatgacttcgaatataactacctgagaaatattcttgagaactacgcttacttcgccgaagagatcgtgtctttcaagcgaaagctgaaatccgtcccaattctcgatgaccgattcatcctgaagctggccagcgattacgacgtcattgagaagtctggattatttgacgtaaactggtactgtaaacggtatagtccgcctcgcaacatccatcccataatccactacctgctcacctacagggaaaatatgaatgaccctgcgggctttttttcaaccgaatattattttaaaacgcacgtggatgtggcaaacagcggaatgaatcctttcgttcactacatcaaatatgggaagaaggagaaccgcaagatcgcgtcctccaaaagtgagaactttggggtgcagtga

SEQ ID NO: 3291 - DNA, 1224 bp, synthetic construct
  source 1..1224: mol_type = other DNA
atgaaaatcacagttgcgggcgtgggatacgtggggctgtctattgctatcctgcttgcccagaagcacgatgtcaccgctattaccacgactgaatcaaaggccgagaaactgaaccagttcattagtcccatccgcgatgacgagattgagaggttttttaaggagactcgagacgggaagaggaagctcaacctgcacacaacgactgataaggagtcggcgtataaaaatgcggatctggtcattatagcagcaccgacgaactacgatgacgtcaaccatttttttgacacatcagctgtggaggacgccatcgaatggactctcaaggtcaatccagatgttttgatggtcattaagagcacaatacctgtgggatatagcgagtctgttcgggaaaagtacggtgtcaaaaacatcatattcagtcccgaatttctccgggagtccaaggccctgtatgatatgctccatcccagcagaattattgtgggctgcgatgacgaccagaaagaggatgcccagatgtttgtagacctgctgttggagggggtgagactggaagaaaagcgttcggactccccaaagcaggatatccctatcctaatcgcccccttcacagaggtggaggctagcaagctgttccaaaacacctacttggcattacgcgtaagctacttcaatgaacttgacaccttcgcccagaccaaaggtcttaacaccaacataatcattgactgtgtgtgcatggacccaaggatcggcggacactataacaatccctcattcggctacggagggtactgtctgcctaaggacacaaaacaacttttagcaaactgcaaggacgtgccgcaggccctcatcgaggcaatagtcaattccaatgctgtgcgaaaggagtttatcgccgaccagatcatttccaataatccaaaaaccgtgggcatctacaggctgatcatgaaaagcaacagcgataacttccgcgcatccgccatacaggatgttataaagatgattaaagccgaaggcattaaaatcatcatctacgaacctattctagacgacgggagtgagttcctgaaatccgaggtggtgaatgatctcgacatcttcaagagagaaagtgacatcatcctggctaaccggtttgaccaagatattctcggagacgtggccgataaggtatatacccgcgacatcttcggccgggattga

SEQ ID NO: 3292 - DNA, 2682 bp, synthetic construct
  source 1..2682: mol_type = other DNA
atggagatccgctataaaaacctcttaaaagtgtttaccattttccttgtgttgctcatcagttgcggatttgcctccgcagtcagtgatctggatgagggcaatagtgcaaacattgtggataatggggacctatcattatctgacaacatgatgagtgaaagcgccgacaactgcaagaacctggaaaccatcgaggagtctcataccttcagtgagaagaacacggtgaaagacgtgtcatatggacttagcacacccatcgatggcaacacgttcgaggatatccaaactgcgattgataacgccgcggacggagacattattgaactcaacggtacttactttggcaacgggagcgatataaagatcacaaaggatctgacaatcagcggcaatctcgaaacaatcctggacgcgaagaacaaaagcgggatcttctatgtgaactcaaacaacgtcacgctccagaacttgaagttttacaactccatagtgcccgagtatggatcggcggtgcacttcctgagcaacggttcggtgattaactgtaccttcatcaataacacggctggtggagtgtatggtaccattgactacttttggtctactggcggtgtcgtatacctggccaagggcaacggctctgtgattaactgcacgtttatcaataataccgccaacgcagacggcggtgccatttactgtggggttgacggcgggtccgtgattaattgtacatttattaacaacactgccaaagagctcgggggggccatctacattggcggcgggcacgacgggggcgctcattactcaaatgtgtatgattgctacgtcgacaattgcgtattcatcaacaacaccgctggggaaggtgctgggatctactatggcggaggcggtctgatcttcaactgtacctttatcaataacaccgctcgattcggcgattcaatcctagtcaataacatgtattaccctaacaccgtgagcgatatgaaaaccctgaccattaaggaatgcgactttaagtccaacaaagagggttggggatacgtagtagtgaactacaaagcatacaagaacaccatctgcggactgtgtgaaatcattgattcaaatttcagcaatgagcaggccgaagactacattaacatttataaccagggaaacatttacttgtcgggaaacaagatctccagcaattacgctacaataagcaacgatctgatagcttacggtaataatgcaaacatcacctcacagacaagcctggtaattctcgacaatactactaaaagtgtcgaaaaatactctccatttgatgtttacgctgttctggtcgacgatcaggggaattatatccgggacgagaacatcagtctgttcattgggtctaagaatgtaacgggcgtgttcgataacgtcaacctcttcaagtaccacctgaatgatttaagttcccttaactatcggactctcgtgtccggcaattatgatggggcaaaggacctggtggttaaaaccggcgttttgcagctggacgtcgaggtcgatatcgacttggattatgaggacgacaatgtgatcataaagctgaaggattccgagggaaatcctatctccggagagagcgtgagcctgctcatcgacaataataccagctctgtgaagaccgactcaaatggtgaggcgaaggtcccagtgaatgagatctcgatggtcaaggcaattttcactgatgggtttggcgtgaatgtcagttcctatctggtggtcaaggccgtggagaaggttaagcttgtgccaacttttgccaatgctaaaatctcattggacgtggaagacaactgctccgctgttatcgtcacgctcaaggatctgtccggcaaccccatcagttctgccaaactggacgccctggtgaatggtgccggcaaaacccttatcaccaacgcctctgggcaggccaaaattgacattgaagggaacgcgacagtggaagtgacttacatcgatgcagagaacgctaacgcaacagtttccagcagcctgactgttataaagaatgtggactccgttccggttattcccaataggacagccacgaatatcatttgtaaggatatgaataccaccgccgtggccaagccggacggaagaatcggaaaatacttcgaggtcactctcgtggacgtcaacggcaaggctctcgctaacaagtccgtgaatatagggttcaatggagccgtgtacaatttgacaacaaatgaaaccgggggcgccaaacttcaaatcaacctaggatacgagggcaaatacacctttgcaatagcattcctaggtgacgacaactatacggggtcctttaaggtggccctgatctcagtcagcaagcacagccccaagcttagcgcgcctgccaaaacatataaggccaacgcaaaaacgaaaacaattaccgctacattcaagacatcgaatggaaacgctatcagcggcaagaaaataagcttcaacatcaatggcaaaacttatagcggcaccacaaactccaagggagtcgcctccgtgaagataagtctgaacaagaaaggcacttatagttgcaccgccaaatacgcgggcgacggaatgtacaaggccaccagcactaagttcaacgtaaagatagtatga

SEQ ID NO: 3293 - DNA, 2274 bp, synthetic construct
  source 1..2274: mol_type = other DNA
atgaagattagatataaaaatctgctgaaagtgtttaccatttttctggtcctcctcatcagttgcggatttgcctcagccgtcagtgacctggacgagggcaactccgcaaacatcgtggataacggtgacctgtcactgtccgacaacatgatgagtgactctgccaataattgcaagaatttggaaacgattgaggagtcccacaccttcagtgagaaaagcactgttaaagacgtgagctacggcctttcaacaccgatagatggaaacacttttgaggacatccaaatcgccattgatgacgctcaggatggggacacaatccagctcaacggcacgtacctgggcaacggaagcccaataattttctccaagaacttaactattggcgggagcggcgagacaattttggacgctaatggactgtctggcattatcaattcgtctagcgaaaaaatcgtcctgaaagacttgacctttgttaacgggtcggggttcacagtggacttgcgcgagaacaacggtgataatttgaaatactgctcaatcatcaactgttcctttgaaaagtgttacggggacaaaaatagcgccgtgatctgcctgaatggatctggaattatcctggactgtgattttcactatactaactgcactataaacatcatggggagcgaggacgtgtccatcctgaactcttcgttcaactatacgggcggatatgctatccattccaacagcagcaccatcgttaaagcgtgcgatttttacttcaacagtttcttcgagacctactacgagaatactaataaggtgtacaatggcaatattgtggacctgtgtaagaacagttccatcagtgattgcatgttcaagggcacatactacgagaccattatcgattccctagtggactccaacacttaccagttcagcacactccatgtctgcgatgaggtggacgtcattaactgcactttcattagatctatcaccgaattttctggttccgccatctaccattttggcaacggcagcataatcaattgcacgttcatcaacaattcggctggcggcagccacggaacccctagctacctttatacccaggatggcgttgtatatatagggtctgacgattgtctggtgctgaactgtactttcatcaattgtcactccaatacattcggcggtgctctgtatatcaacgccaggaactgctatgtgataaactccaccttcatcaaaaacagtgcttacgaagggggggcgatctatctggctcaaggggattgttacgtcataaatcccgtgttttccaataataaggccaatcactcactctataacgatatcaacgatttaaatgctgtttcatacgagaatgacaccagcgacgacaatcagactgaaaagattattaacccctcaatcgaattagactatctcgatgacaacctcattataatcttcaaggatatcgaaggtaaggcaattagcggagagtcggtgtcacttatcatcaacaataagaccattagcgtgatcacggactcaaacggggaagctaaggtgccactcaatgagacctctatggttaaggccttctatgtcgatgccaacggtctcaacgtgagctcctccatgatgattaagatagtcgagaagaccaattatatccccatcaagcggaacagcagttttattgactgcaagaacatgactacctctgcaataacgaacagtaaaatcagggacggggaatacttcgttgtaagcctaaaggatgccaatggtaagccactgtccaataagcccatccagatcggattcaacggcaaagcctatgaccggaccacaaacgaaaacggctctgcacgcctgcagattaacctggcttacgtgggcacttacacatttgcggtctgttttcttggggatgactactacaacgggtcgtttgtagtggccaaaattgacgtaaacgcgcagaaagccagccttaatgcaccttccaaaacgtacaaggcatcaacaaagaccaaggcgcttacagccaccctgaaagatgcaaaaggacgattggtcagcggcaagtccataagcttcacaatcaacggaaaaagctatgtcgcaaagaccaataccaacggtgtggccacagtgaaggtgagtctaagcaaaaagggtacctacaatttcaccgccaagctcgacaatgataaaacattcaagacaacggcctcaagtggaaagctggtaattaagtga

SEQ ID NO: 3294 - DNA, 3858 bp, synthetic construct
  source 1..3858: mol_type = other DNA
atggcagcttacaacagcggagcatatatccaggagaccctcgacagtctaatcaatcaaagcctggactttaaggaaaacatccaagttattatcgtgaacgacgcgagcagtgacaataccgagtctgtatgccaagagtacatcaaaaactaccctaataacatcatcctaatcaacaaccgcatcaactgtggccctgcccacaccagaaacgtgggcctccactatgcagaaggggagattatcaactttctggacagtgatgactacatatcaaagaagacctttgaacgggtagattccttctttgaagactttgtgcacgtggacatggcatcaatcccaatcaagtttgtggggtccaagcggggagaccatccactgaactacaaatataagggcaccggggtcataaacctcctcaacaatcccgatgccattcagctctcctcggcatcagcgttcttcagaagcgacattcttaaagctagcctattcaaccactcccggtctcgctacgacggatctgtctctgttgtttacaatgacaacagtccggtttcagattcaattcctatgattttcaatgaaaacctaagtgtctctgaagatgctctgctcatcaaccagatgctcctgcgcaaccccctgcttggaatcctctcaaactgcacttatttctatcgaaagaaagcaacggacaacacgtccctaatctctgattccgccaatcaccggtcttacttcacatcccgtgtaaataactatatgatccggctgattaacgattccttagacttgtacggaaaggtgccagaatttattcagtacgtggtcatgtacgacctgcagtggatcatggagatcaggcaggtggatcacctcctggacctcgaagacctgacccacctgtacgacaagctaatctccattctcttctatatcggcgacaaggtgatattcaaccagaggtccatcccaagcatcctaaaatcacatatcctcctgctcaagtatttcggatggggatacctggatgataaaacatttaattttaaacagattgataaaaaatattacgatgagcacggtaacctcatcccgtatattgaaaaagaccaactctccttcattattcagaagctggagctgaacaaaatatatctggacatcgttgatattaaaaatattaagtctaaaattaatctgaataataacaataatggcactccagacgatgacaaaaaggatgatggaaaaaatagtcacgatttctacctttcttcgcaagatgatgaagacagacaggagctctatctctccgggatgatcacaagcttcttcaacagcgacttcgacatctatgctatcgtaagcgaaaaagacaagagcagctcccatattcttgaaaaagagatcaaggtcaaaaagataagctatccccagcgggacaacctttcccttaacttcaactatggttataaccagtgctttgaggtgaggatacccttgagcgagaagacaagtcgcatttccttccgcatgggctttaagagcctgaatgaggtctgtaactccctcggcatcgagacgctcagcgaggattcatttgactacattaaccatcacgacctggcgttctccggagacctgctgatcgactacaatcacaccagtcgcctctcgcaggtgtccaactacaagatatccaaggattacttaatcctggacaacggtaaccacatgattgttagaaaaagaagcctcctaaccactataaagtacgaactggtcacctttgcctctatccttggtgaacgagaggagggctggagaaccggcatcctgcttagggctctgtactttattttgtaccctttctatcgcaacaagcgcatctggatatttatggatcttccctacactgccgacgacaacggtttacagttgttcaagtctgttcggaatatggacaagcttaagctggaggactataataagctgttggacttggatgaaagccttttatcacgggagcgccatccatacaaatacgaactgttcgaaggcaaggacatagggctggtagggcttatcaaaaacgtatttagtagtattaagaacgtcttctcgagggatagcgacgacgatgaaaatggcaaggtcaagttcatcaaggggggctctttagggttggatgataagtacgatgagcttgaggataatggagattattcagactacttgaatgagcactttggttttgccgacgtgaacgaggactatctggacaaccaggacattcaagtggaaggctcgagctttgaggatgacattgagcacagctccaaattcagaaggaacgtctatggcaaggccgggtttgtgaaaagtttcgatgccaaagtggatgccaagtataacgactcgctgaatagcctggagaacaggttcgataagagagtcagcaatataaagacacggacaagaaatgcagacgtccgtgagaaagtgggcctgtctcgagatagggatgacaatttctccaaggggtttagcccgattgactttatctacggcttcgacctgtccaaattcctcagcgaaaacagcttcgtgtatttagtgaactacatcctgtaccgcatctccaagctgctgctgcgacctagaaagatcaaaaggattgacaacagaaaaatcaagaagtactttaccctggagcagagcacaagccactttaacaatgttcgccatatggaaaaccagtacatcgcaagttccaacagggacaagttgcggaaactgttagcccgggaaaagcagagcaatgagtacaacgctctgaaaaagataggtcccgtgcttgcctacaagagtttgaaacaccgaatctacgcgctctatgctgaggtgattgtctcatctcaccctgacaacaatctgatctatcccttctacggtaatttcccgcatgtggcgggcctggtgaaggctaaaacggtgttcctccagcacggagtgacaaaggatgatgtgtcattctggctgaatcgcttcgacaagaacctcgacatgatcgttactgtgtcggatctggaaagggattcattcttcccacgttttgacggggacggggagtatatcagtagttactatggctacgataaagagactgtccaggtgctgggattccccagattcgactatcttgagagtttagaggataaaaaagagatcgtgatcatgcccacgtggcgacgccagttgcacaacctgaaaaaagaagagttcgtaaacaccaatttcttcaggacattcaatgccttgataaatgataaggtgctgctggattacttggactcgcatggatacaagctggtctttaagccccatcctaacctcaacaagtacatcggtctgtttgataaggactcaagggtcgaatttgacctgaatgacttgaactttgctgaaaacagtaaggatgggactgccaaatatggctctcgacgttacgccgatatattcaatcattccagcctgattgtgaccgactttagctccgtgtcctttgacttcgcctacctcaagaagcccatcatttactatcactacgataatgactaccactttgacagcgagaatggctacttcaattacgagtctatgggctttgggccagtcataaaaagtcataaagagttggttatgagcattattggctctattgagagcggatgcaccatggatgagctgtataaggggcgggtggataagttctttaagtatcatgatcgtgacaattcacggcgggtgtacaaggccatcctggagatggacaagtattactga

SEQ ID NO: 3295 - DNA, 1017 bp, synthetic construct
  source 1..1017: mol_type = other DNA
ttgcggtatatcgcagatgagctgaaaggccgcaagacttccgacggaaagccctacgaatttgaatttattcctaaagatgagttctcactgagcaatatgaagaaactggccacctccaagtacatctttctcactgacaacttcttcgccctggccttcatgcgcttcaacaagaagaccaagctcattcagttatggcacggaaccggaatcttcaagaaattcggctatgacctgcttgaggatgaacagaagaagaccatgcttaaatttagtaacaagatcaccaatttaatggtcagctcacacaatgtgattgacatctacgcccgcaatttcgccatagataagtcgaaagtgcttcctctcgggataccccgaaatgactattactctccagagcacctggacgaggactatgtacggcaattgcggggcgagtttgaacagaggtaccctaacctgaggggtaaaaagatagtcctatacgcgcccacatttagggaagaccccaaatacaacgctgtgtttaattacttcgacattgaaaagttcatcgatgagctcggggatgattatatactgtgcatcaagctgcatccaaactacaataaatttgcggatagtgctaataggattgacctggatgagctcactgacacgtacaacatcgttaacttcacagaatataaggatgagcagaagctgttcctcatctccaacatcctgattacagactactccagcgtcatggtggagtatacacttctgaaccgaccaatcatcctctttgcatatgacctcgacaattatttggaaaacgagcgcgggttctacttcgactacagaaaggaagtgccgggcagaattgtgaaagatacggatgagttggtgcgggtcatcagagagaaagacttcaacctatctaacctgaaggagtttgccgagttccagtttgactattttgatgcatacagcagcaaacgtattctggactacgttctggaggaatga

SEQ ID NO: 3296 - DNA, 285 bp, synthetic construct
  source 1..285: mol_type = other DNA
atggctggcaccacaaacctggtggatgccatgcttgtcctcgcgttgggatttctcatcttcgcagtgatcggctggaacctgcaaagcgttatattctcagacatggacccccaggagcggcaggccaccatggagtccattaatcagatcactaatgtgacccaaggggaacagctaaacagtaccccagacacaagcaaccagtctggagaaggttatgtagagcaggggaaagtgtacaaggattccaagacgggcaatctgattatggtcgagacttga

SEQ ID NO: 3297 - DNA, 732 bp, synthetic construct
  source 1..732: mol_type = other DNA
atggaactgatcttcagtgtatttgccgtaatcagcctggctgccatcctgctgctcggcatcgagctaggattactgtccaaattctttaatctctcattaaagaagcatctcatccttgtccttgcttacagcatcataatatttgcagtcattgtgattctctcgccatcctacgaggccgtcttaaatagcaccttctacagcttctactattacataattatgggctttgtgtgccttgccctggggcttttgacccttttctattggagcaagatggagtggtatccgcctgcactgaaatgtctgctgtacttcgatttcgttcccatcagcctgagtctgatgctgatctcaacagctctcatggcgccaagcttcgcatttaaagtccagaacttctccctgaacctgacgatggtcaacagtggcctaatcctggtggtgctcatggctatcctgatggtgattttctacctcttttccgacttcgtggaggactatagggtgactcactatgccattattatcggtagcttgctcttgatttttgccctggcctactttgtgctggggttcatcattcccaatatggcgccagttttcgcaaacccttcaacagaactaaccctcatgcccatcgagtccatagtggttatggtggtgttgatcgcgctgctgcttggattgggggccctctttagaaagcggactaaccgcctggaatga

SEQ ID NO: 3298 - DNA, 642 bp, synthetic construct
  source 1..642: mol_type = other DNA
atgacaattcctggcggcgacttcttaaccaccggactgaatttaatttcacagagtttgctgataccggtagttatcatcctcctcgtttttgtggtcgtggtcgtgatttcacttggagggctgatctatgaatacacgtcgcgcacaaaggtctctgtagatgacgtgtccaatctgatcctggagatttccgacagtgggagcgtggatagcatgaagagcgccatcgctaactctccaatccccaaactgcagaaggacattctgcttaagatagcgagcaccggaaacatgagccccaacaccagagaggccttcgcccgaaaactcatcgagaacgaagaggggctaacggacaaatccctggaaataactgacatcatcacacggatcggccccaccctgggcttgatggggactcttatcccactgggcaccggtctagcagccctgggcagtggagacgtcaacactttgtccgagtcgctgattgtggcattcgatacaacggttgtggggatcggttccggcgccctcgcgtatgtgatttcaaagctgcggaataggtggtacgaggaatacctcagcaacctcgacgtgctgtctgatgctgtcctcgattttatggctaaacactga

SEQ ID NO: 3299 - DNA, 882 bp, synthetic construct
  source 1..882: mol_type = other DNA
atgaaccagaaactatcaaactacttcaatatgggtctgtcgctctacctcctgctggatttgatccttataacattcacgttagtgtttaagatagagaataacttatactacatcataatcgccatcgacaccatcctgtgcgttattctgatctatgagttttataatcgattcaagaccgccgagaacaagattcacttcagcatccggaactctacggaaatcctggcgggcatccctattgacctgattttccttccatttgctccgaatctgactgtcttcctgaccattttcaacctgctcaagtttctcaagatcatcggcctctttttggagttttttgagacgattgacgtgttcctgaagaagacccatcttgatgagattctggggctggccattctggtgatcctggtctccaccctaggaatctacctctttgatcccagcataaacagcatattcgacagtctctggtttgtcctctccacaatcactactgtaggctatggcgatgtgcttcccaatagttatattggaaaagtgatagggattctgatcttgatcttcggagtgctcatcttctcagctatcacaggggccatgacctcctacttcgcaaggaaggtcttcgccacaaaggactttaacattaccgagaacgacgacaatatccggctgctaaaggaagacttaagcttcaacaagaagaacctcaacaacgcaaacgaaaaaatcgataaaatcaataatgatgtggaaaagctgaaaagagagttgaatgagatgaaagaggaactgcgcgaatctaggcagctgaacaaggaacttaaagaagagattgttattctgaacgagaatttgaaaaataaatga

SEQ ID NO: 3300 - DNA, 840 bp, synthetic construct
  source 1..840: mol_type = other DNA
atgcagcggtcattatttgataaagtgaaaacatcgctgtggatgctaccatccttctttggattggtcaacggcctgggatttatctatctcggccgcaagaacagtaacatcaaatggaccattgagggcattgtctatgaaattccctggctgatagccatcctaaacattttcaacctttcagtggcaatcaccgcattcagcttggggagctttatggtgctcataagcattgtccgcagtgtcatggtgaattatgaataccagagattgcttgatgaggaatatgtggtgcggccgagcgtggagagcggtagccacgggctcgataagcagatcaagaatggtcagttcaacgaaaaggaagcttctcctaaggaggagaaagttaaatacaacccctacgacctgagcggcatcgacaagaattacgacgggcggatcaagttcgacaagtacaaggcggaaatcaaggaaatggaaaaggaatttaatgagaagaacgacaacgtaaaggagctggttgaaaaacgtttctcccaatctggaatcacttatgaccgattcatgtttatcataaaagactccgaggaccttttcaactcccaggccgccaatgccctggacatgattgacctcgctccagagtacacagagaccatcgatgccgagataagaaaaaaaatggaaaccctgaggacgatcattgagaaaaatgatgagctgagggatgagctgatcattaatatgacaacggagactgggtcagagatggagatcaagaacctcttcgaggatatgggccacctgaccagttccattaagcattacgaatga

SEQ ID NO: 3301 - DNA, 360 bp, synthetic construct
  source 1..360: mol_type = other DNA
atgacgatgaaaacagggagcgaactgaaattcaacgacgattatgaatacatgaccttcgatcttgaccaggagtttctactgggtgagctgggccaggacgaaatccgagacaagatcattaccgcccaggagatattggataaccacctcgccaacccctatgaggcaggccaagagatcgaaattgagaaccccttcgagaagccaatcctccgcaagtacatcaaggtaaatgaggtgacagaggacatgatagatatcatctactaccaggtcagaaatcattacgaagtgtataaatttgtgactctgaccgacccggctcacaggggacggattctgattcctaaggactga

SEQ ID NO: 3302 - DNA, 474 bp, synthetic construct
  source 1..474: mol_type = other DNA
atgcagttcgatgaactaatggaaaaaggggatcaagcgagaaaggataggaactatgaagaggccctggactggtaccagaaggccttgaaagaggataaacgccggagcgaggcttggaacatgaaagcaagtacactcggcctcctggggaggcctgacgaggccatcgaggcgtttgacaagtccttggagctggactttaataacgaacagacctggtttctgaagggtatgaccttattcgctgtcgaccgattcaatgaggccgactcttgcttcgataaggcagtaaattcagacccacacaatcccgtgtactggaagtacaagggaatggtcctcagccagctcggccacaaccacgacgccctggaatgtctggacaacgcactggagcttaacccggatgacgaggctatccttgttttccggcatacggtggtggaagccattgaaaaagaggataactga

SEQ ID NO: 3303 - DNA, 1956 bp, synthetic construct
  source 1..1956: mol_type = other DNA
ttgaaagagttcaaactgaaaagtccatacaagcctctgggggaccagccccaggctatcgagagcctgtcaaacggaatcaaagagggcttccacgaacagaccttgctaggtgtgaccggctccggcaaaacttataccatggcaaacattatacaaaacgtgcagaaacccacgctcatcatcagccataacaagaccctggctgcacagctctatgaagaatttaaggtctttttccccgataatgcggtggagtactttgtcagctactacgactactaccagcctgaggcgtacgtcccgagaacagacactttcatcgacaaagaagccagtatcaacgaggacattgacatcatgcgccattctgccacacagtctctcctatctcgtgacgatgtcatcgtagttagcagcgtgtcctgcatctacggaataggttccccggaagactatggggagttcgcattctcgataaatgtcggcgacatctacgaccgtggggatatcctgcggaagctgatctttatgcaatatgaacgtaatgacattgcatttgaaagaggtcagtttagggtccgcggcgatgttatcgaaattaaccctgtgcatggaacaccccccatacgcatcgagctcttcggagatgaaattgatgccatcagcctcatcaaccccgtgactgggatgcgggaggaaagcattaataggtatgttatctttccagccaagcacttcgttgtcggtgctgatagaatggatcaggccctcaaggacatagaagccgagctgcaatcacggctcaacgagctgaacctggagggcaagtatcttgaagctcagaggttggagcaacgaacacggttcgatctggagatgctgcgggagatgggttactgtccagggatcgagaactattccatgcaccttagtgggagaaactggggagacatgccttactccctactgaaatacttcccagatgactatctgacgataatagacgagtcgcacgtgaccgtgccccagattaggggcatgtacaatggggaccgggccagaaaggaaacacttgtcaactacggattccgccttcctagtgcaaaggagaacaggccattaagattcgatgagtttgaagccagccagaaccaggtactgtatgtgtccgcaacaccagggccttatgagctctcaagaagcaagaatgtggtggaacagatcatccgtcccacggggttagtggacccgaaaatcaccatcagaccagtgaagggccaggttgaggacctcctaggagaagtgaggcgaaaagtggagcacgaccaacggattctcgtgaccactttgacaaaacggatggccgaagacctgaccgactactacgcaaagattggaatcaaggtgcggtacctgcactcagagattgataccctggaaagggtggaaataatcgacgacctccgaaggggcgagttcgatgtcttagtaggagttaacctcctcagggaaggcctggacctgcccgaggtaggccttgtcgcgattctggatgctgataaggaagggtttctgcgctctgagacgtcccttattcagacgatcggcagggctgccagaaacgttgacggcgaggtgttgatgtatgtggatgagatgactgattccgtccgaaatgcggtggacattaccaacaagcgacgcaagctgcagatggcctacaatgagaagtataatatcactcctaagaccacacaacggaccctgaaggagaagaagcttgccgaccgcgcccccagtcgcgatgacttacgcggcatgccgaaagatgaactgaagctcttgattaaggacctggaggctgagatgcgcgaggctgctaataatctggagttcgagaaggccgccagcttgcgggatcagattgtggccctgaaaagcattaaaaaatga

SEQ ID NO: 3304 - DNA, 1917 bp, synthetic construct
  source 1..1917: mol_type = other DNA
atgaaatttaaaaatagtcatatcctcctcgtgtcactgatctccatttttctcttgctgtcgatatccgccgcttctgcagcggactctgacattgccgcggacgacagctccgtggatattgtggaaatagaggatatcaacataaaagaaagccactatctctgcgatgacgcctctacgggcagtgaggatctgagtggtgacgagaatacaagtgcttcaggcaccgatgacgcgacagggggaaatgacactgatgctacagggggagatgacactggaaatgctacaagtgtaaatggcactgaaaacgttactgatagcaatgggacaaatgccaccaatggaacaaacgccaccaataacaccaaatatgacggtcctgtcaccaatgcaaccatcattcctgtgagcacgtctgccgattaccagtacggcaacttcacattcaaggtggtggacaatgctaccggagagcccctagccaatcaaaagatctctgtgagcggagtgtacttctttacctttaacaacggatcatccatctccactacaaaggtcttcacgaccaactccaacggtttgctggtcattgcaaacaagaacctgaacaagaaccttgacacactgggtatggtttacaatttcaccgccctggatgtgggcaaatacgacctgaccttcagcggcaacgacagcctgaagattgttgtcaacaataccctcccaatcactgtaaataaagtcaacgccgaaattaaggcaagcaacttcaaagatgaggtgggaacaagtaaaaaatatacatttaagctggtaaacaagaatacagggacggtgatcaaactggcctccctcaaattccagatcaagttaaacagttcaggatacaccacctataactcaacaaccaacctgtcaggtcaggtggggtataacctgaaccttctcgccggcacctatccggttcgaatcgtcaacaatgattcaaatctaaaggcgtccacggtcagccgcaatgtgacacttacgaaaaaggtcggggtgctctctgcctcgaacagaactatcctgtacaactcagctcctacggccataatcaaactgacggacaagaaaaccggcaaggcagtggcaggggccgtcctcaaggtccgggtttacaccacaagcaaaaaatatagcgatctcgccttttacactgacaacaaaggacaggtcagcttcaaggcagcactgagcctgggcaagcacaagatgattatcagcaccttggacaataactacactgctagcagcattacccggtatgtgaccttaaagaaaaccacggggaagatatccgctcccaaaatctcggctacctacaagtctggcaaattgtatacaattacccttaagaacgccaaaaacggcaatgccatgtatggctccacactgaacatcaggatctttgtgacaagcaaaagctactacaaatacactggcatgactgacggaaacgggaaggtcaacatcaacaccagttccctaaagcccggcacttacaaggtgtctgtttcttccggggactcgggcttcacggccaaggcagcgacaggtcaaatcaaaatcaccaagataccacttaagctgtcccccacagcctataaggagaaatacaattccggcaaaaccttcaagatcaaggttaccaataagaataccaataagatcatttcgggcattaaggtaacggtgaaggtgtacacttccgccaagaaatacaagacctacactgtgaagaccactaacaaggggattgcttatttgaaggtgactcagaagccagggacgtacaagaccgtagtgagtctgtctaacgcttattactcagcaagtgcggtgacttccaagatcactgttacaaaatga

SEQ ID NO: 3305 - DNA, 693 bp, synthetic construct
  source 1..693: mol_type = other DNA
gtgtacagcgaaaccaagatcgcaattccaatattccaaaagaaaaaggaagatgtgataagcgttgctcaggactgcatcatcaaaggtgcagatatcctggagctccgaatagacggcatggaaaaccctaatcccaagctagtacgcgagataatcgaggagatcaactttcccatcattgccaccaaccgcacaaccagggaaggagggttcttcaagggcaccgataaggatcggatcgccatattaagagagtgtgcagatgtggccgactttgttgacgtggaactccagacaaacagaaagcttattgaatccattacagagacgggggtaaaaacgatcatttcctatcataactttaagcagacccctgatctggactttctgattgacattgtcaatcaggagaaagagcttggggacattgccaagatcgccgtcatgccaaataacctggaagacactctgacggtgctggcgatcttgtctcacttcgatgacactgtcgcgatttcaatgggcgagctgggaagctacaccagggtgatcgcttcgaaattcaatgcccccttcaccttcgctgtggctaacgacactacagccccgggccagatcgacatcgatacaatgcgggtcttgctcaatagtgacctcatcaacactgatgagtttgagaacaatgagtga

SEQ ID NO: 3306 - DNA, 726 bp, synthetic construct
  source 1..726: mol_type = other DNA
atgaaagttgtagctatcggggcggatatttcaaacaatgatgtgagcgtttccaagtccctcgtcgaaaacatagagaaggacattcccaaactcattgatctgggagctaaaagggcagcattgacaaacgtcacaggagacgacgtggtcatcagcgccttttgtgaagatgatctgttagaaactgtcaatcgcggaattgcagacatactccgagcgaatgcagagagcctgggtgaccttgctggagttagcgatgacccgagcaaggccggggagggcctctcatacgccgaggcaagcctgaacgatgacggctaccaggatgccattatcatggccttcgacacctacggtggggagggctttgttaaggacgtggccaactccgccatcgaggctgccagtggcatgaagtctgtaatcgacgtgtcagacagaatcggctccaggaccgacatcccaggtgtcggctatgtgtccgaaaatgacacggatgatcctgtggtggtggtgagtgtaaaagacctagaacagatagctgtggtggctggggccatgatcggcgcggcccttgggtgcaagaacacctatctggtcaagcggcacaccccctgcaatgtgctgcccgggagtgtgctggtgtcggtcactgccttcatgaacggaaacatgattgacctgtctatcccattcgagaacaaaacacggatcttgggctga

SEQ ID NO: 3307 - DNA, 870 bp, synthetic construct
  source 1..870: mol_type = other DNA
atgataatcttagatgagaacgtgaaatgtctcgtacagggaatcactggcaaacaaggttccttccacactgaacagatgctgaaatataatacaaaaatcgtagcaggcgtgaccccagggaagggcggacaggagattctaggcgtgcctgtgttcgattccatcgaggaagctaaggaaaatacagacgtgaatgcgtcaattatcttcgtgccagcgccatttgctaaggacgccgcctttgagtccatcgaccacctcgatcttgtaattataattacccgggccacattccccatccatgacaccatggaaatcatggcttatgcaaaggccaagggggtgactgtcataggacctaacacgccaggtgtcatcagccccaaagtgggcaagctgggaatcatgcccacccatatattctcagaaggcacggttggggtcatcagcagaagcgggaccctcacctatgagattgccagtcaactgagccgggcagaaatcggccagagcacatgcgtgggcattggcggcgaccccgttatcgggaccccgtacattgaggtcctgcagatgtttgaggacgaccctgagaccacggagatagtcttgatcggggagatcggcggatcggccgaagaggatgctgccgcctacattaaggagaacataacaaagccggtcgtggcatacattgccgggatctctgcacctcccggaaagaggatggggcacgccggagcgatcattgcaggtaactccggcactgctaaaagtaaaatggaagccctggagagtgccggtgtgaaggttgctcgcaagccctctgaaatcgtggagtacattaaggaaatccgaggagagtga

SEQ ID NO: 3308 - DNA, 1203 bp, synthetic construct
  source 1..1203: mol_type = other DNA
atggacaaagaggaaatcatcaacaaactcatggctggtgagatgaagctgtatcagattgataaattcacagaaaacgctacagaggcgctggatattagacgcgaatttatagagcgtcattccaattgtgagctgaaccagatagccaattacactttggacatggagaaggcattttccaaaaacattgaaaaccccataggtaccgttcaagtccccattggcgttgtcggcccactcaaaatcaatggggaacacgccgacgacgagttttttgttcccctggccacctccgagggcgctctgctggcctcagtcaaccggggctgctcggcgatcacagcttctgggggagtcaatgcccgggtgatcggcgataagatgacgagggctccagttataaagaccgatagtgtggtagaggccgtgaaggtaaaaagttggtttgagactaaattcgatgagctaaaatccatcgccgagtccaccacaagccacggaaagctggtgaagatcgaccctatcatcatcgtgggaaactatgtctatcctagattcgtctactctacgggcgacagcatgggcatgaatatggtaaccatagctaccgaaaaggtgctcagtaagctgtacgatgatctgggggtgcatgcgattgcactgagcgggaatctctgcgtggataagaagcccgctgccatcaacctcgtggagggccgcggaaagactgtggtggccgacatcttgatcccagaggagatcgtcaaatccaagcttaagaccactgcaaaggccatggaagaggtaaacatcgcaaaaaacctgatcggatctgctgccgccggcagcatggcgttcaatgcccacttcgcgaacatgattggtgcaatattcctagcaacggggcaggacgaggcccacgtggtggaagggtcgcttggaatcacaaccgcagaggacagggatggagacctctacttcgccgtgagcatgccggacttacctattgccacaattggcgggggcacccggcttgaaaccgcaagcgaaggtctgagcattatcgactgcctggggtcaggcaaggtcaataagttcgccgagattgtgatttcaactgtgctggctggtgaattaagtcttgttggggctttggccgccggacacttggctaaagcacatcaggaactcggccgatga

SEQ ID NO: 3309 - DNA, 405 bp, synthetic construct
  source 1..405: mol_type = other DNA
atgagcgacaaggagtacattgatttcaaaaaggagtttaaagactttgcccaggacctggaaaacagcaagccaattttcgacgacgaagatctctccttcgatgacttcgataatctcataggcaacattggagaaaataatctgtccgatgattcaatcgacaggtacggcagtataaacgatgatctggacaaactagacagtcttttcgggagcgattgccccgaaatcacgctggaaacagagaacatgctcatgaacctgagcatcaaaaaggactactccaagatcaaagacttcaacttacggaagaaagagttctttaaggacctgaaggatttcatcgacgagtttgagtcaaccgaggagtcggacgagttgatgaagttttatgatgactga

SEQ ID NO: 3310 - DNA, 156 bp, synthetic construct
  source 1..156: mol_type = other DNA
atgtgtagttcaggaggcccaatggccgacctgtccatgaaaaaactaaaaaccaagaagtacaagtgtctcgattgcgggaatgagttcaagggtctgggcaggaaggtgatctgccccagctgccagagcgacaacgtcgagctgcgggaatga

SEQ ID NO: 3311 - DNA, 405 bp, synthetic construct
  source 1..405: mol_type = other DNA
atggtaggcatcgcgaaggctggggaggacaagatgctatttatcggaacaccagacaatgatgagattgtgcagtacctggaaaaggacgatttgattgcagtgagcagtttcaacctgggcaagaaatacgaaaaggggatacgctcgctcatttatctgacgcgggacatcgaatctccgatcatcgtgcttcccaaaaaccaccccgcctcaaagagactgaagatggtcctgagcgtcggtgaaaacgttaggctcgattgcggcatcatccccgggacccatccagagcaggacattttatgctcctgtgacagtctctccggactgaatatcgtgaaaagcgccgatggcgtgataatagagggaaacgtccctgactacaaaattgagcctttctga

SEQ ID NO: 3312 - DNA, 714 bp, synthetic construct
  source 1..714: mol_type = other DNA
atgctgttgcacgagcaggccttccagcttataggtgaatctattgtggtactggtggttctcataatcatcatcctaattatagccctgatcctgggcatcatcctcctgagacggaacaaactggtctttcctagtctcattatctttgttgtgaacgtcttctactcccctctaaagagtctcgctaatttcttacgattggatgacgctttggtggaccatattggcatagaggtgaggaataaagtcaacaagccaaaatttgaccagattccgcccgaggagaagattatcgtgctgccacactgtctgcgcagccgggactgcgaggcaagcctgaaggaaagcggaatcaaatgcacattctgtggaaagtgtgcaatcgggacgatcaagtcaaaggccgagccaatgggctacaaggtgttcattgtacccggatcgagctttgtaaagaagatcatcgagcaaaacaagttcaaaagcgtggtcggggtggcctgccacgtggatctgaaccagaccatgatggcgctttcagacttctatccccagggcgttcttctctccacttccggctgctttgagacccgcgtggatgtctctaaggtcctgagcacaattgggtactatgagtacaaagaaaaaaataaatccattgatgatgaaaaggacgacagcgaagacatcggtaggatcaaacccagttga

SEQ ID NO: 3313 - DNA, 390 bp, synthetic construct
  source 1..390: mol_type = other DNA
atggaggagaacgagatttctcccttcttcacgatcaaaaagatacgggaaggagacagcattcagctggatcagaaatacattaaggtccggtcaaacacagacaaggtgatcgccatccactacaaggcccccatcgaacgaaccatcgaactcgaaatgttctttgaggattataatccgatcgagaggctgaattacaacattggcgacaccggttgggtcggggcaaatttcagagggctcatcgatggcaaggacaagtccctgccagtggactatgattataagatcttgctactggaggaatacaaatgcctgagcaaggtggagcttaagcatgtaaaaaggagttccaaatttcgccctaactacactatagctaaatga

SEQ ID NO: 3314 - DNA, 672 bp, synthetic construct
  source 1..672: mol_type = other DNA
atgaacagtaaaaagatagcaatcgttctgggaattatacttctgagctttgccatcgtgggctctgcaagcgccttcaacctgttcggcggcccgactactgacttcgacaacaaattcatgagtggtacctttaccggggatgttagccggaacaatatcagcaccaatgactccctatccgactgggtggactcctatgaggataaggaacgcaatatcacctataacatgtcttgcattaaggggggctcattcctgacagacctctacgagctgcaggggatggccgcccctgaggtgaggaatttcaacggtgaagactggaaggtctactactctcaagcagtgccaacaacagatgaaaacaagaccgccaatgagtcctcggtaatcaatgtctacatctgcgaggctgatgtggataatgtgacctacatgattaacatcatcgcctatgacaacgaatcaattgactgtgacggcagtctctactgcggattctttaaggacgacatccagccacttttagagagcattactctgaaggatgcgaagaaggcgccccagatatacgatctcttgaacatgacgaaagatgactttaaacaactgcaggattatatcgagcaggtcaaaacaggaaacattcccgagacggctgaagggtga

SEQ ID NO: 3315 - DNA, 519 bp, synthetic construct
  source 1..519: mol_type = other DNA
atgaaagtcaccgtgtttcacgcaaacgagtgcgataagaagaaatgcactgcctttaagatggaaaagcaaggaaagtgtcgcattgtctacaagattcaccagatcccgagaggtgccgtggtgctcaacccatttagcgaaaaagcagtaagctttgaagatcgggggctcgtcgaggacaagggggtggttgggcttgactgctcctggaacaaagtgagcaagtctgctagtttcttctccctctcaaagtatcacaggtccctgcctttcctgatcgccgcaaatcccgttaacttcggcaagccctgtatattgtcaaccaatgaggcgatcgccgccacattctacataacgggcttcaaggaagaggccaaccatatcatggacggattcaaatggggccattcgtttattgagctaaactacgacctgctggaggcgtatagctctgtcaaaacaagtgctgaagtggtggagatccagaatgagttcctggccgctcacgagaaatga

SEQ ID NO: 3316 - DNA, 162 bp, synthetic construct
  source 1..162: mol_type = other DNA
atggaggacgtcgagatggccaggtttgaagaggcggagaaccgaatgttcaatgtgaagatctgtctcaagtgcaacgcacggaacccagctggcgccacaacctgccgcaagtgcggctacaaaggactgagattcaaagccaaggaaccccgggggtga

SEQ ID NO: 3317 - DNA, 189 bp, synthetic construct
  source 1..189: mol_type = other DNA
atgctcttcttattgtttaactacgtctttctgtacgccatcctcataattgcaaatctcagtttttcaattgacctgtccacaaacagcttcagcatctacaatcactatcttatcttcttcaacatccccctgttcctacttaaaaagatcaccctgctgaaggtgtttctgaacattctgaaatga

SEQ ID NO: 3318 - DNA, 750 bp, synthetic construct
  source 1..750: mol_type = other DNA
atggaaaacgtcgagcagcacctgaaagagattctgaagactcggaaaatccatttaactctaatcgaccccgatgagcagagccctgatgaggccgtcaatatcgctaaagaggcgattgccgggggcagtgacggcattatggtagggggctccactgtagacaccgctgctctggacggaacctgcaaagccttgtccgagaatatagacaacccgattatactctttcccggcaacatcaatggagccagcaagtacgccgatgccatcttcttcatgagctatctcaattccaacaacccgtactggattattggggcgcaagcccttgctgcccccgccgtgaataagacagggatcgaaaagatcccaatgggatatgtggttgccgagcccggcggaacggtgggctgggtgggggatgcaaagctgattccaagaaacaagccaaagatcccagcgatctacgctatggcagctgagaacctcggcatgcgatttttctatatcgaggccggaagcggtgcagatcagcctataccccctgaaatggtggcatacacaaagagggcgacctcggacatcgttctggtggtgggagggggtatccgggacggcatagccgcttacacagcagctaaggccggtgcagacattgtggtgaccgggacggtggtcgaagagacctcagatgtcaagggtaaaatccaggaaatcgtcgccggcgttcgcaaagcaagtgaatga

SEQ ID NO: 3319 - DNA, 1086 bp, synthetic construct
  source 1..1086: mol_type = other DNA
atgctgaacagtctgtatactgaagccatcaataagaaaggccagctgaaagagcctcttgaggagctcaatgaaagcaaaatcgatctggagagtaaatggaacgatacgcctatcatccccagcaaatccaaccacataatcgctgcgggtgacggaagctataacaagaagaaatacctgaacttcaatttctacgcagttgccgcggaatcactgatctataatcccactaaggaggagaataagctttcctcgattgagagcgtggaactggacattatgccccaccaatccttcttggaagaccgcctcagaaacatgatgagcatattcgagatcaagacagccatcaagaccttcagggagtacgaaatcgattactacttagatgacgggtcaatcctgggagacctcatccggcccattcctctggagaccatctcctttgaaaaaaaacaggaaattattgattctgcctatctaaaaatcaaaaaaggctacgaaaacatggactcggacataagctccctgaattataaggaagagtttaaggaattttttgatgacgaggagattgacgagcatgacctcattcggctcctggagaacttggagaacctgatagctctgaaatatctcttggagaacagaaagaagattattgccatctcaaagaccagttccagcaacgagctgttctacgctaacatcccagacatggccattctcgaccgattcacacggaaggaaggcttttctaaagcctattacaggaaggtaagctacaaagtcaagcatgacttcccaatagagaatgagttcttccgcaaccttgggttcaccaccgtctttgcacgtctaaaagactacaagaacatcatcaagatcgagtttccatactatattgatgatgatgaggaaataaagaacatcctctcaattttaaaggataattccacagaaggctacccgtacctgctaaagaaggcacacaaggatgtggtgatcagtaatcagaacatgacgagtctgagcaatgtgattgggtttcttgacaagtctggaagggagatgttggactga

SEQ ID NO: 3320 - DNA, 1509 bp, synthetic construct
  source 1..1509: mol_type = other DNA
atgattggaagatgcattggggaaacatccctaattgaactgagctttatctcgaaagagatgccccaggtcggcgagtatgtcagcatagagtacgatggcaaggtcatcctggggatgatcgaaagcatggtgcgcggcagcgtgagcttgaacgatgacatttacgaccctgacaccatcgaaaagatacgtgagatcgagggtgatgacttctacatcaagggcaaggtgacaatccttggagacataaatgacaatcttaggcttccccggacgcccgcaccgcccggaactcctatctatagggcttcatcagagattctaaaggacatcttccagatggacaactccctgaagctcgggcacctgatcagtaacgaggaggtggaaattggagtgaacataaatagtatggtgtcccgacacctggccattctggccatgaccggggccggtaagtccaataccgttagcgtaatcattgacggcctcctggagtataatggctgcatgctcatctttgacatgcactcagagtacgtggacgcagagtttacaaatggcgaggttaatgtgattgacccaatcatcaatccgcagcatatggaatttaacgagataaagaaactggccaacatcccgagtaacgcgcccctccaggagcggtacttcagaagggcctttaatgaagctcgcaagaaagttcaggaaggggtggccaaaccaacagatttcattgaaattctagaggatgtcctggtgagcatgcatgaaagcgagcagtatgaatctgccgacaagaaaaagatcttggatgtgatgaacaaaatcgaagacctcaaggtcaagtacgataaactcctgaacaccaacgtgggagatatcctcaagcagctcaagcctggaatggccaacgtcttggatctgggccaggtcgatgagaacactgctgaagtactggtagcacatgtcctccggcgatcccttcgcagcagaaaggcttacgtaaaaaacaaggataagtctgccttatcctacccaatcttcttcattgtggaggaggcccacatcctggctcctcagaacaggaatccaaattccaaatattggatcaccagaattgcgagagaggggcggaaattcggtctgggtctgtgtctggtcagccaatctcccaaatctgtggatgcagagacgctgtcacaagcaaacaatatgataatcctccgattggtggagcccaaggaccagcgccacgtgcagacagcgagtgaaaacctcagtgaggaccttgtgcagcagctgccttccttaaacattggggaagctttggttttaggtctgatgacgaaggttccaaccctggtgaagattaacgagtttaaaggcaggcagcgcggcggcgacctggatatcatcgagcaatgggcctcgcaaaagaaagagaaaaaggaaactttgcagatagaacttacccggttcaacgacctgagcggagggtactga

SEQ ID NO: 3321 - DNA, 1392 bp, synthetic construct
  source 1..1392: mol_type = other DNA
atgcggtttgcacatatctcagacagtcatctgggctgtagacaattcggcctattggaacgagaaaaggacttttacgaggtcttcaaccgcaccatagataagataatcgaagaggacgtggatttcgtgattcacagcggagacctgtttgacagcaaccggcccagcacagaggcactgctcacttttcagcaggcgttgctcagactgaacgaagcaaagatacctgtgtacgccatcgctggaaatcatgattccatactaagaaaaggatcgttgcctccccaggtcctattcaaggacattggcctgaatataatcagtccggagcatccagtgcaccagctcggggctgtgctgatctgcggagtgccattcgccaccagttcacagaagaacgcattggtggagaattataatatcctctccaaagttgcggacaccgccgttaaatccatcctggtttcccaccagggcattagcaaatggatgcctgaggacagctacgagattgatctcgacgatctgccaaagaactttgactactatgccatgggccaccttcacaatttctatgtcgaggactacggaaaaggcaagctggtgtacccgggctctatggagatcaaccggaccagcgaactgaacgacaactttaaggaatttggaaaggggttctgcatcgtggatctcagtgaggacattcccacggtggagagggtcaccatcgacctcgccaggaaattctacaatgaaattatcgagtatgacaaactggacgaacgcctgagcgtaattgaggaggagctgaaaacacttgaggtgaaacccatcgttgatattacagtgcgtggcggtgactttgagagcgctgatgtctacgaaaagatcaatgaaaaaattggtaatgacgtgctcagtttccgccctacgttcaagccagacaacgttttaatcggggagaaccaactcgatggggataaaacattggaccccaagacccttctgaagcagacagtagataagaaattcgcccgagaggaagtcactaagctgagcgtggacctcctggacacgttatctgagaagaggatgggggaagccaaatatatctctgacgaattttacgatgagtattactatcacaaggatgaaaacgaggtcagctccgagtcagagtacggcgggtctgaacttaatgtgaatgagcacaacgatgatggtacttctcacctggagtcgagcgcttatgattcagtgtcagacaactcctccagtctggatgactaccttaacaagaacctggactcgaaggaagaagtatccgataaggaaaagagcaaggagaatcaggtcaagaccaaagaggtatccctggataacttctga

SEQ ID NO: 3322 - DNA, 2799 bp, synthetic construct
  source 1..2799: mol_type = other DNA
atgatatttaaacacctgcaactgaagaacttcaaaagtcacgccgacacggagctggatctggatcttggcatcagtctaatcgttggtgaaaacggggccgggaagtcaagcatctttgaagccatctcctttgcactgttcaagaactacacaaccaacaacatcaccgacttggtgcgcactaacaagaatctggacgaaaagatagaaatgtcagtgaagctaaccttcctgtgtgagggaaacgaatatatggtggagaggggaggcatcttatctccatcaaagaccaaatccaagcctaatttcaagtcaatctccaacctgtttaaaataagcaacggacgagaggatatcattgcatctggcaacaaggaggtggacaggcaaatagaagagctcctgaacatgaactcctccacctttctaaacgccatctatatccgtcagggagagatatctgccctgatagacgacactcccgcaaaccggaagaaactgattaccaagctcttgagaattgaggaattggaaacagcatacaataacattccaagcattattgaagagtataaaacaagaaaggccgttctggagagcaacattcggccggagtccgagctgaatttcgagctgaagaaggctaaggaagaccatttcaacttagacgaccagataaaaaaatcaaaagaggagtttgaaggcctcaaggtcgagctggaaaacatcaaagaggagaaggaaaaactggacaaggagaaatcggatttcgaatcgctgaaactcaagcacgcccatgaggaggagaacctgagtgctctaaacaagggcaaggaagagctcttcacgaaactcaatgagatcacaagaaatgaaacagagatgggcattctgaagcccttctgcgagaaacttcctatttacaaggaatttaaagagtcctttctcgctctgaataagctgaaagaagatgaagagaatcacaagaagaccctgagtcagatcgaagaatacaagacggtcattaaggatgagcaggagaaccatgagaaatacattgcgttagaaggcgaaatcaaggtcctcaacaacaagaagatcgagatgtcctctgagattaaaaacctgaatgaactggaatctcgcaaggacaccctgacccaggaggtgagtctcaacaatcagaagctggagacattctttaacagcagcaaatcggttctctcccagtttgatttggaagaggaaatcagccctatcaaaaccaatgatgacttcaacaaactggaaagtatcgtggaagaccttcgaaccaatctccggacttccattgacaacacaagcactgagatagataatctgaagaaggaatccatcagtctaaagcaggaaatcaaatcactcgatgagccactggctgacattaaaaaggtggagaacaaatgccccgtctgccagtctgaaattagtgaggataagaagaatgaacttatcaacgggtatgaggccacaatctcgggcaataccaagaggataaatgaaatcaatgggtttctccttaaactgaacgaggataagtccctcaatgagagcaaattaaagagccttgattcaatcaagaacgatatttacgccaataagcatattgtagacgaccttgacaagtccaataagactcttgaaacattggacgctaaaatcaaagagctccaggggaaaaaggaggagctggaaagtttggataaaatgatagagtccaaaaacggagagtttatcgagcttgaagcccacaacaagaaatacctggaggcaagcacgctcttgaagtctttccctgacgaaaccaaggtcaaggacgacttatacgcgatatatggcaagatcaagactgaggacgaaaagctgaaaacatacatcagttcagattctgagctcagcctgaatattaccctggaagagcttgacgagtcaatcgaaaaactatccgagaaggacaagcgatacaatatcctgttgggtagcgtgaaagataagaaagagtacgaagataaatacgagaataaaaagaaagagatcgagtccaagactcaagagattgaggagattaaaaagcagatcgaatcttccagctacgacgaggagtattataaccacgtgaatatcttgcttgaacggttaaacaacaaattcacctattactctcaggacattgctgtgaaggagacgaatctcgccaacttcgaaacggtaatcaagaacatcgaagagatcatccaacagaacagagagtacaaggaggagtacatcgcagttaccgagtattataatctcttggaggactttagaaaactctacagcaaggacggcatccagagggacctgaaaagccagtcccgcccgctgattcagaagaacaccaaggatttcttcgacaagttcagcttcaagtactcagatctgatcttggacgatgactataacatctcgatttttggccccgagggtgaggcgaatatcgatatggtcagtgggggtgaaaagatcgcgatagctctggctctgcgcttgggaatcactcaggccatgagcaagggaaacattgagacaattctcctggatgagcccacaattcacctcgatagcttccgccggcaggagctgatcaatgtactgaggagcatgagcataattccacaaatgatcatagtgacgcacgataccgagcttgagactgccgccgacactctgattagcgtggaaaaagaagaggggatcagcaaaattgaaaatagttga

SEQ ID NO: 3323 - DNA, 426 bp, synthetic construct
  source 1..426: mol_type = other DNA
atgtttgaggaggacgaaaaggtaaacaagatatttaatctgattatcacgcagggcatcgactcggaaaatgaatacaaaatctttacagaacggctgtacagcaagcctgacttcctgtggaccgagtccttcgcaagggactatgcgccatttggcgaacagttcttcagtaaggtcgacatcatcgtgctgctctccggtctttacaacgacaacaaggagctcttcgataccctaatcaagaaatcagaggagtttgatattcccctcctgttggtgcgcccgtatgggatggagattgtccccgaggagttagaggaaaaggttaaaagcgtggtgggatggaatgccaactgcatcatagatgacataaaaagcatcattatgggggattacgacttcgacgatgatttcgacatttga

SEQ ID NO: 3324 - DNA, 1074 bp, synthetic construct
  source 1..1074: mol_type = other DNA
atgacatctcgaagagcagaacatgagagataccttaaaagcatcctatcaaactccctatctagcggacacccctctaaggaggccatagaacgctatcggaaatcatcgccaacttactataataagctcaagctcggcctgatgaacaaatacaaggactgggacctcttggacattgaagggagtagtgtgatcgagaacatctacggagagaccctgcggatcagacgacgggaaaagctcgacttccacctagaggataagaaagacgagatcaagaacgagctcagcagtaatttgaagttaattcccggtatcggctaccagaccgagtcccgcctgaaggaaaacaactaccatacaatctatgacctccttcaacacgacaaatacagccacaaggcccaaaaggccttgaatcggatcgaaaggaactgtttcgtttctgatttcaagctgctgaaggagtcatccaaataccctatggatcactcccagcccattgacaagaaccgcacgctgaaggccctgagctcccttgatccgtttaacctcaaatttatggatattgaaactcttgggctgtcaaacgtccctatcatcctgatcgggatcgctgagataaagggcaaatggattgaatccaaccagtatctcctgagggacattgaggaggagcccgcagtgattgaggcttacctgtcccacctggatgaggcaagcgtgcatgtaacctataatggagccagcttcgatattccttacatcaagaatagggcgcattattacagaatggactataaccttgaccagatacactacgacctgatatacccggctcgcaatctgtggaaagatgtgctgcccaactgcaagctcaccacaattgaggaaaatctgttcggcatcaaaagggaggacgatgtccctggcgcgttcatcccagactattaccagagctacttaaaagaaaataacatcggtccattgatcccaattatcgagcacaatcgtatggatatagtgtctctggccagttttctgatgaaaatttatgaagaatcgttttga

SEQ ID NO: 3325 - DNA, 309 bp, synthetic construct
  source 1..309: mol_type = other DNA
atggagctcactgccgaaaagcgcaaagaactgcaggagaaagtcaccacagacatcaatgcaatcctagaaaagcacgagctgccgtataggatggacgggatctccgtaatgaagacctcaaaaggcaccagttttctcggcaacattagagttcacgatccctacaaggtcaaggatgtgcgaaaagaggtggaggactacttcgaaagctacggaaacgtgaccatcactagccgggatgtggtgccttgctgtgagctgccatatacatatataacgttccatattgactacttcaacgagtga

SEQ ID NO: 3326 - DNA, 2757 bp, synthetic construct
  source 1..2757: mol_type = other DNA
atgagcaccgaaagcaaagataagcagatgggcaaaatcgatcagttcaaaaacgacatccggttcaggagaaagatcgaatatgtggaaaccatcccagggaaagatgccagctataagaaggtagatgtgctgaacaaaagaattttacagtatcttgaggataaaaagataaagctctacagacaccaggctctggctatcgaaaaaacacgggaagataaaaacatcataataaccaccccgacagccagcggcaagacgttggccttcaacctgcctgtcctggaggaactcattagcgataatgatgcttgtgcactgtacatttaccctgccaaggccttaagttacgaccagctgaaggtgctcaggaacttcgaggatgagatgggcctagatctcaacccaaacccgtacgatggggacactcccaaggctaaacgctacaaaatccgccaggagtctcgcatcatcctgaccaacccctaccagattcaccatatcttggcttggcaccaccaatgggagcgattctactcaaacctaaagtacatcatcatcgacgaggcccactattataagggcatcttcggttccaacgtggcgtttctcatccgacgccttaaaaggattgcaaagttctacggctcggaaccgaaattcatcctgtcctcagcaaccctggcaaacccactggagcttgcagagaagcttacgggagagagtttcgaactcatcgacgaggactcgtcccctagcggggagaaggattttgtattgtacaatccctataagtcaatcaaaaaggattccaaggaccagtttgacatggatgagtattcacgctctgtccacatggaaacagagcgcattttcctgtacctgattttaaaagacatacagacactctgctttacctcaagccgcaagattgccgagctcattgccctctggacaaaacgtgacatggaaaaggtcaaaaagcgaaacgtggagaagatcgcagcctaccgggccggttacttggccgaggacagaaggcagatcgaggacggcttgaagtcccgggactatctgggggtcacctccacgaatgccttggaattggggataaacatcggaagcctcgatgccgttatcatttcgggctttccagggagtatgatttccacctggcagcagggagggcgttccggccggacaaaccagaagtccctggtcatcctggttgcattcgagaaccagctggaccagtacttcatgaaaaacccggaatttttcttcgacaagcctcacgagaatgtggttattgacctcaacaatgaaaagctactgaaaaaccatatcatctgcgctgctaacgagttgccccttaccttagaggaggcaaaagaggaatttaatgtgacggaggacttcctggacaatatagtgcggaacagggatttacggaaaagcagagggttctacatctatccatatgatgacagccctagcttcaacttttcgctggaccagatcagtaatgagatattcacggtgatgaacggccgaactgtgatcgagcatatggaaaagtccaatatgtacagggaagcccacgagggcgctgtgctgatcaaccaaggacagacctacattgtgaataaggtggatctagacagccatttcatctttgtgaaaaagaaggatgtggaagcccatacaattgccctgaaacgtacaaacatcaagatcaccaaaaagattaaaaagcacaggatcggagagttcacagtccatttcggtgaacttgaagtagaggaagactactttaagtataagctgatgcaatacagcaaggtcatcggagaatacataatcgacctgccccccctgaagttcaacactaaaggcatttggtttactatcccagatagcgtcaaggacaagctggaggagatctacaaggacgaaactgaggtcttcgccggcggcctgcatggaaccgagcacgctatgattggcctcttccccctgcacgtgatgtgcgacaggtttgatataggtggactgtcaaccaattaccacgaggacacacaggaggcgactatattcatctatgacgggtatgaggggggcataggaatctgtgagaaggcgattgacctcatcaccgaacttaccaaaagtactagaaacctgatcaaaaactgcgagtgtaaggacgggtgtccctcttgcatctatagccccaaatgcggcaatgataataagcctcttcacaagaaggccacggaatacattctggactacatgtgggacgagatgaataagctcagccccgaggaccttgctaaactggaggaagagagaattaatactgagaacagtgattatgacaatctcaacggtcattctgatgttgaagttgaatacgacaaaaaaccaaacaatgctgagattgaaattgacgacgaacgggaagcggataatgctgaaattgagatagaagatgatgaggcccaagaggaatatgagaaggcactggaagagtttaataaggagaactattcaattgccaaagacattctaactgatattatcataaactacgacaatcaatccgccgacgcgtactatctcatcggtaagatcctgtttattcaaggagatagtatgggagccctctcctttgtgaaaaaggcactgtctattgagcctgcgcacgaactggctaatgagttttactttgagttgaagaatagttattga

SEQ ID NO: 3327 - DNA, 2568 bp, synthetic construct
  source 1..2568: mol_type = other DNA
gtgatcagttacgaggaatttgaaaagctggtggtagagatactggaaagggatatctcttccaattcagaccagaaggccgctatctctgctgataagtcacagtccctgttcattgtcgccggtcccggctctggaaagactaccgtgatggtgctcaagattcttaaattcatcttcgtcgatgatgtccagccaaaggagatcctggccaccacctttacgaaaaaggcggcttcagaactcctctcccgtatcctgagctggggcgacaagctgaagaagaaaatccccgtgttcattatggataaggtcatgaatggggaaatggcagatggcagcgttgtagacaaggtgcgcaagatcgacttcaatcaaatcaacgtcggaacaatcgacagcatagccgatgagctcttacgggtccatcgcgacgccggtacaagccagcctatcctgattgaggactttgtggcaaatagtgtgatgattaatgaatgtcttctgaagaacgatatgtatctgcatgagtccttgcaggagtatctggctgagatcacaggaaaggaaagccagattgaccagaagcctaaggtgaaaaacctaacagccatggcagatatcctcctgagcatcaaggagcacatctattacaacatggtggacattaacgatatcctggcggatacaaaggataatgagaggggcaagaaaatagccctgaacctgatcatggaatatgagaaaaccctgagaagtcagaacatctttgactttgccatgttagagacggaatttttaaacagactgagttcaggcaaattggatagcttcctggatgacgttaaagtgattcttgtggacgagtaccaggacaccaatctcctgcaggagagcatttactttcggatcgccgagtcggccattaaaaatggcggtaacattactgttgtaggcgacgacgaccaatctttatacagattcagaggagcgagcgtggacttgtttaccaatttcatcgaacgcgtgtctcggattggcatagaagcgaaagagatcaacctcaagacaaattacagatccactgaaaacatcattgacctctgcaatgacttcgttgaactggacgatgagtatcaggacgctcgtgtaaaggaaaagcctaaaatcgtgtttccgaatctggacagctcggaggacacgtcagagaatgaatctcccgaggacctccctaatgaggacgagatagaaacccaaaagattcccgtgctgggcatgttccgtagctccgaagaaaagctcgcaatggacctgactaacttcttggatgaactaaacagaaagggcaaagtcaagcgaaaggttaagcgcgtcctgaacaaggacatcaacaaaaagctaaactcagacagtgaggatgccctcgaaagctacaagaagtctggctttgagcttgcccagagcgagggggaaatcataatagagcttgatgaggagaccgggtccatcgacgacgtggccttccttacatactcccccaaggaagtcactcacaactcgcgcaaattcccatttattctcaaaaaacgcctggagcacctgcggactcccattagagtcttcaacccaaggggacaggatctgcaggatatcgagtcggtggcagtgttctgcgggttgatgctggaatgcatcgatccaaactcctattaccagaacagtaataaaaagcttccgcgcctggctcggcgaaatatgtcggtctggcggagaaaagcccagagtttcatcaaggatgtcaacccagagccgcactctccaatttcccttgaggatttcatcattcattggcaggtaaggcagcccttcaacaccaacggttcaaaagacctgaaatggcctaaggaggcaggcctaatggagctcgcttataaattggtgacctggattgaagagttccaggacgacgacgagggactggtttacctcaaggcgatcacccaaaccatcaatcagacaagcttcttcaacaaatacagcagtaacatagttttcacttcccacgaggctgaggaggaatccatcaatgaggcattgatgaacatcttcgtccctatcgccgtggggggagttaagattgacgagaacctctttgaggtcataccgccaaaccgatttaacatcatgtccatacaccaaagcaaaggcctggagtttcctctggtgattgtggatgtggggtccaggttcaagaagaatacggtaagggagtccaacctacggtttcccaaaaaggcagacaagagttcaatcattcaggaccgcatccgaaaatacagcagccttggtgaaagcgaacgggatagtaaggatagggcctttgatgacctgacccgactctacttcgtggctttctcacgggccaaggatgttttgctcttggtggggctgaatcccaatattgatggatataaacaaaaagataaactgcagaaaatccccaacgtggctttagggtggaacagggacgaggaatttatagggtttgacgacatttatcttatttga

SEQ ID NO: 3328 - DNA, 1410 bp, synthetic construct
  source 1..1410: mol_type = other DNA
atgaaactaagcacacgttctaaagagtatatcattccagaatatagtctaacgggcgacctcttgtccttcctcacttgcaatttgcagtaccgctaccagaataaggggaatcttcctccctccatgcccatccaactgtggtttggagagtttattcacggagtcatggaagaggcttacttaaaatggaataaccttagtgatgaggagaagaaggacttcaagtgggattgggagagagacattaagcccatcgaggatatcatcacaaaacgccttaaggtcaagggccttaaccctccaatcaactacacggagaactacgggccgaaggagaacatgtacagtgcccgggtggaccgctcaattaagatttggggaccccatctctttccactgatcgaggatgcggaggtgctcataaagggcatccgagatatgccgaaggacaatgagggacatagccggtccgagtactatagcatcaacggggtgatcgatgtgctgagctccgtcaagctggacgagatatattcaatagagaacgactttaacggcgataatgaaaaatccaaaaacaccttcaaacagacaaccctggacagtttcttcgtgattgattcatgcgacattgacaatgtgagggacaaatcctcgaagaaatcaggcaataagatcctcgaatatttggctaataatgaggagttcaagaccattctggaaaacctggaagacgatgaatacgaaatcattatagactataagggtatgagaaggcctagcgccccaaacaaaaacgacatcgataagaataacatccacttgctgaacgaggatagcaacgacgagaactcactcgaagactacaaaacctggattcagcacgaatggcaaattctgacttatgcatggctcagatccatgcaggaggacgccaaaccagtcatctgtggcatcatcttctacctgaatgagctggtgccctcgaccgaggatttgctcctgataagggaggacctcgagaacaataaaacggacatccctcgacagtccattcccaaggactgggaaatactgaagaattgggatgagaacggtccgaaggcgatccacgatgacctgagcaaaaagttcaagatggaccggagcattaggatcatcaacataaaggaagatctaatcgatgacagcctgctggaatttgacgaagttgtaaaccagatcgaaagctctatgattcgcgagttaaatgggtctaagatcaaggaagcctggaacgcaaacgccgaacagcggacatgcaatgcttgcgatttcagtaccttttgtaataaaaaagatctggaagagaacactaacgagaatagcaacgaggaagacaacaagcccgttttcagcgtaccttga

SEQ ID NO: 3329 - DNA, 681 bp, synthetic construct
  source 1..681: mol_type = other DNA
atggactacgatatcaatgaaaacgccaactattcgaaaatatttatcgatgagctaaagctcagccgcctccccgtggccgtgaagttcatcaacgacgagagtgaagtgccagagggcattgagaagatcgacgagagtttacgccactgtgagatgattacaaaggcagctaaaggcgagtccttctactccaccgcggaagagcaaaggtgcgccggcggggcttctgccatgggactgatcgacctccctcccaagatcgctagcggtgaactttactacaacctgggcagatttgaatctattgagaccgctaagagtgttctggacaatatttacagaaaggatgaaaggtcctttggcattgtctatgcgcccctggagaaagccaacttcgctcctgacgtggtggtagtcatcgcaaatccaaagaacggaatgcggatcacgcaggccattgtctacaatagcggggagatgttcaacgcaaaattcgccggaatccagtcactgtgcgccgatgcagtgagcggaccgtatgttagcgggaagcccaacgcaactttggcctgctccgggtcacgagcatacgcgggcatagaagatgaggagattgcttatggtatgcatcgggacaacataaaaccaatcatcgaagcctttgccaatatgaaatga

SEQ ID NO: 3330 - DNA, 741 bp, synthetic construct
  source 1..741: mol_type = other DNA
atgagcaacctcaaaattatttcatggaatgtaaacggcatccgcacccgcatcaaaaataaggacatcaatccagtgctggagaaggagcctgacattatcctgttccaagagactaaagccagctacgagcagatggataagaagttcctaaataagaacccctacgactattatttcctgaaaggcgagagcgctaggacaggcgggctcgcaagctttaccaacatcgtcccaaaaatcatcaaacggttctttattaagagtcaggatgccttccacagggcgtgcgtcctcgatttcgaggactttacactcatccatatttacgcacccgccggaacggggaaaaaggcgaattttaaccagaaactggattatttcaacagtctacttaaatacgtcgaaaagaataaggacaagaatttgatcattgccggcgactttaacatcgctcacaatgatatagacatatccaacaaggacactaaagtgagcttcaccgacgaggagagatctgtgctggataagcttgaaagttttggatttgttgacgccttgcgactgttcaacgaggaagaatccttttcatactggaagaacaaggaagaaaacgacggtgctcggctggattacttcttcgtgagcgaatctctgaaggacaaggtgaagtcttcctcgatattagttgatgtggaagggtccaaacacctgccgattgagctcgagatcgagatctga

SEQ ID NO: 3331 - DNA, 657 bp, synthetic construct
  source 1..657: mol_type = other DNA
atgctaagtgtgtcagccgtcatcaccgcagcagggaaaaactctagaatgcgacaggatcaggagaaaaggaatcttccgttgcagaacaagcttacactccccttcaaatccaaaaccgttatagagacaacaattgacaatgtgctgaacaccaagggcattgaggagtgcgccatcgtattagggcattacagcagcgaaatactcccattgatcaaggatatcgatgacgaacggataaagatagtgatgaacaatcccatcgatgtgggcctgagcgtctcgctcctgaatggactcaacaacatcaacagtgacatcgccctttgcgtgacggccgaccaaccaacggtcagttcaactaccttcaataacattctggattctattctcaattcctccaatcctaataagaccatctctgtgttgaggcgcctggacattggtaagctcgacactgctaaaggcctggggatgcccttcgctgcgagccggtgtgagctgatcgattacatcaaggacaaggatgacaacctgaacccaatcctacgcgagatctttgccgacggcttcgaattttacggagttgaagagaaccaccctgacgagctgattaacattaactattactccgactatgaaagcctgctgtga

SEQ ID NO: 3332 - DNA, 1230 bp, synthetic construct
  source 1..1230: mol_type = other DNA
atgccacggctcttcaaaaaaacaagctttaagatttttattgcactgattgtcataataattttactaatccccatctccatggccatgacaagtcatcataatacccagaacatggctgagatctccaagtatgagaatggatcaaccgtctttaacggagacaacatcatcgacaagaacaagatcaacaagtacccgatagttagcgatataggcgctttgaccgatcagatcctgaggggcgacattgccgatgccttcttcagcatatccacaggggtggtgcctacccctgcatctgaactggtgaccggaaacatcacgaagtccggcgagattcaaggcatcaaagggcctgcttacatcgatatcgagaaagaccagatcaacattgtggagcccggcaactttctctatggattcaataccccatacacacaggcggtgattgttgagggggggattgacatcatcaacaacaagaccaatgagaccatcaagcacatcaatgccaatgacatcactaatgacacgctgccaggagacatggtctccgaggagacaataaaatactggtacaacacatcacaggtgggttccaaatacaatatcgaattttgcattgacgggctgaacgataaccgcagctacattactcccactgagctgaaggagaaattccccgaggcctataactactcaatcaagtaccccggaggctctccagttattctttataaggacaacgtcaatagcacggttgtaagcagcacctatacctacctggggtcacaccctcagtataacgacgcaaaccgagaatacaatgccagacagttcgtgacagcctggaacggcacggtaattcctgccaatacctctggctgcggcagggaaggtgtgtatttcagtgccgtgaaggaagccaatgcccagtcgggcatggctacacacggtgtgtgtccgcccgcacgcgcgctgcggaatgctgtgcttgcgctggggttcagtttgccggtagggatggattacggtgaggatgctgtcctctttggatacagtcccagcactggtatcagagtgaccaacactctcgactatcccatccaaatcaacatgtggactgaaggggccggcactggcatggcaatatacgcagatgtcgtggaatatatcccaaataatgtcaccactaccaactcgacagaaaccggaacaacgatttga

SEQ ID NO: 3333 - DNA, 1332 bp, synthetic construct
  source 1..1332: mol_type = other DNA
atgaaggctgctataattggtctgggcgtagaagggaaaaaagcattgaatagtctactcaaacacaactgggacgtgtatgcgagtgacctgaatgtcaacatcaagatggacaacctgccaattagcctggcccaggtgaacgtgagtccatccaaggacaaaatcactttccaaaaggacaacctcaccatcgatctgggctttaacaatcaggagatcatcaattccgctgacgccgttgtcctgagccctagcatctgggggagccggattgcagagcattacaaaaactctgggaagctcttgtgtgacgtgaagaccaagcacagggacatcttcacaatcggcgtaaccggaaccaacgggaagacgaccacggtgtccatgattaaggaaatcttggagaatgccggcaaaaacgtgctggtcggaggcaacggtggaggaggcttcgaaggctactacgacctgatcctcgaggccgatgaggaagaatacgatgtcctgctgattgaggtgtgtgacatgactgtcgggttctgccgctattgctttgacttcgacattatagcccttacaaatatgggaaacgatcacatggacgtacacggttcaatggaagggtataaggattccctcaaggagttcttcaaagataagacaatatttctgaataagaaccccgagtttccagagagcttcaaggaagaatttattggcatttctaaaaacaccatagaatacggcgaaacggattatgagattgatctgttcggccgtttcaacaggctgaacgccgggctcagccagtcactttccgagtacatcaatgaaaacgtgtttgagatagatgaggaaatcattaaaacaagcctcgagaacttcaagcccgtgaaagggcgattagagctgcttaagctaaatgactgcacaatctatatagggaagtccgacaactcagatgcgattaaggtcattcttgatgaggttgacttcactgccatcttcattggaactcccaggcataacgagaaccatagattggacatcctcaatgaggtggtgaatgcaaatcccgacgcgatcatcctcttcccgggacttgaggataccctagatcaggcaatctacagattaggcctgctgaactacgacggccggatcgaaatagccaataatctggacgagatcgtggcctttgttgccgaattttcgcacgaccctgctatctttattggtggaaacggtcaagagaccattatcaaaatccaggatcggctgcgcgagatcgctgattcgatcaatgaaagtgattacgagtgcgactga

SEQ ID NO: 3334 - DNA, 1104 bp, synthetic construct
  source 1..1104: mol_type = other DNA
atgaagggtgaaatgatgacatctgatgagaagattaaattggtcgaggaactctgcatgactccagggatctcggggtttgaggaaaagattgcagagattatcaaacgcgaattaaaagatgtcgccgacaaaatcgaggtagacaagatgggaaacctaatcgctacgaaaaaaggtagctcaaaaaaaggaccaaccgtcatgctggcctcccatatggacgaaatcgggctgatggtcagctacatcgacgacaatgggtaccttaagttcgcaaccattggcggaatcaacgaccagatgcttatgaaccagacagtggtgatccactccaagaatggggatgtgactggcgttatcggcagcaagccaccgcatgttaccaagcctgaggagaagaagaaggtggtgccctacgacgaaatgtttatcgacattggagcaaaggacaaggagcaagctgaggagatggtgtcaatcggcgacccaatcacattcaaaacctggttcgaagccttccccaataatctcgtgatgtgtaaggccctggataaccggctcggctgctatgtcatgatggaggtcctaaaacgggtggattccaaggccacggtatatggagtgggaacaacccaggaggaagttggcttgaaaggggcaaaggtgacgtcatataagctgaaccccgacatggcctttgcgctggacgtgaccctctccggcgatcaccccggcataaagcctgaggaggcgcctgtggtgataggaaagggccccgctgtcatcctgatcgacgccagcggcagaggcataataacccctaaatacatccgagagctgctgattaacactggcgagaaagaagagattccctaccagcttgaagtaagttctggtggtacaactgatgggaccgccatccacctcaccaaggaaggaatcccgaccggggtgctgtccgttccaaccaggtatatccacacaacggtgagcgtggctagtatggatgatgttgagaacacaattcagttgattgtcgctgccataaacagcctggaaataaatttcaagtacattttcagtattctgaacactttttga

SEQ ID NO: 3335 - DNA, 1161 bp, synthetic construct
  source 1..1161: mol_type = other DNA
atgttcggggtaaagaaaatgaagtacaaatctaaatttggttttggctgtatgcgcctgcccctaaaggatgaaaacaacccacagtcaatcgaccaagaatactttaacgagatggtggatacctatatggagaaggggttcaactatttcgacacgtcctacgcatatcacaatggcatgagcgagatcgcaatcaaaaaggccctggtggaaagatatcctcgcgagtccttcctgatctgcgataagatgcctacctgggcccttacaagtgaggaggacaatgagaagtttgtaaatactatgctcgaaaggctgggaatcgactattttgatgtcttttttgtgcacaatattaatattccatggctagagctggctgaggaacataatacattcgaatatgtgaagaacatgaaggagaagggcatagcaaagaagatcggaatcagcttccacgagaacagcgacctgttagaaaagttcctcaacaaatatgctaaagacattgacatcgtgcagctggagctgaactacttggattgggaagatcctgcgatcgaggcccacaaatgctacgacctgtgtgtcgagcatggccttgacgtctacgtgatggagccactcaagggaggcgtgattgtcaaccagcccgaggagattaacaacgacttcaaggagcttagtcaggacgcgtcaatagccagcttcgcaatgcggttctgtgcctcccttgagcatgtgaaaatagtcttaagtgggatgagcaagatggaagacctcatcgacaacatcaatacctttgaaaacttcaaacctctcagcgaagaggaatttgacttcctgctgaaagaagctgataaactgagggagaacctggccgtgccctgctcggaatgcggatactgtctgaaggcctgcccgctcgagattcccattccggagtacttccgactgtacaatcaccacaaggttcagaaggaatccaatatctaccggttgtacttcgataagttggccgatgagaaggttcccgctagcgactgcacacagtgtgaaacctgcatagattactgcactcagaaaatcaacattccaaaagaattggagaaactctgtgagcatttccaagagggtttttctccctatgggaattga

SEQ ID NO: 3336 - DNA, 7899 bp, synthetic construct
  source 1..7899: mol_type = other DNA
atgaagtttcggacaccatccaagaaggacaccaacaaggatattgagaaggagttcaagaacttgcgaaaagagctcctggacctcaccctgcgcaaccccctcctgaacttcaaggctcgaaaccgaaacctcagtattatcaatcaatcgcctatcaacatctacaggaccctggtgctggagaacaaaaagatgttcttccaggccaataagaaggaaactaaaaagtccaaggcccacgcattcatcgacgaggctaaggagttcctatcccaggaaagcgacaagaccttgaaggctgaccttagccctagtgagcttcagaaaagactcttctatatagaccagcagtctaagacaatggtacaggagcaggggtacaatatcctatacattgcaatcggctttatcgaatggatcgacaataagaagccccggcagaagaacctggcccccctcatcctcatccccgtggagatggagcgtaaaaaggtgggcaacagcttctcactgtcctggacaggggaagacctgcagaacaacatttcgattcaagcaaagctcagggagatcggcatagagttgcctaagtttgaacagacttcctatgtggagggggtgaaccactatctggaaaacgtcaggcaggcaatcaggccctttccaaagtgggatgtcaaatatgacatcgccctggggttcttcagcttcaccaagttcgtaatgtacaatgacttgaacccggaaagttgggatgagaacatcgacttgaccaagaatgagctgatccaggccatcttcaacccaagcaagaatgtatacgaagacacctttgaagaggacgatgtagatgagaagctccactacaagaccatgtaccaggttttggacgctgattcctcccagattgccgccattgaaaatgtcaaggccggccataaccttgtggtcgagggtccccctggaaccgggaagtcacaaaccattgtgaacttgatagctgagctgattgccgaggggaaaaccgtgctttttgtaagtgagaagatggctgccctggaagtggtcaaaagcagattggatagcgtcggcctcggcaagtttgtactggagctgcactcccataagacacgccgaaagaaattcctgaaaaacctccagaaagccactaacgtgcgctcaacaagggatctgaagctcgaccaaacactgagaaagctggagaacctccgtgaccagctggaccagtacgcagagataattcaccgtcctatggccaacgtcaagctcagcccatttgaactctacggtatgaaggagtcttccgaggactatttctcccgccagaacaggctgctgcctctcgtgaggttcgacaatccagaagatatcaccatgaaggatctggatgatataatcatatcactggagaacctatccgagctctatagcacaatctcaaaaaacaatccgtggagctattgcaacccgaaaagcctgctgccagccgacctgagggagatcgagcagctgataatggacaccctcgaggcactcaccgactttcggtatgagatggacataatcaatgaggtctacggaatcaaggtgccaaacaccctgcaggagtatgaagactccatcactgcattaagcctactgaatagcgagaccgttaacctgatcgacagctccatcctactgaatagggagtggtatagcaaccctgagcaggcacagattctaatcaagctattggcgagctatcagcagtcatcgaacctcttcgataagtttacagactatcttctcattgccgacctggacacactgatccaggacttgaataaggacttgaacaagaaatttcgcctcttcggcggaaattcccataaggatgagctaagccggctgtataagggccctgttcctagtgaaaaggaggcccttaacgacctgatcaaggtgcgtaaagagattaaggtgcgccaaagctataatgataacgagaagctggggatcagatactttggagatctgtggggcaagaacgccaatgttcaggagctgaaggaggttagcatctggatgcgcaagttcacccacctgctttccaacggcaccttcaacgaaaataccgttaagatgctgtccaatgaaatattccacccttcaatagacgatgggatcgatgagtacatcgaaaaaggcaaccggttctacgagagcctgaagaagctggagtccaagctcaatccgcgcagcaagattatattcaagaaggaaagcgaggatgttccatttgacaagtgggagatccaacttaacaaatggaagggacagctgtcaagcctccacctgtggtcccagtactccaataccaaaagggcctgcatgaacacgcacgcttcgatcttcatcaagaccgttgaaaagcggaacatcaaaaaggacgacgtcaagcccctggtgctgggtaacttcgccgacagtctcctgaatattgtctttagtgagaatgagatattggccggattcatcggggaattgcatgaaaaccgcatcgccgactttaaggacttggatcgaaagatcatcaatctaaaccgaaagcgaatcttcaataaactgaatagccagatccccaagattttcggtggggcaaacgaccctgaggcaaagatcctggcgggcgaatttactcggaagagcggacacttgccagtgcgcaccctgcttgaaaaggccggaggcacaatcaaaaagatcaagccagtcttcatgatgagtccattgtcaatcgcacagtacctcgaccccacaaatcctaaattgcaatttgatgttgtcatcttcgacgaggcaagtcaggtgaagcccgaggacgcattaggggccttcatgagaggaaagactgcggtggtgatgggagacacgcagcagctgcctcccacaagtttctttgaccagatgaccgacagcgaggggggagaggaggtggcaaccgcgttggatatggagagcatccttcacctttgcaagatgtcattccccgtcaagatgctcaaatggcactaccgcagccgccatgagtccttgatcaatatttccaacagggagttttacgacaacgagctcctggtctacccctccccgtgccataatgaccccgagctaggccttaaattccactataatcccaacacagcctaccacagaggcgaaggctctgctaaccccttggaagccaaggatgtggtaaaggaaatattccgtcactttgagaagtacggcgataagaagagcctgggtgtgggaacattctcggtggcccaaaagaacgccatactggaggagctcgagattgaacgcaagagccatcctgagtttgagccactcttctctgacaagcgggaggagaggttcttcgtgaagaacctcgagaccattcaaggggatgaaagggatgtcattctcatcagcgtgggctatggatacgacaccgaggggaagatgtccctgaacttcggtcctctaaaccaggacggtggagaaagacgtctcaatgtgcttatcaccagggcaagggagaaatgtgtggttttcaccaacttcagagcccacgacattcacctcacagccaaccccccatttggggtgaagagcctacagagcttcttggagtatgctgaaaacctttcccagaatcagttcatcgaccaggaagaggacgaggaggctccattcgaggacgcaatctacaacttcctcgccgacaacggctaccgggtcgacaagagaatcggttgtgccggattccgagtggatctcgcgataatcgacgaggagaatccgggcaaatacctcctgggaatccagtgtgacggccacaattatgcttccagcaaggtcgcccgggaccgcgaccgcctccgagagcaagtcttaaacggcctcggatggaaaatctaccacatctggtcaacagactggtatcggaaccgagacctagcccgggcgcgcctcctggagcatattgagaataccatcatcacgacaaaggttaatgacctgaagagcaagattcacgatgctgagtcaatgcagatcaacccagtcacaacggtggtgattgacaagaaaaataaggagaaagactctgacgatgattcagacagtgataaaactgataagaataaggaaagcctcattaacaattacttgaaggatctggaggacgaatttggcgacaacagtgacaaaaaggacaacaataacgaggacgatgattccaacaacgacgatggcggactggtcattgactccacggatgattctatcgacaacccagatgatggaggactggtcatcgattcaacggatgattcgattgacaatcccgatgacgaagggctggtgattgactccgataccaacttagggagtgaagagtttgatatcgggtcggattctgtgctggacgatgactccgacgatgaagagttcggggtggactctgattctgacctggatgaggaagagatcatcgaggactcagaaattaagctgagcgacacgcttaacacggatctgaaagatgaggacatttatgaacctgaaatcgagttagacgacaactcggactctgacttggatgaagaggaaatcatttacgagcgcgaaatacagttaaaggagggttctgacctggatacagaggacgaaattatcatcgaggagaacaacaacaatggctcagatattgatttagatagcgacgatgtcacggtcttcgaacttagtgacgaggattcgagtagcgattccgacgatgtgactgtcttcgaactgagtgacgacgattcgagttccgactcagatgatgaggaactcgacaacgactccaatatcgacctggaggacgaagagagcgatgataacttcactctcgacctggaggatcaatccaataacctgatgcccaaaagcactatcgacaaatctgagttcctgaaggatctgtacggggaggatgacgatctgagttccactattgacgaggaaccgaaaatacttaacgataataatgaagtgattaataaatctttcgactcaaaggacaaaaagagtagcaaaaatatcagcaaatccgagctgaaaaaccaggaaaaagctaaatcgaaaactaagtcgaaaacgaaatccaaagctaagcctaaaaaccggaatcaggagattaaaaatattgaaaacggcaaaattaaaaatgatgactctaaaaaagagcagaataagccaaaaagcaaaaataggtccatactcaacagactgaagaacattggtggcgggctgggtctgagccggtcagaagaaagcgaaggtaaagaatttatcaaggctgaggacaagaaaagcaaggaatttgtatccgacgccaaaaagtccataaaacggaaggacagaaaggcaaaggataaggattccaatgacaaaaaggagatcaacaaaaaacttaacaaggagcagaatatcaagaataataaagacaatatcgtggaatcagataaaaaacaagaggagattaaggaggagattcagaagcccgtgcccaaaagcaaaccaaataacaccaaggagttaatcaatcaaaacaacaaaaccattgaggagctggaggaatacatcaacaacagttcaaacaacagcgatttagaatttgacggggcttctgatattgatttagagaaggagattattagcgaggacaagacgaaactcgacgtagagtcagacatccaaatggacgatgaatacgtgatcgtggacgattctgagttggaagacgagtttgagtttatcgaggaattagacgatgattctgaactggaggacgagtttgagtttatagaagaacttgatgacgactctgaattggaagacgaagagtttgagtttatcgacgatctcgatgacgactttggttcagaagacgaatatgaactagttgatgacagcgaactggaggacgaatttgagctgatcgacgatctggaggaaaagtccaacaattatgataatgaagatattaatcttaaagaggacagtgaatacctggaaaaagaagagtctgaggatatcatgagacaaaaggagagtgtttccaaaagaaaggtggagcatgaaatcattgacgattcgctcgacgtgattgtgcctataagtgctgaaagacgagccgacgaatacaacaattattctgaagacgctaatgtgattattcccatccaggacgaggaggaatttgaagaggagtattataacaacgactcccaggtggattctgaggagggaattgatgagctcgaggagttaatctctgaaaacattaactactcagatgatgacgccagagaagaatttcttacaaataaggagtctaatcaagagagtgaagaggattcttactattacagcgcagtaggaattgaaaacagcctgaagaagaacgcggttcagtaccccaagtccagcaataggaacaaaaaaggcatcgtcggtgcggtatctagcctgaaagacgaaatgctgtacatcaatgcgtcaattaaagaaatagagaacccaactgagcgcgaaaaaatctatgtgatagacccctcagaggaggaatactacaatcagcccgatgactctatctactacaatgattccctgagtgagaataaggagagatatgcgaaatcaaaacagtacgaagacgaggttgaagtcatatctccggtgtcagattccgatgagggcgaaacaggccatattcagtctgattatattgagcggaaagctgaggacagttctaaaagcagtagcgagtccctgtttagtcctaaaaagcatgaatacttggacaaaatcaaggagtacgccgcggaatcggagtatgaggaggccgccgagaaccccacaatcagtccagttcacactgagattgaagagagtgtggagtcctctgtaattagcccggtgcatactgagtacgtggagactgttgaatcgtcggctatcagccctgtccagcaggaatacgacaaaaccgaggaaccttccaccatcagtgctgaagatcaggagacagagtttattgatgatattcttttagaagaagacgagctttcaaacattcaggacacggacgactctgctctggctgaggaagagccggagtctatagagatcgatgatgatgaatttgaaagcatcatcacggacgtggatcaagactaccaggaacttgaaaaagagcggataaaggaagctaacgtcctgagtgccgtcgataatacccggcttactcccaccggcaaactggaagactacatcgtggcatataaggaaattgacgatgtcatcatcaaaagtgccacagagatctacgatgatgagaagaaagtggccactgcagttatggacatcgtgagtgccgaaggccccattcacgtggatatggtgatccgccggattagggagagctgcaatctcagcagggcaggcactaaattcaaggaagctatattcaaggccattgaccgcaacgagtctcatatgaacctgataagagaagaggacttcctttttatagattatgaccagattgccgtgcgtaaacgggacaaaccgaatatagaccttatttctgatctggaaatcgagaacgctatagatttggtactgagcttcgagaaatcactgaaggttaaggaactggcccggatcgtgtccagaaccttagggttcaaatccacttccaagaaaacttccgcgaagattctggaagtcattgatgtgatgatcggcaaagagatcctggtgaatgtgaacgacaagatagaatttagatga

SEQ ID NO: 3337 - DNA, 288 bp, synthetic construct
  source 1..288: mol_type = other DNA
atgagcatcacgctgatccatacccgacggcggcttgcccacaagaagacatataaaagcccgaacgaacgtaaaaagaaaaccctcgccaggctatcccacaaagagagggctcagagaaaccgcgacaagaagcgcgcaagactcgaccggcaaaaaaataagaataagcctaagagtcgcaagcccaagaaaagcaaaatgccatacaggttcaaatattaccagttccaggactacaagtttaactccgagctggatcagctggaaaagattgactcagattga

SEQ ID NO: 3338 - DNA, 180 bp, synthetic construct
  source 1..180: mol_type = other DNA
atgttctacagcacaatcatgaaaattgatagcattgaccggctgcgcgatatcagagatgccctcctagtcgaacaggggatcaatcccacccgaaacggcgaacaggcaattcgggtggtggtagacaggatcgacgagatccaatccacgctggacaaaaagatagagaagctgtga

SEQ ID NO: 3339 - DNA, 2070 bp, synthetic construct
  source 1..2070: mol_type = other DNA
ctgtcaaacagtaacaccgatagctctgataatgcctcagacgacgccagcggctctgaaatcgtatcaggaatcaacgaagagctcgaatccaataacctgctgactgaagacctcagcgtggacgatgtaattctccaaactagcttctacacaagctacgctgtgaagtctgctaagtcccctacggtgctgacgttcaaaaactcgacagtggtgaagggcgataaattgtacatctacttaaaggacagttccaatcacggcatttccggcgagaaggtgatatttaaattctcaaactcatcctacacccggactaccgacagcaacggaatggccgcacttgacatcaaactgaatccaaacaagtacgctttttcggccatatatgatggcagcgataattacagcgcgtccaggaaagactttacgctgactgtggctaaagtcaacacaaagctgacgtccagcagcagcgttgtgagggggagaaacctctacacgtacctgaaggataaaaacaacaatgccctttccaataagaagattagcatcaccatctctggcaagacctacaccgttactaccgacaagaatggccgggcaagcctaaagttaagtcttaagaccggcacttacagcacaaagatcaattttgcgggagataaaacatacaactcccagtctctctccaagaagataaagatctataccctgaagacagtcatgaccatccccagtacttcagtggtcagagggcagtacatttatgcctacctaaaggacagtgacgggaacgcactcagcgggcaaaaggtggtaatgaaattcgacaagatctactttaacctaaaaacagacaaaaacggcagagtggccctgaagattaatactcggcttggcaaaatcccagtgaaggccagcttcgccgggagtacctcctactccgctagcagtaaatcagtcactatcacctcttatgtggagaaaaccaagatcacagtggaaaactccacagtgaagcgcggaaaatacttctacgcctatctcaaagacagcaaagataaagggatttcaaaccagaaggtgaagatcacgctcgctaacataaactacaccaagaccacagactccaatgggaaggtcgcactgaagatagaggaaaatccgggcaactacacaattaaactcaactttgccaagacaaacagttactatgcaagcagcaaatcactgaagattaatgtcttgaataatgcaaccgccaagatcattgcgaaagatcagaccgtgctgggcgaatactctgtccgcttaaccgacatgaacagtaatcccttggctaaccagacagtggagattactgctgcgaccgtgaaccgaagtgtcggatcgggactgcccatcaccaaaaagactgttgtgatcaactctgacaacatctataacaaggccacagactcgcagtttattaaatccattggcgaggtccttaagtccaagggttataaagtcattatcaattccaacatcggtccgaatgcgcattgtaccgacgcaatgggagcttactctgacgtttgcattttctgcatcttcggtggggtggacagtggtatgtttgttgacatggccgctagttggtatcagaatctgttgaagaaatacgataatgaggtggtactgggattcacgcacactcagcgaaacctcgccaccgatacctggctggagagggcccacgacgacgactacagccctaaaaacttcacgggactgtcataccctgggacatacttgaacgattatgatatggattatgtgtatggccgcaccgccacagagatggccaacaatttcattaaatatgcggtcaatgggctgagcatcgggctgaacaatactgttccctgcaacgtcatggagtataacgtaacgaccggcgataatggttatgcaaccattacagatcttctgccaggtgactatgctgtgatctcctcgtatataaataagacggcaggatatgttgccgatactgtgatcagcataatcgaggttaagtga

SEQ ID NO: 3340 - DNA, 852 bp, synthetic construct
  source 1..852: mol_type = other DNA
atgaattttaacttgaaagacatgatcttaatttttatcagaggattcctgatgggctctgcagacaccattcctggggtctctggcggcaccatcgcacttatcacaggtatatatgaacgcctcatccatgcgattagcagcatcaagttcggctttataaagccactgatcaaattggactttgccggatttaaggagaagctctttgaggagattgatttcgagctattcataccgcttgttctgggtataggtattgccgtgcttaccctgtccaaggtgatccggtacctgcttcaaaattacactgcctatacattctccttctttctgggcctgattctggcttctgcctacatcctgtacaccaaattggatgaaatcaacattaagctgatcatattaacgataatcggcatcatcctgagctatatcttcgtagggttaaacccaattgcagctaaccacagcctcattgtgcttttcttcagtgggatgattgccatttgcgctatgattctgcccggaatttccgggagcttcctcctgttgctgttggggcagtacgcatatatgctcgactcactcaattcactgaatttcactgaaatcattgtctttatcgcgggagccttcatcggaatcctcggcttttccaaaatcctgaactaccttctcgagaactacgaatcggctacaatggccttcctgattggaataatgatcgggaccctgaggctacccttcaaccagatcacgagcaatctgactggcagttggttgatctgtctcatcctagccatcattggcgtggtcctgatcgtggtgctcgagaaaaagctgagttga

SEQ ID NO: 3341 - DNA, 1896 bp, synthetic construct
  source 1..1896: mol_type = other DNA
atgggactgttcggtttcttaaaaaaggataagaaggaaaagagcaacaagaaatttgacgaagaatcgaataaggatctggacgaagctatcgaggaaagtactgatatgattaaaaaggattctgactcgagtaaagacaagtcagagagtgatgattccaaatccaaggagtctaaggatagcaaggaaaaagagtccaaaagtaaagagcccaatgactccaaatctaagaagtcaaagaataaggaatcaaaggatagcaaagagaaggagccgaagaagtccaaatcccgcctcttcaggcggtctaagaagtccgaggatagcatcgacttcgattccataaagcacctgagcaaagaggatatgcaggaggctaaggagaagcggctcaaaaaggatagcagaaccaaagaagagaagctcaaggacgaaacctttaggcagatcgcaatgaaccacagcaacagaaataaccggctcgcagcagtgatggaaatcaagtcccaggatatcctggaggacgtgtgcctggaccataaggacagattcgtgcggaccattgcggcttcacgaatcacagatcccaatatcctagaggagatcgcctacaacgccaaatacacagacgtgcgccagatcgcctttgatcagctgggccaagtggagaacgtcttcgcagagatcgctaagtacgacaagaaaggcaaaaaccgcttcgctgccatcaatgagattgacgacgaactcatccttatggacattgtcatcaatgccaaagacaaaaaggtaaggatcaaggctctggagaagatcaataacgctgaaatcttggcggaaattctcaaaaacaccaatgacaaaaagatcaccaacctcatcgtggagaaggaaagcttcgataatgaggaagtcctctcgagaatcgcagaggatgaaagctatgacaagttcattcgcagcgaggcaatcaagaaacttaatccagacaatgagataattagggagattgctatcaacgacagcaacgagcacgtccgcctgatagcgattgagaagctggaggacgaagatgacctgaatgaaatagccctgaactcagaatacagctcatcgcggctgcaagccgtgaaaaagatcaacaaccaggagatacttagtcagattgccctaaatgacgaggataagtttgttcgaatggagacgctgagcaagatcgacgatgaaaaaatcctatttgaagtgtataacaaggatagtgatgaatttgtgagaagcgaagccatcaaatacatcaattcccctctgaacctggccgacattgctatcaatgatgacaaccttatagtgagcaaaaatgccttaaacaaaatcttcagtctctatgaggagggggattttgaagaggacctggatgagctcctggggaaaatcgccattaaatcaaacaaggacgagatttctgaattgtcaatcaaatccattgaaaaagaggacgttctagagcatattgtgaacgaaagcaagaacactaacacgttactgcttgccgtcgacaagattaagagcgaggacatacttaagaatatcagtgagagcaacgagaactccaaaatccgagtcaagtccgtaagcaagattaaagacaaggacaatctggaagacattgccctgaacggcaactacaacgacgcacgtgtggaagccatagtcaatgtgcacaatcaggagatattgtctaacctggccttgaacgacgaggactccaaggtaagggaggcggcctgtaggaacctgaatggattgaacactctgaaagaggttctcgcaaaggacacagatgagtacgttcggaagattgcgaagaagcgttatgatttgattagtaaatga

SEQ ID NO: 3342 - DNA, 2907 bp, synthetic construct
  source 1..2907: mol_type = other DNA
atgatgagttcagaacgtaaaaacatcattctgaagggtggccgcgaacataaccttcagaacatcgacgtatccattccccgcgatcagttcatcgtcgttaccggactcagtggctccggcaaaagcaccctggcttttgataccatttacgccgaggggcagcggcggtatgttgaatccctgtcggcgtatgcccggcagttccttggacagatgaaaaagcccgaggtggattacatagaagggctcagcccagcaatctccatagaccaaaagacgacaaaagtgaatccaagaagcacggtggggactattacggagatatacgactacttacggctgttgtatgcccggataggaatcccccactgtccaaactgcggtaaggaagtcagccatcaaaccatagggcagataaccgagtccattatagaggaaggggagggactgaagatccatgtgctcgcgccagtcattaaagaccgtaagggggagcacaaggacatcctcgaggacttccggaaaaacggctttgtccgtgcccgaatcgacggtgaaatccgggggctggacgaggagatcgagcttgccaagaccttccgccatagcatcgatctagtggtggaccgcctggtgataagggagggcactgacttccaacgacggttgtcagattccgtagaaaccgcttgcaactttgcagaaggcattgtgactgtcatgtttaatggcagggatagtgaggggaatgagaccgagtacgaaaaaacatactcggaagactttgcatgtaccgactgcggcatcagttttcaggaactgacaccccgaatgtttagcttcaacgctccgcagggagcctgccctgaatgtaatggtatcggaaccaagatggagatgaatccagacctaatcgttcccaacaaaaatcttagcctgaatgaaggcgccattgtgccctggtcaaagagtaataagaaggaaaactactattaccaaatgctgcaggccgtggctgaacacttcaactttagcatggacacacctttcaaggacttgagcgaagagcatcagcatatactcctctacggcagcaatgagaaggtggcatttgcctttaaaagacgaaaccgctcatatagggtgaatcggaaatttgaaggcgtgatcacaagaatggagagactgtacctggagaccaaatccaattataaccgcaaatacatctctaaattcatgagtgacttgaaatgccccgtctgcggaggaaagaggcttcgccctgaggttctggcggtaactgtaggggacaaatcaatcatcgacgtgtgtgatctgtcaatcaaggaaagctacaggttcttccaggaactggagctgacagagaggcagatgtacattggaaaagagattctaaaggagatcaaggcccgattgaagtttctcgttgacgtggggctggattacattaccatgtcaagatcctctggcacactttccggcggggaggcccaacgcatccgcctcgccacacagataggcagcggtctggtgggggtcctctatatcctcgacgagcccagcataggcctgcaccagagggacaacgtcaagctgattgaaaccctgaagcacctacgggacatcgggaataccctgattgtggtggagcacgatgaagagaccatactgtctgcagactatgtcattgacatcggcccaggcgccggtgagcacggaggaaagatcatcgccgaaggcagtcctgaggagatcatggagagcgaggagtccatcacaggaaaatacctctctcgaagggaatttattccaatccgcgaggaccgccggagcggcaacggcaatttcctcaccatcaaaggtgcaagggaaaacaacctcaaggatatcgatgtggagattccactggggctcttcacttgcatcacaggcgtcagcggctctgggaagagcagcctgatcaatcaggtgttgtacaagggcctttcgacaaagataaataagaaatacatgcacccgggaaagcatgattccattgaaggcattgagaacattgataagatcattagaattgaccagacccctatcggcaggacgccacgttccaacccggctacttatgtaggggtgttcactcctatcagggagcttttcgcggagactcccgaagccaaggcacggggatacaagccgggcagattcagtttcaacgtaaagggggggagatgcgagtcctgtttcggggatggaatcatccagattgagatgcacttcctatcggacgtgtatgtgccttgcgaagtctgtaaaggaaagcgctataacgaggagaccttggatatccgatttaagggcaaaaacatctatgaggtcttagagatgactgttgaagaagctttagagttctttgagaacattcccagagtggctagaaagctgcagacgttgtacgatgttgggctgggatacattaagcttggacagcccgcaaccaccctctcaggtggtgaagcccagagggtcaaactggccaaggagctttccaagacaagcacaggccaaacattatacattttggatgagcccactaccgggctgcacttcgacgacatcaagaaactgttgaacgtgctggaccggctgacggatgcaggcaattctgtggttgttattgaacacaacctggacgtgattaaaactgcggattatatcattgatctgggtcctgaaggtggagatggcggcggtgaagtcatcgccacgggaacccctgaggagatcgctgagagcggaacatatactggggatttcttaaaagtcgtgctgaatgagaacagaacggctctcgccaagcagctcgtggaagagaacagtgctaaatga

SEQ ID NO: 3343 - DNA, 969 bp, synthetic construct
  source 1..969: mol_type = other DNA
atgaaagggacgtggaagctgaagttgcgactatggcttagcatggccgtcatgttcgggctggtgtatgtgctgatcatgctggctggcaatttcctcggataccggggcttctacgggttctacgccatcgcaggcctctttgtcctattcctccaatacatcttcggtcccaagatcgttgaaagctcgatgggggttcactacctgtccgaaagcgaagcccctgagctgcaccagatggtggcggagctcgctcaggcggcaaacattcccaaaccgaaggtgggcatttcaaacaccatggtgcccaatgcctttgcatacggccggtccaaacgcagcggacacgtgtgtgtaaccaagggaatactgggcctgctggaccatgatgagctgaaggcggtccttggccatgagattagtcacatcaaacacaatgatatggccattacaactgtggtgagtgccataccactgatctgctactatctgggattttctcttatcttctccgggggtggaggggacaacaacaacggcggtggagccctcatcggctttctggccttgattgcctacttcctaggccagttgattgtcctctttatctcacgggtaagggagtattatgccgacgctggtagcgtcgagctgggatgccagcctgaaaaacttgcctcagctctgtataagcttgtgtacggggctgcaaggataccagagcaagaaatcaaggatgtggagggcaccaaggcatttttcttaactgacatcagcaacgcaagaaacgaaatcaacgacctctcccagctggacttcaatcgcgatggtgttattagcaaagaggagttggatcagttaaaaaacaataatgtgaagattagtgggtccaacaagatcatggaaatgctcagcacacatccagacatgctgaagcgtataaaaagactcgctgacatgaattga

SEQ ID NO: 3344 - DNA, 1593 bp, synthetic construct
  source 1..1593: mol_type = other DNA
atgctttgggtggataagtaccggcccaagactttcaaggaggtggtcgggaacaacaagcaaaagaaggtgatagaggactggctgcaatcctggcaggatggcaatccgcaaaagcccctgctgctgatcgggcctgctgggaccggcaagaccacgatcgcccacatcatcgccaatgagttcagcgagtacatagagctgaacgccagtgacaagcgttctcaggatgtgctgatgagtaccatcggagaatcggccactaccaaatccctatttggtgagaacaagaaactgattataatggacgaggtggatggtatccacggaaccaatgacagaggcggaaccagcgctctcaacaagatcattaaaaacagcaaacagcccattgtcatgatggcaaacgatttctacagcaataagcttactacaatcaagaagaacgcgcaggtcatcaagatggacaagatcagggccccgacaatcaataagttcctgcgtgacgtggtccttaaaaatgaaggcatcgaagtggaccctgatgtgctgatgaagctgtcaaaacgctccagcggcgacttgcggtctgcgatcaacaccctccaggcattggttgagaacggaggggagctcaccgaggaaaccctcgatacaaccggccagaaggacaatacagctacagtgatagacactgttacaagagtcctcaaaagcacgaatgccatcaacgtaaaaaggtccctaagggagaacaacgaagatccaacgttggtgatggagtatattgcagaaaacattccccgagaatacgaggataacaaggagatcaaggacgcctacgagatgatcagcaaggcagacctattctttggaagggcccggagcagtagaaactatggctattggcgctatgctagtgacttcatgggtccaggggttgccctctccaagaagcagacctataagaagttcactcgagtaacaggccctatggcattcacgctcatgggccgcacccggggacagagggccctgcgcgaccgaattgccgctaaaatggaggagaaaatgcatgtgtcactgcaggtggcctacaccattttcccatactttgagatcatgtttgaagatgacgtaaccgcttggcagatatcagactttttagaacttgaggaggacgagattaaacggttccgcaagaaaaagatccctaaaaaggtcataactgctatggagaaggtcaaagcggagatgagagaagaggaaaaagaagagtggcggaacagcattaaaaaagggatcttcgccaatgtgccatctgaagcggacttagcagacaacaatctgaataagaacttgattgacgaggactacattgaggatatcacaattaaggaagatctgaataacatttcagatgatgaactcgatgaaatcgccaatgaattttccctgaagccctccaaatcgagactggataaaggtaagaatgacgctgataacgaggagaaaaaagacaaagacgaagacaagaaggaaaagacagaggaaaaactggagaaagggcagactacgctctttagtttttga

SEQ ID NO: 3345 - DNA, 945 bp, synthetic construct
  source 1..945: mol_type = other DNA
atgttaggcccttgggtggaaaaatatcggccgcagaccctggacgacatcgtaggacagaaacacatcgttgagagcctaaagaaatacgttgatcaaggcagcatgcccaacttgatgtttacaggtcccgccggtgtcgggaagaccacttcagcactggcccttgtgaaggcaatcctaggggactactggcggcaaaacttccttgagctgaacgcaagcgatgcaaggggcatcgagacggtacgcacaaacattaagaatttctgccgattgaaacctgtgggggctccctttagaatcatcttcctggacgaagtggacaatatgacgaaggacgctcagcatgcgctgagacgtgagatggagatgtacaccaagacctgctcattcattctctcctgtaactattctagtaaaatcattgacccaatccagagtaggtgtgccattttccgctttgcgccaataaaagctgaggagatcgcagaccggcttaaatacatcgccgaggctgagggatgcgaatacgaggagaaagccatagagaccatagtcctcttcggcgaaggggatatgcggaagtcggttaatatgctgcagtctgccgcctccactggcaacataaccgaggaccacgtgtacgaggtggtgacaaaggcccgcccccaggagattaaggaaatggtcgatgcggccctgagaggcaagttcatggaatccagaaatattctcagggatgtgatgattctgcagggcacaagcggagaggatatggtgaaccagatctatcaggatgtggcaggccgagtcatggatggaaagatgagcggtgaagtctatatggaactgattggggccatcgccgacactgactttcgcatcagggaaggagccaatccacgaatccaattggaagctctgctcgctaagtttctctga

SEQ ID NO: 3346 - DNA, 1482 bp, synthetic construct
  source 1..1482: mol_type = other DNA
atgatttgtccaaaatgtaacacagtgaacgatgataatgagaaattttgcaagaactgcggtctgcagctgaatacaactcggatatgccctaactgtaacacggccaacaagcccaattccaagttctgtcacaagtgcggaactacccttagcccggtggacacctttaagaaaggaattatcgaggaaaacacgagcaactcgttctttagtacctacaagatacccattatctgcgctcttgttatcctgctggctatcggcgcggtgaccggggtggccatcttcgggggtgacggcaataatgggatcaattcaatcatccctttggcaaacgacacatatgacgataccaacctaaacaactacggcgtaaaccatgacaatgtgagccaaactcaatccgacaactttaccgagaaccagactgacaacctaacagacaatcagaccgtcaaccagaccgtggagaataagacaaaaaccgcaactgtgcagaaccagaccgacaacaataaaaccagcaataacgacacaaataagaccaaagtctattcagaaaagacgaacaccaccaacagctcagcaaaagtcaacacggaaaagacaaatgccactaacagttcagctaagacatatacggagaagacgaacactactaacagtagcgacaaggtctactccgagaagacaaattccacaaacaatagtaaagtttacactgaaaagaccaataaaacctccgacgataataaaaagaacgatacgagcatcgatctcaaaactgatgacaacctcacctcgattgacagcaagataaacaatacagacgacgataataactccgtgattgtaatagataataagcagaacgattccgacttaaacgacagcgatgaccttaacaagaacggcctgaacgattcagatgatctgaacaagaatgacgacctgaatgattcggatgacctgaacaataactccgattcaggaaaagacaccgacaacacattgaatgacaccactgatgataataaaggagatgacacgatctctgacaccatagagatgacagatgtgccaaacctcgcccaggaggccgcaaataataattaccgcttcagctctatcagttataaagggaatgtgtttacacaagcccaatgcatcgacatcttcagtgagtatattttgaatgtcaacaacggcgtgttctctccgatcaagattaattcggtcagctccgcctctagtccatctggggaagaccagtcccagagcatttcccagagtgactacatcagcattgccaacagggtccactcatggattgacagcaacaatcaggtccctaattacgttggagtgagcgtaaagggtcaggcggatctctctcccaacaagatgctggaactcttcggccaggtggtgctgaactacgctgtgaccggcgacatgccccagtccgttgatatctga

SEQ ID NO: 3347 - DNA, 474 bp, synthetic construct
  source 1..474: mol_type = other DNA
atgaagtcgattgtgtttaacatagactgtctgttgaacttcctcaaggtacgccgaagcgatctgctcgaaaggaagtttaaaagaattataatcagtaacaaggtgtacaataacctgtccaatccaagcatcagtcagtacatccgggacgacctcaacaccctaatcgataagaaattcatcaaaatcgaggagatcaaccttaacacggccgtgttcgagctgtattatgaaattatcaataattacgataatgagatcttaggagaaagcgaggcttcctccatcgcactggcggtcaagaataaaaagacacttgccttcaacaaccccaaaagcattgagttctatctggagaagtacgacataaagtgcattggcactaaagacatcttgaacgacctgctggacaagaaaattatctcaaccgatgaattttacgggattctcaatgaactgaaccagtactga

SEQ ID NO: 3348 - DNA, 777 bp, synthetic construct
  source 1..777: mol_type = other DNA
atgcgggaccgcatcaagctcaacagctttgctgtcgaactccgtagagactgggagctgaacccatacagtccgatcgacctattctccattgtcctatccaaactccccgacctgaccatcattttttatcccatgtcagaaaacacaagcggcatgtgcatcaaaaacatcaatcttttcaatgagaaggagctggaagaggagtgtgattccgatgacatggtggtgtgcataaactccaacatgtctaaggggaggcaaagattcaccctcgcacacgaactgtaccatcttctgtttgaggaggataaggaggacatcatcatctgtgaagattcaaacaaggacgacagcgagatcgaagctaatatttttgcgagctatctgataatgccttacgaggggctggagcggtattacaagacaaacaatattggcaagtggaccttggaggataccattcgggcagagcagttcttccagatgagccaccacgccacgttatttcgcctcaaagagcaggaatttattactaaagaggaatgcataaactttaggaaagtgttcattggttacgaagccagaatcaatggattcagcgacgacttgtacgttcagtccgaggaatctaaaaagtactattcactggggaaatatatccgatcggtagaaaaggccttctcgaacaagcgaatctctagtggaaagcgcgatgagttgcttctggacgccttcaggagtgatctgactttcaatttcaatgatggcctgtga

SEQ ID NO: 3349 - DNA, 342 bp, synthetic construct
  source 1..342: mol_type = other DNA
atgaaaaagatagggcagcggctccagggcctgcgcgagtcaaaaggattgagccaaagcgacctcgccaactacttagggatttcgcagcccctcctaagccagatcgaagctggcaaccgaaacctgaacctgagcctgctggacaagctttgcgccctctacggttgcaccgattcctatattctttgtaaagacgacgagtacaatgcagtcaatttctcctttagaagtaagaatgcggccagggaagatctggattgcatctccagtgtgcacaagatcgtgctgaacatgcggttcttgaacgaaatcgacgaagatgacgagtcagaggagtga

SEQ ID NO: 3350 - DNA, 735 bp, synthetic construct
  source 1..735: mol_type = other DNA
atggcagtgccggaaataaacgagctcttcctgccattgcttaagacaatcaaagacaaggacgaatataaggtgaaggacattaccgatgaggtgattgagataatcgaaatctctgaagaggacaaaaacattaccctgcctaatggcgaaacactgatcgagagtagaatcagcacagctaatacttacctccgcaaggccgacctaatagagtcaaaccggttcctttactacaatattacggacgagggccttaaggtgctggaggagaatcccgacgaactgaaggaagaggatctgatggagaacagtgccttcaaggagctaaaggatgtttatactcatgatgatgtaaccgaagagattcccaacccacaggacgccctgaaggcttcgctccagaagcagatggaagatgtccgagcggagatctccaacgatgtcattaaagagaatgaggtgaaatacttcaggcccaagaaccaaaaggagaacgacgagatctacgaaatcagaagccgcagggccaacctcaaagatgacaaggataaatccaaacgtaagtgccatgacaagcaccacgggcacaaacaccatcacaaacacaagtacatcgtctataaggaatttagccctgcagacgagttgctgaagtatgccgaactctttgagcggggatacctgaccaaagaagagtttgacaagaaaaaagaggaactgttgaaattatga

SEQ ID NO: 3351 - DNA, 1200 bp, synthetic construct
  source 1..1200: mol_type = other DNA
atgagtagcaaagtagatcttgaaaaggctcgagagtacaataaagtgaagaagtacgaggagtccctgagttgctaccagtcatacctggaatctggtgaagagctccctgaaatcgacaaggagagatatgcatgggacatctactttgcaagggtcaagaatgctagcacaatagccgagctggaggaatacgtcaaggagctgaccaaatatgcaaagcagaagaactcttcccgtagggagaagccctgctcctacaccatttccatcctgaagctaatgaagttctactcagacaacatcacattcaacaacaatgcctataagctgatcgcatgggccgataagctcaaccccgattacctcagcaataatcaggctaaaagggacgacacgcacaaatacaattcaaacaaggaaaactggtacctccagattaccaaagggctctttgaaattaaaaaatacgacgatgtgatccggctctccaacgaggccctggagaagattccggaatttaacaatttcaacgactactggttcaaatacaaaatagccaagtcctacaaggaattaggagaatacgacaagagcttagaatatctggatgagatcgtcaaggttaagaacgattggttcatctaccatgagatagctaaaaactattatctcaaagaggaccttgattcgtcggccaaatgggctgcgagagcggcactgagtccagacggcaaggtagaaagcaaattgaaactgtatctactgattggagacattctgaaggccaaaggctatgaagatgaatatatcatgcacaagtacttggtgtatgtgatccgcaatgccaaggactggacccaagaggagggctgggatgaggagctggcgagttatgagttggaccttgacaatactgactacaaatcaatccacaaggagctgtctgccctttggctcagcctgaaattcataggccaggaacgccaatatggtaagatcactaaggtctttgaaaacaacaacggattcattaaaagcgggaacaagtcctacttcttcaacgcccgggaatttcaggatgataagagctttatctatgaggggacagaggtgtctttctttttggagaaggcttataatcggaagaaagacgaggtggttgataatgccgtgaatatttactgtgaggagttctga

SEQ ID NO: 3352 - DNA, 1197 bp, synthetic construct
  source 1..1197: mol_type = other DNA
ctgaaattctataacgacaccgacatctttgtcttcttaaatgaagaatacgctgattttgaaggaaatgagatcgaatcaatcgagtctaatatcgaggatgactttgattacctcttcaacttctacgaggagaaagaagaggactacaaccacctggtcgacttctatgacgaaaatctggagagcttcgaatttgattccctgatcaaggattatgaggattacatgaaccaaatcgattcattcatcgatgacaatcagtacagagaagataatatagagtcctttatagaggattatgaggacgaaggggaaatattcgatctcatcattgcaaagtacgaacaggaacggcaagaagaattggattactacgcagacgagtataaaaaccagatcagtcccgatgatgtggaggagaagtactacgaccacatcgaaagcttagacgagatgcattacaataactatgaggagtccatagagtcgaaatttgaggcctaccagtccagtccgatcaacaatcacatcgattacggcaacatgcatgaggtggacaactttagcgactatttggattacaaggacatggacacgatcgactttgcgctgagccaggccgactcctacaacgagattgaccgctctcctgaatgggatattatcaatagtgacgggcctgaatacgatgaacccttcttcatagaggacttcgatgattgcgacaacatagttgtggactaccttgagaacattctgccactggacgccgagctcgaaaccctgattgaagatgacccatacgactccctcgagaacctgattagctttgatgaggagatcaacagcaacattgaaggcgagattgacttcctcatttcaaataagctagaggaaatggagaggtatgagtatgaggtagactcgtatctggaaagcctcctggaggacaagaaggccattaacaacagtatcgaagcctatcttgaccgggaggagtaccgagagtacgatgaatattaccagttcaacgacctggaacttgaggagatcgaaaaccagggcatcgactttgacgacttgaataatctagatggaacagctaatatctatttcaacagggacgaggaagatgaggagcccttcgacctgaatgaggatatttattacggtgactatcagtacgacgagtga

SEQ ID NO: 3353 - DNA, 4641 bp, synthetic construct
  source 1..4641: mol_type = other DNA
atggagactatcgcagagaaccagaataccgaatttgagctcaacgagtaccaggaggaagctgtcacatactacggcgaaaagccgctcttgatcgaagcagggccaggtagcgggaaaacccgggtgattaccgaacgcgtgaggtacctggtagaagagaaggaaatggacccagaatcattcctgataatcactttctctaataaggccgcgcgtgagcttaaagagcgactgatggactactttgatgtggatattatcaaccagatgcagatatccacggtgcactccttctgctataaactattaatcgagaacactaacattacctacaaaatccttgacgatgactacggaaccaaaaagaacatgttcatctacaagaaccgggaacgactggggttcaaacgagagtctacattgactcggggaaaggtgaaggatgtcgtggccgcttttgacaaatatagcacttttgatgtggatacagaaaaactggtagagtggataaaggagaacgagcccgtgtcccaggattacatcgacttcgtgaacgaagagtacagaaaaaccggcaagtttccacggaagaagatagatctggataaaaagaaaaagaacctgaaaactgcgactgattaccatgcctatgcagattcctggtacaatgccctgcaccttcaggtggcaaaggcttatccaatctataaaaagcttttagacgagcacaattaccttgattttaacatcctccaggtaaaggctctggagtaccttaaggagaaccccgaaacccagtatacaaacattctggtggatgagtttcaggatacagaccctgtacagattgagatctttgagatattgatgaaaaatgctctaaaccccattgagaaaagtaaagatgatgctgaagaagattgtccccctattagtgaactggaactagacgaggcggaaatctctgataagaaaataacatcctcattcactgctgtcggcgacatggaccagagtatctatggatttagaggggctttggaaaattacttcgaatattttgataataaatattgctgtaaaaaagttgggctgaacgtcaattaccgctctacgaacgagattatcgagttcagtgagcaatacataaagatgcaacggggtaaaaaatctcgcaagaatctgagagaggcccgtaaggagagccgcaacatctactatattgaaaacgaagaacgcgagatggaggcggccagcatcgccaaaatcatcaaaggacttaaggacgaggagaagatcaagaactacaatgatgtggccgtcctgctccggtctgtcctcacttcctctaaagacatcatcaacgtattcaacgatgagaacattccatttcaggtgaagggattgcaggacctggaaaacaaggacgagataaaatccatcttaactctcttgcatttcattattgaagacgataacccgcaggaaactccaattatcaccttctgggaggctgactggcttaacctcagggcttttacaaacgccgactttaagcagacctttattaaactgtcctctgaaaccgaggagatcctgattgaaaagcaaaaggagtttgaagagaacgtctttaactatgccaaattgatttataatgacatcacagggaatagattcacaaaacgcagctacaagggcgtgttggagcttgaggatgaagtgctggacgctgtttttaaggaatatcctaagccggtgctgacaaataaaaccctccgggagtacggcatcacgaatgaggacgatttagaatttttcaatcaattgaatgagctgaaattcgaaatattcggtgatgacaaggactttgacgaacgacctaccatactgaatgtctactacaggatcttggagatctgcggtttcctgagtgaagactatatattcgaccctaaaaacaagcaggcgttggactatattgggctgtttacccagatcatctacgaatacgagaacatcatctccaaccgggacatccgcggcctgtactggttcctgaactctaatatcaagaattacagctacgacattgaaaatgaaaacggcgtgaacattatgaccattcacaagtccaagggattggagtttcccgtggtcatcctggcaggcctgaacgactcgagcttccccagggagtacgaggacctccgagaaaccaaatataagaatggaagcgccgtgttctacacgccaagggaatgcctacgctacaaaagcctcgataaggacgatgtcacactccactatgaggaggaggaaaggaatatctacgtggctatgacccgggcccaggacctccttattttatcgaagaacttcaaaaaccctaaaaagaccacttactccaagaccttggagaaggaaatcaaggccatcgagctcaaggaaaagatcagcagtattaaggatgagcttgacgagctgatgaaaaaagaggatgttaacgacctttccttcctgctgaagagcctcaatgatgagttaaaagacatcagggccgaacttaaggagctgaagccactgatcaaagatcataaaaagattaaggtgctaaacaagcaactcaaggaactgtccatcgaaatcaaatggaagataaaagacttgaaatacgaggataagattatggacgatctgatcgacctgttcaaccttgatgaggacagtggcctgacaagggatgacctcaagaatatgttcctgaatgacttcgacattggggagaataatgaggattcggatgagagcgagaacagctttgaggatataatcaacgactcaacgatcgataaagaactggacaacgataatacatccatcgattcattgagtagtaacaacaagcctatcgaggactactttgaagacaaagaagccctgtcagacattctggtccgtacggagaacgaaatcgcaggcctgggtgaggacattgaaaagtcactcaagcggaccaagaagctcctgtcgaagcttaaggagctccaagatgatgacttaaacgattcaatgagcgaaattcacttcaaatataagatggaaatccagtcaatcattgaaggggccatcgaaagcaatgaggatgattccctcagcaagaatcagattgccttaaacgcactgtactgcatgctccagtcaatcgagtctgagataatggagaacaaagagaccatggaatcaaacaaggagatcctgaagcgagaaaaagagctgaacaataaaaaatcctacctggactataaaatcaagctcattaaagacacggaagaatttgacaagaaatacgacatgggatatagtataagcagttacgaggaatacaagataaaggaggacctggatgaactcagcaaagtgcttatggacgactcagtcaactccattggcgacctggcactcctgcgggagaaggttctggaagctggaagtcccaagctgtgtgaggacttcataatcaactgggagttgattgagagcctattcaatgacgacaaattcgccaaactggagctgctctttaagatcatggagtctgaagagattgacaacatccgccacatgtcgatcctaaatgacagaacagagctcaaggagaagaccaagctcttcttcatgctcttctactataagaaccaagagattgaatataaggagaaactgtccttcatcaataagaaaaaggaccatctcggcaacctgatcaatgcctatgatggaattataaagattgagcccaccgaaatcgacaaggtaatagacgagcgcaagatccccaatgttattgtgatagaggatgacaagaagctcaccctgagctacagctccattcagacctacgaatcctgtcctttccagtaccatctggcctacaactataagttcaagattagcgatagggaggccattacggaaggcaacatcaaccacaattccctggaggaaatcaataagacaatcattgagagaaaggatgaaaaagagggggagttggtgggagaaatagacaatgagctgctcattagcagagatgagatcatcaagatcgtcaagcggatctacatggagagccccaatatcgaccgtgacgagactccgatagactatgttctaagcaacatctttgaatattgggacaactacggcagacggtttgatatcatcggcagcgagtatcagttcgacatcaatagagaggactattttgttttaatcggttccattgacctcctgtataagaccgataatggcattgtgatcctggactacaagacaactgaaaacatcagcaaaaaagcccaagagaaatacaagaagcagctgtacacgtatgcgctggccttgaaggatgatcccatgtacaatgacgcagtggttgataagctgcagatatatgcaatcaaaagccttgagatgcttgacttcgagctaaatgaagaggagagggacgagagagaagagaagattagggagattgcatcgaacattcgcaacgaggagtttcactcaaaggggtatgacgagttctcggaatgcagtttctgcagatatagtttcatttgtgagaacaattga

SEQ ID NO: 3354 - DNA, 1209 bp, synthetic construct
  source 1..1209: mol_type = other DNA
atgaaatatgtgattgttatcgaggacggtgctagtgattaccccatagaagagatagatgggaaaacgccccttaaggtcgccgagaagcccgccctggatcgcatcgcgcgagaaggacggaccggccttattcaaaatgtgcccgagagcctgcccccaggctctgacgtggctaacatgagcatattcggctatgaccccctgctctactacacaggcagaggaccactggaggctgcaagcatgggagtggaaaccaaagatggagacgtggtcttccgctgcaatacaatcaccgaacgggacggcctgatggcaagctcgaacgctgggcacatctcctctgaggaagccgcggaacttatggagtacttaaacgaatacttcaatgacaagtatcccggctttaaaggcaagttctaccctggagtatcctaccgtcacctgtttgtatacaacgataaggaaaatgcagagaagctagctaaactggacatggtgcctccacatgactttgttggagagacaatcgcggacaagatcgagtttgactccttcgccgatgaagtgaagtcaattatgctggaaagtaaggaagccctcgagaaccacccggtgaacctgaagagaatcgaggaggggaaagagccttccaacatggtctggttctggggtcaggggacaatgccggccatgccaagcatgaaagaagtgtatggcctcaagggggcggtgattacgggcgtggacttgatcaaaggactgggcgtctgttcagggtgcaccaacctcgatgtgccaggggcaaccgccttctttgatactgattataacgccaaaggggagtatgcaatcgatgccttaaaggacaatgacattgtgttcgttcatatcgaagccccggatgaggcaggccatgccaaaaacctcgaggagaaggtcaggggcattgagaatattgacaagcacatactggcccctctattggaggctcttcccgaatacggtgactttaagatcgctgtgttgccggaccaccctactccaatcgatgttggaacccacacgagggacatggtccctattgccatctatagcactgtagatgagcccgatgacgtccaggtctacgacgaggacagtgtgaaagagggttctctgggtgaactgaccgggtgcaatctcctgaagttgctcctggagtga

SEQ ID NO: 3355 - DNA, 1017 bp, synthetic construct
  source 1..1017: mol_type = other DNA
atggacgaatgtaaactcgtgctgatcggtttcggcgctgtgggccaaggggtggcacgagccatatccatgaaaaaggaaatgatcaacgagaagttcggcataagcctaaaagtcgtggctgctggtgatagctccagcagtgccatctgccaggacgggttggatgaggagctgctcctgaagacgaaagaggagacgggcaaactggcaaactaccctgaatacggcagcgacatctccggaattgacatcctcgatgcagtggactacgacgtgctcatcgaggctactccaaccaatattgtggatgcggagccggccaaatcccttacactgaaggcctttgcggacggaaaggatgtggttaccagcaataagggacacctggcccttttctacaaggagatcattgaagctaaggagaaggcgggagtcgactttaagttcgaagcctcagtcggcggagccatgccaataatcaacctatgccaggaaacactggcaagctgcggaatcagcagtataaaaggcatcctcaacgggacaaccaattatatcctttcgcggatgactacagaaggcatgacctacgagaataccttagcagagtcccagcagctgggtattgctgaaactgaccccacccaggacgtagagggtatcgacgccgcctgtaaggtcgtaatcttggctaactctgtgttaggaatcgatgccacctatgatgatgttgaggttaggggcatttcagacgtgagtctcgaggccatcaatctggccaaggaagagggctattacgtcaagttgattggggaagtgtcccgcaaacaactgaaagtctctcccagactggtgaagaaaaacagtccctttgcgattgacgggaccttgaacctcgcaaacattactacagaccttgcagatgacatcacggtaatgggcaaaggggccgggtcgctggagaccgcttcagccatgctgacagatctgattaacattataaagaataagtga

SEQ ID NO: 3356 - DNA, 486 bp, synthetic construct
  source 1..486: mol_type = other DNA
atgcgaatgaacctaattcttgagatcttggatgttccagggcagttggtgtccatactcggccccattggtgagctgggggctaatctggtcaccattgtacacaagagagagatccggactgaagaaggcaaagtgccggtgcagatcgcccttgaaggcgagagggagaatctccaggcagttgtggacaaattcaaggagatgggagtaaacctgatcgaagtggacgatacaatcaagaaggagaagctaagcactatcctctacgggcatatcatagacaccgacctgcgcgacaccgtcgacaagatcaacgcggtggaaggactggtcgtgagtgatctgcaattaaagcttgatggcgaactcaaaagcacggccctgctcacaatcgagctggatctgggaaaacgggagatagcctatgataaggtgatggaaattgcaaaagagaaggactttctggtgattgacgaggtctga

SEQ ID NO: 3357 - DNA, 216 bp, synthetic construct
  source 1..216: mol_type = other DNA
atggctatcgaaaaagacgcagaaaaaatactggaggagttctccaagaccctcgatcaggtacccgaactggaaggaacctactatatcacagacaacctgaatctaaatcgcgaggatgagagcgaggagaaggacgccagcaagatcgtcaggaacgccagaactgacaaagatgggaacgtgattgtgaagcgggcggactggacgggctga

SEQ ID NO: 3358 - DNA, 1812 bp, synthetic construct
  source 1..1812: mol_type = other DNA
atgtgcggctgtatcggtctggttggaaactttaacaaggaactgctcttctctatgatggagtcgactaaacaccgggggatggatagtagcggatattacctttacaacaaggggtcctccgagtcactctacgagaacaacttcattctggataatcggaagtctttcaacgagtcatctatggaagacaacgactccaatcaatgctctaccataggcctgggacacaacctattgtccatatttaatctcatcaacgagaaaagagaaatcacagacaatatcaacgaaaaccgccagcctatcatactcgataacctggtcttcatattcaatggcgagatctacaatttcaataagctggaaagctttctcaaggaaaacaacgagaattatgttaagtccaaaagtgacagtcaactcttggctaacttgattcagtattactataaagagacaaatagtggcaatcaggagaatcctcttctggagtctgtcaaagaggtcgtgggtcagctggatggcgactatgcgttcgccatctatgacaaggacaatgacgatctggccatctcccgggactccattggcgtcaagcctttgttctacgcggtcaccgataacctgaaaggatttgcatcggaaaggaaggcactttggaaggctggatttgaagatagtgacatcaaggatctgaagccaggcagcattctttacaactttgaggagattgatctggatgacgacttgatcaatgaaatcatcaataccgacttcaagctgctgaaatcctcatttgatgactacaaatcctatttggacactaaagacacctacgatgtgtacaaagagctcctggctgatgatatctatgaggcagtggaaaagcgtgtggaaaacatcgtagacataggcctgatcttctctgggggagtggacagtacgattttagcggtcattctaaagagcattgccgaaaagcggcaaaagcagattgattccgtgaataacaaatcgtcagacctggacaacgtgtttctgaacggtctgggggagacgagcaatcccagcaataatagtctagaaaatagcaaaagctcaaatgactttagcgaaaacgtgaagcccctgaacatccgactctacgccgtggggctggaaaactcacaggatatcgagtttagcaaaagggtggccaaagatttggatttagacctcaagacaatcattatcgatgaagatacaatccgcaagagcgttccagacgtgctgaccgccatcgaggacccaaacatcatgaagctcggcgtgggaatgaccatctacctcgccactaaggccatccatgaggacaacatcaaggtagctctctctgggcagggtgccgacgagctctttggtggctacaacagatacctgaaacatttcgataaccacacgcttttcgacgcttacttcgacctggacgaggagatatatcatgacattgccaacatatatcacgtcaaccttgagcgagacgacgcagtggccatggccaatggggtagagctaagggttccgtttttagataaggatgttattagcctggcactggatattcccgggaaattcaagataaaagatggggatgaccttctgagaaagcacatccttagggacttggctaaggacattggagtggctgagtatattgcagaccgccccaagaaggccgcgcagtacggctctggcatcaacaagattctcaaaaagaaagtgctgcgcagcttcaacattgaagagttcgtcgagtccttaaaacactga

SEQ ID NO: 3359 - DNA, 267 bp, synthetic construct
  source 1..267: mol_type = other DNA
atggccaagaaaaatatatacctggccatgattcttagcttcttcatcccagggctgggtttagcgtatgacggcgtggtgaaaaagttcctcggctattttattctgggactgatctttatcggcctatggttttacttcggcatgcccctcgatgctgagataagcaacaccgggttctgctgttacctcgcatatattatcgtctggatctttgggttgtacgacacgctgcggaccacaatcgacattaacaggggagaatga

SEQ ID NO: 3360 - DNA, 1137 bp, synthetic construct
  source 1..1137: mol_type = other DNA
atggccgaatttagtttagatgtagaggaaataaaagaagaagtggagaaaagtttccaagaagaggagaaaacaattccaaacgacaaaatcaagaagcaggctgagcaaaacgctatcgcgatctttgaggcagacttcgatgatgcagcccagagggaaggcatcatcaagcccctggatgacttcgggataaatgccattaacaggagctccgccaagaactcgcttctgagcacacgctttaaagagatgtccaaaggcggctcagaggccgacaatgtaggtgacaagctggctgacttgaaccggcaggtcaaggcgttagaccccagcaaagtggacttcaccaggacaggattcctcggcaacctcttccacccggtgagaaaatactttgaccggtacgaaaaggctgaggtcgtgataggaaacatcatcgagtccctcgataacagtagcaaggtcctgcagaatgataatacaaccctcctgtccgaggaaacttatcttagggagctgaccaagaagctcatgaccgacattgagcttgccaaggaaatggacgagtcgattgaggtgcaaatcagaaacgccgaaatccaaggggtcgaccagtacaagattgactttgtgcgcgaggaggtgctgttccccctccggcagcgaataatggacatgcaacagatgattgttgtgaaccagcaagggatcgtgagcttgaatgttgtcagacgaaacaacaaggagctgatccgcggtatctcccgtgccaaaaacgtaactgtgacggccctgcggaccggagtgatggttgccagcgcactgtataatcagaagattgccatggataagatcaaggtcctaaacgaaaccactgaggatgtgatcgaatccacttcaaagatcctgcgcgagcagggaagtcagatccagaagacagcttctgaaaccatgatctctcctgaagtgttgaagacgtcattcaatgaggcactggccgcaattgaagatgttagcaattacaaacagcaggcgctaccaaaaatgcaggagaccataattgcatttaatgagatggctcaggaagggcagaaggtcattgataaaattgagatcggcaacaatacgcagtga

SEQ ID NO: 3361 - DNA, 453 bp, synthetic construct
  source 1..453: mol_type = other DNA
atgaccgaagagatcaaaaagaagatcaaggacatgaacttcgagggcgactttcaaagtctggacctatacaaggaggccctgtttgacttgaaccagcagttcttctcaaaaaaggcaaaactaagcaatctcattgaagagaactatcagtatacaaactacaactatgacaggctcctgaacattgtcttccacctggaaaagatgttcaacgaggaatacaagtcaatcctcagcataattcagctcagctacaagaacaatgtggtgatcgaccagctgctgcagaagaagtttaaaagtctgatctccataattgataaaacggactccttatatgatgatttggtgctgaatctgtccctttcggatagcaatgagaatcaacggaacatctccgtcctcgagagcatggattctcttatcgacagcgtaaaatactacaaatga

SEQ ID NO: 3362 - DNA, 510 bp, synthetic construct
  source 1..510: mol_type = other DNA
atgaagcgctataatcactgtatttactgtggctacaaattgcacagcgacgatgtcttctgccccaattgcggcgtcaagatcggatatgtggacgaccagtccgtgtcccttcccttaagcaaatacaaagagcaggttcttgagctccgggatgaatatgagaagaaggaaaaggaggtgctgagtctggtagaaaaacggttcgcaccgcctcaactgacataccatagatttatcggggaaattgataactgccgagtcttgttcttcagggaggccgagtcaatcctggacattatcaatctggttaccgaactcagcccaaagatagagacggagatcaagaaaaagatagacctgctaaagaaaatcatcgatcagatgaacgacctgatcaacgaactcattataaacatgggtgacaaggaggagtcggagaacgaagtgaaaatcgtgctcgatgacatgaagaacctgattgattctgtgaaggactacgacttttga

SEQ ID NO: 3363 - DNA, 1287 bp, synthetic construct
  source 1..1287: mol_type = other DNA
atgactaaaaagtatggcgatagaaccctcgaggtgcatgccggtcaggaggaggccgatccctttaccggcgcccgggctgcgcctatctatcagacaagctcatacgtcttcgaaagtgctgaatatgccgcaaacatatttgccctgaaggagcctgggaacatctacacacgactcaacaacccgaccaatgaagtctttgaaaagagggttgccgcaatcgaagggggcgtgggagccctctcccaagcaagcgggatggcagccatcaccctcgccatactaaacatcgctcaatgtggcgatgagatagtgtccggaaacaacctgtacgggggcacattcaaccttttcaaaaataccctgagcaagttcggaatcaaggttaacttcgtcgattcccaggacaccaaggcctttgaggatgcgattaatgagaatacaaaagcactgtactgcgaaagtatcgggaaccccaagctggatgtgccggactttgaggtgctagcggacattgcacacagacatggcatccccttgatggtggacaataccagcgcgataggcatggtaaagccaatcgagcatggagcagacatcgtagtccatagtgctaccaaaatcattggaggccacggcacttccctcgggggaacaattgtggggttccgcgtcactttcgactgggaccagacggccagttccccagagtttacggagcccgacgacagctaccacggattgatttacactgaagcattcggcaatgccgcctacattactaaggcccgtgtgcagatgatgcgggacctgggtacatgcatcagcccattcaactcattcttgctgctgcagggactcgagaccatgtctcttagggtcaagcagcacaccgagaatgccctggaagttgccaagttcttagacaatcacgagctggtatcatgggtcaactatcctggcctggaagacaatcccaaccacgagattgctaaaaagtatcttggggacaaattcggctgcgtgctgggttttggaataaaaggcggtattgaggagggcaagaagtttatcgagagcgttgaactcctgtcccaccttgctaacatttgtgatgctaagacgttggtggtgcatcctgcttcgacaacccactcgacgctgagccccgaagagcaaattgccaacggggtgactccagactttatccgcatgtctgtggggatcgagaatgtggaagatatcatcgctgatattgatcaggcgttaaaaaaaagcggttga

SEQ ID NO: 3364 - DNA, 648 bp, synthetic construct
  source 1..648: mol_type = other DNA
atgaccgataacgaattgaaactggagaccaagtgctacgatgcctgtgagtacggctacctctacggccttaataagaagataccggacgaagactgggagaaggtcaagccctatatgcggaaatggaagcggatggacttcgtggaaggcaacatcaaggtaacgggaagacctgagggttacaggtgcctggaggaagatgtggccaaggtggaagagatactgggcatcacaaacactcttgcaaaacgaagggcgaatattgaagagaaaatgtcggaccctattaaaaaggttcagttcaaggaccaatgctataactggttgaacatgctctttaaaagcgggacacagcccaaacaggacctgtccagactggcgatccactcaacaaagatctacgaccccgcagacagcttcaaaaacggtgccgaggatggctacggagagctcttcatctataccccacatggcatgtggtacgtgatcaataatggaagcgacgctgccaacaagagtctgaacaacctagaatccaagtttgggggggccattggatatcgcctgatgtacgctgatacggtcgataccttaattcgcgtgtataccgaggagaatgagtatactgggccacagctctactga

SEQ ID NO: 3365 - DNA, 2235 bp, synthetic construct
  source 1..2235: mol_type = other DNA
atggaagatgataatttagaatttaacgagctcctgaacgacctagagccacatatcttcaactttatcttagacaacctctctgaggttccatccgatctcagtaaaaaggaacagatcgagtttatcacctccaactacagccaggacacaatagatgacctgatcgacgaatacaatacatttgaaatcgaggcaaccgaaactctggactccctggaggatgatatctttgggttggtagcaatgggcctggacgtgccagaggacgacaaggaggagcagatcagctatataatcacaaactactccaaggacaagatcgaatacgccatatacgaggctgaattgaaaagggagatcattgctgagctggaggaattggatgatgagtacttcaatctgattgtttgccacttcaacctatctgatgagattggggagagggaaaccctcatcaactgcatctttgacaactattcaataagccaaatgaaaactgcaattgagattgcagacaagaagatggtcttctacaatgatatgcttggatttgatgatgacgtgttctccttcatctgctttaactactcctccctcgactacaacaacctcaaggccttggaaaacaaagagagccggaaggataaggcttattacctgattagtaactactcgccaactgagctccaccagaaggccagtgaattttttgcgaagatcgacctcttcaacagcctggactccttggatgaggtcctgtttcgcatcctgattaagaacatgaatgcctacagcttcttcctggaccgccttgacatcatctataacctgatgatcaactattcagactatatcatttatattgaaatggacaaggcaagggagagcttcaagacctatgatgagcttcgcaacctggaggacatcaagctgctgttccttgcaaattatctcaatgcgcccgaggaaatgattgagaactggataaaggtctctgacttcgacaataatatcttcaaggactacgacgttaaccccaagaaccatataatcagcttttatattgatgacgaggaggaggagaaagaggaagagcctaaagtgaaacggaacaacctcttcggtatcaattactttgacatcaatcccctggaactgtctcccaaggaggagattgcctattatatctacaagaacaagagcgaggaagacatcatcgaagggctcaattcattccccaatgtgattgtggacagcgatggcaatcttgtggagggcatgaatgactccatctcaaactcgaacctgaataatcccgctgacagtgatatcaatgacattgacgattccgataataaagagagtgataatatcagttcaaatgacgatagcacggtaaaagtcaatattgagggagctgacgatggaaaatcagacgaagtggaggtgaaaattagcgatgatgaagattccgattcgaccgaaaatttagacgaatcagacaaagacagtaattcttcggaggacttggaggagacgcaagcgagccaggcccctgagaaagacagttcccgtccggaggtgtctaaagaagaatttacaaagatgctgaacgaattggatggggacgtgttcaagatcctcacgaaaaagctggccattgtcgaaaacaataaggtgtctatcatagaccatatcgtatctaactacaactactacgaaattgaagatagaatcaagcttatctcatttaaaaaggaccactacgtgcggcttgacgccctggatgacgccacattcaacatcttcctgaaagagttcagcaccgtgcctaatagtttcaatcgctttgaaaagattgactatatcataaacaactactcctacggctatattgaatcccgactggagatggtgctagacgacattcgggagataaagcggagcttagccgatgacgatgtcttctttgagatagccacctacttcaaactgccgctccacgccactaaggaggagcagatcgatcaccttctcatcaactacgacctgattagagtccgaaaaagaatcgctttctatgagggaaagctgcacgtcgagggcctgattaggggcatagttgataaaaacaagatagaatgtccttattgtggggctaagattagaaaagatgcgaaatactgtaccaactgcggtgaaaagctaagcattaacatcaacattgattga

SEQ ID NO: 3366 - DNA, 747 bp, synthetic construct
  source 1..747: mol_type = other DNA
gtggacttaaaggacgtgtattactcttcaaaaccctatacacaggaggaatttgaaagtatcataattaatgcctacaagtatgtctgtgaggagattgagaccaaaaacaagcggttccaggcctgtcatgatttcgaaccatgctttatttgctggaacatcgagttggaagggaacgaatttacaaagtggatcgaggagaactctgacctgagagtgataaataagttcaacgcttccatggatgtcggggtactcggcagcttcaccgaggatactattaagctggaaaacggcattgatctctcgaagatcccccgctgcaaggggaaatgcgacagggagtacttctttaacgaggaatgcttcttcgagcgacggaggctgagagagaaaataggctcaatcgaggacatggaactaatcaatccttccagcatcttcgagtttatcgattataaggaggaatttattgaccttatcatcgagagcgttaacctgatcaaaaatcacttcccgaaggcaaaaatttatctgaagtacaactgggatcacgagtactgggatctcacgagcatctgtggaaatatttatctgaaagacggaaataacgacgagaactacagtatctacaaatacaagctctttccagacttcgtgaagctgcgcaagtcctacggtgacttcaattattacatagaaatgatcgacagcgatgaattggacgaacttctgaaaaattga

SEQ ID NO: 3367 - DNA, 795 bp, synthetic construct
  source 1..795: mol_type = other DNA
gtggatataaagacgctccaaaaacgtgccatatattacagcgaatcgaaatacacaagggacgagttcgaaagcataattatcggcgcgttccggtatgtctgtgaggagattattcccaacctgtccaacttcactcgctgtggcttcgatctcaattttgaacggatttgcttcgccaagggagtcaatgggtatctgaataaatggatcgaggaaaactctgacctgcgaatcttaagaagcactgagatctcaatggatatagggaaccccttctccccgaaatacgacacctacaaactcctggacaacatcgattatgcaaagatgcctgactgtaagctggagtgcccaaacaacgaggactatgagaagatctggcgccgcaagcactgctactgggaacgggaaaaggtgaaggagaggctgaactccattgagggcctcatcctagtgaatccaaatgaaatctacaggttcgtgcttaagaaggacaatttcattgactatatcgagagcaccatggatctgattagaaagcattttccaatggctgtcgttatcctgcagtttagtcccgaccctgaatgcgagacctacgacattctgtcagctgtaatctatgacgcagatggagactacgactattcttttcttgtgcagaacgaggagtttaccgaggaaaactgggccttgattgattactacgatatccacgacctaatccttaaactcacaaaaagtgatgagtactacaaatccttgatcgagaagaatctggaaagcgaatga

SEQ ID NO: 3368 - DNA, 447 bp, synthetic construct
  source 1..447: mol_type = other DNA
atgtacaagctgaagaacttcctcaaagggcattttgcaaagagcaaagtcgaggacctgaattttcactgtaagatcaacgagaatttccttctgataaatccgaacgaaatctacgacttcattggtgagaacaatagtctcatcgaactgattaacattagcttcacgctgataaaaaagtacttcccagactcaaccatctacttggagtttaaccaggaccccgagtacgagggactgaacagcatctttgccaatatttatgacggcacaaactcctacgattgcaatatggatctgttcgaagacctctcccttgaatttcgcgaattaaaaaagcagtatgggaagatggattatttcctcgatatggtgtcggtggatgagccttttcggaacaggctaaacgacaaattcgacggcttcttgaagatcgtaagatga

SEQ ID NO: 3369 - DNA, 360 bp, synthetic construct
  source 1..360: mol_type = other DNA
atgagcttcgactgggaaaggtttatagatgtggccgagcacctgagaaactattccaacagggaggagtaccagaggaccgctgtggggcggtactattacacatgcttcctaatagcacgggacatctactacgatatggccaaagtgcccgagggaaccttcgtaagccatgaaagtgtcatcacattctttgaaaagtcaaaaaaggacatcgagaaagatctgggcacgaagctccgcaacctcagacgacgccggaataacgcggattatgataaggaatttcgtttcgccgacctgaatgacatcaagaaacgctacaaggacattattactctgcttgacaagttgaaatga

SEQ ID NO: 3370 - DNA, 432 bp, synthetic construct
  source 1..432: mol_type = other DNA
atgaacaacaaaactagaatggtggttggccggcactcaaaacggaccggtccggagatggaccagatcgttgagaaatactacttctttgaggaaggctttgccgggctaatgatgctctttgaagaggactggttcgtggataagttactggagttgaaggacctggtcctcgagcactatgatgatgtggtattctacttcttcaacctgaccctcaaaagtgacctggaaagctgttgcttcttggtgacagtcatcgtgaagaaggatgacggccatgagatgtcgaagtcccacatacgctctctgatttccgacaggatcaatgacggaagcaagcttcccttcatgatcaatctggtcgaagtgagcgatcctctggaatttaagcgatatacgcagggggagattggaccacataaagactga

SEQ ID NO: 3371 - DNA, 402 bp, synthetic construct
  source 1..402: mol_type = other DNA
atgcaggtggcaattgccaaaaaggaaaatggagaaattctggaactggatgacatcagctaccaattcgtcttatggctaaacgagaacaacctgacccagcttgaccccatatatgccaagtccgtgctcaagactacagttggggagttcagcaagctgaccagccagcatgagtttgaaggcgaggacgagatgctggtaccacagctcaactactttgtggagctctcaacatgggcttcttggaaagacggcaagttgatggacgaggatgaggaaatcaccatctcctttgagatctgcgatgtggtcttcaatcgggagactatgaaagaggaataccacccgattgaaatgacgtatatgaagagtttcatcgagtcgttcctggaaaaatga

SEQ ID NO: 3372 - DNA, 1836 bp, synthetic construct
  source 1..1836: mol_type = other DNA
atgacactaaccgccgagcagcagagaattgcagatgacatgtgcagagagctggccccaatcacattcatccaggggaaggcgggaagcggtaagacccacctcatcaacgagctcatcaatctactcgagatcgatgagatactctgccctaccaacctggcaaagcagttatacgggcgcaatgcacgcacaatacactccttcttctttcacgagtttgacaaaatcgaagagggctaccagaaccctaaggcttacgacggggtgcgaaatgactacttcctccgcaacatcgcctttacaaagataatagtcattgatgaagtgtcgatggtccgctccgacctcatggagatgattcacaagatcctaagtactgctcttaagaacgacagtcccttcggtggaatcaaaatgatacttgtgggtgacatgttccaactgcctccgatcgttgagtccgaggagacctatgaatacctgaaaaatgaatatggcgggctgtacttctttgacagccatgtaattcggaacaatctgtcccagatcaagttctacgagctgaacgagagtgtgcgacacaaggacgactccgactgggtgaacatgctggacatgctgcgtgaagtgcccaagtttgaacgcgtccttcccattcttgaaaagatcaacacccgtgtcgtttctcccgacgagattccagagaacatcactgccattactccgtccaacgccgaagcaaaccggatcaacagacgacagctggacaagatttccggagaggagttttcttcaagagcccatttcagaattaaggagctggactcaaaggattacctggaattttattacagcgaagaccccatgaaaatcgacatgcagaaatactatccaattgaagttccctcccgcttcgaagccttcttgcggtacaagataggggctcgcgtcatgctgaccggatctgtgatgggcgggggtaaaaatggagacttcggcacgatcgtggacagggagataatcagggattacgatgatagcataaccgagatcattaaagtgaaactggaaaagaataatcaggtggtcagcgtaactctggacgctttcagcgctgtggactataagtatgaaatggaatatgatcctacgtcccatagcttaagacgaaagaccccttacattcagcgggtgaaacagtacccattaaagctaggctatgcattcaccatccataagtcacagggccaaagctttcctgaaatggttttggacctcaaaagcaatatctttgcgtcaggacagctgtacgttgcccttagtcgggtgaagaaactcgagggcttgtacctgaccaagccgatcgcctttagtgatattatcatagatgaaaggatcattcaattcttggatagtttgaggaatcgggaatttgatgtgccagaggacggcagcagcattggctctcaggaagtactgatctctaaaaagactcccctgaatgatctgttcgaggactttttgcacgagacagaaagccaggcggagaacgaggtgaaccggacaatccacaggctggtggattatgcctacgccctctatcaggtagacgagtatgatatgatcctgctcgagattaaaaagattgctcaaattatttcgaaccaattcctcatcccacaggaggacatggagtttatcgagaaagttaagacgatgtcggatgacaaaatcgacgagtctatctgtacgtcagtcctgttcaatctttatgatgtctacaaaagggtgcatgatgatcccaaccccatcgtcgtggataagattcactga

SEQ ID NO: 3373 - DNA, 1701 bp, synthetic construct
  source 1..1701: mol_type = other DNA
atgctaatcaacattaaaattaaaaatttcagatccctcaaagactttgagatgaacttcaatccaggcctaaatgtgataattggtgagaacgatgccggcaagacttccttaattgactctctgaaaatcctatttgggctgaagaagattgacataaatgactataacgaggtgggctgtcccattaccatagctctggacgagtcaaacttccattactgccttgaaagtcggattgtggaggacactgtggtaaacacattctacctcaagcccaccgaggataaaatcaatgaaatgaaaacccgcctgaacgggatggatgaactgaaggaggccgaggcgagaaagatgttgaaggagtactgctccatcttcgacatcagctatcgctccaacagtattatggaaaacctcaagagtaagatcctggaatcaatggaatctgatgaatacaccaaggtgaaaagctttagttacccgatcagcttcttgggttcgcgcgaatttgaaaacatcgactccttctttgaaaacactttcttcaaggagctgaaggaggagatctggaacatccatattggggataagaccctcaaccagcacatcgatgactatatagaagagttcaaaaacgaacagctgtccaatcaggatgcagaggagctcaatgcccaactgaaggaatttatgcccgatttcaaagagatcaaccctatagtcaatccaagcgccaagcttagcctggacgtggatgtcgaaatcctcaacagctcagggcagcgcatcatgattgagaaaatgggcgacggaacgaaccgacgtacaaccatggccatcttcaagcataagaaagacaaaaaggacctggtgtacgtatttgatgaaattgagacacacttgcacatcaaggcccagttggacattctcaaactgctgaaggaccttactaaagagaataagcagatcatcattaccacacactccccattcctgatcaaccaagttaaccttaacgagatccacctcatgtccattgacaaggagacgggctctaaggtgtctaccctcaacagctcggaggaaagtcaagtcgccctgagcaatctgggaataaacaatatagatctcttctttactaacaaattgcttattgttgagggggaaagcgaacagaactttatccctatcatgtacgaaaagatctacggctatcctatcagccagaatttcatcaagatcgtcaaggcagatggcataagggacatcccgaatttcatacgggtcatcaagaagtccttctcgaagacagacatcttcgtcctcatggacaatgacgcagatgagctgaccgaggaacggatcgagaagatggttgagggtgacctgatacacagggacaatattttcgaaatcggagatgtggagtttgaagacaccttcagcgatgacattttaaggcaggccctgagccagtacatgagtgatacgcttggatatgctgtggaggcgagcatgcgagacattcagaatgctagacattcagataaattttcaaaagtgttaggagaggcctttaatcggaggacatacaaaaactttaaaaagcccctgtttgctcagtatctggctatgtttgcagagaaagaggacatcgatgagaagatcattaaactgttcgagttgattagcgattga

SEQ ID NO: 3374 - DNA, 726 bp, synthetic construct
  source 1..726: mol_type = other DNA
atgtatctggaaatgaatgagctggcttgtgcgtgccgtcgacagtggaaaattgatgtgaatgaatccatcgacatcttctcccttgccataaataaaataaagaacctgaccattgtgttcaaagtaatggataacgacatcagcggggcctgcctccggttggacaaggaaaacataattttcgtgaactcaaggcacagtaagggaagacaggcctttacaattgcccacgcactgtatcacctgaaatacgacgagaacaacttcaatatctgcggaatcgacagtgatgacgaaacagagcaaaaggcagacctttttgccagctgtcttctgatgccccatggggccctggagacctacaaactgaataacaacatccagaagtgggatttggattcaatcattgacgctgagcagtacttccagataagccatcaggcactgctctggcgcctacgccacttcctcaacgagattacctacgaacagtacagggcattcaaggaggatatcaatcggaacgcctccatcagaggctacgacagcagcttatacgctccatatttaaacaaggactatctgacgattggcaattacatccaactgactgagaaggcttttgaaaacgagttgatctcgctcggcaaaaaggaggaactgctgctagatgcgtttcgggaggacattgtctataacctcaatgaggaaatcatcctctga

SEQ ID NO: 3375 - DNA, 348 bp, synthetic construct
  source 1..348: mol_type = other DNA
atggggttcaagaacatggtcgaaaccgtgggcgatcgcctcaaaagaatccggctggaacacgacttcacccaaaaccagatagccgagtatctgggatttaagcagggccagatagctaaactggagagtaacaaacgcatcctcaggagcgatagcatcatcaaactctcgaacctttaccggtgctctcccgaatacattatcctgggtattggggagtactccaagacgaatatggccttcagaagcaacaataagaatctatccctggacgacattgcagagatgaacaggatcatcaataacttggaatttttatcacgaattacagacaagcaggagtga

SEQ ID NO: 3376 - DNA, 1122 bp, synthetic construct
  source 1..1122: mol_type = other DNA
atgatcattcaggaaatcttctacgattgtgagaaatttctcaccatcgtgcacaatggcatggataatgacatcaaaaaacgagtgatccaaaagagcatagacgtctccagacacgaaatcctcctgaaagagcgctacattgaaaaatatcagttggagaatgataattatgaatttttcatcaagggtttcctcgactgcgaaaacgagaagaacccatacacgaactacagcacatacttcaagcagtatgtgtatcccaataagaatgatgagattgacaatctgtcgtttaaggacttcaagaaggtctacgattttatttacgagtacacaaactttaagtttacaaagctgaacattaacaacattttcctgtttttccctacggacatcctggtgaaaagcattaaatcggaaaccacatcttacctcattatcaagagttctgagaatatcagtaacattagcgtcaaattcaaactaaacgacatcataaaggaatcaatcaatctgactgagattccgaatgataacaagatcaagtcaagggaaaattggaacaactacgaaatcgagatatttgataaggataaaatcatctacaaatcccatacctacgtcattatgtccataaatttcaacatgggcataaccactaagatcaagaagattaaactgaacaagtttgacaaaatggtaaattccagtaacctgaaaaccgagaagttcacgatctcagaggagaacggcctcattaatatcagcaactatctgcttgaggagagcaagaaccgcaacgagcttaatgacgtgacaaaaaccgagtgcatctttctgcggaagaacgagcgggaaaaagcatatgaaatcctggagaagctagtgaaaaacgacggggagttattcatcttcgacccctatttcctgaagcagagcgaaggaaaggacgtgctgaaggatttgctgaacactatcttgactcacaacgacttagttaacataatcttttccaaagacattggagagtctttcgagaacttcaagaatagtctcaccgttgatgaaaagcttttcttcaagaatataggggggtccgccaaaaagctctttttctga

SEQ ID NO: 3377 - DNA, 1497 bp, synthetic construct
  source 1..1497: mol_type = other DNA
atggtgaaaagaatccctgatgaagagcagatcaagttgggcattcgaactctcgactttaacatcccagaggatcacattagccgttttgtggtggatttcattgacgaatactatcctcttctggggatcaaggaaaataaaaagaagaaagggcgggacagttttccggtgaaggagatgctcaagctgctgatttatgctaagatcgagcacattgacagtatgagattcctggcggacatggtcaagtatcatgacgtatacaaattcgtggggaacggaatctgtccttccgaacgaagcctgcagaggtacagagagaagtacggcaaatattacaacgagctgctaaaggccaccctgaaaaaagctagcgacgtggactacactgatttcaacgaggtgtccatcgacggaaccatcaaaaaagcctacaattcaaagaataaggtgatcacggaaaaggagactgaaatattgacccgctacttcgaggggggccgggtcagtcaggaagagctagacaaactccataaaccggcccgagagattcttgagaacaagaaaatcagcaaccaagaaaaactttacctcctggacgacattaaaacccaattcacgctgtcgggtcagaagtcggtgccagtaaccgacatcgaggcacggtggatgaagagcaagaaaggaaactcacagataagctacaatatccaatctgcagtcgattacgacacaaagatgatttgcgcaattaacgtcgtacaggcccctacagaccactaccagctgcccaaaatcgtggataaggcgatcaacaacacaaacgttataccccgcttcgttctggccgatacaatctacctgaatgaggaaagcctcagctatctcgccgataatcagatcaacggcgtgataccagatcgcaagcagtccaaggagaagatcggacgcctcaacaagaacccataccacaaggaccacttcaaatacttccccgagatcgatgcctttgagtgccccgaaggccagattatgtattttttcaacaaatacactgaaaaaaatgacgatctggacaagcccgacaagattaagcggctgtattccaattatggtgcttgtaaggcttgcaattgccgggagaactgcttgtcctccacccagacccacaggacaatcaccgagtatggcgggagtttaaagaaggcgatgtgggagaagatggaaacggaggagtataaggaagagtatgccaaaaggtcatcagtcgaaggtccctttggcattctgaaggaacaattccatatcgagagcgaggttgtgataggaaagactaagacagaggaaagaatcctattggatgccgtggcttacaatctcataaggttatttaacctggaacaggaaatcaaaaatgataaagaagatatagttgacttctgtgagaaaatttctgtccaggagaagcttgaggtcagggcaaccattttttga

SEQ ID NO: 3378 - DNA, 1143 bp, synthetic construct
  source 1..1143: mol_type = other DNA
atgaacttctatgatcttaacaagattcggatcaagatcgcggaggatgagatcgatatcaaggaaaatgattttctctacgaactgtacgatctcgacaatttcgactcactgtttgacgagttggatatactcattaataaaattgagtaccaccaattcgagtttacactcatttggtatgtaggatttttcaatataattaagtacgaggacattggaaatctccccaatattagtaagctcaagtcgtataactacctgaaaggcggcctcatcaaatattttagggggcactttcacctgacgaattacactatggagataaaaccgtatcgcaactactattcattcatcgaacattacgtgctgcgcccatttcagtacagggccatcactaagttgctgaactggatctatatttacgacaagaaattcttctttgagctgcactattttgacaaaagcaactttcatttcctgaggttgttcaagctgcatgaaatcaagaactttgagctggaggagaaatacatcgatttcaactgcgaggacgaactgaaaaactacatccttttcaattacatcatcacggagtacatccacagcgtggacaaaaacttgcccaaggatataaagaccaagattgagtccgatttcaagctgattgaaaagatcgaggtgaacatccttatcaaaatcatactcgactacattagattcgacgagaccaagaagatcccctgttacttcctggagaccatcgaggagaatgaagaaaccttctttacaatattcgaatccttagaaatttacaacattaatgaactcaatagcctagtcaacccattgaaagaaatccacattaaccaggaccggctgtttcagcagatgatcacaaagctggagaagctgctgacagaggaaatcattaccatcgacaattatgagtgggagcatttcctgaacatcattcctgaaaaatatgtcctaatgattaacggccttcttcgaaagaccattggggatttaactttcatcagcgagctcgaccgtgaaatacggagtaagagatatttctccgagaagaacaaggaaaaaaaactaaaagagctgatagacatcgcaaagaacatcaactga

SEQ ID NO: 3379 - DNA, 1371 bp, synthetic construct
  source 1..1371: mol_type = other DNA
atgcaaacctgtagctattgcggaaataaaatcagaaacaaggccaaatattgcgataactgcaacagctacctgaagctcaataatctcgaaattcagttcgacccaaaaaaatacgaaaagattcggctgctagagaaggctatcaaagaagccagcaatctgatagaggaagataactatggcaacctgagtgccaaaacgcagattcagataatttatgacaccatctattcctatctggtggagactacaaattttctgaaagttttgaagaagtatgatctgaacgagaaatacttcgtgtatcacagcttggagttcatcaatcgtgtgagcaagtatcccaatggaatcatatcgaatgagtttctttttgagataaaccggatcttcagcgacctcaagaataagaacaacaacaatacgcggaaatacttgttctacacaaacatcaacaaccgcgagtacattgagaacactcttctcgagattctggaatacttcgactttaaggtgttctcctacgacgactttaagttccctcccgaatttccagaaaactttaagaccaaattcaaatcaaagtacctaatcctcgagtacaactcagcggagaaccatataagtaataaggaagagaaagccctgaaccagctgtacctcctcttcggctacctgacgttcatccaccgatttgggaggctaaacgaaaagtggcacgtgaaccggttcaccctgaaccaccagatcagcgatctgaacgcttcggcaatgatcgagttggataagaacaacaacttcctggacatacacgagtccctggacatcttacgcacagagattaagctagacaaaagcgatttgattaaattcaccaatattccgtttaagaccaacttgtatgaatccatcaagaatgatgtaaaaaacgaggtcgtcctgcataatatcgaagagtatctccgactctactacatcgcgtcaactaagtccgatctggagaatagctttatcaaattctggacccttgctgagaagattctgaaggccactttcgggcaaatgaacgacgagtccatggtgagatacatgaagaaaatcctgaagtacttcggtttcgcaaattatatccaggacagaataccctttttacgcattaagaggaataggcttgtccatgagatcaaggatgaaatcacaattaatgacaggaatatcatcaagctcgtggtcgactacctgatcctttttctgctcaactggagtggcgaactgaataacaatgaagagtacaagtttattctcgacaacttcaacaaaacagatcttaacagacgcgttgagttactgagtattctgaatgaatga

SEQ ID NO: 3380 - DNA, 2712 bp, synthetic construct
  source 1..2712: mol_type = other DNA
atggtcctaagccagtccgagatgcgccgcagggccgaaaagttcattgagacttataaggaagtgtctgatgaaagaagctacagccagatgttctggagagacttcttcgatattttcggaatcagcctcaatgacgtcgctgttttcgagcaagctgtcaaaaaatttgacggcacacaggggttcattgactgcttttggaagggaaagcttgtcatcgaacacaaatcagagggaaaaaatttgaacagcgcctttcagcaggcactgggttatctggacaccctgtcgtcactggaaaaaccccgatacatcatcgtgagcgactttaagagaatcaggctgatcgacttgttcgaagacaaaaagacagagatcagcttgtttgacttgaaggacaacattcagatgttcaacttcatctatctggatggcgtgaaacaccatgaaaagcaggaagagctgaacattgaggccgccgagctaatgggcaagctccatgactcgctcaaggagtcaggatacgttggccacgagctggaactccttttgattagactgcttttctgcgtgtacgcagaggatactgggatttttaacacctatcaattctttgattacatcggcgatgaagaagacccaattagtgtgggcccgaaaattcaacagctgttccgaatcctgaatcagcccgagtctcagcggcagactaacctgccggaggagctcgcaaatttcccatacgtgaacgggaaactcttcgaggaacctatcgtccctccatacttcgattacgagatgtacaatcagctgaaggagatctgtaagttcgactggagcaccatatctccagcgatctttggctctatattccagtccataatgaacgaggacgagcgccggcagttgggtgctcattacacaagcgaatcaaacattctcaaggtaatcaactccctctttatgaatgatctgtgggaggagttccggaaagcgaagaagaatagtaagaagctggaacagctgcgcgacaagatgggcaaactgaagttcttcgaccccgcctgtgggtgcgggaactttctcatcatagcctaccgggagttacgcctgctggaatacgagatcttgaacattctgcataacatcaaaagcgaacgagatacgcaggtcctattcgactccaaggagctgagcaacatcaagattgagaatttctatggcatcgagattgaggagtttccttccctgattgccaaagtggctatgtggttcattgagcaccagatggatctcaagtacgaacaactgaacatccacaaaagcaatctgcccctcatatcttccgccaatatcattcagggcaatgctttgaaaatagactggacccagttcctgcagcccaccaatgaggtattcgtgctgggtaatcccccttttgtggggtcacgcgagcagactaaggagcagaagaaggaaatgaaggaggtcttcaagggggtgaagaggaacggtctccttgactacgtgtcggcatggtatcttaaagccgcacaatacatccaaaatacaaatataaaggtgtgctttgtttctacgaacagtatctgccagggagaccaggtaggaatcctgtgggaagtcctcatgaagaagtatgatatccacattaactttgctcaccagtactttaaatggagtaacgaggcccgaaacgcggccaaagtctacgtcgtaatcatcggcttttcaactgttgacatctcccccaaacacatctatacctatgaaacacttgactctaaaccagacctcgaaatagctacccagattaaccaatatttaattgattcagagatagtttttattaaatcgaggaacaaccctatctccaacgtgtcaaatattatgaaaaaagggagtaaagcgtatgactatgggaacctcacgctcagtcttgaggagaagaacgagctgttagatgaatttccagagatggagaagtggatcaagacatttctcaacgctcgtgactttctcaaaagcaccgagagatactgcttatggttcgccgatatcaccccttgtgagcttcaacagttgccggcccccataaagctgagaatcaataacgtgaaggagaaaagggaaaatagtagtgattccggcatcaacaacattgttaatgtgccatggctgttcgaaaacaatcagcccaagaacgattttctggccattccggtggtgtccggtgaaaaacgggactacatccctatgaaatttctgagcaaggaaatcatcgtcacaaacgcaatatataccttcgagtccgccacgttactcgactttgcatttctgacttccaagatgcacatggcctggatgaagtacgtgtgtggacggctaaagggcgattatcggtattccaagaagatagtgtacaacaatttccctttccccaacgagctgtctgaaaaggataaaaataatatcattaaaaaggctcaaaagatcctggacattcgtgatgagtacaagaacgaatctttggaggtgctgtacggagagtacatgcccaactccctgcagaaagcacatatcgaactggacaaagccatcgacaaggcgtatagtagcaaaaagtttaaggatgataatgacaggatgaagttcctattcaatctttatcttgaatacaccagcgattga

SEQ ID NO: 3381 - DNA, 918 bp, synthetic construct
  source 1..918: mol_type = other DNA
atgagtaagttctatgaagccaaatcgatcctgaaaaatctcgaggtgcctgacaaacagcaaagcgacatatgcgtatacacattcttgtccctgctgtcggttagcgaagatacaaagtgggaagattcaactaacgagtggatcagaatccacgacgtcatccaattcattaagaacaattatggtgtggtctatgcagagaacagccgggagaccatccgcaagacagcaatgcacccctttagagacgccgcttttattgaagacaacggagtgccgactaactctccacgctacaagtacaggataaccgatgagcttctggaagttgtgattagttacaatacgagcaactggggctctgccttaagctcatttaaggaaaatcacgagaccctaattgagatctactcctccaagaaagagatgaggaaaatgccggtcaagatcaatggacaggacctcaccttctccccaggcaaacacaacatacttcagatcctcatcattaaagagtttgctccccggttcgctcccaacagcgagtgtctgtatgtgggggataccacgaagaaagacctcataaagaacaccgaaaaactccaggaactgggctttgagatcagtctgcacgataagatgcctgacgtcgtattgtacagcgaagagaatgactggatttacttcgtggaagccgtgacaagtgtcgggcccatgtcccagaagcgtgtgaacgagatcgaaaagatgacggaggaagtggagtcagggaaaattttcgtgactgccttcctggatatgaaggactttaagaagttctctgaggagatcgcgtgggagaccgagatctgggttgcgtcctttcctgatcatatgattcatatgaatggagacaaattcctgggcccacgatga

SEQ ID NO: 3382 - DNA, 1473 bp, synthetic construct
  source 1..1473: mol_type = other DNA
gtgttgaactacgtaagcaacgagaccaactcattcctcaactccatctctaaagaggagaggaagaaaataggccagttcttcaccgacgtggacgtcgcaaagtttatggcccaactttatgtgcctacgaagaagcacctcgacatcctcgatcccggagcaggaagcggcatactctccgctgccattatcagccagctggagaatactgacgttgattccataaacctgacgctttacgagaacgattcgcgcatcctgcccctgctgcagaacaaccttaaattcatctcagagaacacaagtatcaatctgaaatacgagatcattgaggaaaactatatcctgaacaacagcttcagcattgaaagccaagagttttgcaaaaaagagtatgactttgttatcgccaatccaccctatttcaagataagtcgcaaggcacccgaagctcaactgatggagtcaatatgctacggcgcgcccaacatctacttcctattcatggccatgtctctccatcacctctcaaaggacagcgaaatggtgttcattgtgcctagaagctggacttcaggcgcctacttcaaaaaatttcgggaatacctcttgagcgctgggaagattaatcaggtccacctgtttgtcagtcgcgacaatgttttcaataagcagaacgtgttgcaggaaaccataatcattcacgtaatcaagtctaagaagccgctggaaagtataaagatctcttcctcctccaataacgacttcagtgacattgatgagtttgaagtcccttacgaccttgccatctccaatgacgagaatcatttcgtttacctgcccaccaacaagggggaggtgaaggtgctaaatgatgtgcacaaatttgatagttcttttttgacagaagaaatcaagctgcgaaccgggctaacagtggatttccggaataagagctatttggaggagaaaccaaataaagataacgtgcctctgatctacccgttccactttaacaaaaatttcatcacttttcctgtcgagcatgataaaaagcagtacgtgaatatggcgaagaagggtttaattcaggagaacaaagactacctgtttcttaaacggttcacttcaaaggaagagaagcgaagactgcagccagccatctacctgaaggaggattttccaaactatgactacatctccaccgaaaataagatcaatttcatcgagtccaccaacgacgatgacctgtccaaggagcagatttatggcttatttgtaattttcaactccacaatgtacgacaaatattataggattctcaacggtagcacacaggtcaacgctaacgaaatcaatagcctcaacattccatcgaggacgagcctggagaacctgggaagaattttaattaataagaatgactatagcgtggaatcgtgtgatgaaatcctggagagtatcctctga

SEQ ID NO: 3383 - DNA, 2328 bp, synthetic construct
  source 1..2328: mol_type = other DNA
gtgatagaccgcatcgacatagggacagtgttagggaatgagtttattgtcatcgacaagtacggtggagaaggcaagtcaggcttcggcaccgtctttattgtctatgatgacgatttgaaaaaggccttagcactgaagaccctgcaggacaaatatcttaacgatgaagaaacgatcggagacttcaagaaggagagcttgatctggacagaactgaaacaccccaacatcgtggaggctttgggactggatattattgatggtagactctttatcataatggagccgatttttagttttatggggaagcaatccctcgatgactacttcttcgagggcctgagcgactacaaaatcctcgattgggctatccagttttgttatgctatggagtacatggaggagcagggtatcaaatatcacggggacataaagccccagaatatcctggtgtgggacaacgagattaagattactgactttggcctgactagtttcatcaatgagtctaagatcttcaaaaataagaatgtaggcaattattacatttcaaatggaaagctttgtggaacgaatgcgtatatggcgccagagagcttcgaggggatcaacaacatctccaccgatatctatagtttcggcatcgtgctttaccagatgataaacaaggggaatttgcctttcgaggcagaaaacaacttcgacaacgagtgggaagaactgcacaaaaaggccgaaatcccttactttgatcatatcctgtatgacgtagttctgaagtgcctgagcaagaatccaaaagacagatatgactcctttaaggacctgaagcgggagttaatctcaatctttaaagagaccttcgacgaggagccctacgtgccaaaagaaaaggacttcgaaaaggactcaaactactactacttcaagggaaactctcttgcaaacgttggcgatattgaaaattttatcagcaattacgacaaagccatcgagcttaaccctaattcctcggacattaggatcaactatgccataaacctcataaagtacgggtactatgacgaagccctaaatcatctgaacctagccaaaaagatctttgatgagaacaacaaaaatttcgtcagcctcgatcgtttgtacttcaactttggacatgcttaccaatccaaaggttacctcaacaaagcaatcgaaaattacgagaacgctatcgagatcaacgagaattacttggaatcatacgtgaatcttggaaacatctataaagaactggagctctatgaaaaggcactggagaagtaccagctggccctcgacattaaccccaatttcttcatggccttgatcaatatgggcgaggcgtatagtttcctgggcaactatgaagattccgagaactgcttctacaaagcaaaataccagaacatcaatgaggacctgtatagcctgtggggagagtccttgaggcgactaaacagggaaccctacgcactgaccaaattcttcgagattctgaaaatcaacgatgagtctatgtatgcctactacaatataacaattagctacctcatcctggataacctggaccaggctaaggaatacttcggcaaggctctcgacctgttcggagacaatattacctacaagcttgacctgagcaaacagtttttcaagtatggtttccaggaggagagcctggagatcctcgacgaaattatagaaaccagtgaggataataacaagtttttcgctttattccagaaattcaatatcttcaaggactctgatgtgaagtactccacgtcaattctagatgagattatttacagctctgccgatgatgaactgaagtcggaggcctattgcgataaggccctctttctgaaggattatgaggactttgacctcattctagaatactttaacgaaggtctcagtttaaacccatataatattcgcatctattacctgaagggctgcttctgtcacgagaacgaggagtacgaactcgccatgcagacatttgaagaaggcctgtttatagataaatacaacaaggaacttttgtacgagaagtcccggctgcacctcctttttggggagtgcgagaaatgcatcggctgctgtgagaaatatctggagatcgggtatccgtcggccgagatttaccttagcaaggccctgggcttcatggggctggaggactataacgagtccctcaacttcctggaactggcgcaatctctcgttattgatgaagagacaaaggagatgattttggtgactaaagtcactatagaaaactttctggaacggtga

SEQ ID NO: 3384 - DNA, 1377 bp, synthetic construct
  source 1..1377: mol_type = other DNA
atgtatcaggttagtgagaaggaaagctctgtgtacaaatacaaagctctcggtacttcaaacgatcgcgaaatcaaatcaaaggatgtcaatgaccattacaaagtcacagaatacaacatcgacttgatctacaatgaaatcaaggaatttattcactactatttattctcaggggagatcagcacggatttcactataaaagtccaagacctgttcgaaatggatgacgacgacctgcgcaccctgaagacagtgcacttcctcctgtctgatgaggtccgagacctgattcagattttaccctacctgctccggaacctgtcccactcgacacagaaggagaaagaggaatttaatggcattgttagagggcggatcgactggaacgcaactttgaagacaaggtacgccaaaggattcaacgaccctagcctttttgtgtgctctcccccatccaagttctatgacctggaagaaaatcagctactgaagttcgtactcaggaagatcatcagcctcaagaacaactatctcgatttcgtggattttataagaaacgatgaggagaatcctttcgatatagaaagcctctcggatgagcgggattggtacgagattgtgggcaacaactacaagatggcaaagaaaacactgaaaaaggtctactttgacgacatctcagacgtgcgcatcatcaaggccaagcacatcagaaaggccttcaagaacaggaatgtgctctatcatcgggtagcccgagcctatatcctctacgaagacctattcattaacgaagacatcgagcttctcaaggaattggtcgagcatcggttgattaaggccaccaatccaaataagctgtacgagatctacatattctactccctggtgagagcgctgccctctccggagctgcgcctgttgcacagcggaaatgactactccaccttcgatgtgctggaagacggaaccaaagtgaccgtgcactaccagtaccttcccaagcctctgcaggaggtctccgagtacgccgagatccttcgaaattataacatccaatgggcatatagggctccggatattattttagagttcgagaaagagggcaaaatcacctacaggatagtggaagtgaaaaacagtagtagcgctaattatgtacgggactccgtgtataaggtcatgggttattataaagactttgagcgcatcttgtataacgaggaggcgacgtttacggaaaactgtcccatcgtgctggttacctgggggggcattagaattaaggacaactacgatccatttaaggacagccttattgttctaaatcgtaacgagtttctggatagtctggagaaactgataaacctttga

SEQ ID NO: 3385 - DNA, 2859 bp, synthetic construct
  source 1..2859: mol_type = other DNA
atgcccaacatcgaaaaatatgcttatatcctggatgacttcaaggaaatcctcgatatttaccccatcgagtcgaaaaagccatacaagaacaacgaatttgccgctaagatgcgtaacgatatagccgacgacttcaacaagttcatcctggacatggtttccaataaggagaagtaccactcaaaaatctctccgggaatgatggattggtccaaaaagccatgggcggggttttaccataaggacgtgaccaacactttcaaatttgggttttacctcatttacctttttgagggagacggttccggtttcacactgtcccttggccagggggtcgacgatgctgagaagaaactcgtgaagcggtccgaatacctgaactacatgattacagaaaatgagctgaagatccctgacgggtttaagcatgaagccaacgtgggggaatcaatcatccgaaagttctataaaaaggaagagttggatctggaggagttttgcaatgacctggagaaaatgataaaaatctacgaatcgctcatcccccactacaatgaacttagagctggggaagagccttcccgaaaggatgtgcgtcccaagaatagtggaagcaaagtctggcggatctctccaggaggcagcgatatctacgatgaagcttgggaggagttcaagcaggaatcatatatcggcgtgggcttttatcacggcgaaattgattacagcacattcaagaacaaatggtccttggaccggtatttagataaggatggggtcaaggacccttcaaaggcgatgctgtggaaattcgtcaattgggtggaaaagggtgacattatcgtagcgaataaggggaagagcaaattagcaggcatcggagtagtcaccggcgacttcattcctttgaccaagaacaaaaaccgcaacaaattcggcttggacaatatttaccctgtgaagtggatttacacccctgacgaccttgagatctctaaaaacttctttgcccgccacaccctcgtggagtggcagggggacaaatggaaccagctgttgtgcgtgttggcccgaaacgatgaggtcctgaaggagcgcattttgaagaagatatatgatgagagttataagctcctgttcgagagagaggattatcaccacatggagggctacaaaacagagtccaaagagataaacgatgtgtggaatgatctgttgttaaaatacgaaaatgatgaggacatcgttgatgatgtttgggaccggctcgtcaaccgcaagatgaaggttcacggagacggaagtaagaatatcaaggcctccattaagggaaaattaaagattagcgatgaggacctcagcaagaccgccatcctgctctttgaaaccctgaaaggattgattggaaacagggacgaagccgaccagaagagaattatcaaggagttcaacgacagcggttatagcaagggcttcaagagtggcagattcagtagcatcctgtattacctggacgattattactatgtaatcaatcagaaaaccatcgacactgtgaaactcctgtctctaattctaggggatgagatcctcctgtcaaatgagctggaccgctatatcagcaacaatgcaaagtataaagagttcatacataacttaaggaacgcttactattatgataaatatgacgtctttgaatttagggcattcgatgccatctgtcattacctatgttcgactccccccatctactttgctacaaataaggctgaaaaaattccaatagaattttacgtggataccgacgagattcttgagggcatagatgagagcgagttcgatgagatggatctggacgacgaggagattgaggaaatcactgaggtctacattgaggagacaaaatacgaactgctgaacatcaatccgccactcctggagagcaagctgcaaagttttgccattgctgagacgacagtgaaccagctgtgcgcatcacttaatgccggcaaaaacatcatactggacggcactccaggcaccggtaaaacagaactcgcaatcaagtttgcaacggccgccagcgacaacaacttcattgacgggtacattcttactacggcgacgtccgactggtccactttcgatacgattggtgggctgatgcccaatgagaagggcgagctctttttctaccccggcaagttcctggatgccatcgctgaaaacaaatggctgataattgacgagatcaacagggccgacatcgacaaggcattcggtcaattgtttaccgtgctttcaaagcaggatgtggagctcccctacaaggaaaacggcaagccaatcaaaatcaagctatgggatgaaaactattccaagcacgataaagagaaaagcacctactacatcggaaacaactggagaataattggaacaatgaatgtggatgataaggacagtctctttgacctgtcttacgccttcatgcggcgcttcatgtttattgaagtggacctgcccgaggagacccaatataaacgactcattaagatgtggtccaatgacctcagcgaagaatatactaacaatctcctaagggtttacgacgtaataaaattccggaagctgggcccggcgatcttcaaggacatgaccgagtacatcaaattcagggacgaaataagcgacgacagcaccgacctgatcctggcagaagccatcagttcttatatagttcctcagttcgaggggcttaatagaaataaggtggaacagatccggaaactgatgggagacattggtctgtcgcagtacctggacgaggagcttaaggaactgatcccgaaattttga

SEQ ID NO: 3386 - DNA, 141 bp, synthetic construct
  source 1..141: mol_type = other DNA
atggaggatgagctgctgaagaaatactttaatgagctccggaaggaggccaacaacgaagacttcatcaacgaactagaaggcagcatagagaccattagcagggaagagatcgtggagctgatcaagaaacactattga

SEQ ID NO: 3387 - DNA, 354 bp, synthetic construct
  source 1..354: mol_type = other DNA
atgggtcagaaattcaacatcaaagagctcgagattaggagcttcagaggcatcaaggatctgaagtatgattttgagggaaagtccctggtgctatgtggcccaaacggatgcgggaaaagtagcattacccaggcattcgaatacctcttcacaggccaagtcgcctccttgaagggcatccagggagtaaagcacgacgagagcctgatccataaaggggattcaaaggaagacctcctggtgaaagccaagataggtggccagtacattgaacggagcttcaatgaagagtttaaccccgggcgactgaaggacatctatgaggactcgcgcatggctcttttttactga

SEQ ID NO: 3388 - DNA, 1890 bp, synthetic construct
  source 1..1890: mol_type = other DNA
ctgaatagaaaaaagctgttgtccttcattgagtcaaagcccagagagagatacaaccagatcacgggcctcatctcctatgagaagtatgatgagatcgagacaaagctccgacaggcatccaaggacattaacgacgagataaagattttgaacaaaaggaatgatgaaaagatcagtgaactgacccagttctatagctgcgagagcgacgacctgtacgagaagatcaacgctagcctaaagaagaacaacctgaagcagattgatgagaacactaacttaacccagtacatcgatgagaacaagcttagcaagccacacaaactactgaacaagaacattgaggagcttaaccatgattatctgagactcctggataattatgaaaacatcaccctcacagaactgaagacgaccaatagtctggtttcactgcttgaaaaatcccgggaataccttttactggaaaacccagataagtgtcccatctgtcaaaaatacattgacagcgaggaaatcataaacgatcttagtcccaaaatcgataaaatcaatgaaaacctgaagctgttcaaagactggaagaatgactgcaacatcataataaagcagctttcagatctggattacgaaataaaggacttcaatggtgaaaatcacaatagtttggactatgacttgaacgatctgatagagagtctcaacgacctgtcgaatttcgataaaggactctctgagatggacagggaaatactgggctctctaaataaagacatcatctccattaaaggtaaaatgcaagctaatacagatgagattaaccggaatttagaccacctacagattctgaagaatattagggagaatgagaaatatctcgagaagattcaaaagcaatacgatgtgtccaaaaaatcgcatgagctgtttaagaagatcaaagaggaagagctggccaacatcctcaagcagatagaggaatacaccattgaattttacaactacattcactacgatgaagacatcaacagccctaaaatgaagatcaaagggtccaacagcctgactctggccctcttcttcgaagatgacgagagcgagccacggagcttttcaagcgaggggcacatcgacaccctgggactatgtctctttttggcctttgtcaaggagtttaacaaatatgatttcatcattttggacgacatcatctctaccgttgacctcgaacataaggagcaggtaattaacctgctgtttgaatacttcggaaactacaaattcatcatcacgacccataacaagctttggtttgagcagctcgcacggctcgccgattactatcagcagggccgcttccagtttgtggaaattactgactgggaccgagagatcggcccgtcactgtcccgtaaaaaggacgagaaagagaggattgagcagtacatcaatgacaatgacaccttcgcggcaggcaatgccatccgccgccagctggagtatgaattggataagatctgcaaggtcaatgagatacctctgcctcttaaaaagcattacacggtgggggactactacactcccacaaagaaatttgctaaggagatgttcaaggacactgatgtggaagaatattacaaaaatgtgttcaaggaactggacctgagtctctacaaggcgaatctcacatcccacaacaacgaaatgaactatgacttgaacatcaacgagatcaaaaagttacgagatgccgtgtacgggctggagacagccttcaagtgcaagaatcactcgggaaactatgtcttgaagtttgacatggacaaatgtctcggcctttgcagccacaaacggtgcattgacttcttcacctttaatcgcatttga

SEQ ID NO: 3389 - DNA, 1005 bp, synthetic construct
  source 1..1005: mol_type = other DNA
atgaaactggtggtagacggattcggcaaaagtgtggccaaaagggacaaccagatcgtgattaaggagaacggaaaggagataaactactacttagccaaggacataagccaaatactcttaactggcaagggaagcatcaccttcgatgccttgaccctgctggccgaaaacgatgtggactgcgtctccatcaactggaaaggccatgtggactaccggctctcggcgcctgataggaagaacgcaattgtcaaaaaggagcagtacttcgcactgacagactcccggagcggctatctggccaaggcttttgtaagagcaaagatcgaaaaccaaaaggcagtgcttggaacccttgccaaaagccgagaagagaaggattacattatcgaacagagagagaaggtttctgagcacattggtaagatcgaaaaactgtctaatatcaatagcgataacatccgcaataacatcctggggatcgaggggcaggcgtcacatgaatactggtccgcgtttgcttccgttctggatgagaaatgggaattttttggccgcagtgggagaggggctaaagacccggtcaattccttgctgaactatggttatgccgtcatagaaagtgagatctggaagtcaatatatttggccgggcttgacccatattgtggtttcctacacagcgagcgctacggaagggcttccctggtttatgacctcattgaggagttccggcagcagatcgtggacaagacggtgctctcaatcgtgaatcgtaaccagatcactcccgatgacttcgaggaagatggcaattacattaagatccacgagagggctcggcgactcctaattgccaaaatcctggataaactcaatagcaagattatgtttcacagcaagaacattagttactcggacattatcctgtaccagggcaagctcatggccgactacctgacaaatggcgtcccctatgaggggttctctctgcgctggtga

SEQ ID NO: 3390 - DNA, 126 bp, synthetic construct
  source 1..126: mol_type = other DNA
atgatagagcggtacatcattagcggcgacgatgagatcagctactgctcccagtgcaggaactatgaaacctgtgatggggatgactgcgacccctacttcgacgacgacctctatgatctgtga

SEQ ID NO: 3391 - DNA, 279 bp, synthetic construct
  source 1..279: mol_type = other DNA
atgttagtgtttgtcatgtatgatattgtagataccccaacgcggacaagcctggtgaagaaactgaagcactacggactccatcgcatccagaaatccatcttctgcgggttcctgtctattgacgagagactcaatctggccagcgagtttgactttttcatgtcgtcagaaagggatagtatcatcctcatcccgacctgtgaatcctgcgtggacagtatactaattgagggcaacctggacctgcccaagaagagcctttacgagttcttgtga

SEQ ID NO: 3392 - DNA, 765 bp, synthetic construct
  source 1..765: mol_type = other DNA
atgtgggtgaaacgaatctactacgtgagtctcataagatttaaaattctgaaaaaacgtttgatcaagtcactgcttttccggtgcaccatgaagatcaacacatgtcacctggtgctgaagactaataagaaggtcaagcagaacccatcaaagttcagaggatatataggccgcgaatttgacaagtaccccattctccacaaccactacggcaacaacaaattcctatacagctatccgcttgtacagtatcaaatcatcgatgggcagccaagcatcctcgggatcgaagagggtgccgacatcttggtggacatatcctctaaaatcaaagcgcttaagatgggagacagctactacagggtggaggatcattacctgtactataaggagtatgatgtgcgggccacccgcaaatatcaccagtacaagttcttaagcccttggctggcactcaatactaagaattatcaatcctttaagaatatcaaggactggaaggaaaaaaagagttttctgaataacattatggtgggtaatatcctgtccatgtccaagggactggggatcattgttaacaaaaggctgcatgtcagctcgctcctagatgatgagattgccgagtacaaaaatgttcagatgaacgctttcacaggcgagttcaaggtgaacttcaacattcccgacttctttggattcggcaaaggcgtaagccagggctttgggacggtcattaaggtcaccgaccaggaagaggactga

SEQ ID NO: 3393 - DNA, 1368 bp, synthetic construct
  source 1..1368: mol_type = other DNA
atgtctaaaaaagagcagattctcattctcagtctgggaggttcgcccgagccactcatttattccattaaagaatttaagccagataaagtagtcttcctatgttcgccccagacactgaaggaatgcgatggaatcctcgaggagactgcattcaacgaggaaaatgtggaaatctacgagatacccgacgcggagagcctggacgactcattttccacttcaaagaaggtgctgtccaaattcgcagatgacgggtttgaggttcgtgtggacttcacgggaggaaccaagcctatggtgtcaggtcttgtcctcgcagtgatcgaggggaattactctaatttcaaattcagctacgtgggccagaaggacagccagagccgcaccaaaaatggtgtcggggtagtcaaggatggctctgaaatcacaaaaatgcagatcaatccatataagaaatatgccataaccgaatttaagcgcgggaaaaacttcttcaacacataccagttcgaggcggccttggaaaatttccagagcgccaaatcccggttcattaagggaactgagcaaagacggatctcggagatctacgagaggatcgtcatactttatcaaaaatgggacctcttcgaagataaggtgagcaaaaacacagatctcttcaaatatctgggctttatcatcaatgacattgaaaaggatgaatttatactgaacgaatttgagaatatagacttctttatccagatgaagcggaactacgagtttctgagtttcaaaatcaggggagttagttacgacagcgaggacccttccataaaggggcacttaaagttcagaatttcctattaccttagcgatctcttcaacaacgcctaccgacggatcgaagagggcaaatacgatgatgctgtggcccgcttgtacaggatcaacgagctgattgcccaggttcagctgacccaaaagggcctgattgacgatgaccagctgcagacccagaaggagtttaaggtgaatatctcaagcacgaaatccaaagcgcatgcacgagacaactacgacgaaatcctggacttcattgattacaactccagcctgaaggaaaagaacaaagggtattttggcatcgccaacgacaagagttacgagctgttagacttgttcggcatcaagcaaagccctaagttcgacaagctgaacagtaaactcaaggaaagaaatggctctattctagctcacggcctaaagccgatgaacaagaaaaaggccgaggagctgtatgacaagacccttgattacgctaaggactatttctcatttctggacgaggatatggatttggctaagtttcccaagttttga

SEQ ID NO: 3394 - DNA, 1203 bp, synthetic construct
  source 1..1203: mol_type = other DNA
atgatggtgcgcttgcagttggaaaccatcagccccgtgtatattggaaacacaggaaacgagtattcccggtctgaatttgcctttgccaagtttagcggcaagaagaagctggtcagactgaacctcgacctcgtggcgaaggagctgtaccaacgagacgagaagctcttcaaggaatttctaaaggttctttccgatacaaaatccttcaaaaacatcaaaaccaaaaaggataacagtcagttcaataaaaatgagcgaattgcaattaaggggatgcagaaattcctgtacgacaccattcgaccttacgacaaggatctgtttaagaaaatcctctccagttgctcatcttacaaagttagcctgcagtatgccccagagtccatcaaggagaaaaacggcaaaaaggtgagtgtgacaagaaaaggggagagcacggccgacataggtctaatcaaggagaaccttaaaaccaataacgagccctacatctccggctcgtcaatcaaaggggcagtcaggaatgccctgctgtacagcagattaaatctcagcagcaaaagcaaccgtgacgtagctcgggagattaataataagaataatagggacattaagaacattatgacctatgtgcaattctcagacactttcaacaccatcgaagagcccagcctttatggggtcgaaagcatcgggaccaaaaggaacactttttcattcttcgagacaattgataggggcaatgtgtttgaatttgaatatcgcaacactttcaattcgaaggtgcacaatcctcgcatgctgaataacttcgatctgagcgtggaatcaatatttaagcacatctacgaattttctaacgacatcttggatgaggaaatacggtttatcgaggatacagtcaacttcgattatgtgtactccgatgtcgactcgggaaagctttacaagtacttcgacgacctcaaggacaaaaatactgaggagtccccactcctgcggttaggccagggcagtggcgctctgggtgtcagtcagttgctggaggttaaaaactccaggagcccaacggaatttaccacgttccgcaagttcaaccggctgggacacaagaaccattacgacttccccaagacaagaaagctgatagtaaacagcttcgagccgctcggatgggtgaagctgagtaaaatctga

SEQ ID NO: 3395 - DNA, 996 bp, synthetic construct
  source 1..996: mol_type = other DNA
atgtacgtgtgtgataagatgaaaatcgtctacctcaaacctaagagcacatttccttttctttcgagcgacagcatcttcggcgcactgacctacgggatggccgagttgttccccgagaaactggattcattcatagagagcttcaagaataagaacgacattccattcctcattagcagtgcttttcctttcatcaagaacgagaacaactattttcgattctaccccaagccaattaccaaattccagagcaaagacatgaaattgtcgaaaaagttcaaaaaaatcaaatttatcgaggaggatattttcttggagctagtttcaggcaatattagtaacgatgggatctttgacaactttaaggatgatctgttccttgtgaatgaatttaacgaatctttccttgtgaagaaggagaatagcgagattatcgacggaagtttattttcaaaggaaatctctccccacaatgttatagatcgcgtaaagaataactccataaatatcttttacagcgaggattataggttcagagagaacaaaggcctgtttttcctggtggactttaaggactccagtttcgaagaaattttcatttccctgctccggttcctcagagacaagggtttcggccatgacatctcctctggaaagggacagtttgacttcgaaatagacgactttgacaagtttgacaacctgaacaagagccaatacttcctatcactgtcccgtttcatcccagacgagaaggatatcagctttattgaggagctctccgatgatgacgccctgtatgaaatcggagacaagcgctcccgggacagtttcgggctccggaagaaaacaaggttcttcaaggaagggtctgtcttcccggattacactgtcaaatatgatgtgaactgcggttgcctggtggaaacgagcgacaggtcaatcgagtacggctactcctttaatatcccctataacgtggaggaactgtga

SEQ ID NO: 3396 - DNA, 768 bp, synthetic construct
  source 1..768: mol_type = other DNA
atggagaacttggagtttcagggcaacgtgataatcaaaggaaaaatcgtttgtgataccggtctgcatattggcgagtccaatgagacactcgaaattggcgggatagacaatatggtcatgagggataagaagtcgaacctgccatacatcccaggtagctctctgaaggggaagctccggcaccagatggagctgttcaacaaggacagcgtccggtacattctggacaaccccaagggacgcaatagggagtatgctccttgcaactgcggaaaatgtagcgtgtgcaagatattcggttttaccaacgatgaggatggcacgtacgtgggccctactagaatcatcgttcgagatgccttccccgacgacgaaacaaaggaattttgggagagttcagagggcgtgtccagaggagcggaactaaagacagaaaacgtgatcgaccgggtcaaaagtaccgccatgcacccgcgaccaacggagcgcatccccaaggacagcaaatttgacttcgagatcgtgttcgggatctatcacgatgatgacaaggaaaactttaaggagattttcaccgcactgaaactcctggaaaataattatctcgggggcaatgggagcagaggatacgggaaaatccatttcgaggacctgtcctacctcattcgcaacaggtctttctacactgacaatgccgaggaaaaggtaattgaacttggcgtgttgtcaaacttagaggatgaaaatctgaaaatcgagctttga

SEQ ID NO: 3397 - DNA, 432 bp, synthetic construct
  source 1..432: mol_type = other DNA
atgccgaacgatctaaaggacgtggagaacaagataaaagggctcaaaagcctcaagtactatgagatcgaagagtttgtcaagttcgacggggacgcagacaagataaccaagcaattacgaaatgatgacattaagacgtcccagctgcggaagttttttgctgcagtgaaggaaatcgaaatgtacgtaaaagataaaagagtgtgggacgacaaggccaaagtggatttctacctcctgatgcccaaactggcgtatgctaaaggacggaaagtcatcagtgagcgcttttttaaccttatgaagattacaatggagaaggttggtagcggcaataaggaagataccttggacgatttcctgaggttcgtgcagttcctggaggccatcgtcgccttcttcaaagtgaacaatccaggctcactgtga

SEQ ID NO: 3398 - DNA, 2658 bp, synthetic construct
  source 1..2658: mol_type = other DNA
atggatcgcaagaaccttgagtttgcctccctccttcacgatattggaaaattttcgtaccgcgcggaaaacaacttctcaagcgagtacaagaacctcgataaagacgacttcggttatcacggagctcactccaagtggagcgctagctttatcaagcattactggaacagtgacatcaccaaccttgccctgtaccaccataaccctaaaagcggtatcaacgaggagatagggcttattattcagaaagccgaccatcactcttctggtgagcgcatcgattctatcaagaatgacccgttcaaaacgccattgctttcgatcttttcagacattctcatcaagcctgaaaagaacaagaagtgcgatgagctgtacgtgcccttggaagagtttgatttgaatcgaaagtggaaaaatagcatcccaacctccatcgataacgccaaaaagggccataattccctgaaaaagtgctattcggccctgtgggagaagtttgaaagtgaggtgaagcatctggaaaatacggatgacttcaacactatcctggccctcttgaagaaatacacctcttgtatgcccagcgcaacatgggggtctaaaccggacattagcttgtatgaccactcaaagacaaccgcggccatcgcagtgtgcaggtatctgttcaatgaggagacagagctcaagcacacctcctcaacgcaggaggtgtattcagttatcagcggagatatttccgggatacagaactttatctttaagatttccagcccccagaaggctcagagcgcaatgagtaaacggctcaggggccggtcactgtacctgacactgctgaccgacgcgattgcaaacaagatagtgcaggatctggacctgacccaagccaatatcctgttctgtggcggaggcagattcacaattctggccccaaacacggaaaaggctaagaagagcctcaacgagatacagaaggagataaatgccttcttcattgaaaagtttaacgcagaattgtacctggctatcgcaagtgaagaatgcagtggaaatggcctggagaacttcagtgatattacatccatcttaagctataagattgcacaggataaaaagcacaaatttatcgacaatctggacgatctgttcgacttcgaggaggacttggatggcaaaagcacctgtgccgtgtgcggaaacctcttcaagccaaaggatgaggaggacaagttctgcgacgactgtgaggaacacatcaaactggggtccaaggtgaccaatgccagttatatgatcaagtgtttctttaatgaagagttcaaaaacatttacgacaaaaataaatttaagaaagtctctttctatgagaagcccctgaacatagcgtatattttcactagcaacaccagtaagaagtctgttgacaagactttcaaagaaatcaaagatatcctctcggaatacgacgagtttgtcgatagatttgagatcatcaagcttaacgacactgacttcctcgagattgagaacaagttcagcctcgaggaactggataaaatctccttcagtttcagcttcctgggaaataccatcccaaagtaccacaaccgtaaccccctgtactttgaacacctggcccagatcagtaagggggcaaacaaacttggtgtcctaaagatggacgtagatgatctgggcatgatcttcggcgagggcttcaatcacgcctttaaagacagcgacgagagtataagcagcatctcccggatttccaccctaagctctcagctggacctcttcttctcagggtttattaataagattgcctcggaattttgtgtgtatgacgatggaatcaaggaatacttcaaaaatgacccttcgttcttcgagttaaactttaaggaggtagagttgaagctgcaaaatgacgacggctctaaaaacgaagatgagtccatcattgtatacaaagaaaagtacggcatggagctcgacgacgaaatcaaggaatccatcaaggagtatagtatcccaactattcatataaactacagcggcggggacgatctcctcgtgttggggccctacgacgatatcatcgagtttagccaagagctgcgcacaagattcaagcagtggacttgcaacaatgactccattaatttatccggtggaatcaacattgtctcctcaaaattccccataggcaaggctgtgatcatggctgaaaactaccttgaggcttccaaatcctgcggtaaagacaagcttacagtgttcaatgaggtcgtgccgtgggatgccaagggctctaagtttaaagacttcaaccagctgcacgaatttggcctaaaactagaggaatataactctcaaaataaactatcaaaaagcatcgtgtattccatgttatacctgtggaaggataactttgaagagcattcaggaatatttttcaacgaagagaaatgggaaaaggagaattttgcgaaatgcaataacaatagatttgtccccaagttcgcttataggctgcgagggatgaatcagaacagcaaagagtacgatgtggtcctcaaggaagggattaaatacatgccttggattaagatacctgtttcatgggttagtctgcggatgaggtga

SEQ ID NO: 3399 - DNA, 4698 bp, synthetic construct
  source 1..4698: mol_type = other DNA
atgtcaatcgacctgaacaagaaccagaaacgggctgcctattacaatggagacaagtacctggtcatagaggccggtccaggcgctgggaagacacgggttctgattgagagaatcaagtttctcataaacgaagagaaggtggagcccagtagcctgctggttatcacattcacacgcaaagccgcagaggagctgaaagaacgtttatacaaggacattgacgaatctgtggtgagcatgatgcagataagtaccatacatgcgttttgcagagtgatcctctccgagatcggggagtacaacactcgggtcctcggcgacagcgttaacgagaagcagaaaatgtttttaaacaaatataagaaggacctcggcttcgtgaatgagtgtcacatccgccagaatgagatatttaacctaatcgataaatacggcgaatacgccaccttcaaggtagacagtaaaaaattggttgactacatagaacgcaacactaaaattgaccccgagtatatcgatttcgtgaacgaatacatgaaggagaacgacggacgatacccttttgacgaggtaatggctaatgacgcctataagaaatcccggacaaacgcattgtacctgcaaattgcaaagagctaccctaagtacctggagcttctcgacgagaagggcttcagcgattttgatcagatgcagatcaagaccctgaactacttgaaaaccaatcccaacaccatctacaagaacgttttggttgacgagttccaggacaccgatcctgtccagatgaagatatttgaaatcctaatgaaaaacgcagactcctttactgtggtgggggatattgaccagagcatctatggattccggggcgccaacaagaactacttcgagtatctctacaacaattatgacgacagggtctacaaggtgaacctgaacgtaaactaccgttcagcaaatcagatcattgacatcagcgaggacttcatcaagtcgcaaagggcggagggcgcaaagcaggacaaggccctgggcgcacgggatctcgatcgcaacacctattttctcgtgaacgagaacagcgaaagcgaagccaaggccatcttcgaaatgattcgatacctccatgacagcgggaagattgagaattacaatgagatcgctatcctttcccggtccatcaggtttagcaacactgcccaggacctcatccagcttttcatcgataacaacatcccttatcatgtccgaggggtgccagacctcttcgaccggccggagattaggagtgtgatcacacttatccaccacctgatagaggacaccaacccccataaccacaaatttgacctgtgggagttggagtggctaaatctgaaggcctacactggcgagagcttcaaccaggtgctctttaacctatctgacgagactaaaaacatcctgaacagtatacaggaggaatttgaagagaacgtcttaaaggaggaaaaacgcgcttatctgaaagttacaggcaagaagtctcataagtatgtctttaagagagtctttgaacgagatgagaaggtgctgatcgagctgtttaaaaacattgagaggcctatcctaagcaacgagaatctgattcggtacggggtaaaaaataagcaggatcttgagttcttcagacgcttgaacgacttgaaggcttacttcaacagtgaagagtacatggactccgaggacactatcctcgatatctatatgaaattgctgacagacgtctgcaattatctgacggaagatttcattaacgaccccattaacagggatgagctgaaaaacctggcaatcctcagcaacacgttccacaattatgagctgattgtagacaataagaatctgaagggagcctactatttcctgagatacaacattgctggctacagcacagataacgatgaatccgagggggtgcagctgatgaccgtccataagtctaagggactggaatttcccgtggtcatcctcctgagtttgaaccacaagaagttcccaagccaatacaaggatgagtatgatcgattctacactccaaactcctgtcttgaatacaagaattacgattccaaggaggaggaaattcaagactatctagaggaagaggacagaatcgtctatgtggcgatgacaagggcccaggatattttggtgctctctaatctaatcaaggaaacgcctgaactggaagggctgaaagccgaactgaatgacaatctgtcccagattgaaaagatagaaatcatcaaggacattccgaaagggcacattaagattcacgacctgatcaataggaatctcagtagctgcaagttcctggaggacgactttagccagctgccaaagacggtgtgcgaaaagccccaagtgaaaaaggaggacttccttaacctgagcttctattccctggagaattacgtggcctgtcctttcaagtacaaactgatgcacgacatcaacttcagcgagtccaccatggagtttaacaagctccggggcttgtttgtccacaacctgctggagacgatcaacaatcgtatccgctccaacggaaaccggtacattggggacgacgaggtcttggctatctttgaacggtttcaggactccttccgcttcgaaaacctgagattgagtaagaaggaatatgatattataaaaaacgacgtgctttattactacaataccttcggaaaggatttcaatatacttaacacagagctttcattcagcattaaaaaggaatattatggactctcaggcattattgacctcatctacaagaccaaagatggaaagatgggcattctggattataagaacaccgaacgcatctcaaggcattatgtgcaaaattatattaagcaggtctacacctacatgattgccctgaaggatagtttcgaaatcgatgagctccggatatacgcaatcaaagcacggaagatgatctccgtggatataaatcagaagtccctggatatccttctggaagagctggataatgtgtcattgaatattaaaaaagaagtattcgaatgtaattttggagagggctgcctgaaatgcagtttcagcaagatctgcgttaaggcaaataacgatgacgtgtcggtttttgactttaacaacgaggacaccctgtcgtttagaaataagttctatcagaacttgcccgactacgaaataattgacctgaaagaccgctattggaaggacatcgactttgattcagatgatgagaccaagtttgatgtggacatcagtgccgatgatctggcctcaatctccgcgaaggagggtgtttcggtgtctgctaacgaaggtatccccatatctgccagagagggtgtgagtgtctccgcgaatgagggtattcccatatctgctaaagagggtgtttctgtgtctgataaggacaacgacctgagcgtatcggccaatcagatcaaaaatttaaataactcaagcgatgataagcatcttggtgcggacttcaaatcgaaaaaagactcatttaaatcagagatgaaatctcctagttctaaaaaggattcatctaaatccaaaaagaaaagctacaaaagcaaggaatccagcaagtctagcaaggaaccattcattagttcgtactcaaagtacctcgatctgaagtccatcccgaagaaatacaagaatttccttaaaaacgattactccaaggacatcgatctttttgagtatgatgatgacctctccctggaggagaacattctgcgaaaatacatcctcaagaaaaaaggcctgaaattgctcaaaaaagagctatatgatgagtccgaagactattataaaaaattaatacacaattcctacttcaaggaggactactacccatataagcaactgatgaaggtctatcacaagacgaagaaatacgacaaggaagcggacatcatacgcgatttcttcaagtcaagcgtgtatgccaataaataccagttcttatacttcaaatataagaataggaaattgccgaagagagctcgcatcaagcataatgaactcaaagacctgatcaagaattacgtgaatctcttaaaagattctgacctttcgaacaattctattcccaatgctgatagactgaaaaaagataagaaccgtctcaagatcctatcagatgaagaggagttttacaaccacaaaaggtcctattacaccaacattgccgatggcctgtatgaggaaaagctcaatcaggaggccttcgacctctatgctatggcaatctacaagtacaaggaaaagagtttcagatattaccaacgactggctagtatttataggcgcactaataattacaagcatgagttgctggtgattatggagtactttaataagagcaacaagatccacagaaccaagagcagcgacaagtggtttaagcaacgtctttattccactaaacagcttatcggggatgagaacgccattaggcagattgaaaacatcgtgtgcaaaaaaggatacaacctcaaagccgattacgccctcaattacttaaaccacgacctggacgaatattactgtctgaagaatttagacaaggaacttaactacatcatcagtagcaatgaggacattttcacactgcacaaaaagaaatga

SEQ ID NO: 3400 - DNA, 1197 bp, synthetic construct
  source 1..1197: mol_type = other DNA
atgaacgaaaccacgtcgaatgaactcatccacgcccgcagactttatatgaagaagaacatgaaggaagccgaaactaactttctgaaagtgttcaacacaaacagggagctctttaatgacctggacgagatctactttatccgtgcaattcaggaatcccatatcgacaactgccagtcaataggtgatttaaggcactatgctgactttgtagtggagaactttaaccaagaggactgctccaaccgaaatttcgaagatccctacgcggactttattctcaatcttagcactgttctaatcaaggaagaatactacctggatgcaattaaatacctgataagattggacgagtctttcctctctgacgtgtcacggcacaactccaacggctattatagattctcgcaccatgagaagtacctgagcaatatggttaaggccctgattggcattggcaaatacgatgccgctctacagtattccatccggctgatcaacgacctgccggacaccgccagtgaggccaagtattggattaagtggagcattgcgaaaatatataatctgacgggagattacgaactgtcaatcgaatacatcaacgagttgttgcttaagaggagtgaaaactatttctacaaacttctggccgacaactacctcaaactcgatgattatgataatgcactggtcagtggggtccactatattattttaaaaaaggacatcaaaagctgtgtcaattattacacagagctcggatatatcctgagccagttgggcctgactgaggagtccaataaacactactatctcagctacgctatcaaaaagagctatggcaacttcattcccgattacctggaagagaagatccgagacctgggcttcgatttggagaacaccaattacaataagatagctaacgagctgaaacctttctggcgggagtgcctttaccgcaataaaaagcagtttacaggaaccataagtgccatcaagcaagagaggggatttggtttcatcaagccagatgacggggggaaaaaccagttcttcctattcaaggactttaaggatgatcatgactacatttggaacaacatgcgggtgtcatactacctgggggacagcatcgactactctaagaataaggagtccacccgcgcagtgaatgtggagctcatctga

SEQ ID NO: 3401 - DNA, 1695 bp, synthetic construct
  source 1..1695: mol_type = other DNA
atgtctagtcaacttgaggaattaaaaaaagaatttcaaatagccgagtacaatctcgactttgatagactccacaccctatgtgacaagatcttggaacacgaccccaacctgatcgaatacaagcagtacattgctattagctacttcctgtctgaggactatgaaaactgcataaaggagtacagcatctacctggaccgccgggagaaggatgctgacgacgcgtacatactggccatgagccacctgcatctcaacaacgaatcagaggccatgtccattatcgaaggctttgacgagatcgactctcttgagctgaaactcaaggcgtatcatgacattaaacactactacaaggccatcaaggccggtaacgagcttctggatattgacagctccaatgatgaagccttgcagaccatgtcggagatctatgacgagttgaacaataccgagatgtcactgttctatgagtgggagctatgcaagctgaagcccgctttcaaaggcttccatctcatgaggctctatgagctgggaaggtatgaagaggtcatcgagatctttgaacggaatcccgacgactttaaatgcgaccttctgcactacccattcaacttcttgatcggatcttcatactgtgaaatcggcaagcacatggatgcattgaagtatctgtaccggtccaaccagctccacgagtgccgagatacaggacttcagatcgcccgtaactactatatactgaaggattacgagatggcatataagattctaaagggggtggctgttaaggagggtctattggactatgatgattctctctcggacgatgagctgttgaatgacaattcgcttctcctgttggatgaagatggactggaagacgatagtttactcctgtccgataacgagactttgaatgacgattccctgctgttatccgaggataagacgttaaataatgattccctgttcctgagagaagataagacactggaacagataatggacaagtactgtaaaggggcacctgaagagaaagctgatgagaagacttgcaatgaagaagaaaaagaaacagaagtcctcagcgatatacagattcttgaccagatgctgctggagcttgatattgacgaaagtcattatacccaggtggaggaggagccaagttatttcaaagaaactgatgaggactcaatcgacggcgacgaggacattgacatcgtggacgcaaacatcctgagaatgatgagcgaggtatgtctctacttaaaacgctacgatgagtgcatcatgatcgcgaaccggctcctgagcgtgtcagaccgatatgacgagattgtgaacgtgatcagtgcatactacctggagatggaagacgagtggaaggctgatgaatggtacctgctccttcctatcgagctggcattcaataaaccatttgtctatacgattgcccgcaacctgtccctcatcggcgagagcgaccgcgccctgaaaatctacagcaccatcgagaagctgattgacgaaagcccctatctcctgtatgaaagggccggcctctacaagaggattggggagaaggagcttgccatgaaggacttggataaatataacgagattgccctgaaatacctatacgagaacggggaaccggaagttaaatacgaggacctggagtga

SEQ ID NO: 3402 - DNA, 135 bp, synthetic construct
  source 1..135: mol_type = other DNA
atgaaggtagaaatcatgattatagggatcttgctgctgagcaacttcctctaccatcacgaggacggcaatcccattgtgcagtacgtggcatatatagccagcctactggtcatcatcctcggattcttttga

SEQ ID NO: 3403 - DNA, 1290 bp, synthetic construct
  source 1..1290: mol_type = other DNA
atgaaaagaaaagaagtcgtgctattcatgacggtgggcaccgggatcaatccagacagcaacgaggcggggtacaagaagctggccaagaagctctacagtactctgaacaagatttatcccaactatgtaatcttctttgcaagcaacgtttccaagcacactattaaatacatagacgcgctgttcgagctggacggcgacgagttcaatgaaggggaggattatgaaatcgttgaactgaacaacattgacgacttcaactactgctttgagtcctttgaagcaaagatctgggaatacgattacctcaatgagaaaaaataccagattatcatggactacaccagcgggacaaagaccatgtcagctgctatggcctgctgtggtatgctctacagccgtgatctgatctctgtcggaggggaccgcagcaagggagaggtgtcagctggaacagagatcatcaactaccagaatctctataagatctatgacaagcgcgccatcatgcgcatccggtacaacttcaacacgaacagattccagccgtgcctggacgtgttgaactatattgtggatatgaacatccacaaggactccctagtggacctctgtaaaggatacttcgcatgggataccatggatttcagccatgcatatgagcacctgaagagcattgaccttaattatatggagtttgcggagataaaaaacgagcttaagaagaacctgaatgccctgggcatcatcgtcaacagtaaatcccagaaccttaagaactgttatatcctggcctgcatcatcaacaatgctatacggagagctgaggaatataagtttgacgacgcaattgctaggctataccgaagctttgagctcattgcccagatccgactggaaaaatacaatctcatgagttctgatattgatatagatcttctcaaagaaaagggcttaaggcaagagtttatagatgagctggagaatatgcgggaagacggtaaaattaggattggcctgataaaggactaccatttgttgaatgagctggatgatgagctcggcaagtactttatggagaatgaatcgaagatcaaagacctgacattcaagaggaacaattcgattttggcccacggactggactcacaatccaaagaagacttcgataagttcttagagcttgtgatcggcctggccaaaaaactggataaagacatgaacaagttcctggaagaaacccggtttgccaagttcgacctcaagttggatattaataatgcctga

SEQ ID NO: 3404 - DNA, 339 bp, synthetic construct
  source 1..339: mol_type = other DNA
atgtataagataattaacgaggacggctccctagtcaggggatacccatctgatgcactctacgacctgttgaccgacaaagagaaggaacacatccaactcttcaagaatgagatcgaaaagatcacagagaaagaggggcttggtaaaataacggtgtcagtgagttatgatgaacccattatcgaaaaagccttccagatccaggacaagaatggctacagctttgacgagtttcaggagatcctggataagattcggctgcatatggccgatttctgtaagaacaacaaagagctgtgcgaatttaagaagttcagctacatcatttccgcttga

SEQ ID NO: 3405 - DNA, 270 bp, synthetic construct
  source 1..270: mol_type = other DNA
atgatggtaagtgacaaggatttggccaagaacaataacgtgaagggctcacggatcaacgtgacaccgctcatggccgcatacttcctgggatacatgctgtcggagaagggtgagaagatcagcgatgagaaaatagaagatctgtacaagggggcttgcttcagcatgggcatcgaccccgtcgaagacatttccgagctttttaacgaactcttcagcccaaaaaagaaaaccaaagaggacctagaaaattccttttattgttga

SEQ ID NO: 3406 - DNA, 1407 bp, synthetic construct
  source 1..1407: mol_type = other DNA
atgatccatctcggtgccatcatgagcaacatcgtggacagaataggtatggagaaatcagtcattctccttgctgcggtggtctcctttgtcactgccttccttgcaaacatcagcgtggctctgcccctgatagcgagggagctggccatgagcaatatcattcaaaactgggtagccacaatctaccttcttccaattgccatgctgtccatccctttaggtaagctgaccagcaaacacggcctaaacaagtccctgctggctggaatcatcttgacaataatcggggtgatcatagcctgctttagcatcaacagtgaactgttgctgctctcacgagtaatccaaggcatcggaaccgctctgatcaacgtcgcttcaatggccttaatcgttagcgcagttaacccagaaacccggggtcaggccctggggctgaacattgctggggtctacattggtctcagtagcgccccggtgatcggaggcctggtcatctaccaccttggctggcagagcatattctatatcatgctcatccccttgatattctccgcctacctgagttggtcactcaaagacgagtggacaatgtacgacggcccaatcgacataacgggatctatcattttcagtatcgggattctgctcgtaatctacgggttcaccatagtgaacacgtggcttggcattgttctcttgataattgggctgctcctgctgattgcctttgcttatttcgaattgcgcgtcaataatcctgtcttcgacgtgagactctttaagaatagtaggttctcctcttccaatattgcatccctcattagttatactgccacttttgtgatcacctacatcctgacctatcactttcagtatattatgggctttgactcgaaattttcaggcatgctgctgattgtaacacccgtcatgatggcaattctagcgcccctcagcggccggctaagcgatcggatcgatccgcagaagctggctgcaatcggcatggggttcgtgaccgtggcattgaccatcctatgcttcctgaacgagtccacccccttatacatgattctgctcgccatgtttctccaggggataggatacggcctgttctcttcacctaatacaaacgcgatcatgagctcggttcccaaggaagagacttcttccgctagtgcatccctggccgccgttagggtgattggacagacactcagccttggaatgctgacggtgatcttcgcctacatcatgggcaatgtggcgattgtgcctgagtattatccattgcttatggaaagctcgcgtctgtcttgcattatctctgcagtgttgtgtgtgattgctgtggtggccagcttagttggactgcgctccgatgatgagtacgagacttga

SEQ ID NO: 3407 - DNA, 1785 bp, synthetic construct
  source 1..1785: mol_type = other DNA
atgaatagtaaacaaaaaaccttaattatcttaagtctaagcctgatattgctggcctccatagccgccgtgtcggccgtggattacaccctgactaacgcagatatggactatgtggttaagtccaacggcctgttgcatgtccatgaggccatcacgtatgactttgacagcagccccaatggggtctaccgcgacatacccctgaaaagcggccagtccatagagaatctggaggtttacgtggacggggcctatgcagagtaccagatcattccaaaaggaagcggggagcggatcaaggtgtatctctatacagactccagcaaaagccataagctgtctagtgactcggtcatcaccgtccactacgtctacgacatgcccaaggtggtaaaaatctacaacgatattggagagctccagtataaggtatggggggatgagtgggacgaagaccttgaaaaccttcagtccacgatcactttcccagatgatgaggagcttcagttctggatcaacccatacttcagcaatgctaaggccaggtgggcggaggaccacctgaagatccactcagactttgttggcgacggcaaatatgtggaggcacgagccttgattccgctgagcgagtttgattccaatgcagaatatgcgcagcacatcaacaagaacggaaaggatgagatcatcaagatccaggacgatgacaagaaatctcaagagggcttcaaatccctgttctcaatactgaataaggttttggtggtgctctgctttattcccgggctcatctacctgaagttcggacgggagcccaaaacaacttatgatgccatctacgagcacgagcctcctacagatgaccctccagcctatgtgaatggtatgattggctcagggctgaaggatgtgggcagtctaaaccaggaagctttccaggctaccatcatggaccttatcaaccgaggcaagatgggtgtgtcctcagaggaagacactgaatttacaaagaccaccttcctgaccatcaaggacacgtcaggcctcaagcggtttgaagctgatgtcattaacatcttgaagagatatgagctcaacggaaacattagcctaagttacatgcaggactgtctgaggggagaatcggaagccagatacttccaaggccgctttgaaagttggaaagaaaactttgaaaatgaatacttcagtgaggacagcttcagccgcctctttgacaagaaaggaaacgactatctgaattacttcgctttccttctcataattctcggaattatcgctttcgtggcatcaatctttttcgactttgcagtcaccggctcgacgatattcgtgggggtcctgttagtgattgtaggggtcgtgtgcctgatgctgcctagcggaattgcgggaaaatacactgacgaaggaaagctctacgaggaaaaatggatgaagtttaaaaaatacctgcaggattactcattgatcaaggagcacccgcccgagtccattgtgatttggaacaagtaccttgtgtatgctaccgcgctgggtgtggcagatgaggtttacaaggccatgaagatggaagtctatagcgggagcgatgattactacagaacaaatgatctctacatgttctattacctggggggtcataggtttatcaatgatagtttcaacacagcctcctccaccatttctgctgccgacaacagctctgtaggcggcatcggcggcggctccggtggtggggggggcggtgccttctga

SEQ ID NO: 3408 - DNA, 750 bp, synthetic construct
  source 1..750: mol_type = other DNA
atgaactcaaaacaaaaagccctcatggtgctggccttgagcatcatcctgctcagtagtattgcagccgcctcggcagaggattatagcctaacgaatgccaaaatagatatggtaatccaggatgacggattagtctttgtggatgaggcaatcacctaccacttctacaagaccatgaatggcgtctatcggtacattcctatcaataacttcaacatggaagactttgcggtagacgtggatggcgcctattatgaactggagggtaacgacgacgactcacagatagaggctaaggtgtatctctacaaggataaggacaaaaccgaaaagatcgaccccgggacagatgtgacagtccattacaagtactacatgagcgacctccttgacgtgaaaggggacaacgccgtgctgaactattacctattgggagaggactgggaggttgacctggaggagattgaagccaacgtccacttccccgaaaagaaagagctcgattacgagcttgtgccaagcggctccgctgaaggcaagtggtctggagacacgctgaccattactggggagaatattaacgctggggatggtctggcactgatcgttgaaatcccgctggacgagttcgcttccggcttttccaacgcggtgcacaacgacactgatgatgacgacgacatagataatgatatcgacaatgacaaagatgatcttaaggacctgacaaaggcgaagcagatttga

SEQ ID NO: 3409 - DNA, 561 bp, synthetic construct
  source 1..561: mol_type = other DNA
atgtccacatttattcttgtcattataatcctcggtatcattttaattatcgccggcataatcgtggccctctataatggcctggtgactgccagaaacaaggtaaagaatgcttgggcccagatcgatgtccaactgaaccggcgcgccgatctgatccctaacctggtcgagaccgtgaaaggctacgccggacacgagaaaagcgtgttcgaagacgtgactgcggcaagggcagggctgatgaatgccaacggagttaaggagatcggggaggcgaacaaccagctaacaaacacccttaagaccctgtttgctgttgctgaaaactacccggagctcaaagccaatgagaacttcaaggagttgcaggcccaactggctgaaagcgaggacaagatcgcatactcacggcagttctataatgacacggtgttgatgtacaataacaaatgccagaccttcccaagcaatctgattgcaggcctcttcggattcaaggaagcggacttctttgaggccgcaggggaagctcgaagtgtgcccaaagtcgaattttga

SEQ ID NO: 3410 - DNA, 1791 bp, synthetic construct
  source 1..1791: mol_type = other DNA
atgaacaataagcagaaaacactggcaatcctcattctactcgctatcgtgctgacaagcatttcagcagctagtgctgtggattacaaaatcaccaatgccgatgtccacctggatgtggaagacaacgggatcttgcacgtctccgaaaacatcacctaccttttcaaaagcgacggacatggtgtctatcgcgtcatccccctaaaggcggatgagaagatgagctacctgaccgtggatgttgacggctcgtactttgaatataacatcattaaccgtagcggggaaaaggaagtaagggtgtacttgtataaggacaaggatttaactgattacggggtgtccgaaggctctacggtcactctaaagctggactattatatggaaaatgtggtgaaactgttcagggatacaggcctcttggagtacaagctctggggtgaggaatgggaccagggcgttgagcacctaaacgcgaaggtcaccttcccaaatgatgaggagattgagtactggattaatgacgattccggaaaaactgaatcgagcttctcaggggacacactttacgtaaaaggctccgacatccctaagggggactatgtggaggcccgcgtgctcattccattgggtgaatttgacttcgatgccgactatgctctgcattacaatcatgatgcctctgatgaggtcaaaaagcagcaggaggactttcaaaaaaagcagcaatactttaacaccatcggcaatctgttaaacgtgatttacggcattctgatcctcacgccactgggcatctacctcaaatacggccgagagcccaaggtgtcaagtgatgccatatacgagcatgagcctccaacggacgactctcccgcctttgtgaatgccatgatgagtggactgagtaaggacgttggaaaggtcgataagaaaggtttccaagccacgataatggatctcattaacagagacaagcttggaatggaaatagcatataccaacaagaaacggcctgtgtccctcctgactgtgaagtcaaccgatggcctgaaggactttgaaatggagctgatagacatccttcggcggtacgagcagaacggaaaaatcaatttcctttatatgcagcagcagctctccaatcggaacgaggcttatcacttcaacagggcattcaaccgctgggtcagtaacttcaaggtggactacctgccggacgacgttctgagcagatacttcaatacaaaaggcagcgacttgataggcaaattcaaatggatcgcattagttgccgggtttacaggaatcattgggcttctgttgaccggcagctggatacccctggtgctgggactgatcctgatttttgtaggggtgatctgcttctacctcccttcaagcattggtggccagtacactaaagagggcagggagtatcagcagaagtggaaaagatttgagaagtatcttaaggacttttccctgatcaaggagcaccccccggaatctgttgcaatatggaatgagtacctggtttatgctaccgccctgggggtagcggacaaggtctataaatccatgaagatggaagtctacgatggcttggccgacggcagcaatttcagttcaaacgatctctttgtgttctatcacattggtggtatccgaagtctggacaactccttcgtgaccgtgaacaacattatctcggctgacagctctagctccggtgggatcggaggaatcgggggcgggtctgggggagggggcggaggagccttttga

SEQ ID NO: 3411 - DNA, 1755 bp, synthetic construct
  source 1..1755: mol_type = other DNA
atgaatcttaaacaaaaagcaattatcatgctcatactcagtatcctgctaatgtctgccatttccgccagcgactataaagggagctacatggactatgtgcatatgaacgtgaacgagaacggtttggttcacgtcaacgaaagctttacgtatcagatggtgtcgcccgagtccgagatcagccttcccctctatcacggcaccaacgcgagcattgagaatatccacattcgagtcaacgacctcttggttgcctacgacctcaagaaaggggacactctggatgagctggtcatacaccctaagtccagtgattacgattacgactcggagagcacaggcacatatctgcttgatgtggaagtcgaatatgacattgaaaatgccgtaaaggtgtacaatgacgtgggggcattcacttaccagatcaataaaacggattttaatggggtttctctgggcatggcccatatccggatcaagttcccaggcactcaggagcacgaatacttcataattcctaaagagggcgaaagcagtgcccaatgggatgaggaccattttcatatgaccaatagccagcccgcgaaagccactgtgattattccactggatgagttggacgctgatgcaaaatacgctcagcacattgattctgacgggttggaggcgattaaaaacgactcattcgatctgaagtactccctcattcagatcgtcaacatcctgatcaaaatctttgtaatcatcgctttcatcctaccggttgctatatacctgaaatacggaagggagccaaaagtgaccctggacagcatctatgagcacgagcctccaacggatgatcccccattctttgtgaacgccatcatgggcgggacctttcgagacgtcgggctagtggacaccaaggccttccaggcaacaatcatggacctgatcaatcggggcaagctctccgtggaaactgaaatcaacgagaagaacaagcagaggacatatctggtggcaaagtcaacagatggcctggccgattacgagtcagacctaatctccatcctcagaaggtacgaagaggatggcagaatcgacctgaaacacatggaactcagtttatacagtaagtcagaggcacgctatttcagaggccggttcaacagctggggacacttactgtattccaattaccttacggatgacatcaaggccgaatactttgaggacaagggtagcaaactgtttaagtttttcgcctatggcggattgattctgagcgttattcttttcctgtattgcctgatgttcaatcaaatggaacccctcccctgggtaattgctctgtttatcctctcatcggtcctcatatgcatcccttcagcctttgccggtcattacaccaagaaggggaagatattcaaggaacgctggaacaacttcaagaaataccttaaggactttagtatgatggaggaataccctccggagtccgtggcagtgtggaacaagtatttagtctatgctacagctctgggggtggcggataaggtctccaacaccatgaagataaacttctacgacggactgaatgacgagacctaccgcgacaatgatgtatttgtgttctgtgatggcaacggactggacctgattggggactccttcagtgccgtgtccaccaccttggactctgatagcggaggctctgacggagtgggcggaggctctggaggtgggggtggaggtgctttctga

SEQ ID NO: 3412 - DNA, 489 bp, synthetic construct
  source 1..489: mol_type = other DNA
atgaaactcaaatattttgccgtgtgcctgttcgtcttgatcctggcggccggcatcagcgccgcctatgcaacagatgtggacttcgaaggcgggcacagcttcacaatgccagacggctacgagattgttgagggacaaaacacgaccgaggacatcatcatggagaagaacggggacaatcggattgtgttccagtactggatagatgagtacgaggacctgaagaacattgaggaaaactataattttggggacatcattaaggctgtgatggaggatgcagttataggaaacgaagaaaactacacctttgaggactatgatgtgactcagatcgactataaagtacagggcatccagtgttactcctacatccttgataatggtaaggaaggttacgtcattcaccatatcgctaaggaagacctaaaggacctcaatgaccccgataacgtcattggagatctggtgaagagtataaaatga

SEQ ID NO: 3413 - DNA, 507 bp, synthetic construct
  source 1..507: mol_type = other DNA
atggataataaaaaaatatttgttatcgtcgccttggccctactggccatcgtggcagtggggtctgtgtccgctctggatcttggtttcctcggcggcaatgacgatcaagacaccgctgcggaagatagcgatgccaagacaactaccattaagggcatcgagtttaacatcccagacggatatgtgaaagcggaaaattacaccctggatggggagacacggtcaagcggaagtatagactataaggtctaccaggaagggtacgaaaaaggcgccaccgatgcaatccttttcctgattggagattatccgacggacttaacggacgacatgctggagcagatgaacctcggagagcccaagaccatcaacgggcacgacggttacatcaccacttccaacgaaggcggcgacacattcactgtgtttttctacgctgaggatggggacctggtcacggtgacagtaacagacgacaccctgctcgaggagattattaagtga

SEQ ID NO: 3414 - DNA, 465 bp, synthetic construct
  source 1..465: mol_type = other DNA
atgaacaataagaagatatttgccatcgcagccctggccatcatagcgatcgtggcagtcggaagcgtcagtgcttttgacttgaacttcttcggcggagacgacaagcaaaccactactctcggaggcatcgaatttaacatccccgagggctacgagatcgtggacaactacacgattgtaaatgagacactacacgacggggatgatgagtacattgtgaacagccagtactatgaaaacgacgatggggactccctggagctctatacatcagactatcaggatgatatggaagactacattctgaagatcctgaccaagggggacgagaaaaccattaacggccggaaagggtacattaattctgaagacggcttcacaatgttctcgttcgtggatgatggtaatctgggttttgttaccgtgtccgatgaaagcatccttgaggaggtcgtgaaatga

SEQ ID NO: 3415 - DNA, 468 bp, synthetic construct
  source 1..468: mol_type = other DNA
atgaatgccaaaaagctgactattctggccgccttggctattctcgctatcgtggcagtgggctcagtcagtgcgtttgacttaaatttcctgggcggagacgacagcagcaccacaactgtgggcggtattgaatttaacatccccgagggatatgagataaatgatacatacactattgagaatcaaacgcggaccagcagcggaggcaacgaatacatcgtgaaccaggaaggctacgggaactccgacggtgaggagctcctattcctggttggacactatgacacggatatcaccaacgagatgctttccgcaatgaaagttggggatgaaaagaccatcaacggccaggaggggttcataacatccgacgacgtctacaccgtattcagctttgccaaggatggggagctcgtgacagtcaccgtgtcagatgagagtgccctggaatcgatcatcaagtga

SEQ ID NO: 3416 - DNA, 1257 bp, synthetic construct
  source 1..1257: mol_type = other DNA
atgaatatcaccgaaaaccagagcgataatgatgagaaaatactcacaaagagcttttgtctcatttttggagcgctgctctttacagccttggttatgtacgccctgatgtccaccgttacagagtatgccagcagtatgggttccaccgcaaccattgccgggctggtgagcgggatctatgtattcggggggctttgctcacgaatatatagcgcaaacgccctggaaaagaaggactggaagaccctcgccttgatcttccttagcattcactttctggcatgcatattgtacttctttgtcgacaatgtcgaactgctgattctggtcagattcatccatggccttggctttggagcgtccgcaaacgccatcgtgactattgccagttcgattcttcctaaaaaacgctttggagaggctttcggatactttatgctggggaccactatcgccgtaggcctgggtccatacatcagcggattcttctacgatatctggggcagcttcggcagctttctcctagcgacggtgttcagcttcatcgccctggtctgcgtgtttttcctggatatcgaaaggtatcacccggatgagaagataaacaacgaggacattctgtctgacgctgagtcagtgggcacagagtcgatcgatgccaacccaatcaaaaaacaaaaggagaaacggagcttcattgagaagatatttgaaatcgacgctatccccgtctccctatttaccgcattgactgcgcttggatacgtgtccatactctcattctacaggctgtacgcagtggaactggacctggtgggccccttctccattttctttttaatctattcagtcatcctagtggcctcacgtcccattgccggtaagattcaggacaagaatggggataagatcatctgtgtgataggcatcgtggcacagagcatcggcctcttcctcatcgcttacgctccatccgacataaccatttatatctgtgccgtatgtgcggctctggggtttggaaccctgaacagtgcctgcacaaccatcgttactcggaattgcagtatcgaccgccggccgtacgctatttccacgttcttcatcttctgtgacagcacgattggcttcggtcctgctctcctgggctgctttgtgagtgccacaagtgggtatgctcctatttactacatctcggccttcattactttgatggcactccccatctgcctgtattccttaagaaacaaatga

SEQ ID NO: 3417 - DNA, 1470 bp, synthetic construct
  source 1..1470: mol_type = other DNA
atgggcgagaaagcccaatgggatagttccctgagcttcatctttgctatgattggagccgctgtggggctggggaacatctggcgtttcagctacgtactctactctaacggcgggggatctttcttcattccttactttgtggccatcgccatcatgggaatcccttttctgatccttgagtatggtgtgggcttcagctttaaggactcgttcacgaatatcctgaagaaaatagatggcaggctcgaaatagtggcctggattctgattctcttcgtgtttattgttgtgatttactacatggtcatcctgagttgggatatggtctatctgctgaccagcttcacctttggctggggggtggacactgcagcttactttacaaatacagttggtggcagtgcagatttggcgaaggggggcatctttctgattcccaccaccatatgcgtcgtcctgatgtggattgtgctgtggttcatctcccacagggacgtggacaagggaataggcaaggtgtcaaaagtcttgatcccatccctttttgtcatcatgggcatcatcgtgttctactcaatcaccttgccagggcatatgattggaattgatgcattgcttagacccaactggcgaatgcttcttgatgtcaatatctggctggcagcgttcgcccagatcatcttctccctgagcatggggcaggcgatcgccctgacatatgcgagctatctgccagagtcctcacgcctcactgacaacgtgctgattgttgtcgcctcaaacagcctgtttgagattttcacagcattcggggtcttttccattctgggctacatgtcgctgaatagtggaatggccctaaacaaactcgttaccgaaggaaccgggcttgtatttattgttttccccatgatcttcaatgtcatgggtacggtaggaagagtcttggcacctctcctgtttctggctattctatttgctgggatcacctccgctctgggcttcttcgagcccatgctcagctcggccagttccaagttcaacctcagccggaagcggaccgccactatcctgtcaattataggttgtgcattcagcatactcttaacaacgggcatcagcagttacctggtgggagttatcgactcctttgtgaaccagttcggaatcctcctgcttatcggtgtgcagtgcattatctttgcttgggtgtatggcatcgaccacttcattcccgtgctgaatgaaaacggcatcttaaaggtagggaaaatttggaagtttataatcaaatacctcctcccggttgtgctattcgtgatctgggcctatggcatattcactctcttcaccactgccaagacattcgagataatggtggacatcattataatcgtggccgtgttaattctaagctttatcttgtctcacttgaacccgcgcggtagcaacgaagacaatgcttga

SEQ ID NO: 3418 - DNA, 213 bp, synthetic construct
  source 1..213: mol_type = other DNA
atgacttataactgctgcctgaaaaccagcagggaatacacggaagagggactactgaatctcattgcagagacattcgatacagacgtcagtgggctgaaggtggaaaacatcgactcctacgaggacgatcggggtgagaacttcataatcacctgtagcaaggaagagggcaatatgaagaccatcaaagtgtttcacgcctacggctga

SEQ ID NO: 3419 - DNA, 210 bp, synthetic construct
  source 1..210: mol_type = other DNA
atgaaggacatggaatatcccaacgaggaagccaaagaaaagttcgaggagataatgctgcggcgcctcaggctactgtacggcatagacgtgtcagagatggaaatcatcaatatcagcctgggggagagcagtgtggagccaaccattcgaatcgtactcattgactccacagaggaagattgcattagagtctttgagatcgcatga

SEQ ID NO: 3420 - DNA, 1473 bp, synthetic construct
  source 1..1473: mol_type = other DNA
atgaaacaacattctgttgggagagtggagacgaagacatttgccatcaatgacaaactgaaattgagttcagggaagaccctagaaaatgtggaactggcttatgagacctacggggagctgaacacggcaaagaccaacgccatccttgtatgtcacgcactcactggggacgcccatgctgcaggctggcacaagaacgcgacaaagcccggctggtgggagatagtgataggccctggaaaggcattggatactgacaagtatttcgtcatctgctccaatgtgttaggtggatgtaagggttctaccgggccagcatcaatcaacccaaaaaccaacgaggaatatgcgctcgactttccaatcattaccatagaggatatggtgcatgctcagaagaaactgatcgagcatttgggaatcgaaaagctccacgctgtcgtgggaggtagcatggggggaatgcaagccttgcaatggaccgtctcctatcccaatatgatgaaaaaggccagcatcatcgccacaaccgcccgctcgtcccctcagcagattgccttcaacgaggttggcaggcagtccatcatcagcgatccgttctggaacaacggccagtactatggcaaaaacagaacaccccgttctggtctggctgttgcccggatgatcggccacatcacatacctgagtgatgaatcgatgtacatcaagtttggcagggaattgcaggataaagatcagctcagctatgacttcaccctggatttccaggtggaaagctacctgcaccaccaaggggaaagttttgtaaaacggtttgacgctaacagctacttatacataacaaaagcggtggattactttgatctgtcggtggatggcagtctgcccgacggactcaaaaatgtcaaggccaagttccagattatagctgtcgactcagactggctctacccggtagaccagtccaaggacctcctgacagcccttcagaccctgggggttgaagtgagctataacgaggtgaaaagcgattacggccatgacgcattcctactggagaacggtcagatgaacttccttctgaacaatttcctctctgagaatgtggttgacgaccttatgaaaactgatgtgccaaccattgacatcaattccacaatcaaggatgccgcgaacatcatgttcgacaatcaggtcactcacctccctgtggtggatgagaacgataagctgctgggcatagtcacggcctgggacctgtccaagtccattgccaaggactgcaagctgctggaggatgtgatgacgaaggatgtccgctattgtaaaagcactgacagcattgagtacatttcacgacagatgaagaagtttgacatttcctgcctgcccgtggtcaatgacgacctatgccttgagggaattattaccactgaccagattagtcacctcatctcaagttactga

SEQ ID NO: 3421 - DNA, 768 bp, synthetic construct
  source 1..768: mol_type = other DNA
atgaaagaaaataaggaaatgaactggaagatcaagttcgccattatcatgtttgtgctggccgtgctcattttcctggcacgataccttatctgcggcgacggggaggagatcatcgcgtacctgtggaagcacatcggattcataccaatagatatcctcattgtggcactcgtgctggaagagatcatgggcaggaaagagcatgaagccattttagagaagatcgacatgctcatggggacattcttctcggagattggaaatgatctgattgccgagcttagcaaggccaacgtcaacaaggctaacacggatgacttgaaggctattaaaagttggaacgacaaggactatgataataagctaaaagagctgaaaaacaaccccgtcgactttaaggccaatatcgctccagaggaaagggaagatttcctgaaccgcatccagagcctgttggttgagaacagagaatttctggtaaatctaatcaataaccctaacctcctggagaaagatgagtttagctcacttctgctggccctcttgcacttggatgaggagctggcaagacggggcgaattaactgacataaaggacgctgatttcaatcacctcaacggtgacatgaaacgcgtttattccaaactggtgtacgaatgggtctattacctcaaatacctgaataagcactacccctatatgatcagccttgcgatacggaccaacccgtttgactccgaagcagacgtgcatgtgaccgagtga

SEQ ID NO: 3422 - DNA, 201 bp, synthetic construct
  source 1..201: mol_type = other DNA
atgacacacctcaccatcacggaataccgggaaatggtcaaggatatcatcgagttcaaaaacgagaatgggaagatgccagacttcgcaagcgtgaacaatcaggagatcagccatgagaactactccgccatgataaacgacgtaaataactatattctgcagcacggcaggagtcccgaatttgtgcaaattaaatga

SEQ ID NO: 3423 - DNA, 1494 bp, synthetic construct
  source 1..1494: mol_type = other DNA
ctaagttttagcgacaaaatctataacgctaaaccaggctatacgtatgatgattttctgttggtgcccaatgcttcttggattgaggcgaaggatgtggacactaaaataaaccttacaaaggatatcaaactgaacattcctataatgagcgccgcaatggataccgtaactgaagctgatctggcgatcgctctggcgcaagaggggggcatcggtgtgattcaccggaacatcaatcaggaggctcaggtcgctgaagtccggaaggtaaaaagcgccgaagacatcactgtgcgagatgttgtgaccatcagccctgactcctcgatcgaaacagtccaggacattatggagaacgaatcagtcagcgggctgcctgttatggaaggggacaggattgtcggaatcatctccaagagggatgtcaggccattcctcaaaaacgattcgaaaagattggtgaaggaaatcatgacatccgatgtggtcacaatcaaggaaaacatcagccaggaggaggcgttagatatcgcctacgaaaataaggtggaacgcctgcctgtcgtgaatgaggatggcgctctggtggggattctaaccatcaaagacatactgaaccaggatcagcatccgaacgctgcagtggacaagaacggaaaataccttgtggcagccgcctgcggcccatttgacctggaccgagcgatggccttggacgaggcaggagcagacatcatttcaatcgactgtgcccacgcccacaacatgaatgtggtcaagtttgctgagaccataaaggacaatatcgatgccgacctctgtatggggaacattgccacaaaagaggccgctgaggacctcattgcccacggggcagacggccttaaggtaggtatcggtcccggttcaatctgcaccacccgtattgttgccggcatcggcgtgccgcagctcacggcaatagcagacgtggccgatgtggccggcgaagccggcataccagtcattgccgacggcggtctccgctacagtggggacattgccaaggctatcggagcaggggccgatgtggtgatgctcgggaacctgctggcaggtacgcttgaggctcccggcgatgtggtaaccatgaatggccggaagttcaagcagtaccggggaatggggtccatgggcgcgatgactggaggatctggaggcggcgccgacagatacttccaagagctggagaaaggaagtcacatgaagcattccaagctcgtccctgagggggttgagggggtggttccatacaagggaactgtagccgaggttgtcttccagctggtgggaggcttaaagtcttccatgggctactgcggagccaaggacatacaaaccatgaaagaagtggctagattcgtgcgcattaccacaagcggtattaaggagtctcacccccatgacttcctgatcacgaatgagagtcccaattatcccaccttggactga

SEQ ID NO: 3424 - DNA, 720 bp, synthetic construct
  source 1..720: mol_type = other DNA
ttgctgctgctgattagtccgataaaccatgaagaggctgtggaaagcattgagggtggcgccgacatcgtggacgtgaaaaatcctaaagaaggttccctgggagcgaatttcccctgggtaatcaaggatatccgggagctcaccccaaaggacatgctggtcagcgccacgctgggcgacgtgccctacaagccaggaaccgtttcccttgcggcaatgggggctctcgtctctggggccgattatataaaagtcggtctctacgggccaagcaactacgaagaaggcgtagaagtcatgaaaggggtcgtgaaggcggtcaaggacaccaaccctgatgctacagtggtcgcctccggctatgcagacgcccaccgggtgggagctgtgagtccttgggacatccccaaggtggcaaaggactcaggcgcagacattgccatgctggatacagccgtcaaggacggccacactctctttgattatctagacatcgacgattgtcgcaaattcaccgaggaggctcatagctacggattgaaagtggccctcgcaggatcggttaaaaaggaccagttaaagcccctgtacgatgtgggctgcgatgtggttggggttagaggggccgcctgcgtgggcggagacaggaacacaggccacatcgatcgaactgctgtggccgagctgaaggagcttgtacagtcattcgaggagtga

SEQ ID NO: 3425 - DNA, 7251 bp, synthetic construct
  source 1..7251: mol_type = other DNA
gtgaaactcaaactgatatacctgatttgtatgatctgctgcgttttacttacctttagtactgtgagtgccattgacatggatggaaacctaacggcttccgtgaatcacctggatggctcccatagtgatcagtctgcatttatttcccagtctgaatcgtcgaaaaccaatctgaacgctaataataatctgagagtttctagtggagattatgattgtgtagagaccatgaacgagctgtctaatttagactctaaggattctaaagacaacaacctgtccaaggacaaaacatccctgaaatctgacctaaacagcatcgattcagatgagtactcccttaaatccagtctgagttccattaattcgagtaagaaaagttcttacgaagatggcgataatgaatatgagaacttggaggattctcttgactcaaagaacaaaaactctttaagttccaatgcgctcggagccggcacaagtacctttggcgacctgcaaaccatgatcaacaatgcccaggagggttcaaccatcaaccttgatggaaagaccttcatcggaaacggcagttttattaccatcaagaaggccatcaccatcaacgggggctcggctacaaacctggcacgattcgacgcacgaaacctctcctatatctttaagattagcgcctccaacgtccacattaagaactgttatttctcctacagtaccaactgttccgtctatttctttggaaacggcagctcaatcgacaactgccatttcgactacaattacaagcacctgtgggttgcggtcaacatcaagtacttctcactgaccaactgcaatttcactaatggaaagacagatatgggaagtaccgcctacgtggtggccgacaatgccactgtgaaaaactgcaatttcatcaacaacgaagcaagcggaaccgagcagtgctacggggcggccctccagatcggggcctcatcctcaggcatcaacgaaggatatgtggtgaactgcaccttcattaacaatagggtgatcaccacccacagctactcccatgccggagcgctctgcttccggccgggaatcaaggtctataattccactttcatcaacaactactgcaataggatgggaggtgccacaaccctccacagcgacggggagatcatgaactgcaccttcatcaacaacagcgccggggaatatggcggagcaatctccacagggctgatggctgataatatcagcgtaaacattaccgggtgcactttcattaataactacgccccgatgggcggcgcgatcctgataaaaggaaataacgtgaaggtaaccaattctacctttaaagaaaacaaggcaagagaaaatgacggtggcgccgtgtacattctcggtaacgacgcgttgattctcaatagtaccttccagagcaactatgcaaagaacgtgggcgccgggattctaatcaacggttcatatgtgacggtcctgaacagtagcttcgctcgcaacaatgcaagctacggggctggcatctacgttataggttccaatgctaaccttttcagctcaaacttcacgaaccacaatgtcaagaacggctctgtctatataaaggggatcggcgcctatgtttataactgtaattttgcaagcaacactggagagaacggagcggccctgtacatcgaaggctcaaacacaacactgattttaagcaatttcaccaacaacaatgtgacaaaggacggcggggccatctatgtggtgggctcaaacgccaagctcatggcttcaaatttcctatacaacaatgcgatcccaagcgaatcagacatcaaaagcggcctgggaggcgctgtgtacattaagggaaacagcaataccatcgattcctccagcttcaagtacaacacagcccggaacggctcggccatttataccgacggaaagaacatgaacctgtccaatgacaactttgaccgcaaccaggcatggagttacgtgttggattcggtgattaaacccagcagcagttacttcaacagaagcgacattctgattaaccttactctcattgggggcaataatattgcgaatgctatttataacacggccagtgtgaatgatatctacttttataatgtaagctacatatccagcaaggggaaaaaagtcacgacttcaaatgagatccacccggtgaatggtgcctcaaacagccagaacggggcactgctataccaggacgaccgggaggacaatcaattggtaaacgttatcgtgtacaaggaccctaatagcaaatccacgtccctttctgccatcaacaaaaacgacatcatcctaaacaagacattcacaacaggaattttaggcaacgtgtccctgaacctcagctcatctgtgggcaaggccatagctccaggaaactaccttctatatgcaaagcacactgaagatgactattacaaggaaatcgatgaggacaatcagtttgagatcctccctctggtggatgtggctgtggacatcgtctccagcaaggatatcgtggagtataaccgcacaaacaagttcacagtcaaggtgataaacaatggtccaaacaatgccacagacgttcaggtgagtgctgtgctgcctaaaggcctgatcctcgtgtcttcaagtccctctgtgggcacctacaacagcagcactggcatctggaccatcggcaacctgaacagcggagttaaccagaccttagccataaacacccgtgctaacacgacaggggcagtgaattacccggttagcgtatcctcctacgagaaggacaccaacgaagcgaacaataaggataaccagtcaatcaagatacccgaatgtgacttgctcattgacattgcctccagcaatcacagccctaaatatagcgatattgtcaactggacggtcaccgttaaaaacaacggtccggacgacgcaagcaaagttgtagtttccttaggcaacctctcgggaaacgagctgatataccaaaagtccaccaatgccaatttcaatataagcactcagacattggagctttccaagttggctagtggctcaaacgtaagctttgtgataacgaccaaggtgaacgcctccaacaagaagatcactgtgaactcctcagttagcagtgacacctttgagtataacctaaacaacaaccaggacaacgattatgtcaatgtggccccactctgtgacgtgggcatcaccgtaaaggtctctaacaggactgcaaacagaaatgacctcgtcaaatggacaataactgtgaaaaactacggtcccgataaggcaagcaacgtgaatgttgcactcagtgacctcgccagcctggggctcggcctggttaacaagtcagacgccaattacgcgtcaaacgaatggaatgtaggggaccttaacaaggacgcctctaaggagctggtgatcagcactaaggtgaacactgagaacaagaacattgtccttaagggaacggtgaatacaagcacgtatgagaccaacaaggctaataatctcgcaaacgacacactgtccgtcaatccctattgtgacgtcctgattgaggtgaccgcatcagataacagtgctaacaagaatgatgtcattacgtggactgtcaatgttaaaaacaacggcccaaaccaggctaaggatgtgaaggtctcactgaccaatatggaaaaattaggcctgatagtccaaaaccgaagcttcacctttaaggatatcgccgtactggagaatagtaccttcaacttcaacaagtcaagcaatatctggtccatcggcagcatggcctccggcgacatctccagcatgactgtgaagaccaaggtcaactgctcagacaaggtcttgtcagttgagggaaatgtgtcaacaagcacttacgagctgaacaaggccaataaccatgatgacgacctcctgactgtcgaggagctgtgtgatctggctgtggaggtgaacgcttcaaagaagacggccaacaagggcgacattgtaaactggaccataaaaataaaaaacaatggtccggacaccgcttcggacgtcttcctgaccgtttctgacctggaatcgcttggaatggtctttgtaaacagtagcagcaaagacttcgacagcgaatcattcgcctgggagatcggggagctcgccagcggaaagggcctgactctcatcctggccacgcaggtggacacctctgatgagaccatcatggtggaggcggacgtggacacaagcacatacgaactcaacaaggcaaacaatgcggacaatgatagtcttaatgtcaatccatgctgtgacattgtcattgacatctcagtcagcgactcccctgtaaacaaggaagatattgtcaactggaccatcgtggtaactaatgacggtcctgacgatgctaaggctgtggtggtcaatctaacggacttggagccgctggccctaatcatcatgaatgtttccgagagttcttacgataatggccaatggacaataggcgatttgcccgatggagaaagtcagagcctgatcattacaacaaaggcaaactgttccaatgacactatcaaacttgatggaattgtcgataccagcacctttgagctagacaagagcaataaccataatgatgatattctggagattgatcccctgtgtgacctctccattgaaatcagtgtgtctgacagccctgtaaacaatggggacattgtgaactggactatcgttgtggccaacgacggccccgatggtgccagcgacgtgatcgtcagtctgagcgacctcgagtcactgaacttggaaattctgaacgtgtccgaggataatttcaatcccgagacgtacgagtggatcataggggatctggataataacgaaaatgcgagcctgatcatttccgccaaagtgaatacttcagacgacatactggatgtggagagcaccgttgacagcaagacctttgaattgaataaggataataactatgacaatgagagcctcattgtgaatcccctgtgcgatctgatcatagatatctctgtgtccgattctccagttaataccgaggatcttgtcgattggaccatcaccgtgactaatgacggtccagatatggctgaaaacgtgaaagtctacctgaatgaccttgacgccttaaacctgatcctggttaatgcttccgaggacagctttgatggggacgcctatcagtggatcattggcaatctggacaacggcgatgctgtggaactcctcattacaacacgcgtgaacgcttccaataagacaatcgaagtggaatccgcggttttgagcgacacctttgagttgaataaggagaataactacgacaacgataccgtcacagtgaatcctttatgcgatctgattgtcgttgttgatgtgagcaactcaaccataaacaaggatgaggtggtcaactggacaatcactgtcacgaatgacggccccgacacggcagagaacgtaatcctggacctgagcgacctcgaggatctgggcttgatagtcctgaacgtgtcggatgattcctataatcccgaatccggtaaatggatcataggggatttggctccaggcgagaccgtggacctgatagtcacaacgcaagcaaatgtgtccaacgcatctctccccgtagaggccatcgtgcaaggcgatacttacgagctgaataaggacaacaaccatgacgacaagctcctcgacgtcaatcctctgtgcgacctcgtgattgagatcactgtgtccaacagctctgtaaacaagggaggcactgtggagtggaccattgtggtgtataatgacgggccagacgatgcatccgacgtgatcgtcactctcgacgacctgaagacccttggactcatcctgtccaatgtgacttatggcacaacaagcatggacatcagctatgacggttcgcggttgtttgttaaggacatctcctcagaggactcggaaaattctgactccattgatgagagtgacagttcatcccctaatatgctgaaagcaagctctaaactagatggtgttgggtctgatcttgataacggggaacttaaatcactcaaatctggctcttacctgagtgatgattcctccaatgactcagacaaagcctcaaacactttcgacgaagagacgaacttatggtacatcggggatctggccaaaggaaacagtatctctttgaaactgttgacagaggtgaacaggagtaatgacaacattacgctgccaagcaatgtggatacaagcacgtacgaggtcgtgaaatccaataactttgacagcgctattgttgaagtgctgcccctcgctgacaacggagacaacgaatctgtgaacagtagcgactctaatggtgacaatcccctggacggtgatggaaacagtacatctgacggttcgaaccctgacggggataactctagcgacggggatggaaacagtacctcggatggttctgatcctaatgggggcaatggggatgaacccctggacggggatggaaacaacagttccaatggctccgggaatcccgacggttcggattccaatggggataaccctctcgatggcgacgggaacagtacatcggacggttccgataattccgatggtgataacaagtctggggacaattccggcaatcctgatgggtcggacagcaatggggataatcctctggacggtgatggaaacagtacatctgacggttcggggaaccccgacgggtccggttcttcggatggggataacagcggcaattctgacgctggggaaaagtcggatgacgggtccagtgatacggatggctctggaaacaccgacggcaatggctcgttggatgaagatggcgacaacgacagcggcagcgggtctggcaattacggcagtgacctttacgacatgtacccctgggacgactacatggataataaaaccaacgacggaagtaacaaaaacaaccagggggacaacaattcccatgccggcaaaaaggtcaaaaatccaactaaaaagaaccttagcaatcacgtccaggccaaacagcagaaaggagtgccaatgaaaaacactggacacccattggccctgttggtgctgaccatttttgccctgtttacacttagctaccggaaattcaaattttga

SEQ ID NO: 3426 - DNA, 1230 bp, synthetic construct
  source 1..1230: mol_type = other DNA
atgaaagaggaagagatcgaaagcatgagaaaaatattctcccagctgaaagacaaaatcgaacctctctcccagtcccctgccatacaggctcttcagaagagggtcatggaaattagaaaggaagccattaaaaacaacagtcagctcctggaaacagttcaaaacagcttcaaggaaaacgacatcgactgcttcctcgccagcaatgatatcgaggcccagaaaatcattctggacctaatcaatgaagagatagagtctaaccccaacatagacagcaacgatgtgtacatctgcaagtccaaatccaacaccctgagggagattggattcctggagctcatggaggagaacaactacaatgtgatcgagaccgatttgggggaccgcatacttcagctgaaaaaggaagacaacgatcccgtccatcccacaggccccgcttcacacctgaccgtgtcagacattgcggacatcgtcaaccagagtatggacctgaatctaaaccccgtgccaaaggagattatggaagccgttaggtctgacgtgctgaatctcatgcacaagtcgtatatcggcatcagcggctcaaacagcatcgcggcagaggacggtgcaattctgatggtgcacaatgaggggaacatcagctttgtccaaagtaagaagctccacatcattgtggctgggattgataagctggtcccacatctggaggatagcgtatcaattgccaagctggagactgcatacgccacagggaagcctctgacctcctatatgaatatcgtgtcaggcccatcgaagacggccgacatcgaaaagaagctgctgaagaatatgtacggtgctgaacgggttgctgtgatccttcttgacaatggacgcagtaaggcaatcgatgagtgcttgtggtgtattggctgcggcaattgcattgtaagctgtccggtgtacaacataatcgggaacaaatttggctattccagttatttgggaggacgggggattgccttaagccgatacctgaaggataatgaggtaagcgtcgattccggattgtacatgtgcaccctatgtggaatgtgcactgagaactgtccggtgctcactccaacgtacgagatcattgagaacttacgttgtgatagccaaaaagaaggcctctttcgcaaccagcacaaatctatccgggacaatatcaaaaataagggttcgccttattga

SEQ ID NO: 3427 - DNA, 759 bp, synthetic construct
  source 1..759: mol_type = other DNA
atgctcctgtactttaggggatgcaccgcgcgagagaagctggattcaataagtgaggccacccagagccttctcaagctcttcaacattgagtatgaaatcttagacaacgaacagtgctgtgggtctgtcctcctgaggacaggcttcaaggaggacggaatcgagcagatgaacaaaacctacagcgacattaaagggaagaccattctcacctcctgtgccggctgctacaagacgctcaaggaagactacaagacatacctggatgctgatctagaggtaattcacatctcccagctccttaacgaattgatcaacgagaacagcatcaataagctggataaagacctgctgatcacttatcacgatccgtgccaccttgggagacatgcgggggagtatgaggctccccggtcggtcattaagactttctccaacctgacagagatgaagaatatcaaagagaagtcacgctgctgtggctcgggaggtggcgtgaagagcgcttacggcgacctgagcaattccatagccaagttacggatcgccgaggcaaatgaaacgggtgccgacctgttggtgtcagcatgtccattctgcaaattgaatctaagtcaaaacagcgatgacttggaagtgctggacctgtctgaatttgttcttaaaatgctgaaagagagtgacctggacctgtccaacctaaaaatgctggaagaagataatctcgagctgagcaaaaacaagaagatggagtga

SEQ ID NO: 3428 - DNA, 318 bp, synthetic construct
  source 1..318: mol_type = other DNA
atgatcattgccataatcttcatgtacaatagggtccgcaacaagcggtccacaccggccacctttgcactttgggtggttgtgtggatggtggtcctattctttgctttcgccccaaagataagcgatcccctggccggattcttcggtttcagcagaggcctggacctgttgatcatcgccgggtttgcggtaatcgcatacgctggctttcggttctatattaaaatcgacaatctcaaccagaatatgacggatctggtgagggagattgcgattcgaaacgaaatccagctcgacgaagagaacgacgagtga

SEQ ID NO: 3429 - DNA, 708 bp, synthetic construct
  source 1..708: mol_type = other DNA
atgtcaaacgaaattagccagaacacggaaggaatcttcttagtggtgcccgcttataatgaggagcgaaccgtctcccagatcatcgaatgcattgccgagaggggatacaatgtggtgctagtcaacgacggcagcgccgacagtaccctcgaactggcaacagagtccaaaagaaagtacccggataagatctttgttgtctcccatgtaatcaaccgcggcctgggggccgccctgaagactgggatgatggtggcacttaataaaggagccaaatacatcataaccttcgacgcagacggccagcacgaaatcagcgatattccaaatgtctgtaagcccctgcaggatggcgaggccgacgctgtaatcgggagccggcctttcgaggacatgcccctgagcaaaagctttgcgaacctcgttatgaacgcccttaccttcatattctatggacggaacgtgaaggattcccagtcagggctcagggccttcacagcggaagcggctgagaagatcgatgtggtgagcacgggctatggtgtcagttcggagtttattaaggagatcagtgacaagaatctccgcctggctgaagttaccatcaccacaatttacactccagagactcaacacaaagggacagatgcaattgtgggcttgaagatactgggtaaaatggtgattgacttgtttagaatctga

SEQ ID NO: 3430 - DNA, 459 bp, synthetic construct
  source 1..459: mol_type = other DNA
atgcggatcggcattgcggacactacgtttgcccgctacgatatgggagcggccgccatcgacgagctaaaaaaaaatgctagcgacctgaagatcatccgccggaccgttcccggggtgaaggacctgccagtggctagcaaaaagctgattgaggaggagggctgcgagatagtcatggcccttggaatgccagggcccatggaaaaagacaagatgtgtgcccacgaggcttccacaggactcatcagagcccagctcatgacaaacacccacatactggaagtcttcgtacatgaggacgaggaggaagatccgaaggaactcaagaaattggcagataacagggcccgagaacatgcacagaacctgattaagatgatgttccaccctagactgatggagaaggaagcaggcaagggcatgagggaagggaaagaggatgtgggtcccttatga

SEQ ID NO: 3431 - DNA, 1191 bp, synthetic construct
  source 1..1191: mol_type = other DNA
atgccaaaagaggagatcgataaaatcaaacggaatctgagcgggaatcccgatctggatcgcgattacctggtgtcccagctggaatattacaaaggccacgaatactcctatgagataatcaaagagatctcccacttgattctccagtccttggacttctacctgattgaagacatcggctctaaaaagacgatggccagccgcattcttgatgaagtgatgcagtacattgaaactcgtgacaagaggactgccaaggagaaacttgataaatacatggagtcgtttgtagacaaatacgagaacaaagaggaccataaggagagtgacttcaacagcaaccggtccatccgcgaaatccagtacataagatacagggagaacaaactggcagacagtcccaaaagcttcagggtcagtcctaaaaaggacaggcaggtgaattggcggaaggatgtcaagataaagaaaatggagagcaactcaattgaagagatccatgaaaaggaataccatagcttcctgaatccgctggaggagatactgttctatcactacattgggctaaagaaggaactggcatatatcccattcaacgagcctctatttgacctttactatctttacggaaccttgctgtttgaatctgacgagtatggaaagtcagaggaatatctcttgaaggccctgcgaatcaaccccgtatccagcaagaccatcctcgccctcgctgacatctataagtcaaagacccgaacatacaaccgatttttcctctataacgtggatgccctgaagtttgcgtacagaaacgaggatatcgcaagagcctatcggaactttggcttcttttacgtggaggagaatcagctcgatgttgcagctgctttctatgacttcagcttaaactacgactacaataagcacgtcgtgaaagagctggaatatctcaagagccgcggcgtggacacccagatcgaaacagaggaggcggttggtatcattgaatcaaagaacattcaagtgggagtcaatgactttgtgctggatgccttgaagtttatctgcttcgatctggacagtcggaagcacacgagccaggccttatacttctatcgcattctctacgacctaacaaaggacaaccaagtcctcgggagaataaatgctctgtcgaataagatttga

SEQ ID NO: 3432 - DNA, 762 bp, synthetic construct
  source 1..762: mol_type = other DNA
gtggaaaagggagagatggtctctcttctaggacgcaacggcgcagggaaaagtacgctgtttttgcatttcaacggcattcaccagccaaagagtggtgaaatctacatcgatggtgaaaaattatcctatggcaaggaagagcttatgctcgctcggcagaaggttgggatcgtattccagaaccccgacaatcaactgttcgcccctaccgtggaggaggatgtggccttcggccctatgaatctcggcttgccgattgaagaggtggaaaagcgagtgaaggactccctggaaaaggttggaatgggcggatttgagaagaaaagcccccaccatctcagcggaggacagaagaaaagaatcgccattgcagggattctggcgatggaacctgagatcatgattctggacgagcccactagcggtcttgacccaaagggcgcgtcccacatcctcaaactgctatactcactgaatgaggaggggatgaccattgtcatttccacccacgacgtcggtctggtaccggtgtactcgagcaagatatttctcatcagcgacggggagatcataaagtcaggcactcccaaagaggtgtttagcgacgtggaaacaatccggaaagctgatttacgcctgccaagggtcacccacctggccgagatactggaaaagaacaacgatatcgatttcggcggggagtatcccctgacaatcggcgaggccaggcagaaaatcctcgacctgttggggaaatga

SEQ ID NO: 3433 - DNA, 1104 bp, synthetic construct
  source 1..1104: mol_type = other DNA
atgacaaatgatgataagacccaagaatttaaactcatctccaaaacgatcgatggcgatgagatatttctcaatcatgactcaattgttgtgaaattcgccggcaaaagaaatgccatcgtgacttcttggctgaatggaggatacagcgaggatctctctgctgtgttcaaccaccagctgtcgcaggagaacattgacgaatatggtgacggtggcatcctcggctttctggagatgctatcctacgatttctacaacaaacttgacctgaagggcaacaagttaagcgggttggtcacctcggctcagattgacgagtatagtattgccgtggagcggtataaggacattgaggtgctcgccatcacaactgccggagtgcgcgttaacgcggtctccgcaggggacgtcgcctcctactacgagctgaacggggaatacgatttcgatttggaaaacgaggacccaaaccccaataagcccggaacaatcaataacatcatcctaatcaattgtaggcttgatgaaagctccctgctgctggcggaaatgatagctgtagaggctaaggcagtggccctccgggacctgatgactagtagtaattattctagcgagatagccaccgggaccggcaccgacggcatagcaatttgcagtaatctccagagcgacaacttcattgagaatgtgagcaagcacgcgaagatcggtgaactgattgcaaatgccgtgatccgctcaatcaaggaggctctggctaacctgcaatggctcacgccatcctatcagctgaacgcactagtaaggctcgacagatttaagatgaacctggacgagttctacgacaaaagcctgaacctggatgagatggagaaaaaggaatttataatgtcccttatcaaggtctcaaaaaaccctgagcttgtgggatacgtgtcactgatcattcacatcatcgaccagtatcgtatcgggttattggataaaaagccggccctgaaggttctcaactctattttgaacagcaatttcaaccgaaaggagtggaacagtatgaaactgcttttggaatacgtcattgaaaagcagatcgaatga

SEQ ID NO: 3434 - DNA, 702 bp, synthetic construct
  source 1..702: mol_type = other DNA
atgatagaggagctggtaaccaacatgtccataacggaaagcggcgcgagtgccagcagcccaatatttaccatcacaatcctagtctttacaatcctgctccttatcggcattatatattttgtctttaagatgtatgaacaatccaagcctaccgtggagtcaatcgtgctcatcgccgtgttaacagctatcgcaaccgtgggaagacttattctaatgtcgattccggccgtcaacctggccagctttgttatcattatggtgggggttgtgtttggcaaagaggagggattcctggtgggtgccctcacggcattcgtgtccggcattttcatgggaatgggctactgggtcattttccagatgctggcctgggggctgatgggcgccagtgcagggtacctcgcttcaaggtttgacagcttgccattccgcttcatcttcgggctcctctgggggttcctgtacggctggatcactgatatttccgcgatcttctattccggaaccgctctgcagatcactcccatcattgcattgtacatcaacggtttcacctacgacctgacgcacggagttaccaatgccgtgcttctggtcgtattgtatgactggtttaaaaagatgttcacacgggctaagattaaatacctgtctaaccccagctcaagtgatgaaagcatcgacctgactaattga

SEQ ID NO: 3435 - DNA, 1938 bp, synthetic construct
  source 1..1938: mol_type = other DNA
atggcgttaatcgaatttaagaacttcagcttttcatacctcaattccgacggaaccgaatccctcgaaaagtccttagacaatatcagcctcaacatcaactttggcgatttcgtgcttctatgcgggccctccgggtgcggcaagactacgctgctaaccaacctgaaaaaggagctgatgccaaacggcagacgtgaaggaagcataaaatacaacggcactgaaatcgcccagctggatgatttcaccagcgcttgcgatatcggctacctcttccagaacccagacagccagattgtgacagacactgtcattcaggagatcgccttccccttggaaaacatcgggctgcccacagaggagattcgaaacaggatcagcgagattgtggccttcttcggaattaacgacattctccataagaatgtgaacgagctctctggagggcagaagcagttgatcaacctctgttccctgctggtcctgaggcccaaggttctcctgcttgacgagcctatgtctcagcttgaccccatcgctagttatgagttcctttcaattattcgccggctcaatgaggagttttcgattaccgtcatcatgagtgagcacaaggccgacagcatctttccattcatagacaatgccgtcttcctcaaggatggcaagatagagttcaacgacaacgcccacgacatctgtgaggaagtaatcaatgacgacatatttgaaaactacctgcctgcagttacaaagatctataatggccttagccagaactacctggaaaatgaggagtacattagcgaatatgaagagttcactaaactgaacacgcctctgagtatccgggagggtagacggtaccttaatataattagtgacgagctcatcaaaataaacgaggatgtgcaaaaaaataacaattttgaaaacgattatgcctacgattcgttagaaaaagataactctaatcaaaattccacctcaagcaaaaaagaacatgattactaccagaagtccagtctgaccacaaaaaaatacaattccaacaagctgggcctgagggataggctcccattctctaacgataaaaacacactgatccgaatgaacgggatctactttgcatatgagaagaataatcttatcctaaagaacgtggactttaaactgaacaagggggatttcctgagccttgtgggtggaaatggagtcggaaaaagcaccttcctgcagatattggttggcatcctgaagccgataaagggcaaggtccggtacagtaagaacctgaagattgcttatgtgcaccagaatcccatgatccacttctccaaggacacagtgaaggaagagttcttggaatcaatactgagctcaaatgcgttctccgctagcgaatttaacatggaaacctatgatggtcttttaaaactgaacggcaatgagtttttggagtctgacctcctgaacaatctaaagtttaaaaatattgactatagatttaaagagctgatcggattctttgacattgaaaacctcttggacaaacacccttatgactgcagtgggggcgagcaggagaagatcgtaatcgtcaaggccctgattcaaaatacggacgttctggttctcgatgagccaacgaaaggtttggaccccatctcatcgaaaaacctggcatacatcctcaacagcctggtggacaatgggttgaccattgtgatgacctcccatgacttggatttcgtggccaacaactgcaagcgctgtctgatgctattcgataaggacatccaaatcgatgacgaccctaaagtgatctttgcagagaataacttctatactacctttgtaaatcgcatggtcaaggattacattccgcaggctgtgacactggatgacgtgaaggagatttgggatctgaagtga

SEQ ID NO: 3436 - DNA, 1005 bp, synthetic construct
  source 1..1005: mol_type = other DNA
atggttctcttggctttcatttttagcgacccttactttgtgttgagttttctcgctttgattctgatcctaatcgctcttcagggcgtctccagcgagctgaagaacatcatgaaatttttcattcccttaagcgtgctgatcattatcctgaaccccctcctgaatcggacgggggcccaccgtatttatctgttcaacggcttcttcatcacctatgaggcaattgcatacgggattttgatgtcattggcactactcatcgtgattctggtgttcagtagttataacaggagcgtttcctatcaggagatgctctatatcttttctaaaaagcttcccatcatctcgatgattattgtaatggctctccggttcattccactcatcaatagcagggccattgaggtgcagaagctgaataacctgaaagccaacggggtggagtcggatgaagaggatgatctgaatgatgattctctggaagacaatctgtctgaggaaaataacctgtcggacgaaaataattcaaaagaagactcagactctctcgatctggagcaattcgacagtaacatatcaagcctggacatcggttccgactccagagtcttcaaaaagatcaagtcctctaaacgcttccagtccatcgccaaggaggccaaggtccttggaaagatcatgggaataacagtcagctggtccctcgaagagtccatgtttacagccaagagtatgaaagcccggggatacaactccaacgagcgaactagctacctgagctacaagttcggtcttgcagacatcatattcctggcgatcatcatcgtgaccgtatcaataatagtgatcggcctcatccagggctacggcatgatcaacatttacccgagtatagacttcagcttcagcgatctgccatttaacatttactattttgcgtttatagtgtttcttttacctctgatctacctagaaatcaaggagagattcctgtggcgctga

SEQ ID NO: 3437 - DNA, 4056 bp, synthetic construct
  source 1..4056: mol_type = other DNA
atgaacaaggtgcagctgtcctccatccttgctctggtgctgatcctcttcctcagcttggctgtagttagtgcgaatgatgatattttaaatatcaacgtcactgacacccaggatagtgtaatcgataactcaaatggcatctcggattatttcagcagtgacaatggcatcattaatgacgacgggcttagctctgacgacgaaactgccggtagccagctcctgaacgactcagaggatctggattcaagcgatgatctggccaaggacagtgacctggaagattcgaaagagacctcgaaaacgcaggataacagccaaaagaatgaagactcgaaaactcggttatcagacagttccataataagaattacagattctagctattcaagctacttcgacctcagcaaagatggggccattagggaaggcaccatcaaggatggcgacacgcttctcattggaaatgtcagcggaaaaatattctcgatcaccaagaatattaacattctcccgatctccgatggggacaccatgtccaactgtctcatacgcctgatagagggcagctccggtacaagtctgtccaacctgaggattgtgaacagaaatgagaaagtcgggtccttctacctatgcgggattcatatcatcaattctgcaggtcacgacatagtcaatctgaccataaacaacagccagatgaagtgctacggtataataatgagcaacgcttcgaacaaccgcattatcaacagcacaatcatcacaggccaggccacagccatacccatgactggctcttccaacaatctcttctacggcaactacattgagacctacaataccaacatgatctactactgtatgtacggaaacggtgatttctacccaagggaggatctggaaaagtcccacgacaacatcatcgccaacaattacttcactagtcgaaacggtacctacgactcctactgctattcggtctgtctcatggctgaggcgggaggctctgggacggtgatcgccaacaacaccttcaacaataccttccgcccaattacggtctcaacccccgacacgctggtcataaacaacaccatcttgaacgtagggggagaggcaggcataattgtcgatggaaataacgttacaatcatgaataacaacatctccaccaaacggctggaggggttccaatggaacaaggaaggcgacgtggtggggatcttcacctacggttccaatacaaggatcattggcaacagcatcgacacagtcggcacaaatggaatccggtccagcggggatgcaaccttcatttccggaaacacaatcaacaccgagtcctctgcatgcatcaacctgaccaaatccaacgccgtggtggaagacaacgccttaaacggcattggctcgagtgcggttcggatctacacaagcaaactggttgagaacaccacaatccgcaacaataatataagttcagactctgaagggattgttctcaagggtaagattgattattccctggtgtgcggcaatattattgagatttccaatccagaggatgccatcattgtgggaaaatatacaaacagaaacccgctggtcccccagcattacgctatctttaataacacaatcaatggcatagttgtgaatctgacggacatttctgagatcgagcgtaatgataccgatagcggattgaataataccaacaccagtgattccggtaacaatgggactgggaatacgggtaatgggactaatattaccgatgttaacggtacagatattaatggaacggatgtaaacgggactaacatcaccgacatcaatgggactgatgtgaacggcacgaatgtgactgacgtgaacggaacagatgtgaacggaacggatgttaacggaacggacatcaacggcaccggaaatgctaccattccagttaacatcactaaattaagcacttccatcactgtctacaacaccaccgtcctacggggagactacctcgatgcctacctgaaggaccagtacggcaatcctatctccggcgtttctatcgacttccactttaaggataaggtctacgctaaaactaccgacagtgaaggaaaagcaagtctgcactttgatgcgattccggacaattacacgatgaacatcagctttacgggaaataactattacctcagctcgaatatcacaatcgacatttctgtaattcctgtgagttattaccttaatgaatccaacttctatgagtacttcggcgaagacggctatctgaagggggactatgaatatgcagacctcattttccaaggtgacttccgcaataagcggatcgtgctgaaccagcctctgcgcatcatctcagattctgcagtgctgtacgattcaatcatcaagatagagtctgataaggtcgtcgttgacggttttacaattgtcaaccgaaaccctggaaacaagcaggacaaccaccggtttgcgattctgttggactacgtgagggatgtgagcgtaatcaacaacaaaatcaagttggatagctatgacagcggatatggaatctacctatccgaaactcaagactccactgtgtcaaacaactccattgatgtgaaggccgataaacttacctttggaatcatcctgtatgactctaaggacaacctgatccaggacaatataatcaaggtcaacgggacagacgatccccaccagtatgagtctacaatccaggtggacacttccatcagcgtggatgactatgaggccgagggcatgatcattcccgaagtatacaagacatacggcatcatcctattctactcatctagtaacgacattggctacaatgtgataaacgccacctcaggcctgaaaaagtattacacggccgtgaaggagtctaccaacagcattgtaggggtcgacctctactatgatagcaactacaataaggtgcatcacaataacgtggtggtctctgccaaagacccctacctttacggactgggggttctgggggccgaaaccggtaagcgagaccaatttgccactaataacagttttaccgacaacatcgtatttgtgaatgggacttattatgcagccggtataattgcaggttataacagcatcaatactaccatccttagaaattacattatttgctttagtaacaacgtgagctatggggtgatactggagggggctctcaattcagtggtggattccaactacgtgattagccgctcgaggatcaattatgtcctagagggctacgacacggattataatctgattagcaataacacactgaacgcctttggccagtacgtgggggatgtgagcttgtataactccaaacacaattacattgccgggaataagctcagtcctatctttcgagagggcaggcttaaggacgctagtgagttgcccggcggcgtcgactttgacgccatcttcagtgaactgggcgtgtccaatccactgcatgactattcagataaagactggagcgaattgctcagaacagaccttacagaccacgcagacgtgattcctccccataccggtgctttctatgatgacggaggtgagggcaacatctttgtggacaatgaggttccagctcccccgtccggcggcaacggccagaccaatcgtaccggctccggcgaaaccaacagcaacgggaacggaaacagtagcaatggaagccagaatagtaactcaaactccactgtggtcaataataataatgggaactcaggaagccagagcgacatggacggctccgggaacaacccagagaccgacacactcaaggggaacactgttggcaccagcagctctgctgctgtgacagagagcgctcgggcctataatttggacgtggacgaggatgccgcatcaagtcgttcattatcatttggaggcatgaacatacctgtgctgtgcatcttgttcctgcttattttcgcgtgtgcgtctgaactcgtcaagaggtctaaaagaaacatcagatga

SEQ ID NO: 3438 - DNA, 1848 bp, synthetic construct
  source 1..1848: mol_type = other DNA
atgtcaactaaagtacactcacccgatgaactgcctcagaagcctggcatctacatcatgaaagacatcaatgaggagatcatctatgtgggcaagtccaaatctctcagaaaccgagtaaagtcttacttccaaaagaacctggacagcccgaagacaaaggtgctgatgagccatttcaacagcctcgaatacatagtcacaaacaccgaaaaggaagccctcattctagaggccaacttgatcaagaagcatcgcccgagatacaatattcgcctgaaggatgacaaaagatacccctacgtcaagataactgacgaggacttccctaagattgtcatcacccgcacaattagtaagaccgggacatattacggccccttcacggatgtgacagctgtgcgccaaaccgtcaagttcctaaagcagctttttagaatccggacctgcaaacgtatggacggcccatgcctgaacagtcagatagacctctgctatgcaccctgtgacggccagatctccaaagaggagtataaggagcacattaaaaagattgatctttttttccaaggcaaatataataagatcatcaaagacctggaaattgagatgaaacaggccgctgaaaggcaggaatacgaaaaggctgcggtgattcgggaccagattagctccatcgatgaggtgatgaaaaaacagttcgttgaatttgaaaacgacttggatcaggatatcatagcaatcgcatacaccatccataatgccgtggccgttgtcatgaacatccgaaacggaaagatcatgggcaaggacgactttacgatggacggtagtgagaataccacttccgatgaggttatctctgccttcatcaagcagtactacgggatcaaccggcacattccaaaggaagtgttgctggaagaggatatccctgataaagagcttattgaggagtggttaagcgacctccggggaaataaggtctccttaaaagtgccccaaaagggcaataaactgaggctggtgcgaatggccggaaagaacgccgagataatcaaaaaccagaggcagaagatggaaaattcgatgatggaactcaagcggtatctcaatctgaaaaagctgccacgtgtcatagagggctatgacatctcaaacatttcgggtaagcttgcagtaggttccaaggtgtcattcctcgacggcaaaccaaacaagaagcagtacaagaaattcaagatgaatactccaggacccaacgactttgccatgatgaaggaactcttggaacgccggcttaaacccctgaaggaacattacgagaaggtcagaatcaacgaggagcacaccaaacacaatgaagcggagacagagaagatagagcccttaaaactgggggaagagccaaacctaatcgtgattgacggaggaaaggggcagttgggaatggctgtggatgtgctcaaggaatataacctgacccacatcccgatcattgggcttgcgaaggagttcgaagagatttacattcctaacagcagctttccaatcatcattcctcaggataatgaggctctccatctgctgcagcaggtccgcgatgaatcccacaggtttgccgtgacgtaccaccggaaactgaggtctaagaaaatagaggagtctcccctggatgagatagagggtatcggtaaaaagagaaaactggagctgctgaggcacttcggggactttgacagcattaaaaaggcaagtgttgaggagctgaagggcgtggatgggatgaatgagaaagtggctttgaacgtttataattattttcacgagggggaaaaagagcaatga

SEQ ID NO: 3439 - DNA, 543 bp, synthetic construct
  source 1..543: mol_type = other DNA
atgaaagtgatcggggtgacagggctcccaggtagtgggaaaagcatcctgtttgatacagctgaggaaaaaggagctctagtagtgtgtatgggcgatcttgtgcgtgaaaaggctgccgaaaggggagaagactcgggcaccactgcccgcaagttaagggaagagttcggccaatacattgtggcggaactgacgatcgagcgaatcaaggagatcctcgagaaagataaagatgcaaagatcattctggttgacggtatcagaagcccctacgaaatagagctctttaaggagagctttgacaacttcatttcagtctccatttatgccagtcctcagacccggttcgagaggttggtccttagaaaccgcgaggacgatccggaggtctatgaggacttcctggtccgggacaatcgggagataggcttcggaattgccgaagtggtggcaaccgcggactacatgctgaacaatgaatgcagcctggaggagtttaagcagtccgttgccgacttcatcgaaaaggagatggattga

SEQ ID NO: 3440 - DNA, 747 bp, synthetic construct
  source 1..747: mol_type = other DNA
atgatcccaaaaacgcatccccgttacgagagtctgcttttgagagacaaagtcaaaaacgcatttaaggaaggctatctggccgattcgggaatgatcgcccacggaaggggggagaccttcgactatctgataggcgagagaaccaccgaacctgcccgcaaggcctgtgaagccgccgtggcatacattctgctggctgagaatccggtactctcagtgaatggaaacactactgctctggccatagacgaaatcatcgagctcgccaaggcaacagactcaaagatcgagatcaacctcttctaccgaacgccagaacgggtggaaatcattgaacggatgttcaaagagagggggtgggaagatattctgggcgggaacgatgagaagctggaatatatcgacaatctcaacagccccagggctacagcaagcaaggagggtagctacatcgctgatgtgatgctggtccccctggaggatggtgaccgcgcggaggttctcgttcagaatggcaaaaagatcatttgcatagacctaaaccctctaagtcgcacctctaagatgtccacagtctctattgtggataatattgtgcgggccgtgccattgatgaccagcatggcgcttgactttaaagagaaaggcaaggacaaggacaaggagtttttggaaaacattatcaagaacttctccaatgagcagaaccttaaggattccctggctgagatcaaattaaaatga

SEQ ID NO: 3441 - DNA, 579 bp, synthetic construct
  source 1..579: mol_type = other DNA
atgaaacgattcattgctatcgatgggcttgacggttcgggaaaggacactcaggctcgcaagatcaaggagaagtatgagcaggaaggaacggtggtcattcggagccatccaacatctgacaatttcttcggccgccacagcaaatccgcactggagaaaaaggggaagcttaacaagatcattgcaaccctctgctatggcgccgacgcgataaggtcagtgatcaaatactatggcaaatacgataccgttatctttgtccggtacacactcgctgtgtcctacctgagcaaagccatttctgtgcctgtttacaaattggtgtgtgtgttgctacccatctccgagtacttcttctatctggatgtcagcccgaaggagctggtgagacgggtcaagtcaaggaatgagaaggaagagatgtttgagaactatgatgcctttgtaaaggtgcgtaaaatggccgagcccgtactgtacaactggaacgtgattcccgcggacgacagtccagacgaaatctttagtagaatagaagccatcctggatgaactggacaagaagctcttagaatga

SEQ ID NO: 3442 - DNA, 528 bp, synthetic construct
  source 1..528: mol_type = other DNA
atggatgagaaaatcgaaaaccccgagcttaaggccatcatggccatcgaccctgaggagatggacgaagaccagctaaacaagttcgtcgaggcgttcatggaggccaccttgattgtgcccgcagagatggaaacagatatcgacatcgaaggcatgagcgatgaggagatcgccttgaatgaagagatcgagataaccataatcaagcttgaggacgacgaggggcatgaatttattccagcatacacggatgacgaggaggtggaaaagctggatttcgatgtctacggattaatttttaaaacagaagacctggctaacctgctctatgaaagcgaggacgagctggaagccgtggtactcaacccattcactgaatacagtgctgaaattcctctggattccctgtttgagctcttcgacctggaggaatgcgacgatccgaactgtgataatccccaccaccaccatcacgaccacgaacacaatcacgagcatcatcacgaccacgagcacgagcattga

SEQ ID NO: 3443 - DNA, 858 bp, synthetic construct
  source 1..858: mol_type = other DNA
atgcggaaagagatcatttctatcctggtaattgccatcatcgcaatctcagtgatcccaacggccttttcagcaacggacaatgggatcgtcatcacctacggcgaaacgacctacaataatcagaactacaagtctatcgtggataattacttcgctagcaaaggttatggaagttccaacgtgcagggcgaggtgattactgcagctgacgtcaacgcaatatcgtcgggcataagcggcaaaacatacaactccaaccagatagtgagttgcgccctagtggatatgacccaaaacaatgagatcacagttgaagtggacaactccattacaaccatcacgcctcagatgtacgcctctgcccttaagtcagcgggaattacaagcggacacgtctatgtaagcactccggttactgctactggggaatctgccctggccggcatcatgaactgttatgaggaagttactgacgtggagatccccgaaaacgtcaagcaagctgctaacgaccagatctataccgaggcggccatcgttgagaacaatgatgacgtcagctccgaggagctgtccaaattggtggatgatgtaaaggaagaggtgcaggagaagaatattaccgatcatgacaccatcgtgacaatcataaacgactacagcacaacctacaatatcaacatttccgacagcgacattgaaaacctggccgacaccattcagcagctccaagaggtccaggacgatgcaaacagctataaggaacagctggatgatgccgtgaacaataccacatcaggtttctccattgacgggatactcaatgcgatactcagtatttttaatttcagttga

SEQ ID NO: 3444 - DNA, 567 bp, synthetic construct
  source 1..567: mol_type = other DNA
atgaaaagttccataactaaagaggactacctaagaatttatgagatgacagacgacgtgttcacccttgactttgactgtggaaagctctgcaacaatatctgctgcaccatcgagaaggaagccaaggatgatgagtatctggagatggtcctgtacctcttgcccggcgaagaggaactgttttttgagaaccagtggttcgagatgtactatgaaacgacagatgaatatgaataccctgacagttggaaagggaaagtttactatgtaaagtgctccgatccaccttactgcgaccgcaaacgacggcccatccaatgtaggtcatttccggtgagcccacaccttgataaggacaacaagctccatttgatctacgatgaggatgacttctcttacgactgtcccattgtcagccagaaaatggagctgtccgacaatttcaaggaaaagattctgaagatgtggagcatcttaatagaggatgaactgatcttcgatctgattaagatggagtcggtgcagcgggagaataacgaaaaagagtacgacttcgtgttctga

SEQ ID NO: 3445 - DNA, 600 bp, synthetic construct
  source 1..600: mol_type = other DNA
atgaacaaaaaacggtttaaactgctgcttactatttttatagcatttgccctcatcaacacgtgtttcatcctgaatgataatctctcggcggcagacaacgctccaaagggatatagcaactactacattagaggggtctgcttcaatgtccctgacagctacaaactggtggacgagggatgggatgacgtgaatcgcctcagctacgctcatttcaaaaagggcaacaacttcctgaacatcagcctggataagcactccacaaagtttaacaagaaccttttggatggtttcagttcctttaccataaatggaatcaatctgaataagaaaaccatctctcacgtaactgggttctacgcgaagaagaacggcgtgaagcactttgtcttcgccacagaggacgatttcgtgtatattgccgccaaagggcccaagctaaaggacgtgttatcaagcaccaaccagagggattacaagccgtatcatgatagtgaatacgacttcgacgatgatgcctactatgaatcagacgtttatgatgactctttcgacgactcctttgacgacggcgcttactacggctatgactggtga

SEQ ID NO: 3446 - DNA, 684 bp, synthetic construct
  source 1..684: mol_type = other DNA
atgaaaagcgcagttttattttcagggggaaaagactccgccatggccctcaactacgccatcaacaatggagatgatgtgcgatatctacttagcatgaaatcccagaatgacgagtcatatatgtttcatgtgcccaacattcacatgactgacttgatctcgcaggctgttgaaattccccttatggaagtggagaccgacggcgtgaaggaagaggagctgaaagacctgcggaggggattcatccagctaaaggaagagggcattgaagcgatctacaccggagcgctgttctccacctaccagaagagcagaatcgaaaacctggctgatgaaactggtataaaggccattagtccttactggcacaaggacccaaaggaatatatggaacttgtactcgagacaggcttcaaggtcatcattagcggggtcttcgcagaaggcctggacgagaagtggctcggccggctgatagatgctcaggccctccaagagctggagaaaatcagtgaaaagacgtacctgaacctggcattcgaggggggcgaggctgagaccctcgtgatcgacgggccgatctttaaaaagaggatcgagatagtggatgccgagacagactggcacctggataacggtacatacaatgtcattgaggcccgcttggtggagaaagagtga

SEQ ID NO: 3447 - DNA, 786 bp, synthetic construct
  source 1..786: mol_type = other DNA
atgatggatctgatcagcggcatcatatatctaatcctgttcattataatcatggtcttcgccttctcaatgggtatcctctcaccctatgtggggcggcgcgaaatcatctccattatcgccattggatttgttctcggtgctattggcgggtacttcttcatctacccgatgtaccaggacagtccctatgtgttgggcaatctccagggactgtttacgatggagagtgagatcataaacctgaacattccaagcacatccaacatcagtgacgtcactgaaaaaattctaaatcaaaatggggtcaactcagttagcacgaatggatttgagctgacaacaagctcgataaacaacgagacgaaaacctatattgatagctaccttaagaacgactctcagatcgagcgctacagcatcggaaccaataatatttccgtggacctcaagaacgatgcaagctccaccgccacactcggaagtcttgtgacttggctgtccaatactgtgggcgtgagctcggaatttgcctttgtgcacattaaggtgaacgtgaatgcgaaccaggtgctggacatcaaggaatacttaagggacaaccactataccatcgtctccgtagagggccctgtgcaggataccatccactacttctatgaccatctggctccagattacgttgtaatgtgcattaccggcataatcggtgtcttggtggcgattgcaggcatctacgtagagcccctgaccaaattcgtccgagccttcagacggggggggtga

SEQ ID NO: 3448 - DNA, 582 bp, synthetic construct
  source 1..582: mol_type = other DNA
atgttcgacaaatcaatcgctaaaaaatcctcgctcccattcaagagcataaacaacaacagtttatttaagtttataagtattaataaatgtctgttcaagttcatctccatcaacaataaggggctgtttaagtttatcagcatcgacaacaaaggacaactctccctggaatacatactaagcgccatgatggtcattctgcttatcacactcctttcggtacccatcctcagcctgacaattgattactccaacgatgtgatcaactctatcagcaccaagaatgaactgtcaaaaatcactgattctattgacttctgctactatagcggcaaggggtccaaaaaggtggtcctgcttgatttcaatcaggactttagtgttaggtttaccaacaatggccagaaggggattgcctatgcagacctggaattgtcagacaacaaccacaaagagatctctagcgagtatgactacataggtctgaacacgaatattcagttcagtaagggcttcaataagattctggtggagtgggatgaggacaccggactaatccggctctccaagttgaattga

SEQ ID NO: 3449 - DNA, 909 bp, synthetic construct
  source 1..909: mol_type = other DNA
atgaatatctatatcttattctggaatatctttaacaacatcgacttttatctgatgagtggcttcatcatggtgttctttacactcctcttggcaaactactacgacctgaagtatgggatcattccaaacaagcttagtgttttccttatgacatttgggattctaatcaacgtgctgattctgattgtcctcaataaccggctgtacgccattttttacgtctcctatttgattatcattttcatcatctccttcgtcctatggaaaatctccttttggggtgggggtgacctgaagctcttctgttccatagggttttcacttccctttatagatattctgaatcacttctatacgggcagcatcttaaacagcttcagcttcaacagccagataattctgtatccaaagatcttttccatcctgataaattcaatcctcctgtcatttccggtgattctcctgctgctggtttacaagttgcttcgcgaaaacaagctgaacctcatattattcgcgttttccaatatgaaactcctcattaaggaactgtcgacaaagaccgtatttattaatgacctgaaggagggaatgattgtggaggattactacttcaacagcctggagctcttcaacctgatggaggagctgactggaaatgaagagtgctacaacctcaaagccagtcagtttaaagagaacagttacgtccttaagagctctagcatggccggcctgaccagggatgacatcaaactaatcaatttcgcatatatggaaaccttgatcaacttccccaatttcaaaatcaaaatgggcgtgcctttcgtgccctctctgactgtgggatacttggtattcttggctttcggcgatctggtgtttcttatctcgaccataatctga

SEQ ID NO: 3450 - DNA, 216 bp, synthetic construct
  source 1..216: mol_type = other DNA
atgatggcaagcattctacggaatcaggtcaacttcaccttttcatacaactttcatatgatggccagcatactgaggaatcaggtgaacttcactttctcgtacaacttccacaccatgaaatccatctactatctcgaagtgaatttcacgaagagcagtaagttttatgagatgacatccatcctgcgcgatgacatcaactttacattctga

SEQ ID NO: 3451 - DNA, 600 bp, synthetic construct
  source 1..600: mol_type = other DNA
atgaatgatctcgataacaatcttgcaaacgcaaaaggcattgggaaaaccatcgctacaaaggtgcccatgaatgtccacgatgaactcgtgcacctggtggactgtggcgcctatttaagcatctcagacttcctgcgagaggcgattcgggagcaactgaagaactacaaaattgccgacatgcggaaaattaactaccaggacgctaaaagagaggtaataagctacttcaagaagtataaggtgtgctttctggatgagatagccattaatctcgagctggagtttgaattggtcaacaccatcctcaacgaccttgttatggaagaaaggatcaagatgatctctaaagccgatcaggtcttcaaggactacttggaggagaacgacctggatgaaagtcagcacttctccaataagggcaacaactttatcaagttcaagggaaaacgcataattgtggaatcaagttccaaagacgtggacttcatcagcctcaggccgtcgccaaagaataagtctgtgctgaaaagccatggaatggttctgaacaatgggacggtcatcctatccgagtgctatatctttctgaagtga

SEQ ID NO: 3452 - DNA, 1677 bp, synthetic construct
  source 1..1677: mol_type = other DNA
atggatttttacaaggactcccgcttcttccagaatttcaaggagtggatctatctgacaaaatacattataataacggggggagtagttagttccattggaaaagggatcacttcggcctctattggccggattctccgatcgtacggcctgaaggtggccgcgattaagattgacccatacttgaattgggatagcgggaccttaaacccctatcagcacggggaggtgttcgtcacgtatgacggcatggagaccgacctggacttgggtcattatgaaaggttcctggatgtcgagctcccgggcataagcaacattaccacagggaaagtctaccagtccgtgattaccaaagagcggaacggcgatttcctgggcgcttgcgtgcagattatcccccacatcaccaacgagatcaaggaaatggtgcgggagataagcgccaaggacgattacgacgttgtgctagtcgagctgggcggcacggtcggggacatcgaaagccagccattcctggaggctctcagacagcttcgaaatgaggaaggcagcgagaatgttatgtttgtacacgtgactttcgtgccatacctaaacgcagccggcgagtttaagacaaagcccacccaacactcctcaaaagagctgcgcagcatggggatcaaccccaacatgattgtcttaagaagccaagaacctattgacgatgacttgaaaagaaagatcgctcacttctgtgacgttgacgtcaaagctgtcgtgaacactcccgatgctcagtcaatctacgaggtgcctctcgtactggatagggaaaacgccggacagtacatttcagatcgcataaatcttggaatcgacttcgaaaatgataaaaatactctgaacgaatgggaggagatcgttaactcccttaaaatacaagatccggtggtcaccatcggcatcgtgggcaagtacgtggaactggaagacgcttatatcagtataagggaaagcctccaccatgcagcagccaaaatcggcgcgaagatgaacattgagtatctgagtagcgatgtggacgtggaagacgtggatgaactgaaggccttcaaggaggagctgtcaaagctggacggtatccttatcccggggggatttggagaccgtggggtggaaggaaagttccaggccgttgactacgccattgagaacgatgttcctatcttcggtatctgcctagggatgcaatgtatggtgatccagttcgcacgccgcatcggaatggaaggtgccaacagcagtgaatttaacacagagacaccatatcctgtgatcgacatgatggaggagcagaagaaaatcaagaagatgggcggaaccatgcggctcggtgcgtacgactgcaagttgatcgacggcaccagaacgatggaggcttatggggaggagaacattcaggaaagacataggcataggtttgagtacaataatgaatatcgagatgtgctcaccgagaacggtctcgtcatcgcaggaacaactccagataatttcctggtcgagatcgtggagctccctgatcatccctggtttattggctgccagttccacccagaatttaagtcccggcccaacaatgcacaccccctgtttgccagctttgtacaggccgcgtttgacaataaatga

SEQ ID NO: 3453 - DNA, 381 bp, synthetic construct
  source 1..381: mol_type = other DNA
atggacacaaaaacgatcactgcagaactgaatgaggagcagtacaagaaataccagataatgcaggagaataatctgagcgtcggcgaagccattgatctgattttcaacctaagggaggagtttgaattgcaggccaacgattacctggaagagagactcgccgagctcaacgacaagaaagagtccctgtccaaggaaatgagctcaatcgacgatgaactcaacgtacttaagaaaatcgtggattcgcccatggacttcaagcaaaagcgcgacatcattgaaaaggagtatgctagctttgacgagacctatgacatcaaggtcatacgggcgaagcaccaggtgagttgggtgaccgatttctttaaattctga

SEQ ID NO: 3454 - DNA, 453 bp, synthetic construct
  source 1..453: mol_type = other DNA
ctcaacaaggataacagcagtctgaacaagaataatttgaatctggaaaaggaaaactccagccttgagaagatacttaagcccgaatctaaactcaactccagtctagacctggtgagcaacatgatcagcgatctggactcggacatagagagccggctcaattccgatctggagtccagttcaagctcattctcggatttatataggaattacctcatcgaagacaatgaaatctacctggagatgtccattagcaaagatgagttcttcaagatgatgaaatttctgtacgtgctgattgactcatatcgcctggagctaaacaacatcgaggtccttgacaccggagacgggttgttgaatatctgctccagcatcctcatggaggatgagagtaacattaaaatcattgaagcctttctgatcaataacgacttcggcaacgactga

SEQ ID NO: 3455 - DNA, 744 bp, synthetic construct
  source 1..744: mol_type = other DNA
atgctgttgaaaattattgaaaacaaaaagataaaggcaaaccaaaaggagtttgatcgctttctcgaaaggttccacaacaacaaaaagactttcacagttgactgtgaccacatcaatctggactacttcaatagcgaatcatacgtgaccatcagacatcggaagcccaataaggagtccatctattataccagcttttttaaggagagggatgaggtcacgtacttatttggcctcgcccgggaaaatgtggtttgcacatcctcttacatggatatgggcgctcagatccggcccaccctcgtggcggtattgaatctggaggacagctctaaatcaactatcgtatttgcagaggacagcgaagagtataacaacgtcattctgctccgtatagactgcagtcagctcaacaatgacgagctgacggtgctaaagaacaagaataagataaccaagcttaaagacggaaaggggttcatcaatttcggagccattggggatttcaccacacttaaaaacatccgaaacttcatttccaacgtgactttcgaatacgacaacggcctgtatgccaaaatcatcaatgtgagcattccaatcaacaacagtttcagtaaacctgattcggatgtcctaaaggaccgcttctacaattttgacaagctggactctgatctggtggtcatcgatccgaacgaggacgatgactccaacaaaagaatcctgaagattaattga

SEQ ID NO: 3456 - DNA, 4689 bp, synthetic construct
  source 1..4689: mol_type = other DNA
atgaaaaaccatagtttcatgtttttagactcagactttcaggacatctccaatttttgtatgaggatggaaaagaatatcgttgaaggcgacggcgttgacgccgtgatctgggctggaaagatcgctgaacgtgtgacacactacatcacaaaattcgtgggtattgacctcaacgagctggaccaaaataaaaaactcaataccctgtacagcaaaggcatcatcccggaagataagtacaataaactggactccatacggcaataccggaacatcgccactcaccatgagcttcgagatgagatgaacatagctaagaaaacgcataaagacgtgttcaatatactgtcctggttctacgggacctacaagggtgacgaggcctattacaaactcaaatatcctggagtcacctaccgccacgatgagagctttctcaatcagctgaaggaaaacattaacaacaatgtgaaaaccattgacaacaacaaggccaccacagctatcaaatccgccaacgaccacatttatcagcacgacgttgactacaacgtacacagctacttcaaccaaaacaacgtggaatttaatccggaactgaacgcatacactgcattcttcatttttgatgacaagaaagtcaccataggccacttcaagacacgcgaggttgcagtgcgcaagggctatagattcgtgctaaacgaggacttcaggatgtttcagtactttaacggatgcctgcttcccgagcgcttggaagatgggagctattccgactccaagggcatcgacttcgatatggaagaaaagctatggaaagcaagcttcgacgataaggatctcggctacttcatatctgaaaactccgccatcatcgcccggaaggagtacatagacaccctgccactgcctgagagcaaaaacggctcctactccgactataaggaaatcagtttcgacctgaaccacaagctatggtacattaagaaggaaggaaagatactggactattatgatagcgaaagggaggcaatccacaacctttcaaatgtctaccggctcgatatagacctggaggacttgggcatcgtccaggacaagaacgattcaagatggaagatcttctataagaacaagtacgtgaccacctgcgacacgaaggaggaagccatcaaaaagcgattaagccacatttccagctttgctcccccaaagagaaacaaggacggggagtattcaatccataaggggatatactatgacgacaagaaccttatttgggtattgaccatcaagggggagacactggggttctttgacagtgaggaggacgccttcaactataagaaggaatttctcaaatccaaaggcttcgacgtaagcgaccttatattccaccaagaggagttgtttgacgacagctttgactttaaggtaaggcttaacagcgaagagaacgccgttgactacgataaggacaatgacgaatgggtcatttactttaggggaaacgagatcggaaggaaagcctcggaggatgaggcaagaaagttccggcgagcttacctgaaggaaatgccctatcccccccgcaagtccaatgggaattacagtttcattgacgggatcgactacgacatcaacagccatctgtggctggccaagaacggggaggagctgatcggacactttgactccgaggaggatgcattctacggcctgaaggaggcgcttgtgaaggaaggctttgacgtgcgggatatgcacttcatcaacagcgacattaaaagcaacgatgaaaacgacggtaacttgtctaacattgtcaatcccagcaaggattacctaatcaaggacaattccacgaaggattacctgagtgacgggtctgtgtctaacgaagattcttcagcagaagcttctaatcagaaagatggctctgacaagctgatcagcttttatgatgtatttagaacaaatacaggcaactatatcctgagcgatagcgaggaaagtctgagcgatagcgaggaaagtctgagtgattctgtagagagtctaagtgactctgtggagagcatcaacaaacctgtcgagagtgcggatgaggactttaaaaacaacagtgaaagcattgcgaatgacagcgcttttgagaccgacaatggaaggggagttatcgatcaggagttcctcgccgatggagacaagcaattcaatatgggtgcaataatccaagaggacaactcaaagaacataaacgagtacaagaaaagttccttttacggaatcgccaatcagaatcaggacgatcgcctctcagacgatctgtcaatcccatatctggaatccgaggataactacgagtatatggaggacctcaacctcgagcagcttaatctggacgagaacaatggattcctaaacatcagcgaaaaccttttcaaaagctctaaccgtaaggaactaaaggagataaaattgaactcatacgactccaataacttcagacgcgagatggtgctctcctacaacgattcctacctttgcgtgtcccttcagggcatggtcaataaggatgagttaaaggacatcatattcttggacattctggacaatatggtcaaactgaactactccaaggtggatgaggagtacttcagcatcttcatcaatgtgcagtataagctcagcacaatcgatctcgtcaccttgatcaatctgctgtctgatctcgggtgggagtttgacttactcgataaactggccatttccaatgatataaacctcaattcactcgtccagtccaagatcggaaaaatccgcgacaaacgaaaggcccacagtaacgagttgattaaaagttctcataacgaggactcattaatctccaagtctaagattaatgactctattgtgtccaatgaaagcgattccaacaagggcagctctaaattcaaggagaacctgtcgctttatgacaaattcagcctaagctctaacgacgccgaggatagtgacgcgcagaaggctaaggataaaagcttaaagagtaaagactatctggatgcaaatcccatttccaaacgcaaaagctacccaaagcaggaaagcatctccagcaagaataagaagtccaattccaaatccgagaaggccattatccgcggcggggtgcgagtcagtctagaggaagcccatgagatcgataacgctgaggagaacaaggtcattaaatccaagatcatcgacaagaagccagagatggttaaggacttcaaaacaacttctttagatagtcttctcgaggccaatcggatcaaggaggaagaacggctcaacagcacttcagacgatattggtgatgatctgtcgattgaggataattctgacaccttcaaagatgatctcaattctaacgggctggaaaccctggaaaacggactgaatctgattaaagaggggctcaatagcgctgagaatgatttggactacgctgaggatgtgctcaattcggaagaagacgatctggactccgctgaagacgtgctgaaccccgaagaggatgatctcggttctgtggaagatgttctgaatcctgaagaggacgacctgggttctgttgaggatgtgctgaatccggaagaagacaactatgtgtcggaatccagtctgaacgatgattttgatagtctcgattactcagactcccttgaggactcaactgactccagtttcgactatggtgatgtgctgggtgaggacaactcaaactccaattccattgaggacattttcaatgacgaggatgatctggactctgagggcctgttggatgaggattcggatgacgtggacttcctcgagaaggtgtcatctgacctgtcgtcaactaacttgtttgatgaaagcgccgacctgagcgctaacgacctgttcgacggctataacgactctagctcgagcgacttgtttgacgatgagtcggagactagttttgaagacgaattggacaatattgggtcgtcaaatcaggaggatctgagtaccgagagcaatgattcagactctaatttggaagaaatcggctcgctgaaagagaccgcagagcagactgaatcagaaagcgattccacggcctcaaaggtgtctaaacctaaagtaaagaaagcgaaaaagcctaaaaaggttcccgcagatgcctttgatgagaagtatgccaattccactgaaatcgagtatgacgaggagagcgataagtggctggccttcctgggcggggatcttatcaggagcttcaacacgccaaaggaagcctacattgagcggaagaagctcctgagacggaaagtcaaaaggccgaaacgtggtatgaacggcagatattccgagttcgagggaatcgacttcaacacacaggagggcctgtggacaagttcagtgaacgacattatcgtctgttacagcattactgaaaaagaggcgcataaaaaaagaaccatgttcgtggatttgattctggataagtttgatgtctcagaagaggaatttaccgaggatctcctggaagaaattaaaagcacgaatcttgaagacttatttgcggacctgagtgacgaggatctcaatgactcttcgaaccttagtctgaaggaggtgaaaaaggagctcaacaagttttga

SEQ ID NO: 3457 - DNA, 300 bp, synthetic construct
  source 1..300: mol_type = other DNA
atggaggagatacggaaggaactgatcaagtttcagatggaacgcgactggaaaaggtaccataccccagagaacttggccaaaagcatcagcattgaagctgccgaactcctggagcactttcagtggcaaaaggaatacgacaaggatgaggtggtagatgagctagcagatgtgttcaactactgcttcctcatggcggacgcactggacgttgacgtcaaagagatcgtcttcaataagatgaaaaagaacgccattaaatatccgcccaaggtgagttccgacgatcttaagtga

SEQ ID NO: 3458 - DNA, 774 bp, synthetic construct
  source 1..774: mol_type = other DNA
atggatgacttcctcagtaattttgttttaaaggaagaggaaacaagtctctcagactccaaaaaggatgtattgaagtttctcaagcagatcggtgtggacactcggtttgtgagcttctttgagaaagacaatgagaagcgcatctacatagagaatctgcgattctcaaggttctccagaaagcgcacgagcattttcaataacgaatatcccgatattgaagtggtccgtagctcccttttccagaagatttgccttcgggcgagcaagaccctgtcaaactccctggaccccaaggatagagtcatcatcccgaaaatggacaacgagtacaacgagctgttgtttattgttcttgagtcgtatagtcggaaatacggcataatcttcatcgaatacgacgaaaacgaaaacatcaacctcaaagactttaatgccattgtcagccccctgaacctaaatcaggaggtgaaccacatcctgaacgacatattcgatggaaagggaatcgagtgggacaggaaattcgatctgtcgagcctgtacgggttcaatgctagcgatatcaaagacaagaaaatcatatttccattcatcaatgtgcctcaagagtggatttatgacttcctgggcattgagaaggaatacgtgatcgattatgataacgatgacattggcgactcctttatggggttcctaagcgaaatcaacccacagtttaaggagaacgtgctggcagcctctagcttcctcgagacccatcagaaatga

SEQ ID NO: 3459 - DNA, 897 bp, synthetic construct
  source 1..897: mol_type = other DNA
atggtagatgggaaaacgaagatcctgggagttatcggagaccctatcgaacacactttctccccggctatgcagaacgccggacttgaggctcttaatttaaactacatttatctgccatttcacgtcaaaagcgataaccttaacagcgccattgagggggcaaagaccctgggaatcaggggactgaacgtaaccattccccataagcgagaagttatcacctgtctggacgaagtggacccaattgcgaacatgatcggtgctgtgaatacaatcaaattcgattacgatgagaatgagggcatctccaccaaaggctacaatacggacgcctatggctgcctgcgggccatcgaagagaaagcctcggtcaaagacaaaaaaataacaatagtgggtgctgggggcgcctcaagggccatcgcctttcagatggcaagctcagacatcggggagttgtccatcctgaaccgcaacttcaacaaggccgagtccctggcaaacgatattaagagtaacctgaagcaactcaacgataatttcaacttgaatatcaatgcgtacgatatggacagcctcaaaagagagatccaggaaagcgagattctcatagacacaactcctatcgggatgtatcccaacatcaacgacaagccaatagcaagtgcagatatgatgcacgacgacctgattgtgaatgacattgtctacactcccatggagaccagcctcattaaggaggctaagaaggccaacgctgaagtggtctacggctataagatgctactgtaccagggcattcgcagcttcgaaatatggctaggcgaagaagcccccgtgaaggagatggagaatgcgctcctcaaggtgtttcggcatttgaatggtttttga

SEQ ID NO: 3460 - DNA, 540 bp, synthetic construct
  source 1..540: mol_type = other DNA
atgaacctatgcatgacgaccctgcgcatgagtctggccgagaagagacagcacctcagcaagctctttttggaggtgctgaaggagcatagtggaaccatctcagtatatgacctcatgagcgtgactgccgagctcagggaagataccaaatatgtgcaggacaaataccgggaagagacaaacgctgtctatgtgaaatacttcctgggccggatcaagaacatacgagatgacaataaccagtacgatggcagcattgacaaggatgacttcatcgagtccgttgctaccttaaagtcctatcaggagggcgagtcaaaaacatcgaaaaccaagttcccccttatctacgcaattgtctccctgtacacaacttacattctggaagagcctatccacccagtgggaacgccgtttcccgggagcctgaaggtgactcagaaaaatggggtgttctactgtcccgttaaggaagcaaaccttgaatctccaaatgccgtctgcaagatgtgcatagcggaacaattggagttttga

SEQ ID NO: 3461 - DNA, 4620 bp, synthetic construct
  source 1..4620: mol_type = other DNA
gtgagtaaaacgaataaaaagaaactttttttatcgattctcatcattctcagcgtattgatatcgctgtcaagtgtgagtgctatcaacacaaacgacagctctatccaggacaatggggatttatccatccaagactcaattgacgagatttcccagtttgatgaatcagaacagctcaataaaatcaacaaggattccccagaatccaattttaatcaagaactgtctaacgactcgaaagacatatctgcagattccaaccaagacctcatggggtttgagaactatgacttcaaatacaataccaagagctcttactcaaatgccctaaaggactcaaatgtcataaacgtgacaggaagcacatttcaggatatccaggacgctattgaccgggcaaatgatggggacatcctctatctcaagtcctacaaattccacgggaatgggaccgccatcagcatcaataagcccctgaccatcatcggtagctacgaagccaacaacaagagccattatttagacgcatacctgaagtccagaatactctacatcgacagtgacgatgtcacactgatcaacattcactttgactacgggggcaatattgacaataacggcaatggcggggccatctacctggacgggacaaactgcgccattgtgaactgctccttcaaggggaatcatgcttggctggggggcgccattttccagtcaaacaattccaatgacctgtatgtgggtggctgcaagttcgtggagaacaacgcccaaatcggggcgggaattaccacatgcggcttcaactgcctggtgagcaattgcagctttgagaacaacagcgccgttaccgccggtgcaataatgacagacacgcagaagaacggggacatgactttcttccgcctcgaaaattccactttcatcaataacaacgccaccgggggcggcggggccatcaattttgacggctactaccagagcgtctataattgcaagttcattgataactatgccaaaaattctgggggcgccatctacggcagtttgaagccatttgacgtttccctctgccaattctataataactacgctaacaccggaggtgccatcagaggcactgcaaactataatgtgtcggactgccgattcatcaacaacagtgctcatcacgctggcgctgtgttccttcactcctacagtaatgtcattgatagttactttgaaaacaactatgccgaagcgaatggaggagccatctgtaccgactccaacacagtgggagttatcatcaagggctccacgctcataggcaataatgcaacgaccggcagtgccattatgatggttagtagtcggagcatcatcgagaactgtaatttcagcggcaatatcggcaaaagcgaaggcgccatttactcaatccacgactgtaacatctcccactgtatcttcgacagcaatcaggcagagaagggaggggccttctatatttatcggggcaacaacagcaatattgacaactgtcgcttcatcaacaactctgccaattcttccggaggggccatatactggtatgtcaacaagggtaagatttcaaactcttatttcgaggagaatcaggctcgatacgggtctgccatttattgcagcaatgtagaggcggattcgggatttataatcacagattgtgatttcattaataaccaccctaaagaggacggctctaacactaaggggggagcgatatacctgtacgatcagctgaagtgtatcatcgtggcaaactccacgtttgagtataactacgcctcgcgcggaggggccatctacgttgagggagacgtgaacctgatcgcaaactcaaccttcaagtataacaaggcagatattttctccctgtcggcttacaatgataacgccaaccttattgtcacattgaggggctatgagaactatatgaacgccatctatgccgagaaaactgtcgattttcacaatgtcacctattgggatggggaatttgtcaccggcgactatccgatcaaaagaaacctggaagctgggattaacatcatcctcgactgccgtggtaacggacatagcttaaacgtcactaagatgaccaatagcatgggcgaggttatttttgacgagatgcgcaccttgcccagcgggacttacgcatatcaggtctccgtgccagataacagctactacactgccaaaaagctgaagcctgacatattcaacgtcccctatctgtgtgaaaacatcctgggcattgatgtggcggacatctcttatgaccagtatccggtggtaaatatcaccgccaactataccggtaactacacagtgtacatcgccaatagcagctacgacgtcaccttcacggaccaggatgtggaacggggcagggtactgggatacaacatcacaatcaccgatgaggatgtggtgaaaggtgagaagctaatcgtaattccacatctttttgacatcaaggacggctacggggcttatgtgcaactgagggcgatcgaccaggagaacgtggagctcgtctacattcaaaacaggacctccttcaatgtctataaggcagctagtgccctggaggctgagggggcagtggctgtcaatggaagcgatatagaattgaattatatggctcagaacggcactgtgactatcgaatccattaaaaaggacggctctctgctggaaaatggtacagactacaacttcacagtaaatgatgacaagattatcatcacaggcctggatgcaggccactacattgctaatctgaccttgattgtcgacgattaccacaacagctcctccatagacgtttcaatcgatgttctgatcaagaccagcatcgacgtggccgactctatttccatcgccgagaccgagagctctctcattaacgcgaccctatcgcccgaggaggcaggtttgttgaattaccagagtgataatgagactgtggcggtcatcgacaacgacggcagaatcacgggcattttgaaaggaaatgcaactatcttcgttagttacgctggaaatgaggactattcgccttccaacgccactgtaaagataaacgtttaccctctagtggatctgaaaataaacaaaacggctaacgtgtctaaggcttttgtagataacatgattaagtttacagtctcggtggtcaacgacggtccttccaacgctagcggagtttacgtggatgagacactgagctccatccttgaccttatctccaactccagcacaaaggggagctatgatggaaacaaatggctggtgggcaacttgaataacggtgaaagtgccagcctcacgatagttgccaaaatcaaccgtgctggcataatcagcaatgatgtgactgtcaaggccaatgaggccgactccaatcagtccaataataactgttcaatctccatcgaaggtctgatgattgaaacggtactgacagttcccaatgtgacttcaagctataatatggacaagaatttcaccatcagcctcaaagatataaacggaaacccaattggcgatgcaaatataacggtggacttaaatggcaaaaagagttacataacagacagcaacggacagatcaagctttcaacgacaggcctcgctgtggatacccacgtgctgaacgtcacctttgcgggcaattacaagtacaacggttcaagctcttcaagcaagattgtgattatcaaggattcaagcaaactcaacgccaccgacattattagcacgtataacgatgacgattaccttattgtgagtctcactaactcccagaacaatcccatcgcaggggcgaatgtgtttgtggacctggctggtaaacgcaactacactaccgattccaacggccaaatcaaagtgtcgcttaagaatctcattccagacaactacaacgccagcatcgcatttggagggaacgaaaactacaccgaatccagcaccagtgcgatggtgaccgtgaaaagggccaagacctcattcaactacaccgatatgaatactgtcgcgttcgattcaaaactggagggccgggttggagaatactttaaattcaaactgctggataacaacggaaagcccattgccggacggcaggtgttcataggtttcaatggagtgaaatacaatagaacaaccaacgagaccggtgaggcccagctgcagataaaccttaagtacgccaaccattacacatttgcaatcgcattcctgggagatgactgctacagcgggtcattcaatgtggcgctgattagtgtgactgaacagactccggttctaactacaagtcctaagacctacaagagtagcgctaagacaaaggtgttgaccgctacactgaaatccagccgagagagtgcccttcccggcaaaaaggtcactttcaccatcaacgggaaggtgtattctgccaacacgaatgaggatggtattgctactgtaaaggtcagcctaagcaagaaaggaacctatagttttacagtgcagtttggcggagacagcacctacaagaagattaccaagagctcaaaactgacgatcaaatga

SEQ ID NO: 3462 - DNA, 5061 bp, synthetic construct
  source 1..5061: mol_type = other DNA
atggataaaaaggtgagtaaaacgaataaaaagaaactgctcctgtctattctcatccttttcagcatcctggtaagcctgagcagcgtttcagctgcaagtgatctgatccaagactatgaggatttgacgatccaaaatagctacgacgatctcatcattcaggactcgttcaacgaagacttgatccaagattcttctaacacagagctgaagacccaggactcatcgatcgacaatctcaaagagactatcaaccagacagagagcattgatgacacattgactaaccaagatctgtcaagcctccaggactcttcaaaggagaatataaaggattccaacctgaagagctcaagactggggaaatccataaccgtgaagggaaatacatttcagtccatccaaagcgcgatcgacggtgctgaagctggagacaccattattctaagcgagaacatgtttaagggggataactattacggccttggcgagcagatctatatcaataagtccctgaccataatgggcagttctcagttcggcagccagtatataattttaaacgcactccatagttcccgtatcttcaatatcaccgcagataacgtgacaattagcaacattcagttcaccaacggctacgtcgtaggtgaacccggaggagctatctactggtttggaaacaatgggaagattatcaattcttacttctcattgaactgcgccaattcctctatggaatgggacattgaaggaggggcgatttacttcgggctgaagttcaaaaatcagtacattgaaaattgtctgttcaaatacaattctgcctatgatggcggagcactgtacacctgctcgcagaataccaccatctcaaaatgtacgtttgactccaacttcgggatctcgaataatgctggtggcatggccaacggtgcggctctcagtttttccgctaaagacgtgtacgtgattgattccacgttcctgaataacgatgctccagaaggatgggggggggccgtgtatatctataaacacgggtatgaaccctatttctttaattgctcctttaagaacaactctgcagctttcgggggggccatatgttggcttactgatggcgggacattcctgaattgcacttttgagaacaaccacgcaaccggcggtgacgctattccccatggtggtgctatctataaaatcgggcgcaatggaggcaacattataaattccaccttcacacgaaattatgcaacgaccggcagtgccatctacctcaacgcttacctgaacatcgacaactgcactttcacggataaccaggctgatagtgaaggtgccatctacataattactgacaatgttacgatacgcaactgtctgtttgacaagaactacgcatataactacggcgcggccattttttcttgggaccatgacaatatcaaagtggaaaattccagattcatcgaaaaccacgctcgcaatgaaggtggcgccatctacttcctcggaaagaattgtcagatttacggctgcctattcgagggcaacagggtgagcaatttttactcgttcgggggtgccgtcttcatggaaatcagtggtgaggatacttccatcctcgattgcagcttcaagaataactctgctctgtataagggcggagccctatacatttcttatggcagctcggagaagattgccattataaattccagttttgaggacaacagcgccagtaatgggggtgccatccaggcggactggaatctgagcctgatcgccaactcaagttttgaggataattctgccagttacggaggggccatccaggtgtttgggagtgtggaccttatcgccaactccagctttgaggataattcagcaagttatggaggtgcgatacatgtgtttcggagcattggcctgattgccaattccacctttaagaacaattacgccaacagtttagagattaaccaatccaaagagtcctacgggcgggtgtttacctttaagggcaaggaaaactatattaacgctatctacacggaagactacagtctgaacttcgagaatgtgacctattgggacgggtcatttgtcaccagcggcagccccatcaagagtgactgtgaggcaggcattaagatccgaatagtcctgcgccaaggcgtgtcggcgggtcctgtggttttaaacatcacaaaaataaccaacatcaagggggaagtggtgtttaacgagtacaacgggctttctcccggaatctattattacgaggcctatcaccctaaagacagctattactcagagtcagagaagctcagcggcatgatcactgtccctaaaaaagccactgacaacacccttgctatctcgctcgacgactcaatctacggggaagaccttaaggtgaatgtcaatacggacgtctctggagagtacaggatctatattgccaattccaactatgatgcgatattcaccgatgacgacgtcgcaaagggcaacgtcctggcctacgatatcacagtaaacgagaatgagctcaagggaaataaatggacaatcctcaaaaactctctgaatgtgaagaacggatatggcgcatacatccagtttgcagacctggaggacggcgagaactacattaacatccacaacaggacctccttcaacgtctacaaggccgaatccagcatagatgcaaatgaaaccattgccattgagggggacggcgctgaggtaaactacaccattgaaaacgggacggctagcatagacaacatcagacggggctctgccatcctggaggaaggcacggactataactttaccgtcacgccagataagataatcatcactggcttggatatgggcaattatactgtgaaactgaaaaccatcgtggattccaactacaacccttcaaccaaagaagtcttcatttgcatcctcgggcgaacagccattgacgtgcaggagtccgtggccattgagaaggataagagctacctgttaagtccaaccctcattcctgaggacgcagggaccctacgttacatcagcaatgatgaaagcatagtgaaggtggactctaaaggcaatctcactgccatatctgagggcaacacaaccattatggtcctctttgatggcaacgatatctacgccccctccaatgctacagtgaaggtctctgtctattcaggaagcatgcccacatcaatcaaagtcaacaagtcatttgaactgtacatggatgaatccatcgatatgggtgcagtgcttgacccggcaaatgcaggaaacctgacttacaaaagcagcaacgaaaagatcgtgaaggttgacaattatggaaagataacgggacttggccaaggcaaagccaatataactgttagcttcagtggaaacgagaagtttctggccagcaacgctaccgctttggttacagtttacccgctggtggatttaaaaatcgctaaaagtgccaacgtatctggtgaggtctatatcggggacaagatcaaatttgtcatcactgtctccaacaacggcccctccaacgcaactggggtgtatgtaaatgaggcgcttaactcgaacttggtgttggcttccaattccacaacaaaaggcaattacgatggaagcaagtggactattggcaatctcaacaagggagaaacagttaacctaaccattatcgcgaacgtaaaatcggtgggtaacattgacaacaaggttattgccaactccacagaacgcgactccaattacacaaacaatatcgccagcatcagcacaatcaaggcactccccatcgtggatttgtccatcaatgtgacgtcgaacaaaaaatcactgaacgtgggagatacattcacttatacaattaatcttattaacctgggtccttcaaaggctacaaacattatcgtggatgagttactgagtcagttcattgagctggtcaatgtcaatctgagcattgggaactacgacaactccaccagcgtctggtctgttgaccagcttgatccgaatagtccagtgagcttaaatctgactgttaaggccatccgggccggcaagattgagaacagtgtcactgcctattccaatgagaaggactccaacgagtccaacaacaacttcacactgtctatcaactgcgtgaagattaatacgcagttgactgctaataacattacgaccagctataaccttaataaagacttgatcattggactgaacgacagcaagggcaatccactgagtggttttatcgtgagcgttgacctcaatggcaagaagaactacacaaccgattccaatgggcagataaagattcccaccaagtctctgattccagacacctataatgccacaatcagattcgaaggaaatgagaagtactactcctctcacgcgagtgcaatcatcgtggtcaaaagggcaagcacatcattgaactacacaaacatgaacaccgtggccttcgactcaaacatagaggggcgggttggcgaatacttccagttccagctgctggacaacgatggcaagccaatcgccggaaaacaggtattcatagggttcaatggagtgaagtacaatagaacaaccaaccagacaggtgaggctaggctccagatcaacctcaagtacgccaaccactacaccttcgcaatcgccttcctcggagacaacaactacagcggggatttccaggtagcgctgatcaatgtgacggagcagactcctgttctaactaccagtccgaagacctacaaatccacggccaagaccaaggccttgactgccactctgaaatcttcacggggccaagccctggcgggcaaaaaaatcaccttcaccctgaatgggaaggtgtacagcggaaacaccaactcggacggcatcgcgactgttaacgtgagccttagcaagaagggcacctatagctttaccgcccagtatggaggcgacagcacctataagaaggtgactaaatcctcaaagctaaccataaaatga

SEQ ID NO: 3463 - DNA, 1302 bp, synthetic construct
  source 1..1302: mol_type = other DNA
atggagtttgaaagaccacgcgggactagagacttcctctttgaggaaatgcgagagcgaaagatggctgaagatactctgcggaatgtctttgaaaattacggtttcggcgaagtgcagacacctctttttgaggacctgaaactgttcactacgaaatccggggaggagattgtcgatcaactgtacaacttcaaggacaagggcgatagggatctggcccttaggccggagatcaccgcccctattgcgcggctctacctgaacgagctccagaagaccagtaagcccatcaagatctactattatggaagctgcttccggtatgaaaggccccaaaagggcagattccgccagttctggcagttcgggtgcgagctgattggggcaaagacgcctgagggtgaggctgaagtcattgcgatgtgtaacaatgccatcgaagagctcggtataactaccgccgaatttaacgtgaaccacctcggaatcatccgcgggctctttgcccatttcgacattgacacagccacccaaagggagattatggtggtgatcgataagggggacaaggatctattgaaggactccctggttggcgagaacccaatcataaaggataagccagagctgaatgaggtgctgttcaaactgatggacatggtgggggattcatcgatcataaaagacatagaagagcttgtcgctccctacgaggagacccaggaggcactggaagagtttaaagagctcgtaaaaaccctggaaagcttccaggtgttcaactacaaattgaaccttggcgtcgccagaggcctcgactactatacaggtatcgtatttgaggtgtatgtggaaggactgggcgcacagaagcaggtctgcggcggaggtacctacaatctagtcaagctattcggcggggaggatgtggtttccaccggatttgcactgggatttgaccggctgatgaacgccattgaagagcttaatggcaaagttgaattggaaccgattgtgaacacttacgttgctgcaatctcagacagtacacgacacaatgctttcagcatcgcccaggatctgcggaaggccaacattcccaccgaagtggacctcagccgcaagaaattcaaaaagatcctggcttatgcgaataagatagatgtgaaatacacagtgctggtaggcgaacgtgacttggaggaaggaaaggttacaatcaaggacatgttaacgggagagcaggagttggtcgccatcgatgaggtggtggactacatcaaaggcaaattatattga

SEQ ID NO: 3464 - DNA, 414 bp, synthetic construct
  source 1..414: mol_type = other DNA
atggagctgaacttccggctgaacatggggggagaggacctagtcattgcggtggcccaggactacgaaacaaacgatgtgctcatggtagctttcatgaacaaggaagctgtggaacaaacactgaagaccaaaaaggcccactactactccaccagccgccagaaacaatggctgaagggcgaaagctccggcaatgtgcagactgttaaggagatgtatattgactgcgatgcagacgccatcatcatgaaagtcgaccagatcggggccgcatgccatgagggctacaggtcgtgtttctttagacagttggacattgataaggagaatatagacctggacagtcttacggatgaggatatcagcataatctcagaacgactctttgatcccaaagagatgtatggatga

SEQ ID NO: 3465 - DNA, 2163 bp, synthetic construct
  source 1..2163: mol_type = other DNA
atggattttaacgactatgactatgactcggagtacaacaatgacgaagaagaatacaatgatgaaattaaaagaattgtgccagatactagtgcaatcattgagggcaatgtagaaaagatcataaaggaaaaggggctgaactaccccgagataataattccagaagctgtcattgccgaactcgagcaccaggccaacaaccagcgccctacaggactacggggtttggagaacctcaagaaactccaggaaatggccgagattggagagctgtcaattcggatcaccggccgtcgcccgacaaagtttgagaaggacaacgccaagcttggcgagatcgacggtctgatccgggatgtggccaaagacgaattggctctactcattacaagcgacaagatccaggccaagacagccgaggcccagggcatccccgtcatctactatgctcaagagtacaaaggctcaatcgacctgaagatagccaaattcttcgacgaggagacgatgagcgtccatctgaaggagaacgtgccccctatggctaaaaaagggaagcctggccatatcaagcttgtgaagctcgcagacgaaaagttcaccttcaagcagctggagtttatcgctgaggagatcctggagaaggagaggtacgaccctaagacctatcttgaagtggaccgccagggagcgattgttgttcagtcacgggacctccggataagtattgctaggcccccatttgcagaggccctggagatcactgccgtgcggcccgttgcggaggtgtcccttgatgagtaccacctctccagccagctgatcgacagactcacgaacagtgcacgtggaatactcatttcagggtcgccaggagcaggtaaaagtacgtttgcccaggcaatcgccaaattctacgacgaggacttgaataaggtagtgaagaccatggaatctccccgcgacttacaggtggcggatacaatcacccaatatgccccgctcgagggggatatggaaaagactgctgacatcctgctgctggtgaggcccgactttactatctacgatgagctgaggaaaaaccacgacttcagcatatttgcagacatgaggctcgcaggagtggggatgatcggtgtggtccacgcgactaaacctattgatgcaatctccaggatagccaaccgcgtggacctggggacaattccgagtattgtggatacaacgatctacatcgagaacggggagatatctgccatctacgaaaacaagttaacagtgaaggtgccaactggaatggaagagcgagacctggctcgacccgtgattgaggtccgggactttgagaccggcacccttgtaaacgagatctacacctacggggagcagaccatcgttatggacatcggcatggttgaggagtctaaaaaggccaaagataaggaggaaaagacccccgtccaaatcatcgccgagcgagagatcctacggactatgaaaagaatagtccctaaggctgcaatggaagtgagcatggaaaatgacagaagggtgaatatctacatgagtgaaaagtacattccgaaagtcattggtaagggcggcaaaagaattgccgagctggaagaggacattgggatcagcatgaacattgaacctctggacaaggctcccgacagcttcagcgagcgcttatccaaaagatccaagaaaaagaagtctaaaaaggagaaaaagaaaaaatccaaaaaatcagggttgaaggaatacaatggagtagaggatggcgaattgtctgaagatggtttgaaggactacaacaaggataattacttcgacttcaccgacgataatgaggattattatgaggattatgaagattacgatgattcggacatcctggaagatgattatgaagagcttttctatgacacctttgaggtcttcccaaaagttagaaagagccgtgtggaactgccaatcggcaaaaagtatgtgggcaaatcctttgacatcttcattgaagatgagttcctgttcaatgcgaccgttagcaaaaagggaaatgtcaaggtacacaggaagctgaagtcctatggcaagatcgtctccgccctggatgcgggagatcgaatcattgctaaggtgcgcaaatga

SEQ ID NO: 3466 - DNA, 768 bp, synthetic construct
  source 1..768: mol_type = other DNA
atgaaactgggtgcgtcaattttccctcggaagattattccaatcgaaaaatccctggattattttgaaagcaaccgctacatcgagtacatggagatatttcacgactacccaaacagggacattgatgttgaaaaggacctcattgacaagttcaacagttacgatctaaagtacacagtgcacgcccccttcatcgaggtgaaccccgctagcgtgaaccctgcccttgccaaggcatccgtagatgagatcaaaagaagtgttgacctggcaaacttgctggattccgacattgtcgtgatccatcccggacgagccatatttacaaatgatatggaatatatggcctctgtctacagaatcgctgaggagaacctcaaggtgatcggagaatacgccaaggacaatggggtgatgacctgtatcgagaacttgccccgtctcagggggttcatgtatcaggacattaaccagctgaatgagaccctagagcggacgggtctcccaatgacccttgacatcggccacgcatacactgcgggcttcgatgtggatgatgtctcgttcgattgcataagccacatccacatccatgacaatgacggcatccgggacagccatctcccgttaggggaagggatcattgacttcaaacgcttctttgaaatctttgacaaatatgatggaatctataattttgagctgggctcaaaggagtatatagagaagagcatagactacctgaaaggcctgaagctgatttga

SEQ ID NO: 3467 - DNA, 774 bp, synthetic construct
  source 1..774: mol_type = other DNA
atgaagataggagcttcaatgctcgcaacagaagacaagacaatgaaagaatcccttgactacttcgatagcaacaaatacatcgaatatgtagaaatactgcatgactacccctatagagagctgaacgacgataaggagctgattgacttgatcaactcatatgacctcaaatataccatccacagcccattcattgacctgaatatcgcttccctgaacagcgcgcttgccaagctcagtgttgaagagatcaaaaggtcgattgaccttgctaatatgatagacagcgatatcgtggtcgcccatcccggctttgtgtcctttaacgggcggggcaaggaggatataatctacgagatcggacgcgaggggctagtggagattggagattacgccaaggacaatggcgtcaacgcctgcatcgagaacctgccaaagattgaagggttcatgtaccaggatgtgaaccaactgaatgatacactggtggaattggagctccccatgaccctcgatattggtcacgcccacactgcgggcttcagtccggacgagatttactttgactctgttaaacacatccatgtccatgataatcctggtgacgatgatacccacctagcactgggcgatgggacttttgacgtgaatggcttctttgacgtgttcaccaagaatgggtatgacggcatctacatgttagagttgaaccacatcgatttcattcagaaaacgctggactacatgaagaacctcggactgatcgactga

SEQ ID NO: 3468 - DNA, 1302 bp, synthetic construct
  source 1..1302: mol_type = other DNA
atgtggaatgaagaaatagaaactatgccccgggaggacatttacgagctgcaattgaagaagctgcagagcactgtgaaacgggcctttgacaagataccctactacaataaaaagtatagtgaagctaacgtgttccctgaggacatcgagactttagaggatatcgagaagctcccattcctaaccaaagatgatctccgcgcctgttacccctttggaatgtttgccgtggataaaaaggaaatcattgaagtccactcctcctccgggactacgggcaagcccgtagtcagcgggtacacgcaaaatgacatagacaactggggggagattgtggcccgcgggcttaccatgatgggcctggacagtgacgacatcatccagaacacccacggctacggcttgtttaccggagggttcggcgttcactacggggcccatagactcggggcaaccatcattcctatctcgaccggccagacacggagacaggtggagatcatggctgatttcggcaccacttgcctgattttcacaccatcctatgggatctatcttggagaggtggcaaaggaggagggcatagattttgacaagctcggcctgaaggccatcggctttggagcggaaatgtggactgctgagatgagagatcgcatcgaggagacattcaagaccaaggcatataacatctacgggctaaccgaactcatgggtccgggagtcggtatcgaatgttctgcgcaaaacggactgcacattgctgaggatttcttctatccggagatcatcaaccctaaaaccggagagaccctggccgagggcaaacatggcgaattggttctgacgaacctggaaagggaaagcatgcccattataagattccgcacaaaggacctgacagctcttcactatgacacctgcaaatgcggtaggacactggcacggatggaacgaatcacgggcaggtcagatgacatgatcaaggtcaaaggagtggccatcttcccatcacagatcgaaaaggccctcctgaaggtcagcaatattgagcctcattaccagatcatagtcacaaggccagacattatggatgaaattgagattaaggtggaggcttctgcctccctcttttcagatgacatcaaagagatgatggccgtaaaacgaaagattggagagtacatccagaatgagacgggtattgcagtgaacgtgagtctggtggcgcccaagagcattccacggagcacaaaaggtaaaatacagcgagttatcgacaagcgtaacttacactga

SEQ ID NO: 3469 - DNA, 435 bp, synthetic construct
  source 1..435: mol_type = other DNA
atgtacaaaatcacacaactgagcatattcctagagaaccgcagagggaaactctacaacacactgaatctgctggctaagaacgacatcaacatccgggcactgttcctggccgacacgaccgaatttggcatcctcaggcttgtggttcaggaccccataaaggcgaaggatattctggaagagaacgaccatatagtcaagatgaccccgatcatcggcgcagagctcgatgacactccagggggactgagcaccgtcttgaaaattatcaaggacgaagagatcgatctcgaatatctgtacgctttcacccacgagaaaactgagaaggccattcttcttttgcaggccgatgatctagacaatttgattggtattctcacagcctataaggtgcctttagtgcccgccgaagaggtatacaatctgtga

SEQ ID NO: 3470 - DNA, 951 bp, synthetic construct
  source 1..951: mol_type = other DNA
atggtcaaagtatgtatcattggagttaccggcgtgatcgggaagaatgtcgcgtttaaattggcacgggccgacactgtagacgaaatcgtgttcttcacaagggagaaaagcctatccaaagctaaaggagagatatacgacatgtatgacgcactggcggccgaggatatcgactgcaagctcactccaacgtcagattacaaggatatggctggcagccagattatcctgatcacagccggggccccaagaaaggagggaatggaaaggtccgacctggcacacaccaatgctcagattgtctataactacgcaaagcagatagcaatccacgcccccgattcaatcattctcatcgctaccaatcccgtggacgtgatgacagctgtggctctggaagcctcgggcttcaacaagaaacgtgtcatcggcctcggaaaccacctcgattccttaagactgaagacgtacttcgctcggcgcctggacattaacagcagtgaggtgcacacaagggtggtgggcgagcacggggagcgcatggtgcctctgttgagctctaccacaatagggggtattccactcaagtactttatcaaggatgtgaagctagacctccccgacattgtgaagacccttcgaaatgccggaaacacgatcatttccaagaagggggcaaccgagtacggccctgcctatgccatcagtaacttgatcaccaccatcattacaaacatccataagatactgactgtaagcatgtaccttgaaggtgagatcgccgatgtggaaggcgtctgcctgggtgtgccggttgtcctgtctaaaaaaggcgccgccatgattgttcccattcatatgaacgactatgaggtgaataagtttcaaatagcggcgaatcatgtccgggaactgactaacgaggttcttgagcgcctggaaaaatga

SEQ ID NO: 3471 - DNA, 2505 bp, synthetic construct
  source 1..2505: mol_type = other DNA
atgtacaaagatgcgattttagtccggggagctaaagtacacaacctaaagaacatcgacgtggacattcccctgggaaagatcgtggctattgctggcgtctccggaagcggaaagtcttccctagccctgggagtgctgtatgccgagggctccagacgctaccttgaggccctatccacatacacacgccgaaggatcacccaatctgagaaggccaatgtggaatctgtccagtatgtgccggccgctctcgcactgcatcagagacctaatgttcccaatatccgaagcaccttcgggacttccaccgagctcctgaactccttacgactgctatactctcgctgtggcagctatatctgtccaaatggacatatcctcaagccttcattgaacgttgcacgggagattgagctggaatgcgatgtctgtggcgagcgcttctacgggcttggcgctgaggaatatgccttcaacagtgacggggcatgtcccaattgtagcggaactggaatagaacgtgtcattgacgactccacactcgtgcccaatgaaaacaagaccctcgaggaaggggcggttgaatcatggaacatgtttggtatcaactggatgtaccatgtggctggagagcttggcgtgcgggtggatgtgccctttaaagatctgagcgataaggagaaggaaatcgtgtacaagggtccctctgtaaagagatacattaacattccatctaagaacggaaagctattcgagctcaacgcagaatacagaaacgcccacagggccgtggaggaggccctgaagaacgccaagactgaaaaagggcttacgcgtatcaacaaatacctcaagatcagggagtgcagccagtgccatggcacccgcctcaacaaacgtgccaacagcactcttttagggggtatcaacattagccaagcctgtcagatgactctagaagatatcgtcaaatggattccaaatgtcatcaacaatctgccaaaggaaatgcaggatatggcaaacaacattgcagaggagttcatggacaacgccaagatcctccttgacttggggctcagctacatctcactggataggccaagcaataccctgtccacgggggagctgcagagggtgcagcttgcccgaaccctccgcaaccctaccacaggggtgctctacgtgctggacgagcctagcataggtctgcaccccgccaatgtggaaggcctgatcaaagtcatgaaccggctgatcgaggatggcaatagcatcatcctcgtggatcatgacgttcggatcttaaggatcgccgactacctgattgagctggggccgagtgcaggttcgaatgggggaaagatcattgctgaaggcaccatcgacgagataaataaaaacaaagaatcactgattagcggattcctctcgaacgaggaaaagattatcattaggaaaaagtcagacaagaactccatattcaaaaacggcagtattgacatttcaacgtgccagatccacaatgtcaagccgatggatattagttttcccaaaggcaagctcactgtcgtaagcggggtttcgggcagcggcaagaccaccttgctcctggaatcgctgtatccagcggttaaatcattgatcaacgacgaaaatatccctaacaatataaaatccatcgacgccaagaacattaataaaatcgagcttatcgatagcgttccaatcggcaagaacgtgagaagcacagtgagtacctatagtggcgtattggatgacctgcggaagatatttgccaaattggactcctctattgaacggaatctgaaggcatctgacttttcatacaataccggcagcctgagatgcccatcctgcaacggcaccgggacaatctctatggatgtccagttcctccctgatgtggagatcacttgcccggactgcaacggcctgcgctattcggacgaggctggtgaaatcatgctcggtcacctgtccattagtgatatcatggcactgactatcgatgaggccattgatgagctgtccaatattgaagacgagagtatcgaccctctgctgaaaagagcgataaataaactggctaaactgtccaatttgggccttggatacctcacaatcggtgagtcaacacccagtctgagcgggggggaagctcaaaggttaaagctggcgtctgagatcggcaaatcccagcggaatagtatattcatctttgatgagccctccataggtctgcaccccttggacgtgaaggtattgcttaacgtgttccagacactgatagacgacggcgccaccatcatcgtgatcgagcacgacctcgacatcattgcaaacgccgactatataattgatattggaatagacgacaagcacatggggggagagatactggcgaagggcacgttggaagatattcttaactctaaggatagtctgacggctaattatctgaatgagattaacttgtga

SEQ ID NO: 3472 - DNA, 498 bp, synthetic construct
  source 1..498: mol_type = other DNA
atggtaaatgagaagatggaggcagccctgaatgcccagctgaacgcagaggtgtacagtggatacctctatttatccatggctgcttactttgaagatgttgatcttgcaggctttgccaactggatgagggtgcaggcagccgaggagttggaacacggaatgaagttctatgactatctcatacgcagaggcgcaagcgtgacccttacagctattgacgccccacagacggagtgggaaagccccctggccgccttcgaacacgtcctcgagcacgagaagatggtgactggtctgatcaacgatctagtggacctggcgatcgaagaaaaagaccatgctaccaacaacttcctgcaatggttcgtcgaagagcaggtcgaggaagaggaaaacgccatggagaatctggctaagctcaaactggcgggcgatgacaactcactgttgtacaaactcaatgaggagtttgcggggcggggggccgccgagtga

SEQ ID NO: 3473 - DNA, 156 bp, synthetic construct
  source 1..156: mol_type = other DNA
atggtctttgtgtgtgacatctgcgggtatgagtacaatcccgaagctggcgaccccgataacggtatagagccgggaaccgccttcgcggacctccctgacgattggacatgcccactgtgcggcgccgagaaggcagatttcgtggaggaatga

SEQ ID NO: 3474 - DNA, 159 bp, synthetic construct
  source 1..159: mol_type = other DNA
atggctcagcaccgctgtactatctgcggctatgtctacgacagcgagacgggcgaagagagaagggacctggccgcgggaaccgaatgggaggatgtgcccgacgatttcacctgcccactctgcggggcagtgaagacaatgtttcgggcccagtga

SEQ ID NO: 3475 - DNA, 618 bp, synthetic construct
  source 1..618: mol_type = other DNA
atgatttccctgaagacaatagtaatcaacgcaggtcctaaaaaaagggggttcaatgcggagatggccaagtctgctctgaggggcgcccagagtgttggtgcggaagtggaatttatagacctgtaccgcctgaagtttacaggctgcctgagctgtctcatttgtatgagagatgactttgaaagctgcaaatgcttcctgcgggacgacctgagccccctaattgaccggatcttggatgcagattgccttctcattgctgccccaatcttctttagcaacccctcaagccactacatggcccttttggagcgactgatcttctgcatagtgtcaaacaagggagagaacctgttcaagggaaaggtcaacgtggggctaatctacacgttccactatgacaagggctattttgaagagtctgtccgcccgcatttcaagcacagtgaggacatcctcaagatgctcaatggagaggtggagatctactccgctgagtatgattccaagaaaacctactccaccagctttgatggcgaaattagttcggaagacgagtgtttcactctcaatttagaaaaaacctacgagatcggggccaaactgagcaactga

SEQ ID NO: 3476 - DNA, 411 bp, synthetic construct
  source 1..411: mol_type = other DNA
atgttcaagaatattctcgtggctagtgatggctcaaagtgcggggacaaggcagtggacatagcgattgatttggctagcaagtacgacgccagggtcgcggccctgtacatcatggacttcggcctggacctctcctatgacgatatggacgatgccggaggggccgtactggatgatatcacagccaaaggtaaagaaaaggacgtggttgtggtggagcacattatcaccgcagacccgattcaggatatggaaaccatgatccgcaagatcaacccagacatcgctatctttggagccttcgggaagagcacggacaaagaggacaaaatccggtacgataagataggcagagtcgcccttaacgcactgaaggtggctaaagttcccgtcctgctagtgaaatga

SEQ ID NO: 3477 - DNA, 1722 bp, synthetic construct
  source 1..1722: mol_type = other DNA
atgatcagtattaaaaacttgtccaaatcatataaattagagaatggggaagagctgcccgccttaaaaaacattaatctggaagtggaggatggcgagatcctcggaatcatcggaaccagcggctcgggaaagaccacacttctgcgaatactgcgcggggttgagaaatttgacgaaggggaatttaccatcggcagatacaccattaagccggactcctcccagttttactacaatcaagtcaagaaggaaactgccatccacttacagcgctcatttggtatttggcctgaaagcgtgctggacaacgtggtgcgaaaactgtacggggccaaatacggagacgagtctgggacggactttgaaatcgctcatgaccaatttgacaaggaggctatggagatcatcgagctggtaggcctggagcataaggctgatcatctcgcctcggtcctgagcggcggcgagaagcagcgccttatcatggcccgtcagttggctaaaaagcctgcggtcatgctactcgatgagcctgccacgatggcatgtcccaagacaaagcaggaaatactggatgctatcaagaaaatcaacgatgaacttggcataaccgtaattctcgtgagccacctgcccgagatccacaagttcctcgctgacagggtggtcctgatggaggacggtgagatagtcaaagacggagatgtcaacgaagtggtggatgagttcctgaaggacattgaggaacctgtggacatagacatcgaatccactgacgaaaccataattaaagcaatcgatattgacaaaaggttctatttgctgaagggcaaaaacgtgctccatatgaaagacgtcaacctggaagtcaaccggggaaatgtgctctctctcgttggcccaagcggtgccggcaagacagttctgctgcggatgctcgggggtctcgactatcccgatagtggcgatgtgctcttcaagctggtcaataaggaggatggagaggaagagatccggtgggtgaacattgagaatgcaagccttgacaggatggaaatcagacgcaacctcggcttcatgcaccaggaatttgctctgatgtattacgccacaatccagagtcagctggcggtcaagctagggtacaaacggtgggatatggtagaggaggccaaaaagagagcgaaggaaaatggccttccagatatcttgttggacgcactgtaccagttgacagaccttcccgagcgcgaggcgaaggcacgtcttgagcagattggtctggacccaactatactggatgaattattccccaaattccccgagactcagatcaaggaggaggttaaggacttgtttgaagcccttgacctgccgctcgatatcctgccaagaaggagctatgagctcagtggcggtcagaaggtacgagccatgctcgcactggttttggtgtcaaagccagatattctcctgctagacgaaccgttcggggacctggaccctaagaccctgcggatcgtggccaactccctgaagagaatctgcaaagagtttggaacaaccctggtgatggtttcccacaatacggacttcattaaggagctaagcaacagggccgtgttcattgaccaagggcacctaaaagacgatagcgaggatgtggataagcttgtggatgacttcattggattctgcaaggccgattacctgatgtga

SEQ ID NO: 3478 - DNA, 2586 bp, synthetic construct
  source 1..2586: mol_type = other DNA
atgaatattaacctcaaaaaaatcaccttcctgtgtctggttctcgttctcatcgggttgatcagttttaactccatcagcgctaatgacttaggcactgtcctggaggacaatgacaataacggcttgaatgacctgaacaatgacgattttatcaattcagacgtgaacagtgatagtatcaataaggaagccatttctaatttgaaaagtttaaatagtcaggatgaatctaccagctccgattctaataactctgcgagttctaactctaatagctccgttgcttctagctctaatagtagcgccagttccaattcggcgaatagcaacagttctactagttccaattccgccaatagcaacagttctgtaagttctaacagcacgaactcgaatagttctgccagtagcaattcgactaactcgaacagttctgccagttctaactctactaatagcaatgcgaacaccaataactccagtagcgatgcatctaaaactcaaacgatcaaactgtcctcgcaggaggaaagtgccctgaacgagttcctcaatgccatcaaaacaactactaaaggcacaattgttctcaaaaacgatctagtgctgaatcagacgatctcactgaacaacaacattaccatcgatggtaggaatcactccatcagctccctcgatgtgaccaacatgtttaagacctttgcaaagatcacccttaaaaacattgtctttacaaactaccatgaaatagagaatctgcgggcaatacttaactccggagaattgacggtcctcaattgccagttcaacggattttcatatctgaccaacggctcagccatctataacagcaaaaagctgaccgttcaggggactaagttcaacaacaattatgtcaataacagcggcggggccatctatagcacagggaccctgactataaacaattcctcattcaacaaaaaccacgctggcaaaaatgggggcgccatctattccactctcaacctaatcctcaaccagtcggtctttagcaataactccgctaatgaaagcggaggcgctctctactcaaaaggcagcggacttaatatcaaatattcccgatttaacaataactcggcttcactcaatggtggtgcgctctacagctcctccaacagtacggtgatttcctactcaaacttcgtgagcaactttgtggaggcctatgacaaagcgagcaacggaggggcggcatttatctactatggatctaaaattgcctactcaaacttcacctctaaccactgcaaaacaacgcttaccaacagctctcagaagaagtccattcagtcaatggggggagctctgttctactacggtggaaatcataccctgagcttctccaattttaacaagaactcggtagagaacgacggcggggctgtgcgcatcgccaagaacgtggggaaatttacattgaacaaatgtaatttcacaaacaacaacgcctcctatgaggatgggggcgccatttccttagcaacccccaacatcacaatctccaactccattttcaagaataactttgccaatgaggacggaggagctattgacaccttcagtctaggaagctacaaggtaaacgtgttgattaagaactgcctattcaattcaaacaccgcattcaaggctgcaggtgccatatacctgggagtgaacactgtccaatccatcgtgaactcgaacttcacaagtaataaggcaaccgttgcaggtgcattctacatagaatccatttcagtgagcattagcaattgcatcttctcatccaataaggcggacaacgtgtccaagaagacaatatacaacaagcaaggcaaggtcgtctcccattcaggaggggctgtattcgtgaagaatggcagcaccgtcaccattaaaaacagccttttcaagagcaacaaggccacctcaggtggggccatcaccaatcacggcaagatggtcattgacaagtgcaacttcacaagcaattctgccaccaatgggggggctttatacggcgggggtaagacaagcacaatacgcaattccatcttctacaagaatagcgccacaaaaactggcggcgccctgttcatcaacgagggcaacgtcaatatgaaaagcagcatgatcgtgtcaaacactgccaaatcctactctgtgtacagcaccgtgtcaatcacactgaacaacaactggtggggcaacacactgagcattaaggacaagtccccaaagacgctgggcctgaccaatgttaaagtgagcacttggctgcacctgaaaataagggctaagaccactaagcttgctaaaggtaagaccacaacactgaccattgacctgagatataacaataacgataagctcgtgtcaactgcctttaacaatccgctgacgctgacggtgtccgagggcacgctgtcgagcaagaaggtgaatcttaagaacggcaaggccaccgtgaagtttaaaaagaccaactctaagactgcagtagtgaaggtcaagctcttgggaaaaacagcacggtgtaccatcaagacgaagtga

SEQ ID NO: 3479 - DNA, 1056 bp, synthetic construct
  source 1..1056: mol_type = other DNA
atgggcatgaagaatctgattttaagtaagagcgatcagttcaaccactacaaggacaaggccaatcagctcaaaaaggagaacaaggagctgaagcttaaaaacgaggaattggagtttaaaaacaatgagctgagtccggagctggaggagggaattagcctcatcattcccagctacaagggggagaaccatatccagcccctgttagagtccctggaaaagcaaaccatttcaaaagacctgttcgaggtaatcttcatcgtcaacggggaaatggattccacaatcgacattcttactgattttgcgaaatcgaaccctgacatgaacataataatttcttatacaagcgaagggggcgtgagtaatgcccgcaacattggaattaggatcgcaaaacgggaatatatcgggtttcttgacgatgacgacttcatctctgataactatctaaaagccctttacgaccacattgctcccaaccgggttgtgctctctaatttcatcgacatcgatgaggagaccggagaagagatcgggtctcgcctggtcccatactcgatgaacagggagggcatattcaatgatgtggttgtaaaactgacaaacctgtccatcatcaccacggccaagatcatccccgcactggccgtgaagggcacggacttcaacccaaatctcaacaacggcgtggacgtgtcctactatgcgaggctatacccaaagaatcattttgagttttattttgtgagtaaggaggaaggtgctgtctactaccggatacgcagaagcggttccatctcaagacaggaaacttcctatcagttcaatgtgctggaccgactgaaggtcatcgatgacatcaatgaaagctataaacaagttgataaaagcgacgagctctatgtccacttcctgaagatactctttgatgctcagacctacttcattggcttgtacttggatgaataccctcaggaccgagaaaaggtgattgaagaggtgagaaagcacaattttgaatacttctcatacgagaaactcgagggatga

SEQ ID NO: 3480 - DNA, 642 bp, synthetic construct
  source 1..642: mol_type = other DNA
atgtcgtttagtttagaaagcattgggatcaaggcgggcggcagatatgagaccatctacaccaccatgaacaaggctggtgaaatggacgcggccccgatcggattgaaatacattggagactacgatgtggccgctcggatattcgagggcagcaagacgctgaaaaacatccaggagacaggtatctttgtggtaaacattacaaatgacccttcagtctttgcccgctccctgtatgacaacctgaaggaagaggaatttgttaaggatgatgacatcgtgtacctcaaaaatgcagatgcttacttcatagccctggtcaaatccattgaagagatgaagcccgaacacgaccatgtgaacgaaggggcaaagaactacatcataaaggccgagccactgaagataatcatcaataggcagggggccaaggcactcaaccgaggactattcgcattccttgagagccttgtggactatactcgcgtggacatcatcgacgatgagaaaaaggaggagtataaaaagaggttcattgaaaatgagagagtcatccaacgggttgctgaggatgacgtgaaagagaatatggccattctgaaggaaaaaatgattgagaaaggcctggatctcgagtga

SEQ ID NO: 3481 - DNA, 1119 bp, synthetic construct
  source 1..1119: mol_type = other DNA
atgtataatgaaaacgtggccagcaagactaagaaaattttggatagcgcgcttgacgggccaatctccgttgaagatgggaattacctcatgaatctaaaggggtcagagatcttcccgctcctggctaccgcagatgcgatccgagagaaggtggttggtgataacgtgacattcatcaacaactgcaatatcaactttacaaatatctgtaaggtgcgctgtggattctgcgccttcggcaaagatgccgacgaccccgacgcgtaccacctaagcgacgaggaaatattgaagaaggctgagggtgcagtgaggaccggagcccgcgagtttacgctgatgggcggggtcctggaggatgccgacatcgaatactatgagcacctgctcaaactcctgaagagcgagtatcctgatattgagatccacggcttttccccaatgatgattaaagatgctgcactgaaatccgaaatgccgattgaggaagctttcaagatcctcaaaaaggcaggccttggaaccttgcccggtactgctgccgaaatactgaccgaccggtcaagagagatcatatgccccaagaaagtcacaacccaggagtggatagacattatcaaaacagcccataatgcggggatcacgggctctgccacaatgatgtacggccatattgaaaccatggaagaaagggtggagcacctggacatcctgcggaacatccaactggagaccggcggcttcaatgagttcattcccatgacattcatgcatgagtactcccccatattcctggagggccaggagaacctgggagccacgggcactcaggacctaaagctgtatgcagtgagccgactcatgtttcacgacattatcccaaacattcaggtcagctgggtaaagatgggattcagatttgcccaggtgtctcttctggctggggccaacgatttagggggaactctgggtggagacgaattgagtgaggcctctggggctccagacggtgtggatgcaagtatcaaagacctcagtcgccttgtaagggacttaggccgggtccctctcgagagaaactcggaatacaccgaattttaccctattgagctgtga

SEQ ID NO: 3482 - DNA, 537 bp, synthetic construct
  source 1..537: mol_type = other DNA
atgaagaggaaaaaccgtggcctgctgattggaaggatgcagcccgtacataacggccacattgaggtgataaaggagactctggaggaagtggatgagatcattatcggcattgggtcggctcagctgagccacgagctcaaagatccattcacggcaggggagcgggtgcttatgatgcgaaacgccctaatcgaggaagggattgacttgaacaagacctatatcatcccgatagaggacatcaaccgcaacaagctctgggtgtctcaggtcgagatggtcagcccccctttcaagaaggtctacagcggaaattccctcgttcaagtcctctttagtgaagagggatacgaagtaatcgcccccgaattattcgacagaaaggtgctgtccggcaccgaaattcggaaaagaatcttgatggatgaggactggcagtcacttgttccaaaggcgacagtggaaattatcgaagagataaatggtgtggaccgcatcaaacacctgaataaaaaggaaatcagtgagctgtga

SEQ ID NO: 3483 - DNA, 438 bp, synthetic construct
  source 1..438: mol_type = other DNA
atggtcattaagattgtggagaaagatgacgaatactttacaataggcgatctgatcgaggagattaaaaagtccgaccgcgtggacgaagcaggggccatctacagcttcgagggaattgtgcggggcgaagaagagaacctcaccgttgataagctcactctcacattacccgacaaggaaaaaggacttgaacagatagagagtatcgtcgaaaccgctaaggtaaagcatggggtctttgagatcagcgtgatccacttcattggtgagttctatacgggagatcagctgttcctggttgtagtgctgggcccacacaggggcgaaaccttggaggccctgaccgaggtggtggaaagagtcaagcacgagatcgactttaaaaaagaggagctatcaaatcaagggactaagatcatcatggcgggcggttga

SEQ ID NO: 3484 - DNA, 207 bp, synthetic construct
  source 1..207: mol_type = other DNA
atggcaatatcagcccggaacgggataaaaggaacggtcgagtccgtgaaactgggcaaggttatggccagcatcaagattaaagtggaggaccccgcgctcattaccgctgtcatcacaaaggaatctgcagaagacctggacctagctgtgggcgatgatgtaagtgccatcatcaagagcacccaggtgatggtggccaagtga

SEQ ID NO: 3485 - DNA, 207 bp, synthetic construct
  source 1..207: mol_type = other DNA
atggccatatccgccaggaacgggctgaagggaaaaatagaagatgtcaagctgggcgaagtaatggcaagcatcaaaatcgccgtggacgagcccgcagtgatcaccgctgtgattacgcgggaatcagctgaggagctatctctcgcggaaggcgacgaggtgagtgccgttattaagagcacagagatcatggtcgagaagtga

SEQ ID NO: 3486 - DNA, 207 bp, synthetic construct
  source 1..207: mol_type = other DNA
atggccatttcagcacggaacggaatcaagggcacagtcgagagtgtcaagctcggggaagttatggccagcataaagatcaaagtggaagaccccgctctgatcaccgccgcaattaccgccgagtccgccgaagaactagagctggctgtgggcgatgaggtgaaggcgatcattaaaagcacggagatcatggtagcgaaatga

SEQ ID NO: 3487 - DNA, 207 bp, synthetic construct
  source 1..207: mol_type = other DNA
atggcgatcagtgcgcggaacggactaaagggcaaaattgaagatgtgaagctgggggccgtaatggccagcatcaaaatcgcagtggacgagcccgccgttataacagccgtcattacgagggaatcagccgaagagctggctctcgctgaaggcgacgaggtcagcgcagtgataaagtccaccgagatcatggtggagaagtga

SEQ ID NO: 3488 - DNA, 207 bp, synthetic construct
  source 1..207: mol_type = other DNA
atggtcatctcagcccggaacggactcacaggcaaaatcgatagtataaagctgggcgaggtgatggccagcatcaaaatagccgtagacgaacccgctatcattaccgcgatcattaccaaggagagcgcagaggacctgggtctagctgagggggacaaagtgaaggcaattattaagtccacgaatatcatggtggaaaagtga

SEQ ID NO: 3489 - DNA, 1224 bp, synthetic construct
  source 1..1224: mol_type = other DNA
atgtctgccaataagaaattcatccgcgacagtatccacggcaacctccccctaaattcattcgaactggagattctcgactaccctcaactgcagcgccttagacgcgtgaagcagttaggcttcatctatctcatctacccaggagcgaatcactcccggttcgagcattcaatcggcacgatgcatcttgcatcgaagctggcagatcagctggagctgaacgatgacgacaaggacctggttcgcatcgccggccttctccacgatgcggggcatgggcctttctcccatgtatcggaagcggtgtttgatgttccccacgaggagctcactgccttcgtggtcaagaacacttccctggccgataagctctctgagaagttcaacacaagtgaaataatcgacatcatcaatggaaaaggtaaattgggaccgatcatctctggggagctggatatggatagaatggactatctaatcagagattcccactacacaggggtggcttatggcgtgattgataccgagcgaatcatcagcaatctgaagctcgagagggaactgattttggacataaaaggggtgcaagctgctgaggccgccctggttgcacgttatcttatgtacccaagcgtatatcagcaccacaccacgcggattgtcaatgcaatgtttaggagatgtctaaggcacatgattcatcaggacattttaaatcctaaagagatgtacaaatatgacgatgctgacatgatcagtatgtgccgaaactctgaaggcttcagtagggacattatggagcgcattgacaaccgtaggctcctgaaggtcgccaagtcaataccagtcaacagatttgagaaccctgacaagatatttaaaataagcaaggaagagctgctgaaggccgaagaggagatcagccaggacttcaatatagaccggaactacctcattatcaaccttccggagtatccccggttcgatgagatgaaaacctgggtgtcctttggagataaactctaccacttgaatgagatttcaagcattgtcggtgctctgagcagcgcccggttcaactccccagacatttgcttgtacgtgcccaaggaagacctggaaaagaccaaacggatcaagctggaaaactacctggacttgcccgaagaagtgcgaaggtacgatacaatccactttaaccagagcaaactgtttgattga

SEQ ID NO: 3490 - DNA, 555 bp, synthetic construct
  source 1..555: mol_type = other DNA
atgattattatcgctattaccggtgcaagcggggtgatctatggggtggagctcttaaaagccctgaagcagctcaagatcgagacaggcctgctgatcagcaaccctgccaagattgtgatcgaatacgagttggaagaatcagtagaggaaatcaaatcactggcagaccactactttgaatctgaggagatcgactcctccgtgaacagcgggtctttcaagttcgactcggctgtgatcattccctgctccatgaagacagtgagtgcgatcgccaacggctatgcctccaatagtattactcgcctcgcagatgttgccctgaaggagagacgcacccttgtgctggtcccaagggaaacgccgctgcgggatgtccaccttgaaaacatgctgcgaattagcaaggagggaggcatcatcctccccgcgatgccagccttctaccatgaccccaaagacataagcgacatgaccaatttcatagttggaaaagtcttggatgtcctaaagatagataatgacatgtttaaacggtgggagaaggagtga

SEQ ID NO: 3491 - DNA, 564 bp, synthetic construct
  source 1..564: mol_type = other DNA
atgataaaagacttcgacttcattaacacctgcgatatctctggattcattaaagaggagattcgcgcaattgccctctataagtcagatgtgagtaaagaggacattgtgctggacatcaactgtgggattggcgagatcagcaccgaattttccaagctgtccaaggaagtctactgcatcgatgaagacaacacggcgatcgagttttccaagacaaatatcgagaagcatggagatatcgataaggtcaaattcatcaaccaggaccccctatcggccatccgaagcatcatcgactttgacattgccatcataaaagcaaatgatgacaacattggtgagatcatagaagagattcacaacagaatcaattcaaagggccggataataatcttgacaaacatcctcgacttcgctctgatgagtgtaaataagctggatgaacttttatacaacccaaccattagccagatcgatgtgtctaaaggccaacagctcaacaagggggtgaagctgatcagcgacaatccgatgactatgatttacgttaaaaagaggtga

SEQ ID NO: 3492 - DNA, 732 bp, synthetic construct
  source 1..732: mol_type = other DNA
atgaacaatcagaacaagtactcttgtatagttctggctgggggcatgagccggcgaatgggtcaggataagggatcgatgatcatttacaacaaaccgatgattctgcacatccttgagcggctaaaccacaagataaacgatgctgtaattgtcctcaataatgccgagaggatcagtatctatagaaacctgctcaatcaatacgcagacaacgacatcgaagaaaacttcgattacgaattgagcttcattgaggatgaggtcaagtcaaaaggcccaatttccggggtcatgaccggactgaagaatatcaaaacagactatgcactcgtgctgccctgcgactctccattcatcagtggcgaatacatcgagagcatgtttgggatacttgacgaaaaccctctggccgacgccatcatcccttttcacattaagtccaataaggataagttcaaggacaatgaggagttcaacttcaaaaacgcggacgaaatgtccctggagatgaagatacagaacagtgagcccctgcattcaatctacaaaaaggacaacctgaataacatcaaatctctgctagatgatgacagcctctatgtgaagagctttatccgctcccttaaaagccccgtgttcattgaagtggataataaggtgttgtttgacgatgacttcaaaaatctcaacaaacaggaggacattgacaacttaaagtttaagaaatga

SEQ ID NO: 3493 - DNA, 699 bp, synthetic construct
  source 1..699: mol_type = other DNA
atggatattttaaataagtttgacatagtgccaaatgatatggaactgtacgagaccgcattcacacacagtagctacgcctccaagcaccatttgaacgactatgaaagactcgaatttctgggtgactctgttctcaacatgctcacctccgagtttcttcaaaacatgcaccctgatttcggtgaaggcaaattgactaagctgcgggctaattacgtgtgtcagaacgccttgattgtgtattcacatgagtttggactcgacaaatgcgtgaaactgaatctcgaggacaatgcactgaccgacaacgaggtcatctcgatcacagcagacgtcttcgagtcctttctgggagccatctacctagaccagggcatcagcaagtgcaaggagttcctgaccatcactgtattcccgtacattgagaacgagcagattttcttccacgactataagagtacgataaaagaatatggcgatgccatcgataaggaaatcacgtatgagctgattgaagagcatggggcgccccacgacaaaacatttgtgatgaaaatactgatcgatggcgttgatttcggccatggagtggggaagagcaagaaggaagctgagcaggtcgctgcctgcaacgccatcaagacccttaggctagatcacgggcaggacgtggcgtacatgcgcctgtacaaatga

SEQ ID NO: 3494 - DNA, 459 bp, synthetic construct
  source 1..459: mol_type = other DNA
atgctactgaattggtgcgaggagattacgaacatagacccgtccatcaactttcgcgcaactggagggtggctcaagaccgtgaccgggttagataaaagtgtcttgaatggctatagtctggtgggagagttcgttaaatcaggcgactataagcacgagtactccgatggactctacctggactgcaacaaggaggggaagaaaagcaagccaaagcaggacttcaggctcttccggctgaaaaacggcaagctgacactgatcgatcaggtatacgacggcaaaaagaattgggcctgtgaattttgggagagcgtgagcgaagagctgaaccccaacttccgagaatccgaagcggacaagattatcagccttattctggataaaacaggtaaagacaagaagctccttagagaggtgcaatcgcagttggatctggtcatctcagaaatctga

SEQ ID NO: 3495 - DNA, 513 bp, synthetic construct
  source 1..513: mol_type = other DNA
atgacaaaaagcctgatcctctatttttcaagggccggggaaaactacacaagccagggaataaagaacattgaaattgggaatacggaggtcatcgccaattatatcaaagagtttaccgaagcggatatgttcaagatggagcccctcaacgactaccccgaggactatatgcagtgcaccgaagtggctcagaaagagctgaacgatgacgcacggcctgagctgaaggagtacattgaagacatatccgagtacgatatgatctacctaggttttccaaattggtggaacactatgcccatgccggtgtggactcaattggaaaagcttgatttcgacggaaagaccatcaagccattcgtcacccacgaaggcagtggattcggcaagagcgagaaggacattaaaaacctgtgtcctggtgttaagctcgccaaaggcctgtccatccgcggctcgagtgtggaggactctaagaaaaaggtgaaacattgggtaaagaaagggtga

SEQ ID NO: 3496 - DNA, 186 bp, synthetic construct
  source 1..186: mol_type = other DNA
gtgaaaggcacgccctcaatggggaagaagaataaaaagacccatatcagatgcaggagatgcggtaaaaacagctatcacgtccggaagaaagtatgtgcctcctgcggcttcggacggtcgagccgactccgcagttacagctggcagaacaagaagtccacaacccgccagaggctggtgtga

SEQ ID NO: 3497 - DNA, 234 bp, synthetic construct
  source 1..234: mol_type = other DNA
atgagtggacagcaaaatgtccagagaccgcttgacgccttagggaaggcagtgaactccccagttctaatcaaactcaagggggaacgggagttcaggggcatcttgaagagctttgacctgcacatgaacctggtactggatgatgcggaggagctcgaaaaaggcgaggtcctgcggcgactgggcaccgtgctcattcgcggagacaacatagtgtacatcagcccctga

SEQ ID NO: 3498 - DNA, 705 bp, synthetic construct
  source 1..705: mol_type = other DNA
atggtggagctgcgagtgaatgctggaaacgtaaagaatcccaatgtgcacaaaattggcatcattgcccttggatcacacctcgaaaaccacggtccagcgctgccgatcgacacggacgctaaaatagcttcgcacattgccttccaagcaagcctagaaagcggggccaagtttctcggcgtgatctacccagcgcatgagctaaaggaaattaaccacggcatacacgtcagtttagaggatctgaccgacgaaatcgtgaaggtcctgaaatcagcaaagaaattcctcaggatcagcagcgtaatcattgtcaacgggcatgggggaaatctgcctatcgtcaccactctgtacgacatcgaagagcgcacaggcctgctgataacactgaacagcaagatcatcgaatccgagggtccccatggagggtctggcgagctctctatggccaaggcactgggaatcattgacgagagtcaggttgaaaaccagaccaaccttgaggagtacggtgaggtgggcctgtacatgttcggggaggcccggagaaacgatcccaacatcgaggaaggggccctggacgttgaggagaatggcgtgtacgtggatgatgtctatggacaggagcttttgaagctcgccattaattccgtgctcttggacgttgaaaaacagttggattcccattatggctattga

SEQ ID NO: 3499 - DNA, 546 bp, synthetic construct
  source 1..546: mol_type = other DNA
ctcattaaattgattaaaatcattgacttttttaacctgaatctactcaatggtttcaaggtgctgattctgaaaattaagaaacggtactttctcaaaaagaagaaagtaaaggagatcaaaagcgagcttggggattacggctcattcataaacaataaggacactctggaaatgctcgaggccgaggactacaacttcatacttgtgaacggagagccttatatcatcataattaatgacaagccatatcccaccctgaaggctgccttaaacatggaactggacagcaaggttgtagtggtggatatgggcgcagtcaggttcgtcacaaaaggggctgacatcatgagtccgggcatcgtggatgcagatgagtccatcgttccagacgacatcgtcatcatcgtggaagagacccacaacaagcccctggccattggaatcagcctgataacggggcccgaaatggtggaaaactccgagggaaaggcgattaagtcgatccattacgtgggcgatgccatctggaatttggaggtctga

SEQ ID NO: 3500 - DNA, 1488 bp, synthetic construct
  source 1..1488: mol_type = other DNA
atgagtgataaaaatgaatggggcagcaacctctccttcgtgctggcgatggttggtagcgctgtcgggctcggcaacatatggcggtacccgtatgttttatacagtaacggtggcggggccttctacatcccatatatcgtggccatactactcatgggcatcccatttctcatcctggagtatggcgtgggatacaatttcaaatcatccttccccaaggccatccgcaagattagttccaaagccgagtacctagggtggctgcttcctacctcagttttcatcatcatgatttactattcatgtattctgggctgggacgggatctacgtgatactgagcttctttaagggatggggagcagatcctaacactttcttcgccagcactttgctccagtcgagtgaatctgtctcggggatcacaaactttattccagtcatcgctatcgtaatgcttataagctgggggatcgtttggtacatctcccacaaggacctggaggagggcctgggcagggtgagtaagattctggtgcctttgctcttcatcatcatgattgtgatcgtgctctttagtttgaccttgcctggcgctatgattggcctgaatgaactcttttcaccggattggaacttgctgttagacttcaacatctggatggcggcgttcggccagatcatcttctccctgagcctgggaatgagcattgcctttacctatgccagctacacagggaaggaaggagacattattacaaatacgctggccattacctttgccaattgcgcctttgaaaacttctgtgcactgggggtcttttccatccttggctatatgtccctgcagagcggaacagcggtggcagacctcgtaactcaaggtaccggtctggtgtttgttgcataccccacagtcctcaacgtactaggacagtatgcctacgtaatcggacccttattcttcattacagtctatctggctgggctgacaagcatcctatcgactatcgagcccctgtctttctccattcagaataagttcacgtggtcccggaaaaagaccatgaccgtgctgtgcctgattggggccgtcctttcaatgatgtacgctaccgcttatggcggaaccttgctgggatacgtggatgcctatatcaaccaaatagccattctctttggcgtgatactcgagtgcattgtctttgcatggatcttcaaatgcgagaacatcattcccatcttgaacgagcgaagcaaaaccatcaagcttggcaaatggtgggtggtgatagtgaagtacatcctgcccctcttcataacgattgtgtggattggtggagtcctggacactatcaatgacggttctaccgaccagctgattgtttttgggatacttacggtgatcctgcttggcctgactgcactgtttacccatctcccagctacaaatgaggagtgggatgaaacggaatacagattatga

SEQ ID NO: 3501 - DNA, 450 bp, synthetic construct
  source 1..450: mol_type = other DNA
atggtgaatgatgaaaagagtctgtcccggatgagtaaaaccgattactacctggccatcgcctttgccgtctcaaaacgcagcacatgcctgaagaggcactatggggctgtgatcgtcaacaacgacgagattataagcacgggctacaatggcaaccccaggggagaggagaactgctgtgaccgaggctcatgtaaacggatggacgttccgtccaatagcggggactacagcgactgcttttccgtgcatgccgagcagaatgccatgatcagcgcaagcagaaacgaaatgattggagcgaccatctatctcgctggggaaatgttcaaggacgactcgtggttcgagatcgaagatgcagagccttgtccaatatgcttccgcatgattaagaactctggtgtgaaaaagatcgtctccaagggcgtagtgattgatctatga

SEQ ID NO: 3502 - DNA, 2424 bp, synthetic construct
  source 1..2424: mol_type = other DNA
atggagggggaacagaacaacctccgaccctatattgaggacttctttagagacttgcagctgtacgacgactacaagaatgggcatcactataaagacctcttagaaggcagcatcatcctgtttctcgagaaggaaaacacatataccgcctatgaaatctacgaaaactttttcatgatctaccaaatcacagatgaggacaagtcccacgggcacaagactgaaagcatcgacatcagcgagtccaattcattactgaaactggtgaacgtaatgaaggactacgaggagaacaccggggatctcattgaaaagcagcgggatcatttcatccactcagtaaacgtgttcatcctggggctagccatctacgccagcaatcataaatataggaatgcattcgaggcctacgtgacagacagtccctacaagaaatactataagactgcggacggtgaattttccgccgaggagttcctctaccgttggggaatagcctccctgttccatgacatcggctaccccgttgaaatcatcggaaagcagctgtccaaatttatcaacgacagcagccagtcaataagtcagaaatacaaggtcaataccgctgtcaacttcaagaacttcaacgagctgaacagtatcataaagctcgaccccaaattcccaataatctacaggatggactaccctgaaaccaacttcattgatgtgtacaagccaaccaacctgatggcgcaccagatctttacggacctgtatgtggattctgacatccgcgccattgacgagtttgatgagctgaatgaatatctatataagctggttgtccatctggatggcttcgtggactacatgacatcgaacaatttcattgaccacggcttcttttcatctatctttgtgctgaactcctacggggccatcatgcagaaacattatctcaacgatgacgaggaaaaattcgactactacataaataaatatgcttatttcttttacccggtcctgaacagcgcaacttccatactgctgcataattattttcggggaaccttaaacgagaaggaaagcaagacggatgagtttaatctcggcaaattggaacccatgcagaacccactggcttttcttttgattttctgtgacgaacttcaagaatggaaccgcaggccaatcggcctaaaggacaaggctaaaaaccacgtccatgatattaaaatcaatattaatgagaaccaggtcctggttgactacatcgtgaaaaacagtgcattagggcttaacttctctgagaacaaggaggaactgattaataatcttctcgatgttacatcgatattctccaacggtttgaaagtgaacatcacgccgtatctggatgagaagtaccccctggaggacatttcactttctgaagttgagacgccaaggatactgctccgccacgtggaggagattgcccgtgcaagccacaacagatacaatgaaatcggaaaggcccacggcaatccggatgagccatatgagagtctgagtcccaagcggaagctctccagcatcagacagactaaggagtttcccatgaagctgaatctcattggatgtgagatggtctcagagaacgatcctcgcgatgaatactcgcttagcgatgatgagctggacttccttgccgaaagggagcacgaggcgtggtgcagagagaaacgaaatgtgggttacatttcccaccacgacgcattcaaacgcggtctgatcgacgatgccgagtacgaccgactatgccggacaaacgaggagggctgcgagaccaacaagcacaataagatcgaatctccagagagaaacctgtatgtgcatagcaatattattccttatgacgaactcaatcaatattctaagaacaaggatcggaggccgttcgaggaccttcccgacaatctgaaattgattaagaacaatcccctcaagatcgtcgaaaaccgatacaagctcttcacagtggccatgcacaatgaatatatggattatattgcaggcaagaaagaagtgcctgagttcaaggacctcccatttgagctgcagcagataaattacaagcaaacctacctcatcgccaaatacctaaatgaaatcggctatgagattgtagagaaggatgacgagcgccctgctgtgaccaagtttgagaacaataaggaaactggctacttggcgggaagagagcacaatgcttggtacctgcggaaactgaacgatgggtgcactaatggtaagaacaaggacggaaccgacaacccccggatcaacccttgggatgaactggattacagtttgaaaaagcctaatatgaacacctttaagaaacttcctaaactgtgtttgaaagctgatttgaagattattaaaaacaaatga

SEQ ID NO: 3503 - DNA, 795 bp, synthetic construct
  source 1..795: mol_type = other DNA
atgaatgataaactcatcgaattgccaaattatggtcgcctgatggtggtcagcgatttgcacggtaacctgaacgactatgaaaagtatatagacctttgggattgtcaagaccctgattttcatatcgtctttctgggagacctcattcattcgccctactttaatgataagtctgtggagctgcttgatgatgtcatcgaaaaggataagaaatattccaatttccacgtcctgctcgggaaccacgaatgggctcacattgttcacagggacatattcaaaaatggagagaacattcgagaggacttcgagtacctgatcagctacaagaaagggaccatagagccagccatcacagaatatatccggttctttaaatccatgcctttctttgtgaaaactgaaaacggcctcttcctctcccatgccgggccgtcaagaaaggtgaagtcaatcgaggacttcaacggcattttcgatggggattaccataacccaattttagacgacttcctttggctgcgccccaagagaaacctatacggacggcgtaacatcctgacggacagtaatctgtacgatgagggagacatcttcaacttcctaaatattgtgggcgcaaactgcatggtggttggccacagtcccgtagacggctacaagcagtatggcaatcagctgataatcagcagcagctttcagaccgaggacaaggtgtacctcgacattgacttgtctaaggagatcaaacacatgagggatctgctggactgcatccggtactttgactga

SEQ ID NO: 3504 - DNA, 360 bp, synthetic construct
  source 1..360: mol_type = other DNA
atgatagactcatttcgatatgcattaaatgggatagcagtgagcatcaaagatgagagaaacctgaagatccagatgatcgtcatgatgcttgtcatcatagccggattcctgctgaagattagccgcacagaatggatcatttgcatcatcctattcgcactcgtaataagtgctgagatgatcaacacggccattgaaaacgcgatcgactacaccagggagatgaccgttgataaggacaatgacctggcccggattgccaaggatgtctctgccggcgctgtgctggtgatcgccatcgcttccgcgatcgtgggcctgattattttcattcccaaagtgctcctcttgctttga

SEQ ID NO: 3505 - DNA, 255 bp, synthetic construct
  source 1..255: mol_type = other DNA
atggaagaaattatccagaccctgaaggagatcgagaaggaaaacaacatcgagatcctctatgccattgaaagcggaagtcgcgcatgggggttcagcaatgaggagtcagattacgacattcggttcatatttaaaaggccgatcaaagattacatctccctaaaaaacaataaggatgcgctggacatcacaatcgacgattacgacatagtgggctgggacattaaaaaggacttcaagcccccactgtga

SEQ ID NO: 3506 - DNA, 444 bp, synthetic construct
  source 1..444: mol_type = other DNA
atggggaactgcgacttcctaaatgaactgccagacttcgacaaggatgtgttaaagtaccattacgcaagcatagcgtttaatgtatggaaggaagccttggatcgagaggaaatggatagaaaatccaccaagaggtatctgtattgtattcggtgcatcctggcttggaagagtgccgatctcggcaaagactcgtcaatcagcattttcgagctgatggaagactccgagatcaatgatgacttgaaaagtgatataaacacacttattgactactacaagagcctgtgcaagaacgagctggacgaagagctgatcgatcgcctcagcatttggatcgacgatacggtgaagaacatcaaggatcactatcccaaaaaagagaaaaaggacatgtccctttacgacgacgtcctctttaaagtgctcgagatcgagtga

SEQ ID NO: 3507 - DNA, 834 bp, synthetic construct
  source 1..834: mol_type = other DNA
atggggtttaaagaagacaataaagacaaatacctagacccttttaaaagagtcactgtggacgtcggcagctcattcaaccggataaacgtgtcagccgacgtgatcggcaaccgcatccgcataacagtgccaaaggacaagagtggtaatctgacgggaaccatcgtcgagaacatcgctctggaaaactccacctggatcttcgagcccgtggccgacgagataatggaagatcgcatcgaccgtaagctcagccctagaaaatacatggacttatctaagttcgattttgaaagggggttcctgccaaaggaaatcctggacgatcttgtatatcccattaactacagaaaggattattctccctttgcaaagaaggttttggagcatccaaacgatgagatccgaaagatcgccctgggatacatcgatgatgaggacgtgctcgcatccatcatcctgttcagcaaggataaggatctgtccttatttgttctcgagcacattaaggataagagcattctcctggacattgtccggaacgacttcaattactactatttcacaggcgcggtggatattttctacgacatggataaattgcccctcaagctcttcgaccttgacattcggaaggcggctctggaaaggatagatgataaagagctgctttttgacctagcctttgactgcgaggaatggttcaagccgattgacatgatcaaagacaataatctgcttagtaaaaaggagttggacagcctgaatctctatgcccagaaccgagagattcgggaaatcattaaatcgaggctgaaaaacgagctgtga

SEQ ID NO: 3508 - DNA, 1740 bp, synthetic construct
  source 1..1740: mol_type = other DNA
atgtgtggaatcgtagggtgcatactgaaagataagcagaagtctgtggctcccattctgctcgaatgtgtggagaacctggactacagagggtacgatagcgtcggcatcgccacgttcgacggcagcatccacgttaaaaaggacaagggaaagatccctgaagtggatgaaaagctcgacctggccgacatgccgggtaactttgggattgcccatgtccgttggccatccacaggcatcgccagcaaggagaacgcccatccccagctggatgagtccgacagcattgcagttgttcacaacggatcgctgaagaactatgacgaacttaagggggagcttatagcagacggattcaaattcaaatccaccacagacactgaagtgattccccacctcatccgaaaatacatgaacgaggggctggacttggagcatgcctttagaaagaccatagaaaggcttgacggctcctatgctattgccgtcatctcaaaagaggagagcaataagattctcgcgacacgataccagtcccccctgaagattggaatcagcgacgatgcctacttcatatcatcagacatcccggccatcataaactacacccggaagatcattcttcccgctgaaggggaaatggtcattctggatgaggatggggtccacgtgcacgatgaggatggcaatgagatcgaaaaggagatcctagtgatcccctggaccgcgcaaatggcaagcaaaggagaccacccctactatatgattaaggaaatcctcgagcagccagacgctgtggagtttactctgggtgagagggagaacatccagagaatcgttgatgacctgggcgatatcaaaaacatctgctttgtagcctgcggtaccagttaccacgcctccctgactggaaagtacctgctgcaacacctggcgaagataaaaaccgatgtggtgcttgctagcgagttcaagtacactgctgacacattagacaaggacacgctggtggtgttcattagtcagtcaggcgaaaccttagacagcatgaatgcgttgcggattgccaaggagacttcgccaaccctggcaatcgtcaacaatataggctcctcgatgacagaggaagccaaatacaccataatcacgcaagctggcccggagaagggagttgctgccaccaaaacatacattgcccagcttaccgccatctatctgtttgccggtctcttggctaatgacgaaaaactcatcaatgaattgtataatgtgccaggttacatcagggaagtgttgaaaaagagtagtgagatcgaggtgctaagcaaacgctacagcttcgctgatgacctgttctacctaggacgcggcttctcttatcctattgccctggagggtgcactcaagctgaaggagatctctcttattcatgcagaaggctatgcatcaggggaattgaagcacggccctctcgccttaatcaaccataagattcccgtgatcgtgatcctccctccaggcagtgattacgaggacacgatggtaaatctggaggaggtgaaggcacggaaggcaattatcctatccatatgtgctgagggggatgcgaaagccgaatgcaaatcccgcgatgtctttacagtcaacagcaaagtcagtgagaccattgcaccactggtctatacagtgcctctccagctcctggcgtattatgtgactctggaaaaagtagcctga

SEQ ID NO: 3509 - DNA, 3105 bp, synthetic construct
  source 1..3105: mol_type = other DNA
atgatagcaaacagcccgaaggaaattaaatccagattgattgaaatctataatgaagagctgttgaaccttaacatattcattaagaatagagatgagctgaaagggaacaaggatctgcggtaccttcttctggagcggatcaaggaggaatttgattatctggacgacgaggaactctttatccttctctcattttaccagaccatcccttcattctacagaaagacttttaacaagatccttgaggccagcattgacaaaaattacattgaaattcaagacgagctgctgaaactggtggaaatcatcaaagaggagatttccaatatagacggcgccatcgaagagcagaacctcaagatcgaggaaaaactcctaaagagtttatattcgaaggacaatcaaaacggagaaaactccgatattaatcacttgaacgagggcaaaagcttagacatcaacaacctaactgatgaggaaatcctggagctctacaacatcagcgacgaggagttcagccagttgcaggactattatgaatgggaaatatttgagagtgattttctcaacgaagagatcctggaggactacgatgaatctgccttcctggacattgcctataatcacaaggatgcagaggtgcgagggtttgcgttaggcatggtgctgaaaccatatgtttggctggatttcctctttaacgatccagatctgtttgttcgaaagtcggctctgttctacctgtttaaagagcggtacctgaacgacattgaggacattgactatctgggcaaaatccctatcgagatcgattttaacctggactatagcgacgccatcgatgactttaaaatcgacgagtcgctttttaacaggcatgacaagatcatcatcagcgagatctccattaaggatgatgaccttatcgtcaagacagaccccaaaaactcatacgaacacgctgtcagcaagatacggagtcaggacgccttaaaggccatcgctaattaccacaatcaatggtcggtgcgctacatcgcggtcaacaagatcacagacattgattacctctacgatatcgctttgaacggttttaacaaggacgcaaagcctcgccacggaatcttatactaccccggggagattagcgaaggagatgtactcaagtccctactcaatagacttcttagactgaagaacctgtctgatgaagactcccagagcttcctcaaggagctgttctacaagtcaaaggatagcataataaagcgctactgcttatcaaagatagaagatgacgtcttcctcgtgaatctggcaaacaccgaagcaaacccaagcttcgcccgagtgtgcttggacacgattaaggatgaggactacttgatcctcctgtccatcgccatcattaccaacccccgcttcaagggcaaaaaccaggacctgtatgacgggctctgcgagggaggtattggggatgaagacagtttcatcagggagtctcaattcgatgaaatagactatcacaatatccgggcctatgcctctaagattctgatcgccctcccgagaaaaactctcaatgagaccctggagagcttcagtctgaaattggatatccccaacctaaaggaacaccgggtgttcaagcccattatcaacaagaggattacggatattctgggagaccttgctaaaattgatgagagtcccctggtgcgctctatcgctgtgctgggtcttgaagataccaacgacctgatgtctatcgctctggacgacgaggacgacaaggtctcatttaatgctataaaaaagctgaatgatgataacttcattgaatactacctgaaggaaaccaaccgcaaagcctattatctggttgaaggaaatctcgtaaaagaccagtccctcttgaagaaaattgcactaaacgattcgtggggccctacacgcagtgaggctgtcagaaacatcaaagacgaggacttactgatcggcatcgcaaagaacgacccggaggcaattgttagaagggaggccgtcctcaagatcaagaatcagtctgcgctgattgatattgcctacgaggacgaggatgacctggtcagggacttcgcaatcagtaacattgatgacgaggatgtgttggaggacctgatctacaaaaatgaggattccaatatccttcgcaccatcctctccaaactggataacgaggaaataattaaggacttcgcgtacaaccatccaagagggattgtaaggaacgcagccatctccaatattgacgacaatcgcgtgctggtggacatcgccaaaacagacgaagactggacggttcgacgaaatattatcgcgcgcctcgtgggcaagttcatcaagagcagtgtcgacgtgtacgaggataaatacctgaatcatctgaagaggagggaatactataattctctgattaagggcgacaacgagaagttcaaatctgagaacaaggtcaagagcagtgaaaatgagaaaaatgaatacgccgatgcttcctcaatcgtgctatatgaagacgatgaaccatacacactgcaggatctgctagtggacagggccctgaatgacgaatcagaaaaggtgcgtgcttttgtggtgtcctacatcgatgacgagtatttcctcttctacattgtcagcaatgacaaaagcatcaaagttcagctgtctgccatcgacggcataaagagaaatgagctattggccaaaatattcatcaaaagcaagaatcaccatgtatatcggaaagccatctcccggatacggtatgaatatattctgctcaagttggtgtgtctgaagaactattacggggagctgtggcccaagaggcagatggctgaggcgcggatggaggagctcggatttaagtctcccctcataaagaaagaggataaccggaaaaacaaattcttcaggcctatctttgacatacgcgattaccagcgggatcttgagcttttggaccgtttggataaggagtacaagaaccgtagtaacaattcagacgacagcgacggttcctccgatgattttcagttcaaacgaattgtgttctga

SEQ ID NO: 3510 - DNA, 462 bp, synthetic construct
  source 1..462: mol_type = other DNA
atgaaacttatgtttgtttgcaccggtaacacgtgtcggagcgtgatggcggaatacctcttcaaaaccatgattagtggagacatagagatatcctccgctgggattatggcaaaagacggctcatcccctagcttgaacacaatcgatgtctgcaaaaagcacgggctcgacgtaagcaatcacaaggccaccaacgtgaagaggtcaaatatcaaggatatggacctggtgctgactctggaggagtctcatcgcaacaccttactgaatatgtaccccaacctctcgatctatacaatcaaagagtttaacgatgtggattacgtctatgacatcgaagacccgtataaccagagtttggaggtgtacgaagccactttcaatgagatcaaggagtctctggaaaagattgatccagacaagctgctaagctacggcttcaatgtcgaaaaggactga

SEQ ID NO: 3511 - DNA, 381 bp, synthetic construct
  source 1..381: mol_type = other DNA
atgattatggacaacatgtggattgaagccctgaagaacaagtacaggttcgaatttaagggcctcatcaacgtagaggacctgttcgatctgaagctggaggaccttgactacatctataagaacctgaaacgggacgagaatgacctgcaggtggatagcctactcgatgccaataaaaatcccttgaaaggggagctggactgcaagatcaacatcgtgaaaagcatattccagatgaaggtcgctgagatagaaaaagcaaagattgcgatggctaacaaggcccagaaggaaaagatcttggcaatcattgaaaacaaacaggatcaagagctttccgagaaaagtatcgaggagttaagaaagaatctccgctga

SEQ ID NO: 3512 - DNA, 2013 bp, synthetic construct
  source 1..2013: mol_type = other DNA
atgcgggaccgcctgttcaatcatttcaatgaaaatatggccccaagaaaactgttcattgtagaccgggattgggaagaactctggaacatgtatctcgacggctttccaagagagatgaaccccatctatcgggagaggcgcgaactggattgtagtgcatgccgcagcttttttaaacgcatggccaatgtcgtagccctggatgaagacacgggggattttatatccctgtttgctggggaaaccaatggagaaaaagaagttttccgggctctagacgaatacgtcaaatccgccaagattaaggacgtctttatgagcgatacccaaagggtaggtatcgaaagcaaccatgaaatgcttgattccggatcagtccatacttggtaccatttctatgtggatgtgccaagtgaatatgtgggaaacctgagccagaaggccatctatcggaataacagaattgtcctcgagaacagtacccagcggatctctcaagatgctgtggacacagtcctggagctgatcgcatctaactccctctatcggggggaccagtgggaagacgcgctgaaaagtttcaaggactacctgaaggagtacgaggcaaacgacatggatgaggatctgttctactggattaaatccatagagctgggatcgctgctggttagaatcaaaaaccacagtattggcgtgctgttgatggacgtgacccagggcgtgcccttagatgaagccgtctccaactatgagcgaattgtggccccgaccaactaccagcggccaaagcccatcttctctaaaagaatgctcgaggacgcacaggagaagatcaacgagttggggtttggcgagtcaatctacagacgctatgcgaatatggccgacctgtccattaacgatgtgctcttcgccaacagggattacaccagtgagattcaggacaatcagaacttctttgacaagctcaaagagctcacagtgaacagggcgcgtaactttgataaggttcaggagatctcactagaggactttgttgaatccatccttccgacggctcttgaagtggagctctacctatcatatgacctgtccaataatttcatgtctcttatcgcaccggtcaatagggacgctccctcaatgttcaagtgggacaatcctttcagctgggcctacaagaacaacattgcagacagtcttatgaaagagcgcgtaaaggcgcttggtggcgacgtggatgtggatttgagatttaccatccaatggaatgacaatgagtgggacaagaacgatctggacgctcactgtaccacacctgagggggaggaaatctacttcagccacatgcgaagctccaaaaccggcggctggctggatgttgatatcatcaaccctgagaagaatgtgcctgctgtggagaacatacaatttaaagaccggaatcagatgattcctggagattacctcttccgtgtccaccagtacacataccgtggtggagatgacggattcaaggccgagattgaatttgacggtaggatcttcaacttcatctatccaatgaggctgtatcagaatgagtatgtcgatgtggccaaggtgagcctgggggaggatggcaacttcacactcaatagctttttagacaaccagacagcctcggctaaagaatggaacctgaactacaaccgattcgtgcccgtgagcctgatttgctacagccccaactactggggcgacaatgccgttgggaataagcacatcttctttatcctaaaggactgcttaaatgacggccgacccaacccctggtttaacgagtacttggtgtcggaattgagggaccaccgcaaggtaacggaagccctggcaactatagctaaagtggaggagtctgatgagcagctcagcggtattgggttctcattcactcagaagaataaggtcactttgaaggtcaagtctgagaacatagagcgcgtgtttaacgtggttataggctga

SEQ ID NO: 3513 - DNA, 1185 bp, synthetic construct
  source 1..1185: mol_type = other DNA
atgggaactctgccactaggcaacgacaatgacctggatgactcacagttttacaacagggcagaagaaatttcattcatctctgagaatctggaactgactaagaagggtagcacccccacaatactccttaccggcatcagaggcgtcggaaagaccgcgctgatgaaaaaattaaagaaagatttccagaaagatggctacattgttgtgtatatggagctgtctggaatgaacaaatacaaaaaggattcgctcgaccgcttctgttttatgaagttattctacgagtccattatcaatgcatacaaggaaagcaacatcctctccataaacacgcagatcctcaaatacattaaaacccggaatttcaaaatagacaagatcagttcgtttgagaagattcctattcctatcatcacaacggaggaggactattccaagtttgctgggttcgtcatggacttgccccagatgatctatgacgatttcaaggacgagataaatggagtgctgatatttatggatgagtttcagatcctgaagcagctcgatgaagacgtgaacgggttcctgtggtacatcaggagcattattcagtcacagaaaaacatcgggtatatcttctcaggaagcatgagccttaaggatgacttgatcgccgacatcgctgggcaaaaaggggccttcggcgggcgtatcctgaactacgaaataaaacgcttctcttatgaaaccacaaagaactatctgaatgaaaaggccgactaccttaattttaccgaggagggtttcgagcggttttaccattgcaccaagggcaacctatactatgtgaacagtttcgccagactgctccccccaaacatcgagctcaacgaagagaaggtgaactctgaatttgacaagtccctgccgtacctcgtgattcacttgagtagcgagtggtataagctgagcaatcaagagcagcggatcgtcattgccctcatcgagggcccactgaaacgaatcgagatcgcaaataagttgcaagtaactagcggtgcgatcggcagttcccttaaaacactgcagaacaagatgctgattgaaatggataataacaaataccagatttacgattccattttcaaagcctggctaaagaaggagtatagggaaaagggagactaccccttttga

SEQ ID NO: 3514 - DNA, 4440 bp, synthetic construct
  source 1..4440: mol_type = other DNA
atggggtttttcgataagttgaaaaacgcgctggaatcaggaaacaaaagccacgacaagcgcgaatctcaaaagaacgaggcgatcagcgacaacccaagaggcgattctctgtcggacaacaaaaataggaacagtctgcccgataaccagaaccgaaattcttcggacaacaataatgttcgaaatttcaaatatctggacgacctcatccatagcggccaaaaggacatcgttctggattgcgacattgttctagctgacagtgagattgaatcttacaaaagaggaatagatatcggcgggagtaacataaccctggacgggaatggacatgtggtggatggcagaaacaaggcggagatttttaaggtttcatctaaaaaccttgccattaaaaaccttagaatcgagaatggatacagtgagctggatagcatcattgacgtgttctccaaaggcgagctgcacctgtccaattgcagcttcttcaaaaactccaacgagagccacaggatctttggcgacaatctggtgtgtattgggagcatcatccgaaatatgggggagctgaccattcaccactgtcacataagaaacaactcttcccgcggccagggcggaaccatcaaaaataccggaaccctcaacatttccgactcgatttttgaatataatctctctctggaggacgggggagcgatctttaatgaaggtttgctcaagctgtcagactcacggttcgaatttaaccactccaataaacggggaggtgcaatccacaatgaatttaatggggagacgatcatcgagaatagctcctttgataaaaacggaggccgcaaatcagctaatgacatttcaaaccggttcaatcttgtcctcaaggacatgcactcagacctgaagatcgataatgagtggacggtgttcattgaaaagggtaagagctttgacatcgacaataagggggggatcatcgagtttgctccactcaacaatgacgagaaaagtttcactttcctaaaggagttactggatggcaatgactcccaaatagatttgatgcatgacatcaagctggacatagccaacgacgagcagctgtacttccccgatggcattaactttaaccgggacaatctcatttttaatggaaatggccacacgattgatgcgctgcgaatgcgcaacatcttcaccctggccgggaacgatattatttttagaaacgtgaacctggaaaacggattcagtaaactctccaatggtgctgcaattagcatgaaagaaggattcctgaaaatctatgaagtggagttcagggataatgcagcatataacggaggtgcaatctccattaaggatgcctcggttagcatcgacagttccatcttcaggcataacgctgctaacgccataaagttcgaaacggggggcggggccatctataacgaaaacggctccctttccattatcgacaccctatttattagtaactcctctctttggggagaaggtggcgctatcttaaataagagcggtgctctgagcctgaataactgtgatttcactgacaaccgttctgtaaaaaatgggaatgatattagcaactacgatagcctgcggatctgcaaatgcagtttcgaaagtgacaaggctaataacagcaattcggatagtggggaaataactaatagcaacctgggcagtaaaatcaacaattccaactcagacagtggggaaattagcattttcaacaacaacctctccaagttatacgattccaacttcaaccattcaatcatcataaacaagggcctgttaaagattgacaaggacttcccaatcaaaagtgcccagatcaaaaattccggaaagctcaaggcttataactttaacgacaagcagattgaaggcattgatatcaacaacgaggacggtggcaagctggtttttgtaatagatggggtggaagtgctgaatacagtggaaatcagccagaagtggatcgaaattaagatattcattagctccacctttaaggatatgcactccgagcgcgactatctcatcactgaagtcttccctgagctcagcaaatggtgtaaggaaaggcgcattttgctgactgaagtggatctgcggtgggggatcacacgggaggatagccgctcaggcaactcaatcaacatctgcctccagtatatcgataagtgcaggcctttctttatatgcttccttggccagcgccgcggtcgaatcccagaaaaaggagaaagaaaggtgacggaagaaacctttataaatttccccaaggtctcaaaccttgtggggcatctgagcgtgaccgaaatggagatcgagcatgccacaacattgcctttattcaagctgctcgaaaatgattttgataacgagcatgcaaaacgcgcactgttcttccttcgtgagaacccctttgaggacgtagatctctccccggcccagagggacatctacttgaacagaaagcctgaggatgatgagaagctttcccagctgaaggacttgattagggagaaatgcatcttcttcgactattcctgcatctgggacgagaacatggagctgtacgagttgtcgtccagcaagggagggctcactgacttcacctgtaacggccggcccctctccgaggtcattatcgccgaggtgaaaaagcagattgaaaatgagttccccgactacaagcccgtgaaaacagatgatatcttcctcgatgacgccatgcttcagaacttggagattatgtccatctcgcacgattttgtcggcaagcaaaaggagatcgactacattaatgaatttatcgaatcagacaatgagagactgcttctcgtcaagggcgccgagggcattgggaaaaacacccttctttctagggtacacgccctactgaatgagaagggtatctcttcgataatgcggataagtaatgcaacagcgaaaagcaactcctcttccaacctttccttaagcattggcagtgaaattgggctgttcaacggagaggaggccttatacaaaggggtgaaacacgccctggacgatgagttcctgaagcagctgagcgacagtggagtgagagtgctaatcatctccaacgcagacaagctcaatgaccggctggtctttaatgagatcccagacaatctccatatcatactctcttgcggtgaaagctatgaaatcgccattctccacaaggagctgatcattgagggctttgaagatatctctgaaagggagcagctgatcaacgagtacctgaaccacatcctaaagaacctgaaccaggcccagaaggagctgattatctcgaaccccgcttcaaagtctccactgttccttaagatactcctcaacgagctcaaaaacttcggttcctacgagaatttagtggagaagatcgaaggattcggagattccaccctgagcgcttttgaggagctgctgcgcgcgcttgaaaatgacgcaagcttcgcaaatggctttgctcgggacacactcctgttgctcatctattcaaaacacgggttgaacgaggaggaattggtctttgggctggagtcactgagccatattgacgcccggagcaagctccgactattcctctacagaatgggcgattatatcctggccatcgaggacaggtacttcatcaagttcgatgagtttaagaaggctatcctgggcctgtacggtgattgtgagcaacggatcagggagatattggtggaaatatacaagaacaacatcctaaaatctccagatagccttgcaaacggcagcgacgagatattgtataatctagaactcctcaaggactacgacggcatcatgaatgttttaaacgacgatagattgatcaacggcattcatcctagttgcattttccttggatacaaatatggcaagttctacggacccagcaaagagtacctgggctttacaatgatagactctaaagacaagttcgagttctttagccagattgcgctggtcctggctaagaagagtgccgactcactgaagtatgccatgaaagcctatcctcaccctcacactcaatggccgcgtaaattccggaacgagaatgacagcgagagctttatgaaataccaggacgccttttacgccattccgatgtttattgaggctgcctgtcgttacgccaataaggcaatcaaggacgaagaggacttggataagctgcgcgagtttaaatctgagttcgacaaacgaataaacggtgtcgactcgtttctgaattacatgtctaattttggcagcagtcagttggatctgggatataaggtcgaagccttggccgatgatgccatcttctcactggataacctgaacgagtactacaatggtggggtgagtgaaaagtga

SEQ ID NO: 3515 - DNA, 2196 bp, synthetic construct
  source 1..2196: mol_type = other DNA
atgtccagacgcgacaaaatgattgcaaagataaaggagctcatgtacaagcccgaatacatcagaaacataggaatatgtgcacatattgatcacggtaaaacaaccctgtcagataaccttcttgccggggctggcttgatctccgaggatctggctggagaggcactcggaatggacactaaaaaggacgagcaggaacggggcatcacgattgacgccgcaaacgctagtatggtacaggagtacgagggagaacaatacctcattaacctgatcgacactccaggtcacgtggacttcggaggggacgtgacccgtgccatgagggccgtagacggggccgtggttgtggtgtgcgctgtggacggggtgatgccgcagactgaaacggttcttaaacaggcgctgagggaaaacgtgaagcccgtgctattcatcaacaaggtcgacaggctgatcaacgaactaaaactcggtccagaagagctactcaagcaacttacaagcattatcgttgaagtcaacgccttaatcaaaagcttggcccctaaggataagaaaaatgagtggatggtaaacgtagaggaaggcagtgttgcgttcggttccgcattcaagaattgggccatcaacatcccaaagatgcaggagacaaaattcacctttaaagacattatagattactgcaatgagggcaaggaagacgagctcaagcagctcttgcccctgactgaggtcctgttgaatatggtggttaaacacctgcctagccctaatgtggcgcaggtctaccgcgtgcctaagatttgggatggcgatattgagtctgaagtgggccagaccatgataaagatgtctcccgatgggcccttagccggcatgattaccaatgtggccgtggataagcatgcgggaatcgtggccacatgccggatctatggaggaaccctggagaagtcgagcgaaatatatctggtagggtcccacggcaaggccagagtccagcaggccggcatctttatgggagctgagaccatcgatacggggaaggttccagtgggaaacattgcttacctgacgggggtcaagggcgccagcgcaggtgagaccatctgtagcgcagactgcatcatcgatgagtttgagcccatcgaccacattagcgagccggtagtgactgtggccgtggaggctaaaaacaccaaggatctgccaaaattgattgaggtcctgcggcaggtctctaaggaagaccccacaatcaaggtggaaatcaatgagaccactggcgagcaactgatttccggcatgggcgagctgcacctggaagttgtgacaaaccgaataataaatgacaagaaactggagattctggtttcagagcctatcatcgtgtacaaagagagcgtgcttggccattctcccgtcatcgaagggaaaagtcccaacaagcataaccgcttctatattgacgtccagcccttagacaagccgctctacgatgccctgatcgaaggcgacttgaaggaaggccggatcaaaaccaaggagactgctcaagacttcattgagctgggaatggataaggaagaggcacgaagggtctgggatgtctacaacaggtccatgtttatcaatatgacccgcggtatccagtacctggatgaagtgaaggagctactccttgaaggttttgaagccgccctgaaagacgggcctctggccaatgaggaagctgtcggattgaaattcatcctctcagacgcgaagcttcatgaggatgcagtgcacagaggcccggctcaggttctgcctgctatcaagaaagcgatctacgcttcaataatgtctgccaacccatgtctcctggagcctattcagaaggtgttcattagtgctccactggagtatatgggcaattgcaataaagacattcagaaccgaaggggtagaatcatcgggcaggagacaaaaggagtcattgcagagatggactttgaagtgcctatcgccaagatgttcggctttgcaggcgacatacgctcggccacgggcgggaaaggggacttcagcacagaaatgaaaggatttgaaaccctccccatctatctccaggatgatattgtccggcaaatccgtacacggaagggtctgagtccagagccctatgggccagagcactattccgcctga

SEQ ID NO: 3516 - DNA, 1986 bp, synthetic construct
  source 1..1986: mol_type = other DNA
atgaccattccggtcatgtacgatctggacgaggaacggctcagagccttaaacaaagatgaaaagaaggaagaccggcttttttcaatcagccttctcaatcctttttatccccttgacagcctggtaactgatgaggaggaggatcttgacattcgcatagccgcgctggactgtctggatctgttcggcgtcacactgtaccatatcgatattgacagcgtgccaaaggagctggcccttgccgtgatcgagatgctcgacgatgggagcaagctaaaagagatagcgctcaaccacaacgatattgactaccggattaaagcactggaaaacaaacacctcacggacgaagatgccctgaaatacataattgagaacgaatcagcccccaaattgcgctccctggccgcgtgtcacccttgcttgaacgacagcaaatttctggaaggcctcgcactgaatgatgatgatgaagacgtccgtgccgccgccgtgtctaactacagcacaaagggggtggacgtgctgaagaaagtcattagtgatgatgaggatatcgttcgcataccggctttaaagaacttggtgttcaaatataatctgttcaacccctccctcaacaagaagtttaactttaagaagaaatttcacgacatgtcgtggcacatgatcagctcgatcgatgattacgtccctaaggaaatggacaatgacgagggaatcagggatctgattgacttcgagctactcgaccagatttatatttcctcagccaacgaatgctataacgaattgatcgacaagctcaagatcttcttcgaaaaggccctttaccactacgagattcataacccctttgacgagagtaaactggagaatgattcctatcggaaaaaaatgtatgacaagctcaagcttgcagaaggggaccagaggagcttctacctctaccaaatggcttatgacggtggacacgcttacttgaacttctacttggactacctcaatggtctggactatgattcctatctgggagactctgacagtagcaacgaggattcggatctgaaaaaactgtttaatgagtctaacgattcctacagcttggataaggagatcgaagagtcttacttcatcgacctggcatacgccgattccaattgcgaaatggtgagactggccattgaggcaataagcgacaacagcgtactgttcgactttgctaagaatggcaaaacaagtgacatccgaaaaactgccatcaagagactgactgattcagcttatctactagacctcgctgtcaaccagatcgacaaggacattagggaagctaatttctacgacgatgactggatatgcgactatatctctgataactcaaacgactacttcgatatctttaatacctatgacttttacagtcatgacctcgagcattacgagcgtctattcgacaacaggctggattccttttattatgaaaaggtggcttggaactattatcggaacaccatttcattctgccttcttgaaaggatagacaactacctggacctggtgtacgctatcaaaaacacccgaagcttcgttttacgggacctggtgatctacaagatcgagaacccattgttcctcacagatatcgcgctcaatgcaatcgacgagcgcattcgctataccgccttcggcagaatcgagagtaaggcattcttaaagtacgtctacctgaacagcaatgatttcagaataaagttgctgtatctgtccaaaaccacggacaatgcgatcctggaagaggccttcctcaacgaggagaatgacgtactgcgaaagtacgtgctggacaattccaatttcaagatcagtccaaaggtgattgagcactgtatcaatgaagagtctgttatctccgattacgcagagaataagtttgctgagcagtttgtgaattacaggctgatggataagaaatttttatga

SEQ ID NO: 3517 - DNA, 372 bp, synthetic construct
  source 1..372: mol_type = other DNA
atgggttttataatgattattaacaagctattcaacatgaatgaagacaatgagatctatttagtgattatacttgtgctcgcgccgctgatcttttcaatcatcgacttcacgtcctgccttgtggaccacggcgtgataacctggttcaactgctacacatttaagacctacatctgtttcattcccatcctgctgatttgcagcattatcgccaaggtgatatggcgggagaaaagcctgaaagatgtcctggagatcgcctttgctccattgttcttctggctcatcgaaatcggcttcgcactgtttgtcagtctcttcattggagtatttattgatatgatcatcgggatcgaggccatggtttga

SEQ ID NO: 3518 - DNA, 477 bp, synthetic construct
  source 1..477: mol_type = other DNA
atggctaattggtgtgaaaacaaactcacggtgaaaggaacaagtgaggagctggtaaagcttatcgaagaacacgtgattgatggggagttgtcctacaagaccttcgcaaccgagcacaggctattcggcgaaaaccattttgacctggatgagatcctgaatgaacgcataagcgaaatcgtcttttggttttcgacaaaatggtccccagtcccggcggagaaagtttgcgaagagatcaaccagacttatcccaccctgaaggccgaactgtcattcttctctgccgagagcggattttgggggcagtatagcgactacggcggtgaggagtactatgagctcaaggaagaggacattgagaagacgtccgaggaatttttcaagttcgggctcgaggagggcttccttgaaaagacagagagtggcaaatacgccttcacccacgacgtgcctacttttcggctgttatga

SEQ ID NO: 3519 - DNA, 4764 bp, synthetic construct
  source 1..4764: mol_type = other DNA
gtgagccttatggaatggaaatatgcaacgatctttattagcagcagtttcatagacatgcatgcagaacgcgactacctgatcaaaaaggtcttccccgagctagaggagtggtgcgaagagcacaagattcacctatcaaacattgacctgagatggggagtgccggaagaaatctccaacaacaaaagcaccatcgaaaagtgcctcatcaacattgacgagagccggccattcttcctctgtttcctcgcgcagcgcaggggctggattccagatttcgcggaagacatcagcgacgacactttcaaacggtatgaggagattgccgcctacagcggtctgtcagccacggagatggaaattgagcacgccttgctttcaccgttaaaagactttttaaatgatgacgatgagcttccagagaatctccgcacccgccattccctcttcttcatccgagacaagtcctcactggatgaaatcacagacgctcagaagagggtatatacaaattacgggttggtagacgcggaacacggagagtttatccccggggaatacgacagcgagggcaattgcatacgagaacctaagatcatcgatgacttgtccctgaaaaccaaggaaatcatcgaggacgccgacaactcctcccaaaagattgtggaccggatcatcaaaatgaaaggggactgtgatctgcccgaggatgagaagaaggttcacatcgaaataaccaagtacactggggactggaacaggaacttgaagatcccagagatcgaggccctcaccaataaagataaggacgacccagagaaaaaggtccgccggtacaatgactatgagtggatgggcaggctaagtaactttaaagaggttaaagaggactataaggatataagtctaatcaagaaatcggaaaatatagaatctaaaatcggcaggcccctgaaggatgtgattatcgaacagatgaagcgccagctggaattggagtttcccgaaaactttaaggaggatgaggacctcaccgaagaggaaagaatcctccagaacgagctgaaccagcaggacaactttgcctaccttaacagccagggctacatccccatcaaaaaggacacagacatactgagcaaatacatcgaagacgccgatgagagcaggatatgcctggtatccagtgaggcaggtttcgggaagactatgctgctggccaacttggccattcagctcgagaagaaatacaccaataaatatgatgagaccaggcctaaccagaaggctatctataagagattctgtggagcttccaatctaagttcaaaggccttctctctatgggatacaatcattcaagaagccgggctgacagaggatgatgatttcaagatcccaaagaatttggatgagctcaagaaatccatcgataagattcttgataaaatttcccagaagggagagtccgtgatcataatcgatgctgtcaatcagatgcccgacggcctggagatgctcaaatggctccctgcccccgagtcatcgaatctcaagattatcataagttgtaaggaagataatgaagacaaggaactctgcctcgaaagcctgaaattcatcaaggatcgtaacgccatctgcccgtactttgaggacggtcacgaggacgagcttggaggagaatacaagaactacagctttgagctgaaggccctcgaggattgtaagaacgagaagactaagattatcaacgcataccttaaaaactacctgaaggagctgtctaacaaggacattgaaaccatatgtagtttcgacgcatcgaaaaacccgcttttcctaaaggtattgctggccgagcttcgggtttttgcctcctttgaaaagctccgggatgagattcaggagtttattaaggacgagtttgcggatgaatctaaattgacgtctgaagactcctctaatcattcggatgattctgaaggctcgaaaaagcagagccaggggtctcccaagacagccttcaaccacgtgctggaaagactggagcatgacgaggaccttgtggagggggaagctctggtgcctttaatctttgcactgcttgcaaatgcccgggtgggactgtcccgggatgaaatggcttccataattaaggccgcaaagccggatttggatgacgaatacatcagagatactattaacctgaacctcaggcaagtgaagccattcatggcaagaaaggaaggacgcgacgacttcttctatgaaagcttcaaactcgctgcacaggaacggtatgctcccaaaaacatccccaagaacgagcggctgaacgagtactttaaggataaggaagacagcgataagttaatcaatgtcaatgccttgctggccgattacttcctgaaagacgctctgggtcaggattcggcggactctaatgataaaaccctagacttaagtacgattgacggtttcaactttaaaggggaaaacatccgctcctataatgagcttccataccatgcaaacgagtcacgggactttgaccgattgaaagacatattgtcgtcatacagtttcattaaaaacaagatcaacctcagcgacatcaacaatctgatcgttgactatcagttcaaggacttcgaagatgcccagcaccccttcatcaaggatgaggaggaccactcaatagtcctgatcggtcgggccctggaactctcggctcctatcctctctgacgataagtctgagctgccggcccaactgtacgggaggatggtggacctgcgtgacgatgaggtgataagtcccctgattgatgagattgaggctgattacgagatggtcctgaagcccaaatccaattccctttactctccaaagagcagtatcattaaaaggccaaaggtgaacggaaccaaatccacatcaagcatcgagattaccgacgacaaactgcttatctctgccaatgaggatggaacattaaacctcttcgacctggaaagcaatgacctggagattctggaagagcctcacgattctaaggtgatccgaatcatccccacagatgaaggccaaaatatgctgatggccagtagcaacggccagatcaataaatgggacataaacaatcgtagcatcttcaaggatgacgacaacatttatcccaaaattaatgccaacatcacagacatctatctctctggaacctacaataagatctacgcatcttcccacgagggaattttcaccattgacctggataccaaagagctatgtgaagagaaagagatagagcacaagaaatataatcaaatcctggttccccggagaaacgaggctatcctcgtctgcgacgagaaggaggtggacggctgggatgtctacgaaaagagaaaggcctacaaccgacagcaccagcagaaccctgcaggcgaggaaagctccacccaattggattcatccgaggagatccgctttatgggacttaataagcgtttcctgaccctgatttccgaaaacggccagatgaagttctggaacacccttaaaaacagcggcgggggagagagcattgatgaggcacaggtctgcagccctcacgacaagttcgcccaggctatcaccctggagaaggaggaccagatcattaccatttcagacatgggcgtgctgagggtctggaacattccacgcccccgacagcctaagtttgaaatcgcgaaaatcgaaggctccgacatccctatggacattcagactgggatcaagtcacctactgcgatcgactatttcactgacggggatgagagatgggtcattgtcgccaacgagaacaatgacataagcgtgatcgacctgaacaagaaagtggaggccaacaaggaaacgaaacatagtgagtcggtgttgagtattaaaatagatggaaatcatatgattacagcttcagataacggtgagatatttgcgtgggacctcaacaaggaagaatgcattaataaattcgccagtgagtttagagtcaactctattagctatgatcgcgacaagtcacaactcctcctctcaggtgtgaagaaggagaaagacggcaataaaatatataagatagctagccgggacgcgacagacatgtgggagcctatcaaggtccaggatgacggcagcgattccaaaaagtccaaaaagctgattgacctgaacgctgatgatcgcgacaatcctaatcctgtgattgacattgcgcagatcagtgacggcatggtattcatcgaggagaaaaagatttccatgccggactacgaggccggctttgataaaaaggctacaagcctggctacgcaattcgactccaatctggcttttgtgggctttgaagacggaagcatcagttcatatccaagagagaccgaatttgatgcaggcatcaattccccagtggttaaaatcagagtgagtggcgatcgactggtggctgggtttaaggatgggagcgttgtgatttttgacctgagcgggaccaaaacagcaagctttaaggcccatgataaggccataacgaacatctatctggatgagtcccgtttaatcactattagcgaagacaagactttaaaattctggaagaatgatgagtgcacttacacttacttcctggacatcttcgcaacaagcgtgagtgttaatgatggcaaattgattcttggtgacacgctcggtaacctgaggttctttgaactgtga

SEQ ID NO: 3520 - DNA, 2286 bp, synthetic construct
  source 1..2286: mol_type = other DNA
atgatgagacaaattagacgaaacacaattgattttgcaatcgatctcggcaccagcgactccgtaatagcctgttttaacgggcaagagtctgagatcatcaaaaatcactcgactggggaggaccacacgccgagtgctgtttacatagacagtttaggtgaaatccacgtgggcaggatcgcaaaggaagctgtcctcaagtgtccttccaatgccaccagtgaatttaagctcaatatgggcttcccaattccatttctcttcgagagctcccagattaagatgtaccccgagcagctgtctgcggaacttctaaaggatcttagaaaatccatctaccaccagacaaaccagaacattgaagagattgtgataaccgtgcccgccaattcaaaccccctgaagaccaaggcaacgaaagaggcggccgagctagctggattcaagagtgtgtatctgatcctggagcctgttgcagccgccatcgcctacggactgagggcaaagaaagaggacactggaatttggatgatctacgacctggggggcggcacatttgatgtgtccctggtgaaggcaaatgggcaggagatcgagaagctggccaccagcggggaggacaacctgggtggaaagctcttcgactggaagatcgtggatgactatttcactccaaagatcatcgatgacctgaatctgactgacttccggcgagacaatcctaactaccttaaggtattctcaatactcaaaaacgaagccgagaaggctaaaatcgcgctatccggttcggataatgacattaaagactatgaactgtcgatcgaaaagcttatcgaaataggggacaagagttacgacttcaactatatcctgggcaaagaagatctgatgaatataatgaagccatttctcaaaatcacctttaatcattgctatgaggtgctcgaggagagcaacctgtctattgatgatgtggaaaagatcatcctcgtgggagggtccacattaagctcaattctccgggacagcctaaaagacgaatttgataggcccctggaatacggcattaaccctttgacggtcgtagcacagggtgcttccatttatgctggcaccatcgaaaaacagtttattgaatgcgagaaccacagattcgctctgattctcgattacgagaagatcggcttcaaggacaacatcgatatcaacggaaaggtcttcgccttggacgagaagtacagcttcttggattatagtattgagattacaggctccaatggagaaatcatctacattgaggactccaaaacgggaaaccccactgaacgcatcgacctggacatcgacggcaatttccgcttgaatctgaatgtcaaagacagctataatgagttcctgatcaacatctatgacggcaacggggacctggtcgaacttgatgaaaattcaccaaattcaatccattacaagaaagccctgaatcccggttacccgattctgtcttcctcaatcagtctgtaccttgatgaggattcttcactgattctgaagaacagtgaggacctcattgacctcgacacagaaaacgactttattatcgaatattctaagaggttcaactcttcctaccctattgccagcaagggggatatcatccccatgagccgcaaagagattctccacaccagtaaaataatcaaaaagggcgacggtgacagcttcatcaaattctccttctattttggagagcttattctagccaactacaataccttactcggacagatagtcatcacaggcaatgacattattgacgatctgcccaaggacagcgagatagagctgaacataaacatcaacgagtctaacatgatcgactttgaagtgttcatcccgtatttacgccagagcttcaacaactcatttagcttcaataattacaacaactacaacgggtttattgataactatgataacttgaagagcaagcatgatgagatcatcaaaaaatacaataaaattcgggattttgcgcgtgatgaggataagaaagagctgtttctcaaaaatggcatctatcaaagcatagagcgggtctacgagaacattgaagagatcgaggaaaaggagataatcgactaccttgatatattggttgatatggctcggtacgataagatagccgtgtacccatccctggagtacctgaactatttggacgatgttttggacgaatgcaagttcttcctgaccattgccgacgtggagctttcgatctga

SEQ ID NO: 3521 - DNA, 1659 bp, synthetic construct
  source 1..1659: mol_type = other DNA
gtggtgctcttgaactataatcagacgaaagacatgatagaggactacttccacggccagtacgaggtccttaagttcctgggggaaggatcattcgcgcaggtattcctcgtcaagcaaaacttcctaaacgacaagcgcgccatgaaaatcatcaaagaaccactgtcaaacaccaaaaatatcgaccatatcttccacgaggtgcaaattgccagccagctccaccacgagaacatacttgatatctacgacgccgggcttatcggagacatcgcatacttcgtgctagagtacgtttccggcggagacctggaggactataggacttcatacctcaaggccaaccgcccaatcccgatccacatttccttggacatcatcaagcagatcctgatggggctcggcaccctgcactcgagcaatccgatcatcatccatcgggacctaaagacaaagaacatcctcatgaactacggtgatgaacgtctgatcgtgaagatatccgacttcggctttgcacgggagctcagtagcaacgcagatgactttgaggtaggtggcaccaagccatacatggcccccgaatgctttaatggcgtgttttcaacaagaagcgatgtatacgctgtgggcgtgattttctacctgctgctcgcaggggaatttccatataggctctccgactatgtcattggtgacatcgtggatggcaagccctggaagattgatctgaagccccctagccactttaatcagaacgtgcctaagtttgttgacaagcttgtgctgaaggccttggatgtcaatcccaacaaacggcatatcgacgcaaaggactttgaaaatgatctggataaggccatcgagaaatttaaggaatattcttactataaggagtacctgaacgagctgaaaggactggaagaactggacgagctggataatctgggaaaacttggcgagctgggggagttcggcgaactgaaggaattggaggaatctagtcggattgctgaattaaaggagtcttctaaactgggggaatccaataaggactcgaaagaccaggaccatatcctcaatgacaacatcctagaggcattcagactggcgaaaacagaggacggactggatgaggccagttccattcttgagaaggaggtcctgaaggattatgagattcgcaagacctacggcaaaactctgaggttatggaaaggggattaccccgatgccaaactaattagcgaggctttcacggttacactcaaaggagaaaattacaaactggcgattgacctgttaagagaagccttcgcctacaatcctatactcaaggacacttacggttactacatagatctttggagtattttcatagacctgaacaaaaacaaggactttatcatttctattaaccgactggagaatcttatggatcgcaacgacaagattagggacatctataaggatagcatcgacaccctcaaaagctatgatgaggatcgaattttaaacgaggccattgatctggctgatcgggggaacctgatcgacgctagcaagctgttggagctcttggtcgtgtatgatgacgaaataagaaaggattatgcttataaactctccttgtggaaacaggacttgagtatgtga

SEQ ID NO: 3522 - DNA, 1146 bp, synthetic construct
  source 1..1146: mol_type = other DNA
atgaagaaaaagttagaatatattcagacagaaaagataaagaacaagaactacgagttttaccgcaacatcgagaataacaaaacagtgatttttcgaaaaaccaagttcggaaaacgtgagaaagtcaatatcatcgattcagacgacttgaccgagcagattatcaatctgagctacaataagtccagtcgcaataaaaagattcaattcccgtacgacaaaatctgcaaattcgtatttaagaacaattttcaagcatgcaacatagtcttcaagctaggtatcgactttaactatttccttgacactgaagtgatcaatcagatttttgagtccacacggtcagacatagtcatttgtgcaaaggaggaaatcatatacataattgagttccagaaggacaagctgaagaagaaagataagatccggtttggcaattaccagaccaatcttcacaactactatcacggccgaaaagtgatcgtgttcgtgatcagtttcgaccctaacgaagagctgggggacattccctatggctatgataaggagtacgggttcaccatgcatgtcaaatcgtttaacgagcttgatgcggaggagactatcaatatcattaataagagaatccggaccagggccaaaatcaatttcatcgatattgtgctgctgcatttcctcccattcatgaagtctcacaggtcccaggaagagctgttgaggatcgccgtggatctgacgaaccaaatcaggaccctgaacgaagataagatcctggagctgaagattacacagactgtacttgctcaggaaattctgagtgaggaggagttcgaggagctcttcaaggtgataaaaatggaggacacgggattagtggaagaagttagacagctctactgggagcacaagatccgcaatgacatgaatgagctcaaccagatgcggaacgaactcaacgaacgcagcaaccagctcaacgaaagatccaaccagctcaacgagcggagcaacgagctcaaggaagaggggaaaatcgaagttgccattaacttgctgaaactgaaacagccctttgatctgattgctaaggccacggagctaagcgaaagcaccatcagaagcctgcaaaagacaatattgtga

SEQ ID NO: 3523 - DNA, 804 bp, synthetic construct
  source 1..804: mol_type = other DNA
atgagcgaagaggagattgactataccgaatttatagacttcgaggattcgaatctgatttcatttaagctggcggcaatcaacaacaaggtgcggttttccatcctcgaaatcctgagggatttccagaagctcaacatgaataaggacaagaccttcaaaaaagacccatactactctcgcgaacttaatgagattcttttaaagaaatacgatattaacatttccctgcagatgttaggccagcatatgaaacagctgctgacagctggcctcattgaagaggtccctctcaagaaagaggtgcccaataagatcggtgcccgaaacgtcaaggggtatatcctaaagccggacgcctttgaggagctgttcctggagatcaacttcctcagcgatgagctcctgagcttctttgacctgtacaaaatcaaccagaagttccacgacgaggactactgcattctgaccatattcaatggagccgataagggcaagacatttaaggtgcacaaggatgacaccgtccttatcgggcggaaagctgatttctccaaaggagatttggcctcatttgctatcctgttggacaacagctatacggcagtgagcaatgtaggcaaaccacacctaaagctgttctataaggacgacagttggtgcatcttggatgagggcagtacaaacgggacgttcatcggacaaaatgaagtggccactggcagaataactccccttaagaaaaacagttttctgaaactctccaggggtgaaggaggggcggttatctactgttctttctga

SEQ ID NO: 3524 - DNA, 771 bp, synthetic construct
  source 1..771: mol_type = other DNA
ctgaacattaggccctcatactcctacgcaagtatcctcaatgtctttatagaggaaaagtacaaagataacctcgggtgctttcggaacacaaatttttatgatgtgctggacttccagtcagatgattcgtctttttactatgatatggcctttttcagcttctactatggggactataagtccagcttctttctaagccagaaggccatgattctgggtcatgatgagggcgacttgaagctcctgcggctggcggctttcaacgagctcagcccaatcaaaaaactactgtttgactccataaaagaggagttctctaacatcatcaaggaagacgatgaggaactgttcctgttctatcttgaggacatgcactacctggagatcgcccttaaccagaaggacatcaacgttgaagaggactttctcaaccttattagtaatctgtacattcaagtgaaatacatggactacgtggattactacgccatgatcaatctctatcagttcttctatatcaataagttctacagcgaggccctgcttctgatcaacgagattctcgctcgcaacctgaacgtgttcaacctgaatagaaagttagacgtattgtttaatatcaacgacattcctggagcatatgacgtctatcaggatatacgactcttggacccgaactacttcgactcctctcccaatagggaagagatgtacctggaagtgtttaccgaacacttcttcaaaaatagtttgggcaagttagaatga

SEQ ID NO: 3525 - DNA, 717 bp, synthetic construct
  source 1..717: mol_type = other DNA
atgacaaatctggagctgaacatcctggatctaagcctcaacgaacttttacgcacagtgaataaaacagaatcaattctgaaagaccagtacgatgagataaaggaatttcgggacatcatcttgacggctcgaaacctgcgcttcgacaatggcaatgacgccaccatctttttggcaggttctggcaggtctggttttgtagcgaagttctttgccatgagactgatgcatctgggcttccatgtgtatgttttcggcgagactctcgtgcccccagttcacgatggcgatataatcctcttcatatcgaaaagtgggggggagaacgccgtgaccgatagtatcgaatccaccaagcttgaaaacattaaaaagtccaagagttccccttcaaaaaacaacatgatctttgagaatgtcaagattctctcagtctgcggaagctttgactgttacctggctagccactccgatgccaagattgtcattgaagccgagagggacagaaagtccaccaaggaagagagcgagcgtttcgacagcctgggattcaacagcaatgagctcgtgatcatggggactggattcgaagactcggcacttttgattctggacgcgctggtggtcgagatgatgaacaacctagggctgtgcgaggaggacctcgaaaacaatcacgagaacatcaatcggccgaaggtgtctaaaaaatga

SEQ ID NO: 3526 - DNA, 1113 bp, synthetic construct
  source 1..1113: mol_type = other DNA
atgtttgagctcagtggaaagtacaatactgctaaagtcttcgccgacaatatagacaacgacagcgtgtctcagatcattcaattcctcaatcagcctatcgccaaggaccagtccatccgaatgatgccagatgtgcatgccgggagcaactgtgtaatcggaaccacaatgaccatcacagataaggccgtgccaaaccttgtgggcagtgacattggctgcggtatggaaaccgtgtacctggacaccgatgagatcgatttcaatcgctttgatgagatagtccgcaaatacgtgccgcacggctatgacattagggaaaatccccacccttacataaagaaactgcggctcactgagatgcgttgctacttcgatctagaggccggctcgcagggcaacttttccctggggacccttgggggcgggaaccacttcatcgaggttggaaaggacaaagaggaaaacttagtgttggtcgtccacacaggcagtcggagaatcggtgccgacgtatgcgaatactaccagaaccaggctttgaagagcttcaaaagaatgcataagactgcaacgaacaaggagctcatatactgtgaaggccagctgttcgaggactatatccacgacatgaaaatcatgcaggaatttgcaagctggaacaggaaggctatcatcgagaccattctctcacactatgggatggattatacagacagctttacgacgatccacaattacatagacacagaccataaccaaatgatcctgcgaaaaggcgcggtgtcagcttacaaaggcgaaaagctactgattcccatcaacatgagagagggttccctgatctgtaagggaaaagggaataaggattggaattgctctgccccacatggtgcggggaggctgatgagccgccgggaggcaaaggacaagatctccctgaaagaatatgaaaacgcaatgaaaggaattttcaccaattcagtcaaccggggaaccattgatgagtcccccatggcttataagcccattgaggccattgttaacaatatccaagatactgtggagatcattgatattataaagcctgtttataactttaaggcctga

SEQ ID NO: 3527 - DNA, 735 bp, synthetic construct
  source 1..735: mol_type = other DNA
gtggaagttgagggggataagatgaatttcaaggaatttgaggagctcattaatagcggcgtcaaggagattagcctcaatgaggacatcagtctagaggataagacacaggcgcccattgaaatcaagaccgacggcttggtcattgacggaaaaaaccatatcatcgacgggaataacaagctgccaatcttatacataaaagcttctaatatcactcttaaaaacatcatattcaaaaacggcttctcagaggactatagcggtgccattaccaactattccaatgaccttaaggtggagcactgccaattcatcgataactcgaccgaaaatgcaggtgacctgtatgggggcgccatctacaatggagagaactcgaaactgacggtggaaaagtccatttttaaggaaaatgattcagactttggcggggctattttcattgacagtgatagcaccgtgaagataaacaactcagtatttgagctcaacatctctgaatttgatggaggagccatttacaataagggcgagctgatcatcgacaaatccatcttcaatcagaacatggccttcaaggggggagccatcttcaacgaaaacagtctgactatcaacgattctcacttcaaaaacaacaaagcaagcgacggcaacgacatacagacagaaaacgaggatatttccataagcaactccctgtgtgagtttatcaataatgataactactga

SEQ ID NO: 3528 - DNA, 1113 bp, synthetic construct
  source 1..1113: mol_type = other DNA
atgaatttcacggagtttgaggaattattggggggcgaggcaaaggagatcagcctgtacgaggacgtcattctggaaagtgacgaagactaccggaggggcatcgagctcaagcgggatggccttgtgatcgacggcaaggggcatgtcatcgacgcaatggagagggcgaaggccttccacatccaaggagacaacattactatcaaaaaccttaagtttaaaaatgccgttagccacaagggcaacgggggaggagccatcgagaacgtgggaaaggaactatccataaaaaacagccacttcttcaacaactgttcactgggtccgctggggggcggagcgatctgtagcttcgaggatatgaacattaatgactgcattttcgaaagtaacacttcagtgcgcagcgatggcggtgcaatatacctggagacctttttcaagccaaatgtaaccgtcataatgaagaactgcagctttaagaataattacgccgatggcgggttcaaggactttggctccaacgccggtgccatatttaataaaaacgctaatctgtatttgtttgactgtaacttcgaggacaacggggtggtgagcgcttacgattcaagcagtgaatcgattcagaataaaaacggcattataaccatggacaactgctgctttaataccagagagtcccactccatcttcaatctggggtttctcctgatcaacagttcccgcttctatcatcaccccgaaaacctcgagattcagggttcgatcttcaatcgaggcttcgtgggactgctctatggggagagaaaccagtacaaagtggagctggatggaaaggtcctggatagctcagatattggtgacctgatcaacgagtataagaagacatacaacctcgatacaaaagaagttgggttcatcttcaagaagaacattattgaatccatcaatgatctgagtagcgacaactttaatttagaggacttcaacctaggcgatattaatctttctgactacaaagacgacgagtatctcatggacctgctcaaaaataaaatcgatttgatctactccggagattttgaagactctgatgaatctatctga

SEQ ID NO: 3529 - DNA, 411 bp, synthetic construct
  source 1..411: mol_type = other DNA
atgctctactaccgcggggcgggatgggccgactgggatctggacaattttggaagcagaatctcgtacattgacgatttcccctttaacatcttgaaggctctcctgagctatttcgaaaccggggacgagcagtctgtggaatttaacgccgaaggctggttctacacgttcaagttcagttccgatgtccgggtaggcgagcgcgtgatctacgaaagcaccattgattttgcaaatgactttatctgcgagattgaggaacggatgggcctttgggccttcttcccatcccgaaggactagtgacgaggactattatgagctggtggacctgatcgtcaaaatcaggacagagctactggacaaggatctcataaacaaatggatcgatataatttcacagtcctga

SEQ ID NO: 3530 - DNA, 1761 bp, synthetic construct
  source 1..1761: mol_type = other DNA
atgatgggggattacatgaacacggattatctgaaggagtttgaagagttgaatcacaccaccgaaagcctcttcgatctgggcatctctgggcttctgatcattctgaaggacggaacaaacctgaccagctggagtgagctaagcaaccctgacgatatcttgtatctcagtgcagacttccggtgtaaggagaactacacggaatttagtaactttaagaacgccaaggtgctgatcctccagaattacgtccgccccaattttggcgtgggcagcttgtttttcaaagaggctgatctcatcactaaactgtctacctggcattccctggtggctttctacggcatcaactgggacatctccagcaccgattcgttaaagaacatgttcgccaattgcctttcactggaatacgcttactttgaggactgggacacttcccacattcgtaacttttgggggatgtttgttgcctgctgcagcttaaaggccatagacggcatggagaattgggacctgagctctgctgagaacatggaatccatgttcgagtcctgcatgtccttggaagacatttcattcctctctgactgggacatgtccaatgtggaaaacatctttgaaatgttcagggattgctacagcctaaaggatgcgagctgtctgaactggaaatttaagaatctaaaaaacggtgacaaccttttcgccaactgccgaaagcttgaaagctttccaagctggtacgatgatgagttcatcaatcagttcggcatccggaaccagctaaacctcattgacgacgatagctttttctataagatcgcagggggattcgacccccaggacatcttcatagcagtagggtacatcagggatgaggagtgtctgaaaagattgcttcgcgactcctctgtgcacttctatgcgcgaagggccgctcttctgaaccccaacctgaacgacacagagattctcgaggagtttgcagacagcaaggattacgtggaaagggcctatgcaattgaaaaccctaacttcaccaacatcggaatcatacggcgcctcgccaataatgataagagtcatctcgtccgcttcaaggcagagaataagctgaaagagctgaaaagtgaaggactggaaatcatagaggactaccctagagagttcaagcaagcctttgaaggtcatgacagagagagggcctctctcgtcctctcccaatggagaggatacgactccacagatgctaatttcattctggccaaggtgatctcagactcatcggatgaggaaatcgagtttagcgaaaccttcgaggcctatattatatcaatggaggagaaaccacaggacccatcactgttcaactggtttagttccacagctgtggaatgtatggaaaaacgggtggacgaggatattggcttctcccagctgttcaacaatatgtataagagtcacatgaactcaacagattatgcaacggcctttttagactttttccaggacattctggaaaatgatcgcgtcgagaagctcaatctgctgcggggtctcgttgattcgtgggatactgactgtccggatgacgccaatatgcactgcgcttacgttatccttaacatcaaaaagatttcgaaagacgaattggaggaccgaatagcgaaggctaaagtctgcattccggagaatttgaatagttatcccaaactgatggccttcatgaatgcggtactggaggccgacaaatga

SEQ ID NO: 3531 - DNA, 945 bp, synthetic construct
  source 1..945: mol_type = other DNA
atggagcttgaagaacggatcgaagaggctctagagtatatccagaacgacagcaactatgccttggagcttttcaacgggattctcaaggaagacccccacaatatcaacgctctcaatggcaaggggtcagccctgatgaagctgcaccgcaaccaagaggctctcgatgcattcaacgactcactgtccgtagaggaaaacccttcggcctatctcaacaaggggatcatactgaaaatcaacggagactacaggaacgcactgaagtccttcgatagggcgttgaactataacccgcgactggcttccattgtgagtctgctcaagaacgaaatactggaaatcttcgagaaggagagcacggatatcagtctgctatatgatttcaacgaaagctgtacagcactgatcaaaaaggcgtacggctacaagaaccagggcctgctctgggatgccctagactgcttggaggaggccgtcaagcaagatccaaaaagcgaaaacagtataaatgacatcattaaaaagcttattctgaccatcaagaaggaatttctgtacaaagaaatcaattccaaaagcaccaaaatcgacaagttgaaattccagactattaagagcattattgtggaggacaatccccataaaacactgctgctgaccaataagatatttgaaatcaatgagaacgatcttgacgccttaaactaccagggcatcgcctacttcagcttgggtgagtacattaaatcgattgagagctttgacaagtgcctgtccatcaatcccaattacacttactgctcattcaataaaggactcgtcctgagacggatgggactcttaaacgagtctctggactgttttaataaagtgatgaatgagtctgattttcttaataaggttaagccatttcaggaggaggtgctcaccaagatatga

SEQ ID NO: 3532 - DNA, 603 bp, synthetic construct
  source 1..603: mol_type = other DNA
atgaagacaatcgccaagccgttccagaacagtatagacatcaagaaatcccaattcatctgtcgcctttttcctgctcagacggaaaaagaggctaaagatatcattaaagagatatcggaggagtataaggatgccacacacaactgcaccgcctacgttgtaagcgacggggaaggctatgatgacaatggagagcccggcggaactgcaggccgaccaatgctgaacgtcctaaagaagaatgagattaacaacgtggtggccattgtcactagatacttcggtggtatcaagctgggggccggagggctggtgcgggcctactcaaaatccgtgttagagtgcctggctattgctgagatagtggaaatggaactctatgaactcttcaggttcacctttgaataccaggacatcaaggcaatcgacgcggaggtgagggccaagaacctggccgtcattgagaagcagtatgaggcacaggtcatctactttgtggcaaccgataatgtcggcattgttaaaagcgtgcaagacaagttggcgaagcaggtaaaaatcgagcatctcggcagccggtacctggaaaaaatcgtgtga

SEQ ID NO: 3533 - DNA, 510 bp, synthetic construct
  source 1..510: mol_type = other DNA
atggaggaccgcaaggcaaaatttatcgtttacgtggtggtgtgcctgcttgcttttatctgtagcagcaccgtcttcagcatgactggcggtctgtctgattggattgtaagcaacgtcaacactaacgaggatgccaataacaatggctacattgacagcagcgagggacaatactacagcgactcggacgggcagtattactccagttccgactcctatgacaattcaaatgggggcagtggattcttagatgggctgttcagcagttcggacaattccgaatccaactactactcaagctccgatgaggaacccgatttcctggccaggctcatacgggaatttatcggtggcagttcaacaacggacagttattatgactccagcgatagcaactactactatgaggacacctcaaacggctatgatctagggaacggattcagctacgatctgaatgaactcttcaccaaaacagacaacaagctcaatcagttgtttaactga

SEQ ID NO: 3534 - DNA, 3513 bp, synthetic construct
  source 1..3513: mol_type = other DNA
atgatagttctgaacaaaagaaagaaatcctgggaaatctatccgattggcagtcctaaaggtgctctgaatacaaaaaggcaggctgagtttgtcggcatcctccgcttcatggaaggggaggacgggttatcaatcaagcgttttctaatcaaaagcgacaaggaagaaaagcctttggctccctcgaaggcgatcaacctgttgcgctctcaggccgtgttcctggctcagaaagacgatgaaatggaggccttcctggaaaagaacaacgtcaaggtccgatttacaaacatctgccagcactgcagttatgaaggctacgtgaccattataaacagcgacttctcatataactatcatgatcagctcatctgcaaatcctgtgccgaagagaccatcaagcgcgagcttcagttgaggggatacgacaagaaggttttcagaaacttcaagaaggtcctggaaaagactggcagcctggacgacgtgctagagatgctgtcaccccgttttgaccctctcgcccatacagacttgactctgtttgacaccattaaggtgcacgaggataagatacctaaaatcgccatgaagcgtcttaaggtgccaaaggaatttcgggacgttctcctcaaggataaccaatacctcctgccggtgcagtacctggccatcagggaaggcctcctgaaggatgagaatctcttggtggtttcagctaccggtagcgggaagacactggttggcgagctggcaggggttcccaaggcactgaacggtaagaaattcctctttctgaccccgctggtggccctggcaaaccagaagtacagagacttcaagaagcgctatgagccacttggcttgaaggtggcgatcaaagtggggatgaacagaatcaaagcaaagggagagctgaagcttccagacagtaatattgccgatgcggacatcgtggttggaacctacgaggggattgattttctacttagatcaggcaaaagcgacctcttgaacgatttaggcctcgtcttaatcgacgagattcatacaatctccgatgaggagcgcggtctccgcctcaacggacttataaagagaatcgagcacctcttcccaaacacccaggtgatcggcctctcggccacaattaaaaaccccaagacgctggcacaggactttaacatgaagctggtccagtataaggagcgcccagtgcctttagagcggcacatcgtgtttgtgaacggcgatgttcagcggcgtctgctgatgagaaaactggtgcaacgagagttctacagcacatcctcaaagggtttcagcggacagacattgatatttaccaactcaagacggaaaacccacaagatagctaacttcctatctgggaagggcataaacgcctccgcttatcatgccggactctcctacttcaaaaaggaaaagattgaaaaggacttcagcaagggcaagattgccgcggtggtcaccactgccgctctagctgctggagtggatttcccggcatcccaagtaatttttgagtccctgttaatgggaaacaaatggatttccccaaatgagttctcacagatgctcggccgagcaggaaggcctagctatcacgaccggggaatcatctacctggtgcccgagattggaagtgaatttgacggggaaagtgaggagtccgtcgccctagaccttctggaaagtgatgtggagaatatcattgtcgattacacggaagacggctcactggagcagatactggcagacatcagtagccgatcattaacgaaagtgagggatgtaatcaacttctataaggacatccccgtcccaatcgacattaatacggccctggaagagctgagggacaaaaaagcgatcgagatacacgcagatgacacgattgacgtcactcggtttggtaaggcggtggccatgtcattcctgtcaattgatgacggggtcatcatcaaggattccattaacgataagaattacctgagccagtattacagcaagcccttctttaagaccaatcttcgcgagctgagaaggctgtccgaccggattgatgaggagaacgaggagattctgaatagaaacaggaagatccaacataagctggaccagttgaagaagaacgagagtcaaaagaaagaggacaaggataaggaagataagactgataagaagaataagaagtccaaaaagaataaatccaagaagagcaaggactctaagaaggacaaaggtaaagacaattctaagaagtccaagaaaagcgaggattccaagaaggacaagaaaaataaaaacaattcgaataaatctaagaaagataaatctgagaacaagaacaaaagcaataagtctaacaaatctaagaaagacaaatctgagaataagaacaaaagcaacaaaagcaacaaaagcaaaaaagacaagagcgagaataagaacaaatcgaataaatctaataaaaagaacagttcgaataaggaatttaaggactctaaaaaagataaaaagtctaagaatagtaaagacaacaaaagcgagagtagtaagaaggataaaaagtccaacaagtctaataaatacaacaaatacaacaagagcaataaatacaataaatcgaagaagtccaataaaaataataagaatagtagtagcaagaacaaaaatgacaactctaaagatagcaataaggataaaactaaccataaggagtctaaaagtgagtcgaaccaaagcaaaaacctcgaaaaagacagccaccctatctctaaggactacaagaacagtaatgcaagcgtctctgatgatctgaaggactattccaagaaagtaatgtataacaaacgaatcaacatgagcaaaaagcagcacaagaccatagaagataagcccattctggtaaacaagcttaactttaaggaaaacatcttcagcgagatcaatccacgaatgtcgaaaaaggaagtgaacgctaacaatctgctgaaggtccagtccattgcccttgacctcgagctgtttgaaaatgcttaccttgctcccgtggtgcacaagcagatcgtatccgccctgaaagtaaacttctccacacggctgttcagcgaatcaaccttggatattatatcctccggggaagccattgccaaactcgatatcaagttccaggatgctcttctcaagctccagatcgacttcctgcggtgtgactgcaacgaccgccccttctgtgagtgcttgcaaaggggcatttcctattacatcttgaatcagcggttgaataagagggaccccattgacatctccaaaagtcttctcaaggaatatcagatccaagcctaccctggcgatattttctcatggctggatgcctacgtgcggaatctggacgccattaaacgcgtggcccaggcatacgggaaaaaggacatcgttaaagaagcggataaactaatcaagataatcgagactgggaaatga

SEQ ID NO: 3535 - DNA, 969 bp, synthetic construct
  source 1..969: mol_type = other DNA
atgaacatcctcatcaacggaaccggagcgatcggcatagggctgggcgcgtcgatgatttcacagggtgcaaacgtgagtttctttgctagggaagagactgcaaatgccatcaggaagaacggaattaaaagaaccggcatcttcaatcactacagcttcgggccagaaagttttaaggtctacacagactacaaggacattcccgacaacgagtttgacttcgtgctggtatccagcaaaaccattgccaacgacgatataagcagaaagctaaacgaacacaagtccatcctcaaagaggatgccaaaataatcatcttccaaaacggctttgctaacgacgagccctacttacgcttctttccaaaggaacaggtctactgtgcacgggtgatcacagggtttaaacgccccgagcggtacatcagcgaggtgactgtccataccgaacctatattgctcgggagccttcagaaggatgatgacggcgagttcattgacagccgcccagtgtcgatcattagcaagatgatcaacgattcaggcatcccgagcgagaccactgaggaactggataagttcctgtgggccaaaatgctctataactgctccctgaaccctctgggtgccattttgaatgggaactatggcaaactgatggaaaatgagtattccgttaaaataatgaatgagctaattgatgaaatcttcgaagtaatcaaggcctcaggataccggaccaactgggacagccccgaggagtacagggaggtcttctatagtaagcttgtgcctgacacgtacaatcaccgttcttccacactgcaggacatttccaagcgacagaagacagagatcgacacgctcaatggaaaggtgatcgaactgggcgagaaatatggtgttgatgtgagtgtgaataagacgatttataatattatcaaaaccatagagtctgaattttga

SEQ ID NO: 3536 - DNA, 489 bp, synthetic construct
  source 1..489: mol_type = other DNA
atgatcatagtcaccacaatctgcgtgatcctgattctgatcgttcttttttacggactcttcccggggttgaccaactcaaacgataacagtgacaataatctaatcattcagaatcagacgtctcacttcaccatcgacatcgaaaacgggacttatctcagcggagaaggcaaaagcaagatggtggactccaactattccacactggaatcctacgagaacttcacgatttcaggctacgaggcctatgagatagaactcgacaatggctcttggtacatagtcagtctgtataaggtggactataacaccccctcgagcgactgggtatataatagtgatgtggatgaggatgggaacgcatacatcttcttcaatagcaaaggtgagtactacggctactttattaacattccaagctcatccgacccttccacatttgagaatttaagctttctgactagcatcttccattacaaccactga

SEQ ID NO: 3537 - DNA, 243 bp, synthetic construct
  source 1..243: mol_type = other DNA
atgagcgacgtgggcaagacagtcatcacaacaatcatcaccttggtaacgaccgccttcggcctggtcgccggacttgcctggaacgatgccattcagaaactgatcgacagcgtgatggggcccggagacgcactgactgggctctttacttacgctgtgattgtgaccatactcgccgtggttgtcaccattatactggcgcggatcgcagctaagatgggcgtggagctagaggaatga

SEQ ID NO: 3538 - DNA, 387 bp, synthetic construct
  source 1..387: mol_type = other DNA
atggaagagatcgtatttaagccgatcggatacattaaaagtaaatatgaaacagtcgagaacatgccaaaatccccaagggaaggcatggaggacgaggcagagctcatcgtcaatgaagagtacctggagagcatgtctgacatgaaagccggcaaggagtacatggtgatcttctatttccacaagtccaacgggtttaagcagcgcgttccttttagaggtgacgggccaataaccggcctgttctcaacccatgcccctaaccggcccaatcccattggagtgagcataatcaaagtcaaggaaattaacggaaacgtgatcaagttcaacggggtggatatgctgaatggcacgcccgtgctagatattaaggacgcttga

SEQ ID NO: 3539 - DNA, 339 bp, synthetic construct
  source 1..339: mol_type = other DNA
atgaaacgggtcgttgcggtgtttcgtcaacagaagttcgaggatgtcaaacgggccctgctcgcaataggctgtgagggcatgaccatctccgaagttaagggcaggggaagacagctgggggtgaaagagagctaccgaggcagcaactattgcattgacctgatccccaagacacgcctcgaattgattgtcaatgaagatgacctagaggatgtgatcgacacgatcattgaaagtgctaggaccggtgaaatcggggacggaaagatcttcgtaagcgacgtggaggaggtgattcgcataagaactggagagcgggggtcaaaggccgtgtga

SEQ ID NO: 3540 - DNA, 1212 bp, synthetic construct
  source 1..1212: mol_type = other DNA
atggtggtgcttagcgccggggacactgcatgggtgctcatcgccactatcctggtgctactgatgagcatccctgaggtggcgttcttttatagtgggctaacaaaacgcaaaaatgtcctgaatacaatgtttctgacgtttattgcattctccattgcaagcataatatgggttgtatatggctacccctttgcctttggagatgtcagtattagcgggttgatcgcgcagcccgctcatttcttcatgagcggcatcggcattgaagatttgacaggaaccatccctaccatattgtttattgtgttccagctgacctttgccggtctgacggcggccctgatctcaggttcgatcgtcggcaggatgaaggtctcagcctggatagtcttcatcatcgcctgggtcaccctggtgtacgttccgattgcccactgggtatggggcggcggattccttatgcagatgggttccctggacttcgctggcggtacagtggtgcatatcaactctggggtgaccgctctcgccttggccctggttctcggacggcgaaaggacacttccctgctaccacacaacctgggatattcagtgctcggggccggattcctctggttcggatggatgggcttcaacggaggatctgccctcgcagctaacggacttgcggccagcgccatcctcgtttcgaacgtggctgcggcaacagcactcatcacttgggtgattattgacatcgtgaaagtcggcaagcccaccatgctgggggcaatcaccggtggcgtggctggcctggttgccatcacccctgcagcaggattcgtggatgtgccagccgcgattgtcatcgggtttgtgaccacgttcgtgtcctactttgccatctactacctgaagacaagattcggctacgacgatgccctggacgtgtttggcgtgcacgggctgagcgggatttggggcgcaatcgccaccgggatttttgctgtgcccgctgtcggcggtgccgctgggctgctctatggcaatccagggcaggtcacaattcaagtaataagtgttattgtaaccattgtctatgctttcacgatcagcttcatacttgctaagatccttgacaagaccatgggcatccgcgttgacgagaaaactgagatcgaaggattagatactaaaatacacaaggagtccggttaccggttatga

SEQ ID NO: 3541 - DNA, 420 bp, synthetic construct
  source 1..420: mol_type = other DNA
cttaaatcagataagcgggctaagtttgccatcttcttcagtattgccatcctagccctggggctgagcaacattgctgctgtgtggacgggagacttgataagcggttccctcccggtcatcaacgaaacagataagctcatcgccctggacaatgacaatttctctcccgcaagtctgaataccgtatacgaagagaaaaaggttgtggaggtggtcaacgacacatctgacgcgaacgatactgattccacccccaacaatgcggactccaatacggaaagtgacgatacttccaactcaaacaataacaacaacaaccaaaacagcaacggcaacggcaatcagaatacaaacccaaataacaatgccgagcctagcagcggaggctcggcagggcagaccgaaaccgaggagtga

SEQ ID NO: 3542 - DNA, 570 bp, synthetic construct
  source 1..570: mol_type = other DNA
atggaggagaacaaaaaatttgctcagaaggtaaaagatatcagagagcgccagcagatgagtattgaagaactggccgaaaagagcggcgttaagcttgaggtgctgcaggccatggaaaacggggagatcattccctcactcactcctctgacaaagatggcgaaggccctcggggtccggctaggaaccttcctggatgataccgaacagctcggtccagtggttgtccgagatggcaagatggaaaacaccctgtactttagcggcagggaggacgtcgcaaatgcaacaaatctcgagtttcactcgctgggggccggcaagcatgaccggcacatggacccgttcatgattgatatcgaccacgacgacgagtacgagttgtcctcccacgagggtgaggagttcatctatgtgatggaaggagagatcgaagtggtctatggccaagacagcataacgctttccaaaggagacagcatatactatgatagtgtggtgccccatcacttacatgccaaggcggaaaaggctaaaatcttggctgtgctgtacactccattctga

SEQ ID NO: 3543 - DNA, 1665 bp, synthetic construct
  source 1..1665: mol_type = other DNA
atgagtgagctatttacagagctgccaattggtaagttctttgagatgcaagtggagaagcagccggatcacgaatttatggtttatccagaccgcaatctccgctttacatacgaacaatttaacgagcgcgtggacaatttggcaaaaggcatgctctcaataggcatagaaccgggggaccgtgtgggaatctgggcaaagaacgtcccggagtggcttacgttcatgtttgccactgctaagatcggtgctgcaatcgtgaccatcaacactgcctaccagtcccacgagctggaatacgtcctaaagcagtctgagatgaaggcgattgcaatgactgacggattccgggacacgagctatttcgatatcatctatggccttgtccctgaaataaaggagagggaaagggggaatctgaaaagcgaagagttcccttatctggaatacattatccacgtcggtcaggaaaagcataggggcatgtacaacaccaatgaattgctgctgctggggatgaactatgacaatgataagtatcaggagatcaaggatgccgtgacccagtatgacgttatcaacatgcagtatacaagcgggaccgaggggttccccaaaggagtgatgctgactagcagaaacatcctaaacgacggctattacattggagagaatatgaactataccgaaaaggacaggctgctcctccaggtacccttgttccactgtttcgggaccgtgctgggggtcatggccgtaatcacccatggctccaccatggtggtcctggaggagtacgatcctctccttgctatatcccccatccagaaggagaaatgcacatcagtctatggggtgcctacaatgtttatcggaatgatgaaccatcccatgtttgacatgtttgacatgtcctcccttagaactggtatcatggcaggcagcacgtgtccagtggaaaccatgaaagatgcgatcaacaagatgaacatgaaggagatcacaagcgtgtacggcctgacagaggccggtcctggctttacccaaacaaatgccgccgacagttttgaaaagaaaatcagcacggtgggacgaaaattccccaatattgaggtaaagattgtcgaccccgaaaccggagaggagttgggccccggcgaaaccggcgagattatgtgccgagggttcaatgtaatgaaaggatactacaacatgccggaaaagactgcggagactatcgagccagacggatggttacactctggagacctggctactgtggatgaggatgggtactactcaattgttggaagaatcaaggatatgatcatccgggggggggagaacatatacccacgggagattgaggaatatctcttcacccacgagtgcgtgcaggatgtgcaggtggccggtatccccgatgaaaaatacggcgagattgttggcgccttcattatcaaagagcccggctacgatgacattaccgaagctgacataagagacttctgcataggctcgatcgcccgatacaaggttcctaaatacgtcttcttcgtggatgagttcccactcacaacgagtggtaagattcagaaatacaagttaggcgacattggcctgaaactcctggaagagcggcgcgaacggggagagctgtga

SEQ ID NO: 3544 - DNA, 879 bp, synthetic construct
  source 1..879: mol_type = other DNA
atgacccttgttctgatcgggccggcctgcgaggacctgattataatcggcaatgagaagagctccaggatcggaggtgcaagctactttcagagcttcgtctacgaggagttttacgacgactacatcgctatcgtaaatgctcagaacaccgacctgatcaatgagtttcccgacatgtctaaaacagagctcattctgaaggacgatacccactacttcatcaatgaatatccagataaggacaaccgcgacatcagaaagcagtccacgaatttcgcagacattccaattctggcggatgacctcaaagccatctttaacaacctgggcttgaacgaggacaacatcgatgccttcgtgataaatcccctgaacagcaacgacatccccctcgagaccctagagtatttaaacagtttcaatttgcctatctttatatcccttcagggcttcctgcggttcaaggacaaagataattccatggtgctcaagtcatatgaggatctcgattacatcttcaacattgccgaagcgatcttcctggatgagaaggaactgaagattgtcagtgacgaagacaagtctgactctaaaattgaaatccaagacattggttttgatgaaaaaaccaacactatttttatcattacaaacgggagcaaggggagccggatcacggatttcaagggcatcaacataaagatagattcagtgaaatgcgacaacatagtggatgccactggctgtggagattcctatatggctgccttcatctcgaatcttctaaacggaaatgatctgaaggactcgggagactttgcatcactcattgccagtaaaaaattggaatttttcgggccttaccgaacagactga

SEQ ID NO: 3545 - DNA, 552 bp, synthetic construct
  source 1..552: mol_type = other DNA
atgaacatcctgaacctgccactgaacatcctcattgggaatgggatcagtttctttgcctcaattgcgctgatcctgagctgcgttgtcaatgacaagagagaggcctacaaatatcaggtcattgaagccctgatcctcacggtgtcctccgccttctttctctcgtggactggcatacttacaatgctcattgctgcggcacggaactacctagtcatgaatgagaggctgagctcccgcttggccataatctttatcataattactctgatcatatgtccgctcattaataccatgggcttaatcggtctgcttcctatgattggaattatccagctgaccatctgcaactattaccttaagacaatcaaatggatcaaggtggccttcattgtgaacgtattgatctacgctgtttacttcattggaatctatgacttggtgagttgcgcaacccaagtgattaccgcaatcatcgggttcataagcctggtgaagctaatcaaggatgaaaaagagggcaacatagactctcagcccaacaattga

SEQ ID NO: 3546 - DNA, 273 bp, synthetic construct
  source 1..273: mol_type = other DNA
atgagcgacgacgaactgtatcgccgggcggagaggaaagtggatgagaaaattggattctacaagcatctctacagctacatcggtgtgaacatcctgctgtttgccataaatgcaatcacatccttcggcaaatggtggttctattgggtgacgatcttttgggggatcggcatagtaattcactttctaaagaccttcgtcctcaccgggaagcttgaggacaacagagaggagatgattcagaaggaaatggaaaagatgaaaaagtga

SEQ ID NO: 3547 - DNA, 951 bp, synthetic construct
  source 1..951: mol_type = other DNA
atgaaacggctttttaagctagtcgaaaaatacttcttcatcatcatcatcatcgcagtggcaattgctgttgtctttcccggctcattcgactgggttatgggagagtttatggggatcaacatcataaacattctcctgggtataatcctttttggcatggggaccactctgaagatagaaaactttgtaaacgtattcaaaaggcctaaggaaatcctgctcggggtcggcgcccaatatatcatcatgcctctggtggccatcggggtggccagcctattcggcctcaatgaggctctgacagttggcctcgtcctcgtgggcacagtaccagggggcaccgcttccgacgtgatcacattcctggcaaagggggatctggcgctgagcgtctcgcttaccgccgtctctaccgtcataagtccgattctgaccccgttaatcactctgattctgattggaaacaatatcgccttcaatcctgtggatatgttcattagcatcgttcagattgtcattctccccatagctattggattgctcctgaattacaagtttccagacttctgcgaggagcttaaggactatctgcccgcagtgtcctctctggtgattgccatcatcgttgccggtgtgataggtgctaataaacaggccattctgggctcaagcgtggtgattattgcagcgatcgtggtgcaatacttcatcgccatgctcttagggtttgtgatcggatacctcagtggcatgaagagaaagcagatggtgaccatagcgatcgagcttgccttccagaacagtggattgagcacaagcctagctaagacgcactttcccgcgctgtccctggcaacggtgccaggagccttgtacagcgtatggcagaacttcgctggttccatcttggcctatatttttcgcaaatacttcactgatgaggaatga

SEQ ID NO: 3548 - DNA, 2817 bp, synthetic construct
  source 1..2817: mol_type = other DNA
atgtcggaaaatagatgttatgatcccgattgtgatgccgaggattgccggaatccccagcactacaattacatttgcttcgaccctgactgcaacgacgagaaatgtctgaacgaagagcattacaataaacagctactgcgagattatcaggaaagcaccgatctgagcgtttacgatcatcgggaagagattgattatgatgaagatgtggatataagtctttgtggctgtcccgattgcgcggatgaccacgaccacaatcacgaccacgaccatgatcatcaccaccaccatgaccatgaccataaccacgaacacagtcacgagcacgagcattcttacagtcacgagcacgagcacgagcacagtcacgaacatggccacgagcatggggatgagcacagccacgaacatagtcacgaccatgaccacggccatgatcacgagcacgagcacggggatgagcatagccatgagcacagccacgaccatgagcacgagtctgaggatacttgtggctgcgggtgcgatgatgatgactgccacgatgatctggaagaacacagtcatgagcatgaccattcacacgaccaccatgaacacgaccatgagcaccatcatgaacacgaacacgaccaccatagccatgagcatgaagatgagcaccaccataatgaagaacactctcacgagcacgaacacagtcacgagcatgatcacgaccacgagcatcaccatgagcacagccatgaccatgaccactcccacgaccatcatggccacgaccatagccatcacgaccatgaccacggagactcctgcggatgcggcgaggaccacgatgatgacgacttcagcttatgtgcttgccctgactgtgccgatgatgacgatgacgaccacggccaagaggaactcctcgccgagggaaagccactcatctacaacagaccgattcaaatcatggtgtccagtggaatactgtttatcacaggccacatcctcgagtttctctccttcagcccaacaattgtcacgatcatctacatgctgggagcattgattgccggctatgagatagcaatcctcgcatacaagtcccttgtcaagcggcacactgtcgggccggctttactggtggtgatcgcctgcattgcctccttcatcattggccacggggaagagggtgcagctgtggcgctcttgtactacatagcagaatttcttgaggacttagcggagcaccgggccaaacgctcaatcaagtcactggtggaaatcgctcctgaaaccgctagggtcaaagtaggggacggggaagagtcccgccggattgaggaggtcaaagtgggcgagattgtgttagtaaaacccggagacaaggtgcctttggatggggaggtggtctatgggacttcctctatcaatcaggcttcaatcacaggggaaagcctgcctgtcacaaaaaccgttggcgatgaggtcttctccggtacagtgaacgaagacggctacttggaggttgtggtgaccaaggaagctaaagactctgtaatcaataagatagttacccttgttaagcgctctcagcttaacaggtcaacaacggaaaccatggtggaaaagatctccaaatattacactccattgatgattattattgccgcctgcgtggctttcgtccccccactggtctttggccaggacctcatcgactggatctataaggccctgtcaatcatggtgatatcgtgtccctgcgcattcctaatctccactccaatcggcatggtgtcagctatcacatcagccaccaagaagggggtcctcatcaaaggcagtacctatgtggaagagatgagaaacgtaaaagccgtcatctttgacaagacgggcacactcacggagggaaagcttgaactgaacgacatcaacattatcaatgacgaatacagcgaagaggagattgtaaggatagccgcatcccttgagaacagctcgtcccacccgattgcccaggccatcgtgaactatgctaatgaaaaagagataggatttgaagagattgaggacttccgaaacgttcccggtaagggcatcataggaaatatcgggggaaagcagtactatgccgctaacgagtccctgattgaaggaagccagttcaacatttcccaagaggagattaatcagtactcggctgaaggtaaaaccctgatcttcattggcgatgagcagtctgtcattgctagcatcactgtgatggacagaatccgtgacaacgcttcggaggtaattaaagacctgaagagccagggtgtcaagacattcatgctcaccggtgacaataaaattgccgcagggaaggtggcggatgagataggcctggactacgtctattctaatctcctgcccgaggacaagctaaacattttggataccctccgaaacaagtttggggatgtggcgatggttggtgacggcataaacgatgcccccgccttggcccgcgcaaacataggaatcgccatgggtgccgcaggatctgacgttgccatcgagactgccgatgtggcgctcatgcaggatgacatcagcaagctgccatacctattcagtctgagccaaaagacgatgaatatcatcaaacagaacatcaccctggccattgtggtgaaggcactgtttgtgatcctggcaatcctgggattgattaccctgatgatgtctgtgggtatcggggaccttggcctgaccctggtggttatcctgaactcattcaggatcgcgatggtgaaggaccctctgttttga

SEQ ID NO: 3549 - DNA, 384 bp, synthetic construct
  source 1..384: mol_type = other DNA
atgaaagattacaaggagccaacaaacgacaaccacaatgacgatctgtgtgaagtgttccatccccacgaggagtcaatagagcgagcaaagaaacacgtcctctctgaagaggagtacagcgatctggctgaatttttcaaaatcttcggaaatccgaccaggctcaagattatctcccttttaagctttgaggacctctgcgtgtgcgacatctgcgaaagcctgggcttgaaccagaacgcggtgtccaaccagctgcggatactaagagcccataatatcgtaaagttcgaaaaagaagggaagtcggcccgctacagtctgaccgacctgcacgtcgagatgatttataagatgggccttgagcacatgacggagtga

SEQ ID NO: 3550 - DNA, 639 bp, synthetic construct
  source 1..639: mol_type = other DNA
atggggaaggtgttcatcatgtcttatattttcatcgatgagagcggggacctgggaaccaaaaagtcaagctccaagtactttgtgatggcaggaatcaaggtggaagacagccagaaactggatcgcgtgatccggaagatcaaaagagacgacaagaagaatatcatcacaagtaacgagattaaaggctccaatttgccacacgacataaaaattaaaatcctgaagaagcttgattccgttaactaccaggtctttatcatcattttcgagaagatcaataggtacaaggtgaacgatggctatgacaacattaagttgtacgaccttctggcttgcgaactcgcgaaacaaattgatataagtagctcttcgaagatcttcattgataagtcaaaaaataagaaagaggaaatcgtcaatttcaacaaggcatttctggaaaatctgaacaacttcaagaagtttcccatcaaactcgagcatgccaattccatgagctataaaggcttacagatagccgacctaatttcttgggccattttccagagtgtcgagcacaacaacaacgaatttatagacctgataaaaaataagaaaatcaaacgagtattcgaggagaagaagaacctctga

SEQ ID NO: 3551 - DNA, 183 bp, synthetic construct
  source 1..183: mol_type = other DNA
atgaacagtgagtttatcatactttttagccacattctcccgctgatcctgggcttcttcagcatcttgctaatgatcaatggaatcatggacaagcagaaagtgataaccgccttcggcattattctctttctggcagctgccttctccccattcgtggtcctgcccatcctgggggtatga

SEQ ID NO: 3552 - DNA, 696 bp, synthetic construct
  source 1..696: mol_type = other DNA
atgctggagatcattcccgtgattgacctgatgaatagcgtcgccgtatctgggaaaagtgggaacagggaaacttacactcccctgcagaccatatatgcgagctcatctgatccactggaaattgcactgtccctgaaaagcgccggtgctaaagagatgtacattgcagacttggacttcattgaacggaacggaaacaacaacatcttcaaaattaaggaggttaacagcgtactgcctgtgatcctggatgtgggagtcgacaagctggagacatttgagttcctccttgagtttgcttataaaataatcgtcgctaccgaaacccttgaatcgatagaggagttagggaagatttttgagaaatacccaaaggagcgcatcattgtgagcgttgatgtcaagaacaacgagctctacgcgaagaatatggatctggaccttgaaggcttcaaggaagtgctacggcgaatcgaccctaatgagatcatcctgctagacatctcctcagtgggcacagaggggggcttcaataagccgctcttggaatcctttgaggagttcaaggacaaaatcatcctgggtggcggaatcaccccagatgaaataagtcagctcgatgccttgggcatcaggaaggccctcgtgggaacggccctccacaagggccaaatcagattaaatcccttctga

SEQ ID NO: 3553 - DNA, 624 bp, synthetic construct
  source 1..624: mol_type = other DNA
atggaaaaaagtgaaatagagcattacctgagagatatctgggtgcgcgagtatgaacgcggagaaaagctagttgtagatgagtttaatgctgacgatatcgagctgttagctaaaaaagagtacatcaagaccgatgacggcttcgtcaatctgacagagaatggggaatacctggggcggtcactcgtgaggaagcacaggatagcggagaaagtggtggccgacctcttcctcgcagatatggacgagatggaagagctggcagaccaaatcgagcacgtgatgtcggccgaggtggaagagaacatctgccgaatcctgggaaaccctgaaaactgcccccataataacccgattcccaagggggacaccactcccggcattagcaaggaatactctgttcctctggtctcctgccacagcggagagagtggtgaggtctcccacatcaagacagaggacgcccgtaaacttagaaagatcatgaacctgggtcttattccaggcagccggatctgtctgattcagaagttcccaaattatgtcttccagctcggcaacacgcagttggccgtggacaaggaattggccaacgagatatttattaaactcgatgaatga

SEQ ID NO: 3554 - DNA, 219 bp, synthetic construct
  source 1..219: mol_type = other DNA
atggacgaaaacgataataaaagtcagattatcaaatgtgagttctgcggattcacatttcagaagtgtgatggcatcagctgtgactcctgcccaatcaactgcaaaaccgtccgctgcccgaactgcgggtacgagatcctccccgagtcaaagtcttataagttcctggaagacggcgtgaaaaagataaggaatcggctgtttaagagcatttga

SEQ ID NO: 3555 - DNA, 2049 bp, synthetic construct
  source 1..2049: mol_type = other DNA
atgagtgaaagtattactcctaacggtggggctaaatactcaaacaacaaaaacaaagccctggccagcaagaaaggcaatgattcctactacaaaaatgtccttttgataggaagtcccaatgtaggcaaaagcctgaccttcaataagctgactggcatgactgcgatggtgtccaattatcccggaaccactgtggacatcgacgagggcaatttcacctatgagaacaagacggtccacataacagaccctcccgggctttatgatctaaacacaatcaccgaagaggaacgggtagccaagctcctcgtcctcgacaaacgctttgacctcatggttcacgttgtggacgcaaagaacatagaaaagtcaatcgacttgaccctccagctgatcgatgccggcaaggaagttatcctggtgttgaacatgatggatgagctggagaagatgggcgcaactgtggacgccccgtccctctcccacgagcttggaatcccagttgtgctgacggccgctgcccagaaccgaggattggatgacctgaagcatacaatcgtaaactacgattccatagagaaccaaatcttaagcgagtctaagacgctgctggatgtcgactatggacgcagcatcgaaatcgcaatctcggagatccaaagaaatatcaaagggaattatccggtgtccaaaaggtacctagcagtatctttgttggaaggtgatgaggacagcgaagacctgctaatggaaagtgaggattgggataacctctcccaggtcatcggtgctcagaaggcaaaattcgaccagcctgtcaagtatctgactaagctgcggcttgccgactatgcaaaacatataaagtcaagttttacaaccattgacagcgtgaacattcaggataccgacagcctgggagaaaagctatccagaatcatgatccaccccttctacgggctgatcattctggcctgtgttctgttctttggcctttacctgattgtcggagtgcttggggcgggcattttagtggatttcctggagaacaccatattcggccagtacataaaccctgctgtgacatctgtggtcgtgcagtacattccctgggttcctatacagaacctctttgtgggggagtacgggattgtgacgctcgggctgacctatgggttcggaatcattctcccgatcgtgtccttgttcttcattgtcttttcaatactggaggacagcggctacctgccaaggctggctcttcttgtggataacggctttaagagaatcggattatccggccgatcggtcatcccttttgttcttgctgtgggctgcggaagcatggcgacaatggtgacacggaccctcgagaccaaacgggagcgaaacattgcaactatgctcatggctctcacaatcccatgctctgcccagctcggggtaatcatggccttactgtctgccaggccaaggtcaatctggatctggctggcggtgattgtcttcaattttgtcgttatcggttacctcgccaagagattcgttccaggggcccagccaagcttctttatggaactgcctcccctcaggtggcccaagctctcgcacattgccaagaagacgtggacacgtctggtgatgtacattaaagagctgattccaatctttattctaataagtgtaatcatttgggccctggacttggtcggcattttccaatggattatcgcgtgtgtgactcccatcgtgaatgcaattggtctgcccggcagcaccagttcctcattcgtcctgggcttctttcgccgggactttggcgcagctggactaatgaccatccaaaatcagctgaccggagttcagctgctggtggcctctgtgaccctgacactgttcctcccgtgcgtggcccagctgatgatcatgatcaaggagcgcggggtgaaattggctggtcttattgctgtgatgagcatcgtgctcgccttcagcatgggttttattgtcaacttcatcttgacgagcctgaatgtggtcttatga

SEQ ID NO: 3556 - DNA, 1197 bp, synthetic construct
  source 1..1197: mol_type = other DNA
atgatcgagaccgatgtgttggtaataggggccggtcctgccggctcggctgctgcaaagcatgcagccctgggtggggctgatgtgatcctaatcgataaaaagtctgaaatcggcacccccaagagatgcgccgaaggcatctacgaccacggactgaaatggctggggattgagccggaccccgcatgggctgtgcagcgcattaacggtggcaccctgattgcgccagataaaacccgcctgacccttgatgagacaattctgcccgagaagggctacatcatcgagcggaaggtcttcgacaagtatatggcgatggacgccgcccgagcgggcgctcagatcatggtgaagacgcaagcaaaatccattcagaggggtgaagactccaaaggctcattttatactgttgactgtgagcagatgggagagatcatcgaggtgaaggccagaattgtgatcgctgccgacggtcctgaatcacgtgtcgctaaggccttcggcgtcaattcaactacaaaaccaaaatatatgatgtctggggtccaatacgagatggtgggggtcaactgcgagcggatggatttgatagagctgcacctgggtgccttcgcagggggaggatatgcttgggtgttccctaaaggggacgacattgccaatgttgggataggaataagtagcgaaagcgacaggcccgccatcgactatctcaacgaatttattgaatcctaccctccactgaaagacgccaagccggtggagctaaatgtgggaggcgaccctatcggaggactcattggccagatttacagcgacaacctgttagtgtgcggcgacgctgccgggcaggtggaccccataacaggagggggaataatccttggaatgctgggcggcatgactgcgggccaggttgcaagtcgcgccatcaaggatggcgactactccaaggaaaggttaaaggaatatgatgagttgtacgatgagtacacgcaaggtgcgatccccaaactcgccgttggccgggatgtataccttagtctgagcgatgatgacctcaaccagatcattcacgcattcgaggggctcgactacaagagcatgagcccaaaagatatcctgaaggtcttctttaaactgtccccaagacttgcactcaagttccgaaagttgtttaaggtagtgctctga

SEQ ID NO: 3557 - DNA, 909 bp, synthetic construct
  source 1..909: mol_type = other DNA
atgtttaacaagaagatggtgttggccatcagcctattagctgtcatctttgcttcgatgtgcatagtttcagcggatgactccggagagggaagcttcaaggaactggccaaactcgtgtccggcgataataagaccggggtgatcactctcacaaaaaattttgcaaatacggacggctacgacgctgatggaataaagatcactggggataatctggtcattcgcggggaagaaggcaaggacattacaatcgacgctaaaagtgcagggcggattttcaacgcgaacggcaccaagaatgtcacgttcgagaatattcatttcgtgaacggcaactcttccgacgccggtggggccgtgctcctgggtgaggagcccagcagtagcgtcaagaattgtcagtttgacaactgctactcagatgcatttggcggtgccgtagatggaaatgccatcgggtgcacgtttgaagactgcagcgcaaactaccacggcggtgcaatattcgatggatctgcgaccaactgcaccttcaacgactgtttctcaaaaagctgtggcgggagcaaatttccgatcatcaggcaaccaattgccaacttcacagactgctattcctactggcagggcggggccctgtatgaggtggaggccatcggctgcgacttcaaaaactgctattcgagcgagggaggttccatgtgtggaggctctgcctttaactgtaatttccaggactcccttgccaagaatgggaacggtggcgcgaccctgaacacaaccgctaagggctgttcattcagtgggtgcagtgtaacaaatggagaaggaaacgccatgtacggaggcactgctaccgactgtaaactggataaggcagatgctgttaaggtgaacttcaaatga

SEQ ID NO: 3558 - DNA, 441 bp, synthetic construct
  source 1..441: mol_type = other DNA
atggcgaatctctcatttatcaacaataattttaagatgattgtgggcatcctgtccatcatcctcgcgatagtggtgtatttcatcaccccgccatacatcgagttctacctgatcttcgtctttctcattcccgccatagccttgatcgttcccaacgacgccattaagaacagcagggctataggcgctcttacctttattctggtcattatcgtggcatatttcgcaatctcggggatgctgggggcctacgacgtgctaacaaacatgtacgtcaacggattaatcaactccacgcctagcacttccgatatcagcgcttgcagcaacggctatttgatggtactgatttacgccctgttcaatatattctgtggagccctgttctttaaacggacaagtagtattgacgacgtggacgatgaagatgcattctga

SEQ ID NO: 3559 - DNA, 1407 bp, synthetic construct
  source 1..1407: mol_type = other DNA
atgcaactggatttcaaccacgtcctgactcggatttcagactacgaaaagccaatcgtcttgaaccacgatgttgtgctgacacggagcgaagcccaccagtttaagaagggtatagaaatcaagcgggacaatatcgtgatcgacggaaatggccactccatcgacgccaggggcaaaaaccgtattttcaacgtgctcagtaaaaacgtagtcataaagaatttcacctttaagaacggcttttccgaaaagtttgggggagcaatccgcgttgccggggaatgtaagctcatcaactgcacgttcgagaacaaccgcgcaaaaaaaggaggaaacgacatttccaacggctctgagttgagcatctgccactgtaatttcagcgacgctgatgggtcaatcaataacctgggtacaatttaccttctgaaggacgaggaacacgagataaagcccctgatctctaataacggggagatcaaacgcatcatccccaagcatgatgtcagcttccttataaatggtgataaagaccacatcaagggcgccctgattaggataggggacaaaagcggattctccaatgacgagggtgcctgtgttttagagggcatcgaagagggcaaacattcgctcgaggtgagtgctgagcattacatcagctttaacggaaatattgacgtgtccgaaaataatgtcctttttgacatccagctagagagactgattcaacgacacgacattaaaattttagtgaagcacaagggcgagcccgtcagtgacgcaattgtgagcgttggcggcatcaaaggctctacagatgaaaatggagaatgcatctttgatgatgtagaggagggagaaatctcggtaaaggtgaactccaacgagtacgagaatcagaagtataccatcacagtctccgataataaaaccaccttccctattaacctggggttcactcacttgataactccattccctgcgagtgatgaggacccttatatttttgccagctactctcatgatgatgccaacagggtgtttctcgagctaaagcgctttcatgactgtggcctgaacatttggtacgacgagggcattgaatcagggctggggtggcagggggttgtggagagtaagctcaaggcttgcaccctgttcatcgctttcatctcagcgaatgcggtggagagcatcaacgtgaggcgagaaatcttcctcgctatcaacaagaaaattccggtggtgcccatatacctcgaaaagaccgagctgcagtatggtcttgatctgcagctgagcccagtgcaggcaattttgaaatatgccatgacggaggagttctacgtggaaagatgcagacgggccttcgtcatgtatggactcatggacgaggaatga

SEQ ID NO: 3560 - DNA, 759 bp, synthetic construct
  source 1..759: mol_type = other DNA
atggcaaaagtgacaagcatcttcttctctccatccgagactaccaaaaaagttgtcaatcagatcgcagagaacttcaaggaggaaaagagcatttgcgacctgttatacttcaatgataagaaggaatttgagtccgatgatatcgtgattgtggggatgcctgtattcgccggccggctgcccaagactgctagcgaaaggctatcaaagctcaccgggaacaatacaaaggcaattgctgtcgccaactacggaaacgctcacgtcaatgacgcgttgatcgagctggtggacatcctgaatgaaaacaactttgatgtgattgccgcggcttccaccgtcagccaccattcgatctttgatggggtcgcgctcggcaggccagacgaggacgacatcgaaaagatcaacgactttgcccaaaaggccattgagaaaatagaaaacggcggctccctggagagcgacattcccggaaaccgaccttacaccgactataagcagctgccattcgtggtggcctgcgatgtggacaaatgcgtattctgtcttgaatgtgttagtgtgtgtccggagaaggccatccccgacgatgacccggccgacatcgaccttgagatatgctcaagatgcacggcctgcataaacatctgtcccgaggatgcacgcagtttcgctggtgatgctttcctctctaaaaagcccctgtttgaggaggcaaatgccgaacggaaagagcctgaattttatttctga

SEQ ID NO: 3561 - DNA, 297 bp, synthetic construct
  source 1..297: mol_type = other DNA
atggaagcgaaattgaaaaagctgacccaggaggacatcgacgacataagcgactttttcgcaggcgtcatcgataagaaaatcgccagctccgtgaagagccaaaaggagattctagctatggacattgatatagaagtggcctacaatgatgagaacgaggaactgatggtagatgtggatgttgatatcacgacagacgaactgtccaacctttcagacgaaaaagtcaaccagctcatcgaggacagttacgtggagctcgacgagtacattaacgacaattatcggaagtga

SEQ ID NO: 3562 - DNA, 348 bp, synthetic construct
  source 1..348: mol_type = other DNA
atggagattccacagaatgtacagcaccaactgaaccagttccagcagctgcagcagcaagcgcaggctgtgaccgtgcaaaagcagaacgtggacatccagctccgcgagacagaaacagccctcgacgagctcaagaaaacgcccgaggatgcagaagtctacaaaagcgcagggaacctactgatcaaggttgagcgagccagcaccttagaggatttggaagacaaggtggagactcttaagctgaggcagcagaccatgcagcggcaagaggaaagagtcatgaaaaaactggaagagatgcaggcctccatacagcaagctatgcagggcctgcagggatga

SEQ ID NO: 3563 - DNA, 135 bp, synthetic construct
  source 1..135: mol_type = other DNA
atggagctcacactagatggcaacagcataaagatcaaaatcgacgccgaggacgccacctccttccgggcgagtatcaatagcgcaatcaaatggattaagctggctgtcgagattaacgaactggtggaatga

SEQ ID NO: 3564 - DNA, 492 bp, synthetic construct
  source 1..492: mol_type = other DNA
atgctgatctccacctcacggaaaccaagtcagaaaacaagaaccttctgcaagaacttcagtcatgcctttggctttgactatacaaaccggggcaaatcgagcctgagggatctgctggtaaaggccaaacagctgggccacgacgggctcgttctcgtctaccaaatcaagggaaaccccagcaagctgacgttctatgacctggaagaaaacgagagacttgctctgctcatcagcgtgaacactaccaatgagcgactccacatcaagccagaggaattgaagatacgctcaactgtgcccgagttggacattcttgccgaagtgctagggatcgaagtgaccaaggagccgcaggactccaattatataaggatctcctacgcggattacgatgacgagagcaattttgcaattttatacttcattaacaagaaaggagagcagatcgatttccgcatcaatgtcaaaaagattgtggagccttga

SEQ ID NO: 3565 - DNA, 132 bp, synthetic construct
  source 1..132: mol_type = other DNA
ctgtacaaatgccccgaatgcggcgaggaggtcgaccacaaggggtacatggaaaacaagtgcccgaagtgtagatatcggatactgttcaagaaagtgccagaggtacgcaagctcgtgaaagccaggtga

SEQ ID NO: 3566 - DNA, 270 bp, synthetic construct
  source 1..270: mol_type = other DNA
atggcaagaacaaagaaggtaggaatcactgggaggtttggcgctcgctacgggcggaaggcaaagagaagcgtgaagaatattgaagagaacatgaaaaagaagcacgtctgcccgaagtgcgacaggccttatgttaaacgcgtgagcgccggcatctgggagtgcaagaaatgtggtgtcgtcttcaccggaggcgcctacgtgcccgaaacgccaatggcgaaatccgccacccggagtataaaacgagtggtggggggcgagtga

SEQ ID NO: 3567 - DNA, 792 bp, synthetic construct
  source 1..792: mol_type = other DNA
atggatatcgtgcctgaaattaccagaaaaagtattaccagactaataaatgatggtaagagggcggatgggcgcgcttttgatgagcggcgagatattttcatcgaacccaacgtgattgacaaggccgaaggttctgcgagggtgaaattaggcgacactcaggtcatagttggggtgaagccaaccattggcgaaccctttgcagacactccgaacctgggggtcctgatgaccaactgcgagctgctgcctatggccgctcccgggtttgagccagggcccccaagcccggagtcaattgagcttgcccgcgtggttgaccggggaatccgggagagcgaattggtagaccttgagaagctatgcatcgaagagggcaagaaagtttggatgctgttcattgacttgcacgtgatcgattacgacggcaacctcttcgactgcgctaacctggccgtgatgtccgccctcctgaacacaaaactgcctgtggccgaatacatcgatgacgaggtggtcctctcggaggatgaaacaatggacctccctgtgagggacaagctggctttatccacgttcgtaaagataggcaatggactgatcctggacccatccctggaggaagaggaaatcctggacgcacgtatcacaatcggagtcacggatgagggcaatcacatctgtagcatgcagaagggcggagaggagcccctcactcgcgatgacatcctcgatgccgtccatttggcattcgagaccaaagatgacctgcttagttatctcgactga

SEQ ID NO: 3568 - DNA, 711 bp, synthetic construct
  source 1..711: mol_type = other DNA
gtgttctttattatctcagagaatgagaagctccgcggggacggacgcgcctacgacgagctgcgtccgatcaaaatagaagccggagtcctaaaacgcgcagatgggagcgcctacctggaagtaggcggaaacaaaattctcgccagcgtgtatggccccagggaatcttatattaggcggctgttgaagccaaacactggggtaatcagggtcagatacaacatggctccattcagcgtggacgaccgaaaacggccagggcccgacaggagaagtacggagatctcgaagattgccgctgacgcccttcggcctgctctcatgctggaaagcttccctcgatccatggtggatgtttcaatagaggtcattgaggccgaaggaggcacccggtgcgccggcatcactgcagccgcagtggctctggcagatgctggcatccccatgaaggacatcgtggtcggctgcgcggcaggtaaggttaatgatgagattgtgctcgacttgtccgaaaaggaggataaggagggccaggccgacgtgcctattgccatcatgcccagaaccggtgagataaccctgcttcaagcagacgggaacctgacagaagaagagtttgaagaggcgctggatttagctatcgagggatgtatgaaaatcagcgagatccagcacgaggcgctgaagacacgctacagttcccagtga

SEQ ID NO: 3569 - DNA, 1476 bp, synthetic construct
  source 1..1476: mol_type = other DNA
atgggcagtatatgcatgatatatgtgaatgagaaagacctggtggttccaggcgaactgctggctgaggatgactactactcaggccgcgggacctttgaggatgatggaaagatatgctccaaactgttagggttggtgagcctgcggaacaagaagatcagtgtaatccccctaaaaagcaagtacattccaaagaaaggagacgtggtcatcgggaaaatcgacgatgtgagatttagcatgtggggagtggacattaacagcccttacagtggcatcttgccggcctcggaggtgttcggacgcgagaaaaaggaattaagtagggtgttcgacatcggtgacgtgctcttcctgaggatcgtcgatgtcgacgaggtcaagaaggtgaagttgggcctgaaaggccgtggaatgggcaagttccgcggaggcgtcattgtggacatcgctcccacaaaagtccctcggctcatcgggaagaagggtagcatgattaacatgatcaaggacaaaacgggctgtaagattgttgtagggcagaacgggctcgtttgggttaaaggtaatgaggacatggaacagatcgtgaagaataccattaagctcatcgaaagggaagcccacacctctgggctgaccgacagagtgaagaacaagctctgcttgctgattgatggagagcttccagaggaggaaactgaggtcatggaagagaaggaagagatagttgaagagtcctttgaggagggcctgaagaagcctgaaattcaagacttcagagacgaggtggagaaagagattgccgaggagatggccctggaagagtcagaggaagacctagacgaagagtttgatgactccgaggagctggacgacagcgacgaggagtttgatgattccgaggacatttcagatgacgaagactttgacgacagcgaagacgatctggattccgaggaggagattgattatgccgatagcgaagacgacgaagatgagctcgcgatagaagaactggaggaaaaagtagagacagaagagttcatggacgactccgacgaggattccgatttcattgaagaggacatcatcgaactagacgaagatgcagagtcccttaatgaggaggatgacgaggaggagttcgatgtccttgaagagtctgaggcagagatcttcgatgaggcggaagtgctggatggcgctgaggaaatctcagatgacgagctcgaggaagtgatcaacgaggccatctcagaagatgaagaaagccaggacgactctatagaggatgaaagtgaggatgaagaggaaaaggagaaagaagagaagtctaagaaacccaagtttctcgacacattcgaatatattaacgaacagaaaaagaaaaacaaatcgtctttcgatcttagtcgggcagataattccgactcgcccactctgaacatcagccagcgacgaggtatctga

SEQ ID NO: 3570 - DNA, 705 bp, synthetic construct
  source 1..705: mol_type = other DNA
atggtgaatatcgatgatgctatcattgccaggctggaaagctacggggagaagtttgagatcctcgtcgatcccgacttagccgcagactttagaaaccctgataacgagaaagagatagatatcgaagagatactggccgtcgaggaaatattcaaagattccaagaaaggggacaaggcgtcggaggaaagcatgcggaaggtgttcgacaccacagacgttctagaagtagcagagcagatccttcataagggaaatgtgcagctgactgccgagcagcgccgacagatgcaagaggacaagcgtaagcaagtggtggcgaagatagcaagagagggcatcaacccacagaccggtctccctcacccggctgtcaggatcgagaatgccatgaacgagtccaaggtgaagattgacgctttcaagtcagtggacgagcaggtacagacaacgctgaaggccatcaaagtgttgattccaattaaattcgaaaagatcaaaatggcggtccgcctgcccagcactgctgccggcaacggctattctgcaattcggccattcggcaccatcctcaatgaagaatggcagcaggacgggagttggatcgccattgttgaaatgcccggcggtctgcaagatgactttaaccacaaaatggcttccatcagtggaggagaagccgagaccaaagtgattaaatga

SEQ ID NO: 3571 - DNA, 144 bp, synthetic construct
  source 1..144: mol_type = other DNA
atgtccgtaaaaaaactgatcatcaaaaaggtcattctgagcaagacagccaggaaaaccgcaaagaagggcataatgttcgtggtgcccagcgacttctttgatcgccatcggcacctcgggaagatcgtggacatgatgtga

SEQ ID NO: 3572 - DNA, 885 bp, synthetic construct
  source 1..885: mol_type = other DNA
atgcaacccctccagcaacagaacgccggttatgaccgggccattaccgtatttagccccgatggaaggctgttccaggtcgaatacgcaagagaggcggtgaaacgaggcaccacttccctaggtcttaagtcaaaagacggcgtggtcctcattgtggataaacggaccgtcagcagactggtggaagcaaagtcaatcgaaaagatattccagatcgacgaccacattggcgtcgccacatccgggcttgtggccgacgcccgggctttggtggagcgcgctaggatcgagtctcagattaacaagatcacgtacaacgagcctatccttgtggggggactggctaagaagatctgcgacctgaaacagctgtatacacagaatgggggtgttcgcccattcgggtccgcactcattataggcggagttaatggcgaagaaactcgcctctacgagacagatccaagcggagccctgattgaatacaaggccactgcaatcgggagtggagtgcaggctgccgtggacgtctttgaagaaagatacgaagaggacctgagcttggaggatgcgatcaacttaggcctggatgccctatacgaagcgacggaaggcaggacaaccgaggacagcgtcgaaatagctgtaatcgaggttgcaacccaagcctatcgtaagctgtccgatgaggaagtgtctggctatgtaaaagatctcctggagcgaaatgccgaagaggaggagccggaggaggaggctgaggaggaggccgtggaggaagccgtggaggagagtgaggaggcagaggacgctgctgaagaatcggaggaagagacctctgaggaagaggccagtgaagacaaggatagcgcggaggagtga

SEQ ID NO: 3573 - DNA, 2244 bp, synthetic construct
  source 1..2244: mol_type = other DNA
atgaactttatgaagaccaatctgaaaaagacaacaatcatactggcactgctgatggccattcttattttgtcgattggggccatctctgcaaatgatttgacatcagccgactcgaatgtcgatatgaacaatgatctgaacacaaacttggacagcaatgacatcatcgccaattcgaacagtaattccattgacgctgagattgatgaagccaactattcaaaccagagagccgatgccaaggaaaagttgaaggaaagcaacagcttaatcgagaacgaaaacactgagggcaacacgcagatcgaggatgaaaatagtagcccctcaaataaaacagatacatcaataagtattgaaacaaacagtatcgaaaggggaagcgatttaacgatctatctaaaggacataaatgggactggaatcgccaatgagaagctctcaatccagattataaacaagacctacacacggaccacagattcaaagggctctgccctgtttaaaataaatcttgcatctgggaaataccccatcgcaatctcctacaatggcagcgaagattacgagagttcctccgacgacttcaacattagcgtttcccctatgaaaacaaagatcaatatgctctccaattccattgtgaacgggcgcaaactcactattgagctgttggacaagaacaacaatcccctgaaatacaaaaagatctccattatcctaaataaaaagctatataacctcaccacaggcaaagacggaaaggttagcctcaacattaacctgaatcctggcaaatttcccatccaaataactttcagtggggatgcaaactatcatacggtgtctaaaagctctgcgattgacgtgtacaagctgaaaagcagctttaccgttccaaagacctcaatcatcaaaggcaagtacctgtacgtgtacctgaaagacagcgagggcaaagccatcccatccgcgaaggttgccttcaagatcaatggagtgagctccaccaaaaccactgacaagaacgggcggatcagccagaagataggcctgaaggtgggaaactacaccgtccagctcaactacaatggggacaagtcccatttgaaaaaagtccagagctttaagattcgctcttgcaactccaaaaccaaattcactgtggctaattatacagtggtgcggggaaaatacctaagcgtctatctgaaggacagcgagaacgccaaccttgctaataagaaagtgaccttcacgtatcttaaaaaatcatacacaaagaccacagacagcaacggaaaggccagcctcaagatgacggaggctgggacgactaccgtgaacctgcagttcaaggggaccggcccatatctgaagagtagtgcgaatgtcaaaatcaaggtactcaagaacacgaccgctgatatcattgcaaaaaaccagacccgtcacctgaacggcagttccacgataaggtactatgtgaagcttactgacaataacggcaaccccatcgaaaatgaaacgatagagctgaaggtcagatgcaacaacatcaccaccggcagcggtaacaagattactaaaaagaccatcgtgttatccagcgacaacatcattaacaagtcggaggacaagaagctcctcaacgagatggcgaagatcctcagggcaaaagggtataaggtgatcgtttccgggatcggtcctaactatcacgtgtcggatgtgcgcgactattccaatgtctgcgtgttcagcctggtgggaggcgtcgactctggcatgtttgttgacatgagtcactcctactataagaactaccttaaaaagtacaagaaccagttcgtactgggatgtgtagcccccccggtatacctgaacctgggtaatatgacctggcttaaacgagctcacgatgatgactacagtccgaagagttttaaaggactgtattatccagggaagtacttcaataccgtgactaaactggattacgtctacggtgatggtgctgaggagctggtcaataacttcctgaactacgccaagaaaggtaaaagcatcgacctcggccagtcagtacctaagacaactacaacttataagctcactaccgacaagaatggaaacgcttacgtcgatttgcaagtgggcacttacaccatttcctcatctattctgggcaataattataaggttgacacccaaaccagcaaggtgaatgtgattaagtga

SEQ ID NO: 3574 - DNA, 378 bp, synthetic construct
  source 1..378: mol_type = other DNA
atgaagcttaaggtcctgcctcccaccctgcggaagaatcaccattacctgattctggatgtgaaaagcgaggtaaaactgtccaaagacgatatagtgcactacatctgggacgcgtgcatccgatattggggggagaaccattcaagtaacttcaatctctgggtgatgcggcactacccaattgaagaaaccatctataataacgagccggtgttcaactacaagacagtcttgaggtgtcagagaagctatgaggatgacgttcgctctgcactagccacactcaacaggtacaataagaaaaaaatctccataaacacgatcggcatttcgggaactgtgaagagcggcatcaacaagtttattgacgaatga

SEQ ID NO: 3575 - DNA, 972 bp, synthetic construct
  source 1..972: mol_type = other DNA
atgaaattccacgacctcaacataagaggtaccgactacaataacgacctggctctaatcaaggaggcctataagttcggatgggattaccttaatctgaactattcccaggaccattacaaggaagccctctcgtataaggatgatttgctggaggagatatctctgtttgaatggaaagacagctacagaaacaaatacaacagccagtccattgagatttccatgggcatcaacattcagaatgccaattcaaatgagatcaggaagatcgttaacaaatacaggaacaattgctcttatatgagtgctctcggcggggacctcaaggtaaaccgtagcgtctgtgagaaccacaggatggatgtcctgtcccgcccctactataaacggcgggactccggcatgaatcacgtcttggctaaggaagcagcccgaaacaatgtggcgatcgagctgtgcttccgggacgtgctgaagaacagcctgaagttccgggcgaatattatcagcagctttaaggagataatgatgttccatcgaaaatacaattttcctatcatcctgacaactgattccaaaagcatctacgacattcgcagcacaaaggacatagtcggcttctttaagtcaatcggattcagtgacaaagagatctataacgggttctactactacccaagggagattattgactttaaccgccaaagaaagaacatggtgattaagggtgtgaaagtgatcgaaggagccagtgatttcaccgaaatcgactcaaagaccccgaaatttgaagagagtgagtgcttcgatgaagcaatctcccagaaagaagacgacttctttgattgtgatgagtcggaagatgacttctcagactatgatgaggaggacgaagtgtttgttggggagtctgaggatgaatttacggatgtggagttcgaatctcttgagaaggaggacttactctga

SEQ ID NO: 3576 - DNA, 441 bp, synthetic construct
  source 1..441: mol_type = other DNA
atgattcataacatcaggtaccgggtgtttatttacgaaaacgaggataaggacaaggtgttagaagccctactcaatatccttccaacagccgagcctgaggctgaggaggccgaggggctgctcgaagagaagatgctgattctgacgggagccatctccaaaaagcgcgagaccaaagagttcctcaacaccctgatcgaaagcattggtgaagatcagctgatcaagctctataacgacttggatcgaaagatggacgaaaaaggcaatctcttccttagactgagtaaagagaaggccctggacgaggaatgggaaatattggacggcggggacagcatacacctgaagataaagattgcggcatacccggctaaaaaggaggtagcactgaaaaagatcaaagaagtcttccccgaggatatcatcaatgcgtga

SEQ ID NO: 3577 - DNA, 552 bp, synthetic construct
  source 1..552: mol_type = other DNA
atgatgtacaagtatattagggatgcctggaaaaatccagatgagtcgtatgtaagggagctgatgtggcagcgagtgccaaaatggcgaaagcaacctgcaatcacccgcatcgacaggcccacccgcatcgatcgcgcccgcagcctcgggtatagagctaagaaagggttcgtggtggtcagggtgaaggtgcgccggggggggcgtcgcaagactcggttcaagcacggtcggaggccaaaacgtatgggagttaataaaataacgatggctaagtccatacagaggatcggagaagagcgggtggccaagaagtaccctaacatggaggtccttaactcatactgggtctggtctgacggcaagtacaaatactttgaagtgatcctagttgacccccagagcccgtccattaagaacgaccccaaaatcaactggatttgcgagaagcagcatagaagccgagcactgagaggcctcacaagtgcgggtaagaaaggccggggccggagaaatggaggaaagggcagtgaaaagagactgaaatga

SEQ ID NO: 3578 - DNA, 420 bp, synthetic construct
  source 1..420: mol_type = other DNA
atgatcaagtgcgataactgtggattgaagttcgatgacgacactgaaatctgtccgaattgcggcaacaagctagactctacccagagcgtccaggaaacggaagaggcatctaagaaatgccctagctgcgggagtctcattggcataaacgagttcatttgtccaagctgcggaaataagatagaggaactgaaaatcatccggacatgtcccaactgtggtgtgaacctggacgacgacgccgtgttctgcgataactgcggcgctaatctgagctcaacatcagatcagattcaagagttcaataagtccctcatcgagtcgaacaaatccctgatggaccagattgccgatctgcttaccaagtttgggaaatttatcgacgatctcttctccagttttaaaaaggacaagtga

SEQ ID NO: 3579 - DNA, 921 bp, synthetic construct
  source 1..921: mol_type = other DNA
atggttaaatgctccaactgcggagccgaggtgggagatgcaagtttctgcttttcctgtggggagaaggtcgacggtggaaatgtggacagcaacatttgccctaagtgcggtaccgaaaattcaaaaggaaccgtgttttgtgtcggatgtgggcagaaatttgacaatgcattagttccagaatccgtagcgcgcaagcagaaggaatgggagctgcgccgtcagcagatcatcgagcgatatgatcagctggccgatgagtttggcattaaggataaggactacttcctcacctcggtggtcagggtgaatatgttggaggagaagacgactaaacacaaagtgtgggggtcggtgggctcctatggcgggaacaagactacaatcgatgggttcttcctgatagaagacgataagtttgtcttcatggaaatcgacaaccgggactggaagaaggtcaatgcgggcataaacaacttctactttgacaagatcgtgagcatgcgaattacaaaaagactgggcgacatctcaagatacgaggacattaccaagagaacaagcctcaattccgctcatgccattaaacgggccattcaaaacgatatccaatcccttaaagccacccgcttcaaggatctgattgtgaacaacgacagtgctgatatgttcgacaggctgctgatcaagctcgtagataacaccagcttcgagatcaggcttcccagcttcgagtttggcgagaatctcgtggcattgttcgaaatcagccggaacagtccgcagactgtggtcatcgagacggattcaaaacccagcaaggctgacctactgaaggaatacaaggaactactggacagcggcgccataacagaagaagagtatgacgagctgaaaaaagaggttctcagcagttga

SEQ ID NO: 3580 - DNA, 534 bp, synthetic construct
  source 1..534: mol_type = other DNA
atgctggtacggaacctggatttcctgtcaattcccaaggagttttccaaggttgaactggatatttatgagggcaaatcgatcgtgcttgtgtacattgaaaacaaaggttactccctcgtcttaaaaaagaacaacgaaaacgactctatattcctactcaagactgacctggctccagacaatatcgacagtgataaagaagacttcattaatgtcataaaaatgctgctcgacaaaatctacgaaggggcagagattaaggagtatgagaagcagcaccacgagcatgtgtttctgcaactcatggatctgctcatcgagggagaaacagtggagaccatcaccgaggaaagcaagatttacgccgacatcgagaagggatttatgaagttggagttggacatcatggataacaagatcaattccctaaacagtgccatcggcgagatcagcgggaatctgaacaatctgggcagcaaagtggaagatagcaagatagagaacaggcttaagaaaacgttctcacagtga

SEQ ID NO: 3581 - DNA, 549 bp, synthetic construct
  source 1..549: mol_type = other DNA
atgaaggacccgaacatggaccggattcttgaggataatcgaaaattaatggaagaaaacaggaagctgaaagaggaccttaaggagctcaagaacgagttttatcagttcaagaagaactcaagacccggcaagcctttcaacctggaaaacaatgatgactacaaaccctctggaaactattatttccataacaattttaaagaggagtttgatgacgctaacatcaagtacaactccaaggataatccagaaggttcgttccacaatgactctgcaaatatcgtggatatgagcctcatcagctttctggccaggtccaataaacgggtggaaatcctgaagtcactgaatcaaggggacaaaataccatccaccattagcaaggagatcgacgacagcagtcaccacgtatccaagtacctcagtagcctaaaagagaaggagctggtcgtgtgcatgaacgaagaggataaacgcttcagattctaccgcataacagccaagggcaaatactatttggaaattatccagaacaaccagtactga

SEQ ID NO: 3582 - DNA, 546 bp, synthetic construct
  source 1..546: mol_type = other DNA
atggccgatctgaaaggcaccaaaacggaggagaacttgaaggccgctctggccggcgagtctcaggccagagtgaaatatgaattttatgcctcccaggcgaaaaaggatggctacgtggagatcaaggacattttccaggagagcagcgacaatgagaaggaacatgcaaagatctggttcaagctcctgaacggtgggaaagtacctgacaccctgactaacctagcagacgctgcagccggagaacatgaagagtggacctcaatgtacaaggaatttgccgagaccgcgcgggaagaaggctttgacgacatagccgcactgttcgatgcagctggagccacagagaaggctcacgaggaccgctacaatgctcttactgataagataaaggccgacaaggtgttcaagaaagatgaagagattgcctggaaatgcaataactgcgggtatatccactacgggaaagacgcgccggaggtctgtcccctctgcgatcacccacaggctcacttcaggaagcaagacacaagttacatctga

SEQ ID NO: 3583 - DNA, 978 bp, synthetic construct
  source 1..978: mol_type = other DNA
atgtgtaccgcgagtgaatacctcacggaaaaccattattttggcagaaacttcgactacgaaatcagctacaaggagcgcgtgtgcatcacgccacggaattacgagttcaagtatcggaaaatcgacgacatgaagtcccactatgccattattggaatcgcggccggtattgacgagtaccctctgtactatgatgcttgcaatgagaaaggggtggctattgcagggctcaactttgcaggcaacgctatatacagggagatggaggaggatatggttaacgtcactccattcgaatttatcccgtacctcctctctcaggccgacagtgtggaggatgtcaaagaactgctgcagaatctgaacttagtgaatatcaattactccgagaacctgccattgtctccgcttcactggatgatctccgataaggacagttcgataattgtcgagcctctggaggacggcctgaaggtgtatgacaaccctgtaggagtgttgaccaacaaccccaaatttgatatgcagctgttcaatctgaacgattacagaaacctctcagtaaagacacccgagaacactttcagcaagaacctcaatttggatgactacagcaggggaatgggcgccatcgggcttcccggggacctctcaagcgcctcccgattcgtgaaggtggccttcacaaaggaaaatagcttttccggcacaagcgaaagcgaaagtgtctcgcaattcttccacattctaggttccgtggagcagcaaaaaggactgaccttcatcaatgaccccgacttatatgaatataccatctattcatcttgctacaacacaaacaagggcatcctgtactataaaacctacgacaatcatcagataactgccgttgatctaaaccgcgaggatcttgacggggatggcctgatcatctaccccctgattaatgaggcacagattaactttataaattga

SEQ ID NO: 3584 - DNA, 546 bp, synthetic construct
  source 1..546: mol_type = other DNA
atgaagatcctggccctgatcgggtcgcccagaaaacactccaactgtgaagccatcgtcgacgaaattgccaaaggcgccgaggaaaacggccatgaagtgatcaaatacattattcaagatctggacatcgctccatgcagcgggtgtgagctctgccggaaaggcaaggactgccgctatacggatgacggcactgaaatcatagaccagctcgcagatggagcaagcgtgatcctggctagtcctatctactttggccagatgtctgctcaagccaagacaatagtggacaggttctattccatcttcaacaatcccaataaaagcttttcaaaggatgcaaaggcagcgattgtattgacacacgcctatccgggggactacgatgcttaccttcagttaaccattgcccagcctttccagaacaataccgagatggagtttattggagcgatagatgccggagacctaaagttccccggtgacgtcaaggacaagccagagatcctgcgagaggcgtacgagctcggtaaaaagttctga

SEQ ID NO: 3585 - DNA, 777 bp, synthetic construct
  source 1..777: mol_type = other DNA
atggcttcctgcaatatcggcaagaaattcattgcagagctgataggcacctttttcctcgtgttcttcggtaccggcgcggccgtggtgactttactgattagtgatagcgtgacaccaggaaaagctggcatcggcctgctcggcgggctgggagattggatcgctattgcactggcatttgggctgactgtgatggcctgcatctacctctttggaaagatctccggggcccacctgaacccagcagtcacaataggactcctggccagcaaaaacatctctgccattgacagtatctactacattgtggcccaggtaattggggcttgtctgggcagcctgttgctatatgtttgccttggagcccaggcggtcacaatcggcggattaggggctacagctccaggtatgggcgtgggatatcttcccgcgctgattgccgaatgcataggtacgttcttcttgatgctcgttgtgatgggcgttgctgtggacgagaaggccgaacccggatttgccgggatttcaatcgggatgactgtagccgctgtgatcatcgtcctaggggcctttaccggtgcttcgatcaaccctgcccggacgtttgggccctacttgatggacaccctccttggcggcaccaatttctggggattcttcccgatctacctgattggtcctatcgtcggggcagtccttgccgcaatactctatggctacctggcgaagggcaacgacgcctgtgcactgccccaacctttctttgaggagtga

SEQ ID NO: 3586 - DNA, 1497 bp, synthetic construct
  source 1..1497: mol_type = other DNA
atgaaggagctgtatgaaaagatgattaatgagtcagtggcggcactgcaagcagatatcgatgtaataagtgccaataggtacaacgactttaagattgtggatgctaaaccttatgcagatgcggtggcgggaatgacctgtatagacggccaagctaaatctgtgatagacttgcacaagaaatctgtggagagccattacaaggtgttgacgtccgttgccgagaccatccgacccgaagacgatccattcatcgaacattaccagactcccccgatactggagatcctatgtgaggaagacggggaatttgcagacagtatggctacatttattcaggccattgctgacagtgagacactaatcacacgagaatccgtccgccgttacggcggattctacgggcccacctgcgtggtggacttcgctttgatgccaggcagcacttccaatgttgttaaccagatcctgaagaccatccacattcctgtcatgcacaagcaggccatcctcagcgccaaatcttggggcatgaacacaagctatgggatcggcgatagctttgctcatgccatcgagaacggagccacggcagcagaggctgctgccaaagaggtggagtcgatgcagatgatctataaggaaccggtagaggcccagggtaagctgatggacgatgccggccactcgagtttcgatgtgcgggccttcatggagggctacaaaaaggaaatgcgccccgtggtcaaggccgctatggatgatggcgtgcattatggtaatatcgtcaccgttcctgcatactgcgttggggacattgggcaccacatcggtcaggccagctacaacatgtgtaaggatgacgtgactttagccatcattcaggcaactgcgaaggtaatggaagcctccctgaaggacaacattggcaaattcatgcatccatcacaagtcctgaacctggctaccgggtcaacggcctgcgctacagagtacattcttgagctggatggctttaattccactatggtggtggacctgttaaccaagaggttccacaacttcgtccagcagtatcccacccggggagcagctgccgaactccacaactgcgactttatggacatgatccacagaggttccacgtacataagcgcggcccgcaaggccaggagcagtgccaaaatcgaccttgtccctaaggtcaatggattcgccgtggacctgggagcaatcacccataatgaggtgctcatgaacccacagcggtacacttatcctgcctgcggcatcacagtcagattctcctcactcatgcggcttgcggactatccatgtctcctgacccccgaaccggtcacagctaccatgatgaccaacatcattgccctcaataaggaggtgcccgggagccccgtgagaggatgcaaaaactgcgcgtcttgcataattgatgcaaaacacgagtactgtcagtggaaagaatctgtatga

SEQ ID NO: 3587 - DNA, 627 bp, synthetic construct
  source 1..627: mol_type = other DNA
atgaatgagatcgtgctgaatcaccccctgataactcacaaattggcgattcttagagacgtcaacaccgggacaaaagagtttcgagagctggtgacagagatatccactctgttatgctacgaagccaccaaagacgccaagcttgaagaggccgaaattgaaacgcctctcgctaagatgaagacaggcaagctgaacgaggacaattatgcggtagtccccatcctccgcgccgggatgggcatggttgagggaatcatcaacgtgatcccaaacgctaaagtcgggcatattggtctgtaccggaatgaagagaccttcgaacccgtggagtactactataagatgccagatggcatcggcgataggatagcgatgattattgaccctatgctcgcaaccggaggcagcgtgagcgctaccattgacaagctcaaggccgacggggtaaagcagatcaagttcctatgcatcgtggcagccccggagggaatccgggccctggaagcaaaccatcctgatgtccagatttactgtgccacggttgatgagcacttgaaccccaacgcatacatcgtgccaggtctgggggacgctggagataggatctatggcactaaatga

SEQ ID NO: 3588 - DNA, 1188 bp, synthetic construct
  source 1..1188: mol_type = other DNA
gtgaatagtactgttggcgaaccggtgctaagcgttccagtggcgctcatcacgagcgggataggcacactcatttatgtcatctgtacacggaatcggagtcccgtgtatctgggaagctcatttgcattcatcgcccccatggtggccggatacgccatcggcggcaaaagcagtatcttctccgccttgatggtggtcggcttggtctacgtggccattgccattatcatcagggccaccgggaaggaatggatcaataagctattgcctcccgtcatcgtcggtcccatgatcatggtgattgggctttgcctggcccctaccgccatccaggagataggccttgatcaggccgtggtgccaatcaataacattattgtggctctggcagcattcctgaccactgctgtcatagccatccgaggaaaaggcgtactgaaggtgatacctttcctcattgggattattgtagcatacgtcgtggccgcgctgttaggtatggtggacttttcgggattcttctcagccagcctctttgaggttccagagttctatatgccgtttataaactacagcttcaatcccacagcgcttctaacgatagttccgatcgctcttgtaacaatggtcgagcatgttggggaccacaaggtcctgggggagatcatcggacgcgacctcattcaggaccccggcttgaacaagacccttctgggggacggtctggcgaccttctttgcagcgctcctcggcgggccagctaacaccacttacggtgagaacacatctgttgtcggtctgacacgcgtggcatcaatctatgtgatcggcctgactgcagtgtttgcagtgatctttgccttctccggacacttgacggctctcttagccgctatgcctaaccctgttatcggaggcgtggctatcctgctgtacggattcattgccgtaaatggggtcaagctcctgattcaggaggaggtggatttcaacaataacaaaaacattgtggtagcagctaccatgctggttctggggttaggcggagccaccctgtccgtggcccaaggtgatctgtccgtgtccatctctggcatggctctggctgctatcgccggcgtcatcctcaacctgataattccagaaagaaaagaagataacaagtttgtgcccgaagtgaaatga

SEQ ID NO: 3589 - DNA, 480 bp, synthetic construct
  source 1..480: mol_type = other DNA
atggctaagctgacttttaggaacgcgagcgaggaggatgtgccactcatcttagaatttatcaagaaactggccgactatgagcatcggttggacgaggtgatcgccaccgaggaagccctgaaatactggatttttgataagcaacaggcggaagtgatattcgccctggaagacgggaaggaaataggattcgcattcttcttcttgtcattcagtacatacatcgctaatgtcaacatgcacctggaggatctcttcatcgacccggaatatcgagggaatgggtacggcaaggccctgcttcgggagctggctaaaatcgtaaaggagcgcggatacggcagattcgagtggacctgcctcgactggaaccagcccagcaaggacttttataaatccattggtgcaaaacagaaggattggaatgtctttcactttacgggccaggaactagaggacttcattaacgaggattga

SEQ ID NO: 3590 - DNA, 1725 bp, synthetic construct
  source 1..1725: mol_type = other DNA
gtgtacatcaaaagcttttttaatgacttgaacctcaccaagaaggatggcatatatctgctggcactgactgtgttttcaattctctataccgtgcacctaatcgatgtgaactatacccttaactttaaaagcgacccgtttgtctatctgattaacggtctggtctacgctgggatgcagggccatatcgagaactattcctatggaatgttcctcaccccggtcgtgagcttcctgacatcacttctctttcggatgggcatagtggacaagatcgccatcatgatcgtgagcggagtcattagcatcctgggtgaaattgggttgtacctcttgtttaaaaccaagttcaacgaggtgtactcctttttcggctgcatcctctttgcaagcttccacatcgtcctcacaatctggggcgggggcggcatcgacattccagtatgtgccttcagcatcattacattcttattcatggtactggccgttgacaaaaaccctaaatactacattccaacctccatcttcctgattatctccattttcaccaaatacgatgccctgttcatcattcctatcctgttcttatactacctaactaaacatgacttcttcaacctggtggatttggccctcagcgacagggatgagctgaagattgtgattaagaactatataaaaagcgaagagttcaaatacattgtcatctctctgattatcgctgtggtcctgttcatactgttttgtgaagtgatatggtcatacggggctaatctgacattcctgacgcagtctcaggagtctctaaacggcttcaacagtgccaaagcagcgcgcagtcatttttactataacgataagaagttctatataagaaacctctacacgttcttctaccctcagatcagccaagagttttccctgatcattcccgcaatcatcgccatcggaacggtgttcaactttgcaaacatcatccgacgacggaaggaataccccatggtgcgcgattacaagacaccccactttaaatacctgctggttgggctgataattatcctcattccaatcgctatcatcggatttaagtatatctcacacatggtgactaatgttgccctcctcaccatctgcgtatgccttctctcgctggccgataagttcgacatagataagaggaccttcaatctggacatcttcttcttggcttggatttttgtctttgcagtcttcttcagctttatcacaatcaaaggtcaaagatacctgattattgccttgcccgctgttgtgtattttgtgttaaggacaatcgaagagatatttaataagttcaaggattccaatatcctcaagataactttaataatcattgccgcgataattattgtctactccctttcgttcacattcactgacggcaactttgacactgaaagaaacaataccgccatccaggaggtgtacgactacttggttgaatatgaccccgactaccttaataagaacctgagttccgactacagctatggatcgcgttttggtacctggacccttaaaaaggacgtgcggtatgtcaagctaggggtgatcgaccagagtgagagtgattatctgattgttaagcacgacaatgtaagtcttgcgaattacacggagatttatcgcgctggaaagatcaaactgtatcagaataatatgtacgataactcctcaatctga

SEQ ID NO: 3591 - DNA, 735 bp, synthetic construct
  source 1..735: mol_type = other DNA
ttgtctatcgtgagtgcaaacgacctgaacagtatcgacgactccattgaagccgacaacctaaactccatcgagatcgaggacattcaggtagactccgtggagtcagacgatcttgagaagtcgaatatcgatgaaaaagttctgagtgacggggagagcgacggcgactccggcaacgaaactgaaacgcttagctcaggagatgaaaacaatgagtcagacgtgtcctctaatccaaacgaaggtgtagcgaccaacctggaactggataacgacgctgacaaggaaaacgtcaagataggcgagctggttacctggaccctcgaggctaagaattacggaccctatgatgcagagaacacccaagtctatgacgaactgccagaaggcttagagtacgtgagccacacggtcacaaagggagaatttaatcccgagactggcatttggaaaatcggggacctcaaagtcggggagaaagagtacctcaaaatcgtgacaaaggccgtcacgaccggggaaaaggttaataaggccaacctgacaagcgacacagatattatcgatccggatgagtgctacgaggaggaggagattgatgtggaggatgatgatgacaatcatttcgagaaggtgatacacagcaagcagctgcctcgggtgggaaaccccatattcctacttatcctgagcctgttgaccgtgctcggtctcaatactaggaaaaaatga

SEQ ID NO: 3592 - DNA, 1455 bp, synthetic construct
  source 1..1455: mol_type = other DNA
atggactacgacgtcatatacattgggagcggcaatgcctcttggcagggcgcgaggttcctgcgcaaagagggtctgaagattctaattatagaaaaaagcttatatggtggtacatgcgccaatcggggctgtaactctaaggccttgctggatgctccatatgagatcaaggcatttgctgacaactttgaaggctatggcaagtctggcaactttgaagtggactggcctgccctcatgaagctcaaaagaaaacggatcgcaaacatggctcctttcttggacggcaaatacaaggaatacgatctggatgttgcccatggggagggatacattgtggatgagcacacagtgagagttggggacaagacattcacaaccgataagatcgtaatctgcactggcctgaagcccatcatccccgacattaaggggaaggagtacctgcacgacagtacggactttttagacattgaggagctccctaaacatgccatcattatcggagggggctttgtgggaatggagtttgcctcaatcctcgcggaggcagggcttgaagcggatgtgatcatcagagggaacatggccctgaaattcttccaccagccttatgttcaaaatgtgatcgagatcctaaaggaaaaaaacatccgattccacttcaatgagaccgtcaatgaagtcattaaagacgacagcgtggtcattgagaacccagaggagcgtgtgaatatcttcgaaaacgcgcagaataccgatgacgacctgagggaccccgatgcaaaggtggacaacaaggcgtatgagaatgccttcacggtcaactgtgattccggactcagcctcaccggcgactacgtgatcgctgctatgggacgcaccgccaatgtggacaccataggccttgagaacgttggcctggactacacaaaagccggaataaaggtcaataactatctgcagactgctgtacccaacatctacgcttgcggagatatcgccgataccgggatcgcaaaacttgtgactgtagccatccaccagtccaaatatctcggcaaggcattgctgggggatgctgaggaaatagtctacccagtggttccggccgtggcctacaccatcccccgaatagccaccgtaggtgtgccagcctacattgcagaacagagcgatgaatatgatgtccataggattcggtatggaaagtcctactccctggagctgaaaaacgacacacgcagtgaggcaaaggtcattgtggataaggacctcaacatagtgggtgctgagatttatgccgctgatgctgaaaacgtggcaaacatgtttacttttatcatcaatcaaaagatcacgctggaagagcttgacaatatgatttacgccttcccgtcaagcagttcggtttgcttgtacaaactgcataacattcactacaagttctga

SEQ ID NO: 3593 - DNA, 1194 bp, synthetic construct
  source 1..1194: mol_type = other DNA
atgaaaattttggtggtgcaggaaagcgactggctgaagagaaaccctcatcagcagcaccatttgatggaccgcatggtgttacggggacatgaagtaaaagtgatcgactaccccatcgactggcccaaagaagactcaaaaggcctaatctttcaccgcgaagtccacgaaaacgtctctaaggtcaagccagaggccgacatagaggttattcgtccctccttcataaaagagccagggctgaactatgcctccctctacttcacacacaaaaaggaaatcaaaaagcagatcgatgagttcaagcccgatatcatcatgagcctcgggctgctcaacgcatacactggttcaaagcttgctaagcagcacggcattcccttcgtctactaccttatcgatgtgctatacgcactgatcccagagaaggcatttcagagcttcggcaagaaggtaaacatgaaagcgatcgagaacagtgacctcgtcatcactatcaatcaaaagctgaaagaactggccatggaactcggtagcaaaccagaaacgaccattttgattgatgctggaattgacctgaatgactttgacccccagctggatgattccaacatacggaatatgtacaatataagtgaagatgacacagtcctattcttcatgggttggatctacgaatttgctggcatgaaggagctggcaatggagctggggaagaataaggaaaaatatcctcacatgaagatcctcatcgtgggggacggcgacgcctacgacaggatggtggagataaaggaggagtacgacctgggggaccaattgatcctcaccggcaagcagccttatgagaggattcctgaatttttagcctctgccgatttctgcctgctgccggcttatattgatgaggaaatcatgcaggatatcgttccaatcaagctgtatgagtatctggccatggaaaaggtggtgatagctagtgagcttccgggcatttccaaggagtttggatacggcaacgggatcgagtatgttcagaaggcggaggaggtgctcgagaccgcgcaacggattctggatgagggaagatatgaggagatttcgaaaaaaggacgagaatacgtgaagagcaacgactgggaagccattaccgataaattcgagaatgccctggaggagcttattaaatga

SEQ ID NO: 3594 - DNA, 540 bp, synthetic construct
  source 1..540: mol_type = other DNA
atgagaatctgcgtttacggtgctggcagcacgcagatcaaaagtaaatacacagatgaagcatacaagctgggggaggagatcgccaaacggggccatgaccttgtattcggaggtggctctacaggaattatgggagccgtgagcaaaggggccatcgacaaccacgggaaagtgctggggatcgcccccgagtggatggaggagtttgaaggcatctgcaaggactgtgacgagttcatctataccgaatcaatggacgagcgaaagaagctcttcctggaaaattccgacgcattcattatagccccaggaggcataggcaccctagatgagttttatgaggtgatcgtgctgaagaagctcaataggcacgataagaagattgtgatatttaacatgttcaactattacgatcacatgctggagatgatcgactttatgatcgaggagggggtcattcgggcgggccgcgacaagaagactttcaaaattgctgattccattgaaaaggtcttcaaaatcttggaaagggaatga

SEQ ID NO: 3595 - DNA, 492 bp, synthetic construct
  source 1..492: mol_type = other DNA
atgtcacacccacacgtggagagcataaacaatatgaacgcctccagcctcattggcatcatggaagagtcgaagattacctacgtgcgagaaaatctggatatccacttgcatgcaagtcagatcaaactgctgaagcaggtccggaagcatgagaagccgcaccataaacgcattagagttaaacgctatgagcaagccgagaaaagcgacttattcaatctgcatctcgatctgtacttgaacaattacaagaagctggccaagaagggactcatcgagatcgacgaagatcctgagaacggcctgccctacgactgcgcacttacagagaaagggaaagaagtgcttgatgacatcgacaggctagagaaggactgggaaaaagtagtccacatcgatgataacgacctggaggcgctcaagcggatagctctggactcctttgaaatctcttatcagcacaagaaaaagcagaacttcattttctga

SEQ ID NO: 3596 - DNA, 321 bp, synthetic construct
  source 1..321: mol_type = other DNA
atgggcgagaaggtgttctacggaaaagggatacgccggatcaaagaagaagacccacaattatacgactctatcgaaaacctcgacaagaacatttggaatgccaactcgctggactataggacgcagaagctgattgcaatagccatcagcgccaccaatccggagagtagctcattcctcaaacagctatccaaggcgaaaaaagagctggatatctccagagatgaggtaatggatgtcttgaaggtggttcttctgacaagcggcatgatgccctttaacaaggctctggaggtggtcaataagctctacgactga

SEQ ID NO: 3597 - DNA, 336 bp, synthetic construct
  source 1..336: mol_type = other DNA
atgcgggtgagtatcatgaaggaggaggttttctacggaaaaggcatggagcgcgtgaaaaaagaagatgaaggtctgtatcaagctattgtagggctcaacgaggcggtgtggaacggcaaagtcttggactacaagacgcagaagctcatcgccatcggaatagccgcctccaatgcagacagccgagcaaccgaaaggcagattatgagcgctaaaaaggagcttggggtcacaagagatgaggttgtggacgtgctgaaggtggtgctgctaacctcaggcatgcagcccttcaacaaggccctgcagatcgccaataaggtctttgaatga

SEQ ID NO: 3598 - DNA, 756 bp, synthetic construct
  source 1..756: mol_type = other DNA
atgaatagtaagggaaaatatctagtgctctttctcattctgatcttatcattcagcattatctctgcctcattcgcgtataccggaactggcttttctcatgacattcccttttccaaatactcaagccagtccaactcggacatcctcaacaaatacaacaataccgattgccacagcgaaatcaaagggatatgtacgtacgtggcagacggggacaccatcgatgttgaaggggttgggagagtacggtttgtgggtgtcaatactccagagagaggcgtcacagcctatatctgctccaagcgcttcgtgcaaaagttctgcctgaacaaggaggtcagcctggatgtggacgactcgaagcgaaacgatcgctatggacggaccttggccgtggtgattgtagatggcaaaaacctgaacgagatgctgcttaaggaaggcctggctgagatcatgtacattccccccagtgagttctacccatatgactggagctccgactccaccacaagctcatcctacacgtccggcagcagctcatccaatagcggagggtcctattcaagcagcagttttaccagcggttctacagtctctgccccgtacgtgggcagtgccaacagtcacaagttccactactccacatgcaaatggggcaagaagatctcggataaaaatagggtgactttcaacagcaggtctgacgcgataagtcagggatacgctccttgtaaggcatgtcagccttga

SEQ ID NO: 3599 - DNA, 414 bp, synthetic construct
  source 1..414: mol_type = other DNA
atgaagatgcccgaaaagatcgacaacatgatgttcgcaccctgcggaatgaactgcaagctctgcatcaagcacatatccaaatcaaacccctgccctgggtgcctgattgacagtccaaacaagaccaagaacgccctcaaatgcaagatcaaaaaatgtctggagacgaagagggtcaaatactgtggccggtgtagcgaatttccatgtaagctaatgaaaaagcaggacaagaactataaaaaacgctataattactccacactggataatgcgaaacggatcacctacactgggataaaccgaatcatgctggaagacaagcttaattgggagtgtccgtcgtgcggcggcattatcagcattcaggagagagtgtgcagcgattgtggattgaataaggaggattga

SEQ ID NO: 3600 - DNA, 513 bp, synthetic construct
  source 1..513: mol_type = other DNA
atggcagctatcatctgtccccgatgcggcaaaatgaacgacgggtccctggatttctgcatctattgcgggacttacttcgacgactacaatgaagaagacaacaacgacaacctcttttttattcggtcaatgaccaatgatgggagacctggcaagaaacaagtggtccgcctcaacgagatgccagataatctccagaagcccaagcacaggctggccatcctgctgggatacctgttcgccatacttggcggactgatcggcttcgtctttgcgatttatctcattacacggaaagacaagaatgccagaaggcatggtctcatccagttggtgattctactgattgagtatgcattaataggtgttctaatcctgaacggacagttggacataaacatggtacttgatccgttcaacatgacccgcatgaataacatcacgcagctgtacaactccagccagatgaatgtgagcgggtcgaatatcagcagtctgttcggcttttga

SEQ ID NO: 3601 - DNA, 1842 bp, synthetic construct
  source 1..1842: mol_type = other DNA
atgaagaaaaacttaagcctcaagaacattttaatcctgtcactcatcttcctgttcgtccttagcatcggatcgtcatttgcaaccgaggaccttaatacaacaggggataacaatctaatagatgacaatgccatggcagacaccctgagcgatgagaaggagatcagctatcagaagccactgatgtctgatgaaaactcgaacagcaataatggatcagacgaggagaaggttataagttccaacaacagtaagtcagagagttttctcatcattcggcccaacgaatcttctattacagtgctgggaggtaattttcaggacctccaggacgcaattgactatgcctccgacaactacaccatatatctaatttgtaacatgctgggtgaagggaaacccatcattgttaacaagagtgttgtcatcgagggaaacggccatactttggacgctaactactcatctcgaatcttctgcatcttgagcgacaacgtagtgctgaagaacctcgaacttatccacggctatcagcgggcttatgactcttacaagctgaggccatatgatagtaaaaacttcgacaatgcccctgctcttactcaggagttcttcgattacagtgtccctccgctaaacagcacggatgacattgaatacggttggggtcctgctattaaatggctgggcaacaatgggacactcattgactcggcaattctgaataataagattgattatgctaacgatatcggggaaggtaaagccgtgtcctggctgggaaccggcggacgcataatcaacacatttatggtgagcaacgagtaccatcacttttttgtgccatgggggattgtgggctaccagcaaaagtctgagggaaaggttctcgatacttctccccacggggtgtactacggcaatattgaaggaaacgtgtatttcctggacgtggccctgaatgtgttgcctaatttggacgtgaagaacgtcacttcctactatggtgaaggcaaaaagatttcatttaacttgaaccatggcaatgcgtccttcgtcaatgagagccttgaactcagcatcctgtccaagaaatacaactacaccttcaacgtgttcagcgacgaaaatgggaactttgagtttaacctccccaagaacttaagcgtgggaagctacaacctgatcgtggggttcaatgatggcaaaaacaatatcagttccaataccactgtgaagatcaataaagctactgtaagcgtgtccgcgccggatttcaaggcccaatactactccggcgccaaatacacgctgaagctgatcaatgccaagaccaaaaagcccataagtggcatgaaagtaaacttgaatgtctataacggcgagaaagtcaagacgtacacggtcaaaaccaataataaggggatagccacctttgataagttcaccctcccaagcgtgatttatgacgcgggcaaacacaaggtgaccatctctgtggataagagttatgacctgagcaagaaagagttcacggtccagatctccaaagcaaagacagacatcaagctctccaaaacaagcttcaagtataagaaatcagacaaccttaaaatctccatcaaaaaccagatcaaaaagacagccatttcaggcctgaaactgaaggtaaaggtttacaccggcaaaaaatacaagacctacactctgaagacagacaagaacgggatggttaagataaataccaagatcctgtccaaaggatcgcacaagatccaaatcacatccgaggataaaagatacctggtcagcaagaccactagcataaaggtggcctga

SEQ ID NO: 3602 - DNA, 2958 bp, synthetic construct
  source 1..2958: mol_type = other DNA
atgaaaaggaacatttattttattattctgctggtgacactctttcttatctccatgagtgtggtgtccgctgcaaacgatgctgacgtctcttatatcgacgacgaaatagtgagcgatgaatatctggagctgtctgatagcgagatgggcatttcggatatcgactacgatgatattgaatccgacatgcttgaaaacgaaatcaaggagaacggattgtcagacaataatgacgttctgaaatccaatctgcccgagaatgaatttaaggagagcaactataatgagtattatgaggacatcatgaacagtaattcccagaagtacggggaatttattaatttcttgatcaacaataaatcattcgaatttcgcgaaaactccctgagcgaggacggttattttctgtatgctactaagaactataccctccggctttgggatggtgtaaactacactatcttaaaggatgattattacttcgcgagcaccgcggagaagtccggctatttcgtcaacgagtccttttacgacgatatcatctattaccatgagtataactactatctggacgaagagtttcttggatggctgatgtggaacgctaactacaagaaagtgttcgtgagcggtagcatagaggataaggtggatatctcctcagtcgtcaatcctgagaagggaggaagccccaagagtggcaacctaccaagttcttatgacctgagggactatggctttgtaactcctgtgaaagaccagggaaatactgctaactgctgggccttcgccacaatggctgctctagagagccatctcttaaaaactgagaatacctcatacaccctgtccccccagtgggatttcagcgaaaacaatttgaagaatgtgatgagttccctgggccgaaacgggacagacaagctggtcaatagtggggggaatatgctgatgtctctggcctacctcattcgttggtccggccctatcaatgagtcagacgacccctataactctaactataccaacattagcgaggatgtatatccactgaagcatgttcagggagtaaagttcatccctaaccggcagaactacttggacaatgactacataaaggagtcagtcctcgaaaacggggcagtgtatattagtatgtactgggactcgtttttcgagaagaacgatgcctactacttctataatggaagcgggtacaactttaattccaactacatgcatgccgtcacgatcgtggggtgggatgacaattaccctaaaaacaattttttaatccagtctgaaggtatggggaatggcgcattcataattaagaatagttggggcaccaacgcggggaataacggttattattacgtgtcctactatgaccaaatgctgggtttcgataacacatacgccggcttcgccttcacaaatgtggaaaacgtgacaaactatgactacaattacaactacaatcccctgggctttacaaatgtttttcccgtgaacagcaccagtgcgaaattcgctaaccaatgggccgcactgaaaagcggcaccctgaagtcttttgggctctacgtggtaagtccatctatttgtacagccaacttgatcgtgaatggcattagcatcggcaacacgaccagttatctgagctccgccgggttccatacgattctctttaaccaggccgcatatgttaatgtcggtcagacctttagggtggagattactcttcaacacatcgggagctcacacacgtacattcccctggaggagcgcatcgagaactactccaatgtggtgtccggatacaaccagtcattcctttggctgagaaaaaatggcgtcgaccagtgggtggatctgaagactgaggtggacaacgccaatatctgtttgcacgtgtatacggagtgcatcgaaggcttgctcgaaacccacgttcggagcaacaatctggtgacttacttcaacaccagcagtcttaatgcaaccctggttgacggatcaggaaatccgatcgcaaacaaactcatctacttcaagctacttaacgtgacctacaacagaaccacagactcgaacggcaaagtaagcttgccaatccatctgaacccgggctcgtataaatttctcataagcttcctcggggatagcatctaccacaagtccaatcggctggtcaacgtcaaagtgaataagatgcacacaaacatcaaccagaacgtcagtacggttcaccagggcgagtatctcggtctgatcctgaaagacagcaacggcaaggccctgtccggacagaaggttgcattctgtctcctctccgtcacgtacaacagaacaacagacagcgcgggaaaagctaagctgttaatacgactgaatccacgcaaatacaccttcactctaaagttcttcggcaccgccgggtactacgcctgcaacaagactttcaatctcacagttctcagcgccaagtcaggacaaagctatgagatgggcatcgacgattacgacggaaagaacatcgatgagaacattataattaataacgaaaccttcgagagctcggacgtcgtgaacaacgacatcatgtacatgtacaatgacactcagtattacaatataattaatgaagataaagggtactacaataaccactcaaacgacatcaattttgagctcttggataatgatcagaactacatctactctgacctcaatcttctggagctattgaacaatgatcaaaacgacatatgcttcgatctgaaccttctggaatatattgacttcgataaaaccgattactacaacgacaatctttacaacctcgagcactactacatgaaagactcgttaaccgaaaacgaagacctgtacatttgcgagaacaagctaaacattcacgatctgaaccagataaagatcggcggtatctga

SEQ ID NO: 3603 - DNA, 996 bp, synthetic construct
  source 1..996: mol_type = other DNA
atgagtaaatataacgaatatcaggataaaactattttggtcacgggaggagcaggctgcgtgggcagcaacctgacacggaaactggccgagcttggggcagagaaagtgatcattctggataatatgtccagcgcatacgaatggaatgtgccaaccaacgaaaacgtggagcttattcaaggggacatcctcgatgatgaggagttaaagcgcgtatttaagatgaagccagactatgttttccacttggccgctcacttcgctaatcaaaacagtgtggacaacccggaaaccgacctcatggtgaacggcataggcatcctaaaggtgctccagtacgcccagctcactggtgttgaacgattcgtctactcaagcagcggctgtggagtctacgggcttgacagtaagatgccttttgaagagcatgacatatccatttccctgcacaccccatatcaggtgactaagctgctgggcgaactgtatacgaattacttccataacttgtacgacatgcccatcgtgaatgccaggttctttaatgtattcggccccggggaagtgcccggaaaataccgcaatgtcattcccaatttcttctattggtcgatgaccaaacaggccctccctatcacaggagacggcaccgagacaagggactggacatttgttggagatatcgtcaacggcctgctgtcaatgggagtggaggaggaggcgatcggtgaagcgataaacctagggagcgggaaagatcacagagtcattgacatggccaacaaggtcaaccagctcacgggcaatgaggagggcatcgcctacgtggcaagacggaactgggatgctaagaccaagctgctgtcttctatcgacaaggccaaggacatcttaggttacaagcctaccgtatcctttgatgatggtctggagcgggtgtacgggtggtttacagacaactgggaagacatcgagcgtgatgctgagttctga

SEQ ID NO: 3604 - DNA, 774 bp, synthetic construct
  source 1..774: mol_type = other DNA
atggagatcgagcatactcacgagctgatcaaagatgtctttggaatgaatatgaaagaggccaggctactggacgatctcttaaagactaacgacctatccgagatcctggaattgggctttgcccatggagtgagctcctgttacttcgcatccacacttaaggatatgggcaaaggtcacttgacgaccatagacaatactacagctaaaaccagaaatcccaacatagaggaactgctgaaaaagacagggttagaggaatacgtgacctactattttgaagcggtgtcatacaactggcggttgatgaagctgattgaggagaacaacgggcccatcttcgacttctgctacatcgacggcgcccacgattggaacaatgacgggtttgcattccttctcgtggataagctcctcaagccgggaggcattatcatcttcgacgactataactggagctttagtcgaagcccctccatgagccagagtccaagggtgctggccatgtctaaggaggaacaggaaacccctcagattaaaaaggtatatgatatgctcgttaagacccaccctaattaccacaatttcaaaatcctgaatgacaacagctgggccctggctcaaaagaaggaggaggaggacctgttcgaaaaccaggtcaataagctcgaatctgaaaaccgcaaactgcggaaaaagcaaaaggagattatgtcgtcaaacagttggaagatgacgaagccactgcgccagcttagaaacaaaaaatga

SEQ ID NO: 3605 - DNA, 636 bp, synthetic construct
  source 1..636: mol_type = other DNA
atgaaagctaaagagatgatggacaagaagtttgtgtatgtctccaaagacgatacaatagaagctgtgtctataaaaatggaagagtcgaaacggttcaccgccccagtgctcgacaaggacatgaaattggagggatggattacctcattcaacattaccaagggcctccgagagggcaagaagctgatcagcgaggtcatggacccggtggagaacatactggccattaaggaagatgaggccgcaaagaatgcggtgatcgaaatcagtaagcacaagctcatcagcgttcccatcattgatgacgaaaacaaggtcatcggggtctgccggagcgtagacgtggttgattcaatgtcctccctgtacgacattaaggttagcaagatttacgaagctatggagaaagagcttaaaggggtgacgtgggatgaactgatggaggcttctgccaaaatcagtacaagaaccacaggggtgaagatcactgccgaggagtacgagaagaatattcagaacgccacgttcggagaggcgatctgggcaactggtggactggaaaagttctttgcaggtctaatcagcgtgggcgaaatcgtcatcgcccgcaaagtaggcagggcaaggcgctga

SEQ ID NO: 3606 - DNA, 828 bp, synthetic construct
  source 1..828: mol_type = other DNA
atggagatcaaactaaaaaagcagattgagaccctggagagggaaataacgcttaaaagcgtcgatctggacgaggatatcgaagactttaacgtggatatccacagctacgaagacaacgacaagctcattaccatcagcccacgctgtgtccgatgcaacctgtgtgtcgaggaatgtcccattaacgtaatcagttcgtccacctggctcaaaagggcgaagattggcgaaggctgtgtgcaatgtgagatctgcgctcagacttgccctgtttcatgcatctatgtatgggacggggaaacagtcatcaaagaggatgatagtgtggaatacaccctcaaggagctgaaggtgccccatagaaatctgaaaatggaagacatttccataaatcgtgaagtctgcatcggctgtggctcttgcctgaagtattgcccgactaacgcaatatcccttagaagcaaggagttcattgaggcccacggagaggaatgcccagaggtgggggccatcgactccgagcatgggcacatgtatagctacattgacaaggaccgctgctgcggttgcggatcttgcgcaaacttatgcattcagggagccatcacactcaagcgggatctgggtccagtggttatttacagccacctggatgtaaatcaggacatctgcgtggcctgtgagctctgtgaggacaactgtcccgtcggcgccatcaaggtggtggatggagagatcgtgctgaacaatgacaaatgcatacggtgtaaggaatgcagttcacggtgtcctgtgggggctttgaatttggttagcgataactga

SEQ ID NO: 3607 - DNA, 1029 bp, synthetic construct
  source 1..1029: mol_type = other DNA
atggacgaaaaggatctgaaaagctcaaataatgtgacggcagaggacttaggcgttgatgagattgtctatgacgcgatcaacgtagatgtcatcggctttggcgcactgaacgtggacaagctttaccgggtgggccacatcgccgagattgacgaagaaagcttcatcaaaggtgaagagcaatcccccggtggtagtgcagccaatacaatcatcggcctaagcaagctgggatgctccacatcgtatatcgggaagatagcagacgatgaggagggagacctactcgaatataaccttatggtcaataacgtctacctgaccaatctgatctacgccgacagtggcaatagcggcaaagtgctcggatttgtgtcagacgagggggacagggccctatatgtggacccgggagtgaacgatgacataaccatcgacgagattaacccactgaacgtaaatgcctgcaagatactgcactacacctcctttgtaggggattcctttaatgctcagaaggaactgctcaatgtcttgggtgatgatatcgtgttgagctttgacccagggatgctctacgttaaaaagggagtcttagaacttaaggaaattctcgaaagaactaacattctgctcattaatgaaaacgagctgaaaatcctcttcgaggatcattacaaggagaaactcagtgtgagcaaggacttgaccttccgggacttggcagtgttcatccgcgatgacggcattgatacagtggtggtgaaacgaggggagaacggggtctacgccataaacaaagacgacgatgaggtcaaggcccccgcgttcaagtgcgaggccgttgacactacggctgctggggattccttcaacgccggcttcctgtacagctatcttaagggctacgatctggctaaatcatgtctgattgctaactgggtggcctcgaggtctgttcaggcgatcggaattagtggactgcctaacctggaggagctggaagagttcatcagctccctgtga

SEQ ID NO: 3608 - DNA, 891 bp, synthetic construct
  source 1..891: mol_type = other DNA
atggtcaattatgacaaggtcgaggataccttcttcgagtcattcgatgggatgtacatccgggccttgatcacagcagaagacgagctgactgtgaaggaagccgcctatgacgcgacagctacgccaagtgccgtgatcggcagggtggaagccggggtggagtcctttgtaagtggagataagactccagacggacggccgggagccattgttcagttctggctgaccgatgacctcgctaagtttgagaaagaactgtcgtaccgcatccgccaggacatcctcgtcaagccattcacccgggtcttcagcataacggaaaatccggtggggagtatccctatgatggaaagcgtgggccactgcggtgacggctacgagtgggaaatcgaggagtacgggcgaaaaatgatcaatgtgcccattgccgtccccgattttcaaatcgagtccgagctggcttacgcagaaggcatcatgggaggaaacttctggtatatgtgttccactaaggaagcagtgttgaaggcaggcagaataataatcgacaccattatggaggtggatggggtctgcacaccctttggtatctgctctgcagccagcaagcccgaaacaaacttccccgagatcggtcccagcaccaaccacccttactgtccttctctaagggagagactcggcaaggagtcaaaagttcctgagggcgtaaactatattccagagattgtgattaatgccgtaagccaggaggcgatgaacttagctattaagaaagcggtggacgccatcattgacatagggggtgttgaacgtatttccgctggaaactttgagggccagcttggcgagcataaaaccaacctgctggatatcctgaaagaatga

SEQ ID NO: 3609 - DNA, 1107 bp, synthetic construct
  source 1..1107: mol_type = other DNA
atggtcaaaaaggttttcatcacagattgtgaggggcccctgacccttaacgacaacgcctacgaactagctgctgaatttattgaagatggagataagctcttcaaaatcatcagtcgcttcgacgactacctcgtggacgaggtccacctggagaactaccatgcgggggacactctcaaactgatcgtgcccttctataagctagccgggctgacgaacgaaaagatgattgagttttcacgtaataacatctatatcgtggatggcagcaaggacaccctgaaattggcaaacgagttgatggactcgtacatcgtgagtacaagttatggccaatatattgaagcgctctgcaattacatgaacttcccatttgaaaacacctaccacactcaactcgatatagacggggccacgaacttcaaccagagcgataaaaaaagctccacaatcggagtcaaatctcccttgtttattgaagagctgaagaaagtggaggaatttcgaaagatcattctggagcacggggatgaaaatgaggacgacttcaatgtactctacgacattttctttaatgagttcccgaagcttgaaataaacaagtacatccagtccgtgaagactgttggaggcaagggcaagcagattgcagtcgaggatatcgtggagagactgtctctggaggaaggttccatcatctatatgggcgacagcatcaccgacgtagagcctctgcagtatgccagggacaatggagggttatctgtgtcgtttaacggtaacgagtacccactgaatgtggccgagatagctgtaatctccgacaataccatcgtcagctcaatccttattgaccttcattccagattcgataaggactacgtcatcgattttgtgaaagcctacgctgagaaaggcccagacgatgcattcaaggacttcgaggttgactattcactggtggaagagtttgaaaagatattctataacaggcaggcccctataattgatataatcacagacgagaatcgcgattacctgctgggcttaagcaagaaaatgcggaatggcattcggggtaaggatattggcggactcggatga

SEQ ID NO: 3610 - DNA, 114 bp, synthetic construct
  source 1..114: mol_type = other DNA
atgatccacaaaaagtactatatgaagaatgaattttacctgctcattaaagagataaaccagaacatgatgttcatctacagcaaggagtattaccccaagaccggccggtga

SEQ ID NO: 3611 - DNA, 1452 bp, synthetic construct
  source 1..1452: mol_type = other DNA
atggtcactgtcaaccctatcccacggccactgcgtgatgtgcacatagaatacgagattgacaacgaaaagtgcatcaattgcagtgataaaccctgcctgggcgtttgcccgattgacgctgtctaccaggacgaaaacaccaaacttatcaagctcgacgagcactgctttggctgtgtattatgtagcaatgcatgcccttacgacgcaattcacataaaaaagaccctgtctgaacccatccgggagaacgtacccaacattaataaaaagctttgcagagcctgtggtgcctgcgtgaacgcctgcaaatctggagctatccatctcaaaagcacgggaggggaggagatgcacagtgaaatagacgagaataaatgtatccgctgcggctattgtttccgcgcttgcccaactgatgcgatcaagtatggcgagattcttcccaagacagttaaggagggtaagactctctgcattgaccatgaccaatgcatcggctgcatgacctgtacaaggatatgcccttccaagggggctataaatgtcggtaagaccaataaactgccgttcattgaccctgcctactgtgcacgctgtgaagaatgtatgcacgcctgcccaacctatgcaatcgactatgtggaacgggaggaggcatttgagtcattcaataaaatcaagacgttggagatcgcctcggagatactggatagggatatcaataagatctccaaaggcatcaccaacattgacaacgtgctggtgaagctcctagatgacatcagcaaagattaccatttcgatgactttgactatgaaaactcaatggacattcgagacgtgcccaggggcatggagttttcggatgtggagatattcacctgcacaaactgccgatccattgtcgtgaatgttacagaatacctgaacgagcggttgaatgcccagctgaacaaggacctggatgttgtaaaggtgctagacctcgtggaatttttcccccccagtttagggattgaagtggtggaggaaaactgcatcagctgcgggctgtgtatggacgtatgtccaaccaagagcatcagcctggacggacctaatccaattaagatcgatacagacaatagctgcgtgtactgcggactgtgtgccgaggcctgtaattttgaggcgatcaagctggccgaagagttcttcacaaacagaaaccacgagatcttctttattaaaagagacctcaggggcagacgcaacgggactgtggagatcaatcattccgcttgccagctctgtgaggtctgcattaagaactgtcccgttgatgccatgtcagtggaagatgatatgatcaccgtcaaccacgatgaatgtatttcctgccgaaactgtgagggaatctgtccggtgaacgcggctcgggtcagcacgatctggcagttcttgtga

SEQ ID NO: 3612 - DNA, 1035 bp, synthetic construct
  source 1..1035: mol_type = other DNA
atgtcctcaattatttggtacatttatgaatttgcccgaaagacgtggatagacggcttctttgatgcaaaatccaaagaggacatagcccataagccagaccggttcagagacttccccaacgtcatcaaggagaactgcattggctgtggaagttgcacagcaagctgtccatctcctaacgcaatcaaactgatccgcgatagcgatacagaagacgcctttggccttatctatcccgtgatcaacaaggcttcctgcataagatgtgggttctgcgctgaagtctgcccttccactccaaagaccttggagtgcggtgagaatcacttcatccgtgaagagttcaatatcattccatcgaagcgaaaatacattgtcgacgattacctctgcataagatgtcataagtgcatggacgcctgtgaagtgggagcgatcgaagagtttgatgacagggtgagcgtaaatcagagtaaatgtatttcctgcggcaaatgcctcgaggcatgtcccgttaaaggtgctatgcggggggtatttgtgaacaacctggaagagcagaagaaaatcatcaaccttgcggtgactacgctggaggactacatagagagcaagcaggacgatttgattcaactcggcacagacaagctattcttagatgagctgcccttcaaacctatttttgataagtcactgaatatcctcaatgataaggaagtggtgcacgaggtgctggaggatgccatcaaccgcctgaaaatccgcatcataacctgggacagtgagaactgtaaaaagtgtcaaatgtgcattccggactgtcccaccggagccatcagcttcgactacgacaaggacaccatcgtgagggacaaggaaaagtgcctaaggtgcagcatctgctaccagacctgtccgtttggggttatcaagtatttcctggccaagttcaatctcgataagaacgacaatgatgaggaggtcattcacatctcagtcaaagcttctcagctggcggaacggcgggcctga

SEQ ID NO: 3613 - DNA, 1128 bp, synthetic construct
  source 1..1128: mol_type = other DNA
atgatacttccaattgggccaatccacccaggcctcaaggagcccctacgcctcaagctgcagactcagggtgaaaaggtgatcaaagctgagattgattatggttatgtgcaccgggggattgaaaagattatggaggggaagacctggcagaaatgtatttacctcagcgaacgcatctgcgggatctgctcatatgagcacacacagacatttgccgagacattagagggtatctctggtgtacaggcgcccctgcgagcccaatacctccgggtaatcacaaacgagatcgaccgaatccagtctcacctgcttgccaattcaaccttcttcaagaccctggaccatgagacattgttcatgcatgtgctggccctgagggagtacgcgatggactccctggaactacttacgggaaacagggtcaacctcggctggaatgttgtgggaggggttcgcatggatgccgacgagcgtcatttcaacgctatcctggagaacatgaagaaaatcgaagatggattcgacagacacgtggcattgttcgaagaggctcctatagttgccttacgcgcaaaaggcgtcggcgtcatgacgaaggaagaggccataaaaggccacgcagtcgggcccatcggaagggcttccggcatcaagcatgacctgcgagaggaacactacacctacaaagatcactttgacttcaagccgatttggagaaaggagggagacaactacgcccgtactctgaataggctctatgaagtggagcaatccatcgacttggtgaggcaggccattgaaaacatgccgaaaggcgatataagaacccctgtcgacatccccagtggatatggggaatggcggaatgaggcccctcggggcgaggtgagatacatggcggaaaccaatggcgatctgatcaagcggattagcatcagaacccccagtatcatgaacattgattcctgcgcacgctatatgctgaaggacgtcgcaacagtggccgacgctgtatcgacctacgcaagcagcgatccatgcattgcctgtactgagcgggtggctataacggacattgatagcggcaagtacaccactaaagacttttttgaggtgaaatga

SEQ ID NO: 3614 - DNA, 462 bp, synthetic construct
  source 1..462: mol_type = other DNA
atgctgaagaaacttaaggacattgtgcgcaagagtagcattcatgtctgtatagtaaactgcgggggctgcaatggctgcgatgtcgagctggtggccctgttaagcccaagatacgacctggaacagtacggaatctatgtccacaacaaccctcgtgaagctgatgttctactggtgacgggtgcagtgaccgaacagtggcgcgacaatctcagaaggatctacgcaaaggctcccgagcccaagatagtggtagccgtggggaactgccctcagtccggtgacgtctttgcacaggaggggggcagggtgctcgcgccggtttcagacttcatcccagtggatgccgccattccgggctgtcccccccgaccaagcgagatcctcgaggcagtcttgacagtggcgcctggagccatcgccgctaaaggacgggctcaagacgcccggaaagattga

SEQ ID NO: 3615 - DNA, 384 bp, synthetic construct
  source 1..384: mol_type = other DNA
atgaatagcgaggagaagtacgaaatgatgaagctgagggtacttcacagttttaaatgggagaaggatcttaccattcccctgagcgaagagtttggaatctccaaagaggagttcgaagaaatcctgatgaaccgattcgacatgtcagacttggagaacatgcacgctacattcgaaatcgccaaccgggaaaagatcaaaaggcagatgcacttagacctacgcctctattggctcagcgatgtcgcgaagctgatatccgaggaggacgcagaccgcatttgccatcaactgacgaaggatgtgattcagcatgggaaaaagtacgaagacgccctggatgagggccgggcccagatcgtggagctgctcagagagtga

SEQ ID NO: 3616 - DNA, 333 bp, synthetic construct
  source 1..333: mol_type = other DNA
atggaggagctttactacatgatttatattatcgtgtttatagtaggcagtattctcggcctactgctgagctataagaagcacatggagcccttcatcatatctgaaatcgacgtgctgaccctcgttctggctatcgtcgggtggttccttctgctcaaccatggcttaattggatttgtgtcctcagtcattctgctcaccatagccttcttctgcattgggctggcgatcggccgccggccaggatacggtaggaaagaaacggccatcggaatcttggtggcagtgatcgtgtggatcttgacaagcggggtcatctttaaattctga

SEQ ID NO: 3617 - DNA, 156 bp, synthetic construct
  source 1..156: mol_type = other DNA
atgaacgacgagaaggggatgagagtgctcaccttcataagttgcttcaggagcctgtactgttgccgcttcagcagcatcctgcccaagcactcgtccatctcatacggctataaccgatttaatatccggtccatttacattgatgccaaatga

SEQ ID NO: 3618 - DNA, 861 bp, synthetic construct
  source 1..861: mol_type = other DNA
atgaatctgatggcccagatcctcatcaacgtggtcattgccttcctggcagggagtctgctgctgggtttccatcgaaaggtcatggcgcgggtccagctgaggccaggcccgcccatcattcagtacctcctgcactcattgaaatttttctttaaggaaaccagcttccccaaaactgccagcatgccattctatgtgggaatcacagtcatcctagccggcatttgggtgaccggcgtaattgtggggcccgtttgcaagggttcccttatgatcatcttcgggatctacgccatccacaagattgtagagcacaatgccggcagcagctcaggttccccttacgggaagctaagctgcgtgcgcgccgtgttctcggcggctggagaattgcccctcttcgcagtcatcgctgtggtcttccttctcactggcaccatggacattgggggaatcatccagtatcaagcagcgaacgggcccttggcatttaaaatccctcttgccgctatcatgttctttaccctgatagttacgaagtccccttattctccatttgccataaccaaaggcaaggaaatcatcacaggatttgagaccgagcatttcggtatgctgagaggctacataatgtttagtgagagtatcgcctggtacatcctgctctggctcttcttaacaatattctttgcaccgattggcgtggtgggatacctgataggcatgattctgatttgtgtgattacgggatttatcaatgctacaactcctatgttaaacccaaaccactctgtaatggctcagatatccattgctgtgatctgcgtggttgggagcattatcatgattatcatttga

SEQ ID NO: 3619 - DNA, 216 bp, synthetic construct
  source 1..216: mol_type = other DNA
atgaaaaagatggaaatggccagctacattatcctgattgcatccgtgctagctatcttgtacgcactgatcttcaaccccgcggactggatcgtctatgccatagccattgtatgcatccctttcctggtgcttagtttcggcctcctcaccatgagcaaaccaataaaggaggaagaggaggagcggagggaggaaccgtttacagggtactga

SEQ ID NO: 3620 - DNA, 669 bp, synthetic construct
  source 1..669: mol_type = other DNA
atgctgattgagaacctcggtggagactttctcggaacaatccctctgggagatatcgtgctctacctgaacccgctccatatcttcctgtttgttacgatccttctatttacagctctcatagcaatctcgcggactgaaacccaggttgaagctatgtttggctccctggacgagaataaagtggccgtgggactgaaggagtttaaacacaggcgattcttagcgattatttgtgggatagccaccgcgggagctatgattaccggggacctgttcaacttcaccctatttatggccctgattggtatcgtcaacatcggtatcgtgagtgccgtaaagcaagtggaagtcttaaattcagcctatcagtacggcttgatcgccatgatgtgcggcttgccattgttcgggggcgcggctatcatactggccgctacagggaccctgagcctgttcgagctggcatccatccccgccaatcctatgatgatcttcggcgcactggtgatgctcattggcgtctgcggggagagcggcatagcccccttctttgcaagcaaggccgagatgtttcgcacgccaggcagccccttcatccttattattcacctgagttcccttttccttatcgtgagattcattgaaatcctcttgactatactgtga

SEQ ID NO: 3621 - DNA, 678 bp, synthetic construct
  source 1..678: mol_type = other DNA
atggtggccagcgtaatcccccaggtggtgcctgccttctatagctccatgtataccacggccctttacgggggcctcattgtagcttttattggcctcattggagtggcaatggaaaagagagacatccagattctgattctaacagacatagtgggactcgctatgctgatcgtcgtggcggccgtcgggactgacctgtcggaagctctgatcctaccagggctggtcgttgaattggcagagatcatggccatttcagagatcctgatatctcgcgagatgcgcaaggccgataaagacaccagttttagcccaatgcccctggatattgatatggagattatgacaactgcgcctaacttcattgcattgcttctcatcggatacggcatctttctgtccggttttaccggcggtgccgttgctggcggcgggatcgtcatctatgtcctgagtaggaaggtgcggggattgcccatctttgtgctcgacggcgtgggcgcaatatcagggatctcctggtgcttatggataatcggtttcatattcttcttcatcctgccgcaatactggctgctgagcctcttcctggccgctcttggacttttactgaaggttgccagcaaaatcgggttgattggaatcctcatgcgagaggaatacggccggaaatga

SEQ ID NO: 3622 - DNA, 600 bp, synthetic construct
  source 1..600: mol_type = other DNA
atgcctaaaattgcaaaattatggaataagctggccgacccgaagaacattccccgcctgttcgctgtaattctggggctgctcctcatcgccggcttcctcatccctatggggttgaataccgaccaaatctacactcggccggcaccccagagtcagatggacgcaggactgcccttggcgccctacgacaggggcggggaggtgctggagagcccaggcataacagaggcccagtatcctgaaaatgccgagaaccttggctggataaactcgtatatgactccaatagcggagatgctcaagggaatctccccctactttggaacaagtatctgcagctctccaggtggtctgattgatgaaatcctgtactataccagaggcttcgacaccatccttgagtcctccatcctcatgatggcattcatcatcgcttcatggctggcgatcaactttacgatggacaggaccaaggatgaacgggatattgctgaagatgtcaaacgcgccattgccagctcagaccgactagccaacgaggtggaagaaagcaacagaaaggctcgtgagaagcaggccaaaaaggagtttcggtga

SEQ ID NO: 3623 - DNA, 261 bp, synthetic construct
  source 1..261: mol_type = other DNA
atgtttaatctggcgatttgggtgtacctgggcctggcccttgctatcttcggaagcctcgcaactgtatggggccccggggtcaaggacccagtgattaggactataaacacagaagttgcctccgtgggtgtgagtctgatcctgctctgctataacagcaccctagcccttctgacattgatagcaacgaccatcatcgtgaccctgatcctcttccgcgccatttcacggttagaggagatcggggctgatgtctga

SEQ ID NO: 3624 - DNA, 342 bp, synthetic construct
  source 1..342: mol_type = other DNA
atgttggagtttatcaacatagagacaatttcaatggccctcatgattatcggtgccattggagtagtgctcctgaagaaaccattggacaagatcatcatggtgtcggtgctggaggcagggctgttcctggctatcgttagctttaaataccttgatgtggccttcctaaccgcagtcctcgatcccctgtccatcattgtcttcctcctggcgctgatcaagatcaataaagtgcggaagtctaaactggaggactattccaccctggacaagctcaacataagcacggagaatcttgaagaaaaaagcttagacaagaacagtgaaggcggcaagtga

SEQ ID NO: 3625 - DNA, 279 bp, synthetic construct
  source 1..279: mol_type = other DNA
atgtacatcgagatcatcggagtgatcaccattctgatggccctcagggccgtgattactaaaaaccgcgccgaaaagctcctatacatcaatgtcatagggttctgcgtaagtgcgatcatcgcactgtacattaaaaccacgtttggctttgtgctggctgccgctttcttcatttccagcacaatcggctcaaacgcaattgcctatagccttaaggacttggaagatgagataagctatgacaaggatatggaggaacgggacgaggagaactga

SEQ ID NO: 3626 - DNA, 501 bp, synthetic construct
  source 1..501: mol_type = other DNA
atggatatgatcatcggaataatcctggctgcagtgatcagctggattaattttgtagtggtggacacgttcctcggcctgcccgaggctccaggggtgaagggtgcagagaccgtgggctactcgatcaaggaaaggaaaggcgacttggcgggcggtttcttccagggaaacattctgtgtagccccgacgcctcagccgggaccctgatagccgccataggggtctacgcgttaggcatccaaggagggctcattgccgcccttctggtctatattgggaaccgcctctgcgcagatccgggatacgccggcacctgcggggctctgaccatgacactactgatcttcattttctcctttgtcggaatcgaagttgagatgttcatctgcggaatggtgattgcaatctttactattcagggtatccatcaccctacaagtagccggttgcttggcaagatcgctaagtcctttggcagatatactaaatacgagtga

SEQ ID NO: 3627 - DNA, 327 bp, synthetic construct
  source 1..327: mol_type = other DNA
atgattagtataggcgccaacggatttcagctcctgatcaactacatcgtggctatcgtagtggcagtcattatcgcgtttgccctgcggttgccattacttcccgaacgccccatcaggttctcttggacgacaagcgccctgttcccaacccctattttcgctatcggcatcctggcaatattttactcactaaacgtttactggatttatgacggtctcatcctgagcgtgattgtgggcctggcctccgccctcttcgtgaaatatggatttgattacatattccccaagcctccgcagatcgaggacggggggaatgtctga

SEQ ID NO: 3628 - DNA, 936 bp, synthetic construct
  source 1..936: mol_type = other DNA
atgaaggataagaacgtggtggtaaccggagggctggggtttataggatcacacattgtggatgctctgatcgatgacaataaagtcacgataatcgacaacttgtcaagcggtaagatggaaaacctcaacaatccgaatcacgagaacctgaccatcatcaaagaggacctgatggacgcggacctcgaaaagatactgaaggataaggactatgtcttccacctggccgcccttgcaagcgtgcccggctcggttgccgagcctttacgctacaatcagaacaacattgacgctagcttaaagctctttatcgcctgcaaaaacaacaatatcaaaaaagtgatcttcagctcttcctctgccgtctatggggagaatccgaacatgccccttaaagagagcgagaacttcctgccctgctccccttacgcggcccaaaaggcgagctgtgagctatatctgaagagcttccatgagtcctacggcctggattacgttgccctgaggtatttcaacgtcttcggtcccagacaggatgaaaactcaccttatgctgctgttattcccaaattcatctctgccatcctgaacggcgagagtccagtgatttacggagacggcgagcagagccgggactttatttacgtgaaggaaatagctaaagcaaatatcctctccgcagaatcagactacaatggagtcatcaatgtggccctcggcaagtcgatgacaatcaacaggctctttgaaatcatctctgacgtgctagaaagtgacattgatgtgaaatacctggatgagcggccaggggacattaagcattcccttgcagacatttccaatttggataagattagtttcaagccagatgaggacaagtttgaagagcagttgcgagagactgtaaaatggtttatcagtcagatggaatga

SEQ ID NO: 3629 - DNA, 1494 bp, synthetic construct
  source 1..1494: mol_type = other DNA
atgaaaatcgaagtactggatacgacactgcgcgacggcgagcagacccctgggatctctctaaacactattaaaaagctcagaatcgccactaaactcgatgagataggtgtcaattccatagaagccggctctgccataacctccgagggggaaagggaggccataaaggcaatcacctcccagggactgaatgctgaaatcgtgagtttctcacgcaccctaatcaaggatgtggattattgcttagaatgtgatgtggatgcggtcaacattgtggttcccacttctgacttgcacctgcaatacaaactaaaaaagacccaagatgaaatgcttgaggatgcagtgaaggtgaccgagtacgctaaagaccacggcgtcaaggtggagcttgccgctgaagactcaacaagaacagacatccagtacttgcgcaaaatcttcaaggcaacgatcgacgccggagccgaccggatctgcccatgtgacactctgggaatcctcaccccacttaagtcctttaacttctataagcagttcacagacctcggcgtgcccgtgagcgcccactgccataatgactttggcctggccgttgcaaacaccctctccgctatcgacgggggcgccagcagattccacgccaccatcaacggacttggggagagggctgggaacgccgccctggaggaggttgttgtcagtctctacacactgtacaaagacgagtcgaacgaacggaagtacgaaactgacattaagatcgatcagatttacagcacttccaaattggtgtcacgattaagcaatgcctatctggctccgaataaaccgattgtgggtgaaaacgcgttcgcgcatgagtctggcatccatgccgacggtgtcattaaaaacagcgcaacgtatgagcctatcatgccagagctggtcggccacaggcgtaaatttgtaattggaaagcacgtgggaacaaaaggcctgaacaaccgactggaagagctcggcctggaagtcaacaagaagcagctgaatgatattttctacaaggtcaaggacctgggcgacaagggcaagaccgtgacggacacggatttggaggcgatcgcagagcatgtcctcaacatagagcaggaaaagaaaatcaatcttgatgagctgaccatcgtaagtgggaacaagatccggcccactgcctcaataaagctgaacattgagaacgaagaggtgatagaggctgatgtgggtattgggcctgtagacgctgccatcaatgctgtgaataagggtattaaaagctttgcagacattcagctggaagagtaccacgtcgatgcagtgacaggagggaccgacgcgctcattgaagttatcatcaagctcagcagcggagataagatcatctcggcccgggcaacagagcccgacattattaacgccagtgtggaggcttatattgacggggtgaataggctgttggagaataaatga

SEQ ID NO: 3630 - DNA, 525 bp, synthetic construct
  source 1..525: mol_type = other DNA
atgaagtacaacaaagagctggctaatctggacaatgtggaaattttaggcttcaagggcactatcgagtccattccaaagacgttggaggagattgacaacatccgcaacagttgttgcgacgtaggtaccatccagctgatgaatgcagacgcgatcgctgggccgaaacaccttgagcacggcacaatccacgcaatgaacgcgtttgaacgaggagacaacctagctaatgacctgggaatcgagatcctgctcagaacctcggcccagaggcagatatccaaggccttcaagatactcgggctgaaggagggggagatgaacattgccgtggtcatgatcgattgccccgattactttatcgacgaactttctaacatcttcatacgggatgatagcgtgttggaagccgacgagtcaaaactgatgaagatctatgatattcctgaaaaagaactgaagaccatccatctgagcgacatactcattgataagacaagcaaactcatcattgcccaatga

SEQ ID NO: 3631 - DNA, 1443 bp, synthetic construct
  source 1..1443: mol_type = other DNA
ctcttcgctatagtgagcctatcggccgtcagcgccagcgacgatttttcaagttccctggctgatgactctgacagcgacatcctagccattgacgacatcgcacaaaaggacagttcccacaaactgatggacgaagaggacataagtgttgagttcgagatcgatgacggggacgatgacactagctacgattcctactatgacgactcgccaggtgatgactggtcaaactacgaggactacgaccccgaactgattagtgaggacgctatactgacgaagatagaagtcctgaacgtccctagccactacggtgacgacaacatttcatttaggctgatcgatttgaataccggcctgcccatccctgatgtgaatctgggcctccaggactcctacgattatgatgtctacagcttcttcaccgatgaggatggggttgtggtatacccgatccccgtgaaagttggagatttctctatcgtcatcggattctacgaggatatgatggtggtgaacgaactggatgacatggtatgcaactttaccaaactcaacgtctcaattcccactgtgccagcgtcaataaagatcactaaaacaggcacttattataatgatacagtcttaaaggtttccttggtcagttctgttaaggaagtcttaagcaaccagaaaatcaacctcaccttctcaaatgggaagaaggccacagtgaagactaactccaagggaatcgcaaactatgcccttaaatttgcccccggaaactacagtgtaacagcagcgctcgtgtccgatggcattgtggaggccaataagtccagcctgaaaaacatcaagatcatcaaggctccaggcacactcagccctaccgcactgtcaaccacgtacgcctcggggaagtacttccagatcaaactcaccaattccaagacaaaaaaagccattgggggcgtgaagcttaacttgaaggtgtatactggtaaaaagtataagaccgttacagtaaccaccggatcaaatggaattgccaaattctccgcgtccaccctgtctgtgggcactcacaaggtgattgtgaccgtgaaggacaccaaatatgtctctgccagttccaaaacaagttccatcaagatttctaaagccagccgggcgatttcggctccgaaagtcacagccaaatataagagcagcagcacgttcaaggtaaccgtgaagaataaggcctctaagaaaattcttagcggggttcaggtgagcctgaaggtgtatacgggcaagaagtttaagacctacaacgtgaagacaaacagcaaaggcgtggctagctttaataccaaatccctgacgaaggcaaaccataaggtgatcgtgaacatcaaggcaagtgccaattacaatgcagctagcgctactagctacatcaatataaaatga

SEQ ID NO: 3632 - DNA, 1503 bp, synthetic construct
  source 1..1503: mol_type = other DNA
ctggaagagaatccaattgattttaaggataatagcatcaattctaaagccttaaaggacagcgactacgagcacgcctcggacgagttgagccaggacctctacaatcggatcatcaatgcaaaggaaaacgaaataatactgatcgagcccggaacctacaagatacacaaggtccacctgaccaagaacatcactctgcagggaactggcgacccacgcgaagtgattatcgacggtgagcagctcggcagtgtcttcttcatcaatgatatcaacgtcacagctcaattctacaacctcactatcatcaatgggctgagcgataatttcggcggtggaatttgtattgaaaccgggaatacatatgtggacaactgtatcttcataaataacactgctttgaatatcaccaacgggggggcgatctccaactatggaaacgagaccaataggagttacctttttataaacaactcactctttattggaaaccacgctgatcatgatgggggcgccgttaccacatgctacgcaatttccgacatctacaacagcgtgttcattaataatagtgccgtgcgcgacggcggcgccatccgtgtgagcgtgtatggctacgggaatgtccaggactgcatattcattggcaaccacgccgacgaatgggcaggggcctattacagctgggctggcaattcaagcattgaccgctgcatattcctaaacaacactgcaggaacaaacggcggggccgtgatggtctccggcagcctgaacctcaccaattccctcatcgtgaataacaccggcggcgaaacaggaggttccttctacattcagcagcccatgtttgatgctaagacggtcatcaatgtaaacaacaacattattaccaacaactcaagccccctgggcaaggaaatctttgtgaaatggaacgccacccaactgctcttccctaacttcaacaataacgattggggagacgaggacccgacaggccccgatgtggttgacccgaataacgtaagcgataggatcatccctgagcgaacgaaaagaattacagttctgtatgacaagcttaactgggggttactggatcggtacactgatgtgctggatgactattacggaaaatcgagtagctccgactccaaagcaaacagtgataccaaaacgaacagcagcggtctgaagttcgatactgagaacaagacaaacgacgattcgaaagaagagcagggtagtatcctgaacaatagcaacggattcgccttgcttaatcataataactccagctcttccaactcaaccgctggtggcgggctggagaagaaagacaattcaacctttgtcagcccaaaggactatcagaagatggtggagctatttgaggacaatcctagtgcgtccaaatcaacggacattcggtattttgcagttctcgcctttatcttgctggtattccttgtggggctggcgagaaagaggaaatga

SEQ ID NO: 3633 - DNA, 1014 bp, synthetic construct
  source 1..1014: mol_type = other DNA
atgaaccttaaatttaagaaaccgtcgcgggaaagtcagatggccatgtccaaggtggctatcggtgaggacaatattgattaccacaacatggccgaggagaagctatccaacgccacgaatcatcagtatgcgaagctggtaaatagtggcaacgcagctatcctgacagccatgaatagtattgatggggcaattttaatccccgaccagggagcctggaatggcttcaagcagatcgctaacttcctgaacaaggatttgatcaccgtgactaccaaccagtgcatcatcgacttggattatctgcaagaatccatcaaccagaacgacgacaatatcgatctggatgatgagaacaacaagtcggccctctttctgaccagctttgcagcttacacagcagagcaggacataaaggagattgccaagttcctgcacaaatacaacattctcctggcagaagacgccagcggggccatttgtgatatgaaaggcgatctggccaatggcaaatactccgacatcatcatcgggtcaaccggctctccaaagataatcaatgtcgaggacggtggatttattacaacaaatgataattctctcctcgagaagtcacgacttattctcaaaacgagcaaatgcagcaatatcacagcctgtggaataagtcacgagatagaatatgcaaaggacaacctgaacaaaaccatagatttcaccttaaacctgaaggaaaagctgaatgacagcactgacttcgaagtctttcacagcaacaagaggggaatcaaccttatcctcaagaccaacgaccctaagtccctttcatataagctccgccaggagttcgcgctagacagccacgggatgatcactaaatgccccaactacaatagattgaaggaaaaggctgtggcgattgagataaaaaatctggacatttcctgcctgaacgagcataatagcaaccaaatcttcaacacgattaaaaaatacgaagacttcgcttga

SEQ ID NO: 3634 - DNA, 1194 bp, synthetic construct
  source 1..1194: mol_type = other DNA
atgagaacatcaaaagctactaaaaatgcctacctggcgaaactcacggaaaagatccagatgcagagcgtgaacgtcgggcgcgaccttgacggcagcactccaccctcggtgttcatagggcgctggagctaccctaaggtctacgccggaccgatgatggtcgcccaaacgggagatacagccattatggactctccagagagttggattggtcagaataaaacccaggaggacattattggctaccgtatgaacctcgtcagaggaaaacagctaatctccatcaaggatctcgagaaccccttcgtggaaaagctgcaggacatttccctggccgctaagtccatcgacagcgaggcaacctttgggtcccggccaagcggtgccatgttcaacgaggaaagcatgccccacggccctagcgcggtgatcgagaagtttgatatcgacgccgttaaatgggacaggcaactggaaaaatccttttacgacacggacctcaaggcacgggatgcggtgatgaatctccacaataaggatgttcccttctctgccatgcaaaaggcattctctgtaggggcctttgggataaagaaaaaccgccggctggtacctacccgatggtcaatcacagcctgtgacagtaccattgcagatagcctgctgaaggaagtgcgacattataatataatggactcgtacagggtctatgagttttcaagcttaaagaactactatgctatcatcctgacccccaccgagtggcagtacgaatggttcgaggctttcattaagatccttggcaaggaagagatgatcttttcagattatgagaccaacactgataagagagagtatagctgcgtgggaggatgctattacacagccaagatggctgtgctggataagctggccaagctcaagcttcagagtggcgttatcatcctgagggaagcttacagtggttacgtcccgttaggcgtgttcaatgtgcgggaaaacattaaatatgcaatgaacggcgactacaaagagtttgagtccctaaaggactctctggcttattgctcaacaaagctgaaaatacctatctccaaatacgtgaagcagtccaacctcctgaatgagcttttgcacagtcagcagactaccttggacgcattcttcaaaaaatctccagatttgcagtga

SEQ ID NO: 3635 - DNA, 927 bp, synthetic construct
  source 1..927: mol_type = other DNA
atgctagaaccgaaggaatttattagcgacgcgatagcaaagatcaaagaggaaatcggagatgaaaagaccattatcgctctgagtggcggcgtagacagctcagtgtgctctgtgctgacacaggaggctattggcgataacttaacggccgtctttgtaaatcacggactactgagagagggtgaggccgagcaggtgtgctccgtgttcgaggagcgcctgaacttcaaatatatagacgcctccgacgagttcctgagcgagctcgccggggtggaagatccggaagagaagcggaaaatcatcggccgtgtctttatcgaagtgttcgaacgagaggcccaggcggtggacgctaaatacctcgttcaggggaccattgctcctgactggattgagactgaaggggagatcaagacccaccacaatatggccctccccagcggaatggtcctgaaggtggtggagcctgtcagagacttgtacaaagatgaagtgcgacttgtcgggactgagttggggctgccagacagcattgtccaacggcaaccattccccggccccggtctgggtgttagggtggtaggagacctgacccgggagaacctggccgtctgcagagcagcggatgcaatcgtcagggaggaggtggagaaggccggcctcgataaggaactgtggcagtactttgccgtgcttaccgacacgaaggttacaggcgttaaaggagacgagcgcgacttcggctatcttgtgatcataaggttgatcagttccatcgatgctatgacggcaaccgtgcctgagatgccctgggaagtgattcggacaatctcaaagcgcatcacttctgaagtttcggaagtcacccatgtggccctctccataagtgataaacccccaagcacaattgagttctgttga

SEQ ID NO: 3636 - DNA, 240 bp, synthetic construct
  source 1..240: mol_type = other DNA
atgttcgataatgcagatgacttcaaaaagaaagccctggacaacaaggacgagctcaagcgggaatacatcaacattcccataggagaggacgagcagagcttcaggatcagcggtattggcgaaaaggcgatcaagatagaaaaatacgtgaaatatgatgacatggtcgatgctgtggagtccggcaaggaagaggggctggaggccgtgatcatgaagtttgtagaggaatactga

SEQ ID NO: 3637 - DNA, 567 bp, synthetic construct
  source 1..567: mol_type = other DNA
atgaaaatcctggttatcaataataaggggcagtacaatcacaggattcagcggactttacagaaccttaagatcccctccgagctggtgaagaataagctgtccatttcggagattgaagaaaaggagcctataggcttgattctcgggggcggaccaagcatcgatggtgtcggtaacgcagcagagtacataaagcacttcgacatccccatccttggaatatgcctgggccatcagctaatcgccaaaacatttggcggagaagtggccacctccgacacggaaagctatgcccaagtcaagattaacatcaacgaagaaaacccactgttcaaagggctcacatcacctatggacgtatggagttcacataaggacgaggtgcacagcctcccggaggactttgatatcattgcggagagcagtctgtgcgatattgaggctatgaagcacaaggaaaaagagatctacggcatccagttccatcccgaggtgcaccacaccccaaaaggggagtacatctttaaaaacttctatgaaatatgtcaaaactataatgagtga

SEQ ID NO: 3638 - DNA, 147 bp, synthetic construct
  source 1..147: mol_type = other DNA
atggagatcgacgaactgattacatacctcatcattattgcagtggtggccatcctaatcaagatcttcagctggctcctgcccatctttgtcatattggctgtagcctatgtgatttacctgtacataaccgagaacaatgcgtga

SEQ ID NO: 3639 - DNA, 1446 bp, synthetic construct
  source 1..1446: mol_type = other DNA
atgaaaagacggtacaaggtgctgtttctactggccatcctgactattatcagcattaatgccatctcggctagcgaaatcggcctggatgacaacaatgccatcgatgagaatgacgggtttaagattaagcaagacatcatgtctgagaagataatctctgataatgaggatgccgattcgaataacgcaaacgacgtgaacaccgactcatccgatgaagtaaatgaggataacgtcatcgagcagaatacagacaccgataccgtggacgaggatgaggaagatccaatcattcccgtcgacactcgccttttcaatcccgattctgttatcaagggaaacgacctcaacattgttctaaaagacatcgacaacaaccctctggccaatcagacaatcaagttcaacatcaatgacaaacagtaccagcggactacggataaaacgggaaccgccaagctgaagattaacttaagccccaagactcacacgttcttcatagagtatgacggctgcgatgaatactatccgaccaatctcgtattcgacttgaaagtgataaagcccgtgcaaacaaaactcagcgtaaagagcaccatcgtgtataaaaacaataaactaatggtgtacctgaaaaccagcgacaacaaggcgctggcaaaccagaaaatcaaaatcggattgccgaaaaaaacatacacccgcaccacggacaagaacgggcttgcaagcctgaacatcaatctgaatcccaaaacatacagcatcaacctgagctatgacggcaagggcaaatacctcccaaccagcaagaaaataaagattcacgtctttgaaaacgagctgcttggaagtacctactacggcaaggtggagctccttaaggggattggcaactcctcctcaaaggtgaagatagcttacgtggtgggtctgcatgtactcgaacaccagatccacgatgaagtttacaatatcatgaagcagaagactagtatgcattatagttataacgtctacaagattaccctgacaaagaaatccgggaactacaatacagacaggatgcgagggcaaatcctcgccaagaactatatcgtgcctcatgttaacaagcagaagtataatttggtcgtggacgttcactccaccacgggcgtctactataagaaatcctacttcatacacgtgcctcagaacaggcataagccctccttaaacctggcgaataaagcaattaaaataattaacactctggataagcagtcaaagattgtgtactggtctccagactcacagacaagtcccccatatcttactttgcctatcatgaaagctggaactcctacatttgtctttgagaccctcaccagtgagccagtctccagaagcaagtatcgtgccaatattctgattaacgctgtggacaagctcttcggttga

SEQ ID NO: 3640 - DNA, 948 bp, synthetic construct
  source 1..948: mol_type = other DNA
atgatctttatggaaaattacgatatcataatcgtgggggcagggcctgccggcctcactgctggcatgtacgccggtcggcagaatagtaaaaccctaataatcgaccgagggttcgctggaggcttaggtctggaggtgcccttgatgcagaactatccagggttcgatctgattagcggaatggagctcattcagaagatgaaggcacaaacggagaactactgcgaaataaaggaaaacgagaccatccaatcaattgaaaaaaccgaagacggcttcctgctgaaaacccgcacaagcccattgctgatgagcgaagagagtgacgaaatccgcgagttcaaagcaaaggcaatcatccttgccacgggggcctctcaccggcacctgaatgttcccggggaagctgagtttctgggacgtggcgtggcctattgcgccacctgtgacggaatgtttttcattgataggacagtactcatggtgggcggcggaaactccgccgctcaggaggcactgtacctaaaaaacctgggatgcaacgtgaagctcgtgcacaggcgggaccagctccgctgcgagcatcatcttcaaaaagccctggaggagaaggaaattgaggttatctggaatgctactgtagaggaaatcaagggagatatggtcgtggagtcagtcagactgaacagaaatggccaggaggaagactacaagacagatggcgtctttattgccatcggtgacgacccgtccaacgagattgccaaggagctggggatcgaccttgatgaggatggctatatcatcaccgataagaggcaggcaacaagcgtggagcacgtgtattccgccggcgacataactgggggagtgaaacagtgggttgtcgcctgtggcgaaggtgctgtcgcggcgatttcggcgtacaacgacctcaatttgtga

SEQ ID NO: 3641 - DNA, 1848 bp, synthetic construct
  source 1..1848: mol_type = other DNA
atgatggggctcgagattcaccagcagttgaacaccaagcacaagctcttctgtccatgctcgaccgaacttaccgatgatgaatttgatgacgggatcatccggaacctaaggcccacccagtccgaactcggccagatcgaccgggccgctctgcaggagtccctacgacacatgacctttaagtacgagtcatttaacaaccacacctgccttgtggagatggacgacgagcctccacatgccttaaacagggaagcgcttgacatatgcatcacaatcgcgtcactgctgaacatgaaaatggtggacgagttccatacgatgcgcaagcaggtgattgacggcagtaacactggagggttccagcgcacaggtctggccgccacggacggatacctggacactccatacggcagagtggctatcgagagcttaggcctggaggaggacgccgcacggaggatcgacagcgacgatgagtttacccagttcaggctcgaccgtctgggaatccccctcgcagaaatcactacagacccctccatgcaccacccggaacagatcaaggaagtagcatacatgatcggacaggtcctgcggagcacaaatgtgaaacggggccttggaactatcagacaggatgttaacatcagtatcacaagaggggcacgcgtggaaatcaagggggtgcaggacttggaccttatgcctgagattgttgaacgggaggtgcaacgccaattggcactcgccgacattaaggacgagctgattgcaaggaatgccagcgtggatgatacaatctacgaccttgacgaggtctttaaggacaccagctctaagatactgtcaaaggccaactgcatcaaggggataattctgcggggcttcgacggcctcattggaaaagaggtccagcctgggaggcggttcggaacggagctctccagctatgcgaagaagatgggtgtgtccggccttttccataccgatgagttgccggcttacgggatcaaggccgatgaagtggatgctatgaaagagttcctcaaaatcggccctcaagatgccatcatcattgtagcccacgatgaggatatcgccataaatgccctgaatgaggtcatcagacgagccgagatggcatttgacggcgtggtcgaggagacaagaaaggccctggatgatggcaacaccgaatatatgaggccgctgcccactgccaaccgcatgtatcttgagacagacattccattgttccagattactgatgacatggttgagcccatcaaaaacaacctgcccgagctcccagacgctaaaaaagaacgaattaaagcagagtacaagctcagtgaagatctggctagccaaatagtccgcagactactgggcgacacttttgagagcctgttggccagggtgaaagtggaccccaccacggtggcttcagtcctcgtcagcgacctgcgcgatctgaagcgcgagagatataacgttgatgtattgacggaagacaaactggtagaagtgttctccctgttagaggcaaataaaatttcgaaagatgcgctgaaggacctgctcgtggaagtctgtaaaaaccccgatgaaaatgttgaaaagatagctgaagacgctaacctgaccctgctcagcgaggaagaggtgcgagcgatcattcatgagattgcccaaaataatgaatccatgattaaggagcgtaatatgggtgctatggggcctctgatgggcatgagcatgaagcagctaaaaggaaaggccgatggtagtctggttaataagatagtgcgtgaagagattcagaatatcttaaacggttga

SEQ ID NO: 3642 - DNA, 1308 bp, synthetic construct
  source 1..1308: mol_type = other DNA
atgacttataaagagatctcgaaagagtttctcgataaggcaaacgtgaccattggggatgtgatcaaggtgaccaaggaggatatctcctatgagggaatactactggaccggtccgaagacgcaaaggacgcgtatatcgtcattaaactggatagcggttacaatgtgggcgtcaacattgaatctgccacgatcgaactgattgaaaagggagaccaaccgaaaataggctttgaaggcgataccattgagaaagaccccaacaaacagaacataagcatcatctccacgggaggtaccgtctcttcaatcattgactataagacaggcgcggtccacccgaaattcactgcagaggacctcctgcgcgccaaccctgagctgttagaccttgctaactacgatgtgaaggccctgtacaacatcctgagcgagaacatgaagcccgaatactgggtgaaggccgccgaatcaatcgcggacgatataagcagtggggctgacggaatcgtaattgcccatggcacagacactatgcattacactagcgccgctctgagctttatgatcaagactcccgttcctatagtggtgacaggtgctcagaggagttccgacagaccttcaacagatgcattcctcaacatctacaactcgtgtggcgccgcactctccgacatcgcagaggtgacagtgctgatgcacaactcattggatgacggagactgcgcccttcataaggggacgaaggtaaggaagatgcacacaagccggcgggacaccttccgaagcatcgattccgagccaatcgcccttctgcgcgatggcaaggtcaaaagtgtcaatctcccatacgtcaaacgtggggagaatgaactcgaattgaataccgacatcgagagcaaggtggccctgatcaagtctttccccgggatcagcagcgacataattgactatcacatcgataagggctacaaaggcctgctcattgagggaacaggcctcggccacgttccagactacatggtcgactccctgcaaagggccaatgacgagggcattcccgtggtaatgacctcacagtgcctatatggtaccatcaatatgaacgtgtacagtaccggaagactactgcaggatgctggggttatttccggggtggatatgacgccagaatgcgcgtacgtgaaactggcttgggctcttgggcagagcgatagtttagatgaggttaaaaagattatccagaccaatattgccggagagttgaatgaaagttcgtccctgaagtatttcttgaactga

SEQ ID NO: 3643 - DNA, 840 bp, synthetic construct
  source 1..840: mol_type = other DNA
atggaactgaccagctacctaagtcagataatcatctcagtgataatttttatcatcctctgtctcctagccaaccaagtgaaaaagatcatagagaagcactacggaatacaccttaatcccaatgactttctgcctattgaggagatcaaatccctgatgcagctgtacttcttgctcattatcctgcttatctacatctgcatcatgaacttctttttcaacaatttcggaatctccggggagttgatctttatcaattcgctgatcgacattatcctgtcagtatttctcgtgactatatactatgacggctctacaagaggcaagattattagcatattcctgttgcccattgtgtccatctcctacatcctcttcgggggcagtttaattcgatactgggacttcatccgcatcccaatcctgctctatctggttgtgattttctataacaagttcatcgattacacggagcggaataaccttggaaaaaccatcctgatcctactcagcattatctatacaggcatcctgttaaccatagtcctggaaaaacagaatccgatagatgccgtggccatggtgaccaacgcaattactagcaacggttatgccgcgctgggggacagcgagggcggtgtcttgactagcgtcttcctcgcgtgggggggctacattattagtggagtcgctaccgccacacttgctgcagatatcattcataggaactctcgcaagaaatttaggaatatggagacgaagatcgacaacctggagaacaagattgataatctggaacggattattgttgaatctcagaaggagaacgaagaatga

SEQ ID NO: 3644 - DNA, 429 bp, synthetic construct
  source 1..429: mol_type = other DNA
atggcagacaagtttagcaaagagaagaggagttatatcatgtcgaggattcggggcaaagacaccaagcctgagatccttgtcagaagctacctgttcagcaaagggctacgcttcagaaagaatgacaaacgatatcccggctcccccgatgtggttctgccgaaatacaacacggtagtctttgtgcatggctgtttctggcacctccacgaaggatgcaagcacgccaaaattccaaagtcaaacgtggagtactgggaaaagaagctgtatggaaaccgggatcgtgataagcgcaataagaaggagctggaagatatggggtggaacgtgatcacagtgtgggaatgcaacctgaaaaaggacaagcgggaaaaaaccttgttcgagctctacaatcagataatctccgaggacgaggactga

SEQ ID NO: 3645 - DNA, 615 bp, synthetic construct
  source 1..615: mol_type = other DNA
gtggtggcagccctgtgcaccgaggctctgggcaaggaccgggttatcggggtcctgatgcctaatggcgtgcagtcagacatcgactatgccaaactcctggtatcccacctggacattaagcactacatcattaatatcagggacgctgtcgatggggtcttaagtcaaatgaccaaaagcggcattgaaatctccgaacagacacgcatcaacctgccacccaggatcagaatgtccaccctatacgccataagccagtctaacaacggacgcgtggcaaacaactgtaacctttcagaagactgggtgggatatgcgacacgttacggggatggggccggtgacttcagcccacttagtaacctgacagtcagtgaggttaaagagattggcagaagcctgaatctgccgtcggagatagtggataaggtacccattgatggtctctccgaccagtctgacgaagagaagctaggatttacctacgatgtgttggacaagtatatacgaactggcgagatcgaggacaaaactacgaaagaacggatcgattacctccatgatctcaataagttcaagttggagctcatgcccagcttcgagtacaagtga

SEQ ID NO: 3646 - DNA, 1494 bp, synthetic construct
  source 1..1494: mol_type = other DNA
atgactgatattaaggtcgacaaaaacgtagaaaaggccaaatctagccaggttgaagagcgagttattaaaaagccagaatccctctatgattccttcccgagaaaaggaaatgacatttacaacacccactactgtgcaggatgcggtcacggtatcttacacaagttgatcgccgaagtcatggatgagctcaatatccaggatcggtgcgtcatgatttctcccgtgggctgttcagtattcggctactactatttcaactgcgggaatgtgcagacggctcacggtagagcccccgcagtggcgacaggcatctctcgcgcggaggacaatgccattgtaatgagctatcagggcgatggcgacctcgcatccatcgggctgaacgagacactccaggccgcgaaccgtggcgaaaagatagctgtgttctttgtgaacaatactgtgtacgggatgacagggggccagatggcccctaccactctggtgggagagcgcaccgtgacgtgccaaaacgggagggaccctcattatgcgggatatcccctgcatatgtgtgagcttgtcgacaacctgaaggcccctgtttttatcgaacgcgtgagcctggccaaccctaagcttattcggaaggcaaagatcgcgattaaaaaagccttgatgattcagaaggagggcaaaggatactcattcgttgaggtgctgagtccatgcccaaccaacatacggagggatgtgaaaggagtggaagacttcctgatcaatgagatgggtaaagagtttcccgtcaagcggttcagagacctatcgaaggaaagggctccggttgaaaggaatgtgagtgacttctctattgaaagtctggataaggcattcggcgtcgacagaacaaaagaaatcgctgaggtggaagacgactttgaggactgcaaggtaaaaatagtcgggttcgggggccagggagtcctcagcacaggtcttaccctggctcaagctgcctgcagtgagggaaaagaggtgtcctggtatccaagctacgggccggagcaacgagggggcacgtccaactgttcagtgacaatcagcgccaagactatcggcagccctgtggtggaggagtgtgacgttctcatcgccatgaacaagccctccctggagaagtactcaatcgatgtcaaagagggcggcaccatcctttacgatagccgagccggaaactacaccaatgacaacctggatgtgaaggacaacgtcaagatcatttccatcccagcacgggagatagccaccgaaatcggcaatgccaaagctatgaacactgccatcctgggggctctgatggagttaggaaaggacagccccatactctcgcaggatgcctttgccgagggtattaaggaaacctttgcagctaagcccaagctgattgatataaatctaaaggtgttggacgcaggggctaaatggttgcgcgagaacatcaattga

SEQ ID NO: 3647 - DNA, 1167 bp, synthetic construct
  source 1..1167: mol_type = other DNA
atgtctaatcagattgttaaaggaaacacggccgtgatcatcggcgccctctacgccggctgcgattgcttcttcggttatccgatcacccctgccagcgagatcctccacgaggcttccaaatactttccaatgttaggccggaagttcgtccaggcggagagtgaagaggcatctgtcaatatgatctatggcggcgcttccactgggcacagggtaatgagcgcttcatcagggcctggaatatcgcttatgcaggaaggtttcacctatctcgcaggtgcggagctgcccgccgttatcgtggacgtgatgcgagcagggcctggtcttggcaacatcggccccgagcagggggactacaaccagatagtcaaagggggcggccatggcaactacaaaaacattgtcctagcaccaaacagcgtacaggagatgtgtgacctgacaatgaaggcctttgagctttcgaacaaatacagaaaccccgtggttgtcctggctgacgcggtgctgggacagatggccgagcctttgaaattccccgaggaagctgtggaacccgtgattgacaattcctggtctgtgaggggaagcaaggaaaccatgaataacctggtgacctcaatctttctggacttcaatcagctcgaggactttaacttccaaattcaggagaagtacgagaaaatccgagagaatgaggtggtctatgaagagtatatgctggatgatgccgaatatgtgatcgtttcctatgggacaagcagccggctgtcccgcactgccgtggatattgcccgtgaaaaggggattaagctgggactgttgcgcccaatcacattattcccatttccggagaaacggatcaaggagctggcagatgagggtgtccaattcatctctgtggaaatgagtaacgggcagctcagagaagatattaaggccgctgcaaattacgacgaggtccacctggtgaacagaatgggcggaaacgttatagagctgaaggacattctaaatgaaatataccaaatggtaggaagcgatgaacgccataaggtggacagtgaggacaaggaatttgacaaatcctacctcagtgataaggactacaaggaagagttggataatgacaactaccacaatcacaggatggtggattga

SEQ ID NO: 3648 - DNA, 255 bp, synthetic construct
  source 1..255: mol_type = other DNA
atgaaggtcaaccagatcaaaccataccctatcattagcaaaaacaactgtaaggcatgcctgcggtgcataacggcgtgtaaggaaggctgcctaaagctgtccgaagagatcaatgacagcggatatcagtatgccgagtacacaggagaaggctgtatcggctgcggggactgttactacacctgccccgagcccctcgccattgaggtgcacataccgaagaggctgcgcaaaagtgctggggatgcctga

SEQ ID NO: 3649 - DNA, 1665 bp, synthetic construct
  source 1..1665: mol_type = other DNA
atgacaagtctgataggaaactttgtgaaccgggtcgactttaaatcctataaggacttctacgataattttgaatttaatgtccccaaggacttcaactttggtttcgatgtagtggatgagtacgcaagaatagacccggataaaaaagcactgatctggtgcgacgactacgaaaaaagggtgtttaccttcctagatatgaagaaactgtcgaaccagactgccaacttctttaagagtcaaggcatcaataagggcgacgcagtgctgctgacacttaaaaacagatatgagttttggatctgtatggttgccctgcataagatcggggcgatagctatcccaactacgcacatggtaaagctacacgatatcgtctaccgggttgaaagcgccagcatcaagatggtggttacggtggaggaggaccagctccttcccgactttgagcagtgcgaaaaagaattggacattgagctgaagaaggtcctggtgaatagcttccgagacggctggttcaacttcgacaacgaaatcgccaaaatgagcgaggagttcgagaggccaactggagatgaggccacccatgaggatgagacattcctcatctacttcagcagcggaaccactgggaaccctaagatggtggcacacgcgcatacctacgccatcggccacctcattacagctaaatactggcataatgtcgtggaggacggggtccaccacacctctgccgatacagggtggggaaaggctgtgtggggtaacttgtatggacaatggattgctggcgccgcaatctttatctacgactatgtgaggttcaacggtttggatttaatggagaagatcattgaaaacaaggttaacaccttctgcgctccccccacaatctatcgattcctcattaaggaggacctgtcccagtttgacttctcagacattcaatatgctacgaccgccggcgagccattgcctccggaggttttcaaaagatttaaggagttcactggccttgaaatcaaggagggattcgggcagacagagaccactctctccctcgctaccttcatttggatggaatccaaaacagggtgtgtcggcaagccctccccggcattcaagatcggcctgctggatgaggaaggcaatcccgtggatattgggtcggaaggcgaaatcagttttgatgtatctggaggaagacccgtgggtctgtttaaggagtattatcgtaaccaggaaaagaccgacgaggcgtggtacaatggttactaccactgtggcgacactgcctacgtggacgaagacggatattacacgttcgtggggcgcaatgatgacattatcaagtcttcagggtatcggatcggaccatacgaagtggaaaatgccgtcatttcccgcccttcagtcttagagtgcgccataaccggtgtggatgacgagctgcggggccagattgttaaggccacaatcgtgctcgccaaaggctacaagccaagtgaagagcttaaaaaagagatccaggatcatgtgaagcacgagaccgcgccttacaagtacccccgcatggtagaatttgtcgaagagctgcctaagaccataagcgggaaaattcagcggaaaataatccgcacgaggaaaagcatttattga

SEQ ID NO: 3650 - DNA, 561 bp, synthetic construct
  source 1..561: mol_type = other DNA
gtgatcgagatgagtgacgtaaacaaagacatcggaatgcggatcagggagctgagagaactgtccgacatcacaacagaagatatggccaacgagctcgacgtggatgaggagacttacataagctatgaggacgggatcatcgacatcccagctagcttcttataccagattgcccacatttttaaggtggacctggctttgattcttaccggcgaggagactcgcatgacctatttcgacgtcacccgagcagataaggggttcgccgtggaccggaggaaggaatacaagtacgagaacctgtgcaagaaattcgttcacaaaaaagccgaaatgtttatagtcacggtcgatccgaaagaggacgctatgccctccctcaattcacatgccggccaggaatttaactatatcctagaaggaacggtgaagattttcatcaaggacaatgagattattctcaacgaaggcgattctatattcttcgatgcaacatgtgaacacgccatggtggcactgaatgatgagaccgcgaagtttctggcggttatcatgtga

SEQ ID NO: 3651 - DNA, 369 bp, synthetic construct
  source 1..369: mol_type = other DNA
atggtgaaccgggaggactgcgtgatcttcaaacaggaatacgggaatgaactactcgtcaaccagcaatatgtgaaaatcagggcgaaggaggaaggattcatgtcatttaacctgcgcgtccctaaggaggatatggaaggtattgagaacttctttaaagggtttaaaatcccagagcccatcctcatagacattgcctgtaccggcaatatccattgctacttcaagggaattagtcccatcataaataagccggagtacagcttcatttccgttagcgtacaggagctgaagaaggaaattgtggaggaggaacaggagatcggcatcccagcacacgaatgcgtgggctgtgggctgcactga

SEQ ID NO: 3652 - DNA, 1098 bp, synthetic construct
  source 1..1098: mol_type = other DNA
atgtcattcctgacgttaatcctgaaaaatccctttcggagcaaaagccgagccattctggctatcatcgggattggaatcggtatagccactatcatcgcgttgggcgcgattaccgacggaatgattgcaagtgcagatgacacactgcatgccggaggctgcgatttcaccgtatctggtaagattgagagcacatcatcccagatggctacattcgggacgagcaccatcgatgaggattatatagataagatagccaatgtaacgggggtgaaagatgctattggcatgtatatgaccgtcctaatgaccactaattcgccatactttgctgtggtaggattggaccccgaagactaccaggtctccgacctgacgattacagagggccggatgtacaaaaacgacactaacgagattgtgatcggaaagattgcctctgaaaacgaagagaagggggttggggacacaatcacactcgatgacaagaaattcaagattgtgggaatctatgagagcgggaacaccctgcaggaccaaggcgggttcaccgccatcaaaaactcccagaaactctcgaaggatgaaggcaagatcagttccatctacatcaaggtgaatgacggcgaggatgttgataaggtcagagataggatcaccgacaaatacggcgacaatctgaccaccatcagcagtctgtccgacttggagatgactaagaacatgatagacatgctcaacggtgccagcctggccatttccctcctggcaatcataattggagctgtcggcatcataaacactatgcttactagtgtttttgagaggacacgcgagcttggtgtcctgaaggcagtgggctggtctgacgaaaagattctactgatgattgtgggggaatcaatagtcattaccatcgtggccggcatcatcgggtccatcgtgggcgtcatcggagtggaactccttgccgcgtctaagatcatgcagctgctcaacccggtgtactcagttgacatctttgtgaaggcattcgcaatcgccctcttcgtgggcataattggaggtatctatcctgctttaaaaagccactga

SEQ ID NO: 3653 - DNA, 717 bp, synthetic construct
  source 1..717: mol_type = other DNA
atggcaaacataattgagatcaaaaacctggtgaaaagttatgagaatggcaacatcaaggctctgaatggcatcgacttgaccatcgaggaaggcgagttcgtatcaatcatcggaccttcagggagcggaaaatccacactgttaaacatgctaggggctctggacattgctgatagcgggagcattaacgtggccggctacgacctgacagtcaacaagaatctcaacaagttccgcggagagaagatcggctttatcttccagcttcacaacctcatccccaacatcagtgtcgttgagaacatcgagattccgatgtactcccaaggaaaatcctcgaaggaaatgagaaaaaaggcgcttgagctcttggatatggtggacttaaaggacaaggccaatatgaaaccaaacaagctgtctggtggcgaacggcagcgagtggccattgcgcggtctctggcaaatgacccaagcatcatcctggcagatgaacccaccgggtccctcgatagcaaaaccagcacaaagatactcgaacagattcacaagctgcacaaggagaagaacattacgctgatcatcgttacccatgacatgactgtggccaagcttgccgatagggtcattgaagtgctggacggtaaaattctgaatgccgaggaaagtactctcctagataataagatagagataaaagtgaatttgttttga

SEQ ID NO: 3654 - DNA, 1380 bp, synthetic construct
  source 1..1380: mol_type = other DNA
atgcagaccaataagaacatcgagtcaatcatcggggacccgaaaaaggccataaatagactgacctaccccacaatcctgtccatgcttctcatgtttgcaaacaacctcatcgacagcatgtgggtgagcggcctgggcgctgagcctctggcagctctcggattcatgtctccactgtatctggtgattatcggcttcggaagtggagtgggcgccggcgcaaacagccttatatcccgcctcattggtgccaagcgttacgatgagtctaacaatgctgccatccactccattataatagctcttatcgtttcaatcatcatttccatcattgggatgttcttcttagacgacttgttagtgctctttggagcggggtcggtgctggattacgccatggactatggtatgatcatctttctatccagcatcattatactattcccagccatcgtgagcagtcttttcagggcagagggggacattcggcgcgccactgtgcccctggtggttaatgcaatcctcaacattatcttcgatcctattttcatctatattttcaattggggagtcaagggggcggctatcgcgaccgtattgtccaccctggtcaacctgttaatgatgctctactggtatctggtaaagcgcgatacattcattaaactgagtttggagtactttcatagcaaaatggaaatttataaggagattcttttcgtaagcatccctgccagcctggaagagcttatctactccattgtggccatctgcttcaactacctcatcatgatcactgccggaaccatggaagttgctgttttcacggtggtgtggcgattcgtgtcaatcgcctttctgccatgcatttccattggcatctcaacaataacagtggcaggcatagcctacggggcgcggaactacgagaactttaagaccacaatcaattactcgactttcctaagctttacaattactttgataatatgtatcatcttcttcgtatttgcctatccgatctctgaaaccttcaacttcatctctggggacgctgaaatgatcagtagaacggctgaggtcctgaggataatggtgttctacaatattgtcattccctttggaggcacggcagtttatgtctatcaggccattggctctggctttaagtcattggccatcaccattctgcgggaactgatcctgagtgtgttcctggcttatctctttggcattgtcctcaaaatgggcatctttggggtctacctgggtgcgatagtcggaatggccattggttgctttatcgggtttacctgtatcaaaatctaccaaggtaagtttaagaaagaatgcgagagcctgaatcagcccgtgtga

SEQ ID NO: 3655 - DNA, 1035 bp, synthetic construct
  source 1..1035: mol_type = other DNA
atggatctactgctgatcctgtcacaggagcatgacaagctgcccctcgctgagttacgcgctgtcctcgagacagaggaaatagaaaccgaacttgagatggtctgccctggcctggttctgctgaaagagcttgaggaagacgtgttcgatgactattaccgcctccttgttcggcgattaggttacacccacgaggtccaccagctgattaagacagtggactgctcagacctggaaagcgaagtgaaaagcatcgattggtctgagttcattgacgagaactttgccgtgagggtcaagaggttcaatagcgagatagacactgtggacacggagcggaagatagggggatatatcctgacaagtaccgacaatatcagcgttaacctatccaatccaaaatcgtttatccgagtggtagcctacaagaacactatctatctgtgctatggcaaataccaattgaacaaaaagtatttcgaagagatgaaaccgcataagaggccctttttccaccctggatgtatgagtcccaagctggctagatgcatggtaaacctctcaagagtcaaggagggggatctcgtcctcgatcccttctgcggaacggggggcatcctgattgaagccggtctcatcggggcaaaggtggtgggctgtgacatcgactggcgcatgaaaaatggaacagcaacgaacctggagtacgccgggatcaccgattacaaaacccatgtggtggacatccgggagatggaaatgtacgaagaggcggatgcagttgtaaccgacccaccatacggcatttctacaaccacttgtggagaaggtgcctccggcattttcaaagaatttctcgaatccatcgagcacagcatgaaggaggacgcccttttggtgatggccagtcctgattccctggacatagattccctatttaaggatgtcggcttcgtgttgttggagcggtacgcgattaagatgcacagaagcctgactcgtatcatttctgtgattgctaagatcgattga

SEQ ID NO: 3656 - DNA, 1299 bp, synthetic construct
  source 1..1299: mol_type = other DNA
atgagtttcgattacgacgtagcaattgtgggtgcaggacctatcggcagcagtctggcttatgagcttgctcagaacggcctgaaggtgtgcctcatagacaaaaagaagcgtatcggtttgcctttgcagtgcgcaggcatcgtcaacaaacggatttctagtttgtgcgacatcccaaaagagctcatcctgaacgaagccaagggtgcgttcatacactctaaaaaccatagcctgacggtgtccaagaaggagagccaggcctacgtgttagacagggtggcctttgaccagtacctgttcaatcgagcccgggagcacctggacacctacctaagcagcaaggtagtggatattgacacagagcttgggattgtccaattcaaattcgactgtgagatcaaaactatccgctccaagattattgtgggggcagacgggccactgtcactttcagcaaaaaaggtcaactccaagctgaactatttcaatgccagccagtatcttgttaaggttgataagatcgatgaaatgtcctttgtagacttatacgcttggggcgacctctttccgggctttatctgggccatcccagtgtacagtaacatctacaggattggactctttagcgaagacgactataagagccagtccaagatgctggatgactatctggaaaatgaatttcgctacgacgaatatgaggtgttagagaaatacaagggaaaaatacccatctacgataaaagtaacaagctttttaagaatcggcttatcctcataggggacgccgcgtcgcaagtcaaacccaccacaggaggcggaattttgatcggcctggagtcggtgcagttcgccaaagatgccatcttgaatgctctcaacaccctggacttcgataaaattgatttcgatctggtgggggggtctgattcaaatgaggatgacagcgatctaaatgacgccaactataaagaagagctcaataacttcctcgatgagctgtctaagatcctggagaactaccagaatgacttcgaaaacagattctccaaagagttcgagattcaatttaaggtccagaagagcctgtcaaccctgtctaacgatgacctggactacgtcctaactaagctgaaagaaaaagacgctgataagctcatatccgaatatggagacatggacaatcagtccaagctggttaaggagtttctgaagagaggcctcatcttctcactggctcccaagattcacaagaaggaattggcgaagatctggctgctcaacaaagattga

SEQ ID NO: 3657 - DNA, 1911 bp, synthetic construct
  source 1..1911: mol_type = other DNA
atgtttgggaaagataaaaaagagaactcgaacgaaaaagtgctgtacgaagggcagccaaacctgatcgtttatagtaagagcatcttcatcgcggtgattttactgggatttctctttttcctctattcaactggaatccagtacattggaaacatgcaggtctacatgatcgaatcgaccaaattgccattgactcgctattttgcaatcgccgtcttcgtgatcataatggtggtgatcctatacatcatcataaaattcctctcttggacctcaatcaagtatacaatcaccgaaagccgggtgatcgtggaaaaggggattatattcaataagaagaattacatgccttttaacacaatccaggacgtaagtcgttcgcaaagcattctgggaaaagccttcagcgtcggcaccattaccctttacagtgcctacgacggcaaggacatgtcactgaaggatgtctcaaaccccaaaaagattgaagaccttatcttcgagaatatgcggacaacgcacctccgcagccacaacctgtacgacgactcctacggcaatccctacaataacagttacaacaaccataacaaccattggggatacgacaactatggtgattcctaccaaaacagggacttcaagcccataaggcccaactccgatgaaaaggttcattacaaccgtatggaggacctcgacgaccttgagttggttgatgtgaaggagagaaagcgaaatctgcgcgaaataaggcgaaaggctaagaatagtcggggaaacaactacaataatcagccgattgacggtccgagtaacaattacaatcggaactccaattacgaccctaactataacaggaactctaattataagcagaatccgaattataacaaccgcaacaactacgatgatttcggctacgatgattacgagagcggctataatcaaagatccaaaagagcccctcagggcaataggggctacagcaaaaggaatgcaaaccagtacagggacgactcacgggccaatcaccagcacagagagacaatccgggagtcctatcaaagaaacccaaataagtattttgcacagaactatgagaaattccatcaagacaatctagaggctcagaatagggggggggaaagttttaatgagatgaaccctctggattctaacgactattatggtatggatgacgactttatctccgatgaggagtttgatagcacgattaataaggctatggaaaacattggagacaatattaaatttaagcccaacaatcactcaagagtggtcaactctcacgaggacttcgactcccgggtagtgaactcccacgaagacttcgatagcagaatgaatgactcgtacgacgacttcgcgagcggctctagacataacactgactacgccaatagcaaccagaacaggcattataacagcaactaccccgacgaccggcagttccgaagcaaccagtcttacgagggggattaccgccagtctcgttctaatcagccttatgagggggattatcggcaaagtcgacccaaccggtcctatgacgatggctatggtcacagcgggtccaacccaaactacaataactcttacgaccagtccaactacggctatgatgactacagacagtcaaacaatcccccacggctgaataaacagagctcaagtgataactaccacaaatccaacaatcgcaaccgctcaagcaactatcgcaatcgcagctataacaatcaggaaaattacaactcctacaacgatatggaggataacagcaataactatgaggagagtgataagaagggcaagaagaagaaaaagaataaggattccaatgacctgctggagaagcacagcaggaaattccgacgctcgtga

SEQ ID NO: 3658 - DNA, 297 bp, synthetic construct
  source 1..297: mol_type = other DNA
atgatctttgtgctggcgaaggccattcccaaggacgaggaagcctgcgagaaaatcgtcgaatttgcacaggacctgatcgaaaatagccggaaggaggatggcaacatcgactataacctatactccaacacttgtgatggcaccctgctgttcgtggagcagtgggaaagcaaagagatactcggagcccatcttcaaacagagcacttcctcaccttcgggaagaatatagcagatttggtagccgctgaactggacattgccgtgtacgaggcggaggctacggacctctga

SEQ ID NO: 3659 - DNA, 684 bp, synthetic construct
  source 1..684: mol_type = other DNA
atgaaagtcgcggtgattggtggcactgggccacaagggctgggcattgccaaaaggttcgctattgagggggttgaggtgatagtgggcagccgcaaggaagagaaagctctgacaatagtggaggagacaatcgaggagcttaaagattacgatctaaacattgtcgggatggctaatgaggatgcagccaaggagggcgatatccttattctcactgtgcccctggccgcccagaaaccgacgctcgaaggaattaaggagttttgtaccgacaaaatcgtattggatgcaaccgtccctctggagaccgctataggtggcaagccattccggttcattgacctaatggagggcagcgccgccgaacgcacggccaaaatattggatggaacaggtgcgaaggtgatctgcgcattctgcaacatcagtaattctcatctctccaacatcccaaacgagatcgactgtgactgcctgatcgcaggagacgacaaggaagccaaggaaatcgctaccgaactgatcaataagctgcccggcgttaaggccatcgacacaggcattctcgaaaagtcaagaataatcgaaaagatcacccccctgctgatcggattaaacattaagtaccggtcccactatggggggctccgaatcactggaatccctcagtttgaagactga

SEQ ID NO: 3660 - DNA, 1077 bp, synthetic construct
  source 1..1077: mol_type = other DNA
atggcaacgtttaaaggctttgccatgaaacgactcaatgaaatcggttgggtggaaaaagaagtgcccgagtgcggaccgatggacgctattattaagccaacttgtgtgtctccatgcacatccgatatccacacagtgtgggagggcgccatcggggaccgccgggacatgatcctgggccatgaggccgtgggcgaggtggtggaggtggggagcatggtcaaaaagtttaaacccggcgatcgcgtcattgttccagccatcacccctgactgggatgatgaggccgcccagcgcggattccctagccagacaaccgaacccctcggtggctggaagttcagcaacttcaaagacggggtattcggcgagagattccacgtgaacatggcggatgccaacctcacgttcatccccgacggactctccgacgagggcgcatgtatgctgaccgacatgtggagcacggggatgatgggatcagaaaacgcgaacatccccctgggtggaactgtcctagtgattggcataggggccgtcggcctcagtgctattgctggcgccaagtgtctaggggccggtagactgttcgctgcaggtacccggcccatttcggtcgaggttgctaagaagtacggggctaccgacataatcaactacaaaaacggaccaatcgatgagcaggttcgtgagctgaccgatggtgcaggggtagacagcgtcgtgattgccgggggcaatctggagaacacatgggcggaagccattaaatctgccaaggctggaggaactgtgtccaatgttaattatctgagtggcgctgacaatgtcctgatcccacgggtggagtgggggtgcggcatgtcaaacatcaatataacaaacggattgtgccctgggggagccgtcaggatggagaggcttgcggatctggcactttgcggcaggcaagatcctgaacttctggtgacccacaagtttaagggcctggaaaagatcgaagatgcattgctcttgatgaaggacaagccgaaagacttaataaagcctgtggtaatgctggacatcgactga

SEQ ID NO: 3661 - DNA, 825 bp, synthetic construct
  source 1..825: mol_type = other DNA
atgattatcagtgaggagctcttcgaaggaatctgcgacctggacgatttcaacctcctcaagtttgttatcagcagcgagctacgactgaaaatactgtttagcctttacgaaagtagcaagagcattaaggagctggagagcgagatcaaccggaaatccggcaatatttcccgcggcctgaatgagttaaaatcctgtaaactgataaccaagctcccaaacaaattgtttgcgatatcatccacggggttcttggtggcaaagaacctggaaaatcttatggacaatatgggaagtatcgagagcaacggggaattttgggagaatcactccatcaaatcaatccccaacaaattcctaaaggaattatccatctttaataacagtaccctggtgaaaagcaccattacagattttgccaagccgattaacctgtaccttgagaacattaaaaagtctacctatatctgcatgatactgcccgtattctcgaaaatcttcaacgacgccgtcaatgacgctataatcgaacatgacggctatctggacttggtgactacaaagaacatctatgatttgagcattaaatcagactcggacaataagattaagtccctcgtgcgggataagaagatcaagttctacatcgtggatgacctgcctaacatcttctttactgtctcagatcagttcgcaagcctctacctcttctttgatgacgtggtcttcgacaattctgagatgctccttctggaggacgatctgaacctgaatgatgcctacagattctacaggttctttaagaacgaaattctgaagtga

SEQ ID NO: 3662 - DNA, 861 bp, synthetic construct
  source 1..861: mol_type = other DNA
ttgaccaaccgctttgaagaggaaaatttcctggaactgcaggaggacatcaagttcctgattaactccgaaattcggctgaagatcctgggctgcttgtataactcctccgctagcataaaacagatcgaggcaatcaccaactatagttacagtagtattctcgacaatatcaataagctggagcaaaaaaagtttatctacagcatagaggacaaattctacctctataataagacaaggctgaaactcaacagcattctctactttaacaagtcagccacctttttaagagagaatagtgacttcctgaaccagtcccttatcgatatcaacagcgaagccataaaggacctctccgcccttgagggctctagactaatcgaatccaacaacatcgatctgtttaaatctacagaaatctttcagcgctctcttatggggttcaaatttctcaagggtatcttcccgtacttccatccacgacacgacgatattattagctattggatagacaacgactgcactgtggaactgatcctgcctgatgaggtttcagaggccgtaaagaacttcattattgattatgtgccaaaaagccccgggattaagaataggtttgtcaaacttaaacccaacgaccacaacatccagttggcgttcacagtgtcggataagtgtttcgtcttggccctctacacgaagtcgggccagttcaatcaaaatgcagtgctggtgtcaactaaccccgaagctatcaccttcgggttaaagctgtttgaggagtacgaggagctgtgcggagactacgtcagcctagagaatctgatataccctaatggacgggaggatgactattga

SEQ ID NO: 3663 - DNA, 1275 bp, synthetic construct
  source 1..1275: mol_type = other DNA
atggacgattctcccaatgaagtcccagagctgaaccgcccaactaaaatagataacatagaagagcccaaaacagtagacgagctccagaaggaacttgacttgcttaaagctgaaaaccagaagaccaaacgcaaccttatgtggaaggtgaggaagctggagaaagacaagattctcactgaaaatgagaaaataagattggagcgcgagctcaaaagcctgcgaggtgaagtggagcggttccgatcaccgcctctggtgatcgccactatcacggaaatcattgacgactccagaatgaccgtaaaaagcagcaccggccccagtttcctaatcaattacagcaaattccttgatgaagacctactgaagccaggctcaagggtggcccttaatcagcagaccttcggcgtggtggaggtgctaccctccgagaaggatgcaaatgtcagcgggatggagattgaggccaaacctgacgtgacctatgatatgatcgggggtctcgacgagcagattatagaagtcaaggaaacggtcgaactgcctctgaagcacccagaattattcgagaaggtggggatcgacccccccaaagggatcttactgtacggcccccctggaaccggtaagaccctgctggctaaggccgtcgcgaacgagacaaacgcaacattcattaaggtggtcgcctctgagtttgtgaagaagtacattggtgaaggggcacggatggttagggaggtgtttgagctggccaaggagaaggctcccagtatcatcttcattgacgagctggatgccgttgccgcccaacgcctgaaaagctccacaagtggcgatagggaagttcaacggactttgatgcagctcctcgcggagttggacgggttcgagtcccgaggagatattggaatcattggcgcaaccaacaggccggatatcctggacccggctctgctgcgccctggacggtttgacagattcattgaggtcccagcgccaaatgaagacggcagacgtgagatcctgaagatccatactaaaaagatgaacatagatcctgaagtgcggatgtcggagttggttgagctcaccgaaggcctctctggcgcagatctcaaggctatctgcacagaggccgggatgtttgctatccgtgaggaaagagaccacatcatcaaggcagactttgaggatgccatcaacaagattatgggaaaaaacaagacaggcacgctggacgataatggcggagtaatgtttggatga

SEQ ID NO: 3664 - DNA, 504 bp, synthetic construct
  source 1..504: mol_type = other DNA
atgaactgtgagatctgcggcaaagaaatcgaaggaaaaccactgagaacgaagatagacggcagcgtgttactggtttgcaacgattgcgccaaattcggcagggtccagagggacaccccccttgagcgcaaattcgtcactcgcgacaagaaggggcgaaaagaggcaaatgcgaaaacacgccccaagaagacctacacacggaatgaagagccgatggatgagctggtggaggactttaacctcgtggtgaggcaggcccgggaagctaaagggtggaagagagaggagctggctgccaagatctatgaaaaggccagcgtaatcaacagaatcgaatcagggaagatcctgccagacctcaaattggcacggaagcttgagaagaccctgaacattaagctcatagagaaatacgatgatatggacctagaagcctacaagagttcctccgcgggtcctaatactctgggaagcattgtgaagattaaacgaaagtga

SEQ ID NO: 3665 - DNA, 423 bp, synthetic construct
  source 1..423: mol_type = other DNA
atggccttgatcctcatcagaggtgagaacaacgccaagatactgaatgcaatcgccgatgtcgaaaggcacgcaaatctgactctggagacaaagccgaagaaagtggaccccaaattcgccgacaagctcgttgagaacgtgttaaaatcccctctgcggacgaagtctaaggtggctaccgcctttcgggtcaaggaggacactacgatcgcgattcttcaggtgaagaagatacacccacccgctcatatcgtggtggtaagcaacacctacgacggctaccgcgaactgagcaaaatcattaatgaaggcaaggtcttcaagggatattactccaacaaatcaagttcggggacccgaatgaaagattacaaactaacaaagaccagcacaaatgaggggctcaacatttatatgtga

SEQ ID NO: 3666 - DNA, 1227 bp, synthetic construct
  source 1..1227: mol_type = other DNA
atgctctttagcgtaattgcgactgtctctgctacttgtaacgtcatcgtgataactgaccctagtggagaagaccccaacggcgccgcagcaggaagtatgtcctttgctaataacatgttccagtcgagcttcatcatgagcaaagatgatggatacgccatgctgtcagggggggaggggaatggtaccgaaaggaattacgcgattatagcagcgcttgcagccatgcagcatggagccactccagcatctgctgccgccttggcaagtggatttaagggcatcagacttgtgattggcggcccctcgatgggggccgccatcggcggcgactacaacgcttatctcgtggtggtcgacgatgccggcaccattaaggtcacccaccacacaggaggagtggtgcagctgcctcaggggtccaagggcgccatcattcacttgcggaacagtgcagggaaccccatgtatggcactgccgaacgcgtccgccgcgagacggcagtgaatataggcaaaatgatcagggacggttaccccgccacctatatcgtcggtaaggccatgaaagaggtggccgaggattcaggggaaaagtacggggggggtgccgtcaacctggtgtccagcatcagcacgggagacatgttcgtgcccgatcaggtcaacaccaccgggtacccgatggatgagaactattccaagtcctgtgaaaaatgcggatgggctacaggcttcccagatgccgagcgatacaacgtttgcccctactgcggctccgagctgaccgtgaactctgctacagatgtgctcatcgacagcatcacagtgtcgaaggactctgtgtctgtgtccgtgtacggaagtgaccggcttggactcagcgacattacaagagaggtcgtcaaggcgtcagttaagaaatatggctacaatgcgagtaccattgccggcagcctgaacaaagggatcaataatggtctgatcgttggcgttgactacgtagagccaagcgacctcaacgtgaagccggacgttcgagctgtaggtgtgtattataatccactacctaatggcagaagctcacctgcttggaacctgccaatcaattccatggttctaacgatcttggggaccattcaaacggctattggcttcgtgctgataatgctggtaatctttaggacacggctgttaaaatccttcaaggatcgtgtgtcatga

SEQ ID NO: 3667 - DNA, 498 bp, synthetic construct
  source 1..498: mol_type = other DNA
atgtttatcaaaattcgaagagacacactcatcatcctgctattggcctttatcctcattctgtgcgggcgcctcattatctacgtcgcctacgcatcctcggcccaggtcgaggagggcgtaccaatcgcgggtattatcgtgaagggcaacgacatagttccgatcgacaacataaggtacaacgtggagaactcagggctgcgggaaggcagctatattgatggagacatccttaagaccagcatacgggagctgcctgtgacggaagccgaggcaaatgccgagaagttcgtcaaaaggtccacaattcccgggaccactatcgctccaattgctggagcggacgtgaatgttaacaagcagactggaatcgtcaccgtgactgtgatagaagatttctccaccatcaatatcacaggcaacagtaccaccagcacggatttcacagaaaacgagccctcaaaaagtgtgtacaattatagcctggctggttga

SEQ ID NO: 3668 - DNA, 1125 bp, synthetic construct
  source 1..1125: mol_type = other DNA
atgattatccccactctggggtgcccctccaactgttcatactgttggggctcggaggacaacgctgaactcatggacatcgatgtcattaagcagattgtggagtggctagcggattttcgcgatgagccggtgcacttcaccttccatgggggagaacctttacttgcaggctatgatttttacaaggaggcccttcccctgctcaatgatgcagagacccatgaaacggaagggttctcattgcagagtaatctgtggctgctcgatgaggagatggtggaattattctccaaatataacatagccatcagcacaagcattgacggccccaaggagatcaatgactaccaacgaggcgaaggctactacgacaagacgatgaaaagtgtgaagctggctaccgaccacaacatccaaattaacttcgtctgtaccttcacatcctactccaaagacttctcagacgagatatacgacttcttcaaggccaacggcctgaacctgaagatccacgctgccctcccctcccttcgtggtaacaatgcagatccatgggccctacctcaggatgagcacggaaaattgctgattgattggctggataagtatctctacgacctggacaagttcgtaattatggacctggaccatatcgccaaaagcagcctgcggagggttggaaccctctgcacatttaatgactgcatggggactaccttggctgtgggccacgatggtagcatctatccttgctaccggtttgtcggaatggacgagtacatcatgggcaacgtgtatgacaagccatctatggagacgctcgagcagtctgaagcttgggagaagctgatggaatttaagaatttcgtagatgaggactgcgccgactgtaaattcatcaaattctgcagggggggctgcccgtataatggaatcgtggctacacagagcccaagggcggtggacccccagtgtgaagcctataagatgatctttggggaggtcagtcgcagagccaacgaagactttaagaagaacgcaatggcggcatttggtggtgccccacgggttagaaaagaaggagatccttttagcataatggatctgatgactaaaatgtga

SEQ ID NO: 3669 - DNA, 219 bp, synthetic construct
  source 1..219: mol_type = other DNA
atgaagttcgaagacctgatggcaaaatgtcccaaatgcgggagccaggacaagaccgccgtccggaggttcatcgacaaccatcacgcccacgctgaactcaaggagtttaaatgcgataactgcggcttcgtgtatgaaacgggaaaagattacgaggataatgaggacgagacaattaagaagggcctaatcaaggagctgaacaagaccatgtga

SEQ ID NO: 3670 - DNA, 1047 bp, synthetic construct
  source 1..1047: mol_type = other DNA
atggactattccattaagagtggcatattcggcctcgtggtagcagatgccctgggagtgccttatgaatttaaagacaagcactactgtgatatgaatccgatgacagacatgatcgggcacgggacctacaatcaggaagcgggaacctggtcggatgacagctcgatcgctctcgctacactggacggattgaccgactatgaatttggcgaagacgacgtggaaggcatgcggatcaagaactttgccgagatcatcgactacgacagcattgcccataagttcgccgattggctaattaataagaaatacactccccacggggacgtgttcgacgtgggcaacaccaccagccacgccatctactccttttacgctggtaaggtcgatgccctgcacgcaagtggcgcagggaaaaaggatgctggaaacggcagcctgatgagaatattgcccgtctcattccttatttacttcctgagcctcaaatatgacttcgacgaggagggggaaatggaagcaatccataacctgtctagcattactcacaggactttacgatgccagatggcctgtggcatctacataaaaatcgcgatcgagctcttaaagaattactttgactctgaagacgattcaaacttgctagagctggtgaataacggtataaactcagcgaaagagtattatgagacgaaggaggagttcgcccatgagctgagtatttacgaggacgtgttctcccttgagattcaagattttgaccgcgatgatatcaaagggtccggttacgttgtcgaggccctcaaggcagctctgtggtgccttctgaataacgatgattataaggacacagccttggcagcggttaatctgggtcatgatacggacacaaccgccgctatcgccgggggactcgctggcatttattacggatacgacaacatcccatccaactggcttgataagatcgccaaatctgattacatcggcgaactctgcaataacctgagcgactatctgttcgagattctggaggattga

SEQ ID NO: 3671 - DNA, 780 bp, synthetic construct
  source 1..780: mol_type = other DNA
atgtcgctggagattctcaaaaagggcacaagtgaaaacttcctgcttaagcagatcattaggaagaactttaccagcaaatacaaggactctgtgttgggcattctttggtccttcttcaaccctctgatcacaatggccctattgacagcgatctttagcagtgtcttcgcacgcaacattgaaaatttccctgtgtacttcttgaccggccggtgcgtgattgatttcttcaatagcggaactaaaatcgccatgacctccctgaaaaagaacagcgggattctgaataagatcttcgttccaagatacgtatttgcactgggcggaatcttttctgagtttattaactttctgatgagtatgatcgtgctgattgtgatcatgatcgtaactagggcgcccttccacctctatgctatcttttcagtcatcccaatagccatcctattcatcctgattttaggagtggggctgacactttccattctctgcaccaaattcaccgacattgagtacctctataagatatttaccagcctcctcgtgtacgcctgtgccatcttttatcccatcgacatcgttccccaacccatccggcagtacatggaactgaatccgatctatggtattatagctcagttccgcgagtttgtcatgtatgggcgattcccatcaacgaagctgatgctgataaccttcctgacttccatagtcatcttcatcattggtgtgatcatatttaagaaataccagaacagaatcacgctcgagttatga

SEQ ID NO: 3672 - DNA, 1230 bp, synthetic construct
  source 1..1230: mol_type = other DNA
atggataataagaatgaaaacagcaataagatcaaaacccagttaatcccatctattcataacactgtatctctccaagcacacctcactacaaaagatggcgagcccattgtgggtgaggaggtcgtgtacaaactgtactccatagacaagagctttcttacccagtattctcggataacaaatgaagagggcctagtgcaccttaccctcaacatcaagcataaggtctatattgaaatctgctatgagggcagcgaaaagtacgagagcaacaacgtaatgaccttcaggaccaagccttcagacgatgagaagaacgtaaaaaccaaacaccccctgcaggttcaaagagaagagaagctggaacagaagaaaattgaggagaaaaagaaaaacctattggacttccagcagaaacagaaggacctggaaagtgtggatgaggacaacatcgccatcgagctaaagaatgtgaatctgagttttacaatcggctcagataagattgacaacttaaaggagtacgtgatccgtaccatcaagcgcacgaaagaaaagaaaacaatcttcaaggccacagatgatgtgtccttcaagatatataagggggaaaaggtcggccttatcggctttaacggcgctgggaaaagcacgctgctcaagatcatctcaggtgtctacactccagatgacggtgaggttatcgtcaatggaaagatagcgcctctgctctccctgggggcaggctttgacaagaattatacgggccgggagaacattttcctgaacggagccattctgggatacaatgaggagttccttaacagcaaatacgacgaaatcctcgagtttagcgagctggggcagttcatcaacctgccagtgaaaaactactcctctgggatgctttcgaaactcgggttctccatagccaccatcgtggagccggacattctcattctggacgaggtgctgggagtgggagacgtgaatttcaaacgaaagagtagggagaaactcaattcgctgattgagtccaacattaccgttttgctggtttcacacacaatcagtgagatacgcaacatctgtgaaaaggccatctggctggaaaacggtaagatcagagaaattggagaagtcaatgacatttgcgataagtacttggaagaagctaaaaaggtgagcgatgacaagactaaaaaattgaagcccaagcggttttga

SEQ ID NO: 3673 - DNA, 681 bp, synthetic construct
  source 1..681: mol_type = other DNA
atggcaagcatagtggctattatccctgcctacaatgaagaggaagcgttggccgacgtgatagcgaagacctcaaagtacgtggacagagtgatcatcgttaacgacggcagtgctgataggacggcagatgtggcgattgaagccggcgctgagctaatcaaccacccgacgaaccttggaaaaggagaggcattaaagtccgggtttgaggctattaccgacgattccatcattgtcacaatcgacggggacggccagcacaaccccgatgagattccaatcattctgaagcctatcatcgaagatggagtggacctcgtaaatggcagccgttatctgtatggtcatgaggagaacacccccgcctacaggagagttggacagcgggtcctggacattgccactaacatctccgccggcatcaaggtgacagacagccaaagtggcttccgcgccttcagcccaaaggctcggaattgcttccgctttaaagacaccggttttggaatcgagtcggaaatgctcgtggatgcagccgaggccgggctgaagatagtggaagtcccaatcacagttcgatacgacgtggacggctcaactaaagatcccgtaacccacggggtgggggtcctgctcaagataatgaaagataaagccgtccggactttcaaaaagtga

SEQ ID NO: 3674 - DNA, 972 bp, synthetic construct
  source 1..972: mol_type = other DNA
atggagacacaaaggattatggtaactggcggaagtggcttcataggcacaaacttagtgaatgaactccgaagccggggacatgaggtcctgtccgtcgacctgctgcatcacgaggatgaggctgacctctacagcgactcttacagcgactacgtgaggggagacatccgcaactaccggcagatggagcgcatcttcgatgacaatgacaagttcgactatgtgtacaacctggcagcagagtacggccgatggaacggtgagggatactacgaaaacctttgggagaccaatgtgatcgggttgaagaatatgatccgtcttcaggagaaactgggttttagaatgatatcattctccagcgccgaggtttatggggactatgaagggataatgagtgaggatgtaatggagaacaggccaatcaaggacacgtatcagatgaatgactacgccatctccaaatgggccggagagttgatgtgcatgaacagcgccaccatgtttggcactgaaacggtgcgcgtgcggccagtgaactgttacgggccgcacgaggcttactcgccttataaaggcttcatcccaatcttcatctacaaggccctacatggcctcccctattcagtacacaagggtcacaaaagaatcattgattatgtggaagacacggccaatacctttgcaaacattgtcgataatttcatccccggggaagtctacaacgttggcagcaaacaggagtgggaaatgaccattgaagagtattctgacctggtgctcgaagctgtggggatagatgattccctggtgacctacactcccgcggaggactttaccacaaaggttaagaccattgactttagtaaggcgatccgggatctgaaacacgatcctaaggtcagccccaaggaaggaattaagcgcacagtcgaatggatgaaatggtattacagaattgaggattga

SEQ ID NO: 3675 - DNA, 543 bp, synthetic construct
  source 1..543: mol_type = other DNA
atgacaaataaaagccccgaagaggagatcgaagaactcaaggctcagctgtccaagtaccgcaaggaaaaccggattctgaaagagagatgcgcctcctacgaagataggattgagcatttcgcgatagagcgaaaagagctgtctagagccatcacgcagttcgaaagcctggagttggagctgcgtcagtacgatctcgaggagctgattcaaaacacccgcaagctaaaccaccggatcgacattcttagacggtatttgcagacagagcgagaggacaatgagaagctcaacgagttgatcaacaagctaacaaaggaactcgatgacgcaaattacgaaatatcacggctgactactgaatttcacaagcttagggtgcgcaaaaatcagaggacctatttcctggaaaaccgcctggatatcgcatacaccaaactggcccaactcaaatacaccttaaacgagtttgaggagcttgggttctgggacaggctgagaggcaagaagccagaaagttatgacgacatcgacatctga

SEQ ID NO: 3676 - DNA, 846 bp, synthetic construct
  source 1..846: mol_type = other DNA
atgaaagcagtcatccctgctgcagggctcggcacacgcttcctgcccgccactaaagctcagccaaaagagatgctgccggtgtacgacaagccgaccatacaatatgtaatagaagagagcgtcaatagcggtgtggacgatatcctaatcgttacgggaaaggggaaaagatcgatcgaagaccatttcgacaggtccttcgaactggagcaccacttgaaaaccaaaggcaaggaggacttcctcaaggaaattgaatatatttccgatttggcagacattcactttatacgacagaaaaagcagaaagggctcggagatgcgatctactgtgcgaaaaagcatgtcggcaatgatcccttcgtggtcatgctgggggacaccattaccaaggataccgttccctgcacaaagcaactgatcgacatctatgaaaagtatgagaaatcagtgatcgccctggaggaggtgcctgatgaaaaggtggaaagatacgggatcataggcggtgaggagatagaggacagcatctacaagattgataagctagtggaaaagccacccctgcgggtggccccaagtaacctggccatcatgggccgttatgtccttacacctgacatctttgattgcatcgagaacgtggagcccggatacggtggagagatccagctgactgatgccttgagcaagcttgacgagatttacggccaggtatttaagggcgagtcatacgacattggaaaccggatcgactggctcaagacgtccttaaggttcgccctcgaagacgacagtgctcgcgatgatatcctggagtttattaaagaagagattatttga

SEQ ID NO: 3677 - DNA, 414 bp, synthetic construct
  source 1..414: mol_type = other DNA
atgaacttcaaaattaaggccaaggggcataagaacgtcctgtccctccataaatccacgttcgagatcaccaaagacaaggatctctcgctgagtggggactgcatcatcggtttggacattgataagtgcatgctggacttcccgaaggaatttaaggaaaagttagcaaacgatgagaccatagtgacagtaaaactgaagagcccaaatgcctacgatgagatagtgggatatggccaccacgacttgacccttgaccaccccacagacatcgtctgtcggaaaagtgactttatctgctcaaggactctcatgattaaatctgataaggccgctattgatctgaaccgcgatctgatcgaggacctggcgaatggcgagagcctagacgtggaaatcatccttagctga

SEQ ID NO: 3678 - DNA, 939 bp, synthetic construct
  source 1..939: mol_type = other DNA
atgatcataaataccgggttacgcacagacatcccgggattttttagcaaatggttctataacagaattgaggaggaatatgtctacgtcaggaacccctactacaaaagccaggtatttcactacaagcttaaccctgagctggtagactgtatcatattctgcactaaaaatccaaagcctatgctctcaaatctggacaagatcagcgaatttaatcagttctggttcgtgaccataactccctacaaaaaggaaatcgaacccaacgtgccctcggtcaacaaggtcatcaaaagttttaaggaactctctagtcagactggcaaggagagcgtgtcccttaggtacgacccgattctgatcaacgataaatacacactggactatcacattgaggcctttgaaaaaattgccagctccctgtcagaccacacaagcgaaatcatcatcagcttcattgacctgtatgaaaagaccaagcgaaacttcccacaagctcgtgaggtttcgaaagaggagcgcctgattatcggcaaagagttctccaatatcgccagagagaacaatcttatcctgaagacatgcgttgaggggaaggaactggataagttcggaatagattcttcaggctgcatgacgaaggaggtgatagaacgggcgatccacaataagctcgatgtgcgggtgaagaaatcccggaacagaccctgtgactgtctactaaacaatgacattggggagtacaacacgtgcaatcatggttgtctctactgctatgcaaattccaacaagcaattggtgaagcgaaactttaagaggcacgacccagattctcctatcttgattggcaacatccgcgaagaggatgagattaaagagatcaaccaggagagtttcctgattcatgaggataccgtgcagaccaaactcttctga

SEQ ID NO: 3679 - DNA, 459 bp, synthetic construct
  source 1..459: mol_type = other DNA
atgaaagggacgtactgcctcatcataagtatgaagaaaagcgacaagatcaagataggcaatctataccccgaagcgtacaaattcaagaagggatattatgtgtacatcgggtccgccatgaacagtctgatctcacgccttaatcggcacctgtcggacgataaaaagatgcactggcatatcgattacctcctcaccagcgagtatagcgagattcgagagatcctttttacagactcagagaaaagaatcgaatgtgatctggcaaacgagattgctgaagacggattggagattgagggcttcggctgtagcgactgcaactgcaattcccacctgattttcttcaaccgcaagcgggatgccctgaggagggtcaaggacgcctacgaatccttaggtattgaatattacgacctgaaatattttagaaccatcgacaacaagaaggattga

SEQ ID NO: 3680 - DNA, 2883 bp, synthetic construct
  source 1..2883: mol_type = other DNA
atgaaaattatcttcaaacggtgcctcgtgctcatctctcttatttttattctcattttaactcttggccttgtatcagctagcaataatattaaccaaatcaacgacatgaattgtagcgtatacgaagactacagtgaaaatattatcacagccgatctcaattcaaacagcaacgagcttaattccgattttgcctacggtgacagcgactctgaagaaatcctggatgaaccctctcagaagctgaaaacaggtagcgataattctgatttcaaagacatacaaaacctgatcgataatgctaaggagaatgacgtcattgagctgagcggaacctataccggtgattctctaattgtcgtaaacaaatccctgaccctgaagtcttctagcagtgccacactggacggagagtttctaaatgagctgatggctataaatgctcccaatgtgatattggacaacatcaactttatcaacgccaattacactggtctgagcgttaataacaattatgtcaccattcagaactgcaacttcgacggctgtatcaacggagagctcgggtgcgccctgattatccatgggaacaacgtcaacgttctgaacagcaattttaccaataatgtggcaaacaagtccagctgccatcacacggacggggcagcaatttaccttatcggcaacgactgccaaatcgacaattgcagcttcatcaacaactgggggtacaattttgaaacatccagctcaggaggcgccatctggataaagggcaacaatattgtaatcaacaattcctatttctttaataactccgcgaccgcggaagttggctggaccttccacggcgaggagataacctacttggcagatggatacggcggagcagcctttctcgtgggaaaaaacgtgaaaataatcaattccctgtttgacagtagcctgtcccacgcccaggggggggcattgtactataagagcgcatatgactgctcaatcatcaactcaacctttctgaactcattttctgtgggggagggcggcgtcatctatcttggtcagaatatcgacgggctaatgatcgactcgtgtaatttcataaacaacacggccgacggattggacggggttcttgtcaagtacaccgatctgggcagtgtgctctatgcctcaaagttcgctgagaatgtcgtgatcaccaactcaagcctgctgaacaataaaggaacctctgctgtctacttcctcggaaataacctgaatatttcaaacagcatcatcgaaaacaataatctatcgaccgccgtgatttatatgaatggaagtatgaacgacaacttctggagcaagaacttcgattctgccgatgagttcaagaacgactgcttcattatccgagacaacgagtctcaggtgcctgacacttggttcaacttagtgtgtgacggcttggacagtctgaaggcgaagggggtctacgattacaacatgtccttcgtcctcaaggatgcttccctggataatcatgcctccaaaatttcactcacaaataacctgcctaattaccacattaacctgaaaaacagtgccaagaataagatcaacccaaacgagctggtgattgttgacaaccaggcggacttcacgtatgattacattgagtctgctaaggactccatcgatgtgtatgatgactacaacaacttgatcttatccaagaaggttctcagcggcatcacgtatattaacgacagtggaaatgacacaaaggaccttcaggatgcaattgatagtgccagttctgggagcctgatctccctgtccaacaagacctatgttctggacacaatcttaataaataaggacattcacattagcggagaggaaaacacaactgtcatgctctcaaacagttcagattatatatttaaaatctcgaactgttccgctgccaactattctgactacggcatagccatctccaacatcaacttcatcctggataatggcgacatcgtggccctggctgaggctgtgaatgggtctggctcactgtccattgacgtggcctcaataaagatcacagacaactcattcacatcccgtgaaggggtggtgagggagagcattacgatcctggagctggacagccaaagggctgtcctcgcccccacacggaacatctcgatcagcaacaactccttggaaatcggaatgaacccattcgattttaatgttaagtcggtcatcaatggctccgatgtgcgcgtggatgtcgggggcaatctcgccagcaaaaaagccagtcagatcatttgtaaagatatggtcacgaaagccattgcaagcaatgtggattcccgctcgggagagtacttcaacgtgagcctgaaggacagccagggcaaaccattgcagaacaagtttgtgcagataggttttaacggtgcggtttacaacagaaccactaatgagagcggcgaacttagactacagataaatctggcgtacaaaggagtgtacactttcgccatatcctacttgggggatgacgagtgcaacggttccttcgaagtggcgaagatcactgttaatccgcagagtcccattctcatggccaacaacgcaaaatacaaggtaagctccactaaaaccctctcggctagttttaaatccatgaaaggcagtcctatctcgggcaagaccatcaaattcactgtagatggcaagacttacagtgggaagacaaattctaacggtatcgctagcgtgaaagtgagcctcaacaagaaggggacctataagttcacggccaagtttgcaggcgataacaccttcgcagcggtgactaagagcgctaaggtggtgattagttga

SEQ ID NO: 3681 - DNA, 804 bp, synthetic construct
  source 1..804: mol_type = other DNA
atgaaaagacagaagaagatcgccatctatggaaagggggggataggtaaaagtactacagtagctaatattgcggccgcgtacagtgaagacaacaagaaagtcatggtgattggctgcgaccccaagtccgacacaacgcgcaccctgtgcgggaagcggataccaaccatagtgcacaccctgaaggacaataagaagccagagcttgacgatttagttttcgaaggatttaataagatcaaatgtgtggaaagcggcgggccagagccgggggtgggctgtgcagggcgtggtgtcatcgtggccatgaaacggctggagaacctgaatgccttcgaagaggaatttgacgtgatcctgtatgacgtgctcggcgatgtggtctgcggaggcttcagcgttcctctcagggaggattacgctgatgaggtctttatagtctcctcgggagagtacatgtcactgtatgctgcaaacaacatcagccgaggcattaagaaactaaaaggaaatctgggtggcatcatctgtaactgcaaaggtatcgacaacgaggaagagatcgttaactcctttgccaaggagattggcactcaggtgatcggagtgattggcagaagcaatctcattcaaaggagcgagttggatgcaaagaccgtagtggagtacgctcctgaatccatcgagtctgatgcctaccgcaagcttgccaaggacatttttgataacgacaactacagcacaccccagcccatggaagacgaagacttcgagaacttcttcaaatcattcatcgattga

SEQ ID NO: 3682 - DNA, 1260 bp, synthetic construct
  source 1..1260: mol_type = other DNA
atggtcgagctgctggctccagcaggaaattttatctcactcagcagtgcattaaagaacggtgctgatgccgtgtatatcggcctggaagacctgaacatgagagtgaacgcaagcaatttcagcctggaggacattaaaaaggccagtgaaatgacaaaggaatatggggctaaattatacgtatgcacaaacaccatcatgaaagataaggacattgagatgctcaaagatcagttgccctacattaaggaatatggcgctgacggtatcatattgtcagatattagcctgatcgagctcgcttctcagaatggcctcgaagcccacgtgagcgtccaggaaaataccactaacttttacgccctgaagaccctggagagactgggggcaaaacgggccatcctatctcgagaactgtccctggacgagataaaggagatcactcgaaaactaaaggagtcggattccacgatcgaaactgaggtctttattcacggggccatgtgtatggcgatcagcgggcgctgctttttgagctatggcctgtacggccgtagcgccaactgcggagactgtctccagccctgcagaaaggaatggaagcttagctttgaggagaatgaagacgacgacgtcatcaacttcagtgactgtgacgacgaatccttcataatatcccaatcatacgacgactcctacaggaccaacttcttctcgccaaaggatatggcactcattgagcacattccggagcttatcgaagcgggcatcgattcattcaagatcgaagggcgggcgcggtctcctgattacgttgccgctgcggtttccgtgtaccgccaggccatcgatttgtactacgacgacccagataactggcaattcaatcccgagtggatggaagagcttatgaaagtcttcaacaggggctacgacacaggattttattttgacacgccttatgagatcagcgagaacaaccagtccaagttcatcaaaagggatattggcaaggtggtgaactattacaataagatccgggtagcagagctgaagatctgggatgacctggctcttggagaggagattatgattcagggacccacaaccgggagtatcacccatgtgatagagtctatgcagatcgatggaaaaagtatagagaaggccgagaaaggttccaatgtggccattgccattgacgaaaaactgagggaaagcgatttcgtgtataagctcgttcctcgcgaggagtga

SEQ ID NO: 3683 - DNA, 1443 bp, synthetic construct
  source 1..1443: mol_type = other DNA
ctaaaggacaaatgcggtatagtggggattcactccaaagactcctctaaggacgtgtcgcacctgatctactacgggctgtatgctctgcagcacaggggacaggaaagcgcaggaatagccacgtacaatattaactacggcctgaacttccactgcggaatgggcctggtcacggatgtgtttaacaacagcctcatcaatagcctcagcggaaacgtagggattggtcatgttcggtactccacgacaggccagtcaaaaatcgagaacagtcagccatttttcacagagctcgacgatggattcatcgccatggctcacaacggagacattgtcaactcaggtagcctgagggacgaactgaccaaaaaaggctaccaattcaagagtggcactgatagcgaggtggtctgctatctgatcaaagaggcctacgagaaggataaggacatcctcaacgtgatcgacgcggtgtcgcagaagctcatcggcagttattccctggtgattttaatcaatgacgagctgtatgtgctccgcgaccctatggccatgaaacccctcatcctcggccaaaccaatgatcactttgttgtcgcatcagagagcgtggcatttgacgtcatagatgctgaaatcatccgggacatggcgcccggggaactgctctacttcaagaataatgagattaactcgtatatcctgccaagcgccaaagggtccagacgcgcccattgtatgttcgaatatgtgtacttcgcgcgtccagacagtgtcatcgatgatcgcagcgtgtataacaccaggcttcgcatcggagaggcattgtttaaggaaaaccctattgatgccgatctggtccttcccgtgcctgactccagcatcccggccgctatcggctactcaagagcttcagggattccctacggtgagggcctgatcaagaaccggtacgttggccgaaccttcattatgccaacccaggaggagcgggaaattgctgttaggctcaagctgaatcctctgaaacatgagttggtgggaaaacgggttgtggtaatagacgacagtattgtaagaggaaccacatccgaaagcctggtgcgaatccttaaggccgccggcgccaaggaggtccatatgctaatcgggtgccctccggtcatcgccccatgctactacggggtggctttggcaactaaggatgagttgattgcagcaaatttggaaattgaggaaatcagaaagcagttaggtgctgatacactgggctatataagcatagaatctcttatcgaagccattggcatagatggggacagcctttgtctgggttgtattaccgaagactaccccactgagatccccgaggatctggaggcggaatcctattatgactactatcaggacctaaaggatgccgtggaggaggacgagtga

SEQ ID NO: 3684 - DNA, 1413 bp, synthetic construct
  source 1..1413: mol_type = other DNA
atgaataacgattttgagtctgacgaatttaactccaatgacaacaacaataacgatttcgaatccaaactggtcgatatccgaatcgtgttgactgatctgaactatattgaagccattagcaaggcagtaagtaactttgacctgtccaattttaatgtcaacattagttcgatcattccaagctccgatattgagatcgcaaaaaacacgatcatcggcgctgatctggtgctcatcgccacaagtagtgattttgaaggcaaagagctgtacagtaacttcaagagggccttaaagacggattacaacttcgttgagtatttgaaattgccgtctctcgacgaactggaggattacgactacgattatgacgaggacaacacctttgaagacgagatagccaactccataatccgggcagggctctacagcatcagcaacctgagcagcatcaataagtctaaaaaggcctactataacgtgaaaaaggacttcgacgacagccggctgcgctttgaaaagattaccaaggaaaatgatatactcttgaacgaatcaaagcagattagggagaaaaacgagaagcttcgagaagaggtgaaaatacttcagaaagacctcgataacatcaagtcagattatagtgacctgaaaagccgcttcgaaagcattcacagcaaaaacagcctagaagtcttcagcctgatggagttatggcaggacctcttcaacgagaccttcaccgaggagatctataggtttatcctaatcagcacagacaatttccgccctaagaatcttatgatcggacagggtgccatttgcgccgagtcaaaggaagacgcgatggattggttgaagatcataaagactgcttttatcctcagtgacacaaacaagcaagagctcaatttcaacaacttcaacagcaacttcaagttcgaagacctggactccaacattagcagcagtcagaatctggattccaacatttctaacaccagatacgacctggattctaatgactccaatcttttttctagtctggactcgaatatttttaatgcgcataatagcgactcgtcagatgagttcatctacaacgagcggtttgaaggaaataataactcccaggaggaatttagacagctggactttgatgacgctttcgacctgaacgacaatgaagggcaggaatcattcaaccaaaatgatctggataattcctacaactccaaggacgacccctcagacgagataaacgtgttcaatctaaagtcccttaaaggcttcagagaggagtcggacgaggatgagtccgatgagaatggggactacagctatgatgaggatgatgacctcgacgaggctgacgacctgttcaatcccttctcaaacatctgggattga

SEQ ID NO: 3685 - DNA, 975 bp, synthetic construct
  source 1..975: mol_type = other DNA
atgattctgatcaccggaggggccggctacataggctcccacatcaataagcttctcaataaatccggttacgagactattgttctggacaacctgagcaaaggacacaagaaggccgtgaagtggggcagtctcgtaaacgccgatttgagtgacagtgataaactgagagagatctttcaaaacaatgatatcgaggccgtgatgcacttcgccgccttttcaagcgtggccgagtctgtggaagagccggaaaagtatttcaaaaacaacttcgaaaacacagccaatcttttaaggattatgaaggagtttcgggtacgcaaattcatattctcctcaactgcagctctgtacgggattccaaaggagatccctatcagcgagtcagcggaactcaagccaatcaatccctacggggagagcaaattaatggttgaaaacctactgaaggacgagagcgactttgggggattgaaatatgtctcgctccgttatttcaacgcagctggtgccgatctggattgtgagatcggcgaagatcataatcccgagtcgcatctgatccctctggtcttggatgccgcaatcggaagacggaacagcatttccatttttggtgacgactacgacacgcccgacggaacctgcataagggattatattcatgtgcaggacctagctgatgcgcacctgaaggcactgcagtacctcgaagagcctttcaatgacagcaacatattcaaccttggcaacggcaatggcttttctgtcaaggaagtcatcgacacctgcaaaaaggtgacaggaatcgacttcgaggtgaaggtggaggggcgccgaccgggcgaccccgacatcctgatcgctgattccaaaaaagctgaagaagtcctcaaatggaagccagagtaccccgatctggaggacattgtggaaagcgcgtggaactggcacaagaagctccacgggtga

SEQ ID NO: 3686 - DNA, 1191 bp, synthetic construct
  source 1..1191: mol_type = other DNA
atgattaagaccgacgtcctggttatcggggccggccccgccggttcttcagctgcgaggtttgccgctaaaggcggcgtcgatgtgattctcatggacaagaagtccgagataggcgctccgaaaagatgcgctgagggtgtatccaagaagacattcgataagctggacctggagatggaccctcactgggtgacccaggagatcgcaggggtcaggctggtcgctccggacggcacagatgtatggctggatgaagatgtgatcgacctccccgaggccggatatatcctagagcggaaggtctttgataagcatatggccatggaggccgggcgcgagggagcccaaatcaaaatcaaaacccaggcgaaaggcctgaagcgggaagaagatggatcattcaccgtcacttgcgaatccatgggggagacctttgacattaatgctaagataattatcggagccgacggtccagagagccacgtggcacgctgggctggcttgaaggcatacaccaaacccaaacacatggaagccggagtgcagtttgagatgtgtaacgcaaagatggagaagagcaacgtgcttgaattttacttcggaagcgtcgctcctggaggctacttctggctgttccctaagggagatgacattgtgaatgcaggcctggccatcatcccagatatggctggagacaaatcggcctacgagtacttggtggatgccgttaacaactgttatgccacaaaggacgcacagcccgttgaactcaacgtagggggcgaccccgtgggcgggctcgtgaaggaaatgtacggcgacaatatcatgctgtgcggcgatgcagccagccaggtgaacccactgacgggcgggggaatcaccaatggtatgatgggcgggcgattcgctggtgaagtggccgccgaagcgattaaagcaggggactgctctaaagacttccttaagaagtatgaggatcttgtgaaagaggagatgggtcatgaaatgcagaaatatacgaaggtctgtgactacttatggacgctcgacgatgacgacctaaacagtatcgcccacgcgttccaggatatggagtttactaaaataagtacaactgagctggtgaaggcggtgattaaggttcaaccaaaagcagccttgaagttagggaagctcttcctgtga

SEQ ID NO: 3687 - DNA, 165 bp, synthetic construct
  source 1..165: mol_type = other DNA
atgatcgtaaaagactggtgcagctactgtggctgctgcgcgggggtgtgtgctcggaactgcatagaagtgaaggagaccgccctggtcatcagcgatgactgcaatgactgtggaatttgcgtgaaggcctgtcccctcgccgcactggaactagaggagtga

SEQ ID NO: 3688 - DNA, 606 bp, synthetic construct
  source 1..606: mol_type = other DNA
atgccgagttttttaaatatccggggcaacaatcatgaccccaaagacccacaactcatcagagacgggatcaagctgggcgtcaactacaaacggttctcgaaagagccagtcctcggaaagaatatcctgctgcggtcaaatacggtgatctataatgatgtgatcataggggacgacttcaagactggccacaacgttgtggtaagggaccacaccaccatcggggatgatgtgttgataggtacaaacaccgtcattgaaggtggatgcaagatcggaagcaacgtcagcatccagtccaacgtgtacattccacgaaacagcatcatcgaagataatgttttcgtagggccctgcgcctgctttaccaacgaccgctaccctgtgcgcgtggagtatgatctgaagggccctcagctaagaaaaggctgtagcgtgggcggaaacacaacattcctgtccaatattgaggttggagagggcgccattgtcgcagccggtgcagtggtcacccgtagtgtgcccccttactatctggcgatagggactcccgctaagattaagcccctcccaacgtcccttagggtgccgaacatgatttga

SEQ ID NO: 3689 - DNA, 312 bp, synthetic construct
  source 1..312: mol_type = other DNA
atgaccaagcacgtctgtccaaggtgcggaagcacgaacgtggagtggatcataccccagaactggagcaagtgggagtgccgggactgctcatacacaggcccgatcatcgacgcagacgacgatctgattgcggaaatcaaggccgattgggaggagaataaagaaaaatacatagaggaagagtatgcacgcgctgaacagatggcctccggggaagatgaaagactggacgaggagatggagattgccgaggaggacgagctcagtgacgaggaactagataagaaactggaagaactcgatctttga

SEQ ID NO: 3690 - DNA, 1161 bp, synthetic construct
  source 1..1161: mol_type = other DNA
atggtgtacgatgtgagtgctcttttaagtcacattaaccgaataaggcgcgagatcggacacgaagaggtgaatatcgagatcaaagaggtcttgtataacattgaaaccaacgagatgtggatcatcaccaatgaccgaccggacaagtccgccgttattggcaaaggaggatgggtggttgggagactgagggaggagctccagataaacagcatccatgtggagagctactcagacttcctgacaaaggaataccgcatgggactgtccctgaataagctcaaaagctttgtcacaacagaagacctgagcgacgacgtcaagctatccctgtacaatctaatcgacttgctgaccatcaaatcggataatttgtactcctttgacttcaagtcctactttgacgacctggaaaacggcccgtattcgtatttcgaagcagagaaacctgtcgccatcgtcgccctgtctggcgggaccgacagtagcttcagtttgattcttgccaaaaaactcggcttcaaccccattgccgtaaccgtagatcccgggactatcgtgcttccaaatcagttcaaatataacattgacaagctgaccagcaagctggacgtcaagcacgagtatatcccagtggcgtacgatgatatcatcgaggattcactggcagggcggttccatccctgcgggaggtgttcaaagcgcatagaggaaacgttatttaagtacgccgtagataacgacattcccatggtgatatttggcgacatgctgtcaacgggcagtcagtgcataaccgagcagttttacggtgaaaactctgaggatagcgtgtctcaggatctggaggactcggtttcttccgacttggaagatagcttcaatactgagctggaagactccatcaaccacaagcttatcagacttaacctacccgccgcactcgctgtgtccaagctggagaataaagcgctcacaagccattatgaactcaacaaattcaagggcttcggatgccctctcctgtacgaggtgcacaagaagttcccacacatgaagaagtactccattcaaagaatcctccgggagactcggtcaagcgctctggagcctggtgaagctctcgatctgatttggagtttttataaaacggattga

SEQ ID NO: 3691 - DNA, 1419 bp, synthetic construct
  source 1..1419: mol_type = other DNA
ctgaaaattagaactggcagactcgagaaggagatgacggacgaagctgcggtctacacatcttcactcgaatttgaccgtttcatcttcgatgcagacattcgctgcaactacgcgcacacctccatgctgaaggcccaggggatcatcgacagcgaaatagcggataagatcctcgatgccttggataagctgagtgaagagggcttcgatgccctggagttcgaccactccgtggaggacgttcatatggctgtggagaactatgttacaaagcttgtaggtcccgaagctggcttcatgcacactgccaaaagccggaacgatcaggtggctacagacatccgactgcttctcagggatcggatcagcgagatacagatcgcaatactcgaatttattgagggaatcctggagctggccaaggaacacaaggagacggtcatgatcgggtacacccacctgcagcacgctcagccaattaccctggcccatcacctgatggcgcatgctcaggccctcaaaagggactaccaaaggctcgatgacacctataaacgggtcaacctaaatcccctcggctcggcggcaatggcaaccaccagtttccccattgaccgcgaacttacgacacgcctcctgggctttgatgactaccttgagaactccatggatggtgtatcatcgcgagaccatattgccgaggccgtgttcgacctgactgcactgtgcacaaccctaagcaagatatgcgaagagcttgtcctctggagcacatatgagtttgggatcgtcagcatggccgacgagtacagcagcacttcctcaatcatgccacagaagaaaaatccggacgtggctgaggtggccagatccaaatgtgctattgtgaacggagagctcatgaccatcctaaccattctgaaggccatcccatacacttataacagggatctgcaggaaatcactcctcatttatggaatgcctgtgatgtggcctatgacacgctgaaaatcacaaaccacatgttgttaactgtcaccttcaacacggaacgctgcctggagcttgcaggtgctaacttcgccacagcaaccgacttagcagacatcatggttagggaacggaagatacccttccgaaccgcacacaagattgtgggaagaattgtcaatgaggccgtggctgaaggactgaatccaagtgaaatcgatggagcctacgtggacaatgtggccgacgagttggggtttgataaattgaacctggatgacgatctgatccacaacgccctgaacccgattgagaacgttaagatccggaatgtacccggcgggccttctcctgaaatggtgcaattggctattgacaatatgaatatatttctggacgtggagtttgagaaacaaggcatctga

SEQ ID NO: 3692 - DNA, 159 bp, synthetic construct
  source 1..159: mol_type = other DNA
atggcaaccaaaaaggagctgtacacagtggaaggggataaaatcgtcaggaagaacccattttgcccccgctgcagcgagggcgtgttcatggcggaccacggcgaccggtatgcctgcggtaagtgtggatacaccgaaatgaagacgaaagagtga

SEQ ID NO: 3693 - DNA, 315 bp, synthetic construct
  source 1..315: mol_type = other DNA
atggaaatagaaattaccgagaagaaagagaacatcctcttcgacaggacggaagttaaatttaactgcttgtacgaaggcgaagcaactcccaaacttctggatgtgaagagcaagctggtggctctactggacaccaaaaaggagctgatcgtcgtggacaatatccagccgggctatggggagcctaaagcaacaggttacgctaaggtctacggacgggaagcctccctcctggacgtggagaagccaagcgtaattgccaagaacaaggagccagaagcccccgccgaggaggaggatgaggcggagtga

SEQ ID NO: 3694 - DNA, 501 bp, synthetic construct
  source 1..501: mol_type = other DNA
ttgttcagaatcgatgagaacagcattgacgaatttaagaaaccactgggagtcctgtaccctgactttgaagatgccatccccatgatcaaggaggccagtttcctaatcagcgttggagaccagactattaagaatcttctcgataacgatctgtatccgaacctggggatcattgacaaccggattcaacggaaagatcacaaccatgacattatccgaacagaaaacatcctcaaggcggacaatcccgcaggcaccatcacggaagacctctgggagaccatagagctggctatctcctcaatacttgaggatgaggacactcgcatcattgaggtgaaaggggaagaagacctggccgtgctgccatgcttactgatcgcacctgaggatgccgtgatactgtacggccagcccaacgagggcttggtctttgtaaatgtgttcgaagccaaagacaaggctaccaggctcatgacattcttcaataaggagtga

SEQ ID NO: 3695 - DNA, 831 bp, synthetic construct
  source 1..831: mol_type = other DNA
atgggatacctcacagatctcttcaaggaagcccttgtctaccccctcagcaacatcgtgacattaattattctgggcgtactgctcaccatcagcaagttccccaacgtgctcagcagttttggagtggatgtcgattttcagttaatcatcatctttgccctaatttcttttgtcgtgtcacttttcatggacggctactcactggctgttattaaggatgcagtggacttcaacgtatcgatgcctgcttttgacattatgaaaaacttcatcgacggcgtgaaggtctgggtgctgaaaatactgtactatattatcccgaccatcatcacaatttttgttgcgctgctgaccggcggagttgacgcaatcctcaatatcttcaggttcatcggtgagaatcaggagctgctgtccaatctaaataccccagccgagttgataaatgccatccctcaagaatacattgctactttcctgactagcctcttcattaccgccatcgtggcaattatcctgtacattatctttgggcttctttacaacattggcctctgccgcctggcgaaatacgacagtttcaatgaggggataaacttcaaggccatcatcaacgacattaaggccatcgggcttggtacgtatattctatggtatattatactgttcctgatcatattcgccatatccatcgtgatgggcctgatcgcagctattccatacatcggaatcatactgctgaacttgctgtttgctccctttatcttcttgttggtcaaccggtccctggggctcttgtatacgaaagccgaagggtataacggctga

SEQ ID NO: 3696 - DNA, 183 bp, synthetic construct
  source 1..183: mol_type = other DNA
atggcgcttcaggcctgtacccactgcaatctactcacggaaaagcaacagtgcccagagtgcaagaacccgactagcacaaactggagcggcctgctgatcattaccgatcccgaaaactccgacatcgctcgggagctcgggataaaaaaagcaggagagtacgccctgcgcgtgaggtga

SEQ ID NO: 3697 - DNA, 570 bp, synthetic construct
  source 1..570: mol_type = other DNA
atgacaacaattgagggcactgtgcgcatccccccacaccgattcggtgagcccttggaggacgtagccatcgaaactctcaatgagtcctacaacgggcagctggataagaatctgggcctgattgtcggggtgaccagcattgaagagatgggggagggcgttctcattatgggagacggagctgcttaccacaatgtgatctttaacgccatcttcttcaagcctgagcaacaggaggtcgtagaaggagaagtgattgacatagccgagtttggggcattcgtgcggatcggaccgatggatggtcttgtgcatgtctcacaggtgaccgatgattatataaactacgacccaagaaacgcgtctctaatagccaaggagtccaaaaaaatcctcacggaaggcgaccgggtcagggcgcgcatcgtgaccttaagtctgaaaggcaaaaccgttcaggaaagcaagatcgggctgacaatgaggcagcccaaccttggcaagtttgagtggatcgaaaaggagaaggcaaaagccctggagaagaaaatggctaaggtggaatga

SEQ ID NO: 3698 - DNA, 402 bp, synthetic construct
  source 1..402: mol_type = other DNA
atgaaaagtgagtccagggaagtttttatagatactaacttcttcatgattcccttccagttcaatgtggacatcattgaagagtttaaacgggtgctgccaaactacaaactcgtgacgaccaccttcgttatcgatgagctcaagggcctgaagaacaacaacaaaggaaaggtccgactggccgcagggttggggctgcggatagcccaatcagacgagatcgagattaggaacgtgagcttaaatgatggagaaagcgtggacgacgccctgattcgcatctctaaggtgttggcaacaaatgacatcgtcctgaagaaaaaagccaagaagaatggcatcgcgctggtctttctaagacagaagaagtacctcgctgtagatggctatcttgcttga

SEQ ID NO: 3699 - DNA, 1224 bp, synthetic construct
  source 1..1224: mol_type = other DNA
gtgaaagtgcagtcggatgtgaacataggactggtgggccatgtcgatcacggtaaaaccacccttactaaagcactctcgggcgtctggacagatacccactcagaggaaacaaaaagaggcatatccattcgtctgggatatgccgacattgagtttcgcaaatgcccaaactgtgaggagcctctctgctacacgactaaagaggtctgcgaacactgcggcagcgagaccgagctcatcaagaaggtctccttcgtagacgcgccaggacacgaaaccctgatggccactatgctttctggggctgcaattatggatggcgctgtgttggtgattgctgccaatgaagagtgcccccagccacaaacaaaagagcatctaatggcactggacgttatcggcgttaaagatgtagtggtcgtgcagaacaaggtggacatcgtgccccgcgaacgcgctatcgaaagttacaaggagataaaggaatttgtaaagggcacttgtgctgaggacgccccgataatccccgtttcagcgcagcagggagcaaatattgatatcctcatcaaggccattgatgagacaatcgtcacgcctgagaaggacttagataaacctgccagaatgcacgtggccagaagcttcgacatcaataagcctgggtcccaccccgacaagataaaaggaggcgtaatcggaggcagtctgacgcaggggactctgaaaattggggacaccatagaaatcaggccgggcatcaatgtgaaggaaaacaagcagaacaagtggatcagcttgagctctgagatcatcggtctccaagccggaggcgaggctgtcgaggaagtgggacccggcgggctcattggagtggcgaccaagcttgacccagcactaacgaaggcagattcattatccggttctgtggccgggatggagggcaccctgcccgacgtgctgcatagcttcgacatgaaaacagagcttctggaacgggtggtcggtaccaaggaggaaagggatgttgacccaatcaagctcaaggagctgttgatgattaactgtggtacaacaaccactgttggtatcgtgaccagtgtgaagaagaacattagcgtggacctgaaactgcctgtctgtgccgacaagggggatcgagttgccctgtcccgaagggtcggcgcccggtggcggctgattgggttcgggatcatccagtga

SEQ ID NO: 3700 - DNA, 390 bp, synthetic construct
  source 1..390: mol_type = other DNA
ttggcattcaaaattgtggtatctgagaaggagctgagctatcagctcgaagtggaggaggcgaaacaactcaacggtctgaccatcggcgaagagtttgatggccagattgtgggactggacggctacacactaaaaatcactggggggtccgacaagaatgggttcgccatgaaacgcgacgtcgatggtccacggcgaatcaagagtcttctgacaggcggagtcggctacaaccccaaggtggatggagttaagaggagaaagaccgtccggggaaacactatatcagaagacatcgtgcagatcaacacgattgtgaccaaggctgggagcaaatccataccggaaatcctgaatcctgaggaggaggaggaagccgaagagtga

SEQ ID NO: 3701 - DNA, 1791 bp, synthetic construct
  source 1..1791: mol_type = other DNA
atgaagattagatcgccaattgtgtccgttctcggccatgtcgaccacgggaaaaccaccttattagattacattagagggagtactgtagcggatcgagaagcgggggggattactcagcatatcggagctacggaaatacccattgatacaattaacgaaatatgcggagaatttatttcaaaactagccattaaagatacaatcccgggcttgttcttcgtagacactcccggccacgccgccttcacctcacttcggaagcgcggcggagcactggccgatctggccattctgattgttgacatcaatgagggcttcaaacctcaaacctatgaggcaatcaacatcctaaagatgtacaagaccccattcattgtggttgcaaataagatcgacaggctcttcggctgggagactcatgaaggggcctcctttatggaaagctacaataaacaggctccccgaatcaagtctgacctcgacttgaagatttatgagcttatgggcaagctgcacgaggaaggtttccagtctgagagattcgaccacgtgactgactttgcaagccagatatccattgtgcccatctgtgcaaaatccggggagggagtcattgagctgatagccctgttgctgggcctggctcagcaataccttacacagcaactggaaataagcgaagatgccccggcgaaaggaacagtgctggaggtgaaggaagaggtgggccttggaatcacagtggacagcattatctacgacggagttatccgcgatggggacgagattgccctcatggatgctaacaacgtggtcacaacgaaaatccggtctatcctacggcctctgcctctggaggagatgagagactccaaaaacaagtttaaaaaagtcgatgaagtcgtggcagccgccggtatcaagattgcagctcctaaccttgacgatgtggtttccggctctcccctgagggtactgagcgaccaggaggatgtggaagcggaactcttgaaggaactcgaagacatcacggtcgacaccgacgatgagggcatcctggtcaaagctgataccttaggttccctggaagcggttgtgcacttgcttaaggagatggacttgccaatccggagcgctgaaatcggagacatcagcaagagggatgtcatcaacgcatcaatcgcaatggacgaaaacgaggaatacggcgtcatcatcgccttcaatgtcaaagtgcatcctaaggctgaggatgacctgaaaaatagtggcgtaaaactctttgccggcgacgtgatctatcagataaccgaggactacgaggcctggatagaggagcggaaggaggctcagaaaaagcagtggctcgacgcaatcatcaagcccgccaagatcatgattctgcccaagctcatattccgtcagagcaagccggccatctgcggtattgaagtggaggccggtacaatcaagacgggatattcgctgatggatgccaatggcgactatgtgggtgtggttgctagtatggaggataagggggaaaccctgcaggctatgccacgcggccaaagggtggctatggccataaacgatgccgtggcggggaaggactttgaggagggagactcactgtacgtggacattccagagaagcacttcaaggtcctcgaacgcgagtttaaagacaagctcaccgaggatgagtttctggccctagatgagatcgtggagatcaagcgcaagcgagatagtgactgggggaaactcgggctgttcgagtactga

SEQ ID NO: 3702 - DNA, 453 bp, synthetic construct
  source 1..453: mol_type = other DNA
atgatcgagcgcagctttgtcatgatgaagcccgacgcggtgtcccggagactgatggggcagattctgagccggttcgaggacaagggactcaaaatcgtagccatgaagctaagacagatcgacgaggatcttgccaaagaacaccatggtgagcacaaggagaaaccattctttggcgggttggtggagtacatcacaagctcgccggcgctgaccatggttatagagggagacgacgccattagtgtgatcaggaaaatggtcggggcaactaatcccaaggaagccgatatcggcaccattcgcggagacttcggcatggacacgggcaggaacataatccacgcatccgacgcacctgaaagcgctgcccgagagatcgccctcttctttgatgaggaagaaatttgcgattattcaatgagtgataacgcttggatttacgaatga

SEQ ID NO: 3703 - DNA, 162 bp, synthetic construct
  source 1..162: mol_type = other DNA
atgagaacctgcagcttctgcggcaaagaaatcgaagaggggacgggaaagatgtacgtgaaacgggacggtacaatctatttcttttgctccagcaagtgtgagaagaacatgattaagctgggccgcgtacccaggaaagtgaagtgggtcaaacagtga

SEQ ID NO: 3704 - DNA, 207 bp, synthetic construct
  source 1..207: mol_type = other DNA
atggaggaagggagcccagccgaggtgatagaagtactacaccgcaccggcatgaccggggaaatcatgcaggtcaagtgcaggattctggaaggacgagacaaaggacgcattctcacacggaacatcatgggcccggtgcgggagggcgatatactgatgctgctcgacacgatcagggaggcaaaggagatcagaactccctga

SEQ ID NO: 3705 - DNA, 408 bp, synthetic construct
  source 1..408: mol_type = other DNA
atggatggcaagagccagatgaaaaaggaggtaaattatatggccaacatttacgtgaagtttgacacacccgaggagatcgcgaacaaagcagaagaagccctggaggtggcacagaatacggggaaagtcgccaagggaacaaacgaggtgaccaaattcatcgagcggggaaacgccgccctggtcgtgatcgccgaagacgtcgatccggccgaaatcgttgcccacattcctgttctcgcagaggagaaggagataccatacgtatacctcgcgaccaaggataaagtgggtgcagctgctggcctgagcgtgggcactgcttccgcttgcatagtcgacgccggggacgcggctgaccttgtggaagaagtggtcgagaaggtggccgagctaaaggaatga

SEQ ID NO: 3706 - DNA, 198 bp, synthetic construct
  source 1..198: mol_type = other DNA
atggaactcccaatcgctcccataggccggatcttgaagaatgctggggcagagagggtggccgacgcagccaaagaagagctggcggaagcaatcgaagagtacggaaacgagattgctcagaaagccgtcaacttcgcccgccacgcgggcagaaagaccgtgaaggccgaggatatcaaactggccattaagtga

SEQ ID NO: 3707 - DNA, 1197 bp, synthetic construct
  source 1..1197: mol_type = other DNA
atgattagatgcgtgagctgtggagaggagtacgaggatgacgaggtgatctacaactgtaagaagtgcgggagcgtactggaggtggaaatggaggtcgatgttcctaaatccaccttcgaaggccgccgggataacctctggaaatacaaggagtgcctccctgttgatgccgataaaagggtgtccctggatgagggcggcacgccattctgccgatgcgaaaaactgggcaaggaactgggcattgacctctatgttaaagtggaaggatcaaaccccaccggcagttttaaggacagaggaatgacaatcggtatgaccaaagccatgatgctgggtgtggacacggtcgggtgcgcgagcacaggcaacacctcagcctcccttgccgcttatgccgcacgtgcgggactgcgctgtgctgtgtttctgcctgcaggtaaagtggctctgggtaagttggcacaggcgatgttccacggtgccgaggtgttctctatcaatggcaactttgacgaggccctggaggcgatgactcagctggcccgggagaaatacctatacctcctcaatagtatcaacccattccgcttagagggccaaaagaccatcgggtacgagatcgtacatgacttagggtgggaaagccccgacaggatagtcttgcccgtgggaaatgcaggaaacatctcggccatctggaagggcataaccgagtttcacaatgcaggattcatggacgacgtgccaatgatgactgggatacaggctgagggggcctgtccgattgctaacgcatatcgggataatacaatggacatggtgcccgtcgaaaacccagaaacaatagcaacggctatccggattggagctcctgtcagtgccgtgaaggccctgcgagccatctatgattccaatgggatggctgaaaccgtaactgatgaggagatcctggccgcccagaaactcctggcaaggacagaaggcgtaggggtggagccggcttctgcggctagcattgccgggctcaaaaagctagtggaacaaggcgacgtcgataagggagaaagagttgtctgtgtcgtcaccggccacttgcttaaggaccccaacactgccatcgatgcctgcgtggaccccgttcaggtggacgcagacatcgacaagattaaggagattctgcttaataagtga

SEQ ID NO: 3708 - DNA, 702 bp, synthetic construct
  source 1..702: mol_type = other DNA
atggaggactttaaatattacaagaataagatcaaagaggagatcaagctcgcattcgcgcacaataaatacttcctgatcgtctctgccctgattttcatcatcccgatgtttgtcggatatttctatagtgaccagattactccatacattcagcctatggttgatacctttgaggaaaacattagaaacgggaccgtgacgctgagcaccaagtccctattcgccaataatgtcgaagtggctataatcctatatgcattaagcgcccttggggcgattcttggcattgtcgtgctggccaacaatggcttgtttattggattttacggtgccaacttcgaattgacacgctatgttctcctgaccttgccccacggcatattcgagatctcagccatcatcattgctacaacaggaggctttgtgatcctctcatttgtgctgaacttcctctataacgtgatatacccagactacagctacacggatatattcgacccctacttcagcgatgccaagatcactgtgggccaacggtttaaatcctctttcaaaaagcacggtcataggatcaaggaaagtttcattctgctgtgcgtatcggtaatccttctcataattgctgctttcatcgaggcaaacatcaccatccccttcgcatactggatttgttccctgtttgggatcagcctgatctga

SEQ ID NO: 3709 - DNA, 1092 bp, synthetic construct
  source 1..1092: mol_type = other DNA
ctgattgatccatgggcctcatttagcctcgattacgataaacttgtaaatcaattcggtataaaaaaattcgaggaggtgctggacagcatcgaagatcccgccagacttatgaaacgcggggtgatctttggacaccgtgactttgacaagctcgtgcccctcatcaacggcggcaaggatttcgcagtgatgactggtatgatgccaagtggccaaatgcatatcgggcacaagatggtcatagaccagctcaattggtacttcaaaaaaggcgccagcttgtccttatccattgcggatatggaaagttacgccgccaggggaatcagcttcaatcaggcaaaggacattgccataaatgagtatttaaaaaattacatcgcattgggccttgacctcacggcagataatgtgaacgtctatctacagtcccagaacaagacactgaacgacctgacattcaagctggctaaaaaggtgaacttcaacaacatgcatgccatctatggatttaatgaaagcaccaacatcgcccacctgtatgtgccgctggtgcaggttgcagacatcctgctgccccagaccgaagagtttggagggcctaagcaggtggttgtccccgtaggtgttgaccaggaccctcacctcaggctgacccgcgacattgctgcgaagatgaacgaggagtacggatttctggcgccagcttccacctatcaccgattcctaactggcctgacaggggataagatgtcaagtagcaagccgaacacggccatttacttgaacgaaactcccaagcaggccgagaaaaaggtcaaatcttctaagaccggcggaagagagacactggatgaacagaaggaactgggcgggcggcctgacgaatgcgtgatctacgagatgcttgtctaccatctgattgatgatgacaaggagctggataagattcgggaggagtgcatcaatggggagctcatgtgcggccattgtaaggtgcacaccgctgagctcatgaaagacttcttcgaagacttgaaggtcaaacaagaagagtctctggacatcgctgagtcgctactcgactga

SEQ ID NO: 3710 - DNA, 516 bp, synthetic construct
  source 1..516: mol_type = other DNA
atgcggggtgatctgagcgacgggatagttacagtcaagataggggaggggaacgaaagagctatctcccttaaccagaaaagccagttcggtaagctgtcggaagactgcttggagctcagtctgatggaagcgtcctacctaatggagagcggacgcctcgatatctatgaggatgacgaaaaatgtcagctcgattatatcattgacatgatcaaagaccaagacctctatgggaagtacttggtttaccgcgatcttaaaaatagaggctacattatcaagacgggcttcaaatacggcagtgagtttaggctgtacgagaggggaaccggccccggcaagtcccactcagacttcctggtaaaggtgctgtatgaggccaacgaagtgaatgtcttagacttcgcaagctacgtgcgagtgtcacatggagtcaacaagaagctgctgctggccgtggtggatgatgactttgacgtgacttattacaatattgagtggacccggccatga

SEQ ID NO: 3711 - DNA, 654 bp, synthetic construct
  source 1..654: mol_type = other DNA
atggcgcgggaaatctccgagaacattgaagagtatctggagaccctctacaaatttggaagtaaagatagctacgtgtccacgaccactctctccaaggaactgggcatagctcccgggagtgttacacagatgctaaagaagctcgaggacatcgggtatattgactatgtcccttacaagggagcattcttaaccgccgagggcaacaagatcgcgcagaagattacaagaaaacaccgcatcctggaaaagttcctcaaggatgtccttaacataaaggatgagaacctccatgcccaggcatgcgccatggagcactctctgagcgacgaggccgaacgggccatctgccacatgctggagcatccggacacttgtccagatgataatatcatccccgcatgtgactttaactttgaaagctgcgaagactgcctgaacgaccaccttgatttcgacgacattgaagagagggacttcaatctgttctcaatttcacaactgtctaaaggagacgagggggaggtattgttcatcaggggctcggatgatgctctggcccagtgtgtgcgagtgggcatcaccgtgggtagcaaggtgaaaatagaggaaagtgagagcccaaattttttgttctaccactccaaatga

SEQ ID NO: 3712 - DNA, 1449 bp, synthetic construct
  source 1..1449: mol_type = other DNA
ttgagtagcaatagtctgagttctaacgaactgaactccaatcagctcaattccaaccaactcaattctaactcgatttcaaacagcaattccaactctaatcaaaaagccaattcaaaagactcgcgtctgatcttgctcaacgacaagaacctgaaagtgaacgggacggaagagaaatactttataaagctggtggacggcaacggtaaccctataccctacgtggatcttattttcaacatagatagctcaattgagtttgtgggaggtaccgttcgaacggacgagaatggaatcgcttatatctttatggatttcagttaccctggtccatacactgtgtatgcttcatttgagggtgatggcaatcataatccgtccagcacgttaagttctacagtctccgtgtataaagacacggagatcagctcactgcagtcgtacggctatcttggagagaacttctccttcaagattacaagttgcggggagcccgtatccaaccagaaggttcttatcagcattgacaacaagaactacaccgcaacaacagactccgaggggatcgccaaggtcaaactcccaaaccagcagaagacctattcaatctcctgtaattttagtaaccgggtctattactacggctcgagcctgagcaagaacatccccgtgtataagagggctttcacccagccaaattgctatgccctgttaagaaaaagcaccttcaccgtgaccctcaagggagcagatggcaagatcctaagtaaccgcaccttgagattcattgtggacggaaaggaatataacaaaacaactaactccaaaggggcagcttccatcaacattgacctggaacggggcgagtaccggatcaattactacttcaacaccgacggggtttacgggcccgtcagcaattacactgacctgaatgttgtcgaccctagcggccagtacaaacgccttctgaatgtaaagagcagcgcgtccgctaagatttacctcactggcggcggatatgccacagtcaccagcctaataaagagcactgcaaaatccatcactaaaaagtacaagaccaactttgaaaaggcagtggccatctataattacgtaagggataatttggattatcaatattactacaacacaaggaagggagccacgaaaaccctgaagaccaagtctgggaactgctgtgaccacgcgaacctggtggtggcgctctgccgggcctctggcatcccggccagatattccaactcaaagtactgtgtgtttggttcagggctgcgaagtgggcacgtctgggctcagatttacgtgggaggcacttggtactctgccgatgccacaagcagcaggaataccctcggccacatcgaaaattgggacacaaaaactaataagaaagattataacttccgcaacctgcccttctga

SEQ ID NO: 3713 - DNA, 348 bp, synthetic construct
  source 1..348: mol_type = other DNA
atgagccggacctggagtttctacaaaagctttaagaacctgatagtcggagtgaatattaggacaaagcttctgttcctttcagcattactgatactcctgctctccatctcgagcgtatcagccgacagcagcatcgacgactccaacctggacatcgacagcaatttgggcattgatagcaatttggacctcaacgccgacctgtacgctgatctgaacaacttcgatgattttaataacctaaacaattatgactactccaacaattatgtggattacagtgatattctggagggggactccctcatctggaaactgaagcgcatcatcattctcatcaactga

SEQ ID NO: 3714 - DNA, 3033 bp, synthetic construct
  source 1..3033: mol_type = other DNA
ctgcttttagccgtgctcttaatgggctttgtcctgatatcctcggtctcggccatcgatatcgacgaagccagttcttcaagtgacctgagtgactctagcattagcaacgactacctggtggcaaactctggagatgattctgtggccagttcaagtgcatcgagttcaattgctgccgatgattcagacctgtcgaacaacgctagctcaagtaatgttaacttcgaaaatgaggtgctcagtactaacaacaatgaggatacagagtccgaaatcgtaaaggattctaaaaatcagctgtcgtcatcttcgcttcaggccagtacgaaaactaaaaccacgctgaaaggcagtgggagctccgtctatcgcggcaacccatactatgtaactctcactgacagtaacggtaaggttttggccagccagaaagtgacgtttaacatcctcggcaaaaattacactcggaccaccgattctaaaggggtggcgtccatcaacattaatctcgccaaaggaaagtacaacatagcgtgcctgtacgccggcactgagaactacgcctcatccaagctatctgtagccttgacagttaatctgatgtccaccaaaatcaatacaggtggatcaaccgtgaaaaaaggcaacgcttacagtgtgaccttgactgatgggaatgggaaggcactgtccagtcagaaggtgaccttaaatatcctgggaaagaactacaccagaaccaccgattctaaaggtgtggcttccattgctatcaacctggctgctggtaagaaattcaccctcaccgcatcctatgctggctctgcaaattacctctcttccaaggtatcggccacggtgactgtgcagaaaggggataccagcataaagcctagcggcacgtccatcgtgaaggggaacagctacagtttcaccctggtggacgggagcggcaagggactggccaaccagaaggtcgccatcaagatcagcggcaagtcctacagccgcaccacaaactctaacggtgtggcctcaatcgccatcaatctggctgccgggaaaaaatattcgatagtctgctcttacgccggctcttccaattataaggcgtccagctcgaccgtaagtctctcggttacaaatccaagtacaaacagcaagactttctccattgcaaaaatagaggctgccgccactaacctaaaggcttatgtaaataagaataaggcagtgcctaccactgtcagcgttggcggaacgaacctgaaaatctcagagtttagctacctgatgtcaaaagccattgtcaatctcaactccaacaacactaacgccatcactctgccaagcggcatctataacggggcatcagcttccaatagcctgaacgctacagtctacaaggcccaatacgtggacctctccaaacgcgtctataactacatagacaagaacaaggtgcccgctgcttacgggaccgtttacaacgccaacggcgcctccctgggaaacgcaggatttaacctttacacatttgcatttgccaagatcttggatttccataaaaccaataaatatctaccgaattactgcagctttgacagtagcgtgttcaaagcgtccaatggttcgagctcaagcaacagctccagttccaccaacagttcaagctccacgaacagttcaagcggctcttccaactccagcggatctggaagttccacgcccgcagtgaccgtgaaggcgacaagccttaaggcagccagcacttccgtgatccgaggggatgactattcagttactctgacggacagcagcggtaatgctctcgctaaccagaagattacatttgccctgtccagttccagctacaccaggaccactaattcaaagggggtggccagcctgaccctcaatctggcagggggcaaatattccatcacgacgtcctacgcaggcacatcagcctacaaggcgagcaagcttacaaacacagtcacgatttcaaacagctcttccagattcttcttgaatgacattgaaacagccgctgagaatgtcaagacttacgtcacaaagaacaaggcgctgcctaacaccgtgacagtggccggcacccaactcaccctttcacagttctcctacgtcatggctaaggccattcacaacataaatgctagcaacagcaattatatctcccttaaaagcgtggcaagcagcaactctacaggagattacctggacactacagtctacagggcgcagtatatgaacctcaccaatagggtcatttcctttgtggagagcgataagattacgccaactttcgccacagtctacaacagcaatggcaaaagcgtgggcaaggctgaatttaagctgtacacctttgcattcgccaagattctagcgttctacaagaccaacaattacctccccacctattgcaccttccagagctcagctatcggtgttgtgccggacgttgccactaacgtgacaatcaacagcaagatcaatgccaatatgaaccagttcaaggttggactgaatgagaagaacaccgtcagcaacctgtcagcctatctggtggggaccggccagtccacaatcacaacaaacattaagaacgtggctgcgcagctaaccaaagggttgaacagtactgcaaccaaggccttggcaatatataattttgtgcgggacgacattagctacagctattactccgacagtcgtaaaggtgcagacgggaccttaagctctggatcggggaactgtgtggaccaggccagtttggttgtggccctctgtcgggcagccggcatccccgcacgatattctcatgcgcaaggatgtaccttctccagcggactggtaacaggacacgtctgggctcaaatccttgttgacggcgtgtggtatagcgccgacgccacgagcgtaagaaatagcctgggcaatattgtcaattggaatacaaattcctatcactctatgaagcagtatgctgcggtgcccttctga

SEQ ID NO: 3715 - DNA, 3897 bp, synthetic construct
  source 1..3897: mol_type = other DNA
atggaggataatctgttgaaaaacagaaaactaattttgataagtatcttccttgtgtccctgctggcaatttctgctgtaagcgcgaatgaggatgtggacaatggactcatcgactcagacgattctatcctgcagtcagcggaagtctcggactctgccattggaagtgactcgatcttgcagtcagctgaagtctctgattccaccatagagtccgactctattgaactggaagataagggtaacgttttaaagtcaagcgataatgcgagcttcgagctagacgataaaaataatataggaagcgccgattcggagctggaagacgattatctggagcccaaagagaagaatgtgctgtcaatggacgagaacgcttggttttacaattatattgtgtggtatgacggtgacgatggagattgggtgtcccttgattttgtagacgacctcaaaaatcccgagaacatcaccatccgattgaacagttacgacactccatttgacggggtggatctcgcggttattaatgactacgactacagcatcactaaactgaccacggatgacaacgggaccgtggtgtacaatgttccatacgaggtggatgaactgtcggtcttcgtaggcttctggtacgatggggactttgtggccacttatggaaactgggaaagttacaccatctgcgccgtgaactggggcacgtggtatagggacccctcgaaacggacttacgacttttatgtctctgtgtctgacatggacacttacgaaagtcccattggcgcccaggtggtgttcacaagcgactccaatcagtacgtcggaacaatagatgagaacgaacgcgccatcatccccaaggtcagctacggcacctatgatgtgaaggtcatatacgacggctactgcattctcaatctttcagattctagcgccattgagttctatgacgaccatcacaccgaccccgactcactgggggatgaaaggatcgattatatgtatgtggatagcagtggagttgtgtatctggacctgtgctacgacggttcgctcaaagtgccagacaactccacttatgagccttatggggatgacaacccatccgggggcggttcaggcaaccagtctggggggactgtggctaatggcaccttcacttcactgcaaagtctgtttaaccgtgctgccgcaaattcaacaatatccctgacaagggattacgtctacgacgacggcttcgacatcaaaggaatagtcattaacaaggacctgacaatcaacggtaatgcccacacacttgacgccctaggcaaatccagaattttctacgtgaacaacagcactgtcaaattcaacaatatcctgtttgccaacggtaatgccacgctcggaggtgccatttacaatggcagtgccgtaaactgtctgttcattaataatactgctcaggatgggggggccatttactacggcagcgctctggtgtgtgattttatcaacaactccgcatctcggaatgggggcgcgatctatagtggcggggccgtaaactgtagcttcattaacaactcagccaacctggggggcgctgccatttatgattccctgtttgctgtgaatagtacgtttgtgggtaataccttggcctctagcaatcctacaggggggagcgctacaaccgacgtttccgtggtgtcattcaaccccataactacctacatacctagccctccctccatgacaggttccattggttggggaggtgccgtgctggacttcaccaggcccgtgatctatacggactataatgaaaccttctacctgctgaccaacttcacgctgcagcaggatggctttaacaactacggcaatgtgcaactcacgggcagggacctggtcttcaagtccttgtatccttacagcggaaactattcaatggctcttatcatctctgggcagatctttactcctacctacgtccttggggaaaatgacacttatgaagcccactttaagctgaatggtctgtcgttagggctacacatggtttatgcctatgttgacttcggatatccggaatactatagctacagaattggtggaggctatatggatcgggttgcttacgatcgcactgcggagataatcttccctattctcattaataagacagtagaaatctcatcttccaatctgaacaagtactacggtggaaccggtaagtataccgtcactctaaccgacggcggcaaccccatcgccaacgctaatctcaacgtcagcctcgcgggcaagacctacccgttgaagaccaatgctaacggtcaggccagcatggatataaaccttacgcccggcacctacgaggccgtctgcacctatgacggagtttctcagagaagtaatatcattgtgcgcagcacgatcaatcttcagaacctcacgggcatttatcagaacgcgaaagtgaacgccaccttcttgaacgctgccggcagtccgctggccaacaccaaagtcagttttcgcgtagggtccaagacttactccgcaacaaccaacgctaatgggctggcgacagccaacgttgatttggctgccggcacttacgatgtgattgccatcaatccggtaaataatgagcagaagacaagcaagctcactatttccaaagcgaagtcgtcgatcagtttgagctctaccagcaacaatgataaggtgaccttaacagcaagcctgtccccctcaacggctagtggaaatgtgaccttcaacttaaacaataagaactacactgccaagatcagctccggcaaggccagccaaaccattactggactcaacgagggcaactacactgcaaacgcttactactctggagacagtaatttgaactcttccagcgcaagcacgaaggtggttgttaaaatagtcattccaacgaagatcatctacaaaaatatgaccacggggccagtggcaaaaagcgatggccgaatcggaaactacttctgtgtaaaactcgtggatggcagcaataacgcattaacaggccttcccatcaagataggcttcaacgggaaaatctatgaccgaacaaccgacagcaacggcgaggccagactgcagataaacctggcgaacgcggacatttacacctttgcaatctgctaccttggagacgatgatcatcaagcatcctttgaggtggccaagattgatgtgaacaagaagtacccaaagccaaacagtgccaatggaaactccaacggggtgcctgcccaagagaccatcagcaatacaaagctgaagacctatatccaatacagcaacatgaccaccaagtccgtccttaagtcagacggacgggtgggagactactttgaggtcaaactgctggacaataacaaaaaggcaatggcaaacgttccaatcaagatcgggttcaatgggaaaatctatgaccggacaacagactccaacggcggggcaaagctccagatcaacctcctcaagccaacaacatacacctttgctatcgcatacctcggcgatagcaaatatcaggcttcattcgaggtggctaagatcgttgtgaaagcccagagccctaaactgacggctcctaaaaagacatttaaggcaaacgctaagaccaagtctgtctccgccactctcatctccgagcgcggaaagccgatggccagtcagagcctgaagttcacaatcaacggcaagacatacaccgccaaaaccaactccaacggggtggcaacagtcaacatcagcctaaacaagaaaggcacctattcctgcacagtcaagttcgccggcgtgactggagcaaatgcaaagaccactaaaaccacaatcaaaattagttga

SEQ ID NO: 3716 - DNA, 1650 bp, synthetic construct
  source 1..1650: mol_type = other DNA
atggcccagataaaccagcctatgtatattctccgtgatgacactgagagatttcagggacgacaggccttaagaatgaatattttcgcaagtcagctgctggctagcatcgtccggaccacgctggggccaaaaggcatggacaagatgttggtggataagatgggcgatgtcgttgtaacaaacgacggtgcaaccatcctgcaggaaatggacatcgctcaccccgccgctaaaatgctagtggagattgctcggaaacaggaaaacgtggtgggcgacgggactacaactgtggttatcattgctggcgagttgctcaagaaggcacaggaactcatggaggatggcactcccgtgcccaccatcctgatgggataccggctcgctgttgcgaaggcaatggaaatcttgtttgacatttcattcgatgcccgcgataaggacaccctcttcggcattgcaaagactgccatgaccgggaaagggtctgactacgccaaagacgagctcgccgagcttcttgtgcaggctgtaaagaaagtcgaagagggcgaggaggtcgataagacccttattaaaatccaccgcatcaacggaggcagcgtggaggattccaagatcgtggacgggatcttcatcgaccagggaagggccaacgaaaccatgcccaaggagatccatgacgcaaagatagctcttatgaaatatcctctggagctaaaggacctcgagaacgctaaagtggactttaccgacccactccaaatgcagatatttcttgacaatgagcaagagatgctgaaggaaatcgcggataagatcatagactccgggtgtaatgtcctgttctgccaaaagggaatcgacgatgtcgtgcagcactacttgtccaaagaaggcatcatggccttcaagagagtcaagaacacggatgtgaaacgcatcatgaaggccaccggtgccgagctgatcacaaacattgaagacttaacgccagatgtgctgggaaaagccgattacatccaccaggaacgggtctttgaccagattctcacgttcatcgagggctgcgatgagcctaaagcaagctccatcctgataagggggagcacaaggcatatctcttcggaaatagaacgagctatggaggacgccctgggtgtggtcgcagcgacaatcgaagaaggaaaggtggtgagcggtggaggcagccctgagattgaaatagcccgacagttaagactgtacgctaattcaattggcggcagggagcaactggcgatcattgcctttgctgacgcgctggagattgttccacggaccttgtctgaaaatgccggtctgaacacaatcgatctgctagtggagcttagggccgcccacgaggacaatccgtatatgggcctggatgttttcgaggggaaagtggtggacatgaaggaggcgggggtaattgaaccgcagaaggtcaagaaacaagcaatccaaagtgctcaggaggcctgcgaaatgattctgcgcattgatgacctggtagcagccgccggagccctccagaagccagaccccgatgagaacctggataatagtggcatgccccctgcacccggaatgggggggatgggcggtatgccgcccatgatgtga

SEQ ID NO: 3717 - DNA, 780 bp, synthetic construct
  source 1..780: mol_type = other DNA
atgaatctcgagggggtagaaaaaacaatgctcctgaccctgtacacaaaggcaaaacatagccaaaagccaaaccacaaattctttgactacatggcgatagacataatcagcgaaatcgactacgacttttccatcgctgataaggacagatccatgcagatgggcgtaatctcaaggacaatcgtcctggacgatatggtgtctgaatacatccgcagtcacccaaagtgcacaatcgtgaatattgccagcggaatggacacgcgattcaaccggctggataacgggatcatcaagtggtacaatgtggacttggaaaactcggccaatttccgtctgaactacattaaggacacggagcgggtcaagaccctggcctattctgccatggacccctcatgggcagaggagatagaggcgagcggggatgttttgttcatcattgagggtctgaccatgtatcttactgaggtcgagaacaagcagattctggacatcattgatgaaaacttcaagagttgtactatctttaccgaaatcatgccgcctgtgagcgttgagaatgtcaaggagaaatccgtggaggaaatggatgccaaatttatttggggcgtgcaggacggctttgagctaaggcggctcaacccccgcttcaactgggtgaaggatgtgaatctttttgatggaatgaacgtctataagcccattaccaaactcttcacttggattcctttcataaggcgcagaatggatttcatcgctgtgttagaaaaatga

SEQ ID NO: 3718 - DNA, 438 bp, synthetic construct
  source 1..438: mol_type = other DNA
atgaaccgcaataaaatcattgtgttgctggtcctgcttatcgccgttgtgggctttaccatggggcccgcatgcgcagccagcactacaataaaagtgggcaactacaaggatgtggggaagggagatcgaatttcaacgttcaacgtgcctaaggacgcgcagtacctgaaaggagtgtacgctgtaatcttctatcacggcaagaacggtgacgacttccggccacatacctacgtactctccaagatcaaggtctattataagaacaaaaaaggcaaaatcgtcaccagatcctctacagccaagaatctcagcggactgagcatactatccaccaaacaggtttcggggtacacaccgtataagatggacgtcagttacaggaagatgactaatgctgagaagaagaaaatttgtggtagtctggtgtactga

SEQ ID NO: 3719 - DNA, 975 bp, synthetic construct
  source 1..975: mol_type = other DNA
atgatgcgaaagaatgatagaagttccatcaatcccttcaccggcaaggagcactatgacactgtcgacgatgacaaattcctggaaggctgctttcaagggtactatcaggagctgcagcgctcccagttgttagacaacacgccagaaggccagtttatcgtgcaagtggccgtcaaactgatcaataccgttaatgaatttcttacaaagataggacgtcaggactacgttgagggatattacgagtgggatgtgcatctggttgcaaacaacagcgtgaacgcctgctgcatgcctggggggaaaattatcgtctattcaggtatcttctcaattgcgaacacggaagagagaatggcgttcatcctggctcacgagatggctcatgccctccttgaccacggacggacccgcgccagcgcccagtccacaaagaacacagctgcttccgtggcgtgggtgggaagctttgcgctggacatggtcggtctcggcggtctggggtctctggccagggcagccaccaacattgccagtgtcgggtcccaatacttcctcctccagccgtggggaagggaccatgagttcgaggccgataaactcggcatgattatctgtcacctggcaggctacgacatccgggaagtgcccaaattctggaaggaatttgcaggcgacaaggcaagcaactttgatttcttttcaacacaccccagcgacgccaagaggatagaggtgatggaagcctctgaaatagagattctaaacaccactgacttctacagcaagccagtattgccggagacacctaaggccacgggggaacggaagaacactaatgccaagccccaggagcctcaggctaaagccgtggctgataacaaatcgactcacttctgtaccaattgcggcagtgaggtagctccagatgataatttctgtaccaattgcggcgcaaagatcggaaaatga

SEQ ID NO: 3720 - DNA, 201 bp, synthetic construct
  source 1..201: mol_type = other DNA
atgatcgaggagcacaaccagaaatccgtcgaagagctggtggaaaacttcagctacgtatacgtgtattttgccgacggccggagtatcaggatcagcaaggaaaaaaagttcgaatttaaagacaataagttctacatttatgataaggacatcgaggtcaacatagtggatatagagctcattgagttcaccgactga

SEQ ID NO: 3721 - DNA, 858 bp, synthetic construct
  source 1..858: mol_type = other DNA
atgaaaaaaagcgtttttaaaattctaatcgccctggccctaatccttctggctgtaagcatcgttagcagcaatgacctctctgattccaacgtgagtagtgacctgactgtggactcagactcgataagctctgacgacaccgggagcagcgataccagttcagatgactcaaaccaggacgacgtctcccaggataagacgaacgacaaaaagctgtccgattcccagtcagatagtagtaaagatactcaagacaccgacgataataacactgataatggttcggacaagtgcaacctgattatcacaaaaaagggcaatgaaaaagtcaaggtgggcgacacggtggagtggacaattgaggtcaagaacagcctgaacactgccgaaaacatctcagtggatgagttcctcccgcagaacttcgagtttaagtctgctaaggcaagcaaaggcaactacgcagtggagatcgccaactgggacattgggaatttgaaggaaaacgaatctgcaaccctggtgatcaaggcgcaagccctgaaggctggcaacttcaccaacgtggccaacctcaccaccgattccgacaatatcaatggaaaggtccttagcgctaaggcagatgtggaagtgctgtccgagaataaaaagaatgagacgcctgtaggtcccaagaagaacaaggacaacaattctacagtcaaaaagattcacaaattaattaagaaccagacaaacaatacaaatatgaccccaatcgacttcaagaaatccggaaattccctcttcgcggtgataatcgccgccttggcggttctcgggatatttctgggacggcgcaggatcaactga

SEQ ID NO: 3722 - DNA, 1221 bp, synthetic construct
  source 1..1221: mol_type = other DNA
atgaaagctgatgcctacaaaatagttgacaatgtgtactgggtcggtgttctggactgggatattcgggactaccacggctacaccctggatggcacgacctataactgctacctggtgtttggtgaggacaaagtggctttgattgacaatgtctatcccggaaagtccgaacagttctggggccgaatcaaggatgcctttgagaaagagggacgcgaatttaaaatcgacgtagtcgtgcagaaccacatagaaaacgaccacagcggctctctgggagaagtggtggccaagttcccagatgtggaggtgtactgctcgaaaaaggcagagccggggcttaaaaaccacctgcccgagttagaggacttcgagtttaacactgtaaaaaccggcgacacactcgacatcggaggcaagaccttccagtttgtaaacgctcctatgctgcactggcccgacagtatgttcacaatgttgatggaagacgggatactgttctccaatgatgcattcggtcagcatatctgtgttagcgagcggttggacactgatgtggaccctgtgatcctaaccgatgcagccagaaaatattatgcgaacctcattactctcgcgagtcccatggtgggcaggaagatcgatgagttagccgaactcggcattgtagataatctcaagatgattgccccatgccacggtcagatctttacaaacccagagtttatcattgacctttaccaaaagtggtccacgggaagctatgaaggaaataagatcacgttcatctatgatacaatgcaccattcaacccagaggatggcccatgccatggccgagggggtcatgagcgaaggggtgaaggtcaagatgtacttcatgcatgatgatgacaagtccgacgccgtgacagatgtcctcgactcaaaggcaatcttcgtgggggcccccaccatgatgaacaatccattcccgggaataggagacgtcatgtactacctgaactgcctgagctttggtaatattgagaagaaaaaggcagttgtgttcggcagtaaagggtgggctgggggctctgcacgcatcctagcggctaaccttgagggcgccggctttgaggtggtcgagcagatggaaatcgacttcaagcctaatgaagagatcctggaggaatgttatgagctggggaagaaagttgctcaactgattaaggaatga

SEQ ID NO: 3723 - DNA, 843 bp, synthetic construct
  source 1..843: mol_type = other DNA
atgagtctgaagtacttcaacaatctgacttatgaagagatcggggaatacaatgacaaaatcgtcctgttcctgcacccgaagctgttatcgcattggatctggaagaaacagattgaagagtatgataagtactttaataattaccactgcatctttatcgacctgccccaccatggtgagagcaaatttgatgggaaattctccatcgaagagtccagcgacattctcatcgaatttataaagcacctgctcaacaataaaaagagtgagtcaattaacattgtagccatcggcctgggagcttcaatagccattgaaatcctcaacaaagagacacacctaatcaatcacatcattctaagcggccttgagatcgcccagattcgggagaaggaagaagagacaatcataaagagactggctaagacgaaagcagaatacctgaacatgaagcctgatcagtttatcatcaaggcgtatttgcggtactacggaatcaggaaagagtactacgatgatctcgagaaaagcctcgacattccaatccgaaaagaagaggagatagcatataagtccttgaattatatcatccccgatttctctaaagagaccattgagaaggacaatatattactggtgtatggcaacaaggacaacttcaacagcaccaagtctgccataaagcttaagaaattgttcttcaacgccaagctgattgagatcgaaaaggggaaccatctttggaacataattgactacgaactcttcaatcaggtgattattaactttatccaaaaggagattatcttcaacgacgagcgcatcaaagagatcgactga

SEQ ID NO: 3724 - DNA, 915 bp, synthetic construct
  source 1..915: mol_type = other DNA
atgaaaatcggcgttattggttacggaaacatgggttccatgatcgcaaataacatcctcgaactcaacttgctcctagccgatgaggagctgatcgtgtcaaacaggcacatcgaaaaaatcgaggaattaattgaacggtaccccgatgggaaggtgcagattactgacgataacacggaattggccaagtcctgtgagaagatcattatttccgtaaccaccccgaatttcaaggaagtgctcgacgagataacaccatttattaacgagaagacacatatcatctatacatgcgccgggctggactttgaacacatcagcagcttttacgacggcaagctgtcgctggtcattcccagcctggcatcaactgtgacgtccaacaatgccatcagcagtatcggacgccggaagggcattaccctgatcaagcataatgagaaggttgacatccaggacagctacttcctggaggatctctttaatgagttcagttacgtgcgaacacttaaggaccacaacttcttcttcgaggaaaatggcaacctggcttcaaacaatccaaaacttgaaatatgcaccatcctgacaagttgcagccctgcattcatagccctgatgattgacaattttgcggagaggataagcaatatcagcgacttgagcaaggatgaggcggaggatatgatcctgaaaaccgtcattggaaccgctatcctaaaggaggataaaaaaatatccaattcggagattatcgagaaggtcgctacggaaggcgggataactgccgaggggattgacctcttggacaaaagattaaactccatttacaagaaactcatcaacaccctgcttaaccgctatgaagaagtgagtaaggagatggacgagctgtatctgaaagataactga

SEQ ID NO: 3725 - DNA, 1941 bp, synthetic construct
  source 1..1941: mol_type = other DNA
atggcgaagcggaattttagtgaaagcttaggcaaaatagtcacacttctcaaaaaggacttcaccgacgtgtttaccaaaaacccagtggtgcctattgtgttgctggccatcataattctgccttctctttatgctctgataaacatccaggcatgttgggacccctacgataacacaggaaacattgagattgccgttgcaaacctggataacggaaccacttttgaaggagaatccctgaatgtggggaacgagatcgaggacgagctgaagggaaatgatgatttctattgggtctttgtgaatgaaacggaactgagggagggggttaaaaatggaacctactattccggaataatcattccaaagaatttcagtaaaagcattaagagcatcacgactgacgacccacattccgccgagctagaatacattgtcaatcggaaatccaatcccatggcaagcaagctcagcgactccgccgcaaaggcggtctataataagatcaacgccaagatcgtgcagttcattaatgtggtggcctactctaagcttggcgagctgcagtccgcactgtctcaaggggcagggcagatgtcctctggtgcggtccaactgagctccggatcagcccaggtcaactcgggcgcctctcaggtgaagagcggcagcaatcaggtgaaatccgctgccaaccaggtgcagtcaggtggtgcggaagtgcagtcaggcagtgaggagatcaagtcccatgcctctgaggtcaagtcaggggccaatcaggtctctcaaggctcgtcccagatccagagttcatcccagcagatccaagccggttccagccaagtgcagagttctgctaagcagctggattcctctgttgatgtggacaaactgccgagtgacgacttgaagcacgttgtaaacagttccaagcagttggctaacgcaagttccaacctggcgggaagcagtagtcagctggcaaacgggagcgtccagttggccaatggcagcgtccagctcgctgacggtagcgtgcaattggctgatggttccgttcgactcgctgacgggagcgtgaggctggccaacgggtctgtacaactcgcggatggcagcgtccagttagctgaggggtccctcagcctcgctgccggctcgcagctgcttgccaatagcgccgcttacgccctattcgccgcgtccagctcacttagcggtgctgcaagttcgctgtcaagcataactggcgtggacgagaaccaaatcggaagttacatctatagccccgtgacgctgaacgagatagaactgaaccccgtagacaactatggttctgaggtggcgcccttctatctagtgctctcaatgtgggttggcgccttgattacctgcgtgatgcttcgcacaggccagtccaccggcaccgaatacagcccttcagagatgtacttcggcaaactgctcatattcatggtaatggctgttttggaaactacagtgactctcatcggcgcatcaatcctgggcattgaaatgtcgaatccggtcctctttgttctatcggcctacttcattgccctggtgtttatgctgatttgctacagcctcacctctgctttagggcagctgggaaaaggaatcgccgtcatttggcttgtgttccagatcagcggaaccggcggcatctaccccatccagttgatggggcctattcttcaggcagtgagtccatatatgccaatgacacacgggatcaccctgctgcgcgaagctgccctgggcctcgtatggagcaactacatccactcattcctgatcctgatcgccatggggctcatcacactcattttagccctgatcatcaaggtatttgcagataagagagctcactggtttgaggagaaactaaacgagacggatctgttccactga

SEQ ID NO: 3726 - DNA, 339 bp, synthetic construct
  source 1..339: mol_type = other DNA
atgaacccaaagcagctgaaaaagatggagcggcaaatgaaaaagatgggcatggacatgaaatccatcgatgacgtggaagaggtcataatcaggtgcgctgataaggaaatcatcattactaacgccgacgtgagcgcgatgaacgtcatgggccaggaaacgtaccaggtgacaggaaccgctgtagaggtggagagagaggttgagctggtcattcccgatgaggacattgaaatggtggcaagcaccgccggggtgagtgttgaagccgcggaggaggccctgcgcgaatgtggtggggacctcgcagaggccatcatgaagctatcaaattga

SEQ ID NO: 3727 - DNA, 2001 bp, synthetic construct
  source 1..2001: mol_type = other DNA
atgttcgaaattaaagccaaagatatgagaggacgggtaggggtgctgaaaaccaatcatggcgagattaagactcccaacctcatgcccgttatccacccacgcaaacagacagttgatgtcaaggagtatggggctgacatcgtaattacaaatgcgtatttaatttataaggatgaagagctgagtaaaaaggccttggatgtgggcttgcatgagctaatcaactttgatggtcccatcatgacagactccggctcattccagctgtctgtctatggggatgtggacattacaaacaaggaggtcattgagttccaggaagctatcggaaccgacatcggaacttccctagatattccaaccggcccatacgtggatagagaaaaggctgaagaagacctcgagatcaccattgaacgagcaaaagaggccatcagttatgtgaaggacaatgattacgagatgaagatcaattctgtggttcaaggttccacttatcctgacctgagagaatactgtgccacggagctgaccaagctcgatgccgacctgtaccctatcggcgccgtggtgccccttatggagatgtatcactaccgagatcttgtggacgccgtgatgcactcagtcaaatgcctgcccgactcgaaggcccgccacctgatgggggcgggacatccgatgatctttgcactgtgcgtggctatgggctgcgacttgtttgattcagccgcgtatattctctatgcggaagcagaccgtctattgacgacccgaggaaccgtaaagctggaaaacctcaacgagatgccttgctcctgtgaggtgtgctgtaagtacacgcccgatgacttaagggccatggacaaggaggaaagggtgcagctgatagcccagcacaacctccacgtcagcttcgcagagcttcggctcatccgccaagccatctacgaaggaagtcttatggagctggtcgaggagcgctgcagggctcatcccatgttgcttgacgggcttcggcacctgggagagtacagcttcgacctggaaaaatacgacccccgctccaagaagagtgcatttttctacacaggtcctgagtccctgaaaagagctgaagtgaccaggcacttaaacaaactgaacgaaatggacaagcggaaaaacctggttgtcctgccaacttacaccaagccctacacaaaacacctgacaaacagcttcaacgagctcttcgtgtacgccaaggatgaatccctgtctgaagatgccgagtgtaagatcgagaatggggagaccgacttcatggtgctcgacactccattctgcctcatcccacttgagttggatgaggtttatccgctgagccagtcagatgcgcctagaatccgtgataagatggctatcgaatttgccagggacttcctgatcgactttgctgaggactatgacaatgtcctcatacatcctaacgtgctggaggagctggagctcgactatatagaagaatacaactacccggaggagatcaagttcgaaaaagatgacattaagaagctcaaggcaattgccgattaccagttcggcaatggcgcaggcgacgctttattcactggcaaaatcaagatagagaaaagcaaaaagacggggaagatacgccacgtctacgacaagaatcagattatcgtaaatatgcgggcctcggacagctttctgattctatctaaactgggggcaaaaaggcttgctgcaatcgagggtatgcgaaataaggtcatgatcgacaacagcgtggagagctttgcccgggatggcaaaagcgtttttgccaagtttataaaagactgtgatgaaaacatcagaagcaatgatgaagtgctgattgtgaacgagcagggggagctcctggccttcggcaaggctttgttgaattacagtgaaatgctggacttcaacaccggtcaagcgataaagacccggaaaggatttaaggactga

SEQ ID NO: 3728 - DNA, 1854 bp, synthetic construct
  source 1..1854: mol_type = other DNA
ctgaagattaactcattcagagtcttactgtttattataataatcagtttatctttcatcggtttttctaccatctccgctgtggatttgagcgattcttgttgtgacaccctgattagcgatggctccgacggtatcatcctcgggggcagcgatgatatcagtcttagcgatgagaataataacctcaattttgacctgaatgacaatccggactttaacctggattacgacagtaactcgtatcctaatctgaatctctcttctaattcaaattccaagtccagttccaatacatatgggaatgatttcacgctctcccggttcaaatccgtgcttacttcctcctataacttgaatggaggcagctttgaagacattcagtcggccattaaccatgctgctgatggggacgacataatcctcaacggcactttcacaactactggctcagtgatcgtaatcaacaagacccttacgatcattggaagtccaaatgccgttctggacgcgaagaacatatcaaagatttttctggttgaagcagatggggtgaacctgaagaacctaaccttcatcaatgggaagtcacgcaacgagagtgacaatgggccctatcagggaacagtgaactggcaggggagcaacggaactatcgtaaattgtagttttatcaacaacagcggtgatgagaaaagttacggcgcctctattctatggaaaggatcatatgggaaaataagcgattccatctttaaaaacagttacagcggcgccaacgggggagctatattcgccttgggagagaatctcaccatcaacaattccgagttcatcaacaaccacggcaaggaaggtggcgcaatctacttcggcggttcgagcgccatgtggatcatcaactccatcttcatcaacaactccgccgattcgggtggcgcccttgcagcgtgcgctatgaacaggcaggtgatcaactctaagttcattggcaactcggcaaacaacggagggtccattagctggtgcgggtctaatggactgattagcaattccacgttcattaataattccgctgaccaaaaaggaggaagcatcctctttacagggaccaataacctggtcaagggctccgtgtttatcaatagctcagcgaacattggaggggccattaatagcctcaatcggctgaactacattaacgaccttcgatttgagaacaacaatgccagcctgggagaggattgctacggcgacctggaatttaagagattcagcacctccattgcttccgaggatatggtgacctctgccatcgacgcgaacctcgacggccggaacggcgaatactttaacgtaagcctcaaggacgagtatggcaaccccttgatcaacaaggacattaaaataggcttcaacggccgcatatacaataggacaacagactccaacggccaggcaagcctacagatcaatctgaagtactctatggtgtacacctttgccatctgcttcctgggtaatgacgacttctatggaagtttcaccgtgtcaaaaatcacggttaagacgcaaaagcccaacttggaagtcaacaacttcaagtacaaatctagtacaaagagcaaagtcattaaagcaacactgaaatcatcacgtaacaatccaatacagggcaagacaattagtttcaccgtgaataacaaggtctacaccgcaaaaaccgattcaaaaggtatcgccagtgtgaacgtgagcctgtctagcaagaagacctacgccttcactgtcaagtatgccggggacgacacttattctagcgtctctaaatcggctaatatcctggtttactga

SEQ ID NO: 3729 - DNA, 1224 bp, synthetic construct
  source 1..1224: mol_type = other DNA
atgacgtatatcgaagaggctacagtgatcgatgacacaatctatgacctgatcaacgaagctttcgagaacgagcggaaatacaatgacccggtgtacagaaactccatattcaaaggtcacaaggaatactttgtgaagaccgacgacgggtcatacagcatcaaatcaaaagaaatcaacaacaaggtggaaacactccacaccagcaccggagccataagcgaaagttttgaaaagttcataaagcccctgaaactggattacagccaggacattgctatcctcgacatctgtgcagggctcggatacaatacttctgcagccattgacgattttatgaaaaatagcaccgaagatgccaacctccagattgacctcctggaaatatccaagcccacccttgcagccggcttgatggttccaagcccgatcaaggcacatgacattacgaagaaggccattgaggatgcccttattgccgaggattacgcttcactctccctggaggaggagagcataccagacaacataaatctgaatatcttcatcgacgatgctcgcaaggtcattcagaaactggaggacaatgtctacgatgccatcttcttggacccttttagtcagaatatggcccccgagctggtgtccgtggacttctttagggaatttagaagggtgattaaagacaatggaatcgtctgcacatatactagcagcgcgcccgtcaggatggcatttatcgaagccgatttctacgtaagcctgggccctatcttcggtcggttccaaggcggcaccttggcgagcccctcgcccaaaaatctgaccaagtcccttccaaagaatgatgagatcaagatggccctgtcggatgtgggcatccctttccgcgacccaaatctaaacctaagctcaaaggaaattttagacaaccggactgaggagcgccacaacgcgcggcataacacgaagatctccagtgcggtaaagacacctatcttcctcgcacaggagatggacgatgagccactgaagagaagggttgagcgaaaccttagaaaaatgaacattcccggggtgttatccgaggaagctttttatctggtggggcctgaggagaactatagtgaggattatgccgaggataacaacagtcgcactcgtgttattgaaatggctaaacgactggacgagattaagaacaataaagtcatcttctga

SEQ ID NO: 3730 - DNA, 474 bp, synthetic construct
  source 1..474: mol_type = other DNA
atggacgtaaagatcaaagagaaactggacaatcttttcaactacatctcaaacgcactgagtagcatctacagcagaaaagacgaaaaggattatcacgacttcattagttccatcaatggccgcctcatttgcatggccgatattctagacgagtccgaggaatttgaacgagagtactacacgtttctgaagatcaagaagatgatttactacgtcctggagaacatcgaatcaataaacagggaggattgtctgcgggtgttcgactccttctcgaaatttaacctgctcatcctcttaaagttcaattacctggacgggggaataagccaggaggagtatcagaccaagtttgatgatttcacactttacttgagggaatttcgcgagtacttctatctcaacgtctatgagaaagacggccggttcgatgcgttgatcaatgaagtgagctatatttttgtgaactga

SEQ ID NO: 3731 - DNA, 378 bp, synthetic construct
  source 1..378: mol_type = other DNA
atggacaagaagattaacctcattaactttttctgggaagaaatcctgttcgggctgttcaaggaaaagagcgagttcctttcatgcttcgtcaagtgcagcaatgaggtgccctctaaattcgagataaacaaggactatctgctgaacaaactccagctgtacaattgcggactaaacaactttcggaagtattgtgatttatggcatagtcttgagaatctgggcattcacgaggaggaccgcaaaatcatcttggatgcgcacgatttcgcaaaagatcagttcaccatctttgtgacagtggacgaggaattttacaatgccgtaaagtccttttccaaactgaacatcgacaagtacaaactcttgaattga

SEQ ID NO: 3732 - DNA, 291 bp, synthetic construct
  source 1..291: mol_type = other DNA
atggacttcattgacacaaatatcgcgattgcatacaccttcttccccgataagtattttaagaccgtagacgatttcatcgtcaactccactgagttttactgcagcaacaacgtgtgcgaggagtacaagcggaaatacaaatctatcttcacatcatttgaatatttctttgatgaaatcatcctggccctcgaaaacaataaccgcattttcctaaataaatgttcctttgagcagttcgtgctgagccagacgagtgacataatctggatatggattaagaagtga

SEQ ID NO: 3733 - DNA, 522 bp, synthetic construct
  source 1..522: mol_type = other DNA
atgtacaacatcaatgaaaagatcactctgcccaggatcgagatcaaaatggacgtcaaaatcaaggagatactgaagaacttcctcaacaatattagtaacacacttacctcactgaataacaagaatgatgaggagaaatctcttgagctcattagcagcatgaaagagtacctgttggactttgccatgttcctcaaggaactgaaagaatttcaaaaggagtttagctttttcctagtaattagacgaatgctgaactacgtgctcgacaattacgggagcctatgctcttccaagcggtccgtcattttcgattccttgttcaagttctttgagctgctgcggatcaaacttagcttcctcgagggaatctattccaagtcaagttatctgagttacttcaacaaattcgatacgtatttggacgaagtgaagaccgaatactatttaaacatctaccagcgcacaggcgaatttgatgacgtgataccaaggatatcgcagattatcctggactga

SEQ ID NO: 3734 - DNA, 2034 bp, synthetic construct
  source 1..2034: mol_type = other DNA
atgggtttatttgataacattaaaaagattcgaaataaagaaagtgcaaacagctcttctgccatattggcttccacctacaataagataaaccgcaggtttggggtgggaactgatgccagcagctacattgccaaaaacatgcacaagttctatattacaagctccaagttttcaaaaggggtgcagatcaagaaccttctacgaaaactagacatcacaatccatcctgaagggttcatctacttcctcgacgaatttagaaatctggactatcatggccagattattaacagtcctatcgactacagccttattctggactattccatctacgacctcaacgagttttacttcaatcccaaggaaggtccaggcttccggaaccagtcctccgactacaatagggagatgctcgctatcctggatggaattgagctcctcatttatgaaatcaataaggccttggcaaagtcctcccgggatgacaagagcaagtacatccgcatctttgaggacatcatcgacaaaaaggctagtcattttgaggaggcccttcagcgcatcctgttccttaatcaactcctatatcagacaggccacagcctaaacagtctgggccgtcttgaccgaatcctggaagactattactacaacgacctgaatgatggatacatcactaacaaagaggcgttggaactgattaaggatttcctaaaggccctcgatagctactcctggtataagaccgatgacgagtcgggactggctagccagctgatcaccttgggaggcaagtacatcgatgagttcggcgaatactatttctacaatgatctcacctatatctttttggaggcgatcggccaggtcaatcccaaggatgttaagatagccctccgcctctcttacaagactcccgacgatctgatccacctggcgttagattgtctgaacgaaaacacgatttacattgaggagggtgtggctgtaagttttatcattgacaatcggatttttacagctgacggagccaccattgaggccaatatagattcgaacatagtcttctcaaatgatgaggcgatcatccccaggcttctcgacttcgggtacagtagcgatgatgcctataattatattctgtcagcccacctggaacctacgttcatctcctgcctggatgaaggcaacctgtcatctatctctcttttaaagccattgaatgacatctttgaagacaagaatgagctgagatttatcattaacctggactacttgatggagctttataagaacaatctgaaaaaggagatcgaggaaaaaataagcgccctggatcagattcagtggaaccaggaccctttcctgtcgctgttctcagctgagagttatgagaaccagctggacatttcccagggcggctcccggaacaatcactttggaattagattctatgggctccaaaacactgtgaacagcctgtataacctgaagaaaatagtgtttgaggacaagaccattgacctgattgagttggataagatgcggaaaaacaacttcaaaaggggcaaataccaggaaacattcctcctcctgaagaacaatcccgtgagattcccacaaaacaacccggagatagcaaacatctccaatgagatcatcgcattcattggcgactccataaaagactacaaaaacagtctcgacgggaagctcaagtttgggttaagcgcccccaggtacatgataaagaatgataagcgcgcatcttttgacgccacattaaaggacatcccgccagctcggcttctgatctcgagccagaaaaccaactcagatatattcatcttcaattcaagcctggactacaaaagcagcgcaattaacgggaacctgatagagttgaatatcaacacgaacgacaaacaactgaccaatatcctggtcgaagcaatcggatacggtttcgaccagctccaaatcaacctgatcagagaagagattatcaccaaagaggatactgaagaatga

SEQ ID NO: 3735 - DNA, 636 bp, synthetic construct
  source 1..636: mol_type = other DNA
ttgaatagtgacaagaagatcacaaaggagtcctcaatcctagatattggatgcggtaacgggaacttcctgagccagctcaagcgcggtggctacaaaaacctcacaggcatagacctgttcatcgaggaggagaacattctggaggggatcaacttgattcagacgagcctggaggactacaagccttcagaaaaatttgacctgattgtgagcaatcacgcgttcgaacacatggataaccaattggctaacctaaagtgcttcgagaaccttatcaaggacgacgggctcatcctcctgcgaatccccattaaatcggagccaatatggaaacggtatggcgtaaattggtttcagattgacgcaccgagacactttttcctgcataccctcaaaagttttgaaatactgtgtgataaaaccgaccttaagatcctggatgtgatctttgatagcggatacgcccagttcgtgttctccgaaaattaccagaacgacatcgcctggggcgaagatgggtggactgatttcaggtctaataaaaaacttatcaagaagtataaaaaggagaccaatttcttaaactcccagggacaaggcgaccagtgcatgtttgtcctgaagaagatttga

SEQ ID NO: 3736 - DNA, 327 bp, synthetic construct
  source 1..327: mol_type = other DNA
atgcggattttgaacggagagaatatgaagtgcccaatatgtgagaatgaggagaacaatctcaccttcataatcaaggaaatgcagatcggccttagggaagaatttgagtacattgaatgcagcaactgcggctgtctgttcatcaaggagatccctaaggatattgacaaatactatgacacagattacgccccgcacctgaagcctaaaagtttcaacgaaatcatttttgacaaagggtctgcaataatcctgagcaattcaatcctctccaacctaatcccaaaggagtttgtgcccccccccttcaaaattaacaagtga

SEQ ID NO: 3737 - DNA, 201 bp, synthetic construct
  source 1..201: mol_type = other DNA
ttgaccgtgtccttcctatttgtcaacggcgctgcatctgtgctcctgaacgccattgataaggaaaaggccgtcacaaaaatctacatcatggccgttattttcaacgtgtgccttaatctggtgctgatccccatgttcagctacgacggggaggcgatatcaacggtactcagtgtgaaatatctgctgagcttttga

SEQ ID NO: 3738 - DNA, 114 bp, synthetic construct
  source 1..114: mol_type = other DNA
atgattattatccccctcagcataggcatcttcttctatgcccggctgatcatcgactttatatactccaaccagtacagcctggcaagtaccctaattcagatcatcgtgtga

SEQ ID NO: 3739 - DNA, 1428 bp, synthetic construct
  source 1..1428: mol_type = other DNA
atgaatcagattaaatccatttttaaaaatacgggttggttatcggtgtcacaagtgatcaccagcatttgcgcgttcctctggaccatcatcattgcccgctacctgggagtctcggattatggcattgtctcatttgcagtttccttcactggccttatggggatcgtgatggatttggggatcagcacatacatcacgcgtgaaatcgcgaagcataaggacctggtaaggaaatattttaacaacatcttcctgtttaagcttatcttggccatcatcctgttcattctgagtgggctcatcctgtatgtcatgggctacagccacctgaccatcatagtgacgctggtgtttacaatagaacttatcttcatgtctatgacgactttcctgaacggcgttttccaggcctttgagaaagtgaaatatcaggccattggcgctatactgaatagcagtttcctgttgataggcattctcataacactggggtttgacctgggcgtgatttccatcgccttcgcctacactgtggcctactccatatattttagttacatgttccttagctacgtcaaaactttcagccgacctcacctggaattggataccaatttcatacgggaagtcatcatcaagtccattccgtttggacttaccaacttcttctattccatttatttttcaattgacattgttatgctgtcctacctggctggggactatgcaacagggctgtacaagtctgcttacaacatcataaatgtgttcactaccttttttgttgtgtaccagagcgtgatattccccgtgatgagtaagttcttcaaggagagccagaacctcatcaaggtgtcttatgagctgtcggtcaaatatctcctcctgatcatcattcctatcagcattggcatcttcttctatgctagacccgtggtggatcttatctacagcaaccagtacagtctggcctcaaccccagtccaaatcctgatctggacagtgtcattcctatttgtcaatggagccgcggcagtgctcctaaacgccatcgataaggagaagactgtcacaaagatctacattatcgctgccatcttcaacgtgtgccttaacctgatcctgattccaaggttcagctatgacggtgcagcaatcgctaccgtactcagtgagatcttgatcaccattattacactgtaccacattttcaagaccgactacaaaccagacttaggtctcctcaagaatgtgattaaactcatcgtttgtggaatcatcctctttgtagccttatactacctgaatctctccctatggtttgcaattcccgtcggatttatcgtttatctaatatccttgtttatcaccaagtctattgacgataacgacagatacgtaattcgcgagttgataaaccggtga

SEQ ID NO: 3740 - DNA, 777 bp, synthetic construct
  source 1..777: mol_type = other DNA
atgctaatgagcatcatctgtgtgtacaacgacgaggaggtgcttgagaaatatctgttagaaagcctgaaaactcaaaacgaagagtatgagctgatcctgattgacaataggaaccatgagttcaattccgccgcttcagccctcaactacggtggcaaaaaggccaagggagaaatactcctgtttgtgcaccaggatgtggaattttatgagaacaacttaaaagatatcaagtattactttgaaaactgccagaatctcggcattgcgggagtgcagggggtgagcgaggagaactacgggagaattactacaaatatcgtctctgggattccaaagagcacggtgtcagactacagtatcacagacataaccgaaacccaaacccttgacgagctactgctgattatccccaaagaggtcttcggcaagtaccagttcgatgaggaaacctgctacgattggcacctgtatggcgcagactattgtttgaacattaagcagaagggctactccgtagttctgttccctatcacgctgtatcacgtcagcgagggaggttccatgagcctcgaatactttaagacactcaaaaaggttctcaacaaatataaatacgactataatcgcatctacaccaactgcctgttgagtcatgagccgaataatcagctgaagttggatatcctttactactcggaaattctgcacatccggaatcccataactaacttcctgtccaatttcaacttcctcaagaagatccttaagtga

SEQ ID NO: 3741 - DNA, 1002 bp, synthetic construct
  source 1..1002: mol_type = other DNA
atgcagacggtgggtatgattctgtgcggcgggtttggcaagagactccgacccgtcactgagaaagtgcccaagccgctggtggaaattaaagaggactatgccatcctggataagcagttatttgattttaagaatgcggggataaacgaggtttatctactggctggcttcctgcacgagaaaatccaggaacgctatggggacgaatacaaaggcatcaaaatcaattacgtcattgaagacgaacctctgggaaccctgaatgccatccggcttggtatggaggccctcggggaagacaagcaagtagtgatccggaatggcgacatagtggcggacattaacctcaaaaagatgatcgagtatggcgaaagaagcgattacttcgtgacaatgtttgtcaccaagatgactagcccatacgggattgtggacatcagcggagataaaatcacggcttttaaggagaagcccctcttggactactacataaacggcggcatttacttcaccaaagggctattggacttcggagagtttaaaaccggtgacatcgaaaagacactgttcccagtgctggccaaagaaaacaagctgggctactacagggaggacgatctcttttggatggcaatcgacacctcaaaagagttggagagcgttcagaaggagtatgagaacaagacagacaagccttggggatatgagaaggtcctcatttacactgacaagtacctgacaaaggagctgtaccttaaggaaggattccagactagtttccactatcacaatgataaggatgagaccatgtacataatgtccggggccggctacatcgagttcgaagacaggaaggaatacttcggaaagaacgattccattcgtattaaacccggtgtggtccatagcatcatcgcaaccgagaacaccacattacatgaggtttcgacaccattccttgatgataccatccgcgtaaaagattattatacgcggtga

SEQ ID NO: 3742 - DNA, 1008 bp, synthetic construct
  source 1..1008: mol_type = other DNA
atgagtgagaagaaaaaaattaaggtgaagtttgttgattttcaggatagtctcaaggagaatgataacttcttcatcgactccctaaagaagaacttcgacgtggaggtgtcggacgacccggactatctcttttttggcgcttacgggtacaaacaccttgactatgactgtatccggatcatgtggaccattgaaaactacgttcccgacttcaacatctgcgattatgcactggcgtacgatatcatcgagttcggggacagatacctgcgattcccattcttcctaaatcggcctgaaattgagaacgtccgcaaaacaatagagcgcaagccaattgacacaagcgtaaagacggatttttgcagctttgtggtgtccaatgaatggggagacgattatcgaatccggctgttccacgaacttagcaaatacaagaaggtggacagcggggggaggtcactcaataacattggtggacctatcggcatgggcctggataagaagtttgagtttgatgtcacccataaattttcattcgccctggaaaacgctcaaaacaggggctatactacagaaaagatattcgatgccttcgctgcgggctgcattccaatctactggggagatcctaacattgaagaggagttcaacccgaagtcctttataaattgtaatgatctgactgtagaggaggccgtggaaaaaatcaaagaagtcgaccagaacgacgaactttatcatgccatgctcaacgagcccaccttcctgggtgacctggacaagtatctccaggattttgatgacttcttgttcaatatctgcaatcagcccctggagaaggcctaccgtagggaccggataatgaaaggcaaaacccaagagcaccagtacaagttgatcaacagattctactataaaccctactttttcttaattaaggtcgcacagaaactgcacatcgagtttatcggacgcaagatttaccacttcatcagagactga

SEQ ID NO: 3743 - DNA, 801 bp, synthetic construct
  source 1..801: mol_type = other DNA
atgtcaagtcagaatatccagatctacgttgtgtcccattcggaagaggatatcaaaaatatcgacagcaacgacatttacacgccactttttgtggggcgagccggcaaggacaatttaggcttcgtgtctgacgacacaggggacaacatatccaataagaacagctcctactgcgaactcaccgggctttactggatgtggaaaaacagccctgccgacataattggtctggtccactaccggcggtactttgccaactggcgcctgggaaaaaggctggaacgagaagatatcgagaaaatcttcagcgagtatgatattatcctgccgaagaagaccactgctctgctgggctcagtgtatgaggactacgaccactggaactatgctaaagacctggacctctgtgaagaggttatcggcgagcagtgccccgagtacctggatagttacaagagggttgtggagggtaaggatctctactactacaacatgttcatagcccccaaggaggtcattgcaccctattgtgactgggtgttcccaattctcgcagaggtggaaaaacgggtggacatgaccggatatgatgattatcagaaaagaatctacggattcctgacagagcgtctctttgatgtgtggatggacaaacaaaacttgcgcgtaaaggagtgcgaactaaaggtcaatgggctaaggcttaacgtccacatgtggattgtaaagagaaagatcgtgagatgggcgtatgtccatatctatatgggcttgctgcacaaggatatgcgccggtga

SEQ ID NO: 3744 - DNA, 1098 bp, synthetic construct
  source 1..1098: mol_type = other DNA
atgaaatacgattatttgatcgtagggtccggcctgttcgggtcggtgttcgcctatgaaatgaaccgtcggggcaagagttgtctcgtgatagaaaagagaagccatattggtggcaatgtgtacacagaggaaaagcacaatataaatgtccacaagtatggtgcgcatatattccacaccaacaacaaagaggtctggaattatatcaatcagttcgcggagtttaaccgctacacgaactcacccgtggccaactacaagggcgaattatacaaccttcctttcaatatgaacaccttctaccagatgtggggtgtgaaaacgccagaggaggccaaggccaagatcaagcagcagaaagccgaggcaaacatcgatgagccccaaaacctggaggagcaggccatcagcctgattggccgagacatctacgaaaaattggttaaaggatacaccgaaaagcagtggggaagggattgcacagatctcccctccttcatcatcaaacgcctgccggtacggttcacctttgacaacaactatttcaacgacctctatcaaggaatcccaatgggggggtatactaaaataattgaaaagatgctggacggaattgacgtggaactcaacactgattttctagaggacaaggataaatggatggctatggcagatagggtcctgtttacagggatgatcgacgagtactacgactactgcttcggagagcttgaatacagaggccttgactttgagtttgagaccctggacatggaaaactaccagggaaacgctgtgatcaattatacagatagagaaaccccttacacacggatcattgagcacaagcacttcgagaatgcagtctctgacaagaccgtgattactcgagagtacccaaaggcttgggaaaagggccaagaggcatactatcccatgaatgacgagcgcaacacggagctatttaataggtataatgacttggctgataaagaaggcaatgtgatctttggcggtaggctcgggatgtatcggtacttcgacatgtggcaggtcattgatgaggccctgaagctggttaaaagcctggaatga

SEQ ID NO: 3745 - DNA, 183 bp, synthetic construct
  source 1..183: mol_type = other DNA
atggagatccagtacctactgaaccaggccctggaaaatgagaacatccgggaaatcgagattgtcgtgaaaattcttaaggagtttgagaaaatcacccaaattaaattcgaactgctccacaaagagttgatggaaaagcccaagaagggcctcaagcagagcaagttcagcatcatatga

SEQ ID NO: 3746 - DNA, 156 bp, synthetic construct
  source 1..156: mol_type = other DNA
atgaatcagaacagcaagaaagaatttgagaagcggtatgaggagttctccaacttcttcttcaaatgcgagatcgaataccacaccctaaagggcaaaacaaagcatctgatggccaagaaatacctgagcctctttgacatggaatacctgtga

SEQ ID NO: 3747 - DNA, 582 bp, synthetic construct
  source 1..582: mol_type = other DNA
atgtatatgaatacaccaagccagaagaacatcgatatcaaaaactacgagagaattttcaaggagaagattaatttcgtggtcgaaaaaatctcaaggtttttcaaagggacctcccaggaagacagtttcctgaacgaaaagctactcgatctgtctgacccctttattaaatccaggataaaggagatcaaagagaccacggaatcgattgcggaatatctcaaaatagaatacatcaactacgatgaatactacgacttccgcgagatccagagcatgatgaaccaaactcttgactatggaagtatcgaggagctgaagatcatattaaagattttcaatgagtttaagaacctgacagagttcaaattcgagctcctgagcaataaatcccactctaagagcatcagctttaaggacatcgatgaggagtcaaaagaaatcttcgagaagcggtacggcgagtttagtaagttcttcttcaaccggaagcgagagtactatgcaatttttgagggcgaatgcgaggaggacgtgtccgaattttttgaattgatgaaaaagcatgccctgaagtga

SEQ ID NO: 3748 - DNA, 684 bp, synthetic construct
  source 1..684: mol_type = other DNA
atgaagctgttcatagacagcaacgtgatcattggttactgcatcgagatagattattggcactactacgcggaaaacctcatgaaaaatgaaaatatctactggtccaccacagtcaagggagaatctgagtacaagctggaaaagcttattaaaacgtattcgaactttttcaaccagatcaaggaggatctggacaaggagatcattagtaagactgagtttatcaagctggtgaagtccatcgagtacattaacaacaagaaagtgcccttcgagcaggagaatctggcaaatctggtgtggacaaaggggggctggctggacgacgtaaacagcatagaacttaatgagaacctaaatttgatttcccaggggctcaagaaaaagatgtatcgcaactacaactactgcgatgaaatgctcaatctctacgagcggcagttcaaagccgagtatatccagctggtcaaacggctggaggagctaaaaagaggcaaccgagaaatccactcaccagatagtgaaatacttgttgactgtcacgacttgagcctgtcacaaaacctcgacatgggcttcattaccagcgatggagatatcgtctattttaagaaggaaatcaaaaaaatgaccaatatcaaggacatcatttatttaaaaaacgtgcataggtacacttga

SEQ ID NO: 3749 - DNA, 828 bp, synthetic construct
  source 1..828: mol_type = other DNA
atgaccatcagtcccaagcgcatcctgtatctggatgaggttcgctcactcgcaatcatgctcgtggtcattgggcatttggcaaggctgtttagttacaactacaatagttggctgttctgcagcggtgttttctccctaacacggatcggcgtgcccctcttttttaccgtaagcggctctcttctcctgactagaaaatatgaggtgaaaaagttcttagagaagcgattcaaacgggtatgtctgcctttcttctcctggataatcatatacatcgtggccggcgtgctgatttggcactatgacctgacattcgaatatgtggtgaacactgcttttggtgtgggggactactcggcgctgttctggtttatttggagccttattggagtttacctcctgattccagtcatcagcagctttatacgtgaagagggaaattggggcgccgaatacctgattctgattacaatcatcctgtccctattgtacacgttcggcttctttgactatccacagatgaagtacaactttagagtcatcttcaacttcttccccgtgctcggctacttcattatggggtcttacattcacaacaagaagtttaagtattcagataagaagatgtttgctatcggctgcgtcttgtttatagtcggaatctgcgggcactttgccaaaatctacttaaagggtctcggaggactgtcccttgctccgatcgacttcttcgacatatgtgtgatcatggagaccatcgggcttttcattgcgttcaagtatgccagcaccaaatgggataaaaggaaagatgcccggaattga

SEQ ID NO: 3750 - DNA, 258 bp, synthetic construct
  source 1..258: mol_type = other DNA
atgcaggagattgaatttagggaaaccaaactgggtgaggtgatcgtcctctttgcatcctgcagcttcggcatctatttctcacattacatcctcatgcggtatattatgtacaacggcttccttgctcccattagaaaaacacacgccctgttctggctgccggtcagctcgataatcatcatcggactatcctggctgttgatttacgtgatgagcaagatcccatacgtacgcatagccagtggggtgaagtga

SEQ ID NO: 3751 - DNA, 1785 bp, synthetic construct
  source 1..1785: mol_type = other DNA
atgtgcgggattgtcgggtgtgtgctaaaagaaggcaaagtagcccccatcttgtttgacagcatcagtaaactcgaataccgtggatatgattctatcggcatcgcctgcgcggacgaggacaaaataaacctgaaaaaggactcagggaaaattgcagaggtcgatgctaagctggacttatgtgatctggaaggcaaatatggcattgcccacgtccgctgggccacgcacggagatccaagtaaaatcaatagtcacccccacctcaacggcgacggcaccattgcagtggtgcacaacgggatcatcgaaaattatctcagcatcaaggaagagctggagggggaaggttaccagtttgtctcggacaccgacactgaagtgattcctcatcttattgacaaatacatgaaaacaggcttggatctgacccaatcggtgcgcaaggtcatcggtgtcattgagggggcctatgccctggccgcaatctcctccgctgagcctaaccgcatagtggctacaagaaaggacagtcccctaatcgttggaataggagatagcgagttctttgtggcatccgactatcctgcgatcttaaagtataccaacaacatcgcattccttgaaaagggagaaatcgtcattctggacgaggatggagtgaaattcctcgatgaaaatgaccaggagatgacaaaggagattgaggtcatcgagtggtcccccgaaatggcggaaaagggggggtacgaccacttcatgattaaggaaatcaatgagcagtccacagccattaaaaacaccctgaacgaaaaggacaaagtgaaggagatcgtggatgaggtcaagggcacaatcaatagggttgtctttgtggcttgcggcacctcctaccatgcgtccctcactggaaaatacctgatcgagtcactcgtgggcatcccaactgaggtactgctggcctctgagtttaagtactctgcaaaagccctgaacgacaagaccctcgtaatattcatatcacagagcggcgagactgcagacaccttaaaggcacttgacgttgccaatgaaacgagcaagaccttggctattgtgaatgtgaggggatcatcggctacacggagggctgactacgttattcagacgcaggccggtcctgaaattggggtggctgctactaaaacctatgtaagtcagttggtggcgatctacctgttcagcgcccttctgggtgaggatcatgagctacttaagcgactggaaaaggttccggattacattgaagaggtcctccagaagcgagatgagattaaggagatctctaaaaagtataagcgggacaaagacgccttctttattggacggggcttctcctacccgatcgcactggaaggcgcactgaaactgaaggagatctcatacatacacgccgaaggatacgctgccggggagctaaagcacggtcctatcgccctgatcgaccggaacatcccagtggttgtggtgatccccccgggccaagaccataagaagatcatgagcaatctccaagaggtcaaggccagaggcgctgatgtgttggggatcggtgccgtgggcgatgaggacctgatcagcgagtctgatgacacattcctgataaactgcgatgttgatgatataattgcgccacttgtgtacatagtgcccttgcagctgctgagctatcatgtgagcgtcattagagagctcgatcccgacaagccaaagaacctcgccaagtgtgtaacggtggagtga

SEQ ID NO: 3752 - DNA, 708 bp, synthetic construct
  source 1..708: mol_type = other DNA
atggaaaatgctcccaataaagaagacattaaaaagattgcgggagacgatctctccaaggctgagctgaagaagcgcataatagaattgtatgattcgggccagacaatgatggatattgcagactctgtaaatcggtccaaaatctatgttagcaatgtcatccacggcttttacgacgaggatgagatcaaggtccgtcaatatgacaaactgcgggggaaagcaaaactggacttctcaaggtatagaagtagcacaggtatctacagggtgagttacgtggagaacaaacgcagcggaaacgactactggtcctatcagtactacgacgacggcagattgaagagaatcgtctctgtgaacctttacaagcttaaaacggtggtaaccgaaaaagggctggactggttcgaatttaccgaggaagccaaagagatggtgctgaaagataaggagaacttcgatgagagctctctcaagcgaacaaacaagaccgggttctacagggtgaccaagcggaagaccaatactaagcagggatacacgtgggcctactcattcaaggagaacaaccatctgtattttgttagttccatcagcatctccaagctaaaggaaaaggtcctcagcaacggctgggagtgggaagagttaactgaggaggccactcgcctggtggaagaggattcaaaaaagcgaatttga

SEQ ID NO: 3753 - DNA, 750 bp, synthetic construct
  source 1..750: mol_type = other DNA
atgattgaaatggatagtaaaaagctgctttacgaaggaaaggccaaaagtgtgttccagggggaaaacgctgacgaagtcatcatcgacttcagagacgacatgactgcaggcgatggcgcaaggaaagaaagcatggggaagaaggggtatttcaactcaattatctgcgcaaagatcttcgagacgctggaggaggcaggcgtggagacacagctgatcgaactcaccgagccttgtgtgatgaaagctcgcaaattggatatgatccccatagaggtgattgtgagaaacatagctacaggctccatcatacgcaagttcccatttgaggataagagcccattcaatcctccgctcattcagatggactttaaggcggacgaatttcacgaccccatgctgaacgatgccatagcgatcgccctggggattgcctcgcaggaggacctggacaagctgagggagctggccctaaaggtgaacgaggtaatgtccaaaatgttcaaggagattggaatcatcctggttgactttaaaatcgaatttggtaaggattcccagggcaatatcatcctcggtgacgagatctctcccgacagctgccgactatgggacgccgaaaccttggacatgcttgataaggaactctttcggcaaggaaaagatgacgaggtcattgatgcctacgaggaagtcttcaaccggctcttaaccgaggaggataaggctaaatggaatattaagtga

SEQ ID NO: 3754 - DNA, 273 bp, synthetic construct
  source 1..273: mol_type = other DNA
atgatgtatgatatcgaagtgaaagtgagtctcaaggccggaatgctgaaccccgaagcaacgaccattcagcggtcactgtctctccttgggtacgaagtcaaaggcaccaagacaaaggagattatcagcttcgtaatggaggcggagtccgaggacgatgctagggccaaggtggacgacatgtgccagaagctactgtgcaatccaatcattcacaactacactataaaaatcatcaaaatggactttacatgtgccagctgcgagtga

SEQ ID NO: 3755 - DNA, 654 bp, synthetic construct
  source 1..654: mol_type = other DNA
atggccattggaatcatacggttccccggaacgaactgcgaccgcgacgtctataaggcgatagacctggctggcggcgaggcagagtatatctggtggaacaatgaggacctgaccgactacgatgggatcgtgattcctggtggtttctcctacggggactacctccgagccggggccatcgcttccaacacccctgtggtggaaggggttaaggctctggtcaaggaagagaaaccagtgctaggaatctgcaatggcgcccagatccttggagagattggcctggtgccaggactgttcattaccaatgaggtccccaagttcaattgtgaatggagcagactgaaagtggcaaacaataagacaccgttcacaaagaactttgatttgggccagatcatcgacatacccatcgcgcatgccgagggcaggttctacactaaggatattgatttactcaaagaccaggaccaaatcgtgcttcagtttgccgaggagaaccctaacgggagcatggaagctatcactggcgtaagcgatgagtcgggactggttgtcgcaatgatgccccacccagaacgggccacaaccaaattgctgggctcagatgacggtctcgaattttttaaagggatgctcgatagtatttga

SEQ ID NO: 3756 - DNA, 714 bp, synthetic construct
  source 1..714: mol_type = other DNA
atgccggtttacctgataggtgcaggtccgggggaccccgacttaatcactcttaaagctgtgaaggcattgaataaggccgacgtggtcctgtacgactatcttgccaatgatgagattctgaaacacgcccccgataccgccaagcgcatttacgtgggaaagaaggctggggagcattataagacccaggatgagatcaatcagttgattatcgaggaggctaaggaaaatgagaacgtggtgcggctcaaaggcggcgacccatttgttttcggcagaggtggggaggagctgctggccctggcggaagagggaatcgactttgaggtcattccaggcgtcaccagcgcaatcggagctcccacaagcatggccttccccataacccaccgggctgttgcaacgtcctttacagtggtgacagggcacgaggaccctacaaaagaaaacaagcaggtaaaatgggattatacggccgacaccctaatcatcctcatgggcattggaaacatcaaagaaaacactgccgagatcatgaaataccgagatccagacactcccgcctgcgccatcgaaagtgggaccctccctaacgaaagggtggtcttcggcacactcgcaacgatcgcggataaggaaatcaacacccctgcgatactggtgattggcaaggtcattgacgtattcaagcaaataaagggaatcgaatga

SEQ ID NO: 3757 - DNA, 720 bp, synthetic construct
  source 1..720: mol_type = other DNA
atggaaatcggcgagattattactgatagcttaaagtatccgattaacaacatcaaggctttaataatttacatagtcctcggtatcgtggccgggctcgtgctcgtactgaccggcgttggcgtcggagccggggccatcgccaacagcgcagccgccacgggaatcgtgggaatcattggaattattatcttcttcctaatatacctgctgatcctgggctacgaactggatgtgatcaactttgggattgaaagacgagatgacgctcctgagatcgacttcgcgcgccaaatcaccaatgggattaagtggtacattacgtgcttcatctatatgctcatcccaactatcatcatgatcattttgtcctacctcaatcagacactgggtctgatcgtggggataatactgtttatcatagcagccttcgctctgctgatggctcagtgtaggcttgcgcacacagacagcctgggggaggcactgaatattcccgaggcgattaaagatattaccaaggtgggcatcatcaaaataatcgccgtgttccttatccttgttatcctcggccttgtcgtgtcatttattttgggcttgttttcggtactcggcgacgtcggcacatatatcggagctattctgtctggtatcttcaccatctacctagcctttgttgtcttccgggccagtggactgttgtattccgacgcagtgtga

SEQ ID NO: 3758 - DNA, 1512 bp, synthetic construct
  source 1..1512: mol_type = other DNA
atgaaaatcctcttcctgaacttgccatacgaatttaacatcagcagggcgagcagatggcctgaaaagaccaagtcaggtaccttatattatccctactggctcgcatactgtgtcggggtctgcgaacgtgaggggtacgactgcaaattggttgattgcattacaaaggcctacacaaccgaagacacagtggaagaggtgaaaaactaccaacccgattacatcatggctgaaatcacaacccctacttgcgcttatgattacaccgttataaatgccattaaagaggcctaccccaaggctaaaatcctaattggcggaacgcacgcaaccatcctgcccgatgcagtcctgaaagagtgtctgggcatcgactatctccttcgccaggagtacgactatacggtaggggagctgatatcctctgacgatgtggcaagtgtgaagggagtctcctatcgggtaaactctgatggtgtggacatcgccagtctgggtatcaacctactgactgaacccgtggacttcgaagtaaggcataccgaagaccgagagccgcttgaggacctcgatagccttccatacgtgtcaaaggtgtaccagaagtacctaaacttcgacgactatgcatacgccttcgcccaaaagccaatgatccagattgtctcctcacgcggatgccctaaccagtgtaacttctgcagctacccttcgacaatgggcggaagaatttaccgcacacgaagcgtcacggaccttgccgatgagtttgaatacatcttgaaggagctgccagagatcaaggaaatcttcattgaggatgacaccttcactgttaatcagccaagggtgattgagttttgtgacgagatcataaaacggggcctcaagccgatctggtcctgtaacacaagggttgacctgacctacgagaccatgaaaaagatgaaggacgccgggtgcaggttgcttgtgtgtggctatgaaagcgggaatcaggacgtgctcaatgaaaccaaaaagggcatcaccctggaacagagccgcgcctttgccgagaatgccagaaagttagacattaaagtctttggctgctttatgatagggctcactggggacagcctggagaccatcgatgagacttataagtttgctcaatccgtttacccggacatgtgcttcttccagcaggcggtgcccttccccggtactggattctatgattgggctaaagagaatggctatctcattacagaggactactccaaatggctgaacgaggatcggtatctgaactgtctggtggactacccttacgccgatcacaaggagatagagaagctgcgggacagtctcatgagcaagtactatttcagttttgcatatattgtgaagactttcttggctaacctggattgggtggaatttaagagagtcatgcgaggaggcacgcagtatattacgttccggctgaaaaaagcgctgaataagtcggataatctggattga

SEQ ID NO: 3759 - DNA, 777 bp, synthetic construct
  source 1..777: mol_type = other DNA
atgaaaaagaagatagcaatcacaagacctcaggagcggtcgaaagccgccaaggagttcatcgagaactacggcagcgaagccatcatcgtcccaacactggaactcaaactggagaataccgaatcactcaagaacctgatggagaagtccaatgagctagactggttgatctttacatccgtgagctcaatcgaaagcatctttgagttttatccggacttcctggacaagctgaatcccgagtgtaagattgcgaccattggtactaaaactgccgagctgggtataaaaaagggcctccccatcgacatcatccctaaggattacacggctgaaggactgcttgaagagtttgagcgcatcgacctcaacaacaaaaatgttggcgtgcctcgaacattctctgctcggactattttaccggagggacttaagaatatgggggcaaacgtgatcctggccgaaagttacaaaagcgtcattccagaggacacaagcaagatagaaaaactgattcagtgcatcctggatgagaagattgacggaatcaccttcaccagtcccttaaccgtgtccaacctattcgaaatagctaaagatgaagataaggataacctcgtcgagaagttgtctacgaccacccttactgtggcgattggcccaattaccgggaatatactgaaccaactgggggtgaaccacatctaccccaaacgctatacggtaaaggacatgattgatttgatgttcagggagctcaacaatagggaatga

SEQ ID NO: 3760 - DNA, 906 bp, synthetic construct
  source 1..906: mol_type = other DNA
gtgaacggagaatatctgatgtttattgattccgatgacacttacccaaaagacgcctgcgagattctcctgaataagatcgaggaatatggctgcgacatcgccttcgggcgctatctgaggcattacccggaggagaatttcatccgcaaatcctacaccccctacatcgacacccttgatgaaccctacctcagctacctggatgacctcgtaaagggctcaaactttaagggaatcgtggggagcctgtggaagaacatattcagtaagttcttctacgggagctccatcgacatgaataagttcaattcaaaggaatctgacaactcccacccaaaggagctggataaaaactacaaaaacaacaaagagattttcataagaaatattaaggatgaaaataaagaggagattgctatcctcaagatccttccttcgttttggactaaaatctatagaagtgagcttatttccaagaacaacatcaacttccccgaatgtgtctctgccgaggatctgaacttcctcctcgaagcgtactttaaaagcgaaaacggcatcttgtttttgaacgacaagattgtctataactactttatgcggctggaggttgtggacaagtcagtgacaaaaaatatcaacttccggctggtgtacgatagcatcaaggcatataggctgtcttcggagctgtgcgacaatttcaatataaagaataaggacctgttcctaaacccttatctcctgaactggattagcctctggctaagccgaaaaaataccaaagaggagaataagatatttctggaggaatttgacaagttagataagacgaagaagtatggtttgaagtacaaactgattttaaagaccacaaaattgctgcttaaaatcaaaagttga

SEQ ID NO: 3761 - DNA, 324 bp, synthetic construct
  source 1..324: mol_type = other DNA
atgaaagaggtgatgatctggccgatttatctagacgcagacaagtcgctcaatgaaggcaggaagatcagtcaggaatacgctattagcgagccaagaataaaagagatcgaaaaggccgcgcagaagctgaagtacaaatataccgtcgaagaggataagtcctaccctggcgaatggtataacaaaagcggtcggatcataattgagacagacgactcaaagaaagagatcctgatgaacctgtccaatagcatcaaagatattcgcgaggcccgaaagaactacaagcccacgaagaaagggaagaagggaaaaaagtga

SEQ ID NO: 3762 - DNA, 1443 bp, synthetic construct
  source 1..1443: mol_type = other DNA
atgatcgagacattaccaccagacatgaagcagaagtacgaggaggcaaaggaactgatcgagtccagcgaagacattaagatttactctcacacagattgtgacggcatctcttccggcgccatcctctccacgattctgaaacgaatcggcaaagactatgagatagagattgtcaacctggatgtcctggaggatttggagattgaacatgagctaaccatcttctccgacctcgggtcaggccagcctgtagacaagcacgccaagaaggactcgaaaatcctgattctggaccaccacccgccacttagggagatggactatcccgacagtgtggaatatacttatctcgagataaatccaatgttccacgatatagacggttcacaggagatctgcgggggggggctctgctatctcctggccaaggagtttggctacagggacctcagttggatcggagtgcttgctgccatcggggatatgcagaacacgaagaccggcaagcttcaggggatgaacaaaacaatcctgcaagatgccaaggaagaggggctagtcagctccgatacggacctgtcgctgtacggcagacagacccgccccctcttcgtggcactgtcctacttcagtgatgtgaagttgcctatcaccaacaataagaacgaaacaatcgcgcttctgcaaagactgggaataccccgaagaattaaggacgagagcgttccttccggagaaagggcgaccaccctcagtgacctgaatgacgctcagaaacgcgcactgactagcgagctgatacggatgatcagcaacgagattcctccccgttacagcatttacgttcccaagctggtaatagctgacacctacgaatttttagccgaagaagacggcacattcctcagggatgcttctgaattttccactgccatgaatgcctgcgtgcgaaacaacgaggaggtcgtggcgctgaaaatcctagaagggaatcgggcggaggctctcgatgctcttgaaatcatttctaaagaccatcggggttacttggccgagaacattcagagcatcgaggatgagcataagattatccagatgaagaacctgcaatacttcgacggctcaggcatccggagcaatgtcgtgggtaccattgccggcatggtgctaagctacggagactggcgcaagcccatgattgcatttactcaggtgagtgatgagaaccaggatctgaaaatctctctgcgctgctcacggcttttggcctatgatggaatccacttcgggaacatcataagagaggtggcacagagcctgggcggaaatggaggaggccataatgttgcctgtggtgcatatatcccgaaggataaaaaagatgaatttttaaatttgatgaacgagaaactcgaaggtaaactggctttggaagactga

SEQ ID NO: 3763 - DNA, 828 bp, synthetic construct
  source 1..828: mol_type = other DNA
atggagattttgcaaaaacgcggcgcgttgactcatttccagatactcggtgagataagcaagcaggagccaaacctgaaacagaaggacctggctgaacggctcggaattacgatccaggccgtgtccgagaacattaagacactgaccgagctggaatacatcacaagcaaggacggccgagccccttataaaatcacgcagaaggggattgcaaaggttaagaaagatgcaatcatccttaggaagtataccgacagtgtgcttgagaccatgacatactataagtccacttggcccgccattgccaaggaggacctgaaagaaggtgacgaagtcggtctgtacatggaaaatggacggctgtacgcctcaataaacgcccagacttccgcctatgcagatgtgatcctggacaccaaaaagggcttcgatgttgctctaaccaacctcaaagggacaattgagatcaaagacagcaagatcttaatcgtcacactgcccccaatcaaagatggggggtcacgctctgctgacctagacctcgtgaaaggcatctacgaggggaactacgaaaactacggactcagttccattgataaggtggctgctatcggcaccacctcacacgcagtagccaacaatcttggcatcccgatagacattgaatttggcgtgagcgaggcgtcccagtcggcagtgagaaagggactgaatgtcatgatcctgagcatcggagacatgagcaagaatattagtaaagatttggaggatgcgaatatccagtatcaagtcatagatgccaagaagtctgtaaagacggcctga

SEQ ID NO: 3764 - DNA, 696 bp, synthetic construct
  source 1..696: mol_type = other DNA
atggaaaacaagcttatcagacaagacactagcgacctggacatcgtcaatcacccagagatcaagggtctccagattattgagggaaaaataaattttcccatctcctggctgaaccagcaagggtactgcgaatacacactttacctgcagtacctcaaaggcattaagacaatgcccacgcaggccatgaccacaggcaccaaggaacatctgaagctagaggaagagtttaagcagactgcaaccccatcaagtttcgacgatgcattcaaggaatccaaggagaaggaaatcctgtcgcgggagatgtttgtaatagatagtgaagagggggtgcgaggttttattgatgagatctggatgactccagatgagatcgtgatcattgacgacaaaccgggaaacagggcttatcccagctctatgaaccaggtccgcgcgtattgcttggccttcaaaaacatgattggggacgacaatcggatcatcaggggcgctctgcgccagagaggcacggacaacatattctggagcgaaatcttcgatgagaaggttgaggagaacatcttatacctgattcaccgtatgcatgggctcttcgaaggcaccaagcctttcatacctaccaaaaatggaaataaatgtcgggcctgccgctatcagtcctactgtgagcacaaagtggatatctga

SEQ ID NO: 3765 - DNA, 441 bp, synthetic construct
  source 1..441: mol_type = other DNA
atggatctgtttgtcaaacgcatcattgcttacatcctggacttctttgtggtgtcagccttcatgtggattttcagctatttagcgtacttctttattaactatcttaacatgttccagatctaccactacttcatcttcatactcccaatactgattcttgtgtactttacattcttggaaaagaatatcggggccacggtgggcaagaaactgatgtttatagaggtgaagagcacagtcgccaagcggagtcgaaacggcaggaactataatctgacttacgggcaggcatttattcgctccctatccaagatctactggttccccatcatcatcgacgtgatcctgggcaagattgcaggaaaaaccagactgctcgatggattctctaaaaccaccgtagttgaggaaagggtcgaccggtacctctattattga

SEQ ID NO: 3766 - DNA, 1011 bp, synthetic construct
  source 1..1011: mol_type = other DNA
atgaaaataggtatgtcacacggagcggggggagaagtgatggggaacctcatctcggagaccatccttaacaacctgagtaaaaaagccgtggagggcggtctgggcctcgatgctctagacgacggggcgacgatacctctgggcgattacgaaattgtatttaccacagacgggcacaccgtcaaccccctgttcttcccgggaggagatatcggcagaatttcagctgctggtaccatcaacgacgtgagtgttatgggcgcaaagcccttggcaatttccaatgcaatgatcttgcaggagggcttcccaatagaggatctggataaaatcatcaagagcatgagcgccacttgcgaggaggccgacgtggcagtgatcacaggcgacaccaaggtcatggaacaggataagctcgaaggcatcgtcattgtgaccacagggattggcatagccaaaaaaggggaggtcatcaaggactccacactgagcgtgggcgataagatcattatcagcggtagtgtgggggaccatggcatgagcttgatgtcctttagggagggcttcggatttgaaacagagctcaaaagcgacgtggcccccatgtggggaattatctccaaggcgcttgaagtgggcggggtcacggccatgaaagaccccacccgaggaggtcttgcaaattgcataaacgagatggcccgcaaatctggggtgggagtcctgctgcaagacgaggccattccagtgaagcaggaagtccgggcggcttctgaaatgttaggcattgacccttatgaagttgccaatgaagggaaggttctgatgggcgtgaaggctgagaaggctgaggagattctagaggccatcaagactgacaagtacggtgccgacgccgctatcatcggggaggtaatcgacgatgataaggtgctgatcgaaacgggaattggaggcataaggattctcgagactcctatcgcagatccggttccacgggtatgttga

SEQ ID NO: 3767 - DNA, 378 bp, synthetic construct
  source 1..378: mol_type = other DNA
atggccatttgccagggcaagtccactcgcacaccgtcaggtgcgagacgcgtggcaaatcggggaaagcgcaagagcgaactcgggagggagagcgccgagacgaagctaggggacaaaaatctgagaaaaatcaggacccggggcggaaacgtaaaaaaccggctggccagagacaataagattaatgtggtggacgccgagggtaaggcgcaaaccgtcgagatattcggcgtcatcgaaaacaccgctaacccaaactacgtgcgaaggaacatcattactaaaggggccatcgtcgagacagcagctggaaaggctaaagttaccagtcgacccggccaggatggggtgataaacggcgtgctgatcgaatga

SEQ ID NO: 3768 - DNA, 681 bp, synthetic construct
  source 1..681: mol_type = other DNA
atgcccgagtccccagagcaactggctattgagaaagaaattcagatccagaaggacaagtttctgaacttcttcaatggcgagcttccagatacaatggaactggaatttgagggattctaccgaagagggtttttcgtgagcaagaaacggtatgccgtcattgagaacgagaaaatcatcgccaagggtttagagcttgtgcgccgcgactgggcacccatagctaagaaaacccaggaggaaatattgatggccatcctcaaggagggggacgtgaaaaaggcggaaaagatcattagcaaggtcctgaggaaaatcaaatccggcgacattgcaacgaaagatctaatcatacatacccagatcactaagaacctggatgactataagcaaatcggcccgcacgtgatcgctgcgcgtgaaatcgaggcccacggcattaaggtggggaaagggacaattgtacagtacataatctcgaagggcaagggttctattagccagagggccgtcccttatgagtatagtgaaggagtggaatacgataaggagtactacatcgaaaatcaactgatccccgcagtttccaggatgatggagcctctcggatacgacaaaaaccggctcagagaactggcctcaaccgagcggcagcagagtttggacgccttcttttga

SEQ ID NO: 3769 - DNA, 681 bp, synthetic construct
  source 1..681: mol_type = other DNA
atgaccaaagctgtgttcttcgacatagatgacactctgctggacacgtctagctttgcagatcttgcccgccacgcggctattgagtcgatgtgcaacaacggcctgccattggagcctgatgaagcctacgacctcctgaaagacattatcaaggagaagggtagcaactattccaagcactttaacatcttgaccaaagaagtgctggggaaggaagatccccttttggtggccatcggcatgaccacctaccataacgtgaagtttgcacttctacggcccttccccagaacaagtgccatcctcatctacctgaaaagtaacggctataagttaggggccatcacaaatggaatcacaatcaagcagtgggagaagctggtccggctgaatctctaccacttcttcgacattgtaattacctcagaggaggtgggagtggagaagccagacccggaaatctatctggaggcctgcaggcgaatggcctgcgacgtcaaaaaaagcgttatggtagggaataagctagatattgattgtatgggagcagtgaacgctggcatgtcagcgatcctggtcaattccactctcgatgaagaggaaaaagagagggtgaacaatgaagacattgacataatagtcctcgacagcatctccgacgtggatacggttctgtga

SEQ ID NO: 3770 - DNA, 789 bp, synthetic construct
  source 1..789: mol_type = other DNA
atggcgcagatcaagtgcccagactgtggcaaagaacaggaggatacaaataagttttgtaaaaattgcggagccaacctatccaacgtaaaagccgaggaagttaagctggacctcgacgcggcccccacggaagagaaaatcgacttaaacactgccccaacggaggaaaaactggatacagatgccagcgaagtgaaggagacccctaaagcccctgtggaaaacaagaagatatgcagcaagtgcggacatgagttgaacaatgagaagttctgtcccaggtgcgggcagagtacagcatcgatagtgccatacgaggccaagacggaaagccagggtgagaataacgacaagacctgcccctcctgcggcacaaaagtcactacagaaaagttctgtcccaactgcggcagtaaaatagaggagaagaaaccggtccaaacccagaacgctccccagaagtactgtcgcaattgtggaaatccgattgatcctaaggctgagatctgtccaaaatgcggcgtgcggcagttgactgttgtgaagaaagagcctctgttttcactgattctctcactgatcttccccggcctggggcaattctataacaaccagacccacaagggcatctttctcatcatcggggcaatcgtgtccatcgtgcttaccatttttgtcattggagtccttctgtacatgctggtatggctgtacggtatgtacgacgcatatagcaccaccattgctctcaacaatggggagtatgtggaagacaagctcttctga

SEQ ID NO: 3771 - DNA, 273 bp, synthetic construct
  source 1..273: mol_type = other DNA
atgagcgatttcgaggaggtaatgactgaatacatcaagatctcaaagcaccgggaaaaggtcttcaaaacactaaaggatggctccaaaaagccatccgacattgccagggaaacgaacctgaacatcaacagtgtgagcctgtctcttaaacagctcaccgaaaaggagctggtgtatctgttgaatcccgacgacaagaaagggcgcctctacaaactgaccgaaattggcgagacaataatcaaggagtttgacgagaagaccgagtga

SEQ ID NO: 3772 - DNA, 777 bp, synthetic construct
  source 1..777: mol_type = other DNA
atgacaaagattagacttatctcctggaatgtgaacggcattagagccattcacaaaaagggcttcctcgactggttcaatgaggagaaagccgatatcgtgaacctgcaggagaccaaggctaagatcgagcagctgccaaagaagctcatcaatgtgcccggctacaccagctacttccacagtgctgagaggggaggctatagcggagtggccacgtacacatccatagagccaaacgaggttatcaacggaatggggattgagaaatttgatattgaaggccggctgatcaggttggactttgatgactttaccctcctgaacatctactacccgaacgggggtcgcgacgaggagaggttgcagtataaattagacttctacgacgccttcctggactacgctaacgatctgcgcgaccaaggaaagaatctggttatctgcggtgacctcaacactgcgcataaggaaatcgatcttgcacggcccaagcagaacgaggatgtgtcagggtttctgcctatagaacgagaatgggtcagcaagttcctagacaatggctatgtcgacacctttcggatgctccatgaaaatgaaaaagaaaaatatacatggtggagttataggactcgggcgcgagagcgcaacgtggggtggcgtctagattacttcttcgtaaacgaagaatttaaagacaatgtcagagcatcgtacattatctccgaggtgatggggtctgatcactgtcccatagccctggagattgagatctga

SEQ ID NO: 3773 - DNA, 1548 bp, synthetic construct
  source 1..1548: mol_type = other DNA
atgagcgaggttatagataagatcatcaatgagctgcacatttatgaaaagaaactgctaaaagagctggaaaagaacgaagatctgagtcctgacgagatagcgcaggacacaggcctcaacattaagagcgtcatgagcgccgccggaattttagcgtccaaaggaatcatcacggtgaagaaagatgtggaagagaagttcagcttaactaaatatggtaagaagtatgctgagatcggtctgcctgagcggcgaatccttaatgagctgcaggagaaaaaggaactccacatgaaagacttggccaagatagacagtttggaaaagaaggagatcaatatcgcaattggctggctggttcgtaagggctgggctaagataaacaagggagtcgtgacgatcaccgaggtgggagaatcctccaaggacaaattaggggatgatgaagtgttgctgaacctgctcaatgagaagggcagcctgtctcaggacgaacttgacgaggatatggctaacggtctggccgcactcaaagatcgcaaaaaactgatcgccagtgagaagaccacttcccatagcttccagctaaacgacctggcttacgagattctggacaagggctttgacctgaccgaagaggccacccaactgactcatgagcagttgaaagacggcagttgggccaagctaaaataccgaccgtacgatattaacgctgagtaccccattttcttccccggtaaggagcatccactgcggcggatcattcaggaaattagggaaatcttcctgaacctgggcttcacagaagccaaaggagagtacctcgagtctgccttttggaatttcgactcattgttccagccccaggaccacgccgccagggagatgcaggatacattctacgtcaagaacccactcacttgcgacctgccagatgacgaccttgtggagagggtagccaaaacccacgaagatgggggaaataccaattctgaaggctggcattatgactgggatgcagacatcgcccgccaatcggtgcttagaacccacaccacggggatctctacacaggcactagctaactgggagcttccaatcaaaatgttttcagtcggccgggtatttagaagagagacctttgactacaagcacctgcctgagttccaccaagtggaggggctggtcgcagcgcccgggatcaattaccagaacctcctcggaacattgaaggagttttataagaaactcggctttgaggtgaggttccgccctgcatatttcccgtacacatacctctcaactgagtgtgaaatctatctcgaagagaaggaaagctggatagagcttggcgggtgcggaatgtttcgacccgaagtgttggaacctctcggggtgaaagtcccagccctggcgttcgggctcggtatcgaacggctggctatgattagatacgacctgtccgatatacgcatgctttacaagtccgatatctcgtggctgagggaagttcccctggaggagggcattaactttgagtga

SEQ ID NO: 3774 - DNA, 900 bp, synthetic construct
  source 1..900: mol_type = other DNA
atggaagccaaccagatcgccaagctggcacagattgcttcagcgctcgaggtcagcgggtatccaaagcccggaaacgtgcataggacgcggaattatgatgacatggtcttcgaggacttcataatcagtggcgtggtgattggagataccatccgagaactggccaaccacacccagtccatcgatgatctgtcggacgcaaatctgggcaaatatattctggaggcagtggccgaaacaaacaaatggatcgccaataacaccaatctgggcattatgatgatgtgcgtccctattgcagccgcggctagtataagtgacgatttcagccagatccaagaaaatgtgggtaaattgatggatgcaacgacagttgaggatgccgtagatctatacgacgcaattaacctcgccgacgctggaggcatgggggaccaggatgagtttgacgtgaccagcgagaaggctaaggacgagctgcgggccaacaatcaaaccatgtttgacgtgttgaagataagcgcgccttgggatagactcgcttctgagcttacttccaagatgcccgtgtcctttgaaatcggttatccgacattcactgggttctgcaacagctgtgaggacgtcgataaaatcaacaaggccacagtcctcaccttcatgacacttctgtccgagatcccagacactctcatttcacgcaagtacggggatgaggttgctaaagacgtgtctctaaaggcgaaagagcttctggaatttaaggatgacgacgacttcgtagaaaagctgctggaatttgacgactacctctacgagaacaaatacaatcccggcaccactgccgatttaacggctgcctctatcttcatcagctacttggacaaggaattttga

SEQ ID NO: 3775 - DNA, 996 bp, synthetic construct
  source 1..996: mol_type = other DNA
atggacttcccaaacaccaggatgcggcggtatagaaaaaactctaagatacgggacatagtccgtgaaaccaagctgaataaagaggacctgatttacccaatcttcgtgaaagaggatctgaaggacgatgagaaggaagagattagcacaatgccgggagaatttcgattcagcatcaacggtgctgtggagtacgccaaaaccttggaggctaagggactaagatcaatcatcatcttcggcatccccagtgacagcgagaaagatgaaatcgcaagccctgcttactcccccacagggatcgttcagaagaccgtgcgcaaactcaaggccgagactgacctggtggtgatcaccgatgtatgtctttgcgaatacacctcccatgggcactgtggcatcttgaaggaaaacgaagacactgattttggatatgagatactgaacgacgagtccctgaagttcctggcaaagacggcggtcagtcacgcagaggcgggggctgacattgtagctcccagcgacatgatggatggtcgcgtggcagccatcagagaggctcttgatgaggcaggctactataatacaatgatcatgagttattcagtgaagttcgccagctcgttttacgccccatttagggaagcggcgtgcagctccccttcggtcggcaacaggaaatcctaccagatggaccccgccaatgcccgggaggccattcgagaggccgagcttgatgtgacggaagggaccgacttcctcatggttaagcccgccttgccttatctagacattattaagacagtgaaagatgaatttaacctgccgctcgtcacgtataatgtcagtggcgaattttcaatgattatggccggaatagagaacggctacctcactgaggacagcatcatggaatccctcttatgcattaaacgcgccggggcagacctgattatcagcaatttcgctccatacgccctggatcacctgtga

SEQ ID NO: 3776 - DNA, 1101 bp, synthetic construct
  source 1..1101: mol_type = other DNA
atgacaaacaccattggcaaaatcttcagaattacatcgtttggtagcagtcacggcaaggccctcggagcgattgttgacggctgtccagccaatctagaactgagtgaggaagacatacagattgaactgaataaacgcaggcccggaaccagtgccctgaccactgcacgtaaggagcaggaccaggtggagatattatccggcgtctttgaaggcaagacagatgggactcctataacgggcgttgtatacaataccaaccagaagagcaaagactattcaagcctgaagaacactccccgcccaggacatggtgactactgctggatcgagcggtacggaaactacgactataacgggggcggtcgggggagcggtaggattaccatcggccacgtaatcggcggggccatagccaagaagctgctgtccgccaaagggataaagatcatctcccacgtcgtgcaaatcggagatatccgcgctaaggaggcaaatattgaaagccttgaggaaaacatcacaaagaataatgtacggtgcggcgaccttgaggtggccaagctcatggaggatttgattctgtctaaaaaggaggagggaaacagcgtcgggggggtggtggaaaccatcgccctaggggtgccagcaggcctcggcgaacctgttttcggcaagatcgatggggatcttgccaaagtcctcatgaacatcaacgctgttaagggagtggagatcgggctgggattcggtgtggcgaccaaaacagcaaaggagatcaacgacgagttttattacgagagggacgacgtgaaaacgaagaccaacaattccggcggaattttgggaggcatgacaaacggcatgccgattgtctcccgaatagcaattaagcccacgcccagcattagccaaattcaggaaaccatcgatctgaataaaaaggagaacactaccatcgagattaaaggtcggcacgatccctgcatctgtcctagagtcacggctgtggccgaatcagctactgctatcgtgctggcggaccatatgatccgatcagggttcatccacccgacaaatctcgaaaaaagagtgtga

SEQ ID NO: 3777 - DNA, 942 bp, synthetic construct
  source 1..942: mol_type = other DNA
atgaaaatcacattcctgggttcaggcggaggacgcttcaccaccattagtcagaaacggatgactgggggcttcaggctagataacttcgggggaaagaattatcatatcgacccaggtccaggggccctggtcaggtcttaccaattcggcgtaaaccccaccaaaattgatggcatttatatctcccatagtcacaccgaccactacggtgacgcggagattcttatcgaagcgatgacacggggaatgacaaagaataacgggattatcatggggagcaggtctgtgttcgagaagtacaagcggtgggggcctgcaatctcgaactaccacagaagcaactccaagaacctgattctggtgcccaataaaatcaagcgcttccccgacttcagcataaagggcacggacaccatccacggcgatcccaccggtgtgggctttcagatggaggcaaacaacctcaaggtatcctacacgtccgatacaagatattttgaggagttgaagaaatatcacaagggcgccgacatactgatcggaagcgtcctcagacatgatgacgatgccatcaagggccatatgtgcactgatgactttatcaatttggtcggggacgtgaagccaaaattagctataatgactcacttcggatttaagatgattgctgccaatccggtcgaacaggccatcaaggtttcaaagaacacaggcgtgcgaacgctcgccgcctttgatggaatgctggtggacgtgaacgaaaaatatcctcagaagtcgcgtatgcttcgactgaaggaccggtttgcagctcacatgaaacaggaagacgtgtacagtaccaattttaaagttaaatcaaacaaacgcaataaaatgcgcaataagaagaagtactacaataacaacgattccaacaatagcttcagctctaaatga

SEQ ID NO: 3778 - DNA, 927 bp, synthetic construct
  source 1..927: mol_type = other DNA
atgagtctgatcatcgcttacgtaggaaaaaagggatgtgtgatggcggcggataagcgccgcatcgcctatttcgggctgaaggagcaacgggagatcctggaacaggaaatttactctggagaaattcacaatgatgaggaattatacgccagggcagaagagctagacgtcaatctcaaggttacagacaacgcctgtaaagtaaagagcattgagaatgtggccatcggtgaggtgagctcgcgtggcacaatggagactaaacggaaaagaatctatgggaccagcaatgggtttaaaatcatcgagctttccggtagccacgtgctgaactctaaacggggagtctcttcaataatcgtcttcggcaacaaagtgacgaaaagtctggccaataaaatgattcaggagagatggaagccgagtttctccttgaaatacatgggagagatctttggcgagattctaaaggacatcgccgagatcactcccagcgtcggcaaggattacgatgtgataattgagaagaacaatctggcaaagagccaagtacaggactatatcgacgaagtcgctgagcgcgacgttaaggtgttggccaagttccgagcacagcttagggagcagctgatggaacagaacgagaacataaaattggcttccaccattatcgaagagggctcagttggcgaaatcgtgataatcgatgataccctcattgaggtgaagctcaacccagacgtgagggcctttgatgtgaactggaaggtcctcgcagggcctggtgaaaacgttctcatggtggtggacgactccgaagggcttgacaagggcgatgagatcgtcattgaggacgaagtcctgtgcgtgaagaagaataaggctaacctgaaatgcgacataattctgtgccatctggaatga

SEQ ID NO: 3779 - DNA, 381 bp, synthetic construct
  source 1..381: mol_type = other DNA
atggtcaagatcaatgagatttacaggtgcaaccactgcggaaatataatcgagggcatcgtggagggtgccggggagctggtgtgctgtggtgaacccatggaactcctcgaaccccggcaactggaggaggggggagtgaagcacatccctgtagtgacaaaggaagatgggaaaatcgtggttaagatgggcgaagtggaacatccgatgcttgaggaacactacattaactttgtccagctgaccattggcgaccaggtcttccgcgctaacctaaaaccaggagaggagccaaaggcagttttcgacatcaatgccgagattgaggacataaaagcgatcgagtattgtaacatccacggcttgtggcatgcctga

SEQ ID NO: 3780 - DNA, 510 bp, synthetic construct
  source 1..510: mol_type = other DNA
atgaagaagaacattttcctgattgccataatactcatcgcagtcgtggcagtgagtgggtgcatcaacagccccatggataatatcaacaacaacatgaaggaactgaacacggatatcaccgaaggagacaccgactacaattctgccatcaattatatcaataataaggactttatcagtggcactgacaacatccagattgcgaaagacaagtttaatgatgcggacgagaagctctccaacattgagcagtacaaatcgagcctaaacgagagcatttatcttgactacttatatctgatcaaggaggaagtctccattaaaaggcaggccagcgatgaactgtacctggctttgcaatattacacaaacaatgacttcagctctggtaactcatacgcccagtcagctaattccctcatgaaccaggctaaggtactgcaagatgagcggaaccagatcgtggagaacaatccagatcttttcaaaaaagccggcataatctga

SEQ ID NO: 3781 - DNA, 2343 bp, synthetic construct
  source 1..2343: mol_type = other DNA
atgaaggaggcttgccctaaatgcaacggaactggtttagtggcggtggatacaaagatatgcgatgcatgtgatggaacaggatatgaggacacgtttgaaatgaaaaaccacttcaaaggagtgaccagcaatgccagggccaaattcgacctggatgccgaccaagacatcccctgcgaagtatgcaacggaaaaggtgtggtggatgttttcgaagactgtccctactgtaaggggacaggccagatcaacgtgtgcaacagctgtggcaaggccattcccgatgataaggattactgtgacgagtgcaacgaaaagcagcttgaagagaagatgaataaagtaaaggaaagactggaaaatcctaaaaagcttaaggtcgagtcagacattgagggcaaggaaatcgtatacgagctcgacggactatgtgatatgagtgacttggaaatcaattcgctttacaagggcaaagtcacccgggtggaacgatacggtgtgtttgtaagcctcaacaaccaggtttggggcttgatgcgaaccagcaaccctcacaataaggtcggagacaccatctttgtcaggatttcgcagatcaaggagcggaaacgggaagttgatatggttccggcccacgtcttcaagggcgagtacgtggtcaagaaactatccaagaacattgggagaaccaaaatcgagacccttgatgagagcagtctcaaaagcattgtgaaggtctacggggaggtcatacaaatccagcagacctccgggcctaccatctttacaatcactgacgagacttcaatcacgtgggctgctgcctttaacgagcctggagttcgtatgtaccccgaaattgaagtgggcgacattgttgaggtcattggcgaagtcaatcagcacaatggagagatacagatcgagtccgagtccatctccaagctggatagcgacgaggctgaagctatgaaggaactgatcgacattgctctggataaaaaagcagagccggatgatgtggatttcctcatcgagagccccgtgctggaacgcctcaagcccaaaatgcgcgaggctgccaaagtcattcgacgtgcggtgctggatgggcgctccatactcgtaaggcaccataacgatgccgacgggatctgtagcggtgtggcaatagagaaggcggtgattccatatctgaaggaaaacaatcccgacaatgatgccgagtaccactactttaaaaggtctccgagcaaagccccattctatgaactggaggacgtggtgaaggacctgtcctttgcgctcgaggacctggacaggcatgggcaaaagctgccactcattgttctgctagataacgggtctaccgaagaggatatagtggccctgatgcaggctaaaatatacgacatcgagatcgtggtgattgaccaccactcccccgggaacctaattacaaaaaccctgaggaacggggagacggtctcaggagatgtggaatctgctccagaggacattatgggaggaactgtcgcagtggacgagtatgtggacacacacgttaacccctatctggtcggcggggactcgcagatcacagcaggcgccctggccactgaggtggctcatttcatcaatccagagatcgaggacctgatcaagcacctgcccggcattgcggcacttggtgaccatgccgagtccgacgaggccgaacagtatgtggaactggccgccagtaagggctactcacgcgaccggctgaagcagattgctgagtgcatcgacttcgaggcttacttcttgagattcatgaacggaagaggcataatcgataccatcttgggtgttgacaacattgacaagcaccctaagatggtggatgccttgtataaagagtatctcagacgggtggacacgcaaatgaaagcagcgctcccgaatataaagcgggtgaagttggacaacggcatctacttcaatgttttagatgtggagaaatacgcccataagtttactttcccagcaccagggaagacctgcgggtttgtccatgacaagattgtcaaggaaatcggcgatgacaagcctatcatcacattaggacatggcccagacttcggtgtgttgcgcgccacagacaccgtgcaccagctctttgggttcaacgtgaataatatcgtaatcagtctggcagataagataccccaggccggtatcgatggcggcggccacgaatgcgcaggctcaatcaaatatattgagggtctgggcaaacaggtactgacggaacttctcaatgaagtcagtgagatgactgacagttctaagaactga

SEQ ID NO: 3782 - DNA, 375 bp, synthetic construct
  source 1..375: mol_type = other DNA
atgtacagcgataaagtcatggatcattttgccaacccaaggaactctggcgaaatagagaatgcaagtggtgaagggactgtgggcaatcctacctgcggagatctaatgacaatctatatagacgtggatgatgacgaggtcattcaggacattaagttcaaaacattcggctgcggggcggcaattgcaaccagctcaatgatcacggaaatcgccaaaggaatggccgtagacgaagcgctcaaaatcacccggaacgacgtggccgatgctctcgacgggctgccgcccatcaagatgcactgttccaacctggccgctgacgctctggccgaggccatcaaggactacaaggagaagcaggaggagtga

SEQ ID NO: 3783 - DNA, 1209 bp, synthetic construct
  source 1..1209: mol_type = other DNA
atgatttatatggacaatagcgctacctctcccgtgaaggaggaagttttcaacgcaatggtgccgtacctaaaggaagagtttggaaaccctagcgccttttacagcttagggagaagtgccaagaaagctgtggaaactgcacgtgaaaacgtggccaaactgatcaatgccgagacacgcgaaatcatctttaccagtggggggacggaatccgacaacatggctataaagggcatagcctttaagctggaagacaagggcaagcatatcatcacaacagtaatcgagcaccctgccgtgcttaggacctgcgagtacctcgagaccaaaggcttcgaggtgacttacctgccagtgaaggaaaacgggattcttgatattgaagacctgaaggaggcaatccgcgacgacaccatcctcattagcgtaatgcatgccaataatgaaatcggcactatccagccgattgaggaggtcggtggaatagccaaggagaagggcatcacgttccacgtggatgctgtgcaatcggttggaaaaatccccgttgatgtcaaaaaagcaaatattgacctgctttccatctcatcccacaagctctacggcccaaagggcgtcggggcgctcttcattcggaaaggagtcaggatcgaaaccttgatacatgggggaggccaggaaaacaacctccgatcaggtacggagaacgtgccaggaattgtgggattcggtaaggccgccgagatcgcttataataatctggatgccaatatcgaaaagctgcaggaaatccgggacctccttataggcgaggtcctggacaaggtccctgaggcatatttgaacggtgacagggaggagcgactccccaacaacgcaagcttccggtttgcagcgattgagggcgaggggctaatcctcagactggacgcgaaaggcataaatggggctacagggagcgcttgtagcagtaaaaacctaaaggccagctacgtgctgagcgcgctgggactggaggacgctgagattcacggctcactgcgcctgtccttgggtgtagagaacagtatcgaagacgtcgaggtggtctcagatgccattgccgatgtggttggcagcctgagacagatgtcgcccttatgggacaatgagaaaaacgagtccctggagttggatgaatccaaattcaccgatgtggatcactga

SEQ ID NO: 3784 - DNA, 1320 bp, synthetic construct
  source 1..1320: mol_type = other DNA
atgacaaataaaaattatggcctgagtacactgggcttacacgcaggacaggaggaacccgacccagctaccggggccagagccgtgccgatctatcagacgtcgtcttatgtgttcagcaacacggacgaggccgctaaccgctttgcactccaggagtttgggcaaatctacagcagattgaccaaccccacatcagatgcctttgaggcacgaatcgccgctatcgaaggcggaaattccgcgatctctgctgccagtggcctggctgcaatcagttacgccttgcttaacatcacaccgcccggcgatgagatcgtctcggccaacaacctttatggtggaacataccagctgtttgactacactttcaaggatctggcacggaacgttatctttgtagactcccaggattacgatgcctttgaggctgccatcaccgataagaccaaggctatttacgccgagtcactcggcaaccctaagctggacgtgcctgactttgagcggctggcggaaatcgcacactcccatgacattcccctcatcatcgataacaccgctgcagtggggcttgtgaggcctttggaacacggggcggatgtcatcgccgcctctgccaccaagtttgtgggcggacacgggacggcagtcggcggatatattgtggacagcggaaagttcaattggggcaacggcaagttccctacaatatcagagcccgacccaagctaccatggcataaactactgggaaatattcggcgatttcccaggtctcggaaacattgcatataccctccgcatcagggcccgcctgctgagggatctgggtgccaccctggcgcccgttcacagcttcatattcttgcagggactcgagaccctcacaatccgtatggaaaagcactcagagaatgcgctgaaagtcgcgcagttcttggacaatcaccccgccgtcagctgggtaaactacccaggtctggaacatcatccaagccatgagacggccaagaaatacctcggcgacaaattcggggccctcattgctttcggtattaaaggcggtctagaggctgggaaggagtttattgataatgtggaactgctgtccctacttgctaatattggagacgccaaaagtctggtgatccacccggcttccaccactcaccagcaactgactcctgaagaacaggaaagcactggggtgactcaagacttaatccggctatccattgggctggaggacgttgacgacattattgccgatatagaccaggcacttgccaaggtgagcgagaaattcggggacgattga

SEQ ID NO: 3785 - DNA, 2100 bp, synthetic construct
  source 1..2100: mol_type = other DNA
atgactgaccttaataagatgttcaatccagacagcgttgctattgtgggagcctccaactcggagggcaaagtgggttacattattgtgaataatatgatcaatgatggttttaaaggcaacatatacccaattaaccctaaggatgacgagattcagggcctgaaggcatacaaaaatgtgtcggacctcccagaggtccccgacctggtcatcgtgtccatccccagtgtgttagtgaaccccgtcgtggaagagtgtggggaatttggcgtgaagaacatggtagtcatcactgccggcttcaaggaaatcggcggcgacggcgtggagagagaaaaccagctggtagccttgggagaaaaatatggcataaatatcattgggcctaacagtttggggatcaccgactcacacactccactcaatgcttcatttagccagatcatgccccctgaaggaaatattgcattcatttcccaaagtggagctatgatggtagctatcatcgactggagcgtcacctccggaattgggttcagcaagatcatcagtctgggaaacaaggctggcacaaccgaaatcgagcttatcgaatacctctcatatgacgacgagacggcggtggttatctgctacctcgaatcaatcactgaagacgacgacttcgtgagaaccctgagaaaggtgtcctacaagaaaccggtcatcatcctaaagtccgggagcagcagcgccggggcggaggccgccagctcgcataccggggccctggccggtagtgacattgcgtttgacacagccttcaagcagagcggtgtgttccgggtgacaaccatggacgaattgttcgatgtcgggctggcattctccaaatgcccactaccaaccggccgtaacctggccatcattacaaacgcagggggaggaggcgtcctgtctgtcgacgccatggagaggtataatctggatctggttaaatttgatgagaagaccaacgcacgcctcaaagaggcagtgcccgaggaggggagtattaaaaaccctattgatgttctgggtgacgcgcctgtgatacggtataaggagtctctcgaggctgtgttagattctgacgatgtggacggactggtggtcatggtatgccccacagcctctgcagatgccgatggcattgccgatgcactggtggaaggggccagcggatttgacaagccggtcattgcggtgaacatggggggcccgatatttgagaatgctaacgatgtcttaagggacaacggcatccctacctacgtgttccccgaaactgcggtcaaggtatttgactacctcgcacgatttgctgccgttcaggatcgaaattatgatgatcccgtaggcgagctggatgacgtggacaaggaagccgtggaggaaatattcgccaaagtgaaagccgaagagcgcgacacgttgctcgggagtgaggcctacgctgtcgctgaggcctacggcatcgaggcagctcccataaagcttgccacatccgctgaagaggccgggcaactggccgaggagatggaatttccggtggtgctgaagattgcatctgataagatcctgcacaaatccgacattggcggtgtgaaggtgggcatccagagcaaagaggaagccgaggaagtcttcgaagagatcatggctaacgcgaagaaagcccacccagatattgttccaaacggtgtggaagtgcaaaagatgatggattccggtatagaggttcttgttggaatggttagggactcacagtttgggcctatgatcgccttcgggatgggtggagtgctggtcaacctcttggaggatgtaagctttaagctagctaaaggcctgaccacggacgagatcgccgagcagatggagagcacaaaagttatgggccttcttaagggcttccggggagaggctcccggagatatagaggccgttaaatccgcaatcatccgcatcgcaaaactcacgctggacttccccgagatctctgaactcgatataaaccctatcttcgtctatgagaagggatcaagcgcgttggacattaagattaagctggcttga

SEQ ID NO: 3786 - DNA, 1443 bp, synthetic construct
  source 1..1443: mol_type = other DNA
atgacaagggagaaaggggagctgaacacactcttcgcagacaagatcaaactctttgtgtgcggccctaccgtgtatgacgacgctcatataggtcatggacgaacctacatctccttcgacacaatcaagaggtacttggagtttaaggggtattccgtgttctacctgcaaaacattaccgatattgatgataagattatcaatcgtgccaaagagagcggcattgacagcaaatacctcgctgagaagtttgagaagagatttatcgaagatatggctgcactcaacgtgaccagcgttaactactttgcacgcgccactgaccacatagaggagatcttggaccagatccagcgccttatcgacaagggatatgcgtatgtcacggaaaccggggtctactttgaagttgccaagttcgaagactacggcaaactgtccaaccggaaactggaagatttagaaacccaccgcatagatattgacagttccaagaaaagtccacacgacttcgccttatggaaaaatcgggaggcacccgaatacgcaggggagcctgtgtgggattccccgtggggtaaaggcagaccgggctggcacattgaggatactgcaatcactgagaagtacttcggcccccagtatgacattcacggcggcgggctggaccttattttcccccaccatgactccgagattgctcagatggaggccgtctctggcaaggagcccctggtgcaatattggatgcacacgggattcctcaatgtgtcaggggaaaagatgtctaagtcgttgggtaatttcattacaatccgagagttgctgaaggaatactctggagacacgtttaggctattcgtgcttctgacccattaccggagcccaattgacttcagcgaggtaagcctgcatcaggctgaaaggaatgtcagccgcatcaagaactatctggaaaaccttgatgagaaaatcaacgacatatttgagaaggggaatctcagtgaagacctcctcaaactagccgagctagaggagaatgagtttgatgaggaactgatcaactttgattacttcaaatcaaactaccctgccctgaaagaaggagtcaacgagttcttcacaagtatggacgatgatttcagcactccaaaggccatcgctgccattttctcatttataaagcagtcaaataaggacctcgaagaagatgatctgatcatcgatgaccttctggccatcaaacactggtttaaggacattagccagatcctgggtatcgacttcttcgtttataaggacgagaccagtggaaacgaggcggagctgctggacatcatcgccgacgtgcggctgaaactgagagcggagaagaagtatgatctgtcggatgaaatcagagataagttgataagcctcggcattgaagtatccgactga

SEQ ID NO: 3787 - DNA, 381 bp, synthetic construct
  source 1..381: mol_type = other DNA
atgaagcccccttgtgagatggtggtctggtacatcataccggccatccggagtgaactagctaaagacctcctgaagctgggcatgaagcagaagaagatctcagagctgatggacattacacagccagctgtatcccagtacctcactgataaacgcggcagcggaattgggttcaatgacgatgtgaaggcattgattcaggagtttgcgaacgacctgaacgatggcaccgccaccaaattcgatatcattccaagaacgtgctatatatgtaaaaggatcaaaacagaagacgtgatctgccagatccacaaggaaaaggggcatatgcccgcagactgccaagcctgcctcggaagcgaggcccaccttctgtga

SEQ ID NO: 3788 - DNA, 741 bp, synthetic construct
  source 1..741: mol_type = other DNA
atgttcgacgacctcaaagacgatctgcaggccgccaaggcacgtgacccggccgccaggagtagcctggagattctctgctgttaccccggaatatgggctatcctgttgcacaggtggaaccattggctttggacgcacaacttgccattttgggggcgcttcttctcccagattagccggttcctcaccggaatcgagatccaccccggtgctcaaataggaaagcgcgtgtttattgatcacggaatgggcattgtcatcggtgagaccactattgtgggggatgacgtgctgatataccagggggtcgtgctgggtgggaccagtctgagcaaagggaagagacaccctactgtggaagatgctgtggtcataggctccggagccaaggtgctaggcaacatcacattaggctgctcctctaaaatcggcgcgggcgcagtcgtacttcaggatgtgccaaggggcgcgacagcagttggggttccaagcagaatcattcatgaggaccggaaatgcgtgctggacctggagcacgagtttcccgaccccgtctcatcagccatcgacctcctgttcgaacggcaggaagagctcgaaaaacgaatcaacatcctaagccacttccacgatatcgatcatgtggagttctcgcatgaccctaaggttgaagaggtatttaagggcgccgacgaaaagtctttttataagctgaataatattatcgaggatgaatga

SEQ ID NO: 3789 - DNA, 957 bp, synthetic construct
  source 1..957: mol_type = other DNA
atggtgaatatcccagagctaaagagaggcatagccaacgatatgactgaggcgatcggaaatacgccgctggtcaggttaaacaggctcacagagggactggaagccgaagtgctggtgaaagttgagtccttcaatcccgtgagtagcataaaagatcggatagccgtgaatctgatcgagaccgccgagaaggacggactcctgaaggaggactcagtcattattgaacctaccagcggtaacactggcattgggctgtccttcgtggcagctgcaaaaggctataagctcattctgaccatgcctgagaccatgtcgatcgagcggcgaaagcttttagcagtcttcggggctgaaattgtcctcacgcccggtagtgaagggatgggcggagctattgctaaggcgaaagagttggcggaaagcactccaaattccttcatgccacagcagtttgagaacaaggccaactctgagatacaccgcctgactacagggcctgaaatctggagggacacggatggtgaagtggatattgtcgtatccgcagccggaaccggcggcaccgtgacagggatcgctcaatacatcaagccgctgaaggctgagtttaaggccgtggctgtggagcccgcaagctctcagactctgggaaaaggagaaaaaggccctcataagatccaggggatcggccccggcttcgttccagacgtactggacgtggacctaatcgatgaggtcgttcccgtgaaggatgaagacgccggcaacacactcctcagacttgcacgtgaggaagggatctttacaggtatcagctcaggtgccgccacatgggccggattggagcttgccaaacggcccgagaacaagggcaaaaccattgtagtgatcttgccagacaccggggagcgctacctgagtaccgaatgggtctttggcgacctgttctga

SEQ ID NO: 3790 - DNA, 606 bp, synthetic construct
  source 1..606: mol_type = other DNA
atgactctcttcaaatacattataacgtcaagccctatcggcgagatcacaatcatctggcggaagaaaccacaattccaaattgaagagatcattatttccaatccaaatcagacatccagccagatagctaaagaaaaatacgaaaaggagggggagttagccatcaacaagaagtcgaagcagttgaacaaggtcctccgcgagatggagaactactttaatgaaaaggactataagttctccctgaaatatctgaacctagataagctgaaaccattccagcgggcggtgcttgaggctgagtttaagaccgagaaagggactgtgaacacctataaagacctcgccaaggaaattggcagcccgaaagcctaccgagccgttgggagtgcactggccaagaacccctttcccatcatcattccctgccacagaaccgtaaagggcgataggaccattggagggttcagcggatttgcaggaggtctggaaagcaagaagacacttctcgagttggatggtctgatgatccagggcaaaaagatagtgggcgacagtcctatcatctcactggacaagacgtctcagaccaaactggtctga

SEQ ID NO: 3791 - DNA, 648 bp, synthetic construct
  source 1..648: mol_type = other DNA
atgagaggattcaaaatgaacgacgaagagaaaatccgggagatctttaggcgactgaatgaagtttacaccatccgtaccttccatgaccacgacccatacaaggtcttgattagaactatcctgtcacagaggacacgcgatgaaaataccgaccaagctgcaaacgctctgtttgaagtgtaccccgatatttacgccgtggcagacgcgcctgtagagcacgttcaggagctcatcaagccggccggattctatcgagtcaaggccgcccggattctggaggtcagtcgcatactgatagaccagtatggcggggaggtgccacgggaaatggatgagatgctcaagctccccggtgtagggcggaaaacagctaactgcgtgatagtctttgcattccaggatgccgcgattcctgtggacactcacgtgcatagaatctccaacaggtgggggatcgccgatacaaaggaccccgaggaaaccgagcaggttctaatggagaaggtcccaaaggacctgtgggtggacttgaatgatctgatggtgcagttcggccagacgatctgccgccctatcggcccgcaatgtgataaatgccccattagcgacctttgtgactatgatgtgagcaaattagaatga

SEQ ID NO: 3792 - DNA, 1368 bp, synthetic construct
  source 1..1368: mol_type = other DNA
atgaacctgaaaataaagaactttagtaagatcaacggaactgtcaaggcgccctcctctaaaagctacagtcacagggccgtgattctcgcctccctcagcgaaggcaaatccaagctctttgatgtcctgtactcggaagacgtcctatcaaccatccgtgcctgtgaagccctgggggcccgaatcgacaaaaagaaagaaatcatcctgaagggggataaaagtcagaccgttgactatcttgaggtctatggtactgggggtaagttgcacaatgtgagtgacgacccgagcagcgacatgatcgacctggcgaactctggaaccacactgagaatcatgacaagcgtcgcagccctgagcgacaatgaggtgatattcaccggtgacgacagtctgaagacaaggcctatgggggccctgattgatgcattggagactttaggggtgaagatagagtcattaaacgagaacaataaggctcctctgaagatttacccaggatacgaaggaggccagacagacatcttgggcagcatcagctcgcaattcatctcttccatccttatttctgctcccctctcggagaacggggtggagctggaggtgtatcccgagtttgtaagcaagccctacgttgacatgaccatctccattcttgagaaattcggcatctccgtggaggaggaagagtatcagttccacgaaacctgcaagaaagagcatacggattgtctgggggtgaaattcatcgtaaagccacagaaatacattgcaagtgattatattgttgaaggagacttctcaagcgcctcctatttgcttgccgcaaccgctatcgcaggggggtacatcagagtgcaaaacctgttcgctgattccaagcagggagacaagctcattctggacattctggaggagatgggtgccaatgtcacggtgttcgatgattacgtgtccctgcggtctgatggcaacctgaagggaattgatgtgaacctatcaaatgctccagacttactcctcactgtcgcggttctcggcgccctggcagaaggcaaaaccaccatatctggagtaaagcacggccgcctcaaggaaaccgaccgcatagatacgacatgccgggaactagagaaactgggctgcaaacttgaggaatttgaagatggtatgactatctacggaaatacaatcagcgacggtatcgtcgagtcccacggcgaccatcggctggctatggcgttcagcttgattggcttgaagcatgacgtggaagtggaaaacggcgagtgctttgatgtgtcattccctaattttatagaggctatggccgagattggcatcgatctcgagctgaagtga

SEQ ID NO: 3793 - DNA, 1620 bp, synthetic construct
  source 1..1620: mol_type = other DNA
atgcaacgcaagacactatcacggtttgacgagatcgtaaaaattctcaggaaatatgatatggacaaggtgctgggccaaaccacccggaatcgaatcagcccattccggagtggcagcgagaacaaagaactgctgaaggaagacttcccagaacgcctcagactgacattgcaagagctgggaaccacatttatcaaattcggccagctgctgagcaccaggcctgatttggtgggcgagagaatcagcgaagagctttcccagctccacgatgataatccgcctattgactttgaggagatcaaggtcattatcgaagaggatcttggcggaaacctaaaagattttttcacggagttctccgacacagccctggctacagcttcaatcgctcaggtccatgaggcaaaactgcatagtggcgaaagggtagcggttaaggtacagaaaaccaatgtgcaggaaatcgtggaaactgacctgaatataatgaagttcctggccaacgaaagcgaccgattcaacaccacctttaagcaccttaatctgcccgccgtcgttaaggaatttgaccgctccatccacaaggagatggatttcgacaatgaactgatgaacatccggcatcttcgcgacaatttcattcacaacgacaagatcattgtgccaactatctaccccgactattcctctgagagagtccttacgatggagtacgtggacggggtcaaactgtctgaagttatcgcaggggatgacccaaaatacaataagatcctcattgcagataggatggtgcgtgcctacttcaaacagattttcctggacggcttcttccacgcagacccgcaccctggaaacattttcataacggatgacaattccatatgtttcattgattttggaatgatgggagtgctggatgaaaacttccggcaggatctggctgagctgatgatctgcttctcgaaccgggacatcgacgggctcatcaaccagttaatctatatgaacatcctaaacgtgaaaacagacattagcattttaaagggcgaccttaacgacttatttgccaagtactacggggtcgagctcagtcgtttcaacggtgtgattgaggatctgctctttctcatgcagaagtacgacgtgatgttgccaaacgagtttgtgctaatggcaagagggctgtcaatggtggagaatatcggcttgtcgctcgatcccgacattgacattgtggaaatcatcaagcccttcgcccgcaagctcatgattcagaagtataatcccaagaaaatggttcataacgcccgaaacacctttttcactgttgagcacatgctcagagccctgcctagcctggtgtcaaaaaccttctacaaggtggatgagggggagctgaccataaatatcgaagtcaagcagataagcgagataactaaccagatctccctggccatcattatcgctgctctcgtaataggttctagcttggcgatgatggttgaggccgggcctaagctctttggtctgcccttgcttggttttgtcggatttactataagtttggcgctgggcgtctttacggtggtgaggtatttcatggatttttga

SEQ ID NO: 3794 - DNA, 411 bp, synthetic construct
  source 1..411: mol_type = other DNA
atgagtcttgatcgctttatagaagcccaaaaagaagactacgacatggctttcagggaaatcaacaacggacggaagagaaatcactacatgtggtacatctttccccagatcaaaggcctgggccatagttccacatcccggtactatgggattgacggccttgaggaggccaaggagtacatggaaaatgagtatctgagcaacaatctcattaagatttcacagaaactgctagacttggagactgatgacccaatcgagatcttcgggtccaccgacagcaagaagctcaagagctcgatgaccctcttcgaactggtcagcgataacgaggtgttttcactggtgctggagaagtatttcgacggaaacagggatgagcgaacgctggatttagcaaacaaatga

SEQ ID NO: 3795 - DNA, 786 bp, synthetic construct
  source 1..786: mol_type = other DNA
atgaaaggaatcatcggggccattgccggagacataatcgggtcgacccacgagttccacccaatcaaaactaaagacttctccctttttaacaagaagtctcacttcacagacgacacggtcatgacactggcgatcgcggattggttaatcgaagataagaatagtcgggacgtcctgatacagaagttgaagttctacggtcagaagtatcccaatgccggatacggacgcatgttcatgcagtgggtgctgagcgagaatcccctgccttacgggagctgggggaacggctccgccatgagagtaagcccggtggcgtgggctggcgagagcctggaggaggtccaacagctcgctcggctgtcttccgaggtgacccacaaccatcctgagggcatcaaaggcgctctggccacggcagatgccatttatctagcccggataggtagtagtaaggaagaaatcaaggagcacattgaaatcagatatgattacgacctggataggacagtggatgagatacgtccaggctacaagtttgatgtgtcctgcgcagggtgtgtgcccgaatcaatcatctgctttctcgaggccgacgacttcgaggacaccatccgaaacactgttagcctcggcggcgatgcagacaccatggctgctattgccggacccattgccgctgcatactgggaagttccaaggaacatcgcatacaaatcaattcataggctcgactatcgcctgttgaacgtgctcattaaattcgaagacaagtttctttga

SEQ ID NO: 3796 - DNA, 729 bp, synthetic construct
  source 1..729: mol_type = other DNA
atgagcaaaagaatcattttcattctgatgctcattgccctcttgggcctgagcgccgtggccgccgttgacgcggaccccttaactgataaccagctgaatccaaccatcttctaccttgattttaatcacggcgctctgaatgatggtttcaaaaaagaatttgacctcttcgagtacgtaccaacctttgatagcgtagacctgtacaacgatggggaaaacgtctctgtcagcttctattccctgaaccctaccatcgacgtggataacctgaacgacgagatcatagattacacattcgaggtcatggaggaccccaaggccaacataacgaccctgaaggatggaatacggaacatctgctcggagtatggggcagacgacgtcaagattaatgtggatagcgtaatcggcgaggatgaaattcccgtgatctttacaactgaaggagattccatgcttccgaccataaaaagtggcgacaaggtcttggtgaataagtcccataatatccacgtgggaaacctagtgtcagcaaactccagcgagtatggccctatctgtaaaagggttgctgatatcgacggggattcagtttatctcgtcagtgacaataagaaggtgactcgcgagtactatgacgactactacgtggaatacaaggggatcacgacatgggtgaatattgacgacatcgacggtgtgattatcgacattatgaactga

SEQ ID NO: 3797 - DNA, 222 bp, synthetic construct
  source 1..222: mol_type = other DNA
atggtggaaatcaccagcaaaacaaagtacatggatctcctgaacgagtatcccctgctgaaaacggacctcgttaagaagaatccgaagttcggctttctggtcactccaatggggaaaatcagcctgtgggagtcagacctttccgaggtcagtgagcgggccgaaatgaccgtggaggacacagtaaacctattcattgaattggtgaactcttactga

SEQ ID NO: 3798 - DNA, 1059 bp, synthetic construct
  source 1..1059: mol_type = other DNA
atgaagcataggcttaatctggataataaagaccccaactatattctgttgaaggagatcttcaaaatcatggacagccggaaatccaaaagtatactggcttcctatggttttaagaacctgaatagaacaatttttacatttaaaatcatatttatcagcatgttcttcggaattgacattcccttcattttgaacgagctgaaatccaagaaggagcttcgcaaatactttaatattagtgaggtgctcacggcagaccaggtctataagattttctcggaaataaactccgaaaagctgataaagtgccttaacaggatcttgaactcaaggaatatggtgaagcggatcggcaagaagactttcattgtggatgccaccccagtggacgttgatatcaatttccaccgaaataagaagacgaaagagcatctggaaaaaattaacctcaagtggagttacagctccagcaagggttattacatcgggtttaaggcaactgtggtactcgattatgattcgatgaaccctgtgtgtattcttgtccactctggcgctcccaacgacgcgaaactgttcgaggagattttagagaacctgcagaaacggcgcatcatccggaaaggcgacacactcatcttcgataagggatactacacctacaagaactaccagatcgggatcagcaagtacaagatcattcctttcatcttcccaaaagagaagttcagcagaacccgattggacgacatcctcacctatccactagccgtctttaacaagacaaagagaatcatgaaggaaaagcgtctgtacaacagtctgaagatggaattaatgaaaaagatcgactcatgggaaaaatttaaacccataaggggcaaaatagaggattttttcaaactgctcaagcaaggcctgaatatgcgcgagatccacaagtacactccgaaaagcgtcgaaaaaaccgtttatctaaatgtgttcctgggggccctgatcatttcccagggattttactcaaagacgaccatccaacagctctctgagaactga

SEQ ID NO: 3799 - DNA, 2820 bp, synthetic construct
  source 1..2820: mol_type = other DNA
atgaacgcctttttaacgcttattatcttcatcatccacttcatttggcgaaatattctcacaaacaaagaaatccctaaagactatgaccataagagcgaagagaaatggcagaaaaaatgggagggagatgagatttacaaattcataggtgatggcacgagaccacgatacattatagacaccccgccgccttatccaactggactacttcatatgggccacatcctgaactgggcctatatggatttcaacgcccggtaccgtcgcgagaaaggcatggatgtgttattcccgcaggggtgggactgccacggtctgcccactgaggtgaaagtggaggagacacataatatcaagaaaaatgatgttacaagggcagagtttagggacatgtgcacagaactgacctcacataacatagagctgatgcgcggacagatgcgcagcgtagggttctcacaggactggagcagggaatacattaccatgactcccgagtacagaaaaagaacccagttgtcctttctcaagatgtatgaccagggactgatctatcagggcatccaccccgtaaactggtgtcctcggtgtgagacagcgatcgcttttgcggaggtggaatacagcgaaaacaccaccttcctaaactatgtcaacttcccgccagcagacgttcccgaggaggtcttggccaatgtggagggcaacagctatgttagatatgcagattgtcccgacaatgccgatgccagcgttcctggggtactcattgctaccacccggcctgagcttatgtctgcttgtgtggcggtggtggtgcaccctgatgatgagaggtacaaccagctcctcggaaaatacgtggaagttcccctgtccggccagaaggtgaaaatcattgccgacgaagaggtggacatggagtacggtaccggggcggtgatgatctgtacatttggggacaagactgacgtcgcctgggtgaataagtacgatctggacgtcatcgaagcaatctcggagcaaggtatccttactgctgctgccggccgctacgaaggaatggaactgcaggatgcaaagaaacagaccatcgaagacctgaaatctgagggatacctgaccaagcaggaggaggtggaccagaatgtaggccagtgctggcgctgcaagacccctatcgagatcctcgtcaaaaagcaatggtttgttggcgtcaccaaactgattgaggaaagcaaaaaggctagcaacgaaatgcggtgggtgccagaacacatggaaagccgtctgctgaactgggccgatgctatggaatgggactggtgcatcagtaggcaaaggctttttgccacccccatccccgtctggtattgtaaggactgtggcaaggtgatactgccaaaggaggagcagctccctattgatcccacaatagacaagcccctggagccctgccagtgcggctgcaacgagtttatccccgaggaagacgtgctggatacatggatggacagttccatatcccccctgtctgtggctgactggcctaatcctggctgggaggagattttcccatcaagcatccggccgcaggggcacgatatcatccggacttgggccttctacacaaccctgcgatgcttggccctcaccggccagaagccatttgatgacattgtcatcaatgggatggtgttcggtgaggacggatataagatgagcaaatcccgggggaacgttacagggcccgaagaggtgatcgcggagtacggtgcagatcctcttagattgtgggctgccaacagtgtcccaggctcggacgttgcctttgactggaaaaacatcaagcacggatacaagttcatcagaaaattctggaatgccttccggttcatctccatgcacatctttgatgaagagtctgagaaggccctgagcggagacatcgagtccatcaaggcaaagctcaacccaatggacacatggatctttgcaaaattgaacaaggtaaataagatagttgatacagcattctatgactataactatgctactgcaataaataccatcgagcagttcatttggcatgatttctgcgatgaatacatcgaagccgtcaagtacagactgtacaacgacgacattagtgaggagtcaaggattgccgccaaatacactctccgcactgttattgaagattcactgaagcttctggctcccattgccccattctttgccgaagaggtgtatcaatactttgatgaggataaaagcatccacagcacgctctggcctgagatcgaccctaacttagactccacgcaagtggaagaagacggggatttggccattgagctaattggggaggtgcgacgcttcaagtccgcttccaagatcccactgaatgcagatgtggaaagcacgacggtctacatcaatgagaagacagagaacctcaaggatgtctttgagtacttcgccgacgacattaaaggcacgttgaagattcaggactttaaggtcaccagtggaaagcccgaagtgcatgaaaaggtgattgaaattgagccagacatgagtaagataggccccacctttaagaagaatgcggggcaggtcattggattcataaaatcaaccgatccgaatgagatagcgaagcagctagaggaagacggcgagatagctatcgccgacggcgtcatcactgaggatttcctcaagatgaaaaaggaaatcgtgggggctagtggtaagaaggtggacattctgcaatcggaaaaactgggcgtgattgtagaagtcgtgcgttga

SEQ ID NO: 3800 - DNA, 357 bp, synthetic construct
  source 1..357: mol_type = other DNA
atgcacctgctgtggttctacgtggccatcgtacttgccattagtgacgagatccacagcaggatagtgtggggctatgtgcgggacttttacattgttttcggcgggatcataagcagttctctcgactcggtgatggagacctggattgtccatgaaggactcgaggcactgttccacatgatcttcgtgagcatcgtcttcttttcacttaagattgggtttctggcggctctgatccatttcctcctggatgtgtcccactccatcgtcatccgccacatgccctggctgccacatagagcattgcacttcgttattgaatgcctattctttatagccgtgtttggtttatga

SEQ ID NO: 3801 - DNA, 1656 bp, synthetic construct
  source 1..1656: mol_type = other DNA
atgcccgtgattaccttcaaatatcaggacttgaaagaccttgggattgacatggagaaggacgaactgatcaacactctgcccatgatggccagcgatatcgaggattacgatgatgaggagataaaagtggaatttttccccaaccggccggacaacctgtctgttgaaggggtggccaggtcatttaaaggttttctgggactggagaccggaatcccaaaatatgaaatagtgccatcaggggagaaagtcacagtcagtccggaggttgcagagatccgccctttcatcaagttcgccaagattgagaacgtggacttctctggcgataagatcaaatacatcatggacttccaggagaaccttcactgggtgatcggcagggacaggaagaaagtcgctatcggcgttcacaatgccgatgtcattagcggaccttacaaatacatagccactcccaaggacgaaaatgccttcgtggccctcgaaatggaggaggagatgactccaggcgagatattgacccaacataagaagggggaaaagtacgctcacttgattgataagtttgacaaataccctcttattctcgacaaggacaatcaagtattatcaatgccccctatcatcaatggagaactgacaaagctcacagaggacacgaagaacatcattgtggacgtgactggcaccgatgagattgccgttacccaggctctggatattttatgcgcatccttcgctgaagtgggcggccaggtcaaatccatggaggtggaatatgaagatagaaccgtcatcagccctgactttacgccaaaagtcaagaccgtgcacgtggacttgaccaacgagctgatcggcggcactgacctgagccccgaggatattaagaagctcctggagaaggccagatttgatgcgaatatcctgaatgagaatgaactagaagtcttcatcccaccgtaccgcgtggatatcctccatgaagtggacattgtagagaacattaccatccagtatcacatcaacgcagtggaggccaagttgcccgacataaccactgtagcaaacgagcataattggtttaaatctgagaagaccatccgtgagcttatggtaggacttggattccaggaaatcatgagcctaatgctgaccagcgaagaaagccaatatgagaaaatgaatgctgaggagatcgaccatgtgcaggtctccaagcccatcaccatcagtggcacaatgattcgaacaagtctgctcaactccctcatggaatttctggaagacaacaagcaccaggacctgcctcagaagatattcgagatcggagatgtcctctatatggatgagagcaaggaaaacaagacaaagtccgcgaagaaactagcgggtatgatttgtcacagctctgccaacttcacagaaataaaatcaactgtttccagcgtgctgtccaatctgggttacacgatggaaatatccaactcgacaaatgggagttttattccaggccgggcagctgatgtgattggggagtcgaaaagtgggaaagtggtcggtttctttggggaaatcagccccgaggtgattcggaacttcgagctcgagtacccagttacggcatttgagatcgagttcaagctgtga

SEQ ID NO: 3802 - DNA, 699 bp, synthetic construct
  source 1..699: mol_type = other DNA
atggcacaggtgtttaactaccactgcagaagctgtgatttctatttcacaattcacaactaccgattctgctttgatgacaaaatggactgcatcgaagagtacatggccttattcactgatagcgactacggcaacgattccctgatcaagggccgggtgatcgaaaagtactgttcaagctgccagaagaccgtacgcatctatcagttcaccccggactccagcatttacaccacagacgcttcttttgacttcctgaaattctacatccctaaaaagcatgactttcttctggaatccattgattttcataaggaactgattgaattgatagagaataatgagaacctcaaaaagatcagcagcttcatagaggataatcacgtgtataacatctatgaattgaacctcaaccactacctgaacaccaaaaggtccggattcaattcaaatcaactgataaaggacattgggctttatctggacgccattaacgataatctcgaccgcttcgacgacttcatcatctgcatgaatagtactgaggataattacaacctcgacctggaggggaagatgtttgatatggatgtctgccccgagtgcggagaggagttttatccaatcagtctaaagaacccctgtccaatctgtggcaaaaacacgatggagaggtcgcgggaaatgattgactga

SEQ ID NO: 3803 - DNA, 1668 bp, synthetic construct
  source 1..1668: mol_type = other DNA
atgctgttgaacgacaaatcggaactcctgaaatccctatccattttatttctgctaatagtgctcattaccagttttaattcagtttatgcaaactccgataactttgacagtgccaaaagttcagaccttatcttcagtgactctaacaacgtgtacatcgaaaatatcgattgctcggattctattctgattaacgtctacagcaacaaaaaggattctaatctggggtcctacttcgtaggtagcagtagcgattcctacctgaaggactctaattccgattccgcctttgtcgtgtcgaactcagaggactcctacctggaggactctaatctgaaccactctaagaactacctcagcagccagtcactgagtgcctctagcaagtcaaaggtgattctgaccacaagcaacctcagtgctagctataagaccaagaacttcaccgctaaactcactgacttgaacaaaaatccaatcgcaggggccaaactgagcttcgtcattctgtccaagacctactaccggaccaccgacaaggacggcctagcgagtctaatgattaacctggccccggggaaatataatatcagcacgaaattcgaaggggatagcaattactcatctgctgtggtgaaaaactccattacaatcagcaaaaagaagctttcaatatccagcagcgacctgtcaaagaaatacggggactcaaacagcttccaggtcaagatcacagataacggcaaccccatctctgacatcaaggtggctttaaagctgtcagcaaagacctattacaggaccagcgacaagaacggcttggtgagcctgcccataaatcttataatcgggaaatacattataaactcctccgtctacgataataagttctattatagcaatacaaattccaacaacattatcgtaagctctcaaaatccctataatctctccgtcttgaagtggggaaccaagggcaacatcaaaaagaacagtgtgcttatgaataacattccaaaaagcagcttaaccaacgccatcatctctgcttgtaataacggaacgcctctgatccagtttggcaatggcagcggcaagaaggtctttatcaatgcgggcgtgcatggacacgagctttccagccaggcggccgcattcaagctcatcaataatatttacaacagcaagaaaaagataaatggtactgtctatatcgtgcctgtcttgtgcccgaagatgactgaacagaatgcaagatatttcaacaacgtaaacctgaacagtgttgccaataagaatgggacagtttcaaacaaactggttaacctggccctgtcgctgaaggtggatgttctcggcgatttccattgtacacgcccaaatggagacccaggaaaaaacgtggctatgggaacctcgtctcccatggcaagcagtgccactcttgccaaatatatctccaagacgacaggatactcctccctcatttacaaaaaggccggtgaggagtaccccggcgctgtggaggacgtgtgcaacctcaaaggaatcacgtccgtgacttgcgaggcgctcactcctcacggtaagattgccagtggcagtgtgggcaagtcgtataacatgatgatagccctgttgaagtattacgggatcacaatctga

SEQ ID NO: 3804 - DNA, 429 bp, synthetic construct
  source 1..429: mol_type = other DNA
atgataataaacaaaagcttaaaaattaacagcaactctaatttccagataatcgacatcacaaacgagatcagtagaatcctggatgaaattaagttcaatgagccgaactcgatctccaacggcattctcaccatcttcactaaacactccacgagtgcaattgtcgtaaacgagaatgagcggggactccttagcgactttgagtttatcctggatgaactggtcgccgacaagaacaattacgctcatgatcggattgacaacaatgcctctagccacctgaagtcatttctactcgggtcatccgagacaatcccaattgtggacgggaagatcgacctgggaacctggcagagcatcttcttcgtggaattggacggcccccgacgcaataggaccattgatctggtgtttatcggcgaatga

SEQ ID NO: 3805 - DNA, 123 bp, synthetic construct
  source 1..123: mol_type = other DNA
atgatcacctgcaacgtctgcggtcacctgaatcccccaagcgccctagtgtgtgagaactgcgggtccgatctcagtgacagcccggacctgggcggcggattcgatgatgacgaccggtga

SEQ ID NO: 3806 - DNA, 519 bp, synthetic construct
  source 1..519: mol_type = other DNA
atgagtgagaatcaggaggacgaaacacgaaaaaccaataactatgaatttgacaacagcgggttcaaggccaaggactacgatgatgcagaggagttcgaaatttgggacctggagcaaatcttcaaggaccgcgtcaagatactgcaggatctgaacaacgagttctgggaggcctacgaaggatcaaaaacggaggcctccggcagacgtaaagacaaaaaagagcgcctcgaacccctgagcgtgagggtgaagccacacaccaaacggttcctcaaggaagactctatacttagcgcacgggaaatcctagaaatctatgaggaattttacaacggccgggacgattacatcaaatccttaaaaagggatgaaattcagttgaaggaggagctgtcggagatcgaggagaaactgaagaacgcgcaggagtttactgaaaagctcaatgagatcaagatccaaaaggatcaggagaaggagagagctaagaagatcaagattaatattgaatga

SEQ ID NO: 3807 - DNA, 144 bp, synthetic construct
  source 1..144: mol_type = other DNA
atgtaccggtacgagaacgacaggctagccagccacgagatcgaccccacaacgccaagcaagtatgtgtactggaacgcgaaacgcctcctggaggtcctgaaggaagtggaagcaaccaagaagcagaatcaggataaatga

SEQ ID NO: 3808 - DNA, 633 bp, synthetic construct
  source 1..633: mol_type = other DNA
atgtcagacaaagtgaaagccgaggaggttaaaagtgaagaaacacaggtcaaggatgtagacttagtcttcctgctcgataagagcggaagcatgtatggggtggtgcgggacaccatcggcggcttcaattcgttcattgaaagagagcgagagaagaaccccaacactcacgtgaccctggtgctgtttgacaccgagtacaatgtactgtacacccgcaagccaatagctgaggtggaggaactcactaagaatgaatactatgcagatggatgcactgcactgctggacgccattggcacaacaatcaaccgcctcgataggcaggtcaacaatgatgtcctgtttgtgatcacaacggatggcttggaaaacagctcaagggaattttccaagtccgacattaaaaacatgatcgcgaatcataactgggagttccttttcatcggggccgacatagacagctatggtgaggcactaaccctcggaattgacgaatcccacgccgcgaactacgagaaaacgtccgccggcctgggtgctttgtttgattctgttggcgacgcccacgaggagatcagtcgtgggggaagccttgatgacatgagctggaagagacggctggggtga

SEQ ID NO: 3809 - DNA, 1614 bp, synthetic construct
  source 1..1614: mol_type = other DNA
atgaccctggactaccagctatcggaaatcaaggaactcgaaaaccaggaggaactcatcagcatcatccaaaatcctaatctggatgatcttaggcgcagtgctgctgctagcaactataacttaaataataaggattttctgaaggaactggcgagcaacattaacctcaactacaagatacggcgtggggccatcaaaaatctcaatttggacgaccagtcactgttcatcgacatcggcctgaatgacgagaatatccagattcgccgcgcagccattaaaagaatcaccgaccaggatactctcacaattatcgctagggagagcctggactttgccagccgcttgattgccgtggaaaagatctccgacattgctgtacggttggatattgcagtgaaggactcaaatgacctggtgtcattcaaggcagttgatttgtacccgttcctgagcacgctgaactcgctgttttacaacttcaactgcagtgggcgctacgtagacaatgcactgaagctgattgactttattgacctgtgtctatcaaaagactttaacaaggagagccacgatgctctcaataaatttaaagactacctgaacgatctcatcaatattaagctgtcagacttgaaggaggtgccctaccacttagagaaaagcttctctaggcgcgtccttacgaacatggccatcctgacatgggatctggcctttgccataattgactatacagaagatgactacgaactgttaaagatcttcaatgttcaaaacgatataagaattaggctagcggcgctcaaaaagataaaatccgagcatttcctgatcgacattgtctccaacttccgaaccggacactccttgtatgacgataccctaggtagtctgcagaggagattctcgtacgatctggatgaatgcctgagcatccacaagttcactcaagaggagcttatcgacctggcagtctattccggattcaaaaagacccgtcgaatcgtggtgaagtacatcggggatatggagctgctcgagtactgggccctgaacgactcctatacgggctttcgaagggaaatagtcagtttgccaaactttaacaataaggagctcctgtctaagctggtgttcgaagacgattgcgacagagtgcggctctatgccgttcgaaagataaatgaccaggagatccttagcaaacttgccgtcgatgattcctattgggctgtaagagaggaggcggtgtctaaaattagagacgagtccattttgatcgatagggcccttaacgacccaaacgtcatgattatcatagccgctctcaagaaccctaacctcaatgaccggcagaccataaataagatcggcagttatcccaacttctgggtgaccaaaatcatcgccgagcatcccctcacagatgacgagactcttatcgacattgcactcaacaacccatggaactaccctcgggagaaggcaatcgagcgcatctacgataaagatgtgttaaaatatattgccgagaacgataaggacccctggataagtcttatcagcgaatcccggctgcggaaactggacgaaaatgaaaacgtgtga

SEQ ID NO: 3810 - DNA, 306 bp, synthetic construct
  source 1..306: mol_type = other DNA
atgacaaatcaggtgatcgaggacatggccgaggtgtgccatgatgagtgggtaaaatggagcaagaacattagtgaggaattggctctcgcaatagatgtcctgaagaaggacatcgagttcgcccacgagaagggcgtcgaaaacaaggaggccatcgaactggtggagaaatttgaatcccggctggaacgctggggggcactctggataccctatgaggatcttaccgaagaaatgaaggacagcgacaggaaatacgccattaagatgttcgacatcgctgaggaggcgctaaaagagtga

SEQ ID NO: 3811 - DNA, 240 bp, synthetic construct
  source 1..240: mol_type = other DNA
atgatcgtggagaaagtatctaaaaatgaccagtgggaagattacttcataaaaagcaagtcatccaacaaggaatacattatcacaatagatctgctggaaggcaccgtgagctgtgactgcgaggacttcaagtatcggaaggagaacctcaggtttggaggggtcagactaagtgataaggccaaccattgcaagcacatcaaaaagatcctcgagattcgcgacgatctggactga

SEQ ID NO: 3812 - DNA, 891 bp, synthetic construct
  source 1..891: mol_type = other DNA
atgaaaaagatttatctcatcttcccaatcttggcgggaatcatgtttggatcaaccgggatcttcgttagaaccctgactgaaaacgggatcgactcgaccacactccttttcctgcgattttcaatcgctatcatttacatgctaattgcaatcgtcctgactgacaaaagcctcataaaggtgtctaaggaagatattcccctctttctgatctgtggcctttgcatccttggactgaacctctgctacaataacagtataaatacggtgccactgtcccttgctgccgttctcttaagcactgcccctgtctttgtagtgatctttgcctacttcattttcaatgagaagattagctccgcgaaggtgatctccattattctagtgattatcgggtgcatcctgacaaccggactgctcgaggagagcatgatccccatcacatcgattggtctgattagtggcatcggctctgccatattctgggcaatctatacaatagcctctcgcaaaagcatcgacaggggcaagcacacgtttacaatattattctactcattgatcataattaccatcgtgacgatcccttttaccaactttgggcagatcgaaagcttcgtcctggccaatccggccaataacattatcttcctgctgttgcattcactgatttccttcgctctgccctatatccttatcaccatatccctgaaccacctggatgcagggactgtggtgatcctatcctctggcgagcctgtagctgccctcgtcttcggtgcaatagtgtacaacgagattcccagcccattgatgttctgtggcatcattataaccatcatcgcgctgattagcctcagtcggaagattgagatgaaaagtgaatga

SEQ ID NO: 3813 - DNA, 513 bp, synthetic construct
  source 1..513: mol_type = other DNA
atgaacaataaatactttctgggaataattatcattattattgctgtgctggccgtgattttcgccttttccctggattaccagactaactatttgaatgggagttccaacgggtcagtaaatactaacgagaatagtagcttcaaccagtcgaacaacggccttcaaacaaacgtccagctcaccatatctgccgagcagtcattcccaatggagaagatcgcggaggagatcaagacccaccctgcttatgagggctacgacgaggacacactcaaatggctcgaaaccttcaatggcagcatcatgttcacaagcaaggattactttgtggtcatggataaaaatgacgcagaaaacctgccgaccagcttcgtcaacgacgcatttatctacgatgacttcacgtgcgacatcattgaaaagcggtccctaggaaaggatctgaaggacatcatatatgtgaaaaacgttaagttcgaaaatcagaggatcgtgcccatgatcttttga

SEQ ID NO: 3814 - DNA, 216 bp, synthetic construct
  source 1..216: mol_type = other DNA
atgttcgagaaacagggatttatcgagcggaggatctttaaaaacaaggagagcttcatgtataaggggttcttctcccacaaggaagatttcatcaacaagggggatttcatcgagaaggaaaagagcctcaagaagcagaattttataaagggcaaatacgccaacctgatttttaaaatggacgacgactgcattatactgaaaggtggctga

SEQ ID NO: 3815 - DNA, 1032 bp, synthetic construct
  source 1..1032: mol_type = other DNA
atgaagaccacgctggacaataagagcgtcaaaaacaattcaagaaacagcaaaaacgtaaggagcaaccttcgggacaaccggagcatgcgcaccaatctgagagccagtcgcaacatgaaaacgggcctgggggacgttaacatccagagcaatgatgaggcgacaaagaaatgtccctcctgtggatctgtggatttcgagatcgactacgcccggtctgaggtctcttgtaagagttgcggtctcgtgctggaagaaaacatcattgattttagccccagcggaaccgcaataaacagggacgggcagaacctcactcagaacggagccccctgcagtattacgaagcacgataaggggcttgccacagatttcaagctggaaaacctgaagcatgacagggctcggtgggcacgtattcgcagattacagaaacaatctcgggtcagtggcagtcgtgaaagaaatttagccagggcattcagtgaattgtccttgctgatctccaatctgtccctgccgcgcgacgttaacaaggaggcggcttcaatctaccggcgcgctctcgagaaggacttggtccggggccgaagcatcagcctgctgatctccgcctcgctctacgctgcatgccgagtgtgccgggtgcccagaaccttcgacgagatcgcagaagtgtcaacaggcagcaaaaaatccatagccaaaaactataggtttctcaatcgagaattggcgctcaaaataaggcctgcctctccagtggattacatccctagatttgcctccatgctagagctctcgtccccagtggtggttaagtccattgagattattaacgagctaaatgagaagggactgatcgccggtaagaccccagccggggtcgctgcagctgccctttactattcatcgcgcgtgcttggcgaacgcagaactcagaaggagattgcttcagtggtaggggtgactgaggtcacaatcaggacccgatataaggagatgaccaaaggcctgaatctgaattga

SEQ ID NO: 3816 - DNA, 285 bp, synthetic construct
  source 1..285: mol_type = other DNA
atgagtcaggcaaggaacctggaaaaggacgtctccagtagcaaagcctattttaagggggagaatgagctcagcattaactccaatattaacgagaccaagttcaacgaaatgactgatagcgactcaaatttcttcggcacgcggttcattctgaatctgtcccttatcctgaagctaatattgaaaaaacagatgaaggtgatctcgcagatcgagatcatcagcaacaaccagaagacctcaaaacagtttcaatacaaaatcatacaaaagacactctga

SEQ ID NO: 3817 - DNA, 528 bp, synthetic construct
  source 1..528: mol_type = other DNA
gtgacaatcctggatggtatcctggaagacaataagaaattcgtcgagagctttgagggagaggagatgagtcaccatgcccagaaaaaattagctatactgacctgcatggactgcaggttgatcgacttcttcgaaccggctctggggctcgagcgcggagatgccaagattgttagaaatgcgggaaactccattgtaggggaagacgcaatccgaagcataggcgcagccctttacaatctcggcgctgaggaggtgttggtggtcggccacacggagtgtggcatggccggggctgacgcggaggcactcaaggaaaaaatgctggcccggggcatcaaggaagaggacatcgccaagtacgatatcgccgagtggattgggggctttgacgacgaggaagagaacgtcctcaacgtggttgaaaagattaagaaccacccactaatccctgaagtgcccgtgcatggtctgataatcgatattgtgaccggagagctgaaggtccttaaagaagattattga

SEQ ID NO: 3818 - DNA, 837 bp, synthetic construct
  source 1..837: mol_type = other DNA
atggcgaacaatggccatggccaccatggagccgctaacttaactccagaacaacagaaaaagatgatagagcaagagatgaagctctttgaacacatgaagaacatcaaatacaaaattgctgtgatgagcggtaagggcggtgtcggaaagagtaccgtggccgcgaacctagccgaggcattccagaaaaaagggttgctgacaggtattcttgacgctgacattcacggaccgaatattcctaaaatgcttgacgtcgaaggcgaggatgtaatcatctcaaacggggaaatgattcccgtcatgagccgcaacgggatcaaggtgatgtcgatgggcttcctcatcgacagccaggacactcccatcatctggcgggggccacagaagtcaggttccatcaagcagttcatggcagataccgcttggggcgatctggatgttctcatcatagacaaccctcctggcacgggagacgagccactgaccgtgctgcagtccttgcccgaagtcgatgcagtaatcatggtcacaacaccgaacagcctctcccacgaggacgtgctgaaatgtgtgggaatggttaagatgctccatatcgataagattgggctgattgagaatatgtcttactatgtgtgcccccactgcggggaaaagaccaatatattcggcgaaagtcagggggaggactttgcaaatgagatgggagttaaatacctgggcaacctgccactgacggagcaggtgcccgaaagcgccaataaggacagcactatggtgaatgcctatgccgagtccgaggtggccaccaagttctttaggaacgattga

SEQ ID NO: 3819 - DNA, 2997 bp, synthetic construct
  source 1..2997: mol_type = other DNA
ttgctgctggttctaatggctctcctgatcctcgcaatgtcatgcgtgtcggctagcaatgcaagtgataatctggacgatcttaccatttcagacagtaatagcctagacctggtatctacaagtaactcagatatcctatcttctgatagtggtgtgagttctgacgacagttccaatgatgcctcgggtgacgtgctggggtctgatgtctccagcaacgaaagtaataatcagtctcagtctactttggactcgaacaatcagtctcagtcggggctggactccgataattcaacactgttagactcacagtccaataaccaatccaatagtgaatcaagtgattcctcggacagttcagaaacagtgatcaaaaatgcaaccagcataagtgtgtcatctaaaaccgtggtgagaggcaattctctcaacattaccttgaaggacaacgcgagcacccttctctcgaacaagacagtcacatttaccttcaacggtaaaacgtataacaaaaccacaaacgctaaaggcattgctagcttaactctcacagcgactcctaaaaagtacttggtgaaaattgcctttgtgggtgacgagctttatgaggccagctcaaaaagtgtgaatgtcacgctcagcaagactccaaccagcatctcaaactccggcaagagtatcgtccggggcaaactttacaagctgacactgaaggatgcgaaaggaaaggccctgtccggcaagaaaatcagcatcagcttcaatggcaagaaatacaccaagacgacaaacagtaacggccaggtcaacctcaccataaacgtgaatgtaggtaaaacttataaaatgacctacaagtttgcaggagactccaactacctctccagttccggctctgtgagcattaaggtcaagatgggcacatccataatcggttccggctcaagcatcgtcaagggaaagtcctacacagtgaccctaaagaacgccaacggtgctgttctgtctaatcagaagattgcctttactctgagcggcaagacgtacaaccggacgacaaatgccaaaggtcaagctagcctcaagatagggttaagctcgggaaagacctacaatctgacgtacaagtatgccggcaatagttattacggaggatcttccggcaaggtgtccctctttgtcaagacgccgaccaccatgaagaacagtggcaagaccatcgtgagcggagagacttataaggtcacgctgaaggatgcggacggaaaatctctggctaataagaaagtgtccataaccttcaacaacaagacctacgccaaaacaaccaattccaacggtcaggccagcctgacaatcaaagggacctttggaaggtcataccccctcagctataagtttgcaggagacagcaaatacggacccagctccgggtccttatgcctgagggtcaagaaggcaacaagcctgaaggggtccgcctcgagcattgtgcagggaaaatcctatactgtgactctgaaggattccaacagcactccgctggctaatcagaccatcgtgttcaccctggacactaagaaatacaacaggacgacaaatgctaaagggcaagctagcctcaaaatcgggctggctgcaggaaagacttataacctggcttacaagtactcagggacttcatattataacggctctagtggctcggtgaaacttaaagtgaagttccccacaagtcttacaaactctggtaagtctgtgatgaatggaacgggctataatatcgtcctgaaggattctaaatccaatctggtctccaataagaccatctccatcggattcaacggcaagacctacgacgaaatcactgacgccaacggaaccgtcaccctattgattgatgccaacgtgcccaaaacctacaagatgacctacaagttcgctggggacagcgattacggcgcctcctctgggactgtcaacctaaccgttaaattcaagaacgccttcaccatctctcagattatctcagcgtcttccagcttgaagtcatatgtactgaagaataagaaagtgccagcgacagtgagtgtgaatggcgtctcccttaacctgacaagctttacatatcttatggccaaggccacaataagcattaactcaaataagacctcggggagcatcttgctggttcctgttgattctaactacacaaataacggcagccgtatcaacgccaatctctacaaggcaaactatattgatttggccaaaaaggtgatcagctcggctgaggcaaataaactcgtgcccaacagcgtttccacgaacatagggctggtgtcccatgacctctacagctttggccttgccaaggccttggtcttctttaacagcgatcactacctgccaaactacctgattcttagcagtgacgatgttggcgagaaacatagcactgtgatccctagcaacgcccgcggaaacgcctcccaattcaaggccggactcaacgaggccgagaccctgactgcggctcagatcgccaaatacctggttgcttcaggccacgacgccaccaactctgaaattaaagcactggcagcgaagctggtgtcagggaagacttccctgtgggacaaggccaatgcaatattcacctttgctcgcgacaacatcacctatagttattatgcggactccaaaaaaggcgcagccgggactctgagttcaaagagcggcaactgctgtgaccactccaacctcattgtatccctctgcagagcagccaatattaccgcacgcttcagtcatgctcagggctgtacgttctcaagcgggctcgttgccgggcacgtatgggcccagatctacattgatggggtttggtacactgccgacgctacaagccgacggaacagcttggggaatatcgtaaattggaacaccaaccactacaacacgttaaaacagtatgaccacctgtctttctga

SEQ ID NO: 3820 - DNA, 2478 bp, synthetic construct
  source 1..2478: mol_type = other DNA
atgatcaatcggctccggaaagacttcggccggattatcaagctcatcatcttccttatattggaggtgattcttttctttgcgatcacccagacattcggcgggatcataatccccgacctgaagactgcatttgctattatcatcgctctgagtatactaaacgccctcttgtggcccactatcacttacctatccctacggttcatagtcttgaccttaggatttggaaccttcctgatagacggggtccttctgtatatcatatccctgttcatccctggcgtgtccattaacggaattgccttattcagcattcccctgcttatcggactcatttccagcatgctgtcaataatcctgaacattgatgacgactacacctactatcgatacatcctggaaaaggagatgaaggtgattcataggaacatccccaaaaaggagggcttcctattcctggagattgatgggttatcttatagaatcataaaggaagccctagacaacggagatatgcccaccctcaaaagttggattgacaagggctctcacagactgatctcttgggaaaccgatcttagcagccagacaagctcatcccaggccggcattctgcacggtaacaataacaacattcctgccttccgatgggttgaaaaggatcacgagaaccggatcatctcctccaacggcaggacagattcgaaactgattgaaaaaagaatctccaacgggaaaggcttattgagtttgaacggggccagcagaagcaatctgttctccggggatgccaaggaccatcttctcacgttcagccgattcagcgattcggagagcatcaatagcaacagctggttctatctttactcaactccctacgtcattgcccgcatactggttctcttcatcttcgacatgattatggaactgctgtcacgcgtcaggcatctgttcaagaacattcagcctcgcctcaaatggcgcgggctgaagtattttgtagcccgtgcaggcaccaatgtagtgctcagggaagccacaaccttcacgttgatcggcgacgtctttgcaggagagcacaacgtgatctacgcaacatatatgggctacgatgagattgcacatcactcagggattgaggactttgactcgttctatagcttgaggcagatcgacaagcaattcaagcacatcgagaacgcgatcaacaattcaaacagggactacaagatcattgtgctcagtgatcatggtcaatcgaatggtccaagctttaagcagaagtttgatattagcctgaatgacctgctgagtgaatttctccctgaaaacattacggtccatagtattctgcacagtaatgatgaccacttcagcaaggagttttccatcaatcacctgggcagcgagaacctggagaaactggataaacgcgtggaaaacactaaggagaagctggatatcaagattgacaataccaaggaaaaactcgaccaccgtatcgacaacacaaaggaaaagctcgaccaccggatcgacaacaccaaagaaaaactcgaccacagaatcgacaacaccaaagaaaaaatcgacaccacaaaggaaaaactcgaccacagaatcgacaacacgaaagagaaaatcgataccacaaaggaaaaactcgaccaccggatcgacaacaccaaggagcgcatcgattccaacctggactacactaaggagaagatcaacaccagtttcgatggagaactgatcaacacatgggataagctgatcaaatttaaaaacaaatcctccaataaggcctttctggacaaactgagaaagaaacgaactctgatcaataacgatgagccaataatagataggataaacaatgtgtcagaggacctctctgaggatttggaggtcaatatagagttgtccaaggagaagatcacaagtgacaaggcggctcagacgattgttctatctagtgggaatctgggactgatttactttacggactggtccaatcgcatgagctacgagcagatcgaggatgcctttccggggctcatcaatcagcttgcttcacatgatggaatcggttttgtgatggtgaagagcgatatatatggcactctggttttctccaatgacaacttattttatcttgaaagcgaggagtatgtgggggagaacttcctggacaagtttggtaagaataccgtgcagaaacttaagcggactgataagttcgctcatgtgccggacattttggtgaacagcgaatacaatatggagaccaatgaggtctacgcatttgaagaactgattggctctcacggaggcattggcggaacacagcaatacccattcatcctctgcccaagcaattgggagtcggaagagatctttggtgctgagaacgtatacaaattctttatgaaagagattaacaagtcatggaatcagagcaagaataaatga

SEQ ID NO: 3821 - DNA, 489 bp, synthetic construct
  source 1..489: mol_type = other DNA
ctcgagaccaaaaagatgttcctggtgatactactttttgcatttattgtgatcggagggtcgtattcggtcttcgctatcgtatcaaatggcggaggcaacaattctctgtcttgggacaacattacaatcgccgggcccagcgggaacgtgagcgacgatggcaacaacagtgatgatggtttgctgggcatcttcaattccggcgactcttcagactcatcctcaagcaattcaaacacgggttccagttccagtcagagcagctcgtccccagcccggagtagcagctcttccagctctagcagctcccagtcgagttcaagccaatccagttccagtcagagcagttcctctagctcatccagctcctctagttctagccagtccagttctggatcgagctacgattcaggctccggaggcagcgtggttgaatccgggggacactactacgacgtcaactctggggacgagctcgactggtga

SEQ ID NO: 3822 - DNA, 507 bp, synthetic construct
  source 1..507: mol_type = other DNA
atggagaccgaaaacctgattattgtaatccttctggttctgatcgccatggccggaatcttctgcgcatttctatacacattcggcaccggaggcaacgacctcgccccggtggagccaaacctcacggcgaaccagaccaacgtgacaaacatgactaacgatacggccaacgcgacaactgtggacgctccactgaataatggggcctatggatcaagttccatagacagttctagtagcaatggcttgagtggaagcaacagctacaatggaggctccaacacctacaacggcggcagcaacactaataatggcgggtcgaacaccaataatgggggatcttccagctccgactctggcaacggcgggtctgtcgcacccgactctggaaatggaggttcatcagattccggtaatgggggttcggtcgctcctgatagcggcgggggcgggagctccagtgggggtagcgaacccgcagcctccggcgagagctcaaactga

SEQ ID NO: 3823 - DNA, 1497 bp, synthetic construct; identical to SEQ ID NO: 3377
  source 1..1497: mol_type = other DNA

SEQ ID NO: 3824 - DNA, 612 bp, synthetic construct
  source 1..612: mol_type = other DNA
atgaaagtcttactcattaacggatcgccccacaaggaaggctgcacctttactgccctgagcgaaatcaaaaaccaactagagaaggaggatatcgatagtgagattttctggatcggcacaaagcccgtccgagggtgcatcgcttgtaagaaatgcggacataaggagggaaaatgtgcctttgatgatgacccggccaatgagataatcgacaaactcattgaggcggacggggttatcgtcggatctccagtgtactatgcagggcctaacggggccctgtgcgctgtgctggacagggttttctacgcaagcggtggcaggttcgcatttaagcccgccgcttccgtggtaagcggccgccggggtggcgccagcgctagcttcgacagactcaataagtacttcacaatttcaaatatgccaatcatatcctcacagtattggaatatggtgcacggcaacactccagaggaagtgcgccaggacctggaagggctgcagaccatgagaaccctggcaaagaatatggcgtggatgttgaagtccattgagaacagtgacttgcctaaccttgaagataaaatcgccacgaactttgtgcggtga

SEQ ID NO: 3825 - DNA, 795 bp, synthetic construct
  source 1..795: mol_type = other DNA
atgaaggagcgcctggacaagtacttggtcaacaacaatctcatcgctagccggacaaaaagcaaggaaatgattaaatccaagaacgttaaggtgaacgataaaattatcaccaaggcaagctacaccgtccgagatggtgacaaggtggagatcatcaacgacgagtccctgagatatgtctcccggggcggcctgaagctggaaggggcgatagattcattcaacctcaacttcaatgagaagtccattatggacattggatcttcgacaggcgggttcaccgactgtgggctgcagcatggtgccaagagagtggtggctatagatgtagggactgacataatgacaaccagcctgagggatgatgatcgggtcgacctgtacgagcagatgaatttcaaaaatgccccaagtagtctctttaaggacattgacattatcgtgagcgatgtgtctttcatctcattaaagcacatcattgaccgtatcgcccaagaggacgatgactttgaattggtgtttctcatcaaaccccagttcgagtgcggaaaagagatcgccgaccagtttaagggaatcatcacggacaaggaggtccacaaggacgttattcttgagatcaaagaatacttcaaaactaaaggatactatctaattgacctggatgtgtctaagatcaaaggcaagagtggcaacatcgaatatcttggccactttaaggcaaatgagaaagtgcgcgagatagatatagaggaagtaatcgatagggccttcattgacgaagaaaactga

SEQ ID NO: 3826 - DNA, 393 bp, synthetic construct
  source 1..393: mol_type = other DNA
atggagctggactcggagcaggtggtaaaaaggatagaagagctccggaaggattacagttgttcccaagcaacgctaatgggaatctgcgaggttggcggcatgccaactgaggagttggccctgctggcaaagggattcagcggaggtatcggcggaacattctctgaagggacctgcggtgctgtgaccggcgccgtgatggctctgggctttctcggggccgacgaaaaacagattattagcgcgagcaaaaagctcttcaacgagtttaaagataagtatgagagtgtgacatgtggctacatctcaaaagatggggacgacaagtccccctgcgtggaagtctgtctgttcgccggggaaaaggtctgcgaataccttaaggagtga

SEQ ID NO: 3827 - DNA, 2094 bp, synthetic construct
  source 1..2094: mol_type = other DNA
atgataaagaaggtgaccaacgtgattgatgaaatcaccgacttcctattcggcctgaagatgaccatcatttcagggatatttctcttgattgcggttatttttatgatcttcggcatcgacaccccgatttatctaaatcctgcatggggtacagtcataattagcggcatccccatgctcctgctggccatgacacggctgattcgcgagaaatgggtgtcctcggctctgctcatcgccatagccatggtggcctcactcctgatcggcgaaatctttgctgccggtgaggtggcatggatcatggctctgggggctcttctagaggactggactgtcgagcgagctaagaaaggactgagaaatctgatcaacctgactccacagactggcagacggatcgttggagatagcgaggaagtgatttcggtggatgagataaggattggcgatgtcctgcgcatccttcctggggagagcgtgcccgtggatggtgaaatcatcaagggcagttcctccctggaccagtctatcatgacgggggaatcgctgcctatcgacaaggaggttggcgatgaagttttttgcggtaccatgaatatgtacggagccatcgacatcaaggccacaagcctcggggagaactcctctttgcaaaaattgatcgaccttgtcaaggccgcggatgagaagcaggccccgactcagcggattgcagacaaatgggccacttggcttgtgccagtggccttggccatcgccatcgtagcgtggctagtgaccgggaacattgaacgcggagtgacggtgctggtagtcttctgtccctgcgcactcatcctcgccacccccactgcgatcatggcagccatcggccaagcgacaaaatacggggtcttaatcaagagcggagaggcgctggaaaccctgggggccctcaacaccctagtctttgataagacggggacactcacctacgggaatctggcagtttcagatattatctccttaaaggacgatctggacgaaatggatgtactgcgaattgtggcctcttgtgagaaactcagcgagcacccattggctaaagctattgtaaactatgctaacgaagccaaagtggacatcgaggagcccgaagacttcaagatgtacccaggcaaaggggtctattgtaaaaacagttatggccacatatgtgcggggaactccaaattcttaaatgaaaataacattgattttaatattggtagcaaggacgacttggacgtggattccatactgaaccacctgaaacaggaaggcaaggctagtatcatagtggctttaaatggtgagatcatcgctcttatcggcttgagcgacgtcatgcgcgaggattctaaagccatgatcgagagcctgcacgacctgggaaccgagacagtcctgctgacaggagataatacggaaactgctaattacttcgctagccgtttgggaattggaaaggtatacggcaatctccttcctcaggaaaagcttgactggatcgaaaggtttaaggatgagggcaagaaggtctgcatgattggagatggggtgaacgacgcccctgccctgaaaaccgccgatgtcagcgtggcaatggggtcagttggcagtgacgttgccatcgaggccgcagacattgcactcctgggtgacgacattggcaaaatcccctatcttaagaagctgtcaaatagtacgctgttcaccattaaggcaaacataataatctccatgacaataaatgcggtggccattgtgtgctctgtgctgggactcctcaacccagtgaccggtgccatcgtccacaacgccggaagctgccttgttgtgctcaatgctgcactgctctacgataggaaattcgacgactcaatcaaaagaatcgacactgagaacgtggagcactcccactaccatttccacaacgacggcgagcattcccattctcatgaaggcattaggatcattgatgagatcaagacagacaacggaataaagcatatgcacattcataagcacgcactgaaccggcagagttgcgaggcttaccacaactga

SEQ ID NO: 3828 - DNA, 822 bp, synthetic construct
  source 1..822: mol_type = other DNA
atgagctgttacaaatactggggtaaaattgaggaaatcgccaacaaactcagtagctatggtgatctggataacgagggcctttccgcattggatgggactgatattgatgagattaccaagattcttgacgagattgaagtcatagcccacgataaggaaatcgacttcgactccgcaaagcacatcctagacgatgaaaagatgaacaaggccctgcagctgattcgtaaattctatgtgtacatcggagcgcgcctcgagcgggagaatgcactgacaatactggaggccgacgaccccaaggtcgctttggattcattccacttctacgatcgctacatcggcctcatagataacgagaggcaattagctaacttcaatgagaacaagacctttgtgttcctgggaagcgggccactgcccctaaccatcatcatgtttaatatggtgacaggctgcaagtgcataggcatcgaacaggaccccgacgttgccgacctgtcgcgcaaagtgctgaagcggcttgacctcgatgagggaattgaaatcgtgacagggaacgaaaagacgattgccgaactggattatgacatcctcatgatcgctgcatttgccgagcctaaagacagagtctttgcgaacgtctgggacattgtagacgaagacactccggtgctctacaggacttatacagggatgcgagctatcctgtactctcctgtaacggagaaggacaccaggggcttccataaggaggtgatgttgctgccaagaggaaaaaccaataatacctccgttttaatccggaaaatcagttga

SEQ ID NO: 3829 - DNA, 612 bp, synthetic construct
  source 1..612: mol_type = other DNA
atggaactgacaggaaaaaacatatcgtttaaatacagttccgggtcacgacagatcctcaaggacgtgaacataaccgtggacaacaagaagatcctcggattgtttggagacagcggcagcggcaaaagtagcctgtgcaagattcttgccggccacatcaaaaggtatgagggggaggtaaggctagatggccaggagattccaaagggcttcgaccccatccagcttatctaccagcaccccgaaaaggttatgaacccaaaatggaagatgcatgatgtgctgggagaatcctgggaagtgccggatgacctactggaggactttggcattcaaaagtcttggctgaaccgctggcccgcagagctgtccggtggggagttgcaacggttctctgtcctcagagcgctgaaccctaataccaagttcctcatcgctgatgagatgacgactatgctggacgccattacacaggtgcagatcttcgagtcagttctgaagatagtgaaagagcgcaatatggggctcttggtggtcagccacgatcgggacttaatggatatcatctgtgatgaagtcatctacctggacgacattaataatatttga

SEQ ID NO: 3830 - DNA, 1065 bp, synthetic construct
  source 1..1065: mol_type = other DNA
atgtccgacttaatcaatgtttcgaatatttccataagctttacacaatacgtaaaaggcctgaaccaacgagaactgaaggtgatcaccgacttgaccctggacattaaggaaggggaaatcgtcgctgtcttaggttcaagcgggagcgggaagagcctgctggcccacgccatcctgggaatactgccacacaacgcgaacctaagcgggacgatggtctacaagggcgaagtcctgactgaagagctaaaggaaaaactgcggggggatgagatcgcactgatcccccagtccgtcaatttcctcgaccccttgatgaaggtttcagatcaggtcatcggcgaatgcaaagacgaagccgaggagaaagaaaaacgtgccaagcaaagggctatctttgaaaagtacaatctctctgaggaagtggatgacatgtacccattccagctgtcgggtggaatggcacggcgcgtgcttgtatcaaccgctctcctaacaaacccgaagctggtgatcgcagatgagccaactcccgggcttgacgaggagtccgtagaggaaaccctgaaccatctgcgccagatggctgccgacaacgtgggagtgttgctcattacgcacgacatcgatgctgcactcaaggttgccaacaggatcgcgattttctatagcggctatgtcatcgaaattgccaatgccgaggatttcagtggcgaaggcgagaacttgctccacccatacaccaaatccctctttaaggccctccctcttaacggattcgaacttacaaagggacaccagcccctgcatggtgagattccggtgggctgtccctattatgacagatgccctcacaaaatggatgattgtgataagactcggcctcatctgatccctattgatgagaataaaagggtgagatgctttaagtacgagggagagataaaggacagtagcgaggagcaggtggtggacagttctgaggagcaggtggtggattcctcagaggagcaggtgatggacagttctgaggaccagataaaagacggcagcgaggagtga

SEQ ID NO: 3831 - DNA, 861 bp, synthetic construct
  source 1..861: mol_type = other DNA
atggatgagtcagccaacaagatgaataagtttgacgtgctgggcagcatgaacctgcggaccaagaccctgctggccataggcctctctgcctttatactgattgtagtggtgctggtcagttttttcatcgaccccactagcatcaccaccgattggtccattatgaaccagccaccttccctggagcacctattcgggacggactggatgggccgcgacatgttcacacgcaccatcaaggggcttggactgagtgtgcagataggcttcttcgcctccattttaagtagcatcattgctgtggcgctggctttcctgtcaagcttcaacaaatatctcgacagctttgtgtcgtggctgatagacgtgttcctctctattccccatattctccttatcatcctgatctcgatcgctctcgggggaggagcctttggtgtcctggttggcgtggcatttactcactggacttcacttgcccgggtcctcagggctgaaatcaaacgaatcaagacctcagagtttgtaacaatctctgaaaggttaggcaaatccaaattttggattgcgagaaagcaaatcttgccactggtcatcagccaggttatcgtggggacaatactcattttcccccatgcaatcatgcacgaggctagtgtcacattccttggattcggtctgagcccccacgaaccagccatcggtatcattctctccgaatccatgaaatacctggcgacgggcaattggtggttggccctgttccctgggctagccttgttgattcttgttctgctctttgacattgccggagagaacatcaagaagatgctagatccggcaagcgcaaatgattga

SEQ ID NO: 3832 - DNA, 993 bp, synthetic construct
  source 1..993: mol_type = other DNA
ttgctggacaaacagaaaatccttaagtttctggggtacaagctcgtgcggtttgctattctgttaatagttgtcatcctcttaagttttatactaatcgacatgagccctattaatccggtgaacgcttatatctccaatatggttgtgagccccgagaagattgctaaactcgaagcatattggggtgtcaatcagccgataactgagaaactgatcaattggctgggaaacattatcactggggactttggcacttccctgatataccggacgcctgtcttgcaagtaattgccgaaaagttcacagcctccctgatccttatgctcaccagttgggtgatttctggaatcctgggctttgctctgggcgtgctggctggatttaaacgcgacacctggattgatagggtggtcaaggtgtactgttacgttcttcaatctgcccctaccttctggattgcccttctggtggtcatggtgttcagcatctacctgggatggttcccagtgagcgggggcgttcccatcggggcgctgagtcaggatgtgtccttcttcgattggctgaagcacctgatcttgccagcatttacgctgagcatcttaggagtggcctcgatcgccctctatacacgtgacaagctgatcgaggtaatgacaacagactacttcctctttgccaaggcacggggggaatccggatggaccttgattaagaggcatggcatccgcaacattctactacccgcgatcaccttgcagttcctctcattctcagagctcttcggtggcaccgtgctcgtcgagcaggtcttcatgtatcccggcatcggtcaggcagccgtgtcagccgggcttagaagcgacgtacccctgctgctgggcatcgttatcttcagcgcgatattcgtgtattgcggcaacctgattgccgatattctctacaactttgtcgatccacgaataagagagggggaggaaaacggctga

SEQ ID NO: 3833 - DNA, 1614 bp, synthetic construct
  source 1..1614: mol_type = other DNA
atggacaagaagattattatcggagcagtggttgcacttcttgtgataatagtgggggccgccgtcctcatgggcggaggcacgactgaaagaggtccgggagagatcgtcgtggcagcctacagccacggaggagaaccagaagccgggttcgatcccattgccggctggaattattatgcggagccactcattcagagtaccctgttgaaaatgacccctaatggtacgtacgccaaagatttggcgacagactacgagatcagcgatgattataagacatacactgtggacctgcgaaaggatgtcaaattcactgacggttctgacttgactgctgaggatgtagcattcacatacaacgcagccaaggagtcgggcgcaagcctcgacctgtccgctctggataaggccgaggcccagggtgattacaaggtcaaattcaccctgaacaagtcagatagcactttcctagataagatggcctacatcgggattgtgccctccgattcgtataacaacgaatcatacggcgagaacccaatcggtagcggaccatacaagttcgtacagtgggacaaagggcagcaagttatcctggagaagaatccagattactatggcaagcagcctgaaatcgagaagataacaatcctctttgcgcagaacgaagctgcgttcaatctggccaaaaatggagaagccgacatcgtcgctgtgcctctcgaatatgggaaggagaaacttgacggctacacaatgtacttacaagacaccatcgacgtgcggggggtttctctgcccagtgtacccgataccggcgagctaagccccgatgacaactacacaatcgggaataatgttacctgcgatatagccatcaggaaggccttgaactatgggattaaccgcacggcccttgctgagggcgcactgaacggcctcggctatccttcctatgacggcattgctcatcagctgccatgggctaacaaagaggccgcaatagaagacggtgacgtggcctacgccaacaaaaccctggaagaggctggctgggttgacagcgacggcgatggaatccgcgagaagaatggaaccaaagcttcatttaagatctactacagcgcaagtgctcccgagcgtcaggctctggctgtcggggcggccgagcaagccaagcagtttggtattgagatcgaaccggtcggcgcggaatgggacgaaatctatcctaatgagttttcacagggcgtgctctggggctacgggtccacagatccctctgacatgtatggagagtactactcgtcctcagactttaatcccgcaagagtcaacaacagtgcggtggacaagcacatggatgacgcctttgctgagagccgggaggacagctacaaggattggagcgcagtgtcctgggacggctctacggggatttccccgaaaggggacgccaattggctgtggctgggggaaatcaaatatggttacttcgtgaacgacagggtggacatttccaatgacaccgccctcttacagcctcacggaggagacctgttcagtaacgtgtatgattggaccatgaccaacgctactgccgagaaatga

SEQ ID NO: 3834 - DNA, 966 bp, synthetic construct
  source 1..966: mol_type = other DNA
atggtgagtgtcaatctggaagccaaaaagactgtcgatgtgatgatcgagaaggcggacgatcttaacattgctgtgtccaaactcgagaacggcgcaactgtcattgactgtggtgttaatgtcgccggttcgttcaaagccggggagctctatactaaagtgtgcctcggaggactggcggatgtcggcatttccatccccggcgacctgagcgaaaagttcgccctgccgtctgtaaaaataaagacagacttccctgcgattagtaccctgggtgcccagaaagctggctggagcgtcagtgtaggagacttctttgccctggggagcgggccagctagggccttgagcttaaagcccgccgaaacctatgaggaaatcgactacaaggacgaagccgatctcgccatcctaacgctggaggctgacgtgttgcccggtgaagatgtagctcaatacatcgcagatgaatgcggcgtggatgtggcaaacgttttcctgcttgtggctccgaccgccagcctcgtgggatcaatacagatcgccggacgggtcgtggagaatgggacctacaagatgctggagtttctgaagttcgacgttaaaaaggtggtgcacgcagcagggattgcaccaatcgcccctatcgaccccgacggcctgaaggcgatggggaagacaaacgatgccgtgctctttggcggccgcacatactattatgtcaaaagcgaggagggcgatgacattgccgcagtggcagcgcagttgccttcctcagctgctgacggatacggcaagccattcttcgacgtgtttaaggatgctggatttgacttctaccagatcgacaagggcatgtttgctcccgccgaagttgttatcaacgatttaaccacgggtaaactatacaaggaggggttcgtgaacgccgagctgcttaaaaagtcctttgggatagagtga

SEQ ID NO: 3835 - DNA, 957 bp, synthetic construct
  source 1..957: mol_type = other DNA
ttgatcaccactgtggtaggtagttttgggattgacctgaaggagcctaagacgctaggcgaaaagataaagtccagcattggaatgtacgacccctataagatcgccatcgaagaggctgtcaaactgcagctggactgtggcatagacatcatcggggacggtcagcctaggggggatatggtaggcagctttgtgaagcacattccagggttctcttatgaaatgaacagctccgtcatcgtgtctaagattagggctcctcaggtggatatcatgatcaaggacttaaaatacgctaaaaaggttctcgaagcggagataaaagccagaaacatgagtggggacgaggccaatcggaaaggcgtgaaacttatgctgacaggacccagcaccattgtgcactcatcacggctggagtcgttctacaaggagcgtaatccggccatcattgactgcgcctacgcgctgcgacgcgaggtcgagagcgcagagaaggcaggagccagttatgtccaaatcgacgatccgttcctgtccaccggcatggtcgacctgaaggttgcaaaggagtccatcggaatcctaacagatggcatcgaaatgcccatggcaatgcatgtctgtggtaatctggatggctgcttcaaggagattgccaagtttccaattgatattttggactgtgagtttgccggcaacaacgtgaacatcgggattcttgaagaaaacgctagcttgctctcaggtaagaaactcggattcggctgcgtggattccgctatgaatgcagttgacgacaaggaagaggtaagagccctcgtgcagaggggaatcgacgcggtgggcaaagaaaacatgctgcttgatcccgactgcgggctgcgcaaagtggatatcccaatagctatggagaaactcaaaatactcagcgatctggcccgggagttcaattga

SEQ ID NO: 3836 - DNA, 309 bp, synthetic construct
  source 1..309: mol_type = other DNA
atgagcttctgtctcgaaacatatctgcagcaaaatgatgattacaaaatcctaatacagcggagcggggtcaagcagtgctacaagctcatcgaagacaatgcaaaagagatcatccatgtgaaccctggcgacaaggtacttggcgcccgcctgattggactgccccccataccagtgggcattaacgaggaggaagggaccatcttgattacgtacaccaagccgtgccacggaactgccgcgatcgagattccaatctcccaggaagagatccagaacgtgagggacatggacattggtgcttga

SEQ ID NO: 3837 - DNA, 462 bp, synthetic construct
  source 1..462: mol_type = other DNA
atgaaagctttagtgctgctcggctgccctgaagccccatcacagacgcccatcggactgtatgccagctacaagctaggccagatgggctacgacgttacagtcagcagcaaccccgcagcggggaagattttggacattagtgaccccgaaggggtgtacgtgaaaaagcgggtggatattgagaagtgcctggacgaaatcgaagagggagactacgacctcctggtcggttgtgtgcacaaggatgccgcggccaccttctttataacatattaccatatacttaaatgcaaggctctggcccttgtcttctccagagatgcagaggaggttgcagagtttgccgatatggtggagtcctcgaccgatgctgacatcatcgccgtgagggctttccacaacccgaatccaatcaaagtacgcttcgacaaatatctgaagactctcgaggaggaatga

SEQ ID NO: 3838 - DNA, 510 bp, synthetic construct
  source 1..510: mol_type = other DNA
atgggcctgatctccgacacgcacatcagtgaaaagcgggggaagctgtccaaccaaatattggaatctttcaaaggtgtcgatttgatcctccacgctggagatatatcctcacagactgtgctggacaagctcaacagtatcgccccgaccatcgcagtggaaggcaataacgaccgggctcgaaagaccctggacctcaacccctctgagattatagagatcgatgggatcagaatcctgctgattcatggcgataagctgccaagcagggattttgacaaatactgcaaattcgcactcaaggagaacgcggacattctaatatcgggacacagccacaggccacaccttgaacgccaggaggacattcttatgattaatcccgggagccctaaccgccccatcaagagcgacgcctcaatcgccattttaacaattgatgaagagaaagagcataaaaataagctggacaaggtgaaggtagagttcatcaaaatcgagaaatga

SEQ ID NO: 3839 - DNA, 117 bp, synthetic construct
  source 1..117: mol_type = other DNA
atgctgatctgtcctatatgcggctaccccctggacagcgacggtcggtgctggaactgcggatactgggtggagacccacccgctcgatccattccagcccgggagcggctattga

SEQ ID NO: 3840 - DNA, 129 bp, synthetic construct
  source 1..129: mol_type = other DNA
atgctggattgccctgtctgtggcagcgaactggacgagaaggggcagtgctgggtgtgcggatacaacatggccccatgtgaccaccccgacgattatgattacgacgacttcgagccgcagctctga

SEQ ID NO: 3841 - DNA, 504 bp, synthetic construct
  source 1..504: mol_type = other DNA
atgacttttaaaaaggagaagttcatcaagctcttaatgtttatcatcagcaggagctccgacaactataatgtaggcaaaacggtcctgtcgaacatgctctatttcattgacttcaactacttcgaaacctacggtgaatcactcacaaacgaaatctacattaaatcctatctgggagctgtccccagccactttgatgagatcgtgcgggagctaatttattacaacaagatatacagacggagggagccgtactattaccatcacatcaacaaatattacctgaccagcctgcacaatattgacttggactataaggaattgattgtggtgggcggggtcctggataatctgatggggttcagtgccgtggagatagttgattacatcagtggagacgccccattcaagatcgcaggctttgacgagcctctggactactccttcgtgttctaccgagactttgattactcagtgcgcaatcttgattattactggtga

SEQ ID NO: 3842 - DNA, 1809 bp, synthetic construct
  source 1..1809: mol_type = other DNA
atgaaaaacatacgccagaccctaagcactattggcaaaatgctcagtcccctaaaaaagagcattccttccatcttcctcatcttcattttcctgcttatagacgtgtactgtaacctgaccctcccgagctacactgccgacattgtggacgtgggaatccagaataccgacttcaactacataatcagcgtgggtacaatgatgatgaccatggtcttgataggagttctagctaccatcgcgttgtcctatttttccagcaaggtttcagccgcttatggaagggacttaagggaaatcagctatgaaaaaatccttaaattctccaacttcgaactgaacaagatcagcagatcctccctcattacacggaatacgaacgatgtttaccaaatccagatattcctgggcctgctttttactaccatcctctttgcacccattctggggattggcagcatcatcaaggcaatggagcttggcaccgacctcctctggattattgtggtgacattcgccagcgttgctattctcctcgggatcatattcataagaacggtgccctactttaaggtgatgcaggagctgattgacaagatcaaccagacatccagggaaatcctgatggggatgccagtcatcaaggccttcatccgacaggattacgaggaggaacgctttgaaaagactaatgaggagttcaaggaggtgaatctccatgtcttcaaaaccctcttcctgatgattcccgcaatgacgatgatattgaacgtgatgatagtcttgatcctatactttggggcctacgatgctatcaatggtaagattctgactggaaccatcatcgcattcatccagtactccacgcagattgtcatctcgttcctgatgctggggggctttacaatcatgattccacgcatcctggtatctgggcggcgagtgggcgaggtcctgaacactgagatcagcattagtgacggacctattgataagattgatgagaaccccaccatagaatttaaaaatgttggctacagctacccaggaagtgagaaggagaccctgaaagacattagctttaagttggaaaagggcaagaccacagccataatcggtggaaccgggagcggtaaatccacaatcctcaatcttattcctcgcctgcaggatgtgacggagggccaaatcttagtaaacgacaaaaacatcaaggagtataagctgagtacactgagagagcgaatctcatacactccgcagaaggctattctgttccagggtaccgtacggagtaacatgcaagtgggaaaggaagatgccaccgacgaggagatcgagaaagccctgaatatcgcccaggtggactttatagagagtttggatgacgaggtcacacaaggggccagcaacttcagcggaggccagaagcagcgtctgtccattgcaaggagcatcatggacaagcgggacttttacctgtttgatgactgcttctcggcgctggacatgaatacggaggcaaaggtgaaggaaaaccttaaggacttgaaggaaagctcttcaatcctgataatttcacagagaatctcgacaatcatggatgctgacgaaatcatcgtgctggatgaaggcaagattattgataaaggcggtcacgattatctttataaaaactgcgacatctataaagagattgtctcttcccaaatcgaacggtcagaggacttaatctatgataatgaagagactgccagctttaccatcgattctagttcaattaaaaaagccgcggggggcaaatga

SEQ ID NO: 3843 - DNA, 1788 bp, synthetic construct
  source 1..1788: mol_type = other DNA
atggccccacgaccacggagattgcccccggagaagcccactaatgtaaaagaagccatcaaaaacatttttgggctcctgatgggatacaagctaaagctaagcattacagtcatttgcggtatcctatccactgtattctctgtgataagccccctcctgattggccttgctacaactgccatcttcgatggcataaactctgggaacatgaatctggagtatatcattaaccttttaatcaccgttgtgattctctacatcattagtgcagtcttctcctatctccagagctatttcctcttggagatcaccacagacatcagctacaacctccggaaagagttgattgagaaaatcacccacctatccatgggggagatggataaaaacacacggggagacatcctgagtcgaataaccaacgatgtagactcgctccagaccggtcttaatcagacattcaaccagctgctctctggcgtgattaccatcgttggcgtcacaatcatgatgctgtccatcaatatctggctgaccctggccaccattgtgctgattccaattgccttcctgatcatcacatttgtgacaaagcattctcaagactattatacgaagcagctcacctatagggggagcctgaacggacagattgaggagtcatttacgggccacgaaatcattcgttcatacaatcaggaagagcagtccatggaaacctttcgggaagacaatgaaaactggtacgagcaggaatggaaatccaagttctattcgagcctctccgcccctctgatgaacttcatctcgaacttccagtatgtgataattgcagttctgggcgcggtcttcgtgctgcagaatgcgatagctgttggggacatactggcctttatccagtactctaaaaacttcacgactcctattcagcagataacccgcgttatgaacatggtgcagactgcaatggcagcaagtgagagaatatttggctttttagagatcgaaaacgaagagaacccttcaaaagagaagatcgagaagatcaatgactcaatcacctttgaaaatgtcactttcggctacacaaaagatgaaccggtgatcaagaacttgacctttacggctaaaaagggcgaaaagatcgccattgtgggtgagactggggctggaaagaccaccatcgtgaagctgctgatgagattctacgatgtggatgacggggagatcaaaatcgacggagtcaatataaacagctacgataagcacagcgtccgctccctggtaggtatggtgcttcaggacacttggctctttaatgacacgatctacaacaacatcaaatacggtaagcttgacgccactgaggaggaaatcattagcgctagcaaggaagctcatgccgaccacttcattaggcaaattcccgaaggataccagagcgagctgaatgaggacgtggacaatatctcccacggccaaaagcagcttttgacaattgcgcggacgatcatatcaaacaagcagatcctcatcctggatgaggcaacgtctagtgtggatacacgaaccgagaagatcattcagaaggccatggataaactgatggagaagcgcacaagtttcgtcatcgcccacaggctgagtaccgtcagggatgctgacaagatcattgtgattgaggatggacgcatcatagagcaaggcagccatgaagaattgctggaacaaaaagggtactactataataccttaaacactcaaagaagggagaatattgtgtga

SEQ ID NO: 3844 - DNA, 603 bp, synthetic construct
  source 1..603: mol_type = other DNA
atgaatggtgggaacaacctggataataactgtaaaaacctgggcaatatccttaaccccaccgaggtgaacaatcagctcttgttccataagttcatcatgatcaatgagatcctggataagcgaaacaagaagcagaatccagagatgaaaagcattacgaagggccagggacgcctcattgttctgttaaagagaaaggacaagctctcaaccaaagagctctctgaaatcctgaatgtcagcgtaagctccctgaatgaaactctaaacaagctggagcaaaagaacttcatcaaaaaggtcccgtccgagaaggacaagcggatacttctggtggaactgacagaagaggggaggcagctcgagtttaagaaccacgaggacattgacatctttgacttcttgagcaaagaggaaaaggaaaaccttaacgactacctgaatcagttgacactatcgctgcacgagaaattcaaaagggaggaccctgaaaagtatgccaagatagtgaaaaaccggaaggagatctttgataaatacttcaaagatgaaaacaacaatgaaacctgctttgagttcattgattgcagtaaaaaatga

SEQ ID NO: 3845 - DNA, 738 bp, synthetic construct
  source 1..738: mol_type = other DNA
atggccaatgcaatcatcacaggtggatcaaggggcatagggaaagctatggctctaaagctgggtgagctgggctacaatgtggtgatcaactatcgcagtgacagctccaagcagctgactgaagatgtcatcgccgaaatcaaggataagtatggtgtagaggccatagccgttcaggccgatgtgtccaaattcgaggattgtaaaaagctggtggaggccgccgttgatgccttcggcgaagagatcgacgccctcgtaaataatgcaggaattaccaacaactctaacttcattgacctcgagcccgaaaggtacgaggcggtcatcaacacaaaccttgtgagcatgatgcatatgtgccacctgtgcctcccatatatggtggaccgcgacaccgcgattgtgtgcacggctagcgtgggcgggctgaccggcgtgataaatcaggccgactactgtgctgccaagacgggcgtgattggcctgtgccgagcactcgcactggagtttgcacccagaaaagtccgggtcaatagtattgcgcccgggatgattatgaccgacatgctccggggcgtcaaccaggacgaattgaacgctctggcggcaacaatccctcttggacacatcggggaagttgaggagatcgctggggccctagaatacattttgactgctccatacttaaccggacaggtcatctcgccgaacgggggatttgtgctgcaatga

SEQ ID NO: 3846 - DNA, 1032 bp, synthetic construct
  source 1..1032: mol_type = other DNA
atgaaaatatggattgatatctcaaatgctccacacgtgagattcttcaaagatgtcataaagtatttcgaagatgaaggggacgatgtgctggttaccgcccggaagtttggcgacattcacaagctcatggatatgtacgacatagactttatctctgtaggaaagcacggagtcacattggaagagaagctaaaggaaagtgccgagcgggtcgtgaacctggcggatctcatttccggagaaggcttcgacgttgccctgtcaaagcattccattgagctgccaagggttgcatttggcctgggcatcccaagcctgtttgtgctggataatgagcatgccatggctgccaataagctgacccttccattatgcagcaaaatcattgtgccaaacattatagacatgtggaaactaatggagtacggggctaatcccaacgatataattcgctataacgggaccagtgagctgatgcacttcaataactttgtattcaacgagaacatcttcgaggacctgggattggatctacccctccaacgaaccatccttatgcggcctgagccctctctcgcgtcctacctgaatacagactgcagaaaaagcgttctctcccctgtggtagatgtcttaaaggagtacgcaaacattctcattctgcccaggttcaaggaacaggccgagatctttgaaggcatcaagaacgtgactatcctgaagccgccggtggacactagtagcatcatcaaggcatgtgacctggtcatcggagccggcgggacaatgaaccgtgaagctgccatccttcagacacccgtgatcagctgctaccctggggacactttgtctgtcgaccagttttatgtgaacaacggtcttatgtaccgcaccaccgatctggaggacatcacgaaacaggcactcagcttcattgtgaatccccacaagcctatcgacttcaaaacggatgacctcttcgacttgatcgtgaaaaatacgtatgagctgggcggttcgaagaaatga

SEQ ID NO: 3847 - DNA, 762 bp, synthetic construct
  source 1..762: mol_type = other DNA
atgcacaaggtggcggacgtggaagtcgccaagaacataatggatgccaatgccaaactggcacacaagaacctccacctcctggaagaccacgatatcttctgcgtcgactttgtgggagcaatcggctctggtaaaacagccctgatcgaagagattatcgagaatgtggatgaaaaaatcggtgttatcgccggggatgtaatcagcaagtttgacgctggcaggattgagtcccacaatgttcccgtggtcggactcaacaccggcaaggagtgtcacctggatgcccacctcgtggggcacgggttaggcgacctgccgcttgatgacattgactacctattcatcgaaaacgtgggaaacctcatctgtcctgtcgacttcgagctgggctcacatatgcgggtggtggtggtcagcgttactgagggggacgacaccgtagagaaacaccccctgatcttccagaactctgacctggtgataatcaataagattgacttggcagaggccgtgggagctagcgtggataagatggtatgcgatgcaaaacgccttaacccagatgtgaaggttattacgtcaagcctgaaagagggcaaggggttggatgaagtcatagcggccattgaagattgcaaggctcacgtcgctgaacatcaccaccatcatgaccatgagcatgagcacgaccacagtcacgaccatgagcactcgcacggccatgaccactcccacagtcatgagcattcccattga

SEQ ID NO: 3848 - DNA, 375 bp, synthetic construct
  source 1..375: mol_type = other DNA
atgcacgaacttgccatggcccagggcatcctgaatgccgtgctggaaacggcagaggctaacaatgcaatcgaggtaaccgaaatagttattgagatagggaagttggctatgctaaatcccgagcagctgaaatttatgctcggtgtcctgtgttccgagacaatcgcggagaacgccgaactcatcgtggaggatattgacgtggagatcaagtgccacaactgtgacttcgaaggagtcgccaacgtggatgacagcgatcattacgcgccgatgattctgtgcccaaaatgcgagagtcacagggtggaggtcaagaacggcaaggacgtgaccgttcggaacatcagcattgaaaaagaggacgaatga

SEQ ID NO: 3849 - DNA, 921 bp, synthetic construct
  source 1..921: mol_type = other DNA
atgatcatcgggggcagcgcatcacagaaactagcggctaatgttgccaaggagcttggggacgttctgtgccctatagaaaccaaaaaattccctgacggggagagatacatccgcattaagagtgaggtggataaggaagttacaatcatccagtccacgggatttccccaagacgaaaacctcgtggaactgttattcctgatcaggactgtcaaggacctgggtgcggagcatgttaaagtggtggtgccctatcttggatacggcagacaggaattgaggtttaaggatggggaggcgatttccgcccagctggtcgctaacctaattgaggagtcgggggccgatgagttcatttccatcaatctccatgaggacagcgtgcgagacttcttcaacattccaactgccaatcttagcgcaatgccccccatcgcagagtacattgctaacaccgtggagaacccaatcattattgccccggacaagggcgctttgggatttgcagaagagatcgccgaaatcctcggctgcaattgcacgtacatgagcaaagtccggctgggtcctgataaggtggaaactaccattgtagacatccacagcgactttgacagcgaggatctggctaaagtgaagaaagacagcaaggtcaacatagattctgtaaaggataaggaggcaatcatcattgacgacatcatagccaccggaggaacaatcgtcaatgccattggcatcctgaaggagcacggcgcgaaatcagtagatgtctattgtgtgcacccagtgctcgtgaacgatgccgtgctcaagatatctgcagctggcgcccgggaattggccagtacagataccctgaaatcagacgtcagttccatatccgtggctaagatcatagccgacgtcctgcgctga

SEQ ID NO: 3850 - DNA, 1104 bp, synthetic construct
  source 1..1104: mol_type = other DNA
atgcttctgatcgctcagaatcactttcagctgatacttgaggtagggttgattctgcttgctactatgatcttcgtcatcaatctggtgccgttaagcctgagtgtggttaccttcctctcattgttcctctctggcggatttaccatcctatttggagccgacctcgctttcctggtactatcattcgggcagcatgagtttactcaccctttcggtcctattgccctactggctattgtaaccgcacttgcctcgctgaaggtgatggaagggtcgggcgtggatataagtaggctcaaaaacatcgtctacgtgtttctgatagccatcaccgtcttcggcggagcaatgcacagatcattcctactgctctggttcatcgggctgttcatcggttacacgatcatttccaaatcctttcgccaaaagagcatcctcacaatccggagaatactgatgtttttcctggcagccctggtggcattcgggttgcttgagcttgtgtcccggattctgagcatggaagtgttctctcccctgctgaggattagcagactggcccagaactcactcgccagtctaaaattggtcatcggaaatacgcagctgatcgggcacgaccccgccagctcctattggtctgacagtacgggatttgccgatggctacattagcctccccatgcagttcatcttgatgtttggcctgccattcccattgttctttgggctgctcgttaccaagaaggataccatcgactatatgctcccaggcatcttcggctacgcctatgactttggctacttgacattcgtgatactcctgttattagtcctctttaccatcataattggcctgctggttcttcgcgaataccgacttaaacgggagaagaacaacaagaaatatctgggcaaggaagtgctcttgattggttcccttactggatttatcgcgcaagcgatcattggtctgttcctctttaacaggacaatcaacggaatggcgctgctcacattcctgttcctgggctccctggtcctggctcatgtggtgacaattcgccgagatagcaatgaggttttaagccagcagatttga

SEQ ID NO: 3851 - DNA, 480 bp, synthetic construct
  source 1..480: mol_type = other DNA
atggtaaacataaaaactgttgcactggccgtgatcgcaatcatagtcgtgctcctcgccatcttcgcggtgtccaacgtagtgattctagcgcaggatgataccgaggggggcatccctggggttgacatggctgccttatggagtcttaatggtggtttccaatggatttatcccggaagctcttttgacccagaaggccgcaccctgcacaatatctacatgctggacgacccctatggcgaggtgaagacaatcatgcagtacacatacaacgtggaccctcacattctggtgataattaacgaccaggctgctgcccatatctttggggacaacatcttggatacgatcaggcagcatgattgggtcgaaggccactcccggggcgatgccgtcggaatgagcatcacctcagtcaatcccctgccgataattccagacattctcatgggaaacattaagatcatgttcatctga

SEQ ID NO: 3852 - DNA, 2175 bp, synthetic construct
  source 1..2175: mol_type = other DNA
atggaggaaaagaaaatagaaagcacagatgttgaggtgaacgagtctaaagacctgaacttagattccactgtggagaacaatgaaattgacaagactgaggagttggacgcttcctctgaaattgatgagaacgaggaacttggcacgtcctccgaagtacgcgagaccatagtcattgacacagccagtgaggtggtggaggcggatgtggtaagcgaaaccatcgacagttctgaatcggtcaaggacgaggaggaggacagcaatccccttgatgtagaatacgttgaagaggatggcaaacgtaggataaagcccatgctggattacgagtcgctttcaaacacctcggagattgaagtgcctccactgctcatcgaccaggtcataggtcatgaggaatctgtggagacaattaaaaaagcagccaagcagcgccgcaatgtgctgctgataggtgatccgggcgtggggaagtcaatgctcgccaaaggaatggccgagctgttgcctcctgaggtcctcgaagacgtcttggtttatcccaacggggaagacagtaattatccactgattaggacagtccccgccggtcagggcaaaaagatcgtcaaggccaacaaggccaatgcaaaaagcggcgatgagaagaagatgatgatcaccatgtttgcaacggccgcgatcttcgtgctgggaatcctataccagagaatatttgaggcgatcattgctgccctgctcgtgatatttatttccatgcagatcaagcctaaggccaataacatgtctcccaaactgctggtgaacaacggagataaacgctttgcaccattcatggatgccactggcgctcatgccggcgctctcctcggtgacgtgaggcacgacccttaccagagcggagggctcggaaccccagctcacgagcgggtggaaagcggaatgatccacaaggcgcataagggagtgctgtacattgacgaaatcggcacaatgagcatgaaaacacaacaggagctcttgtcggccatgcaagagaagaaatatgccatcactggccagtccgagaacagcagtggcgccatggtccggtctcaggcagttccatgcgatttcgttctggtcgcttctggaaatatccaggttctagaaggcatgcacattgccatgcgctcaagaatccgtggatatggctatggggtcttcatgaaagattacatggaagacaccgaggagaaccggaaaaagctggtgcagttcgtggcccaagaagtcaagaacgacggccgcatcccccactttgcaacggacgcccttgacgaaatcattctggaagccaaacggagagccggcaggaagaacgctctgaccctccgactcagagagctgggtggtttagtgcggtcctcaggggacgttgcaattgaggagggagcagacctggtgacagccgaacatgtggtaaccgctaaaagattcgcccgaaccctggagcagcaaattgtagacagatccatcatccagaggaaagaatacagcgtattccattcctcagggggcaagatcggcatggtgaatgggctggctgtgatgggggatcgaagcggtattgtcatgcccatcgccgctgaaatggctccggctaacagcaaaaacgaaggtaagatcatcgttaccgggaagcttggagagatcgccctggattccgtgcagaatgtcagtgcaatcatcaagaaatacactcaggtggacatctccaatcacgacattcacgtccagttcctccagagttacgatggagtggagggggacagcgccagtgtgtcaataacggcagcggtgatctctgctgttgagggcatcccgatagaccaatcaattgctctgaccgggtccttaagcgtgcggggcgatgtcatgcctatcgggggggcaaccgcgaagattgaagcggctgccgaagcaggcattaagaaagtgctattgcccaagtccaacatggaggatgtcatgcttgagaagaagtatgaggacatgattgagatagttccaatcgagactatcgaggacgtgttggaaaatattctaatcaacggaagcaagaaggagaagctgatcaacaaaaatgagaggaatcagtggagcagtcacaagcaagggctctactga

SEQ ID NO: 3853 - DNA, 1641 bp, synthetic construct
  source 1..1641: mol_type = other DNA
atgactaaatgtctgatgatccaaggaaccgcatcaaatgccggaaaaagtctgatcgttgcagctctgtgcaggatttacacaaaacgcggctacaaggtggctcccttcaagtcccagaacatgtctctgaactcatacacgaccaaggagaacaaggaaattgccattgcccaggtcttgcaggctaaggcggccaatattgagcctaccgtagatatgaaccccatcctcctcaaaccaaagggcgaaagttgcagtcaggttatcatccaaggcgaagcagtgggaaacaaggacttcttcagaaaatatgataagacaaaggccacccaacgggacatcgacaataatctgatggatgatgaggactaccggatcattgcaaaggaggccgtgatagactcactgaacaatctcaaggaggattatgacatcatcatcatggagggtgcgggctctcctgctgaaatcaacctcagggaaggggacctggctaatatgggtgccgccgagattgctgatgccaacgtgctgcttgtgggggacattgacaaggggggcgtctttgcctcgatagcgggaaccttcctattgctggacgatgcagaccgcagccgcttcaagggagtcatcatcaacaagttccggggaaagcaggaacttctgtgttcgggcatcgagcggctcgaggaaatcattcaggtccccgtccttgggatcgtgccttatgccgaaaacctccagctacccgaagaggactctgcttccttaaaagagcacaactggacaaaggagtttaagaataacgatgatcacataattattggcgtggttaaactaccgaagattgccaacttcacagacatcgacccatttgacacagaagacgatgtggaagtgcgcatgattgaagtccacaattacaaagacaaaatcaaagacatcgacgccctgatcttgccggggacccgtaactccacggaagacattatggagctcgagaagaccggtctggcacaggagattaggaaactgtcaaatgagtccaagattccaatcatcggcatctgcgggggataccagatcttgggcaacaagatctatgataaaaaccataaggaatccaaactggatgaggttgagggattagggctgttagacattgagagtgagttcataagggagagcaaggtcgtaaagcagagcattgggagaatagaaataaacgataatatcacgggtctcaacaattccgatgagaacaacatcttttacgagatattcagcaagatcaacggggagactgtgagcggctatgagcttcacgagggcactacaaacctcataagcgccaagcccctgtttaaaatcgagaagggcattggaaataatgacaacgaccagttcgatggggcgtacagcaagaatgtatttggcacctacttccatggcatattcaataattataacctgcgacgagagtttcttaaccacctgagaaaaaataagggtttggacgagaaaactggtgaagacccatatgaaaccagcgtggaaaactctctggaaaaactggcaaatattgtggaggaagctctcgatatggactacatcgataaactggtgtttgatgagtga

SEQ ID NO: 3854 - DNA, 1161 bp, synthetic construct
  source 1..1161: mol_type = other DNA
atgagggacgtggcgattatcggcgcttcccagacaaaatttggagagttatgggatgtgagctttcgagaactcatcagtcaggctggacttggcgccattgaggacgccaacctaagcggggccgacctggaagccatgtttgtgggaaacatgtctgcaggtctcttcgtcgggcaggagcacattgcctcactgatcagcgacagcatgggcatgaaccccgtgccatgcacacgggtggaggcggcttgcgcttccggcggactggcacttcgccaaggaatcatggctgtggcttccggctaccacgacgttgtggtcgctgccggggtggagaagatgactgatgtggtggacgcaactccggccatcgccacagcgtccgatcaggagtgggaagcacagcagggcgccactttcccaagtctgtacgccatgattgcgcagcggcacatgtatgaatatggcaccacaagggaacagctggctatgatgtcggttgtgaatcacaagaacgcttcaaacaaccctaatgctcagttcccctttgaagtgacggtcgataaggtcctgaactcaagtcccgtggcagatcctttgacactccttgactgttcccctgtcagcgacggggcagcagcgatcgttatctgtgcagccgagaaggctaaggaatacaccgacacccccatctatgtaagggcctctgcacagtcgtccggaaccattgcgctccatagcagaaaggacatcactaccttggatgccaccatcgcagccagcagaaaagcctacgatatggcaggagtcaccgtaaaggatatagacgccacggaagtccacgactgcttcagcatcaatgggctgttggccattgaggacctgggattcgccaagaaaggagagggcggcaaagtcctggaggaaggtcagacgaatatagacggtgattgtccgattaacccaagtggtgggctgaaggcccgcggccatcccctcggcgccactgggatcgcccaagccgcggagatagtatggcagctacggggagaggccggcaaacgtcaagtggatggtgctgagatcgggatgacccataatgttgggggtaccggcgggacatgcgctgtgcacatattcggccgcgacctgaactga

SEQ ID NO: 3855 - DNA, 1041 bp, synthetic construct
  source 1..1041: mol_type = other DNA
atggctggcatcgttggatacggggccaatgtgcccagctacagaatcaaagtcgaggagattgcaaaggtgtggggagataacccagagtccatctccaacgggctgatcgttaatgaaaagtcagttccctcttcggatgaagacaccgcgactattgctgtgagcagcgcccgatatgccctgcgccgggcacaaatcgacccacaggacattggagcggtgtatgtaggtagcgaatcccacccctatgccgtcaagccaacagcaaccatcgtggctgaagccatcggggctactccggatatgacggccgctgaccttgagtttgcgtgcaaggcaggtacggcaggtattcaggcggtcatggggctcgtggatagcggcatgataaaatacggtctggctatcggtgccgatacctcccaaggcgccccgggcgatgctctggaatacactgcaagcgccgggggcgcggcctacatcatcggaaacaaggacacaatagccgactttggaaccacgtacagtttcaccaccgacacccctgatttctaccggcgcgaggggcagccttatccaagtcatggcggcagatttacaggggaccccgcttacttcaagcacgtcctgggcgctgccaaaggcttgctggaaaagacagacagcaaagtggaagattacgattatgccattttccaccagcctaacggaaagttctacctaagggctgccaagaaactcggcttcaccccagagcagtacaaggatgggctcctgactcctaatgtcggaaatacctactcgggcgcagtgcccctcgccctgtccaacgtactggacaaggccgagcccggagacaagatatttatcgtctcatatgggtcaggtgccggcagtgacggctttacattgactgtaaacgaccgtattgacgaggtgaggaacttagcccctacaacggaggagatcctctctaaaaagatttacgtggactatgcagtgtatgccaaattcaaaggaaaacttcggatggcatga

SEQ ID NO: 3856 - DNA, 267 bp, synthetic construct
  source 1..267: mol_type = other DNA
atgtcctcaggactgacgatcggccttctcagcctgatcattttcgggaatatagagaacttgattctggctagccagggtgtggtgaaagccgcgaaccccctgaagctggcaatcttcagtctaatctgcgtgtcttgttggctcattctcggcacagtctgcacccagcagttacaaaactatgggatttacatagaatttatcggcgggtttgccatcttcgtacttggactgcagtccatgatcgaggcagcccggggctga

SEQ ID NO: 3857 - DNA, 288 bp, synthetic construct
  source 1..288: mol_type = other DNA
atgagcttcgccgaaagcctcaaggagtataagccatttctgggcctcctcatcttcgggaatattgaaaacttagtgctggctgcccagggggttatcgagggagcggacccgttcctggtggcaggtgctagtgtctgctttgtaatcatctggcagttcataggagtcttcggcaccaaatcagccatgaaatactctcggcacattgagtttattggcgggtttgcaatattcgtgttgggaatccaatccatgcttcccctgatctaccagctgctaggctga

SEQ ID NO: 3858 - DNA, 669 bp, synthetic construct
  source 1..669: mol_type = other DNA
atgtctgacgagaagatggaaagagtggaagacaatgagctcctgattaatgcacggaagcctgagggagaactgggtgatcagctgttggatcgtatgaacaagtcccacgagtctcttgcccaatggggcgtgagtcatctggacatcagcaaggatgacatcatactggacattgggtgcggcgggggagtcaacgtggagagattcctaaaaatgaccgaaaacaaggtttatgggctggactactcagaggtcgcggtagagaagagcaaaaaattaaaccagaaggccatcgaagaaggccgctgcgaggtcatccagggctccgtatcggaattgccgttcgatgatgaaatcttcgacattgttacaggctttgagacggtgtacttctggccagattttgtgaatgacctgaaagaggtccgcagggtgctcaaggaagatggaataatctttatctgcaacgaggctatcccccgagacggggacgcccggcaggaggagctcaaagaacttctcgatatgaacatttacagtgacgatgagctggaccagtcactcaggcaagccggattctccgatctgatcatttttgacaagagcagcagcaaagtggagtccaaggacgtgagtggttggatttgtgcaatagctaaaaagtga

SEQ ID NO: 3859 - DNA, 468 bp, synthetic construct
  source 1..468: mol_type = other DNA
atgacgtttggaaacgataaggaaaacattttcgtaaaaaatgtggttgactatggcgatctaagtaaaagcgataggagttctaacctgggccgctttttccccaacagacagtcccctaaaagcgactttgatagtgtgccatcctcaattgacgagaagataatcaacatcctgaccttcaaggatgaaggggactcaaacggctctaacaacgacggaacatctgacgacagcgtggacggtgtggattattccctctttgacgaagaactggaatacatctgcagcctcggcttcaatccattcgaggaaggggggatcaatcgggactccttggaggagcatttcaatccctacctggaaaatcacccggaggagctcgccttcctttcggtctttgaggatttcaccctggtgcagatgaacttcagcgacatgataaaggaggtctactttgaggagtga

SEQ ID NO: 3860 - DNA, 1611 bp, synthetic construct
  source 1..1611: mol_type = other DNA
atggcccaggggcaacccatttttattctgccggaaggcaccaaccgtttactgggtagagatgcccagaggaccaatatcctggccggaaaggtgctggccgaaacggtcagaaccacactcggccccaaagggatggacaaaatgctggtggacggactcggcgacattgtcgtgaccaacgacggagtgacgatcctgaaggaaatggatattgaacatccagcagctaagatgctcgttgaagttgcaaaaacccaggaggacgaggtgggagacggaaccacaactgccgtcatcattgcaggcgaactccttaagaaatccgagaccctgttggatatggatattcacccaacaatcattgcgatgggttacagacaggctgccgagaaggcccaagaaatcctggatgacatagccatcgaagacattagccgggagatgttggttaaggtggccatgacggcaatgacagggaaaggaacggagaaagctcgagaacccctcgccaacctgatcgtggacgccgtacagcaagtggctgatgacggcgtggttgagaccgatcacatcaagatcgagaagaaagacggggcagtggtggaagagagcactctaatccagggggtcatcgtggataaggagaaggtccaccctggtatgccttctgagctcaaagacgccaaagtggtgctgatcaactccccactcgaggtcaaggagacagaagtggatgctgaaattcggataaccgaccctgcgcaaatgcaggccttcattgaacaggaggagcagatggtccgcgacatggtgaataaggtggccgacagcggcgccacagtgctgttcgcacaaaaaggtatcgatgacttggcacagcactacctagccaaggccggaatcatggccgtgaggcgcgtcaagaaatcggacatagagaagctggctaaggcaactggtgcgacggtggtcagtaacctggatgacttaactgaggctgaccttggcagcgctggcagcgtgatacagaagaagatttccggggatgacatgatcttcgtagaagaatgccaggaacccaaggccgttacactgctcgttcgcggaagtaccaaacacatagtagcggaaatcgaccgggccgtggatgacgcaataggtgtcgtggccgccactgtcgaagatgggcaggtggttgcggggggaggcgctcccgagatcgctatggccaaaaagcttaaggagtatgcccagtcaatcagcggaagggagcagctggctgtaacagcatttgcagagtcacttgagattgtgcccaagaccctcgctgagaatgccgggttggatagcatcgactcgcttgtggatctgcgagctgctcatgagaaatccccttacatgggcctaaacgtcttcactggcgatgttactgacatgaaagaggagggggtggtagagcctaagcgggtcaagaaacaggcgatccagtctgcgtcagaggctgcggagatgattctgaggatcgatgatgtcatcgcctccagcggcaccagtgcaggcgacatgccaatggacccagggatgggcggcatgccgcccatgatgtga

SEQ ID NO: 3861 - DNA, 1017 bp, synthetic construct
  source 1..1017: mol_type = other DNA
atggtagaacgcgccaatattaacccggccatgatgctctgggctcgcaagcgtgcgggctacatcaacggctttgaggaagacctgcccaaagacatcaaatcaaaatacaagagctgggaaagtggggaggaaaagcctacttggacccagctgcggaaggcaagcaagaagttttgccttcctagtgcattcttctttctggagaaggtccccgaagatgatgactttccaaaaatgattaattatcggaagctggacgctgatgatatcttcgaaaacaactccccaagcctgatcaaacagataagaaaatcccagagccgaagggagcattacctggatttgctgtatgagttggaggaaaacatcccctcattcgagatctatgagggctccttaaacaaaaagcacgtctcgaattacattagggagaagctggggatctctttagagacgcagaagacatggatacggaagaacaagtcaaaagacagcaggcactacaacttcctgaacaaatggaaggagatcataacacgaaagattggggttctcatctttgagagcgaaggggtggccctgaatgaaatgagaggactgtgcatcttccacaaggaggtgccgattatcctcctgaatggaaaggacagtgtcaacggccgcatattttcgctcttccatgagttgacccacctactccttggccaaagcgcgatctgtggggatgacgagaacattgacgaggagatcttctacaatgccgtggccggtgagttccttgtgccaaacgaagacctgtgcaaaaacaccaatgcagataacatggacaccatttccaatggcgccggtggaaattatctcaacaatcagattaaatacaacggagagccttactgtgccgtggtgctggaggcttacgaaaagggaatcatcaatggtggcgaattttcccggttcactaacctaaacaagaaattcattccctttatgtttaatagatatctcttctcttga

SEQ ID NO: 3862 - DNA, 276 bp, synthetic construct
  source 1..276: mol_type = other DNA
atggaggagtttcgccagcaactggtggacaaggtggtgttcagcttggtcaacacaaagcagatcagcaatgatgatctggacaaaaggaacaacagcatctcacttgatgttcgaaagctcatcatcggccgggtactagacaaggtcaattccaatattaactacgagggagaaaacctcagttatgcacagatcattgacaagcaggccaaaaaaattgtgaattacctgataaacggcgaaaaatacaccgggttctccctgagatggtga

SEQ ID NO: 3863 - DNA, 696 bp, synthetic construct
  source 1..696: mol_type = other DNA
atgaagatactgattgagggatacaacaagtccatccacaagcgtgacaaccagattctaatcatggagaaggagggggaattggagaagatcaacataaaaaagattgacgatataacgattatcggtaaaggatcaatcacattcgatgccttgcgactcatctccgagaataatgtccggctcatgtccattgactactttggaaagataaactatactctggagtatcccagcaatgaaaacatcttcctccgcaagcagcagtacaaaaccagtgaaaaccacaaaggcctgattatcgcccgggagatgattatgtctaagatgatcaatcaaaagtcgaccattaagaccctgaataagaacaaaaaactggaaaatgtgaagatctttgagagaaacatcaacgaggctattaaacagatcggcagtttacgcttcggcgaaaggacagacatcgagaaaagcaaaatgaagatgatgggtatcgagggcagcgccagcgtggactactggctcgctgtaaatgaactgctgccgaaagagatagggttcttctccagaaataacaggcatccaaatgatatcactaacgcaagcctgaactacgcctacgccattctggcgagcgaagtgaacaaggcgcttgtcatcaacgggcttgattcatattgcggctttcctgcattttga

SEQ ID NO: 3864 - DNA, 276 bp, synthetic construct
  source 1..276: mol_type = other DNA
atgaaggtactcgtgtcattcgaaatcaaattcaaaaccaacaaggagaagattatatccatcctaaagcacttcggcttcaggcggatgcaggagaacctttattttggggatgtcgagtacgacgaactctacgccatgcagagtgatataatggagaacattagagagtacgacagcatcctgacaattcccatctgcaaatcttgttatctgaagctgaatgtgtttggacgcaatttgagcttcaaggacgaactgtacaaaatcttttga

SEQ ID NO: 3865 - DNA, 9162 bp, synthetic construct
  source 1..9162: mol_type = other DNA
atgaataaaagcaaaaaaactatgattatgctgattatggccattctcgttttattgaccatggccagtgtgagtgccagtgagctcgaggacattcaagtcaccgcatccaatggcacaagcgatgccgttattgcctctgaggcgaatagtgcgtatcccgataatgccattatcacctccgagaaggaaaatggcgatgagaatattatcgctacggataatggtaaaatcggatatgagaatgacgataagactattatcgctactaatggaaatggggggaatatcgggtatgaagatgacgataatactctcatcacatcagataaagagctgaacgcgttggataaagggaaataccagtccctatctgtgggagactaccattcctttgaggagttgcagactattctcaatcaggcggatggcggggagacaatagagctgaactatgactattccttgggtgcagggggatcgaccctcaagcttacgaaggggctgaccatcaacggaaataaccatactctctatggcgtggggctggatcgcatactgtacattagttccctcaacacccagccaatcatcctgaacgacatcattttcaaagacggcggaaaaaaggacagttacactaacctggagaccaactggggaggggccatttactacaacccgacgactgagggcggtgccatcggcggcgagccggccgattttatcattaacaattgtacctttgagaacaatggagccgtcaacggtggaggagccatcttttggaacggatctctcaaaatcatagattcccgattcttcaacaatgagatcgagctgggtagcgggggcgccgtgtacgccaacggcaatttgactgctatcggttgctctttcagtaacaaccgcgtgcgtcatggactgataggcatggacatgttaaccacgacctttacggatgagggatattgggccaaggtgattcaatactacagtttctatagtgtcgatgtgattccccctaccgggggggcaattttctgtaacgggacctgtaagattaacgactcaagttttgacaacaaccaggccggagaggcgaatgagatggggaccggtgggggggctattcactccatgaacgatataaccgtctgcaactccactttcaccaacaacaaggcttacgatcagcatggtggcgccatcctctgtaacagatccggatttatttacaactccactttcagaaacaatgtggccaacgtgggtggtgccataagctgtttttattacttaaatgctgaaggttcaacgttctccaacaacggtggcgagataggcactacatggatggatgagcactcctttgatttcctgattgataattttataggcagcatacccatcataggggacatttacggcgccctgcaaaatttccttgatcttttaggcgtagagagtgtcgatgtgctgacgggccagtacttcagcgttgggggcgccctctacactggactcgactgcaatgtcgataaatgtacatttgaaagaaaccacgcagccgaaggcggtggcgcaatctacagcgaacgaaaggtgacagccaaaaacagcgcattctcaagtaacaaggttttccgtggagactcggccgtctctgaactcatgagcagtcaggggaaaaaccgcgacggcggggctatccatgccgaaaatgcgacgaccatccggaactcggaattttcaggcaactccgctccaagcaagggcggtgcagtctactgtgcccatcacctggagatgagcgattcctcatttttatacaacacagcttaccagaacggaggagccctatatgccgatactattgggacaatttccaatacgaagttctccggcaattcagtgaccaaaggcagcggtgacggaggggccgtgtacatcatcgcccagtccgatgctcgatttgagtcctgcgaatttagcgctaacactgcggaaagcgacggaggcgctatctatatagctaattcaaatagccttttaaggctgaacaaatgcacgttcattcaaaacattgcccatctggacggcggtgccttcaactgccgaggaaagactgaaatcaaaaattccgtgttcaagagaaattcagtcgatggagacggacagaccgaaaacagtcagggcggcgccgccttctcaaaaggtgatatgagcattagcgattccagcttcgagcagaacatggccaaacaccatggaggtgccgcctacaccgacgggaagatgacagtgaaaaacagcaattttacggtcaacagcgccaacaatggcggtgccatatatgcaagcgtgatgaatgatgaagtgacaaattcaatattcaagaagaacactggaaccaatggagacggcggtgccatctacatcaatgacaaatcttggcccaagtttgattcctgcgtgttctctgacaataagtgcgtggtcaaatccagtgttgaaaattcccaaggaggagcaatctatgttagaaacgatgactccgagctcaaggtgaccaactcgaacttcacgggcaatgctgctggccaggggggagccattttttccggcaaggttaacgaaatcaccaattcagtattcaagaagaacggtgcgagcaaaagcggtggtgcagtgtacatcgaaccaaactgcaatcccaagattcgccaaagtgtcttcgaggagaacgtgggcggcgacaaaggaggtgccgtctatcttaattcaaaatactcctacctagagctgaccggctgtaacttcaccaagaacactgctaaagagggggggggcgtatatgctcaacagatgagcgcaaaagtctcatccaaccggtttataagcaacaaggccaccgacggtaaagggggcggaatctacgttagaaactatcacattactgagactgtgaagagatatacaaccgaatttgtggactgtactttcacaagcaatacatgtacagacaatggaggaggactctgcatggacagtacatactccgtgctgaaaatcacctcctgtaattttacaagcaacactgctaagaataacgggggcggagtgtgggcccatatgattaactccatccaatggtcttctttcagcaaaaacaaggcgaccgagggcaaaggtgggggcgtccacattaaaaatgactacccgaaccgcattgccgataaccccaaaaccgaggtcaagaactgccagttcgattctaatacatgcaaggatgaagggggtgggctgcacgtggagtccgagcacgccaagctcacgctgacttctagtacattccggtttaattctgctggacgcggggggggagtgtacgcccacaaggtcattagcatcaacagctgtggattccacaacaacagcgcgaattatgtgaagaacaacggtgacgggggagccatctatattgaaaacgacaacgactttgaaatcaagagctgcagattcgaagggaatacagcaaagagccggggtggtgccatctatatggattcctatgaaatcaagaccaagatatcctactctacattcgtcgacaactatgccggccgcgatgaccattcctcgacattatacacatttatggctgggcacagcgtattcaccaaggggacctatactaacatctccctctgctggttcgggtcaaacaatcctagtttcactgaacagcttgttgaccagaacagggtgtcaagcgacaaagaaaagaaaccttcagacttcggtgcagagtacctgaagatcaatattaaaatcaataatacccggcccattgcggggaatccctataaggtgaccgtgtatttcactgggaatgtcaacaacaatgtggtgtcgttcagctcgaataccctctaccattccaccgggaaatttgggggggacggcacgtactccaatatcaaggcggacaagaatgatatgactgccgatgtggtgctcactccagaaagtcgccagatctgggggcagcttgaccaccagaaagtgtatctgaatgtgaatccgctaaccaagaatagtactatggtggagattagatcctgcgaggatatcaagtatcctgatgcgctggaggtcaactataccctagtgaactataccattagtaatgcggaggcggccacatacattatcaatgacagcgaaggtaacacagtaaagtcaggcaaccttacaagccccgagacgttatatgtagaaggattgaagcctggaacctattcaattactatcacgatccccgagacctactactatctaagttccaatgcgactgctagcttcgatgtctttaaaggggacatcgaggagctgcggatcgtggtaaacaacaggacctatcctgaggaggtgaaggccatcgtctatgccagcgtagacgaagactatgaagtgacaattggggaagagacgaagaccgttactgttattggaggaataggccaagtcaatttcggcagcctcgagaccgacacctatgaggctaccgtatcctttggaggttcggatctctatgagcccatcagtaacgctaccgaatttaccgtgtatcctgaagaggagggcaccaatttcgagattgatacaaatgccagcgaaatcacctacggcgcgagcatcaaagtgactcacaaattgccggaagatgctacaggaaccatcaaatattacctgaacaacggcactgtcctgggagaactgccggtcgaagagaaactgacactggacctggatgcagggtactatgtaatatttgccaactatagcggcgacgaaagcttcgagcctgactgggacagcgctgatgtcctcgtaaagcaagtggagacggaatttcacatcggcctccagcagcaggtcatatccggcaaccccgcctatgtcacccacagtatctccgagggcgctaccggcacgatcagctactatctgagcaacgggaccttcctcggggaagtgcaggtgggcgagacatatgtttcacccaaatggaaggtcgggatctataacataaccgccaactactccggggacaggaactttgttccggcatcggacagtatggagtttcgtatcaatcctgacttctcgttcgacatatacttagacgaggacgatgtcatttacggccagaccactacagtgcggccatcgctgccttatgacgctaccggcaccgtggaattttactataacgatacgtacctgggcaaggtgacgataggccagtatgaaatcataatggttgacggagaggaatactacgaaactccaggtgtggagcttcccgagtttgatgtgggcgtccatgaaatcgtggggaaatacctcggtgacaagaattacgatccagcaatcgcaaacgtgcggcttactgtgctaagtaccgaaacagtgttcgagatcaatgctagcccaagcgagatcaaatacggagaagctgcggctgtcatccataaactgccatccctggccgtgggtaccatcttatattacctgagcgacggaacgtccctcggcgagttgtactactacgaggaccttgctttgcccaaattggctgtgggaagctatgagattctcgccaactattccggggatgaaaatttcaacaatgctagcgcaagcacaaccttgaccatcaataaggcagaccctgatttcgaaatctatatcgcattcccttcctatgacttcggggattcgcccgtggtgttcgttaacttacctgacgacgctaccggtaatatctcttactacctgagcgacggaaccttcctgggagagctcccggtagacgagaggctgtccctccctatcctgaatgtaggaacccatacaattataggaaactattcaggagacggcaactacaacaatgctagtgcaagcatgacggtgactgtaaatgaggtgtccatggagtttaatctcgggatcagcgcagaggagatcagctacggcgagactgctacggtcacccaccgactgccaagccttgccaaaggaaatatcacttattatctgagcgacggtacactcctcggggagcttccggtcagcgaaaacctgaccctgcccaagctggatgttggaacttacattattatcggtaactactccggtgacgaaaacttcgacggagacagtgccaatgttaccttgaccgtcattcaggcagatcccgctttcgcgatcagtataagcgctgaggaagcggcctacggcgaaacggtgaccgtcagtccagcactgccagaagatgcaacgggtacagtcatatactacctatcgaacgggacaatactcggcgaacttgccgctgacgaaaacctgaccctgccaacctttgatgtggatgtctacgacattttggcaaactatagcggggacaagaactacctcaatgcaagcgcagagacagcactgattgttagtcaggccgacccggggttcgaaatcagcataagcgcggaggaggcagcctacggcgagaccgtcacagccagtcccgttctgccagaggatgccacgggaaccgtgatttactacctaagcaacgggaccatactgggcgagctgcccgtggacgagagtctgaccctgccaaccttcgatgttggcacgtacacgatcctcgcaaactactcgggtgatagcaactacctcgatgcaagtgcagaaaaagagctgaccctaattaaggccgactctacactggagatcaatgacatcgcctttgactacagcaagacgggctcggccgaagcaaagacttcaggcgccgaagggatcgtggcttcagtggcgggccatgacgaagccgtcgtcgaggtgaacgggaacgagattacagtatccggccttgatgccggcagctacaccttgagcgtttccactatcgtagacgacaaccacaatagcgccagcaagaacatcaccgttacggtgaaaaagatcgattcaagcctgtcggtcgaaggccttgagctggactatggcgaatcaggcaatgttgatgcagccgctgaaggagctaccggcatcagcgccaagatcgggtcgaagagcattggagttaacggctattccatccccatttccggactggatgcgggcaaatacaacctgacggtgactaccatccctgaccggaaccacaaccccgtgacaaaaacagcccagatcactgtaaacaagatcgattccacattggaagccaatgacatggcattcgattacgagggcaccggcaccagttcagtgacatacaccggcgctaccggcgtgaaggcttctgtgatcggacagccaaatgccaaggtgaatgtaaagggcaaggagatttccgtctcaggattggatgccgggaactatactctggagatcactacgatccccgataagaaccacaaggctgtgagccaaacagtgaatgtgacagtcaacaagatcgattcaaagctggactttaataaccttgtagactacggttctgcaatgaacgttaccgttaagaccgagggggcaagtgggataatggctgagatcgacggaaaggagctcggcgtggacaagtacacaatccctatctccgctttggatgccggggagtacgaccttacagtgacaacaatccccaacagcaaccacaatcctgtcagtaagaccgtcaaggttacgattaccaagctggactcagagctggctgtcgaggaccttgagtttgactacaacagcactggaactaccaatgcgaccttcgagggcgcgaccggcatcacagccaaagtggtgggccagccaaacgctacagtagagattaatggcaattccatttcagtttccgggttgaagcccggaagctacaccctggaggtgactacagtccctgacgaaaaccacaaccctgttacggccaaatctgccattagggtgaacaagctggagaccgccatttccgccaatgacatcagcacagtgcacggcgcagacaagaacctgaccgctatcatacgcgacatcaacggcaatcccgtagccaacgccactgtgtccgtcagcctcaacggcagcaaaaaatatgtgagcgattcaagcggacagatttcaattcctctcaagagcctggctgccggcaactacacagctacaatcagctttgcaggcacggagatatacggcaagtcaagtgcaagcatcaaagtggctgtggacaaggagccaacatcaatagctgcaacaaacgtgaatacccagtatggccttgaagactatattacagcagtgctgaaagatggccaaggcaatcctctgggcggagtgaagctgaatgtggatctggacggcaataggacaatcgttaccgactcgaacgggcagatcaagattgctaccaaagacctgacagcgggcaactacattgcgacaatcagctttgcagggaacggaaactacatggcctccgagtctaatgccatcgtcaacatcaaccgcacaggcacgaggttcaacttcaagaacatgacaaccaccgcctttgactaccggatcgaagggaggattggtaaatacttttacttccagctagtcgacgaggatgggaatccattggccaacaagaacgtgtgcatcggattcaatggggtcaagtacaaccggacaaccaatgaaaccggctggaccaagctgcagatcaacctgaggtgcgtgaatctgtacacctttgcagttacattcagcggggacgacaactacactggcgccttcaatgtggccatgatcaacgtgacgcaccagagccccaaattgactgccggcaacaagagttataaggccagcgccaatacaaagacgttgactgcgaaatttaagagcttcaaggggaccgctattgttggcaagaagattacctttactgtgaacggcaagaaatactcggccataaccgataaaaaaggaattgcaactgtgaacgtgagccttaacaagaaaggtacttacaaatacactgctgcctttgctggggacagcacatacaagaaggtgagtgttacttcaaagctgactattaagtga

SEQ ID NO: 3866 - DNA, 555 bp, synthetic construct
  source 1..555: mol_type = other DNA
atgacaaccactgcattcgacttcaagatagaggggcgcattgggaaatacttctacttccagctactcgacgaatacgggaaccccgtagccggcaaaaacgtttccatcggtttcagtggaaggatatataacagaacgagcaatgagaccggttgggccaagctgcaaatcaaccttaaatattccggctactacacgtttgccgtgaatttcggcggcgacgatgaatatgcggctgcattcgatgtggcggccatcaatgtgaccatccagacccctaagctgaccacaagctcaaagacgtacaaggcatcggccaagaccaagaagttgactgccacatttaaaagctataaaggaactccgattccaagtaagaaaattacctttaccatcaacggcaagaagtacactgcaaagacaaacaagaaaggagtcgctacggtgaaggtgagcctctccaagaaagggacctataagtttacagcctcatttgctggagaccggacatacaagaaagtcactaaatctgctaagctgaccatcaaatga

SEQ ID NO: 3867 - DNA, 165 bp, synthetic construct
  source 1..165: mol_type = other DNA
gtggaaattgatgactactttgacatcttcgggcctagcggccacgcctccatgatgtacccgggggacctggctggcggtgcagagaatgtcgccaactgccgctgttgggtgcggtacacaaacgagaggcccagcaacctcaagccatatggaaccatctga

SEQ ID NO: 3868 - DNA, 420 bp, synthetic construct
  source 1..420: mol_type = other DNA
atgtatctcactaagttttgtcctaaatgcggagaggaaaacgaagacgtggcccagttttgctccaactacggccatgacttcaaggacgtgaatcagcgaatgaaggaatccaaacgcgagaacagctcattccccctgtcgggaacaaagatcctgctgtgtattgtgctcctgattgtcctaatcattgcggcattcctctttactggcgggaacgccgacaagccgcaaaacattaccatgatcaaagagaacacctatggcttcacctttgtcaatagaggggttctgttctacaattaccaccttgatgaggtattaccaatctgccggatgatcagcagggctatgaccctgcggcaggatagcacgatgcagatgacacactggttgaggagtatcatgataacaatatga

SEQ ID NO: 3869 - DNA, 810 bp, synthetic construct
  source 1..810: mol_type = other DNA
ctgaatcagctgaaagaggaagtcgactctcgaatgaaatccattgaagacaatgctagcgagaagaccaagcagaagcttcaaaagaagcagaaaaagatcgatgacatctcagaggctgacatagacgagcagatagagacgctggaaaaggaaaacaagaagctgaagcggtaccagagaatcctggatgccctgcaagagaaaatggagatcgattccggccgggtcatgggcttgactgacggtatcttctcgattgtgatgactctcctcatctttggcatcaccctcccgagcaccgagatcctaactgatgccggcctctccagtttcattagttccatactgccaaacattggggtgacgctggtcagtttcatcctgcttgcctcattctggatctaccaccacgagtttattaagttaaaatgcctgaacctggtttacctctggctgagcatgttctacttagcgacagtgtgtttcattccctttacaacgacccttattggaacctaccccgaatttcgcctcagcaccaatatttttgggatcaacatcctgctagttatcatattcttcctcctgatgcttaactatgcatctaaaagggggtttctcgatgaagaggtaattgagaaggataagaaatatgtccatcacacactatatatcatcttgggattggcagtgattatcaacctgctggactttagcgtgaatgaaaacttcatttacttgtttttcctcgtgcctatcatctctacaataagggacgtgcgcttcaaactgaaaaataccgagtga

SEQ ID NO: 3870 - DNA, 2061 bp, synthetic construct
  source 1..2061: mol_type = other DNA
atggcgaacgacaatgagcgactccaacaattggtaagatcatccctgctggaaaacaacaaattgaaaatggaaattgtcaaactaaaggagaacgaaaacagcctcaagtcggataaggagtttgacgaactgaaaaaggaatacgaggcatccctcagtgagaaagaccaggagatcttggacttgaaggacagccaccaaagcgacctggacgaactgaagctgaaatatgatgatgatttgaaaacgaaagaaaacgaaatatcggccctgaagattcagcacaagcaggatctggagaataaaagcacagagatttccaatattaaagtgaagcacaatgatgaattgaagctgaaggatagcgaaatcgaccagctgaagcaaaaacatgatgaggagttgagactgaaggacaatgaaatcatcgacattgagtacgacttcgacaacaagctcaagctgaaagacagcgaaatcaacagcctgaaggagcagtttaaccaggacttgaagagcaagagcctcgagcttgcagatttcctggaaaaatttgatgaggacatcaagtccaaaaatgacgagattgatcagatcaaagaggattacaacaaggaaatcatcagcaaggacatggaaatcgaaagcctgaccaactcactgaacgccaatattgaagttctcaacaaatcaaaggacctccttagctcgaaagatgaaacaatcgacaagctcaatgacaaggtcaaggagctaagcgatatgaacgactccctgagcaacatgaaggaatcctttgatgctgaactcactaattttaaaaccctcgagttaggggagctgaacctaaagctccggaacgccttaaacgacataaccagcaaagacaacgagattcagtccatctcaaatgacctcaagattgccaacaacgacatcgtggacctgaagcgtcagcttaacgagagcaaaacaaatgcaaatgagttgaatctgaagctggctacggcgctgagttcactcgatgacaagaatattgaaatccaggccttaaacaatcgcatcgcttcccagaacgagaatatcattgaccttaagaacaaccttgtcaataaggacaatcttgttgccctgcagagggagctggacagtcgcgatgtggccattcgggaaaaggatgtgcagatacagttgctgaaggacaagagcgtaagcagggaggagtatgccaaggtcaagaatgagctctcgaaaaaggacctgcagatcaagcgcctcaacgaggtcaaggacctcttcttcgaactttcagacaacagcttcatggatagtcagtccagctcggtggtgaacaagacctcctcagatgataagagcctcatggagcttaataacatcaagaaagagctcgagctggcgaaagaaaacaaggtcaagttcaaaattgtggaggagaatctgctggatgacgagaaagcaagtgccgacttagataaaaaggtaaaactggacgagagcaaactgaataccgacttagaggagttggtcaattcagagatagataacttcgatgatcttgtgaagagtagggatgcaaaagctgaggagagcaaatccactgacgcctccagtagcaaaggtgattacacctcttctcagacgaatctggctggcctggaaagctccaaagctccacagagtgacaatgccgagattcaaaagctgaaggaagagctggaatcctataaaaaacaagaggccgagtacaaaaagcagcaggaggagctaaacaaatacaaggacgtgtatgaaaagcttacctcccctcagctcaagaacctcaacagcatccaatcccagatctactacctgctgcccgatgaggctatggacactctgtcaatcaaggattatctgaatgaggttgcattcaaaaacctgagttttggcaacacaaagaacatcctaaagagtctagagcggaagggatacgtggaagtggtgaaaaaggaaaacgacatattcttctggaaaaagcttcccataccggcggaatga

SEQ ID NO: 3871 - DNA, 156 bp, synthetic construct
  source 1..156: mol_type = other DNA
atgatctatatgatgaacctgcgggagagcctcacgcacatgaggagcaatggcctgcccctcctaaatcagatgaaggtcaacctgtcagtggactattacaacaagtacatacttacacataaaaaaacctacttctccaagtactatagttga

SEQ ID NO: 3872 - DNA, 366 bp, synthetic construct
  source 1..366: mol_type = other DNA
atgaacaacactaccaagatcctcattggagtgctgatgggtctgctgatcgtcggtgccgccgtaatgtttgtttccgcaacggcgattaatgatgtctcggacggaaacagctttatggggcaggtgcagaatacagctaatcacgtgaagaacgtggcctccaacgacattaaaagtggcagcaacatcatcgggggcggcagtgaatttaattctcaggagggaaatgggtacttctatcagataaactacaccgacggaaatttccggcaatacgacaccaaaacaggcaagcttatagggagcggcttcaacgaggatcagtcaatcctaggcaacgacgatgggttcaacctcgaatga

SEQ ID NO: 3873 - DNA, 1662 bp, synthetic construct
  source 1..1662: mol_type = other DNA
atgcaagagaaaattgacttggttagtctgcctaaaaaaagcttctggaagctgagcattcctatcatcgctttctgcatcttcgatgccatctacggcatcgttgatatgctatgggtatcaaggatcagtgtggaggctttttatgccattggcgtgtcaataccaatcacatccctcattttctcattcggcgacagcataggccagggaaccaattccatgatgtctcgtttcataggtacgggagactatgaaagcgcatacaatacactcatacatgggattctcatcgcaaatatcatctggctcatcctcgtgctgtgtctgatcttcgcccaggggattctgttcaaagtggacgacgccgattcatacatcctgatcttcgactatatggtccccatgataatttttgcgtatgtgttcatccttaacaatctgttctctgaaacctttcaggccgaggggaatagtcacactccaactatcctgattatcggtagcaacatcctaaacatcatcttggaccccatcttcatttttgacctgaacttgggaattaagggagccgcttacgccagcgtcctgtcctcccttatcacgttctccgtcctgatgttcctttacactcacgggaggaccaagattcccttaagccgaaagtacttcaagttccgcagctacatacttgttgagatctttaaggttacctttcccaacttcctggatgatgctatctggagctttacaatgagcttcattaatgtgatactgattgggaccatgggcgagatcggcccgatcttatactccgtgagtaacaagataaggagtctgctcaatgcccctaccaaaggctacggcaggggcttgatgagcgtaacagggcatctgtttggagcggagcagttcgataagctgaaggaaatgtataagtatgtgcttaagatcgcagtctgcacaagcctcgtgataatgattgtgttcttcttcgtgcggaactgggcctttggcctatttagcattacaggaatggacaacgaaatcttttggatagctgtcggcggaatcattatgatgaccatcctgccattttccaccatctcttcaaagatgctggacggatttggtaaaagtctctattccctgctcattacgatcatcaaggtggccattgaaattgcattgatctccctcctaacccaatacctgaaggatggctcgagcgtcttgattgggattatcctgtctgaaatcatctcgtcgatagtgtattataaattcttagggtacctcttcgaccacttcgataagaaatacgaatttaagtacactgtaaaggcatttactatcaagcgaaaagataaacgcgaaaaaagacgcgaacggatcagacaaaacattgaagagaaaaagctgcggaaggaagagaaaaaggaggagttccggcagaacattgaggagaaaaagctgcgcaaggaagagaagaaggaggagtttcgccagaatattgaagagaaaaagatgagaaaggaagagaaaaaggaggagtttcgacagaacattgaggagaaaaaggcgagaaaggaagagaaaaaggaggaatttaggcagggtcttgaagagagaaaggagaaacggaaagagaaaatcgactga

SEQ ID NO: 3874 - DNA, 1197 bp, synthetic construct
  source 1..1197: mol_type = other DNA
atgggctcgaaaaattttcagtacctggacgaactgattcacagcagtgcaaacgagattatcctcgattccgacattgtgctggatttcgatgaagaatctgagtacgacgatggaatcaaactggatgtggatgacttaacgattgacggaaatgggcacgtcatcgatgccaaggatgggctgtgcagattaaagaatcatgcgaaaaacatcacattcaagaatctctgcttcaaaaacttcaaatccaagtttccaatatcaaatcaatctggcgatcttatctttgagaactgccggttcatccacaaccagggtactatctacaattactttggcaacatatggctaaagaactgttgtttttaccgcaattacctgagcaggtcctcttcaggctatagcgtctgcatctataatgctaaggactcgaaggcattcgtgagcgacagtcacttctatcagaacgaggtgaactatccccattacgggctgatcctcaatgacgggcttatcgaggtcaagaactcgatcttccatgagaacaagggtgaggactgtgaaatttgtgtgatcttcaaccgaaagggggagttgcttgtggacaactgcaaattcaaagacaataagaacgtatattgtagttacgacttcgcggaattgattgtctccattctcaatgaggccggcaaggtgtccctgagcaattccacctttgaaaacgagaaccgtatcctggggagcattaaaaacatgggcatttgccggataatcgactgcaagttcaaagatagtctgatatacaatagtcagtggtactctagcgtttcccggcccgatgaactcgacttcggcccatacctggaggtagaggactcaagtttcgccaacaaatatgacgagggagtcattgccaacagcggactttgtaagatagcttcatgcaacattgatggacgctcatatctcaacaatgatgacgtgctattcatagacgaaaaggactttaatctcctgaaggataacatcatcaatagcggagagatcgtttttgactatgatagggacgtgcctatctacgaatcctttaagggtcacggcaaatctaacggcaccaactccaacctggaggacgacttggataatgacaagagcgatgacggttaccccccgctgggggccttgtttagatga

SEQ ID NO: 3875 - DNA, 642 bp, synthetic construct
  source 1..642: mol_type = other DNA
atggcgatggatttgacggatattggcattgaggaaggacagaagtacgaggggatttacactactatgtccaaggacggggtgaaaaatgcagcccccatagggatcgtgtgcaaaggcaaggacaagctcggctgcagactgttcgtcggcaccaagaccctcaaaaacatcatggaaaccaggaaatacgttgtgaatatcacctttgatcctataaatttcgtaaactcgaccatcggaaacttagacattgaagagtttacagatgatgaggacatcgccatcctaaaaaatgcggaagcatatgtgatttgtgaggtgacagacatccgcaagatggacccgattaaggaccacataacatccaacggggaggcttatatcatcagcagtgacgtggtcaagatcgtcaaaaacaatccatgtgccaaggctcttaaccggggagtgttcgccctgctggagtgcctgacaaactatactcgactcgacctggtcagcaaggagcagcaagactacttcatcggtaggttcaatgaaaacaaccgcatgatcaagcgggtttcaggccccgatacgataaaagccatggagattctgaaaaacagcatgatcgagaagggttttgatgtagaatga

SEQ ID NO: 3876 - DNA, 1071 bp, synthetic construct
  source 1..1071: mol_type = other DNA
atgagtcgtaacttcaaatacctggacgatctcattctacggaaggataaaaagatcgtgctggacttcgacatcgaactaacggaggacgaggagctggaatattgggacgggatcaagcttgataaagatgttctgattgatggtaagggccacaggattgatgcatgcgggaaagcgagaatcttcgactgttccggcaaacacatccgccttaaaaacattattttgaaaaatggaaaagccataaatggcggggctatcaagattagcaaggacagcaatctggaaatcatcgaatccaagtttatttacaacatcgcaaacggaacatgcaacgagggaaacggcggagcgatcttcaacaaaggaaatctgaagctcctgaagtccacctttgagaataacatggctaagggagagggtggcgccataagaaactacggtaagctcaacattgccgagagcattttcaataaaaacaaggcgaaacgcggcgccgcaataatcaatcggaacgacctgacaatctccaagaccatattcgacgataacactgccgaatggtatgggggagcaatctttcataattggggccaggcaagcatcttggagagcgaatttatcaacaactcagtaactgaggaccatggcaacgggggggccatctgcaattggatgcgatcgcagctgaacatcaccaagtcctctttcaagcagaacattagtggaagcgctggcgccatttacaatgctagtgattgtaagctcaatatcagccagtctgccttcaaggagaactcagctcggtatgctggcgcaatagtgaactacggcaaggccagcattcagaagtccgtctttggggccaataaatcaaataagtttgaggggggtgccatcttcaactacagcgaagggaacctcatcattagtcaatcggtgttcgaaagtaacatctccgagagggtcggcggcgccatatattcagagaatgacaatagcttaaaactgaataactgcaaattcaagcacaacaagcccgacaactttaatgtgggttctaagtga

SEQ ID NO: 3877 - DNA, 966 bp, synthetic construct
  source 1..966: mol_type = other DNA
atgaagcaccgactcaatctggacaataaggaccccaattacatcttgctgaaggaaatcttcaaaatcatggactctcgtaagagcaaaagtatcttagcatcctacggatttaaaaacctgaatcgcacaatatttacgtttaagatcatctttatcagtatgttctttggaattgacattcccttcattctcaacgagcttaaaagcaagaaggaactgcgcaaatacttcaatatttcagaagtcctgacggcagatcaggtttataagattttctcagaaataaacagcgaaaagctgatcaaatgtctgaacagaatccttaactcacggaatatggtcaaaaggcggggtaagaagaccttcattgtcgatgccactccagtggacctggacatcaatttccgccgcaacaagaagagcaaagagcatctccggaagttgaacctcaaatggagttatagctcctcgaaaggctattatattgggtttaaagcgactgtggtgatggattacgattccatgaatcctgtgtgcatcctgatccactctggtgctccaaatgatgccggcctcttcgaggagattttagagaacctgcagaaaagacgaataatcagaaaaggggacacattgatcttcgacaaagggtattacggctataagaactaccaaataggaattggcaagtacaagatcgtgcctttcattttcccgaaagaaaagttcaacagaacccggctcgatgatattctgacctatccacttgccgtatttaacaagaccaagaagatcatggaggagaaaaggctctacaacaaactaaagaaggaactgctggaaaagctggactcctgggagaaatttaagcccataaggggcaagatcgaggacttctttcagatcattgagacaaggctagagtacgagcggaacccccagatatactccaagatcagctga

SEQ ID NO: 3878 - DNA, 303 bp, synthetic construct
  source 1..303: mol_type = other DNA
atgtcacaggagcgctataaacacatacgggagagcctgttcgattacatcaacgcattcctgatcaacaagtatgacgagctgtactactttaatatgtacgaaagcgcggagaatatgaattgggatgtggagtacatattcaagctaaaatatagtctgaccttccacgaaaaaaagaacctcgagatcagaatcaggaaagacctcaagaagtttcttaaggagaaatttgaaatgaacatctacgaactggccattttaattatcctcgaggacaacgaattgcattccaagatttga

SEQ ID NO: 3879 - DNA, 240 bp, synthetic construct
  source 1..240: mol_type = other DNA
atgttttatattgaaggagagaatataaaatatgaaatactgccgtacaaaaaggggaaaaaggtcatcatctaccttaagaaaaccgagaacggctttgtgcggaagaacaagtgcttcggcacgcactacctggaacagatcttcgattataacaataagctcctcaaggagacaatctacgagaatccaaacttcgtggacctgaccaacttccccattgacctagactacgattga

SEQ ID NO: 3880 - DNA, 150 bp, synthetic construct
  source 1..150: mol_type = other DNA
atgaacctagaggtcttcaagatggcaaggatactgattccaaactacgagtttgtgaaaaattggagcgaggacgaactcaacgatttcctgaccacacccgccggcatcccgcacgaactgatgcatatcgtgcggaaggtagtgtga

SEQ ID NO: 3881 - DNA, 735 bp, synthetic construct
  source 1..735: mol_type = other DNA
atggagtgctaccatttgctgcggaaggagaattactctctggtcaggaagaaaatcgagaactttctggaaaaataccccctcaagatatccgaagagaattacttctacttcaacaacaagttcgaagaaaacttttattttatctttttcatccacagcaaatacgtgaatgtgtcccaaaaggaggatgtcttgaagaattataaaatcctgaaatatgactacccgttcattctggcggcctacggagagacactgatcgagttcgatgagtttagcaaggccaagtactttcttgagcttgccaacaagataagtccattcgacattggcattctcagacagctgctacgcatctactgcatagaactcgaccgggagaaaattgaggaaatcttcaattatgcactggacattgtttacgacgaatactacctgttctatatctatgagtttctcagtgagtattatctgcagataaaccagatcgagattggtaatctgcttagccagattgcaaaagaagagtcattcaacgtagctgaaaagcactacatcaaggatctcttcaacaagtacgatatcaacttgggctttaacgaagagttaatctcccacatggagtatatcgtgaatctgctaaacaaaaaaggggacttcaccgaatcgtacctgttaaatcaggactgtgctgatctcaagaggttcaaccgaaagtttaagtattattga

SEQ ID NO: 3882 - DNA, 405 bp, synthetic construct
  source 1..405: mol_type = other DNA
atgtccaatattgaaaagatcaatagcgagattaaagactacgtcaactatgtccagaaaggcggtaagttagaaccgttctttgaagacatttgcctggtaaccacggagctggtgggatttcggaaaatctccaacttcgaagacctcttctcacagtttaagaagggggattacctggcactattcagggatacccaaaacgagctggacgaactggcgattgttgtgaaatggaataaccttatgatcgggtacgtgccccgcaagcacatcccaatattgtctagtctgatggacagcggcaaggagatctatgccataatcgacgacctgatcttggatgagctcttcaaggatctcttctttgagacagtgaaaattaagatcttccttaaggagtga

SEQ ID NO: 3883 - DNA, 759 bp, synthetic construct
  source 1..759: mol_type = other DNA
atgagcatgattgtccactcggagtacaaaaagctgaaggaccacctgtatgatctggtgtacgaatacgaagacctcataaatcacatctgtccaaatatcgagatggagtacctccttaagttcggcatatatgaatacgagttgtacaagaaggagctggagctgaacaaacttaagtttaagctgaaactgctccagacggagattaaccaccagaacgaattggatctgaacgagatcgacaagaaggtaatagacaagtacacagagtatgccaacaatttgaagaactctatgaacgaactcgagaacatcatcaaacataaagataactatttccagttagacgaggaggatgaaaaagagctgaagcggatttacaagatccttataaaaaaactgcaccctgatctcaattttcatcaggaaaacttcaaaaaagaactgtttatcaaagtgaccaacgcctataagaacggagacttggaggagcttaaagcactgtatgctatgctaccggacgaagacattgaagagaagtccagcctcaatgaactgaaggagctcatccatagcttcgagattaagattgagaaaatcaagaacgagtacccctacaacaagttagacctactgtcaaatgaaaaagagatcggggagtataagatcaatatccaatacctgattgattcctgcaatgaggaaatcgaggaatacagtaacaagatcaatgaaattattgaaaatcagcactga

SEQ ID NO: 3884 - DNA, 1050 bp, synthetic construct
  source 1..1050: mol_type = other DNA
atggtgaaggttggggtccttggggcaacgggaatggtcgggcagaggttcatccagctcttggccgatcatcccgattttgagatagctgcgcttgccgcctccagtcgctctgccggcaagaaatacgaagacgccaccacttggtacatgaatgatgagatgccggaatctgtaagggacattaaggttatcgagacagaccctgcacacatggataaggatgtggagattgtattctccagcctgcccgctgactttgctgccaaggtcgagccagagtatgcaaaggattttgtcgtggcttcaaatgcgagtgcaatgcgtatgaaaaaggacatacctcttgtcattccagaggtcaacccacaattcctggacatgattgaagctcagcagaaaaacaacaactgggacggattcatcgtaacaaaccctaactgttcaaccatcgctctcactctgacattgaagccgatttatgacaacttcaacatcaatcgcatctatgtttcaaccatgcaggctgttagcggagccggctacaatggtgtgcccagcatggccatcctggacaacttggtgccatacatcggcggggaggaagagaaaatggagagtgagacgctgcacctgttagggtccctcgatggtgacgaagtggtgcctgcaaactttagcctaagcgcatcctgccacagagtgcccgtcatcgacggccacactgaggcggtctttgtggagctggatgaagaggcagacattgacaagatcaaaaagaccatggctgacttccgcggactgccccaggaactcggtctgcactccgcgcccgaacagcctgtgatcgtgaaagaggaagatgaccggccccaaccacggatggaccggatggcctacggcggcatggctgccaccgtgggcaggctcagaaaagatcaggccttcgataacagcttcaagtacgtgctggtgggacataatacaattcgaggcgccgccggggcctcgatactaaatgccgaactcatcaataagcaaatactgtga

SEQ ID NO: 3885 - DNA, 819 bp, synthetic construct
  source 1..819: mol_type = other DNA
atgataaaagtggctgtaactggagcctcgggacggatgggcagcggcattatacggaagatcagtgagcaggatgatatggaggtagtggcagctatcgaaatgcccaacacccccttggccggggttgacgcgggggaaaaagccggcatcggcaagatcggagtgccaatagtcgggtcagaggatctggagaaagccctggaagagagcggtgctgaagtgttagtggatttcactatcgctcctgcggccgtggagacgatcaaacgggctgccgattgcggagtcaacctggtggtgggcaccaccggatttacagaggagcaagcgcagggcaatgcagacgtaatcaaggaaaagaacatcaaggcagtgattagctctaacttctccattggagtcaatgtgttcttcaaggttctcaaggacctaacaccgattcttaatgactttgacatcgaaatcattgaggcccaccacaaccagaaggcagacgctcctagcggcacagcgatgactgcctttgaagtggttgcaggggctctcggtaggaacccagaagaggtgggcgtgtacgggagacaggggcaggtcggcaaacgcaccaaggaggagatcgggatgcatgccgtccgtggtggcgacattgtcggagaccacacggttctgtatgtcggcgacggtgaacgactggaggtaaaacacatggcccataccagggaggtgtttatagccggggtgatcagagccctgcgcttcgtcggttccgcagagcccggcaaggttaatgatatgacagacgtgctcggaatttga

SEQ ID NO: 3886 - DNA, 894 bp, synthetic construct
  source 1..894: mol_type = other DNA
atgcggtttgagggaacagcggtcgccatggtgactcccttccatgaggacggctcaatagacgaagagggatacagacagaatatcaactggctgatagacaacgatgtggacgggctggtggctgtgggcactacaggcgagtcggctaccctgacccacgatgagcaccgtaaggttctcgacatcctgatcgatgaggttgacggcagggtcacgacaatagccggaacgggcagcaatgccacaagtgaggccctggacctgactaaatatgccgacgatgcaggggcagacatggccctcctaatcactccctactataacaaaccacagcagcacggagtaattgagcattacacccaaattgcaaattctgtcgacatcgacctgattgcttacaatgtcccatcccggacgagcctcgacatggctccgcaaaccattgtcgagcttgcaaaggtggataacattgcggccctgaaggaggcctccagcgatgttgataaggcatcaaaaaccatgaagctcctgagggacgaggggttggaagatgaaatcgtgatcctctccggtagtgacgaattgacccttccccttatgagcatcggggcccgcggggtgatctccgcgagcgccaacatcgatccgcgcaccatggtgcagatggtaaacaacattctggatggcaactacgacaaggctatggaactccactaccagcagtatgacctcatcaaagccctgttcattgaaacaagccccgcccctgctaaggaagcactgaacatgatgggaatgcctgccggtccattacgactgcctcttgtgcccatgttagaggagaataaagccatcctaagaaaggcgttggaagatgctggcatactgtga

SEQ ID NO: 3887 - DNA, 1218 bp, synthetic construct
  source 1..1218: mol_type = other DNA
atgggcctgatcgtggccaaattcggcggcacatcgattggaaatggtaaacgcattcgcaaagctgcccagtctgtggtgaatgagtatatggatggcaagaaggtcgtcgttgtggtgtcagccatcaataagactacggacgagctggtggctattgccgacgagtccattgggaaggaagtgaccgagaagcagctggcggaaattctgtccctgggtgagcgtaccagcatacgggtattttccagtgtcctggagtccctcggggtgaaaagcgaatacattgacccaagccacgaattatggcccgtcataacggatgacaactatgggaaggcgcaaatcgactttgaaagaaccgaagagcaggcccagggtcttctctctctgttggagcagggtatcattcctgtggtatgcgggttcttaggacgaaccgagaacggggaagtgacaaccctcggacggggcgggagcgacgtcacggcattcctcctcggccactgtctcaaagccgataatgttatcattgtgaccgatgtggacggagtcatgagtactgacccaaggaagatagacgaggctgagaagctggactacatcagtgtggaagagatgcgggatctggctacacacggcgctcaggtattgcacccacatgcccttagattcaaagacccggagataaaagcaaagattatcagtttcgagaaaggggacctgtcagaccctggcacagagattgtcggcccctttgaagattcaatgggcaagaaagtttgcctacaccatgagcccatctctgttgtggctgtcgtgggagaggacttgcttaaccaaatagggctccttgcaaagatgaccagcctggtggccgatgcaaacatcaacatctacggcatcagcgccggccagaacagcatcacactgttcctcgataaggaggaagcggatgacgcttaccacctgttgcatgatctggtcattgcagaggataacctaagcagcatctccctgggaagggacatcgcaatgctcaccatgatcaatcccgattttatcgaaactcctggagtaatcactgaaatcaccaacccgctaaaggaaaaccatatcaatattgtggagatctcgtcatcccagacagccattgtgctgttcatcaactgggaggacggaaaggccgcctatgaccttataaaggaagttctgtga

SEQ ID NO: 3888 - DNA, 198 bp, synthetic construct
  source 1..198: mol_type = other DNA
atgggaaatattcgcacttccttcgtaaaacggataagcaaggagctgatcgagacccacaaggggaagttcaccacggactttgaagagaacaagattctagtggccgaatacagtaccgtgagcacaaagcatctcagaaacaaaatcgcaggctatatcacacgactggtcaggcaggaggccaacaaagcttga

SEQ ID NO: 3889 - DNA, 324 bp, synthetic construct
  source 1..324: mol_type = other DNA
gtggacgaaaaggaattgatgtcgatttacgagacggaggaagaggcccgcaatgttctgctcaagtctcggaagaggatcgacgagatcgataatgacctggtgaacctcatcagtgagcggacatccctcgctaaggatatagtgtcagcaaaggtcttcctgggcatggagatttatgacaaatccagagaagacgaggtccacgccaaggtaagcaaattagcgcaggaaaaaaacatagatgacgacatccttagcgatattatgaacatgctaaccatcctgagcaaaaacaagcagcgagaatttctggaggagtga

SEQ ID NO: 3890 - DNA, 870 bp, synthetic construct
  source 1..870: mol_type = other DNA
atgcactacattaacgccaagaccatcctgagcagcaaaaacggaatgaacctttataggggatgctcccacggctgtatctactgcgattcacggtccaagatatacaatatgaaccatgacttcgaggacattgaggtaaaggagaacggaatcagactcctgaagaacgcccttaagcggaaacgagaaaaggtgatgattgggacaggatcaatgaccgacccctacattcccctggagagtaatctaaagtttatgcgtgaatccttggaactcatttacaaatacggccacggctttacctgcatcaccaaaagcgacctcatcctgagagacctggacctaatcaagaaaatcaatgaaaacacaaaggcggtggtgcagatgaccctgacgacagctgatgatgagctgtgcaagatccttgagcctaacgtgtgtacaacgaaggaaagagtcaatgtcctgaagaccttaaacgagaacaatatcccaaccatcgtttggctgtgtccaatcctcccgtatataaacgatacggaggaaaacattaatcaaatcttggactactgtattgacgcaaatgtgaaaggtattttatgcttcgggatgggtatgaccctgcgcgaagggaaccgcgaatacttttataagaaactggacgagcacttccccggcctgaaagaacgatatcggcgcacttacaggaatagttatgggataaaaagccctaataacaaaaagctcatgaagatcttcctccagaggactgatgagcatggcattatgaacaatatcgaggatatatttgagtatctgcacgagttcccatcgcatgagagcacaaagcagactactttgatgtga

SEQ ID NO: 3891 - DNA, 918 bp, synthetic construct
  source 1..918: mol_type = other DNA
gtgatcgacttggccaaaatcgtgaagagcccaggttctgctacagtgatcaacgcaataagcaccggtttcggtagcgcctttggcattgatttgaacatcacttgcgaagcggagttttccagccaaggcattgactgctcatcagacctgggagtggaccccaaccttatgaacatatgtgtcaaaagtgttctgagtcactacaacatcggaaaagacctgtcgcaggacgatctattaaacgatttggacttcgggaatggggaagggatcaaaattagaacaaaatccaatctcccattaggctctggcctgtcaagtagcagtgccctgtcgaacagcgtggtcatggccactgccggcctgatttcagatgagttcttcctgaagcctctcagcgattttgaaatgatcaatcttggaatcgacgcctccctggaggctggcgtcaccataaccggcgcgtttgacgacgcctctgcatccttcttcggaggacttaccatcacggacaacatggagcggaagatcctccatcaggagaagctgcccgaatacgacatcctcgtgtttatgccggataaggagtccctgagcggttccagcgatgtaaatcgaatgaaacttgtcgggagctatgtgaagatggctttcgaagaggccatgaataagcgctatctcaaggcactcaccctaaacgggctgctgtacggaactgcactgaacttcgataataatatcgccttggatgccctcagtgcaggggccctggcttctggcctgtccggcacagggtcatctttcgttgcgattgtggaagaggacaccattgatgacgtgaaggacgcttgggcttccttcgatggcaacgtaatagagacaaaggtcaataacgagggaacgaggtttatttga

SEQ ID NO: 3892 - DNA, 858 bp, synthetic construct
  source 1..858: mol_type = other DNA
atgagcgaaaataacaggaccctgattaccataggaatcggcgcttttattatcatcgccatcttactgctcatcgccctggtgctgccgttcagtaacctggcagtggacaatgatgagattgcagtgatcaccatatctgacaccatcacctacggggacaactccacgtctgcccatacaagcaagaaggaaatcgaatccgaactgaacgatgcctactcaaaccccaagattaagggcatcgttctcgatatagacagtggtggagggagcttggtggcgagcgatgaaatctcggacctgatcaagaaatctcctaagccaattgtgagctacatcggagataaagggtttgacgaggcctatcagatcgcaagtgccacggactatattttcgccagctcctcctcatcgctcggagggatcggcctctcctacataaataccgaccggtactccgatgaaaaggtcacaggcgtcttcaatgagaagtatctcaaaaacaataaaaccaagagcaacagcaaggtcaagagtgctaatgacttggccaacgctcaaaagatggtggaccaggactatactcttttcattaagaaaatcgccgagaaccgcaaccttacagcagactatgttgcggagctggcacacggcaagaaatacaacggcaacgaggctaaaaagctagggctgattgatgagatcggctctaaatcccagtcaatagaaaaagccgcgaaattgtcaaatgctactaattacacagtaatcacttaccccgagccacagaagaagctaacggagattctgggtgagaatgatatttttaacctgaaagagcttattaagatctga

SEQ ID NO: 3893 - DNA, 252 bp, synthetic construct
  source 1..252: mol_type = other DNA
atggtgtataaagtggaggtgtttactagcccaacctgccctcattgtccgggagcggtcaggctcgtcgaaaaggcaaaggaggaactgggcgacgctctggacgtaaccatatacaacacggccgaagccgaggccatggagattgctcggaaataccacatcatgtatgttcccacaatcattatcgatggggaaatcaagttccagggcgcacccagctacgacgagctgatggccgagctaaagtga

SEQ ID NO: 3894 - DNA, 1107 bp, synthetic construct
  source 1..1107: mol_type = other DNA
atgaagatcgccatggtaggtcagttcccgccccacatcggaggcgtgggggtccacatacactccctagcaaagcagctaatccgggagggccatgaagtctatgtgattacataccctcacaaggacattaaggacattgacggcatccatgtcatcggcacaaaaggaataaacattcccggcctgagagggttgatgttcgggattaatgccaaaaaggagttaaaaaagctgatcaatgaagagaacattgatatcatccacggccactacctcttccctgctggatgggcctcggttaaggctgggaaatcaacgaacaccaaaacctatgtgacggcccatggatcagatatctttgagatgtataaaaaacaaaagtttatgaggcccttcatcaagaaagtgctctccgatgcagatattgtcctggcagtgagcaacgcgttgaaagatgagataattaagatcgacgtgccgggcataaaggagaagatcaagattcattggaacagtgtcgacattgagaagtacaaaaccactgaggagaacaaggataagttcaaaaaggaactggttaatgagtacaatcttgaccccaacaagccaatgatcctgtttgtcggaaacataatcaaacggaaaaatgtgaatctccttgtggaggccaagcgcctcatcaagaccgatgccaaccttgtaatcgtgggtgagggtagcgaattgggcaagctgaaggagaaagtgaagaacgacgataaaatcaacgacgtgtactttacaggggctcgcagggacgtggaggacatctacccatcctgtgacctgctggtactgccctcctttagcgaaagtttcggactggtgttaatagaagctctggcttgcgggaacgccgtcatcggtagcaatattggcgggattaaggagatcatcaccgaagacgttggcctgttgatcaacccaaatgacagccaggacctcgccaacgcaattgataagattcttcaggatgaagaactcctgaataagttcaagagcaatgcgagaaaccgagccaaagacttctctaaaactgaactcccttatgatgagctgaaatga

SEQ ID NO: 3895 - DNA, 471 bp, synthetic construct
  source 1..471: mol_type = other DNA
atgggagaaaaagaatttactcacctgacggagagtggcgtgcacatggtggaggttggtgcaaaggcccagcagcgccgaaccgcgattgctagcgggaaaatccatctccaaaaggagaccatccggatgattgagaatgccgaaatcaagaaggggaacgtcctgactacagcccagatcgctggcatccaggcagtcaagaagacgagcgacctgatcccactatgccaccccttgaatctctccggcatcgacatagagttcgaagtggaagaagaggaaatcaccgcgatctgcgagtgtaggctcactggccaaaccggagtggagatggaggccattaccggagtgagcgtggcccttctgacaatatgggatatgacaaaagctgtagagaaagatgagaacgggcagtacccgaacacaagaatttcagacattaaggtcctgaaaaaggagaagatatga

SEQ ID NO: 3896 - DNA, 2073 bp, synthetic construct
  source 1..2073: mol_type = other DNA
atgaagaacattcccactaatatcaaacaaataataaatgattgctacccctacatcaaagagttcaatcccgcccaaaaggctgtcattgaatctggctacctggagaatgacaagaattacatcatcgccattccaactgcaagcggtaagactgtgcttggcgtcatggctgcacttcaaagcatcctatctggcggcaaggccgtatacgctgcccctctcatatccattcagaatgagaaggtcaaggaatttaagaaatttgaagagcatgggattagcgtggggaagcatccaagttcctctgacctgagtatcatggtctttgaatcattcgatgtcctgacgcgattttcgtgggatgtcctgagagatgtggacactatcatcatcgacgaatttcacatgattggcgagtattccagggggcctacaatcgagtgtgccataaccagggctaagatcataaatccaaacctccggatcattgcactgtctgcaaccttggagaacatgtctgaaatcgagaattggctagatgctaccgttatagaacacgattataggcccgttcccctcaataaagacgtactggataccgagatgttcaacactaaaaacaagaatgatgtcgtggtaaaagttattgaaaaagccattgaagacgatagccaggccctgagcttcgtgtcaacacgcaggttcacagagagccttgcaaactatgtggctgagaagctcaagaaaaaaaccacagacgagcagaagaaacgctttaaggaagtggccgacaagatccttgaggttcccgagaagaaaggcagcagaccgacctccacctgcttgaagctggctgaaagctgcgagaacggtgccgttttccaccacgccggactcttctcggaacagaaggaaatcattgaagaggaatttcggaacgggaacatcctaatgattgccgcaacacccagtctgatgtatggagttaacctcccttccaaatacgtggtgatacgagactacacgcggtggacctcccagggtccgcaggcgatcccagtctttgactacgagcagatgagcggtagagctggtaggccccagtacgacaacgccggatattcctatctgattgcgaaatcaatggaggaagcttccaccctggaggagcgctacatctatggcgacattgagcctaccaactccaagctgattgagaacaaggatgccgtgttcaggcaaatcatcgcccaggtggcttccaccataagtaagacgccagaagacctggaagacttcttcaagaagacattctacggctatcagatgaccaataacagttcaatgagctttttcgcagaggagagcctcaagttcgagatccagaatgccctcgaatttctgctgcagaatcagatattgcaggctacaccaagtggacttaaaaccaccgcactgggaaacctgatcgccaagtccaactacacagtggaaactgcagtgaaggtcaaggagtatgcgaacctggtggaccagttcagtgcggaggaactgatctatcacttagcgcagactccggatatgcctctcatcagttttaagggccgtcgctctaaagacccagtgcgagaaaagctggctaactacggcctatttgccttggagatcgccaaccccgaggcaacggccgtgtcccttatcgagtggatcgatgagcggaacgagtacgagattgagaacgcctataatgtctacgcgtcatctaccagacgggctgcatacgaggcgtcgctccttgtccgattcactaaaaacacgttggaagttctggggaaatacaattacagcaaggatttagacttcctctcagccagactctattacggggtgaaggaggacattattcctctggtgattggggtgaaacgcctgggccggaagcgtgccagagccttggtgaacacattcggagaggacttacggccggtgtcagagaatgaactgcaaaaagtagatggaatcgggcctaaactggctaaaagcatccgcaacttcgccgacaattattga

SEQ ID NO: 3897 - DNA, 303 bp, synthetic construct
  source 1..303: mol_type = other DNA
atgagcttctgtgacattcgcggggaaaccatagatatcggcgcctttatcaggtacacgggaacagggaccatcagcaaggtcgtggacctaaaggaggaggacaagcagcagtgggtaaagctggacgagcccgcgctgtggtatgctgcagactccctggaggtggtcgacgaaaaggatctcattaacgtggagactgtggatcgggatacactcgaaaaagttaaagacataaaagagggctacgaggaattgaatgccaaccttaacgatatccaaggctgcgaagggggaggttga

SEQ ID NO: 3898 - DNA, 456 bp, synthetic construct
  source 1..456: mol_type = other DNA
atgaagattaaacaactgctgggcatgctggttttggacgacaacgcaaacgaaattgggaagatcatcgacgcagattttgagcccgaaactggcgccatcacaaagattgtcgtcagccttaagaaaaacttcctcacatccgaccagctagacgtggagtataatgatgtgaagagcatcggagactacgtactcctgaagattaccatagataaggaaacgaaaataaaggaggccgaggaggccaagaaagcggagaaggaggctaagaaagaggccaagaaggctgaacgggaggccaaaaaagccgccaaagaagcggaaaaggaggaagcagtcgccgagcagatcgagaagcaggtggaagttgtggaggctgaaatcgtggacgatgccgaagaggctgaggaagcagtcgaggctgaagagaccaccgatgtgaaagtggagtga

SEQ ID NO: 3899 - DNA, 1707 bp, synthetic construct
  source 1..1707: mol_type = other DNA
atggataaagcatgccggatcatcatagaagacattatgaatggcaaaattacgactcgacgggagttggaggtggagaaacggcagctatgccgggatcgcaaactgaaaaagttcatgagcaattcggtgatcctcgagcacgcaagccttgaagagaaaaagatcgtgtccaacctactgaggaaaaagcccacgcgcaccatctctggagtggctattgtggcggtcatgtgtcatccacaccagtgtcctcatggcagatgtttctattgccctgaaagtgatattgcaccgccaagttataccggcgaagagcctgcggctctgaggggccgcatgttcaagttccacccttacgtgcagtgctataaccgactgaagcagcttcacaaggttggccatcccatcgacaaggtggaactgatcatcatgggagggacattcccttcaaaggacatctgctatcaggaatggttcgtgtcccagtgtctcaaggcgatgtgcgattttggaattatcctggaaaacatctctcagatcgacgacatcgagtcaatcaagagagaaggcctgttaaaataccatccgtacagcaacaatgaattgaagacgtaccccccaaacgactatgtcctgatagatgacattcaaaggattaatgaaaattcaaaggtcagatgcattggaatgacctttgagacccggccagactactgtaaagagccccacgtcgatagaatgctggacatgggggtgacaagagtagagttaggcgttcagacaatctataatcacatctacgaaaagataaaacgcggccacaaggtggaggatgtgattgaggccaaccgtatcctccgcgattccggggtaaaggtggccatgcacatgatgcccgggctctttcccctggctagggagaatccacgtatagaacagtgtcccgaacaggacctcaagatgtttaaggaaatcttcaacaatgagaactttaagccagatatgctgaaaatctatccttgcctagtcaccgaggggagcgaactgcacaagctctacaaggagggcaaatacaggccctacactgatgaggaggctgtagagttgatagttcagatcaagaagatccttcccaaatgggttcggaccatgagaatccaaagggacattccatctaccttgattgaagcaggggtcaagaaatcgaaccttggcgaattggtctataaccgactggaagaggaaaaaatcaactgtcagtgcattcgctgcagggagataggccacaagaaaacagagcaggactactccattgacgactaccgcctgttccaagaggattacactgccgtggggggtaaggaacacttcctctccatcgaggataagaatgaggaaagcctggccggattcctgaggctgagaatgccgacagagcaggcccatcgcgaggagattagagacaatactgccatagtgcgggagctccatgtctacgggaacatgattaagattggccataagggaaacgccattggtcagcacaccgggtttggagagcggcttctcaagaaagctgaagagattagcatcgaccaaaacaaggaggagctgctgataatcagtggtatcggagcccgaaactattaccggaagtttggttacgagcgtaaaggtccttatatggccaaaaaactcatctga

SEQ ID NO: 3900 - DNA, 723 bp, synthetic construct
  source 1..723: mol_type = other DNA
atgattacagccgaagaactggctcagtacatcgagtttaccaatctcgataacactgctacggaggagcagatgaaagcattctttgataaggccaaagagtacaacttttacgcagtggtagtcctgccccactacgttaaactcgccaaagaggagctgaaggacaccgacatgaaagttgtgactgtggtcgacttcccactaggtgctggaaccaccgagagcaaggttgccgaggcaaaggatgccatcaagaacggcgccgatgagattgacatgatggcgaacatccctgcaatcaaggagcacaacttcaaggccgtgaaagaagacatcattgcagtgaaggaggccgtgggagatcacatcctcaaggtcataattgaaaatgcccttttaacggtggatgaaaaggcgggggcttcggccatgtgcgaagcgggaggtgcagactttgtcaagacctcaagcgggttcaatggcaatgagcatttctatgctttgatggagagcctgcggatcatgaaaaagaacgctccgcacaaggaaatcaaggcggctggcgggataaacaattataaactggtgaacaatgtcatagccgccggagtgactaaaatcgggacatcctccggccacattatcatggaccagttcaaccatgtgatggacaaccaaaaggtaagtcccgaacagaaaacaggcccaaggctgatttga

SEQ ID NO: 3901 - DNA, 201 bp, synthetic construct
  source 1..201: mol_type = other DNA
atgagcgagctgccaatcgcccccgtcggccggatactgaaaaatgctggcgcccagagaattagcgacgacgcaaaggtagccctcgccgaggcgctagaggaaaagggagacgaactggccaagaaagcagtgaacttcgcacgccacgctgggaggaagaccgtgaaagcggaggatatcaagctcgccatcaaatga

SEQ ID NO: 3902 - DNA, 1287 bp, synthetic construct
  source 1..1287: mol_type = other DNA
gtggacaatatgaaagtatttatcgagacctatggatgtacatttaaccaagcggattccgaaattatggcagggatactgaatgagaacaacatcgggctagtctccactgaagaggaggctgacgccatcattgtaaacacctgctacgtcaaactgcctactgaaagcaaggtgataaacagaatcaaaaacctccagaagcagtaccccgataagaagattatcgtgggaggctgcatggttgaggtggacccaaaaaagctggaggccatcggacctaactgtagttggatcggtccccaccaactgaacaagactgctgacgtagtcaagtctaccatcggcggggagatcgttagggagttcggtttttccgacgaacccaaagtctgcgttcccaaaatacgaaaagatccatacatccatgttatccaaatatgtgagggctgtctgggtgcttgcacatactgctgcacccggttcgcccgcggccaccttaacagctatcctataaaggatattgtggaggaagcccggctcgccattgaagacggctgcgtggagattgagctgaccgcccaggacacgtcagcatttgggaaggatacaggcgagaagctcagcgatctgattaaggaggtggcgagcttggatggggactttagagttcgtgtgggcatgatgcacccacggaacattggcaatgatttggataatctaattgaagcctttaagatggaaaaagtgtatgacttcatccacctgcccatacagagcggcagtgacaaggtcttaagggaaatgggccggaaccatacggtcgatgactataagaatattgtctacagcttcaaacaggctattccagacatcacgatcgccaccgacatcattatcggatacccgacagagacagaagaggatttcatgaagacagcagagctgatcagagaaatcaaattcaacctgatccacctctccaaataccagcaccgcgagggtgccatctcatcttccctggacaatattccgttcgacgacatgaaacgacgctcaaagtaccttagtgagattaagtttgaaatgctcgaagaggagaataagttcctgcaggacagggagatggatgctttggtggtggaaaagggctcgaaagggggattcatagcaaagaccaatagctatatccctgtggtggtccaggacgtgaaccttggagagttcatcaaggtgcatatcgataagaccactggaacctacctcattgggcataaaatcgactga

SEQ ID NO: 3903 - DNA, 633 bp, synthetic construct
  source 1..633: mol_type = other DNA
atggtatgccccgtttgtgggagcgatgatgccatcgtcctgaaaaacaaactaatcgacgctaagtccaaggagatacgcgagctgctgcttaagtgtggcgaatgcggctctgtctacaaggagcgcctcactcaggataagccaaaacctttcaggttgatcatcagcgagcacgaagacacccataaggtgtcaattgacttgtaccccgacgaagagctgcgggtgggagactttctgatgtccgaactcggagaagtgaagatcacctccctggagcttcccgatgagaagcgggttcagaaagctatcgccagtgaggtgaagaccatttgggcctcgtctgaggagatcccggcacgttttggcgtgagcattgacctccacggtaaggtcgctagcttcaaatgcgaaacagaccgggactttaagatagcggtcgatgacattattaaaatcgacaagtatgtggcaagagttcatgtgataaagacagaagagcgaaagacgactaaagggtacgccaaagccagagtaattaagagggtgtatgcgaaacctgtgaaattcaaccacttcgattacgatttaagtaaattcatcgtctcatttaagccactgaataagtga

SEQ ID NO: 3904 - DNA, 486 bp, synthetic construct
  source 1..486: mol_type = other DNA
atggctgaaattaagggcaaagtgtggaacttcggcgacaacattgacacggacgtaattatccccggccggtaccttcgcacattcaatcctaatgacctggccctgcacgtcctggagggggagagacccgatttcaccaaaaacgtggaaaagggcgatgtcatcctagcgggggagaacttcggatgcggttccagtcgagagcaggcgccagtagccatcaaggcagctggagttgatgtcataattgcaaagagctttgcccggatcttctataggaacgccatcaacataggactgccggtggtggtggccgacatcgaggcagacgatggggatattgttagcgtggacttggaaaatggcatcatcatcaatgagaccaaagacactaaggtggaatttcaggcctttaaagagtttatggtcaacatactctcagatggtgggctggtgaagcattacctcaaaacaaaggaatga

SEQ ID NO: 3905 - DNA, 981 bp, synthetic construct
  source 1..981: mol_type = other DNA
atgataattcgagcaccttcacggctccatatgtctttaattgatctgaatggaagctataagagaatcgatggggggataggcctcgcgctaaaagacccccaatttgtgctgcagagcgaggagacaaacgagaagggatacactctggagtttgccgacagcattagcgaagattcacgcgaagaatgtatcgagaagatcccaaaagctgcggagaagatagccgagctttgcgacatcgaatccggattccactttaaggttcttgaagcctatccgccacactctggactcggctcgggcacgcagatctccgtctgcaccgctcatctgatgaccgagactgtgggccagaaatacaccagcagggagttaagtacaatggtcggccggggaggaacctctgggatcggcacctttgcccacgacctggggggcttcattgtggacggtggccacagcctggaggagaagcctggcttcctgccatcctccgcttcaaaggccaaacccgctacactcatagccaggtacgatttccctgaagagtgggacattttgcttgcactgccggaagtgaaggagcatatgcatgaccagcaggaagtaaatgtgttccagacctattgccccatcccaaaaacagaggtggagcaggtgtcccacttgatcctaatgaacctcctccccttcctgctcgagaaggacattgtcaactttggttgggcaatcaaggagctgcagaaagttggcttcaacaagctggaacacagtttggatgccagtttcctgcccacgatggaagcgattgatgaggccggtgcttacgggacgggaatcagctcgttcgggcctaccctgtacactgtctttgataagaacaataaagacatcgtgaaggccgcaggtgagatcgtcggggaagaccgcgtgaaagtggtaaaagcccaaaaccacggctacgttctggaaaagtga

SEQ ID NO: 3906 - DNA, 1530 bp, synthetic construct
  source 1..1530: mol_type = other DNA
atgttcatcaagaaaacaaccagtctgtgcccacactgcctgaagcccttagaagctgaggtgtaccaggaggatggcaaggtctggatcgaaaaggaatgcccagagcatggggtctttaaaaatacttactggagtgatgcagagttatatgacagggtggaccaagtagattcaatcacccaggatctggaaaaccctatggtgaataaggtggcaaaatgtcctcaaaactgtggtatctgttctgagcatgagtcctacacggttcttggactgattgacgttaccaaccgctgtaatctaaaatgcccgatctgcttcgcaaatgccgcaacctccaaaaagctctttgagcccacgcaggaagagatccggcagatgctgcgaaacctgagaggcgaaaagcctgttcctacccctgcgattcaatacgccggcggggagcctaccgtcagaaaagacttgcccgacttgattcggatggccagggaagagggattctcccatactcagatcgccacaaatgggatcaggattgctaagaaggagggctacgctcaagaactgaaggatgccggcctcaacacagtttacttgcagtttgacggtgtcaccgaggagccgtatcttgtagccagaaacaaaaacctccttgatgtcaagttggaagccatcgaaaagtgtagagaggtcggactaggggtggtgattgtacccacggtggtgaaaggcgtcaacgaccaacaggtgggagacatcatccgctttgccatacagaacattgacattatccacggcgtgaacttccagcccgtcagcttcagcggcaggactcccagcgaccaggtggaggagcagcgcatcacaatcccggacttcctcaatctggtggaggagcagacagacggccagatatcaaaggacgatttctacagcgcaacttctgtgcagccagtgagtaagttcatcggggccctgcgaaatgaagagccaccagtaacgctaaactgccaccagcactgcggttcggccacctacatattcatggataatgataagatcattcccattacacggttcatggatatcgataagttcctcacattcctcaacaaatatactgagaagctcgaggatggtggatttgcgataaaatcacgggtcctggcgagcgcagccaaaaacctccccaaggttctgaatgaggatgaagctcctaccggactggatatgaagcgtatactgctggacatcttcaaaacccagagctatgatgctctgggggaatttcatattaatagcctgctgatttcgtgcatgcactttatggacccgtttaactttgacacagaccgggtgaaggactgcgtgattcactatgccgtgccagacggaagggtgatcccattctgtaccatgaactccatctaccgccagggcatagaggacgagttctccaccccccttaaccagaaaatgacggagtttaatgacaagactggggaagaagaggaagacgctgattga

SEQ ID NO: 3907 - DNA, 303 bp, synthetic construct
  source 1..303: mol_type = other DNA
atgaaactcagcgagtggatcattatcaacaagatacccaacaataagatcctgaccatcctcgaggaatacgagaacattgaagcaatcgagttcaacgaccctgaagatgtaaaggcggaggtggaagagcatgggctgaggtatgtggcccacaagtacggagtcaatgagaaagctctaaaggagtacggctggcggttcaagaaaagagacgccaaaggcaagaagcgcgaggaaacgccgattataaagacagatgaacagaaaccactggtggacatctttggtgacgaagagtga

SEQ ID NO: 3908 - DNA, 576 bp, synthetic construct
  source 1..576: mol_type = other DNA
atggcactggagctgatgaacctgttgatctccatccttggagctgtgtatttcatgctaccggcctatgtggctaacctgtcgggtctcgcttttggggggggaacgccaattgacggcggggcgaattaccgggacgggaatcgaatcattggaaacggagtaacatggaagggttgcattaacggcaccattatcggcacactggtgggtgtggtcctgggcatcgtcggaatgtactacggggacctcagcaccctgaccggcggcgtcatcgacctccatgtctatggcagcctcttctctgggctcatcttaggattcctaatggcattcggcgccctgttcggggatgcggttggctcattcataaaaaggagaatgaacctccaatccggccagcctgcccccatcatggaccagttggattttgtgcttggagccctcatatttagcctgctggtggttcgcatcagttggtccttctttatcataatttgtctgctgtcaattttactgcacctgagtagcaatactattgcctacttgcttggtatcaaggatgtgtggtactga

SEQ ID NO: 3909 - DNA, 690 bp, synthetic construct
  source 1..690: mol_type = other DNA
atggggaagatatttaaaatcgtgacaatcatcctcattgtcatcgccttagccatactcggggtgttcatctactccgacggacattccgaaaagatcggggaaaacaatctaggcgtggtgtacaaggttacatatggtcacagtaatgaccccaacgtgacaatcgggattgtgtcaggcatgcatagccgagagaagctccaccaatacgtcctgccatacgtcagtaaggcctttgcgtttctgcacccagacgtgaagattgtcaactatattgtgaacgtcacgaaagaccctgaagactttacgaaaggcagagccaatggagaatcgcttgtgcacgactacgtggtaaaagatgtgaagaaagaggacttcgatgtggtaatcatcggacacgaccacgagccaggctatggtgaggcatattatatagcaacccctgttatggataacgcttcagtcaagctggctaagaaggtgaccaaagatattggcttcaatcattacaccaggaacaaaagccagccgactactagcacctccatcctgaaggtggacaagcccatcgtcgatgccggcacccgcgtattcgtttacgagattcccgaggtggatggaaaggtcaacgcgttctacaagagctatcagctggttaatgctacttacaaccggttgaaaaaatga

SEQ ID NO: 3910 - DNA, 1023 bp, synthetic construct
  source 1..1023: mol_type = other DNA
gtgaaagtggcaggatttgacatcggtggggccaacactgacctggccattattgattttgagaacgacgagattaaagaaatcaaaacagacttcgagtacctgcctatgtggagtgacaataaccggcttggaaatgtgctgattgaccttatagagaagatctgccccctcgaagaaatcgacgcagtgggaatatccatgacggccgagcttgtggacgccttcgagaccaagaccgaaggggtcttggatatagcaaccacttgcgaaaagttattcgaatgcccagttgcttatattggcgttgataaagtcctaagtctggctgaactggtacagaaccccatcgaagtggcggccgctaactggattgccacctcccagatcattgctgaaattgagaaggactgcatattcgtagatacagggagcacaaccacagacattatccccatcaaggatgggcgggagtgtgcgaagggccgcaccgactttgagcgctcagccactggagagctggtctacacgggcaccttaagaaccaatctgacaagcttcgtcgactcagttccactgaatggaaaccaatacagggtggcctccgagctctttgcgagcacagccgatgtctataatgttctgggcctgatctctgaagatgatttcacttgcgccacctgtgacggtgcaggcaagagtaaggaggacagcgcaagacggataagccgcatcctctgtgccgacttggacatcctatcgaaagaggatattctggagatcgccgattacatccacaaggaacaggtcaagcagatcgctagcggcctgaaagacgtaagcgatagggagggactcactaaagtggtggtgacggggttgggcaaggacatcctgtgtgccgaggcagctcgactcctcgggctggaggtgaagtccatgggcgattattacacggatgacgagtgcaccgtggcgccggccatcggtacagctatcatgatgaagaactacctcaaatga

SEQ ID NO: 3911 - DNA, 1167 bp, synthetic construct
  source 1..1167: mol_type = other DNA
atggacttgaaggatgtaactgatgattctatactggtgttcgaactgttcacagccagcgggattgaagacctgtccattgtgtcagaagcggtggagcttatcagatccctcgtcaatgacttgaaagacgaggacacttatgtgctaatcgcagagccttttaaaaacatcttcgacgactttgacttcgatgtaaaaacaataaccatagataacctcgaggaatggctcgaggagaatgcttacatctttgaccgggccatgttcatcgccgctgaaaacgacatgaacctctacaacctgaccaagctactggagaacaaggctgtaaaggtttatggcagcgactcatacgcagtcaaattatgctctgacaagtatgagacctttgattacttaatcaacagagttaatcagccaatgacctacaacatcctgctcaacaaaaagacgtattggaagagggccatccaaatcttctttgataagatcaacggcgactacggggatggaagcgataatggtgccgtgccgatcatgcagaagcctaaggacatccccgtcctggataatagcgaccgggatgaggttaaaaagtacaagctcattgccaagccacgctttggagtggactgcgaaagcctgaagatcatcagctcgaaaagggatatcgacgagctggaggaaatctaccctgaggggtcccgcttcattgtgcaggagttcatccccggggatgtgtgcagtgtcactttgataagcgacggcaagaacgccattccaatcagtcttaataaacagattgtggagatcgatgagaacggaggcaaataccttgggggatacgttccctatgagcacgaaatgaaagagaaagcttttgaggtggcgaaaaaggcatgtgaatcaatccccggcatcaaagggtgtgtcggcgtggatctgattatagcagacgacgtctatctcattgaaatcaattcgcgattcacaacgtcctatgtgggactgtccaaggtggccaatataaacatcggcaagaccattgtggacctgattgacaagaagatctctattgaggagctgggtgaaattgagtacaaggataaggtcagtttctacaaggacgaaaatggcattctggatataaaaattggtgaatga

SEQ ID NO: 3912 - DNA, 1329 bp, synthetic construct
  source 1..1329: mol_type = other DNA
atgaaaatagcgattgtccttgggacaaggccggaaataatcaagatggcctcggtgatggatgaaattgaaaaccggggtcatgaactgttgctgatccacacaggccagcactacgataaggaaatgagcgaaaacttcttcattgacctcaaactccccaccccaaattataacattcacgtcggctccggcagtcacggggcgcagacgggcaagatgatggagggaatagaagaggtgctcctggacgagaagccagatatcttgctggttcaaggagataccaacgctgtgctggccggcgccttggtcgccagcaagctgcacattcctgtcggtcatgtggaggccggcttacggtcatttgacgagacgatgcccgaggagatcaaccgcctggcagccgacatctgtagcaaactgtactttgtacccacagaggagtcagcaatcaacctggctatggaggggatttcccgaaaaaggatcttcataaccggtaacacggtagtggacgcttgcttcaggaacctcgaaatatccaagagccgggataaagaccagtatgatgagggccttcaggagttggatattgacaatatggataatatcctcaccctaacaatgcaccgggcggaaaccgtggacgataaggaacgcctaaccaatataattgaggctctggaggaactgagcgacatgaacattatcttcccaatacaccccagaactaaaaagactatggagaacttcaatctctttgacagattaaacgacctccctcacgttcatatcatcaagcccgtcggctatctggactttctgctgctcatctccaagtctacaatcatcctaacagatagcggcggacttcaggaggaggccatcacccttgacgtgccggcactgaccctcagatacaacacggagcgtcctgagacagtcactgccggagggaacatccttgtaggttccgacaaggaagtgattctggaaaatgcacgaaagatcctggacgatgaggactttgccaataggatgaaaagcgctaaaaacccctacggaatggggaatgctgccgagctgatgattaagatcatcgaggaaagcgataagaatgacaccctgaagatggtggccccagacgaggtgatggcaagtttcactcgccatatgaaggcagttgacgaggacatcactgtggtggactttgaagaaaaaaataactcactgattaaaatcgccttccaaggggaagatattaaatacccttacgatgagctcaacttgaatggattaaccatcatttatgaggattacagttga

SEQ ID NO: 3913 - DNA, 642 bp, synthetic construct
  source 1..642: mol_type = other DNA
atgtttgaatttactaagaacgagctgcgggaccttgtgattgcattcatcgtgctgagtattgcttttgcaattgctaacgtcaagttcgacctccatgctttcatctccattctcccaatcgtaatgttcggagtgggggtgggcttcctcttgcacgagctcggccacaagtatgtggctaataaatacggttacaaagcggagttcaaactgtggcccataggacttctcattgcactgatcacaagcctgataggctgggtcttcgccctgcctggtgaagccaagatcaccgccgagaatatcgacgaagagaccactggcaagattgccatcgcgggaccgatggccaacatcgggctggggctactatttatcgtcatcgccgccatcacctacccattgaaaagctcattcacactgtttgagctgatttacctcgtcagcacggttggcttctctgtgaacgcatttttggctacatttaacatactgcccttctataccctggatggaacgaaagtgatgaagtggagtgtaaaggcctttatcgttgcgttcgccatcgccgcaatcatgatgttatcctcgatgttcataggggctgaaaatatgattcttatgctgattggctcctga

SEQ ID NO: 3914 - DNA, 678 bp, synthetic construct
  source 1..678: mol_type = other DNA
atgaaccaggaactaatcataaacaataaggaataccggaagacagagcccctcgagtctctgaatatgtttaaagggcagctctatgaaactatcgtcaccacccaaagcaatgagcacatcaaaaacgcagcccccattggagtgatctgtaaagacagtaatcatatcgtcatacatctggacaactgcgtgcacacacaccgcaacatcatagaaaacggggaattgatcgtgaacatcactaaagatccactgatttttacatattcaaccattggtgagctggacgatgagtacttcgatgaatttaacggcttccctttaattaaggattccctgggattcttcaaggcccacgtaataaagaaaatcaacaagaaaagggagaacgacttcaacgacgggatcggccacgtggtcacctgcgaagtggaggacattttcatccgagagtacaatgagattgtgccgctgaacagggctatgaacgcagttatcgagagccttgtctactattgcagatttgatgcgaagtacaagcacatgcagaaggagatttggacgcatatgaaagagctgaatcgggttgctcagaaggtgggcaatgagaaagaaaagaagtccatgaaggccatcctcgacaaaatgcgcgaaaatcatgattacttggactga

SEQ ID NO: 3915 - DNA, 465 bp, synthetic construct
  source 1..465: mol_type = other DNA
atggaggatgtcagtgaatttaaaggaatcaacggacagctggtgagcttcaaaaatgaagtggaaggcgccgataagatcacgtttatcggctctccgggggtgtgtaccccattcgctgagctcttgtcctacgctgtacggaataaggagaaccatttcattcccctgcttgacattgacgacgcccaccagtttgagttcaagccatacggcatggtcctcaaggatgaagtgtcaaaccctcgcgacgcggatgtggtggtcctactgggaggcctgacaatgcccaaatatgaggtggccttcgatgacctcaacgcactgatcggggacgtcctgaaagaggatggtaagatcgttggcgtgtgctttatggacatgttcgccaaggccggttggttggacaaggtagacttcgactccgtcattgatgcaagcatattaggggttgtgaaaaagtga

SEQ ID NO: 3916 - DNA, 807 bp, synthetic construct
  source 1..807: mol_type = other DNA
atggccgacaaggataagatctttgaagacaatgcctacgatgactctgagtacatctataacgacacctacgagggcagccgaaacgattacgatgttgaatatgatgagagtgaggattatgaatacgaggaacctctaatcagcctgttcgacatcgtcaaagagtatgacaagggaaaggtgatcgcgttaaacaaggtaaacctcgacatctacgagggggaatttgtaagcattatcggcccctcgggctcaggaaaatccactcttctgaacatgctgggggccctcgacgtgcccacaagcggggagatattcattgacggcctaaacattggaaaggagaaagacctgagtgatttcagaagagaaaccatcggttttgtgttccaactgcataacctgattcccaacctcagcgtttgggacaatgtccagatcccattggtcggcacggggttgcctgaaaaggagatgaaaaagcgggccaacgagatgattgatgctgtgggactctccgataagaaaaagcagaagccgaataagctgtccggcggagagcgtcagagggtggccatcgcacgggcacttgtcaataagccatcaatcattctggcggacgagccaacaggttcccttgatacgaaaaccgggagcatggtgctgaatctcctgcgcgcaatgcacgatgtgtacaacgttaccttgatagtggtgactcacgacatggaagtggctcgcatggccgataggatgattacaatcaaagacggccagatagtcaaagacgtggacaatttctga

SEQ ID NO: 3917 - DNA, 1137 bp, synthetic construct
  source 1..1137: mol_type = other DNA
atgagatttataagcttaatcataaaaaacccattcaggaacaagactcgcagcttcctctccatcgtcggcattgcaatcggaatcgccaccatagtggcgctgggcctgatcaccacagggatggagcagtccgtgcagacaacaatgaacgaaggggccgccgagatcactgtgaccaatatcacctccatcggtgccgggactattgacagcagtctggtggatgagttaaaaaacataacgaatgtgtcacggactgcggggattctgagtgccacggaccagaactttgtggatatggcctcatcgaacgacatgtcttctatggagagcagcacacgcctttacggcattaaccgggcagacctggacttggaaggaatcaaagacatcaacgggagcttctttgaagaaggcactaagcaggccataatcggcaagcaatacgcccaaatgaataatatgtcgatcggcgataacatctccgctctgggcgaggaatttgaaatcgtcggggtgttcgaaaccggtggagtccttgccgatagtggagtttatgtgtccctggaaaccctcgacgaggtaaccggtgccgagggcaaggtaaatcaggtaattgtcaagacagatgaaggagtgaacgacactgtggtggcagacgcgatcgaggataaatacgagaatctgacgacaataaccagcgaagagatgtctcagatgctggataatgttatcgggattctcgacgctgtttccgttgccgtgtccgctctcgctattattgtgggtgcaatcggcatcgtcaacacaatggtcatgtctgtgtacgagcgtacgaaggagattggcgtgctaaagtctgtaggatggaaaagcagaaagatcctaaagatgatcattggcgagaccctggtgctgacaatcctttcaggtattgtgggctcagctttcggtattctcatcgcagaggtcggggtcaggctgatgggagacaccgatttcgcgttgggctacagtcccagcacgttcatcatggcatttgggataaccattgtcgttggactcattggaggcatctaccctgcctataaggctagtaaattggctccgaccgaggccctgcgatatgagtga

SEQ ID NO: 3918 - DNA, 873 bp, synthetic construct
  source 1..873: mol_type = other DNA
atgaaacgcacggctcttaagattgcgtatatcggcacccactttcatggattccaacgtcagccggacgtaaggactgtggaggaggagcttatttatcacctgaggaaactggaatacatagacgatttaaaggcgtcccgatttcggatcgccggaagaacggacgccggtgtccattcattgggcaacgtgatttccttccaaagcgaaaaggaagtacgtgtcaaccagatcaataatagcctgcccgacgacatccagataatcgcttgggccccagtgcgatttggattcaaacccagatttgccaagaggcgctggtaccgctacatcctctttgaggaggacttggatattgatctgctaaggaaaacagcagaagtcttcaaggggacccacgacttcaccaatttcacaaaaagaaagcagaagaccactgttcgcaccattgaggatatcagaatcaccaagccaatcattgatgaagaagacaagaacaaaaaaagtgatttcgcccacctaaacaaaagttactcccctatctttgtggacatctacggggagagcttcttgtggaacatggtgcgaaagatgatgcggatcttcctggatgtcaattacggcaagctcacactcgatgacgtggaacggctcctcaaccccgaggaaggcgagcctcgcgcctacatcaaggtggttgatgcagagaatctgattctgatggacatagagtatgaggggataagattccggtacgacgactatgcatgtgaaaggtttcggcggtacctgatcgacaacctgttcgagctgcagaagacatattcgattactgagtctatgctgaactgccttgacgatctcatttga

SEQ ID NO: 3919 - DNA, 897 bp, synthetic construct
  source 1..897: mol_type = other DNA
atgcgaaaggagaaagagtcaaaagaaagtattagcatttacgacaactataaaatagatatggagcttaagcacaccgacaagcagtactacttcatcttttataaacggaggctgttcctaataaataacaagatcccccttgttaaagacttgatcagcctgaatatcaatgatagcgatgtgaaaaactccatttacattgggcagttccatagcaaggactgcttcgccgttgaactggatgaagaatttgactgtgagcattatatcaaggccaacgacgattcccaattcattgaattgtatttcgtgttcgatatcgacgaggagacctacctggtggcaggcagagccatccagataatcgactgggaaaacacccaccaatactgcggccgctgcggcgccaaaaccgtcacttccgatatcgaaatggccaaggtgtgtcccgaatgtgggtttactagctttacacgtatttgtcctgccattatcacgtccatcatcaaaaaggacgagagtgagctggaccaggagggacggcctatcaataaggtgctcatggcaagacactcatatcacacagctccccggtatgctctgattgcagggtttctggaggctggagagagcgtcgaggaagcggtgaagagggaggtcatggaagaggtaggcattgaggtgaaggacattgaatactttggaagccagtcctggccatttccaaacagtctcatgatcggttgcatatgcaagtacaagagcggtgagatcaaggtcgatgaaaacgagatcctcaaggcgaagtggttcaaaaaagaagacatcgagcgcccggcctcggagatctctatattctcaaaattactcaagaatttcattgagaactactga

SEQ ID NO: 3920 - DNA, 615 bp, synthetic construct
  source 1..615: mol_type = other DNA
atggaacttatagccaagaacattagcttcaagtacccctcagcgaaggactacctcctgaaggacgtgagtatcgagctagacaacaagaagattgtcgggttgattggcgacagcggaagcggcaagtcaactctgtgtaagatcttatccgggtatatcactaagtatgagggtgaagttacctttgacgggcagcccttccataaaaaaggatttaaaccggttcagctcatttaccagcacccagaaaaggtgatgaaccctaaatggaaaatggaccaggtgctgtctgagtcctgggatgtggatgacgccacactgtctgagtttggcatccagaagtcctggctcaccagattcccacaggagctgagcggtggagaacttcaacgcttttcggtggtcaggtccctgaatcccaatacaaagttcctaatagcagatgagatgaccaccatgctcgacgcaatcacacaggcccaaatcattgatagcgtgttgaaaatcgtcaaggagcggaaaatgggcttcctgctggtaagtcacgatatggacctggtggaaacggtctgcgacgagaaaatctacttcaaagatctcaacaaggcttga

SEQ ID NO: 3921 - DNA, 1341 bp, synthetic construct
  source 1..1341: mol_type = other DNA
atggataagctgcttgatgtggaaaatgtgtccatcagtttcatacagtacacaaagggcctgaaccaaagggatctgaaagtcattaccgatttgaccctggatatctctgaaggggaaatcttagccgtcctgggttcaagcgggtctggcaaaagtttgctcgcccatgccatatttggaattttgccggaaaacgcacggctgaacggcaaaatcaaatttaaaggcaaggagctttctcaagccgataaggaggagatccgcggtaaaggaatagtgctggtgccccagtccgtgaacttcctggaccccttaatgaagatatcagacatcgcaatcgggcactgtgacagcgaggaggagaaaaaggagaagaaaatcaagcagagagagatcttcgaacattataatctcggtcctgaggtggatgagatgtaccccttccagctgtccggaggcatggccaggagagttctagtgagcacagcacttctggcagacccggacctcgttgtagcggacgagccaacccctggcctggacgagaagactgtggaagagacgttgaatcactttaagcacatgaaagatgatggcatcggcgtgcttctgataacccacgacattcatgctgcactggaggttgccgacaggatcggaatcttctactcaggctatgtcattgagatcgccctgaaggaggacttcagcggagatggggagaacctactccacccatatacaaaggccctctacaaggccctccccgcaaacggattcgaggtcatcaagggacatcagccactgcacggggagatcgtcaaaggctgcccctactatgaccgatgtgactggcgttttgaccgctgcaaggaagagcggcctgaactgatggacattgggctcaagaagattcggtgctttaaatacgacggagtcaccgaagacatgattaaggacggggctattgaggagactgctgaggccaatatcgaggacgcggccaatgaagtcgttgaaaaagctgctgaactcgtggatgagtccaacattgaagagagcgctgaggcggtggaaggggctgaagaggctgttagtgaaacggaggatgccattgaggaggaagtagccgaggctgtggagggtgcggaagaagctgtagagggcgcggaagaggcagtggaggtcccagaagaagccgtcgaggaaggcactgaggaggccgtggaggagtcttccgaggaagccgtggaggaatcgtcggaggaagccgtggaggaatccagcgaagagacagtggaggaaagtagcgaggaggcagtagaagaaggtgcctga

SEQ ID NO: 3922 - DNA, 507 bp, synthetic construct
  source 1..507: mol_type = other DNA
atggacatcaagatcaaggaaatcgaaaacgatgagagtcaaatcaagagcgtgcaggagttcttgtacgctcagatcaaaatagagtacggcattgggccaatgcctgagttccactatgatattgacggcctcaaggactactacatactgccgaagaggaatgccttcttcgccgcttacgacggggacaagatagtggcgacagcaggcgtgagggcctatgataaggattatgagttttttaaaggtcagtacaatgaagagaacacagccagcatttggagactgatggtcgacgagcagtatcggcgaaatggacttgcacgcattctcgttaaaaaaatcgaggagtttgccaaggaggaaggatataaagaaatttatctaaacacccatcggtacctggaggcggctctgcccttctggaactccctggggtacaccgtcacgatcgaggaagatgactacgacgaaactaaccacatgatcaaggtactcgtgtga

SEQ ID NO: 3923 - DNA, 855 bp, synthetic construct
  source 1..855: mol_type = other DNA
atgattaagaaaaaaactaatgataaggagcagtggtttatctaccgggccaacctgcgaaccaagaccctggtgattattggccttgccgcattgattatcatcagcattttcgtgtgcggatatttcatcagggacatccccacaaattttgcttccgcgaaccagatgccttccctggaacacctgttcggcacggattggatgggccgggacatgttccagagaaccatcgccgggctgggcctgagcattatggttggtttcatcgcgtcagttctcagtaccatcatttcaattgtcttgggattgttcagcagctttaataagtttgcagacgaggccgtggctggcatcatcgacctgttcgggtccattccacacatcctgctcatcattatcgtgagcataatgtttggtggcggagtctggggggtgatcatgggcgtcgggctgacacactggacaccactggctcgcgtgctacgctctgaagtcaaagagattaagaccaaggaatacatcgccctgtctgagaaccttgggaggaacaaagtgtggatagctataaaacacatctttcccctcatcatcagtcaaataattgtaggcgtaatcctcatgttccctcatgcaatcatgcatgaggcagccatcactttcttaggattcgggctgccaccccatgagccggccattggagtgatattagcggaaagcatgcactatctttcggctggctactggtggctggccttctaccccggtctctccttgctgatagtggtcctgctatttgatcttatcggagagaacgttgaaaagctcctcaaccctgagacggcccagagttga

SEQ ID NO: 3924 - DNA, 990 bp, synthetic construct
  source 1..990: mol_type = other DNA
atgaacaaacagaagatcgccaaatattttggctggaaattggtgcgttttgtcgtgctaatgatcgcagttgccatctttagttttgtactcctggatctctcccccattgacccagtgaatgcgtatctgaaaggcgccgctgtaacggaagcccaaagagcaattctgcagcagtacttcggtaccaacgttccactgcctgagaagattttccattggctgatggacctgctgcagggcaatctgggaacttccttgatctaccggcgccctgtgatggatgtgatcattgacaagttcatggcgtcactggccctgatgacaatctcctggatcttgagcgggatcatcgggtttgctctcggcgttgtggccgggaaaaacaaagggtcctggattgataaggctgtgaaggtctactgctacgccatccaaagcgctccatccttttgggtgggtatgctgatatcgatggtcttcagcgtgtacctgggatggttcccaataggattcggagtgcctatcggcgtaaggagtacggatgctaccttcattgagtgggccaccaggctggtgcttcccaccctgacactcagccttgtcgggcttgcccccattgctatgtatacccgaaatgaactcgttcaggtcctatcttctgactatgtcctctttgccaagagccgcggggaaaagggctgggcactgataaaggatcacggcctgcggaacattatgctgccggccatcacacttcaattcttatcattcagtgagctcttcggaggggctgtcatggtggaacaggttttctcataccccggcatcggccagactgcagtggcagcgggtttgcagaacgacgtgcccctatttttaggaatcgtggtcataagcgccatctttgtattcgtgggtaacctcctcgcagacattagctattacttcatcgacccgagaataaaggagaacgagttcaatgactga

SEQ ID NO: 3925 - DNA, 1620 bp, synthetic construct
  source 1..1620: mol_type = other DNA
atggataagaaaacaatcattatagcggctgtggccattctcgtgattgcgggcattgccgtgttcgcctttggcggcggcggcagcagcgatagcgatccgacccatctgacagtcgctacacacagcaatatggcagagcccgaggcagggttcaacccgcttacggggtgggggtgcggacacatgaactataacccattggtccagagctgcctctttaagacagacaagaatggagacatagtcccagacctcgccaccaactactcaattagtgccgacgggctgaaatggactgtgaaggtccgagatgacgtcaaattctcagataactccacgtttgacgccaaagacgtggcatttacattcaatactgcaaaggacactgagacggatctggatctgaccaatctgaagaaggtgacagccaaggatgacaagactgtcgtgtttgaattggaagaaccacgcagtacattcatctatgacctgcggtatgtagggatcgtgcctgaagagtatgacaacgccacctacggcgagcaccccatcgggaccggaccttacgtcctggaccactgggataagggtcagcaagcgatctttaaggctaatgacaactggtatggggacaaaccttacttcactcagatcaccatgcttttccccgaagaagccacctggctagagctggctaagagtggtcaagtggacattgcccctgtggccacctctgccctcaacgaatctgttgacggatacaactttgtggaaaagtccgcaggaagggcacaaggtatctccctgccctatctggaggacactggaaaaaccagcccagcaggtgctaagatcgggaacaatgtgacggctgacaagtccatccgcgaggcattgaacataggtgtcaaccgggataagatctgtgaggaggtcttcagcgggcatgcctcacctgagtataccagcgtggataccagaagctttgccaaccccaatgcgaaggtgaaagatggcgatgttgcaaaagccaagcagatcctcaaagagggaggatgggaagacacagacggggacggaatcgtggagaaagatggcgttaaggcttccttcgacctttactacccacctgattacctggacagacagtctctggccacagtatttgctgagcaggcgaaagacttaggcattcaagtaaacctccagggtgccgactgggataccatctacgctaacatgtactcgtcggcctctgtgatgcagcagaccagtccggacccctataaatccatctaccagcagtatcatagtaaggaggctgatgacttctacatgaaccccaacctgtataacaatactgcgagcgatatgctgatggaacaggcaatgcactccaatgacttcaagctagccgactccttatgggctcagagcgccctggtgaatggcggcggctggggccccgctggagatgccccatgggtatggcttgctaactacaactacaattacttcgtgaaagaggatattgatatgggcgaccagcccgacgggctcggcaatgacttcttgataaatgttgttgattggacgaggaccaattcaactgcctga

SEQ ID NO: 3926 - DNA, 693 bp, synthetic construct
  source 1..693: mol_type = other DNA
atgtccttaagcatcgaactggaaaaatacctgaaaggcaacggcgcaattgaagtaggctacgccgacatcaccaatttcactccaaagaaaggtttgaacacaggcgtggtctttttcatcacctaccccaaggaagtgatccgaaacatggccaatgctccaacgctcgagtacctttatgaattgattgacctaaacaccaggctggatgccctgggaatgatctgtgaggagttcctaatcaacaaaggatataaggcctatgcacagacaaaaaagcgcctcggggggaactttggtgagttcaattcgtttgagctcccccacaagaccatagctaccagggcgggcatggggtggattggcaagtcagctctcttcaccacgttcaagtacggcagtgctctgagactgtgcagcgtgctgacagacgccccgctggagatcggagagcccataattaagtcccgctgcggaaagtgcatgatctgtaaggaggcatgtcctgggggggccataagcggaagaaactgggactacactctcaaacggaatgatttttacgacgataagaagtgcgagaagtatgcgcttatcgtcagcgaagagaatctgggtaaacctgatacagtttgtggcaaatgcatttatgcctgcccacatactcagaagtacgtgaaacggacgtga

SEQ ID NO: 3927 - DNA, 561 bp, synthetic construct
  source 1..561: mol_type = other DNA
atgaacgtgaatatcaaagagctaggaaacgacccggaggagataaaaaacgttcagaactttctgttccacatgatcaagctggagtttggctatgattatgtccctgagtggcatcaggacattgtgaacatggaggactattacattaatccagaacgcaatgcattcttcgtggcttacagtgagagcggggaaatcatcgccacaataggtctgagggcttacgataagaatttcgaaaaatttgaaggcatatactccaatgacaccacctccagcatctggcgcctgttcgtcgacaggcgatacagaagatgcgggttggcctcgaagatgttcagcgtagccgaaaacttcgccaaggaccgggactataaaaacatttacttgcacactcaccggacattagagggggcgctgcagttttggatgaagatgggctttatcatcaccctcgatgaaggagatgagcttgagacggtgcatatggaaaaattcatccaaaagctcaagatttcaccccaggcaggcatcctcacttacgccattaagctgtga

SEQ ID NO: 3928 - DNA, 726 bp, synthetic construct
  source 1..726: mol_type = other DNA
atgctgacgtttattcaaatggagttcctgaaattaaaacgctcgaagatattcttactgagcgttctgatggcagtgctgcccgccctgctgatgtacatagccacatttgcgttcgatgaggtccaggcctttgacgcgctcttcaccaatgtcaacatgtacatgtctgtattgtttgcggttcttatcttcgcaatcatcatggcatatctcttcggccgggaatacaacgagcacaccctgaagatgatgctgaccatcccaatttccaggggtaagttcctgatgtccaagtacctcatgttcctgatttggattttgatcctcaccgtgattacaagcctaagtaccatgatcttcggttttgctgccgggctcagcgggtttacggtaaacctgctcatcaacagctttgcccagcttctatttgccaacctactgctctttctgacattctcaccgttcgtgttcatttcattgtttgtgacaaatatggtgcctgctatggttggcggcgccagtcttactctggtgaacatgcttgtgtacggacagacctgggctccatatgtcccatgggtctgcccctatctgatcgcctccggagagatcgcagaatatgggatcaatatgctcttgccttatggcctggtgttcgctactttcatagtgggaatcgtcatttcttacctttacttcactaaaaaggacgtgcccctctga

SEQ ID NO: 3929 - DNA, 1068 bp, synthetic construct
  source 1..1068: mol_type = other DNA
atgagtcagctcatcaactactacttcatcatcaaaggggatttcgtgactgattacgtgattgagacgacaaatctatcaaaaaagtactccaaaaaatatgtggtcgattctattgatatgcacgtggaacgagggaagatctatgggcttctcggcaaaaacggagccggcaagaccacgaccatgtgcatgttgttaaacctggtggctcccagtgatggagacatcctgctcttcggcatgaatccgaaggagcactccaaggaagtctactcaaacatcggatcgatcatagagactcccggcttctacgagaatctgactgcgtacgaaaatctggagatagtgtcgaaactgcgcggcaagtataacccactcatcattaagatggttcttgagatggtcaacttggaccatgagaagacgaagaaattcaaggactattccctggggatgaagcagcgtctgggaattgcagctgcaatcatgcacaaccccgagctgctcatcctggacgagcctataaacgggctcgacccattcgggatcaaggagattcgggacttgctgaaaaggctatcccgggagtacggcgttaccattctcattagcagccacatcttgagcgagattgaaaacatcgccgatgtcataggttttatggatgaaggctgtctgattgacgagataaccaaagaagagctgcatacccggctgaacaagtttgtagagtttgaggtgtcagacattgacctagcggttgaccttctcaaggacacaggttttgaggaaaacggggactttacattcgccagaaacatcggcaattacattgaagatatgaatagccttaaatccttcgagtccgatggttatgtgaatagtgaagatggcttcgaatctagcgaaaatgccatcggaggaaccatccacttactgaccaatcttgacctgcgcgaccaattcaacaagctgttcgtcagcagcggtatcgacgtgagaaaggtaaatctctgcgaagagaacctggaagagttttttacaaggatcgtgtctagtgcctga

SEQ ID NO: 3930 - DNA, 756 bp, synthetic construct
  source 1..756: mol_type = other DNA
atgaagaatgagaaaactgaaaacgaaaacaacaaaaatacgtcctcacccctcgtcaagtacctgttccagacccgctttttcctattcggactcactaaaaagtctaagacaataaaaaagatctttaacaaggtcttctttgaagacaatgaacttttcatcctgccgaataaaagcaccgtgaacaaatccaacaccaagatcacggccaacatcgaaattaaggagtcctttcagaaggacgactctgagtttctgccaagtgaaatcctgaaggaaataatcaaggaggctaacaatatctttattatgaacaaatgcatctgcaggagctctagcaactgcaaagactatccccacgacttcgggtgtatcttcctgggccctgctagcaagaaaatatcgtcaaagtacggcaaagcagccacagtggaggaagcactggagcacgttgatatggccgacaagctcgggttaagccatttgattggccggaataaattcgattccctcttgatgaacgtgggacccaaagaggagctgcttacaatttgtcactgctgtccttgctgctgcctctggaagatcattccagatctggatgatgagatcagcaataagatcaagagactagaggatgtggaagtaaatgccctggatgacaagtgtaagatgtgtaagaaatgtctggaggagaacgtgtgcattagtaacgcgataagtcttgaggacgacaagatcaccattgactga

SEQ ID NO: 3931 - DNA, 120 bp, synthetic construct
  source 1..120: mol_type = other DNA
gtggggtgtggccactgcgtgcaggcatgcaagttcgacgccatccggctgaactatagcaggaagagcgtagattccgtgattaaccgcatcgaggaactcgtcgactacaaaaattga

SEQ ID NO: 3932 - DNA, 741 bp, synthetic construct
  source 1..741: mol_type = other DNA
atgtcattccaagataataaaatgttaattatgcccgcggtagacattcggggtggaaaatgcgtccagctcgtgcagggaaagcctggaagcgagcaggtggtcatcgaaaacccagagaaggttgcgaaaaaatgggaagacgccggggctgaagtggtccacgtaatcgacctggacggggccctcgaaagtgtgaccaatattgagacaatcaaaaagatactgaatgaggtgtccgtgcccattcagctcggaggaggcatcagatcaatcgaatatgcagaggagctcctgaaccttgatattgatcgcttgatcatcggcactatggggataaagaacccagagatcatcagcaaactatctaacgagtacggcagcgagagggtgatgatctccctggacagcaaggacaataaggtggtcataaaaggctggcaggaaaagatcgacaagagtgccagtgaaatctccaaggagtttcaggagctgggagccgggtcgatcttgttcaccaacgttgatgtggagggcctgctgggcgggttctacgtcgaccccgtgatcgaccttgtggactctgtcgatattccggtggtctactctggcggcgtgaccagcctggatgacctcaaacagctgcagacaacgggtgccaagggggttgtaattggttccgcattgtacaaggataagataaagctagaggatgctctgaaatatcaaaacattgaatga

SEQ ID NO: 3933 - DNA, 453 bp, synthetic construct
  source 1..453: mol_type = other DNA
atgaaagtaatggccaccggggctttcgacatactccacccaggccacgggctgtatctcgaaaaggccaaagaattgggtggagaggatgcagtcctggccgtcgtgatagctcgggactccacagtgaaaaagaaaaaacgcatcccggtgattgatgagaaccaaagactggagatgatcaagtacctaaagcccgtggacgaggcttacattggccatgatggcgacatgttcgagatcgtggaggagatcaagcctgacattatcgcaatcggattcgaccagggccacgatgtcaacaagcttcaggaagagctggacaaaagggggataaaggccaaggcgatgcgggttgaagcccataggattgcggatctggacagcacgtgtaaaatcatcaagaagattcgaaatagcgactttgaagaggattacgtgaactgcgactga

SEQ ID NO: 3934 - DNA, 1017 bp, synthetic construct
  source 1..1017: mol_type = other DNA
atggtgagtatcgccattgtgggcggcagcggttacacaggaggggaactgatcaggattttaagcgctcaccctgaagcagagatagtggacattacctcccggcagtttgaagggacgcccgtccacaaggtccatccgcacatcagagggactgatctggtgtttcgcaacaagaaaccaagcgagctggatgcagacatcatctttacagcaacgcctcatggagcctctatgaagatcgtgcctgatctcattgaaaccggtgctaaggtcattgacctcagcggagactaccggttcaatgacatcgacgtttatgaaaaatggtatggcatcgaacatacctcggacctaaaaggcgtgttcggtctgccagagatccacagggaagagatcaagaaaaccacactccttgccaacccgggctgctttgtaacgggcgccatcctgtcaggataccccctgagtaaagcaaaactggccgagcgaatgattttcgattccaagactggagttagcggcgccggcgtaaatcccacaacttccacacactaccctaacattggggacaatgtgaacccctataaggtaacctcccacaggcatatgcctgagatccagcaggagctaggtgcgttctctgatgtgaagatatcattcactccacatcttgtgcccgtgatccgcgggatactgaccaccaatcactgtttcctcgttgacggtgctgacatcacatcggaggaggtgttggatatctataaggagacctacaagggagagcccttcatacagattcttgaggatggggagatcccacgtctcagcagcgtgagagggtccaattacgctcagatcggatgcttcgaaattgatgaaaccggccggctggtcatcatttcagccattgacaacctggtcaaaggggccagtggccaagcggtccacaacatgaacataatgtgcggctttgatgagaagactggcttggacttctttggaatgcacccatga

SEQ ID NO: 3935 - DNA, 489 bp, synthetic construct
  source 1..489: mol_type = other DNA
atgaaccgaatcatcctctactattcagaggggggaactactcagcaggtggcagagacactggcgattaacctacgttgtgacatctgccggatacgcgatttgaaaagtagggacggctacaaaaaccggttgttctcgaccttcgatgcattcagagaatccaagacagaaatctacccccctaggctggacctgagcgagtatgacaccatctacattggcacgcccatctgggccaacaatccaaccccggctatcattaccctcattgacaggtataatttccttggaaaggacgtggtcctctttacaacctccacgaactctgaaggcgagaacacatttaataagatggatatgaaactgcgcgctagaggggcccgggtagtgcaagaatttaatatcaagaccaaggacaagagcctggagatgattagcgaggatactgagaaggccataaaaaacttagatctggaactgtactga

SEQ ID NO: 3936 - DNA, 1158 bp, synthetic construct
  source 1..1158: mol_type = other DNA
atgttcgacaagattatggaaaatcataaagccctcattgccatacctatcatcctagccctgttaagtctggcgcttatctccttcaatggcatagaacagggagtggagcttaagggcggctcactcgctgaactgcagctgacagggagtacaagcgtcaatgacctggaaagtcaactgactaaagagctcaacaccaacaacatcaaagtgacaagcaacggcgagaacaaggttacagtcgagctggaaaataacgttaattcaagtacattttcaaaggccatcgatggcaaggccaaggtgatcagctacaacgagataggtccagtgctctctgaggaggcaatgggacagatttatatcgctatgctattcgcatttctgtttatggccgtgaccgttttcattgtgttccgggagcccgtacccagcgtcgcaatcatcctagccgccctgtgcgatattctcattgcgctgggcggtatgtccatcctgcacatacccttgtcaatcgcatctgtaggggccctgctcatgctgatcgggtacagtgtggatacagatattctcctcactacccgactgctcaaacgcagggaaggaaccgtggacgagagagctagaaacgcgatgcacaccgggttgaccatgtcctgtgcagctatcgctgcaatgggaattttgtacatcgtcactgtcatcatcatgccggaggccactaccttaagcaatatcagtgccgtgctggtgatcggactgattggcgacattctgtcaacctggcttatgaaccttggcatcttgaagacgtatattgactggcgtcagtctaagaagcaggacaagtttaatatagatgctccaaagtcgaacgagagcaagtccaagagcaaggaagaggatggcaagagcgagtccaaaagcttcaaggaccgcttcaaaaggtccaaggatgatgacagcaaagactctgaaagcgaggactcgtccaaagactctgaatcgaaggactcttccaacgacatagacagttcagaagaggagaagagctccggtaaggataagaaaagctccaagaagacgaaatccaataaaaaaggaaacaaacggaaaacgaaaaaaagcaagaagaaggggaaggggggtaaatga

SEQ ID NO: 3937 - DNA, 1224 bp, synthetic construct
  source 1..1224: mol_type = other DNA
atggctagtaacctgtccaaattcttcaaggatcgccaggtgatcatcctcattatctgcctcataatctcaatcataagcataagtttccttggagtcgagcaaggactggacctaaagggcggttcctccatccaattgcaactggagcatcctgttaacgactctacaatgaaagtggtcacctcggtcctggacaaaaggcttaacctatatggggtgaccgatgtgaaggtccgtagcagcggagatcagatggtcatagtggagatggcgggaaagagccccgaagaggtggagcggctgattgggaaccccgggatcttcgaagctaaaattgacaacaagacagtgctagtgggcagtgacgttgctacggtagacgctccggtggttggcgagtccggcgaatggcaggtgccctttaccttaactacagaaggcgctaagaaatttgcagagcttgccaagggcaaaggcggacatgaagtggtaatgtatctcgacggcaagcagatagatgatcaccctcccgccctggctgaagagttggccagcggagaggctgtaactgaagtgcaggtgacagggggcgccgaagatgttgagaccgcaaaagccgagtcaaatgaagtcttcaccgtgctgaagacaggttcacttccggtgaagatccacactgtaggctccaataccgtgtccccagagctgggtcagcagttcgcgcagggcgccctgattgcaggcctcctggcaatcctgggcatttcagcagttgtgtacatccggtaccgaagggccttcctcgctatccctatactcattaccaccctcagcgagattatcattatcctcggggtcgcgtcgataatccactggaacattgacctggcagcgattgccgggctgatcgcctctgtcggtactggggtggacgaccagatcatcattacggatgaggtgctgcaccacgacgatgaaaacaccaggcatagacgcacacgcacgcagatgaatgtgaagaatgctctgttcatcatctttgccagcgccgggaccctgatcgcagccatgttgccattagcctacgtcggatttgccagaggcagcagtggaatcgggactatcgccggatttgcattcacgacaatcatcggtgtcctgattggtgtcttcattacccggccagcctacgcgaagtttattgagttgtttgtttcttga

SEQ ID NO: 3938 - DNA, 1242 bp, synthetic construct
  source 1..1242: mol_type = other DNA
atggtgatcgtggtggggactggtgccgggggagcaatcattgccatgaagttggcaaaggcaaatattccagtcacaattattgaacgcggcccctatatcgccagcaaagacgcctacgaaacctatgacatgaaatattatgacaagcgatttgaaagcgagcagagtctcgacctgcttaagaccacctgcgtaggggggagcaccatagtggccgctggaaacggcgtgagggttctggaggaggagtttaaggacctgggcatagacctgagtaaggagtacgaaacaatcgaagagctaatcggcgtccaccaaatggatgacgaccacataggtgaggggactcggctatttttggaatctgcaaaggagtgcggattcgatgccatcaagatgccgaaattcatcagggatgaggactgcaagccttgcggcaaatgttccttcggctgtcctagagatgctaaatggagcggcaaggactttatcgacatagcaatcgagaacggggctgagctgattgagaacgccgaagtcacgaagatcctcacggcccacaaatccgccagcggtgtcgagtacatccaggatggccaggtgaagaccatcgaatccgacctggtgatcctggcggccggtgcgatcgacacagccgtcatcctgcagaagacgggaatcgacgctggaaacaagctcttctttgatcccttcataagcgttgggggagtcctgaaagacatcaaatacaacacagaggtacagatgaacggactggcaataggaaatgaatacatcctcgccccccatttctccagttttatttcaaaatatatcaaagaaacctaccccgaagtggaggataaggacattctctccattatggtgaaggtgcaagatgatatggtcgggtctgtagacattgatggcaatgttaagaaattcaatacaatcggcgacatacggcgtctcgggcagggtgctgcggctgccggctcaatcctgcagaaggccggggtcgatgctaccaccatgacttcaaccgtgttccgcggtgcccatccaggcggcactgccgctattggagaggtggttgataagaatctgaaaacagagatcgacggcttatacctcggagatgcaagcgtgattcctatctcgcccggcaagccaccgattttgcttatccttgctttagcggaaagactggcgaaccacctgattgaggaggtgatttga

SEQ ID NO: 3939 - DNA, 429 bp, synthetic construct
  source 1..429: mol_type = other DNA
atgtgggaaatggtttggccgattttgctcgtcatcttaagcaatacgatttacaacatctgtaccaaatcaaccccagggaatgtgaacgcctttggaacattgatgataacttatatcaccgcagccatcctgactgcgatcatctttgtctttctggtcaaacccgagaacgtgatggtggaacttagccacgtaaactggacctccgtggtgctgggcatagctatcgtgggactcgagctcgcctacattttcgccttccgggccggttggaaggtcagttccgcttctattgtggcaaacattggcctcgccatcgttctggtattcgtgggggcgattctatacggagagaacatcacactgaagcagctgggcggcatattcatctgcgcagtggggcttttcctgatcaatatgggttga

SEQ ID NO: 3940 - DNA, 462 bp, synthetic construct
  source 1..462: mol_type = other DNA
atgactaaggtcgagctgaaggtgaagccaatcgagaacggcactgtgattgaccatattcccgcaaataaggcgctccaggtgctcaagattctagggctgccaaagaaaggaaccaacgtgacactggccatgaatgtccactcccggttaggctacaaggatattgtcaaattcgagaatcgcgaactggcccacacggaaatagataagatcagccttatcgctcctgatgccaccatcaacatcatcagggactatgagatcgtatcaaaaaacaaggttcggaaggtgaacgagttgaatggtataatcaaatgcaccaaccccaaatgcatcagtaacaccgaagagcccctcgagacaaaattctacctggtggacagcaacccgattacagtgcgatgccactattgtgaaagactggttcaatacgacgagatatacaatcagtttgaatga

SEQ ID NO: 3941 - DNA, 6768 bp, synthetic construct
  source 1..6768: mol_type = other DNA
atgaaattaaataagttcttcattatcagcataatcctgattatatttctctcaattagtgcaataagtgctgagaatactgataacgctctctcaacagatacacactcgaatgacaacgtgctctccaccgattcacgatctaatgagaacgcgctcacaaacgagaacacactcctcaccgatacacacagcaatgagaatgccctcacaacagacccactcacaaaggagaacacacattcttataaggactcagaaaagtctctgtcatcggatgcttttaataagaccatttatgtgaataaaaccgggagcgatgagggagacggaagcgaagcaaatccttacgctacactcaagaagtccatctcacaactggacgactctgacaacgctgtcatctacatcggtcccggcaactacacaggtgaaaataactctgccctggagataaacctggaccataaggatcatgacggatcactgtccatcattggggactcgaatggaggcaccgttttcgatggggaaaacttaaatccaatcatcatatcgatcagtgaggattcaatcgtgaccctcattaatatcacattcactcacggcaaaaacaatatgggctctgccatccgaagttctgggaacctcacgattgacaattgcatcttcacggaaaactatgcaacaaatctggctgccctgtacgttgacaagcatagccctttaacagtgatgaactccaaatttctggaaaatagggccaaacagtgtgctgacatctatttttcgcagaactcagagataatcttactgaacaacctctttgaaggttcaactgcagagtattcctacgcctacagcccatccgtatccctgcagacaggaaagagtttagtcaaggggaatacttttaagaatctgacaggcgcttattataaaggtgctttgtatattgcctataacaatgggataaatatcgccaacatcactgataacacattcatcaactgtaattatacagggacagatggggcgatcctctttttccagaacgcctacttgaagaacaacaagttcattgactgccactcttccactgcctttctatactccaacactgagtttaatgcgtacctaagtttcgaagacgccgaaatcgatggcaccaccttctttcttaaagccaatgtgaccgacgacatgggcaataaagttaaaaatgccaaggtcatattttacttgaatggagagaatgtgggttctgctagttctgataataacggcgtagcaatgatcagcattaaaaagctcctggagaatggagaatatgtaatttccggtactcagtcatactctgagatcaacccctttggggtgaacgtgaaaaatgcgacggccagagttaattacgaccacagctctctggaggtgtgggtgtcaactgatggagatgatggctctggcaacggcagtgaagacaatccattcaagacgcttagaaaagcattggattacggcaccgcatctgctgtcaacctgactgtgcacgtgaagaacgggatttacaacggggatgacaatcgcgatctctcctattccacgctcggcaaaatcaccatcgtgggggagtcctactccaatgtggtgatcgatggagagaacatcacaaagagcatttttgctttctcttcgacccttgacgttacactgattaatctgaccttgatcaactgtccttccactctgataaacgcatacaccctgagcatgatggacaacattgtcatcaacagcggtaccatacgggcccagaccggtaacaatggggtgacaatcgataatctgcgggtaatcaacggtaccgatcaggccatcactggctataatctgagactgaccaattcccgctttgaaaattgtgatggtctcacgcacaccggtcttatctggctctccaccaataacaacaaggtcacctatctggagaacaacaccttctttaataataccatcgcagggtcggccggcggcggcgccgcgtactacatccagagtgaccttataagcatcaataacactttcgactcgaattggatcacggaaagtaggggagagaatgtggcttatgcagggggcagacacataatctccatcaatgacaaattcatcaacaacgaggtgcccaaatacgtggcccagtatcgaagcattggaaacgaagagtgtgagatcattgtggaaaacattactttcatcaacaacaaggcatctgggaacggtgcaggtctagcgaccacgggggccatcgtcaaaggagggaaattcatcaacaacagcgcctctggaaacggcggcgcgatttacctcctgaatcatgacaacacaagttcgtactgtcaaatgagcctggaagatgtcatttttgagaacaattccgccacgtgcggaaaggacattttcatcgaagggagttctggcaacaatatctttacctatctgaacaatctgacaatagtggccaatgatctgaacgtaacgagtctgtctgacaatcttaccgtcagcgtgtttcacccgtccggcgccataatcggaggaggggagatcagtttctatctggatggtgaatacattggcaagtccactctggtcaatcagaacgcaagtcttgagtatgtgggatttaaaaacaataccatttacgagtttacaagcatttacgaatacgcctctttgaacgacacttacattgacggcatagtttccaccaaaatcccttacgccctggagaacatcgaactgtatgtgtccgacggcagtggcgatgatgaaaacggaaacggcagcatcagcaacccatttaagtcaatctccaaggcattgagcgaaggataccaaaaatccacaaatattacagtgcatattctggagggcacttataccggaagtctgaacagcaatctccgaatccccacaacggtgaacatactgctgatcggcgagggggcggccaagaccataattagtgacagctcctcggactatttcattaccgccctgaagggcaagtgcgagctgcggatttcccagatgacattgaatagggcggcccgtgacacacagtcagccatctacattgaggaggaatccaatgtggccattgacaatgtcacattcatcggcggccaggggaactacggcggcgccatcaatactgcagggaacctgtccatccgcaactcatatttccatgacaatggatatgccgaccggactcttcgtgccaacgcctattacggaggggccatctgcaatgacggcaccctaatcattgacaacaccatcttcgaaagcgaccacgcaggcaggctaagtgaaattgcgaaccagggcacactgtacatgaacaactcaaaagtgattgacagcattaacgcgtatagcataaacatggatctggttgctatcggcgcttatggtggccaaaagggcgagattacaatagaaaactcccagttcattgtgagctccaagaccatcaatgaactgaatgacagaatctatgaccctacgagggcgttgacctgcttgggcattggttcgtgccaacatgcaatcctcatcaactccacattcatcggcgagggggctgtgttctccccttatgtatttggcggaatcaactcaaataaccttgctagtggagggtgtaccatgatccccggggaccttgaggtctacaattcaacatttcggaatgtccaggctgtgaacataatatactcacgcaccgacaatgtgcggtatcactcccagagggtgttcgaaggatgcctcttcgataacgtggagtatataatcgctgtgctgaataccggcaacttttcagtggagatgcacgactgcgtgattctgtcagatgaccttgctaaaatcggatttggaagtgaaaaaaccatgaagatggacatttccaacaactggtggtcctccaacgacgggagctacgacaacgccaccctcggaactaccaactacatttcaaattgtgtggtgaaactcaaggaaatcagttcagagactgttcaccccgagtcctatctgatcctaacgctcaattcaagcaatagaaccggtctgctacaggacgctatcctggcattcaaggcatacgacggcgaaaacatcagcgactacgatggagctctgtacccgcgaaatttcgaaatgtctgccattaatgccactttggatgacctggagggcacaattatcaacaaggccatcaatccctttgagggtgtggaaaacagcgggtattacattgaggccattgtagacaatcagaaggtcaacctgacagtccacgacagcctatctatcggcaacgcatacattcttgctgagaacatctcgatcaactacaacgagacacagataaatgtgacggtgctcgaggagaacggcaaacgggcggatgggggaaacgtttcgttgaaattgcatgataaaacctatatctccgagatcattaacggcactgccattttcgacatagatgtccttcctaaaggggactacctccttaattactccttaaatcgtcccaaggtttatcacagcatttccaactcatcgaacctcacggtgattccatttaagatcaacgcttacgccaacgccagcaatatcaaggtgggggaggatgccatcgtcattgcctatctcgacaaggatgccggaggcaacgtcacgttaggtgaggagatccagaaggtcaatgatgggactgccactttcatcatctccaatctcgccaagggggactacacgtaccagctcagttactccggagatgagaagtacgataatgaaaccttccacgtgtcgttctctgtgaacctgaaggacgctagcatcagcgtggagaatgacactttggacttgtttgtgggctccaacgagaccatcgttgccactatctctcctatcggacttgccgtaaattacagttgcagcaacgaatctgtggccatggttgatgagaatggtgtcgtcagtgcagttggtgcgggaatggctgtaattaccttgacggtcggtgatgacgtaacttatagcaaaaactctagctctgtcactgtcattgtcagtaaaatcccaaccatcattgagatcgtgaacgataccattagccttgaggtcacagacagccttgattccatcgcgagtctgaatccagaggagggaggcaaccttaactatgcaataagcgatgacttgatcgctaagatcgacaatggccagattactgcattaagtgaaggcagtgccattataaccgtgtcatttgacggcaacgacaagtacactaaagctcagaacaaaagcatcaagattatcgtgaatctgaaggaggccagcgtgagcgcattcagcaacattgacctgctggtgggtgagaatgataccctgtctccaaagacctcccctgaagggttagatgtgcgctacgaatctaacgatacctctgttgtgctggttgataacggccaggccatcgctgttggcgagggcaacgccaccatcacactgactgtcggcggcgatggagtctatgctgaaaacacgaccaccgtgaaagtcagcgtgagccggattgctaccatgattgaaatcgagaaagataccatcgagcttaaggtcaatgaggagtcccccatcggagctattctggagccggatgttggcaatctgacttactccataagtgatgagagcattgctaaagtggaaaacggcaagatcatcgctctggctgaagggaacgcaagcctatccatttcatttgctggggatgaacgctacatcggaaccaacgcgagtgtggagattcgcgtaaacaagatcaacacaatattgactgagacagacataaccaccacctacaaagaggagggctaccttatagcaacactgaaggacagccagaacaaccccattagcggggctgtactgactgtggacctggatgggatcaaaaactacacaacggactccaatgggcagatcaagatcgcgaccaacaatctgattcccgacacgtatacggccagaatcagcttcgccggcaacgagaactacagctcatctaacggaaacgcgagtgttaccgttaaaaggataggtaccaagctgaacttcaatgacatgaacacgaccgccttcgactccaatattgaagggcggatcggagaatacttctatttccaattagtggactgcgatgggaatcccctcgccaacaaaaaagttatcattggattcaatggagtcaagtacaataggcaaaccaacgaaacaggatgggcaaagattcagatcaacctgaagtacgccaactcttacacctttgcaattgcattcctcggggatgacaactacagcggttcattcaactttgccgtaatacgcgtgagccaacagaccccgaagttgactgcaagtagcaagacctacaagtcaagcgccaagaccaagacactgactgccacgctcaaatcctctagcgggaaagccattgccggtaaaaagataagcttcagactaaacggtaaagtctatacagccaacaccaactcgctgggggtggctactgtgaaggtctctctgaacaagaagggcacctacagctttacggcgcaattcagtggtgacagcacctataagaaggttactaagactgcaaagctcacgatcaaatga

SEQ ID NO: 3942 - DNA, 1371 bp, synthetic construct
  source 1..1371: mol_type = other DNA
atggaagagcacatcgacctctttaaatctatcttgaacaagatcgaggataaagtggattacgccgacattagggctggcactggcaacaacacaagtataaccatgaaagacaaccagattcaagacattaacacaggcctgtcaacggtggcccgaatcagagtgttaaacaatggggcttggggctttgcaacaaccaatgacttttccaaacttgaagagatcagcgaaaaagccatcaagatatccaactcactgaaaggggacatcacgcttgcagaatgcgacatcatcgaggatgctgtggctattgagcagaagataaagctctcggatgtgagcatcgaggagaaaaaggaaataatacaggatgccaacaaggccagcaacgtgggcaatgtaattagcaccaccgttcggtacggggatgccgagtcaaagactgcgttcctcagcagtgagggatcgtgcatcctaacagacaatgcacgcgtcagcctttcgctgaatgcagttgctagtaatggggagctgatccaattccatcacgactccctgggcggggtcaagggattcgaggtgttgaagaatgccgatatcgaatcctttggacggaaagtgggggaaaaggccactgaactgctcgatgccaagcccgctccatctggccgctttacaatcattgcggacaactccctgaccggcgtatttatccacgaggccgtaggccatgccgtcgaggcagaccttgtgctgcaggatgactccatcctgcatgaccagatgaataaaaagattggatctgatattgtgaacatctacgacgacagcagcaacaaggatgggttcggctattatccctacgacgtcgagggggttaaaaccagaaagaaccagatagtcaaggatggcgatctaatttcatacctctcctcccgcgaaagtgccggtaagctggacattccgctcacaggtaatgcgcgatcaagcatcagcgatcagcctattgtcaggatgagcaatacctacctccagccaggggacctgagcttcgatgagctgattgaggacattaaggacggaatctatctcaagggctcaaggggaggtcaagtggataccggaaaaggaatcttccagttcaatgcttccgaggcgtataagatagaaaacggagagttaaaggaccacttcagagacgtttccctgtctgggaacatcctggaaaccctgaaatgtgtggacgcaatcggctctgacttcaagttgagcgtggggttctgcggcaaaggtggacagacggcccccgtgggcgatggaggtcctcacactcggattttgaacgccatggtcggtggcagtagttga

SEQ ID NO: 3943 - DNA, 558 bp, synthetic construct
  source 1..558: mol_type = other DNA
atgctgtccgaggacgacggcaaataccttctggaactggccaaagacgccatcgaaacctatgtcaaagagcacgataaaatcgatgtgccttcagactgccccgagcacctccgggagaagctgggagttttcgtcaccctaaacaagaacaacaacctcaggggatgcattggctacccagagcctatcttcccattggttgaggccactattgagtctgcgatcagcgctgctgtaagagacccccggttccccgaagtgggggaaagcgagctggacagtctggaatatgagattaccgtgctcactaagccagagctgattgaagtggataagcccatagattacttggacaatataatcatcggcgaggatgggctgatcgtcgagaaaggattctaccgcggcttactactcccgcaggtggcacctgagcacaatatggacaaggaagaatttctttcccatacgtgtctcaaggcaggtctgcgaccggatacatggctgaataaggacacaaaggtgtttaagttccaagggcagatctttaaatga

SEQ ID NO: 3944 - DNA, 1056 bp, synthetic construct
  source 1..1056: mol_type = other DNA
atgatgctgcccactataccaacaccagatgagctgctcgataaaggctttcgccgcggaaagaaggcagccgacctgaggagaggagagaagatgcccaagcgcctgaaagggaagcgaattgaggagaccagagttatcacggcctgtcaggtaatcaaggaccggctgaaaatgattctggatcggactcctgaaattgaggagctgccggagttttatcaggattatatagacatcacagtaggggtggacgacttcaagcaagcgctcggtgccgtcaactgggcgtacggcatcatcacccagctcgaaaaggagtacggggccaagattaggaaagctccttccgagcgggccaccggtctccgaaagcaggcctacggccgtataagttctgtggtccataagattgagaaagacttggactttttggacttcgccaagcagagcctgcggaacatgcctaccgtcgacttcgatgcaataagcatcgtgattgcaggctttccgaatgtgggcaagtcaacattactaacccacatcacagacgctgagccccaagtggcaaactatcccttcaccaccaaaggcattcagattgggcatttcgaaaaacgctggcagcactatcaaatcatcgacacgcccgggcttctcgacaggcctattggcgacatgaatgatatcgagctaaatgctatggtggctcttgagcacctggctgatgcaatcctcttcatcttcgatgcatccgaaacatgcggatatgccctcgagaaccagtacaacctgctggaggaaatcaagaacgtctttgatgccccaatcatatacctgttcaataaaatggacatttcggactatgacggcgccaggcacgactacgttcaggagtacatcgacaagacggagaatccactgcttatcagcgccgcggaaggagaaggactggaagagatcattcagttaatccagcaggtggaaaaaagagagatagctgaagaagatgaggatgaatacgaagacgatgagaactactttgatttgacttga

SEQ ID NO: 3945 - DNA, 594 bp, synthetic construct
  source 1..594: mol_type = other DNA
atggccgaggatatgagcgagaatatcgaaaccaagtcagactttaaggacaaggcggaggagttcaaggcaaaggccgaggcccggactgaagccaacaaagaaaagtgggatgaaacctacaataaagggaaagacgtcgccggaaaagtgggcgagaacctttcgaagacgattgatgacacaatcattgcaatgaaggctatgcagaagaacttcgatgacaagtatcagtcctataaggagacaagcgcaaccaacaagatcagcgtggacctggcagaaacgaaggacttctactacttgcaggcgtacctagctggtgtagctaaagaagacatctcaatcgaagccaccgacagttccatctccatcaacgccgagctgaaaaatattctctgcagcattgaggaagatgaggaaaacccagctaacctgattatcactggagtgaaaactggcgttgctgagaggaccatcaaactcggcgccgaaatcgtcaaagaggagattagtgccaagcaagacaatgggatactgtttataaccatcccgaagaaggagatccccacaacaaaaattgatatagagtga

SEQ ID NO: 3946 - DNA, 204 bp, synthetic construct
  source 1..204: mol_type = other DNA
atggccatcccaaaggctcccgtgaataggatcattaaggacgcgggcgctgagcgggtcagcgccgaggccgtggatgcactggtagcatacctcgaagaagacgcagccgccatcagcaagaaggccatagagtatgcaaaaatcgctaaacgccagaccgtgaaggcggacgatatagccctggctattaaaaacgagtga

SEQ ID NO: 3947 - DNA, 672 bp, synthetic construct
  source 1..672: mol_type = other DNA
atggaattttacatcataaacggcgggccacggaagaaatacaacaccgcagagcttctgaaaaaggcctcagagggtattaaggatgagttgaaggacattgacgaggatgtgaacattcatcaaatccacctctacgacctgaacttcaagggctgcaaatcctgcttccactgcaagcgaattgggggcaagtactacgcgcagtgtccaattaaggatgaccttctggagctgctaccgaaggtgcagaatagtgacggaataatctttggcagccctatctactttggtgaaatcactggagagttaaggtcgttcctggagcggttcctcttcagcatactggtatatggaggggagagcaacgcccctaaaagaatgcccatggcaatgatctataccatgaacgtgacagaagaggggttcaatctgttctatggagataagtttgacatcttggaaaacgccatggcgaatctgatcagtaagccctactccctcaaggtctatgacacgttccagttctcagactattccaaatatgagaactacgcctttgatcccgaactcaaggccaaacgcaaagaagagcactttccaatcgatctagacaatgcttacaacctgggcaaaaaaattgctcaggacagcctgaagctcaatgaatga

SEQ ID NO: 3948 - DNA, 1011 bp, synthetic construct
  source 1..1011: mol_type = other DNA
atgagatataagatgtacgacgagatgatggagcagccggaggcgctcagacgcacatttgccagcgagagtgaaaacatggcaaacattagcaaaatcgctgggagcgtggagaccatctatctcatcggttgcggcagttccatctcgacatgttactccgtaagggatgcattggcctcggtcagtgacttacggatcgaagtgtttacaggttacgagtttgtttacaataaaaaactaaatgacggcgagaacagcctgttcatcgcgacgtcccagagcggggagactgcggataccttgacggccctgaagcgggcaaacgagttcaacattgatacagtgagcatttccaacgagcccgagagctccatgattaaggaagccaagtaccctatcgtaactctgggcaatactgaaaccgctattctgggaactaaaacctacataacccaactggcttgcctttaccagatactgttccccgcctcaggatatgaaaagacagacgagattatggagcagttagccaacatgcctgacctggtgcaggagctcctggaatcaacggaggaggacaataaaaacctggccgaagaactcaaggacgaagagggattctattgtctggggagcggcgtcaattacggcctggcctacaagctggctatgaccatgctcatggaaggagctataaagcatgcgtgcccactttatagcgcagaataccgccacggacttatcgaacgagccgaggaaggggtgcctttgatcttcctcgatgcagatctcgagtcagacgagctaaccaaacgtgccatcgctaacgccagggatgagctgaaggcaaattgcataatctacaacctcagggactatgctgacattaacccattgcttgcccccttcgtctttgtcgtgcccctggagtggtttgtgtactatctggcccacttcaatggcgaagatccagggagcacccggcacatcggcaaggttcgctattga

SEQ ID NO: 3949 - DNA, 546 bp, synthetic construct
  source 1..546: mol_type = other DNA
atgaacgtcgacctgagcaaggccagtatgaatgtggggcagcaatacgaagccattctcactaccattaacaatgaaggcaagacgaatgcagctccgttcggcgtgcgaatcatagaagaggacaaggtcatgctgaagatctttgagggtggaaacaccatcaaaaacataaaggataacggggaatttattgtaaacattacaaatgaccccatcatgttctcctacgccacaaccacttccatccccgatgagtatctgagtcggataaactacgacgaccatgagtttgcccacatcagcaacgcggacgcttatttcatctgtaaagtctattcgatcaaggaaggaatgcgcaaggataatatcaaagattccgaggcgaatgtgatcaaggcagatgtgcttgagctcaaaattaatagcccttgcgttaggccaatgaacaggggcatccacgccttgatggagtctctagtgaactactcaagaatcaacattgtggacaaagatacccaggacttcttctaccggaagatttga

SEQ ID NO: 3950 - DNA, 1371 bp, synthetic construct
  source 1..1371: mol_type = other DNA
ttgcaagaggccaacgaagacatagatctgatcgtaaaccacccaaaacaggcaattaacaagttagccctgccgatcattttcagcaacttcttcatggttttaaacaacatcatcgatggcatctgggttgcaggactgggatcaaattccctggcagccgtgggcttcgtaactcccctgttctttgccatggtcgggttcgcaaacggcctgggagcaggggccaacagcctcatctcacggtgcatcggtgctgaaaactaccagggggctggaaacagcgccatccattcgatgatgctgagcataattgtcacaatctttgcaacaatcgtccttttggtgttcttaaatcctctccttatgctgatgggcgccggggagatcatcgaggagactagcaactatggttacatcatccttgtgggcgcgtatagcatctttctgccggcaatgatggctgcgattttccggtccgaaggggaaatcaacagggcttcctatcctctgatgttgaatgccataatcaatatgatcctcgatcctatctttatctatgtccttggatggggcgtcaagggtgctgccttcgccactgtgctggctggaacctttgccacacttccaatggtctactggatgtttatcaaacaggacagtttcctcaaaatcaagctaagcgaatacaagaccaatctcaagatttacaaggacattctggtagtgggcatcccagcgagcattgagcaatttataatctcttttgtgtcgatcctaatgaattactggctaaccctcctggctggcaccctggctgttgccgcatacacggcgacgtggcgactggtgagtattggcgtcagccccatcattggtattggagtggccgcactgaccgttggcggtgctgcctacggggccaagaatttgaagaactttaagacggctttgaattacagtgcgattctcggaattattagctcaataatcatctgtagtattttctttgtgttcgccgagcagctctccttcatattctcctatagcgccgatagtgcaatcctcgctccccgcgttgtggacgccctgagaatcctgtgcttcttcattctcctgatgcccctgggggtcataagcggtaatctcttccaggccatgggaaaaggcaccatttccctggtgctcaccattttgaggtcattcattctagaggtgatatttgcgggcatatttgcctttgtgttcgactgggccgacatcgggatttatacaggcctggtgtgcggcatgatgtgtgggtccattgtgtcttatctttacataaactactacctgaaaaagcacgaggactattttatcgtgaaatga

SEQ ID NO: 3951 - DNA, 1875 bp, synthetic construct
  source 1..1875: mol_type = other DNA
atggatgagaaaactattgactacgagggaaacataatcacagtgagcgcagagggactggatgaggacatcgagatcggggatatcaccattacagatgccgaacccccagagggggacctagtcataacggccaggatcttggaagttgagataaaggaggtctaccctgcggaaattgtcatcgaaaacggtctttttaaggatgccattcccatcatcactgatgatgactcgctccttgatttagattacgacggggtgctaatcccaggcttcatagattcccattgccacatcgaaagttccaagctatccccctctaatttcgccaaggtggcattgacccacggaaccacgtccgtggtggcggaccctcacgagatagccaatgtgctggggatcgatggtgtaaggttcatgattgaagacggcaacaaagtgccctttgacttctattacggggctccctcctgtgttccagctactccattcgagagttcgggggccattattgacagcaaggacgtggctgagctgttgagccacgatgagattgttgccctgggggaaatgatgaatttcccaggtgtcctggctgaggatgaggaggtgatcgctaaaatcaaggcagcgcacgactttggaaagccaatcgacggccatgcccctctcctgtcaggagacgacctgaaaaagtatatctcatacgggatcagtacagaccacgaatgcagcaatttcgctgaagccgctgagaagaagcgggccggcatgaagatcatggtgcgtgaaggctcctctgccaaggatatggataaccttttcgacgccgatgagcgatttaactatatcatcgaggaagagatgagaggcaacatcatcgcagatagtactgacgaggctatggcagtgcccccattcgactttctcgtgtgtgatgatgtcgatgctcgcgacctcagcaaaggccacctgaataaattggtgaaaaaggcaattagcatgggaatcaatcctaaggaagcaattgccatggccaccttcaacccggccgagcattacggcctgaactgtggatcaattgacccgggcaagatcgcgaactttgtattggtcgatgacttgaaaaacctgaacatctccaaggtctgggttcatggggagctggtggttgacgacggcgaggttctcttcgatgtggaagctcctgagataatcaacaattttgacctggacgaagtcaagccttcggactttgacgcgacaatggaaatgggttatgtcagctctttaatggatgagaccaccaatgtgtttgtgatcgaagcttatgatggcgagctcatcacgggaaaactggaagagagcctccttataaaaaacaaggtaatccagcccgacattgataaggacattataaaaatcgcggtaatcaacagatacggcggtaacaacatcaccaacggattcataaaagggttcaacatcaaaaaaggggccatagccacaacagtttcacacgacagccataatattgtggcaattggcaccaatagcgaggaaatggcagacgccgtaaatctgattcgccagcaccaaggaggccttgccgtggtgtgcaaggaagatggcatccaggacattcttgacctcccgattgccggtctgatgtctgacaaggacgctgagtacgtggcctctaagctggtcgagctctttaacctggtccggggtctgggctgcacgctgacttcccccttcatgaccctgtcatttatggccctgctggtgattcccgcattcaagattagtgacttaggactcttcgactttgaaaaattcgatttcatcgacctcatccacaatatttga

SEQ ID NO: 3952 - DNA, 1218 bp, synthetic construct
  source 1..1218: mol_type = other DNA
atgtacaaaagagagatagagctgtccggccatatcattgatagcctgaccctgcctaaaaccatggacattatcatggacaacggtggcgacttcgacatactggaatttgacataggaaagcgtaaatcggacacgagtaaagctaagattatggtgagtgccgaatcccccgatatcctgaacagcatactggacgagcttaacttcattggagtgtctatctctgaaatcgaagaggttaacctggtcccttcgccaaaggataaagtcgctccggaaggcttttactcaacaagccatcatgttacgcacatttactacaaaggcaaatggattctggtggataaaatcgaaatggattgtctgatcgtcattgatgaagagaatgagaccgcatcctgcaaacccattgccgacctaaagaaaggcgacctcattgtggtggggcgggagggggtaaagatcacacctccccaacgcagtcgaggtaagcagggggtgttcgagttcatgaacagcgatgtgtcctccgagaagcccatgatgagcatcataaacgatgtggccactgaaatcaagaatgtcaaggcgaatggcggaaagatcgccctcgtcggcgggcccgcgatcgtccacacaggcagcgccccgatcgtggccaagctaatcaaagagggcattatcgatgtgatctttgctggcaatgcattggccacccacgacattgaatgcgaccagttcggaacttccttaggtgtgaagatagagaccggagaggtggtggcacacgggcacactcaccacatgagggccatcaacaggatcaataagtcaggctcaatcaaggcagcggtagaggatggaaccctgaagagtggcatcatgtatgaatgcatcaaaaacgacgtgccatttgtgcttgccgggtcaatccgggacgacggaccactccccgatgtgattacagacacggccgagagtcagaagctcatgcggcattatgctcaggaggttgacatggtcataatgatcagcacaatgctccattccattgcaactgggaacttgctccctagcagagtaaagagcatttgtgtagacatcaatccatctaccgtcacaaagcttgcagatcgcggaagcgctcaggttgtgggtattgtgaccgacgtcggggctttcttgccagttctgtataacgccctgcacgattga

SEQ ID NO: 3953 - DNA, 726 bp, synthetic construct
  source 1..726: mol_type = other DNA
atgtttatcggtctgctggccccggcgattgtgtctaccgttttcattatgctgtcgggctcagacctgttgaagaaggactttaagaacaaaatgatcggcttttacaaggtaaagtggctgaacgtgatctgggctgtgatcgtattcgccattgtgatagtctgttccattctcctaagtctgttgtttggacagcccatcgaccagttctccttcactgaaagcttctccttcaccggtgtgggcatcgccggcgcattcatcaccatcacacttgcttctataattgaggaagtggggtggaaagggtactgcgaggatagtatcgggaactacatgaactggttttgggaatccatgatttttggagtgctatggtctttctggcattttcctttaatctttattagcggaacctatcaagcagggctcatggtgaatcccctgtatgtgatcaacttctttgtcagcggcatcccaatgggatttgtcatcacgtgggtctatctcgaaagtgaccgctcaatcctggcctgcatgatattccacttcttcgttaatttcatgcaggagaaaatagcgctcactccagagacaaagtgcctggagacaattgtgataacggtggttgccatccttattgtcatggctaaaaaggatatgttcttcgagaccaggcacgtcggccggctgctcgagtacaatagcagccagcagcaatga

SEQ ID NO: 3954 - DNA, 615 bp, synthetic construct
  source 1..615: mol_type = other DNA
atgaaaaaaggcgaaaaaaggaaacaagagctattaaagatagcttatgatatgtttctgacaagaggatacgagaacacctccgttgacgaaatcatcgaaaaggcccagatcgccaagggcacctactactaccatttccagagcaaagagcagatgctcgaggaggtcattgatatgatgattgatagtgagatcgaaactgcaaagcagattatcggcatggacatctctgtcccacaaaaaatagtggggataattgcatcaatgaaacctaccgaagtggagcagcccattaaggacacgctgttccagccggagaatgtgctgatgcaccacaaggtccgcaagcagttgattgatgtgcttactccactgctgtccgaagttatccaagagggagtggacgaagggatcttcgaatgcgacaatatccccgaacgggtgaagatgctccttatcatctccgatggtacctttaacgagggcacattcagcgagcgagatatctcggtatttatagacatgacagagaagctgctgggagcggagaacggtacgatgagcttcatttatgacctcatcgacaagagtgagatggagggggcccagtga

SEQ ID NO: 3955 - DNA, 210 bp, synthetic construct
  source 1..210: mol_type = other DNA
atgggacttatcctctttttcctgtcatatttcctgctctttctgttcagccagatccaccactccttctacgacatcattattattgccagtcccatctgccatagcaaatctcaggggatatacttatacatgatgatgttcaaactgctactgaagaataagaacaggccaatagtggagaagctctttcgccggatcttgggctga

SEQ ID NO: 3956 - DNA, 975 bp, synthetic construct
  source 1..975: mol_type = other DNA
atgcttttcaatacctatgagccgggcaaattcgccttcagccacgaatctgtcgattactacgatcttattaactccgaggacaacctgaatggttcctccgacttcagcaagagtaagaagtggggcataatcggagtgccatttgacagcacctgctcttatcaccatgggtcccggtatgctcctacaatcatcagagaggccagctttggcctggaacagtacaacagcgagttcgacaagcttctggatggcgagttttatgactgcggggacctgaatgtggtgcatggaaactgcaaacgcacttgtgaaatcctggaggattcggtaaatgacctcattgaagccaacatcaagcctatcattatagggggagagcacagtgtcactctagggtcagttaatgccttatctgctctcgaagataaaaacaacctgaacgacatcaccgtcattcacttggatgcccaccgagacatcattgacgagtacatcggcgaaaagtactcacacgccaccatcatgaaacgcatctacgatctggagcccaaggaactgattcagataggaatcaggtccttctcggaggaggagagggatttcgtggaggataaggaaaacataatcagtttttacgcaaaggacattaagaatcagaatatccatctcaacgaagacgtgtccacattcgaggacttattgagcaaactggactcaatcgaaggtaaagtctacatctccattgatatggatgtgtttgacccctcagtggcgccatctgtgggcaacccaacgcccaacgggctgttcctggctgatgtacaagctatcttcgaggcactaagctttaatgaagagatagatattatcggcttcgacctcgtggagctcgcaagcgaccggttgggtgacattagtggagtcctggcagcgaaagttatttatgactttctgacactctttgcctga

SEQ ID NO: 3957 - DNA, 408 bp, synthetic construct
  source 1..408: mol_type = other DNA
atgtccacaaaagtggtggaacttaaaaccgtgaaggtcggaaagtacattgttctcgatggcgaggcctctaaagtcactagcctgacgacctcatccccggggaaacacggagctgccaaagcacgactcgaggcggtcgggattttcgacgggcagaagagaagtctggtgaagcctgtggacactaaggtggaggtacccatcctggataagagggtcggtcagattctcgctgtgatgggcgatcaagttcagatcatggacctggagagctatgaaaccttcgaactgccaatacccgcagagtttgaggacgagatccggggcgccgtgggtacagacttgggagtggaatacatcatagccctaggcaacatgaagatcatgcgcaccaagaaggtatga

SEQ ID NO: 3958 - DNA, 462 bp, synthetic construct
  source 1..462: mol_type = other DNA
atgcggatcgccattgtgtccgggaacgccgagggccctacggaattaaacgcgttcgacaatgccctatatgaggcaaagataggtgacgtgaacctcattaaggtaagtagcatgctcgaggctaatacaaagatagaaaaattgcccaagctgaaggcagggagcatggtgaactgcgtcctgtcaagcattgtttcctcgaatccgggcgagaacctcactgcctgtgtggctgttgccatcggcgacgagctggggtgcgcggtggaagtcgatggaatcgacaaagatccagaagaccttaaggatgaggccaccaagatggtcaaatacatgatggataaaaggaatgtaaagatcaacgagctgatcgtggaagaggctcatcacacagtgaaaaacattggatctgccatcgctgcagtcatctacattaccgacgacatcctggaggaatga

SEQ ID NO: 3959 - DNA, 1866 bp, synthetic construct
  source 1..1866: mol_type = other DNA
atgaatcaggacgatatacagatttgtaaagagatagccactacagttttcaaaaatgttgagaatctccttgatggccaggtgggaaacccaaaagcgggcgaatttgttaagataggcgcggacggaacccccactagtcatatcgacatcatagctgaggacgaggtaatcaaacttctcaaagacgctgattttgaaagttacctgatcagcgaggagatcggggaactacgactggggaaggggaaacagcagagcgtcagcctctcggaggaattgctgaacaacactccggagaacaagaaagaggaagaggaaattccgcgctacattttcttaatcgatcccctggacggaacaagcaatgctgttaaaaacatccccgcctacggaatgtccattgcagtggcaaatgttccaatcgggagggaggctacgctggaggacgtccaattgggcttcgtaaagaactactcaaacggtaacttttatgaagccgtcaaagggaatggagcaaaggaaaacggtcagcccctgactcccagcaaagaaaccgatataaccaaaatcaccttagggggattcacaaaaagcaagaccctctcggtgtccaaactcgtggacactgcaagaaggatgcgggtcctcggttctgtggtgctggaattggcctacattgcgaacgggaagtatgatgccttcctggacttgagggggagtcgaatcatcgatattgccgcatccaagctgattgtagaggaggccggcgcaatcgtcacaaataagtacggggaaaagctcaacaacagactcagcatctacgaaaaggccgtggtggtgagcgctggaaatgaagatctccacaagcaaatcatcaaaatcataaacaacgatgagttggacaaggtgacgagcgtggctatagtcagccgagtggatgagtataaatcagtcttattctcacttaaaatctttgaaacactgattgaaaagaatattgaaaccgtcctggagacctccctggctgaaaagcttgaggagataaaggaagacccagagttgcacaagatcattgctaagacaatgaacgagacccctgaaatcgcaatgcacattgaaagcctgaatttcaactacgagtttatggattatgccaagcagctgaatgaattgcggacagacattgcaatcattctaggcggtgacggaaccctcctgcgcacccagaaccaactgacgaaggagatccccatctttggcatcaatatgggcactgtcggtttcctgaccgagattgaagtggagaacaccttcaaggcccttgacgccatcctagatggggaatggtccaaggagaaaaggacgcagctgatcatatcccacgaaaacgagtctttccgtgcgctgaacgaggtcgtgataatgactgccagacctgcgaagatgctccattatgaggtgtcagtggacggggaggtggtagaggagctacgggctgacggactgatcatttccacccccagtggttcaacggcctacagtatgtctgccggcggccctattgtggaccctaaagtgggagccttcatcatcattccaatctgcccatacaagcttggcgtccgcccttttgtagtgtccgatacaagtgagattcggatcaagctgctgagacagggcaagaaggccatctttgtcatggacggccagattcagaaagaggtgaactatctggaggagcttgtgatcaagaagtcggaaaaagacgtttactttatgcggatcaataagaagtacttctataagaaggtgaaggataaactgaatgagggcggcctggagtccattaatcgcgttctctga

SEQ ID NO: 3960 - DNA, 1635 bp, synthetic construct
  source 1..1635: mol_type = other DNA
atgaacgtctttttagtggatctgacccatggaggcgtaaagatatcctctgagctgtcgaaatccaagaggttcgaaaaggtctttgcctacgacctgtacagcacactgaaagaggaagacgagcacctgttaaagacctatgatgtgaccatcctgaaggacttcgacagctttaaagaggaactcaaggagaacagcaaagagctgctgaaatcagagaaggagaaagaaaataattctaaagacctgatcatcaaccctattcactcttcactgaacattaaggacctgctgaaccagatcacggaagagattaaccctaacaatgatttaacccatctctacgagattattaaccaccaccaggctacaaagctggtgctcgagaactggaaggaagagactaagaaacatgacattaaaactatcgaaataactggagtgaagggtaagacgagtaccgccttcctcctaaaagagatcttcctggaaaataatcaaaacaccctcctcctctccagtctgggcgcatacttgttccggaaaaaccaggacaaagaaatggagctgattctccagaagaatatcagcatcacccctgccaacattataaacacaatccagctcgcaaaaaagatagcaaacccaaagtgcagttatttccccaaatgtgctgccaacaaaaacaagcaggaggagaacgaactgtttgaagagtacaacaacaacccataccacaatctcaactatgatattgccatttttgagaactcgctgggggtgtgtggcctgggcgacattggaatactgacaaatcttgtggagaattatccaatcgccaaggggtcctccaatgctatggaagcgaagaggcaggtattcgattgcagcctggtcatcattgaatatgaaactttgaacgagttctacaagggggagagcgaggagtacaaggacaagatcaatagcttctccctcaacaacaacaaggccaatgtcttctgtaagaatatcgactttgatatcgacaatactcaaatcaagatcacataccaagatttcaaaacacggaataagaataccatcaacggagaatttactcttaattgcttcgcacccggcccccatcacgttctgaatatccttacagctgtctcaacggcgttggccttggagatagacgagaagaccattattgctggaatctctaaattcaacggcatcgatgggagaacccaggtgaagactgtggaaaatagcatcatcattgaggaaatcaacccgggcattaacaccaaagccatcgaaagctcaataaatatgatcaaagacatcgacaactactatatcattatcggcggtaaatatggggttacctgcgaagaaatagatgaggagaagctatccaattacttgaacaattaccttacagataaccccaacaccaagctcatcctaacggacgaagtgggtaagagtcttaaagagaaactagacctgttgaatgataaggacgagtacgagataatgtttattgagaattatgaagaggcgcgcgatcttgccatcaacgagaacaagaatatcctgtttatttaccgctccaactatagtcaggtttctaagcgatga

SEQ ID NO: 3961 - DNA, 870 bp, synthetic construct
  source 1..870: mol_type = other DNA
atgattgttggcactcggggcagtaaactggccctggtgcagacagattacattaggcagtgtctgtacaatatcaccggagaagaagtggagaagaatatcataaagacaaaaggggacaagattacaaactcccagctgtataacatggacagtaaaggcttatttactcgggaactggacaacgctctgctcgatgaggaagtcgactttgcagtgcacagtctaaaggatgtgcctacggaattgaacgaggacttggagatcgtagctgtccccataagggaaagccccaacgaggtgcttattagcaactacagctggagcgagctggaagagggctccacgctgggtacgtcgtcacttagaagggaggccttctgcaaacaccataacaaggacttcgagctgaagccgatccgcggcaatgtagaaacccggatcgaaaaggtcatggacgggcaggtggatgcgactatcatggccgaagccggtctcaatcgtctgggcctgcagaaatacataaaggccaagtttccaaccgattatatcatgccagcagcagggcaaggcgccttagcggtgatgacccgaaaagactcagagcacaaggagacaatcagaaagctaaatcactatttctcccatcaggaggtcctcgctgagaagaccatcctcgaagagattggagtgggctgccagtggcccattggagccatatctggaattaaaaacaaccagttggaactcaaatccatcctccttgataagaatggagagatcctgtaccaaaaaaccctgagcgggagcatccgcgaggctaaggagatgggggttcaaatcggtaaggagatgattgagttcatctga

SEQ ID NO: 3962 - DNA, 948 bp, synthetic construct
  source 1..948: mol_type = other DNA
ctgaggacgatcaatgtgggcgttataggcgtgggagcaatgggctataaccatgcccgagtttactccaaactggaaaatgccaacctggtggcggtggctgacgtagtcaagcccaccctggataaggtctgcaaaaagtacaacacaaaggggtactctgagatcgaagacctgctaaaaaaccccgaaattgaagctgtgagcgtgtgtgtgcctaccactttccatcacgaggttgttatgcaggccataaaatacggtaagcacgtgttagttgagaagccaattgccttcaccgctgaagaagcccaggaaatgattgatgccgccaaggaagcgggcgtaaagctcgccaccggccacgtggagcgcttcaatcctgcggtgcagaaagccaaggagctgattaaaaacgaagtgattggggacctcgtcgcaatctcagccaaaagggtggggcccttcccaccccggataaaggatgtaggcgtggccatcgaccttgcaatccacgacttggatgtgatgaacttcctaattgaagagcctgtcaaacaggtctacgctacaatgagtagtagattggatcagtctgactttgaggaccatgcagaaatcatggtcagctttgaggaggacattacaggcatccttgaggtgaactggctgaccccctataagcgcagacaaatcgagattaccggaacggatggaataatcacagtagattatatcgaccagtccattgaagtctacgggaagtttgctcaggacatccaaatcaagccggtcgagccgctcagcgaggagctgaactcgttcctcactaagatcggaaatgatgagactccagagatcaccggggaggacggtctgaaagcactgaagatggtgctcgcagctaacaaatcctcaaaggagcacagcccaatcaattttcggtga

SEQ ID NO: 3963 - DNA, 615 bp, synthetic construct
  source 1..615: mol_type = other DNA
atgaatcaagagctcattaaccgggcccaggaactgcgaaaccacggctttaccacgggggagatagcggatgagcttaatgtttccatggatactgcgagatggctgactctgcagaaaacagaagagcctgtggagacagaagctccggtagacattgcaatcaactggaacagcttaggcggaagcgcaacccgcctccggtacgtgtcagctgcccttagtgacattgccttgaagcatggtgacattgacctggtggtcggcatcgccacgtcgggcatccccttcgccacaatcatggccgatgtcattgaagagctaaccgggacaactacctgcgtctctatattccaccccaagaaacaccgcaccaatccaaccaacagcgacgagggcgcaataagcagcaacttcggaactgtggaagggaaaaggatcgttgtggtggatgacgtcaccacctccggtgacacaatcaaggatgtcatcaaagtggtgaaggatcatggcgggaatcccatcgtagtgacggttctgattgacaagtccggactggaagaggtggacggagtcccaatcgagtcactcatcaaggtgagtcagctgaggtga

SEQ ID NO: 3964 - DNA, 807 bp, synthetic construct
  source 1..807: mol_type = other DNA
atggagtttaacatcgtcaaagagctgaacggtcaattcgacccaattgtgctaatcaaaacggatgagaagccagaagatgcgctggcccccaagcctgggagaggaggctgtgtgatgtccttcgtggcccagtccattgcaaagcgaaaggtcaccgccttcggccgtgaaaacatcacctgcggaggggtttcagccgggttcggatggggcaccggcttcaagacagataaggacaaggagtttcaggccacttttctctctcttggccttgactccgcaaaggataaggacgctttccttgagcggttgagctacttgcccaagcccacgcaggagatgtttaaaaaaggagagaggatattcagcgactttgacactgcctatgaaaacatacagaatcgcccgttatacgatgagggcgagtatgtggtctttaagccaattgagctgctggaagagggggaaacaccagactcagtgatctttacagcaaacacaatggaactgtctgctatcctccagctgaatggtagtttccgggctgagagtgcgcacatcatgacccctcaggcttccgcctgccaggcgattggcgccttcacttttgaacaagaagactcggacaaccccatccctgtactgagccccctcgacttcgcagctcgcgcccatatgagaaggctcatcccggatgactacatgaatctgagcatgccttggaaactcttcctgaagctggaagagctaagtaaaaacagcgtgtttcagacccacttctgggatgatttcgggaataaatga

SEQ ID NO: 3965 - DNA, 1422 bp, synthetic construct
  source 1..1422: mol_type = other DNA
atgattgagaataacatctgtctgctgaccgacagttataagctcacccaccactacctccaccccaagggtacagagaaaatctactcctatctggagagccgaacgggtgctgagtttaacaagactattttttacggactgcaatacatccttaagaaatacctagaaggcaatgtggtgagcgaggagaaggtcctggaagcagagaggatcgtggacgcgcatattgcgcccggcatcttcaataccgatgattggatgtacattgcgcaggagctggatggaaagctcccagttaaaatcaaggcagtggctgaaggttcccctgtaaacgtaggcaacgtgttgatgaccgtggaaaatacagacaagcgggcctattggctgccaaactatcttgaatccctgcttcttcaggtctggtatccttcaaccattgcaacactctctgccgaggtgaaaaagctatgcaatttctatctggatgttaccggctcctcaaaggacaatctgaactttatgttgcatgacttcggctaccgtggagccagctcaaccgagagttcacgcctggctggatctgcccacctcttaagcttttcgggcacagacaccgtgccatccctggctatccccgtgaactactacaataccaatgagatccaaggatttagcgtgcaggctacagagcatagcgtcatgacagcaatggggcccgagggcgaaatggagcaggccatcaatgttgtccggaacgcccatgatggcattctatcgatcgtgattgacagctacaactataagaacttcttggagaacgcctgcatcaagggacacaagctgaacgaggaaatcaacgaatttctcaagagaactgaagggaacaagattgtcttcagaccggacagtggggagccgatctccacgacaattgactgcctggagataattgagaggggcttcgggacccacaatacggacaaaggctacaagatcttcaatgagaacatcggccttctctggggtgacgggttagactatcagaagatacgagacatcctgttcggaataaaagcccaagggtgggccgctgaaaacctcatcttcgggatggggggcggactgcacaccgcagtaaacagagacactcagcggaatgccttcaagtgttctgcccagctgcgcgatggtgagtggattgacatattcaaaaagcccttggacacgagcaaaaagtccaaaaaaggacgcttcaagctgataaggaacgataagtttgaatacagtactgtgccaatagagactgaaggcaaagatcagttgcggaccgtcttcaaagatggggaactcctgatcgatgatagctttgaagaaatcaaaaagaggacagagacttacaacatgtttcctattaaatga

SEQ ID NO: 3966 - DNA, 1374 bp, synthetic construct
  source 1..1374: mol_type = other DNA
atggaagagtccaaaaccagatttgaaggtgtggaaagtatcctcggagaccccaagaaggccatatggaaactgagcattccactgataattagcctcttcatcacaagcctctatagtgtcatcgatgccgtttgggtgtcctctcttggtgccgatgcattggcgggtgtgggcttcgtgagtccaatattcattgccctcatgggaattgggaatggtctgggagccggagctacctctgctatatccaaatacatcggagagggggataagaaaaagtcagacaacggggcagtgcacgccatcgtgatcaccgttattgtttcaatctttaccactttgctgttccttatattcctaagggatatcctgcttagcatgggggcatcaaacacgatagactacgccatggactatggagtcattctcgtcagtggctcgattctggtgattctatccaactcattgtacggggtcctgcgcggggagggagatggcaatcgcactatgtacgccatgctatttgccagcatcctgaatatgattctcgatcctatatttatttactatctgggcctgggagtgaagggcgcagcgatcgctacactcatttcccttctgtttgtaaaccttctcctgttctattggttttacattaaaaaggacacctacctgcggccatttctgagcaactacaggttcgataaggacatcacagtcgacatcctgaaggtcgggtttcccgccagcctggagctggtgaacaacgccctctttgccgcactgttctccttgctgttaacggtggtcgcatcaaccgacgctgtggcagtctactcgacaggatggagggttgttacaattgccacaactcccatgctggctgtaggcaccgctctgatcagtgtggtagctgccaattacggggctagaagatatgaggacattttattggcccatcgatattccatgaagatcgcggtgctcttcggcttcattgcagcgatcgtggtctacgtgtttgccccgcaaatcgtgagcatctttgcctacacgggcactagcatgcggcttagctcccagctgattgctttcctaagcgtgatcgtgatctatttccctacaatgggctatggtgtcaccagcacattcctcttccagggcactggcaacgggatcaccgcaatgttccagacgatcctgcgagaaaccgtatttacccttggtttcgcgatcatcctcgctgtggtgttaggctatggggagtacggcgcctggtggggcatcatcctgggagagctggttgtgaacactataaccatgttctgggccgactggcacgtcaaacgcttgatccggtctaataattga

SEQ ID NO: 3967 - DNA, 420 bp, synthetic construct
  source 1..420: mol_type = other DNA
atggaggagaacaattacatcgtcttcaaaaaacaatacggcaacatcaaacgccctagaaccaaggaagtgtccatcaaccagaacggagtcaagatttacgaaaaggatcagtcaatgattatcaacatagtgctgcccatcgaggacagcatgaaggtataccagttctttgaggaatttaacctaggtgaagacatacagtttaatatcagcaacacgggagacttcgagtgcgtgttccgaggcatttcttcggtcattgataaagacagctatagctccttcagtatcacagtgcaggagaagtatcaaaggccagatcagctccaggtggaagccgactgcaatcaggttgatgagtatgggaatccgatccagcaatgcataggctgtgggctgcaccgggacgagatttga

SEQ ID NO: 3968 - DNA, 939 bp, synthetic construct
  source 1..939: mol_type = other DNA
atgattgacgaaatttatgactactacgaaaaacgtctaagcacttccaatagcatcctcaagatgagaggaatcgacgaagaaataaacaaactgcccctggggattaatttagatatcgcaaacatccttagcacaatcgacatatacgactacgatgaaaagaaagccgccaaaaagatcaaggaagcttatgttgaggtcttcaaggaggggatttacttgggaattggctttggcaagatcctgaaattcaactacgcgaagtcgcaccctgagaactatgtggagtgcctcgaagaggattaccaacattttaccttctatgacttcaagattgaggtactcaagaagatcattccaccgataaaagttaagaaatttacgcaggagcggcaccccaaagagatcaactaccgaaacgagagcttcgaagacatccggtcatacacatgcataaatgtcgagacccagtgggaagacaaatttgactttgaggtgaacccagatgccaaggaaatggaagattatatccgccaaagggaggtgaaaagttatgaggataacgaggaacttaagaaatgtgtggatgacttgaagatgggtatccagaatatcctcttccagaagttcttcgaggctctcgaggtggatctggagaaggccgagaacgggtgcgaaaacaatctgcgctttgatgaggagaccgcaaaggacgtcttcatttcccccgtgttctccaatctggagggcgagtttaaaatccgggagctggtcaacaaatatctgattcacgtattcaatgaaggaaagatcatcggcctgctgaacggcataaagattgtgctagaggacatccagaatgacaggttggactacgaagagatgaacagtatgtcatctagagaaagctttctgtacattaaggagggtctttga

SEQ ID NO: 3969 - DNA, 846 bp, synthetic construct
  source 1..846: mol_type = other DNA
atgattaatgaaattgtgaacggctataaaaaccagcaaaaggtctacctgagttcgatcatcaaaaccctgaatctggatattcccgacgtgttaagcgtctatccaaaatcaaaccacgacctggataagatcttcaaagagatcaagctaatagacaaggacgagaacatcctggagccgctcgaggaattttacattgacaccctgaaaagaggtatcctgagctccattcccctgggcaagagcttcatggtaaagctccatagggatgatgaggaacacttcaacgaagttctcaggatgaacagcggactgttccttaattacgtgcccaaaatcagttccctggaggatttggagaaatgcactccaaaatatggggagcgcgactactataagatgaaggaggaggagcaggtcattgtgatcgtagaaggaatactacgatccttttgtgagtttacaacggacaacaaccttatggttgactaccacttcgaggaactctttgatgtgctggacattgacctcaagctggccaagaaacgttgcaataagcggatcaagctgggtaataaatccaagatcggcatcatctctgcaatctacaagaacaagaacggcaagttcagggtgactgacttggtcaaggagcactgccagacaatcttcgaggaggggatgcggctcggaatacggaatgggatcaaaattgtgatggacgatgtgcattcaaaaagaattgatcctgatgactttagcaccatggaattgaatgagcttagcgcctacttctataaggaaataaatgaagaattagaacagctcgctcgcaactgttga

SEQ ID NO: 3970 - DNA, 1224 bp, synthetic construct
  source 1..1224: mol_type = other DNA
atgcagaaagacaattctaaccagaacaatgatctgaagcaggggattagtgatagcaaccaagagaaggatttaaaccacaagaccaataactcgaatcaaaataaggacttcaacaacagaatcagcaattataatcaagaaatggggttcaaaaataaatccaataactctaaacaggaaaatgattcgaaaaacgatttggattccaacaagaacatcaaccctttcaagcagaaggacgatgacttcgacaaggccctggacaaaaactacctagaagagtacaacacccagtactactacagcattagccagtgcacttcattggacaatagctcacaggggcgtctggtgtccaacatcctcctcaacctgatagagagcctggaaaactatcttctcaagatagcgcggatcgattacattaacagttattttgactgggacttccatctgttaaacagcagctttgagaatgccttctgcatgccaggaggcaaggtgctcgtgtactccggcatactgtcaattgccgataatgaggaaaggatcgcatatatcctggctcacgagatggctcacgccttgcttaaccatccacgagattacattattgtgaaggataaagaatacaacaacgttcttctgttcaagccctttagtctgaatcaggagttcgaggctgaccgcctggcgatgatgatcctgaaatgggcagactacgacatcggcaacatcccgtcattctgccagttcctcaggggaaactataacaagtttaactatttttccacgcaccccctctccgacgaccggctgatgaatatggaaagtctgattgctgagatcaacaatctaaaggacgattgctttgcccctattatcaagaatgaccgctctaacgcccttatttatacaaagagatatgccggctctcagtacaatgacaaagacaatgagatcgaggataggccaaaggtcttttgcacaaactgcggatactatgaggactccgacgcagtcttctgtagcaattgcggtagtcgcatggacgataagtctcgatgtgacagatgcggggcactcatcgaccccggggatgtcttttgtaccaactgtggcaatgtgttggttgacgattacaaatgttttaactgtggccacaaaataaaacccggtgatgtgttctgcgtaaactgtggaatcaagctgatccggtga

SEQ ID NO: 3971 - DNA, 399 bp, synthetic construct
  source 1..399: mol_type = other DNA
atggcaacattctcgtcaatcgaagaggcgagggagttcttcaagggagataaatttgccaccaacatcggggttcagctggatgagcttgaagacgactcctgcgtatgcagcctggagctatgtgacgactttagaaacgcctatggtgctgtcatgggtggcgccatattcaccctgggcgatttcgcatttgcggtgctcagcaaccaattgcaccggcccactgtgggcctgcaggtgagcatcaattacctgagtggagccaaaggggaaaagctcattgctaaggctcattacaaaaagaacgggcgaactacgtccgtcatcaatgtggacattatcgatgacacaggccgcgagattgcccagtttgtgggcaccggatacaagatgtga

SEQ ID NO: 3972 - DNA, 1008 bp, synthetic construct
  source 1..1008: mol_type = other DNA
atgaaggacattttcgatgaatgccagttcggcgagttcaaactgaaaagccggatcatcaggactggcgggtgggaaagggacacagaagacggaggcttcttaaagccaaaagtctttgacaggtatgagaagatggcggggaatgaggtcggcctcattgtctctgaaatgtttgcactggacccgaaggaccgtttttacccctactgtgccaacatgaactataagggattcattaaagattacaaacaggtaacaaacctatcacaccactttgaggtgcctatcctcggccagctggccttcttcttttttgatgacggcaccaaccagaaagctgagcccaatgacatatcgctggaggggattcgcaagctccaggcagaggtggtgatggccgccaagaagttcagtttcgctggctttgatggaatccaaatcaacatggcccataacttctacctggctagattcatcaacccctacttcaaccagcggaccgatgattatgggggaagcactgaaaaacgaatgcggatagttgtagagatcataaagctgataaaaaagatggtcggatgtcatgtgagctttagaatcaacgccgtggacggtcgcaaagggggcatgacccttgatgaaagctttaagattgcaaagatccttgcggaggccggtgccgattctgtgcagatcaccgctcgcacaatctccttcaagtttggagagactggcgaccacgcattcctgtcctatgccgatcggatggccaaggaactggacatcccagtgattctcgggggcaccttgcgagacatgaaaacgatgaatgagatcttgaatgagacggacattgagtttctctcactagcaaagcctttcgtggcgcaacaagacttcctgagcgaatggaaggaaaacggtgacggagtttccagatgcagggcttgcaataattgttacggtaaaaaggagagtaattgcttccagtttggggatgagtga

SEQ ID NO: 3973 - DNA, 576 bp, synthetic construct
  source 1..576: mol_type = other DNA
atgctggaactagataaactcctggacatctttaacgctggggacacattggtcatggacgaggaggcgactgatgcttgcaattactatagtgccgaggcccagaagatcacttgtgaactgaactaccaatacaacgacttcgacaaacggagagaattgttctcaaaactcatcaaccaggagctggatgacgagtttcgggtcttcacacccttctttaccgatttcgggaaaaacattcacctgggaaagaatgtcttcatcaatgcaggatgcaagttccaggaccagggcggcatatatatcggagacgacgtgcttatcggccacaatgtggtgatggccaccttaaaccatgatgaaaatcctaacaatcgagctaacctcattgcagccccaatacgcattggcaacaaggtgtggataggtagcaatgccaccattctgcccggcgtgagcattggtgatggggccatcattgcagccgctgcagtggtgaccaaggatgtagaggagaactccatcgttgccggggtcccggcgaagtttatcaggaaggttaaaacggactga

SEQ ID NO: 3974 - DNA, 1404 bp, synthetic construct
  source 1..1404: mol_type = other DNA
gtggctggtttgaacctgattgacagtgtaatgtattaccctattctaattatcgttatggccattgcaggcctctactttacgtttaaaacacgtggagtccagatacggctgttcttagagtccataagaatcctcacggagcccccagacgaggaaggcagcatttcgtccctccaggccatgcttgtcagcaccgcgtcaagggtgggaaccggcaatatcatcggggtctccactgcactctgcctgggcggtcccggcgcctgcttctggatgtgggtgatgtgtatcatcggcgcatcatctgccttcatggaaagtaccctggctcagatttataaacgaaaggacaaggagggggtcttctacggggggcctgcatactacatagagcatgggctgcataaacacaaattggctctgctcttttgcgtgtttctcctcgccacctacgccgtgggattcaatatgctttgcagctttaaccttcagtcaacattcatggaataccccttctaccacccaagcatcacgccgatcatcattggtgccgtgctggccattatcacctgctactgcctgctgggagggggcaaacgcatcgtcagtgtcacaagcaccctggtaccggtgatgggagtgtcctacgtcatcatatgtttgattgtgatccttttcaacatccaaaacgtgccagtgatgtttctgttaatctttcgcgatgcatttgatttccagagcatcctgggcggggttgcaggaagttgtatggtttatgggatcaaaagaggattgtactccaatgaggccggtgtgggttcagcccctaacgctagcgcgtctgcagacgtgtcccaccccgctaaacagggcctggctcagacactctctgtatatattgacaccctccttctttgtaccgcctctgccctgatgtgcctgtccactggagtggtaagggacgcggcggtttccggtgctccatatgtccaaaacgccatcagctctgtgttcggatggatcggccctatattcattacagttgctatgatcctgttcgcatttacaagcctgatcggcaacctgtactataccaataatgtcttaatgttcatgaacaacgagaagatgccttcgaagcggttcgtgcacatatttcacattgcctgctcactgattatcttcattggcgcaatcattcccatggatgccgcctgggctatggccgacattactatggggggcatgactttgatcaacctgcccgtgtgtctgctcttgagcaaggccgcgatagattgtctcaaggactatgagcggcagaagaagatggggctgaagccagtgtttaaggctagttcgatcggcctaaatgaagaagagctagattggtggaagtga

SEQ ID NO: 3975 - DNA, 336 bp, synthetic construct
  source 1..336: mol_type = other DNA
atggcgatccccaaggctcctgtcaagaggattatgaaggaggagggggctgagcgagtgagtgccgaggcagtagatgcactcgtcgattacctggaaaccgatgccgacgccatcgccagaaaggcgatagactatgcaaaactggccaagcggcagacagtgaaagctgaagacattgcccttgccatcggccgcccggaaaccagcgagtccacggcggagaatccacacaacctcttggaggtggttcagaaagtgctggacgccgcagctgacggaaagggcttcgaagagatcataaagagctttatgaagctagagaaaaaagaatga

SEQ ID NO: 3976 - DNA, 1335 bp, synthetic construct
  source 1..1335: mol_type = other DNA
atgagctatgtcgatgaagttattgacctaattgtgaaggaaaaccccgatgagccggagtttcatcaggctgtgaaagaggttctggagagcctcagagtcgtgatcgaggaaaatgaggagcagtacagaaaagacgcactgctggaaaggctggtgaacccagagaggcagatcaaattccgggtcccttgggtggacgacaacggacaggtgcaggtcaacaccgggtaccgagtacagtttaacagtgcaatcggaccttataagggcgggctgcgtttccacccttccgtcaatgtcgggatcattaagttcctgggcttcgagcagatattcaagaacagcctgaccggccttccaattggcggcggtaaaggaggctcaaattttgatcccaagggcaaatctgacagagaggtcatggccttctgccaaagttttatgactgagctctgcaaatacattggtgccgacacggacgtgcctgctggagatataggtgtgggggggagggaaatcggttacctgttcgggcagtacaaacgcatccagggactgtacgagggagtgctcacgggtaagggcctcactttcggcggaagcttggcacgcacagaagccactggctatggactactgtactttgctaacgccatgcttaaggcaaacggcgaaacattggaggggaagacagtgattatgtctggggccggcaatgtggctatctatgccatcgaaaaggcgtaccagctgggcgctaagccagtgacctgcagcgatagcaccggttggatatatgacccggagggcatcgatgtagagcttctcaaggagatcaaagaggttaggcgggagcggttaactgcctatgctgaggcacgaccctcggccgaataccacgaaggcaagggcgtctggacagtgaaggctgacgtggcattcccctgtgcgacccagaatgaactggacattgatgacgccaagaccctcgttgagaatggtgtcatcgcggtcgccgaaggggccaacatgccaaccaccttggaggccaccgagtacttgattgagaacggggtgctgttctcacccgggaaagcttccaacgccgggggcgtggccacgtccgcccttgaaatgagtcaaaattcacaacggctgtcctggacatttgaagaggtggattcccgcctccaaacaatcatggaagacatctttgccaatgtagatgcagctgcgaaggaatacggatttgagaaaaactatgtggttggagcaaacatagctggattcttaaaggtggttgacgccatgaatgcgcagggaatcgtatga

SEQ ID NO: 3977 - DNA, 549 bp, synthetic construct
  source 1..549: mol_type = other DNA
atgaaaatactcatcagcaacttaaaggggaaagagcttgtggaaattgctatgaaaaaccagatcgacaagctcatttcagtgtactccaactataacgagacatccctccttgaccagtacatgacgaaagagaacataaagattagtaccaccaatgcgatcgatgcctgcaagcagctgacggacataattcgccaccaagacaccgatgatgagatctacgtcgcaagcgacggaaactttttgggatcgatgctgaacttcgtagccaataaggaggctgcagactatattttctattccttcaacaatcagatcatccaaatgcccaggctgagcatcaatctgtcagaaacaaaaatgaaaatcctcaagagtctgaatgaaaccgagcagactgccattctgatcggcaagaacataggtatctctcgggccatggtctacaaacatatcaacagcttgatggaggatggcctggtggggcagactaagcagtatgaaaagtactacctaacaaatgccggcaagatgctgattatctga

SEQ ID NO: 3978 - DNA, 240 bp, synthetic construct
  source 1..240: mol_type = other DNA
atggcagaggataaacaggagccgctgagtcccatcgaagagattaagaaagagtatctggaaaagatagactactttgggaatcgaaggtccaaatacgccctatacaaaaagttcagcaagaaatacaacctcaaccgccgcgtcttcatccacatcctgaacgaggcgcatgaagacgtgggcagcccaaagagatatgaactcaggcggcagacccctaaggactataagcggtga

SEQ ID NO: 3979 - DNA, 840 bp, synthetic construct
  source 1..840: mol_type = other DNA
atgctcattgtttactgtcttaacttttatatggtgttttttatgttctacctcgtggggctgggactcttcgacgaaaaagacatctccttaaagggcattgaaacgctgaaaaaagtcgataaggtgtacgctgaatttttcacttcacgcctgttcggcagcaacttcgagtccatcgaagagactataggcaaagagattatagtccttgatcggacccaggtcgaagaggagtctgtgtttctcaaagaggcgaaggagatcgatgtggctctcattacagggggcgaccccctgatcgcaaccacccacagcgacttcctggtggagtgcgcaagagatggcaccgacttcgaagtgattcacggtagtagcatactctcttccgccccggccattagtgggctccaggcctacaagtttggaaaggtgacaaccatcccattcccagacctggagtacaactatttccctaagagcccttatatggccatcgaggagaacctgaaaaatgacatgcatactttggtcctgctggatattcaagcccacaaggacaagtatatgacgatcaatgaaggactggagaacctaatgacaatcaaggacaatctggaacgagaagggatgattgatgagaacagcctagccataggaatcgccagggtaggctcaaaggacaatgtcgtaaaggcgggatacatcaaggatcttttggactacgatttcgggggccccctgcactgcatcgtgatcccctcgaaattgcatatcgtggaggctgaatatctggttcacgttgcagacggtccaaaagagatcttagatgacctgtga

SEQ ID NO: 3980 - DNA, 1404 bp, synthetic construct
  source 1..1404: mol_type = other DNA
atgaatgtgttccgaagttttattgatattctcagcgataggacagtgaacgaacggggctatttcttctcaaataaggcactctttgccctgtttctgcccctgctcgttgagcaagccctagaattttgcgtgggcctcgccgactcaatgatggttgcctcccttggggaggtagcgatttccggggtgtccctggtggacttcttggttcaactgttgatctttagcttctcggcgctcgctacagggggagctgtgattgctggccagtacctcggaaacgacgagccagagaaggcctgtgacgcctccaaccagctggtgtggttcacaaccatcctggcagtgataatggctgtgctggtcctgatcttcaggccatttttaatcaatctcttcttcggtcagatcgagccggatgtcttcaacacgtcaagcatttatctcagctatatggccatctcaattccattcatcgccatctacaacagcggagcagctatctttcgtaccatgaacaaggcaaaccttcctatgcagattatgtttgtctgtgacatcctgaatgtcattggaaatgccatcctcctatttgtcttcggatttggggtggaaggcgtggccattcctacggttcttgcaagagcattggctgcggtcattatgatctactttgtcctgcaggaacggtacgagatccacatccggaaaaccctgaggcacaagtttgactgggtcctcctgcgaaaagtcttgaatgtgggcatcccttatggggtggaaaacggcgtgttccagctgggaaggattctgatcttaagcctggtgtctacattcggcactatcgccattgctgcaaactcggtcggatatgcaattgggatattctccgttcttcccggcttcgcgatcaacctggggctgactgccgtcatcagccgctgcgtgggtcacaatgactacgagcaggccaagttctataacaagaagatccttataattacctttttgagccatctggcaatcaatctgctcatattcgctctgcttccatacatactgcagatatacaacctaagccccgctgccagtgccctcacctatcaaatggtagtgtggcatggaatctttgccgtgctaatctggccgatcgccttcactctgcccaccaccttcagaggtgctggcgatgcgaaatggcccatggcggtaagtttgtccgtaatgttcatctgccgcatagccctgagctacgtgattgccgacttcatgggcgtgggtgtgtttggcacatggatcgcaatgtttattgattggtacgttcgcgccgccttctatgtgtacagatactttagcggcaaatggatggagtaccgggctgttgggacgaacttaagttga

SEQ ID NO: 3981 - DNA, 1461 bp, synthetic construct
  source 1..1461: mol_type = other DNA
atgattctgaatcactacatcctcagtggaatcaatgaaaagatcggggagatggaggaggaatttcagctgatgctactggcctcggaaattgtggattgctgttttaatttcttcgagattgaacgaaaaacttcaaaagtcggcaggcctcattttgagatcaagaatatgataaagctgatcttctatggctacattaacaaaatcaccagttccgtggtcttggctcataatgccaagtacaattttctctacagctttatttcccacggctgcgagcccagcgaccggaccatcagggattaccgcaagaacttcatgagcatcttccaactgatcatgagctttaccctaatagcgacatataaattgggtttgagtgattttaagtacatcgcaattgacggtacgataaaacaggcctataacagccccttcaacataattaaggaaaaagacatccggctcttaattaagcattacatggtcgaggagttaacaaaaaatgagattaagaagcttagaaagaccgcgaagaaatttttgaaggataagacgaaaaccgacgaggaaaaggtggacattctgttcgaatggtggcggctcctggatttctctggacaaagctctctgggtctgaacgaccacgatgcgcgctggatgaagatcaaggacaaaggccagatctaccccaagttttcatataatctgcagctggggacagacactgagtctaagctgatctgcggcgttaacgtggtccagaacccaaccgaccactaccagatccccgctctgatgaatcagatcatcagcaacctcaatcttaagccaacaaaaatcagcgcagacaccatttatctcacgctcgccaacctgaattacttggacaacctggggatcaccgccctgatccctacctcccagcaaaaccgagagaacagcggcgagaagccaaacaatcgcttcgctataggttactttgtgttcgatgagtacaaaaacgttttcatctgtcctgaaggccaggagctcacactggacgggatttatcaggcacacccggagaagggcggaggaaacaagctaaaagcagtctactccaacttcaacgcctgcaataactgcataaacaagggagtgtgtttcaagacagggcaccgttcaatcacgcgctacgttcacgagctcgcttataagactgagcggataatctcctccgaaaaaggcattgaagaatacaaactcaggtccagtactgtggagagccataacgggactttcaagagggtgtatctttatgattttattccgatcaccgggttaaaaagagtacagggactgatgttcgccatcgtagcctcatataacctgatcagattcctgaatcttattaaagaaaacaacatgtcccttcagtctgtgattaatagcataagatacatctcatcgagttga

SEQ ID NO: 3982 - DNA, 1098 bp, synthetic construct
  source 1..1098: mol_type = other DNA
atgctgaccatcaagatcccagtgcagaacatcgaggctacccgtcaaatagtgctcaagcacaagattctggactacgactacaagatcaaggtggaaaacggctttggccacataccgattagagaggaaaccgaggacgaaattctctctaaagtcatcgaagagtgcaaagaagaaattataaaacagaatagcgattatacgatcgaagtggtcgacctgaaccaaaacgaagagctggaaactgtcaaacgatatccacgcagcataactgagctcttaaaggacaagctatcggatgaggagatcgaggagctgaagaaatccttcgacatcatcggggatgtggtgattgtggaaattccagaggagctggaggcacataagaaggaaattggggaggccactctgcagttcaccaaacgcaagacggtatacatgaagcgcagcgctgtggaagggataacacgcacacggcagctggaactgattgccggtgaggacaatcctataaccatccataaggagcacggcaccaggcttaaactcgatgtgaagaatgtctacttctcacctagactggctaccgagcggaaaagagtgcaagaggaaacaaaggacggcgaagagattcttgatatgtttgccggaatcggcccctttccgatcgttattgcacgggaaaagaatgtggacatcactgcggttgacattaacgagtatgcaatcaagtatctcaacgagaatattaagctgaacaagttgcagcctaatgcccatatcacggcaatctgtggagatacaaggatcgttgccgataacgaattgaagggtcgaaaattcgacaggattatcatgaaccttcccggcctcgcgcccgacttcctagacttggccgtctccatgtgtaaggacggaggagtcatccactactacgagttttcagaggggttcagccagggcatcgagagggcccagatcgcttgcgagaaacagaacaaggaggttgagattctgaatacacggaaagtaaagagtacctcccccgggatgtggcacgtagtgatcgattgcaaagtgagtgataaaaaatga

SEQ ID NO: 3983 - DNA, 960 bp, synthetic construct
  source 1..960: mol_type = other DNA
atgcggaccctcgaatgggaggacaataaattaaagctcattgatcagaccaaactgcccgacgaactgacgtacgtctactgcagcaattacaagcaagtgattacagcaattaaagacatgatcgtgcggggcgcccccgccatcggtgtctccgctgccttcggtatggcactggctcagctggccggtgaggacatggaaaaggttgccgtggagatgaagaatgcgcgccctacagctgttaacctgatgtgggctgtggatcgcgtgatgaaggccgagaacatgttggatgaggcccttgagatggctcgtgaggacatcaacacaaacctggcaattggagagtatggcgcggagctgattgacgacggggacactgtccttacgcattgcaatgcaggggcgctagcctgcgtggattacggaactgccttgggcgtcttccgctccgccttcaatcagggcaagaacatccaagtgatctgtgatgagacccggccaagaggccagggagcaagcctaagcgtttgggaaatgcagcaggagggaatccctgtgaaactcattccagatgtggcatcgggctacctcatgtcaataggaaaaatagataaggtggtaatcggggccgacagggtggcccacgatggcatcgcaaataagatcggcagttttatggtggctctggctgctaagaggtttgacattccgttttatgtagccgcccctatcagcaccttcgacaaggaaatcagcatcttcgataccgagatagaagaacgagaccccaacgaagtcatctactatgggggggcgagaatctgtccggagggcactgaggtaattaaccccgcctttgatatagttccaaaggacctcattaccggggtcatcacagaaaagggagtgttcgacctgaacaacctggaaaaagactttaaagagcttttctga

SEQ ID NO: 3984 - DNA, 891 bp, synthetic construct
  source 1..891: mol_type = other DNA
atgacgaaaaaagacataacctgtggcggagaccataaaggggcccgatttgcacacattaccaaagtgcatccctgctacaatgaaaagctccacgataaggttggaagggtccacgtgcccatcgctcctaaatgtaatatcggctgcaatttctgcattcgttcaatcaatactgatgaggacaggccaggtgtcgccggcagcatcatggatgcggatgctgccgtggaacacgtcctgaacgtgacaaaggacagcgcaatcaccgttgtaggggtggctgggcctggcgattccctggctaacgaagccacatttgagttctttgaaaagatcaacaaggtaaagcccgacctaatcaaatgtatgagtacgaacggccttctgctcccgaaatacgccgagagaatagcagagctgggtgtgaacaccgtgacagtaactgtgaacgccgtggacccagagatactgaaggagatcaacggattcattttctatgagggcaaggtctacaagggcctggaggccgctgaaatcctttccaaaaaccagctcgaaggcattaaaaagataactgacttaggagtggtggtcaaggttaatatcgttctcatccccgggctgaacgacgagcacattccagagatcgcacgcacagtcaaggaatgcggggccgatctggtgaatgtcttgcctctcattcccctgaataagatggcggactatccaagacctggctgtatggagattgaaaaggcgcggggggaggtggaagagtacttgcccgtgtttcgcgcatgcacccaatgccgggccgacgcttatggaatcccgggtaagaaacatgaggatcaccatattggaaacgccccacagtctcacttctga

SEQ ID NO: 3985 - DNA, 567 bp, synthetic construct
  source 1..567: mol_type = other DNA
atgtacatcgagtcaaatgacccggagggagccaaagtctacgacatgattatacggcagatcttccaggatctcgtcctgccaccctccatcgatgacatgaaggcgtacgtaaatcccaacgaggtgtgtttcataatcgcaatcaagatgaggaaaacaagccagcacattaccctgaaggaggtggctaacgtcgactataacgctgaagatgacactacagtggttatcattgacaacgagaactatcttccaaacatcctcaaaaggctgtgggaaatcaatggccgcgaaaacgttcaccaacccagcagatacgtgattcacttgcccggggagaagaatgtgagcgatctggtggtagacgaccctcatgagaatctaaagcggcgcatttacgatgccgtcttccgaatagtgcctgagggttttaagatcatgaaagacatgagtgagggcgacatcgtctgcattgttgccaccgatgagctgatcaaggacgaatgggtggaaaaggcaaaagggtatatggtggaactcaacacgccaaagacctgggattga

SEQ ID NO: 3986 - DNA, 1236 bp, synthetic construct
  source 1..1236: mol_type = other DNA
atggtacagattgccctggtgtcctgcggtaccgagtacagtggcatccaaaaggaaatcgaaaaggccgcgctcaagtttggagctgaaattatcctgcccgagattgacctggattacattaatgaagcttatgagaaatttggcttttctgctcaaagctcaagcttaaaactgatgatcgcaagggcaatgtccattgtagagggccgatgcaagcctgatgccgtcttcatcgccacctgcttcagatgtgcggaaggagccctggtgcgaaacgaagtgcgccggttcatccagaacaacacccggattccagtggtgacatacagcttcactgagaggacaaaggctgatgagctgtttatccggatggaggcactagccactacagttacacgcagaagcattcttgctcgggagaagcaggaaggcctaactcttgggctcgactcaggttccacaaccacgaaggctgttctgatggaaaacaacaaggtcattggaaccgggtggactagcacgaaagatatcatagaatcggctaagactgctgccgccgaggcctttgacaatacggattacaactgggatgatgtggacggcatcggaaccaccggatatggtaggttcaccatggggcgggagtttggcgccgagctgatacaggaggagttgagcgtgaacgcaaaaggagccgtctatttggccgactgccagaaaggggaagctacagtgctggacataggcggcatggataacaaggtgattacagtcaataatggtatccccgacaatttcaccatgggcgggatctgtgcaggagctagcggcagattccttgacatgacctcacgcagactcgacgtggacatcacagagctggggccactcgcagtgcaaggcgactggcgcaaagccatgctcaactcctactgtatcgtcttcggtatacaggacctggtgacgaccctggccgccggcggctccaaggcagatgttgcagccgcggcatgccactcggtctccgagcaggtttatgaacagcagttacaggagatcgacatccgtgagcccttgatccaggtggggggaaccagtcttattagtggactcgttgaagcggtcagtgaaactctgggtgggatagaggtgatcgtcccggagtacagccagcatattggagccgtaggggcggccctcctggtgtctgggatgggcaaaaggcacgagtga

SEQ ID NO: 3987 - DNA, 507 bp, synthetic construct
  source 1..507: mol_type = other DNA
atggtgaaggtagctatttaccccccaaattcattgatcctggcggacctgattgagcggaaaggtcacgcccccttagccctgcagaagcagatccgccagaagatcaaagacccggagatcgatagccccccaatgaacattacagaggaagacccaataaacggattgaagtacgcggccattgaagtccctagcggggttaggggacgaatgagcatcatcggacccctgatagatgccgcagaggctgccatcattgtggacggcgctccttttggcttcggctgtgtggggtgcgcaagaaccaacgaactgtccattttctgcctccggaaaaaggacatacctgtccttgaagtggtctatccggacgatgaggatgggaccgtgctcatggttaatcaaatcatggagttcctggatagtctacccggcggcggaggcgacatggaaggtgataacgacgtgctcggcgagcagatcgggacgaaggggggaaaatga

SEQ ID NO: 3988 - DNA, 507 bp, synthetic construct
  source 1..507: mol_type = other DNA
atgcctgcgaatctgtgtattactccagatctcggtaaggaggacatggacccggaggtgtccacaaggatgatcattctctcctccaaggcaaatgtaagcgagagcgaggtcgtgaacttcctgcatatgctgaacctacccctgaccataaaatggacctgctacggggcaatgatcagcggcaaggacaaatacgtccggcaggccatccgggagcttcgcaagttggacccctacggcatcttcacgaaggaaagaggatttgcccccggcgacccccgacgttgcagaggccaccggtatgggccaagggaaggattccaccagatggagaaggaatttaggattttagactatgtgggagaggccctgaaaaacccacgcgatgtggaaatcgagaagaaagaacctgttagtgtcgattacttcaaagaggtgctcgataaggctctggaagaatctgaggggtcgtcaaaggagaagagtgaggacgataacaaatga

SEQ ID NO: 3989 - DNA, 1569 bp, synthetic construct
  source 1..1569: mol_type = other DNA
atgaaacgcggcaagcctatgctaatcaaaattaatggcgaagacgtggacattcctgagggctcgaccatcaaggacgccatagagctttccaatgcgccctataagaaaggcagtatcgtctgcttgatcaagggggagagcgagatacaaagcaacgtccttaagtataaaatcaagactcctaagggaagtattctcattgaattggaagtgagcgaaaaatcaaaacccctgactgatttcttcaaggagaactattccctcttcagctccaacaacgttcggtgggagacctcgaatgaagtggccatagggccggtagagtctaactttgaaccgtctcacgatgagttcaggtactttgacaatgatgtcctgataagcctctccggtttttccaaggaggccacgcacataatctttgtaaaggacgatcactcaaatgtgtatggcgtgccaaaatacagcgacaggggcgtgtttgcccgcattatcggaggccgtagaacgctgttctcactgaccgacgacgatgagatactaagcatcgagcccgtgatcgagcgaagcacggtcaccgacagtacaggcggctcaaatctggaggaggttctggaagagggcaaccagctcttcacctacgctctgctcgagccaaatgcaaagtctcccgcatccgtggagcatctgttctccctgattagaaacaacaaaattcaggttgactttgagtcgaacagttttttagggttctacgaattgaatgggctgactaaagatgctgaagagatcagtgagcggaagagaggtacagtaaccctgcggagcgagggaaacggcaaaggacgagtctatgtctacagggaggaccgagtccgggccgaaacccatacgaatctggccacagtgaagcaggggatggaactctttgataccgccaaaaagggagacttcatcaccgtgttaagcgatccagaaagaatcatgctgatgatgctaactcaaaaggaagcagaggaaaaaatgcagagcctcggcatcaagcacgtgcgggacggaaacctcgacgacgatgcgattgttgtgattcagacacccgaaaataccattgacatcctggaaaataaggaagtcaccaccttcggacttgccagcgatgaattggtgaaaatcaaactgactgacaaagctccacgcacccgctggtatctggagaaaatcagtggactggcagagaagcctgtaggcacattgaaggtctactttgctgtgcccgacatgaacatgttcatgttcaatggggacactgacgaatccaagggactcatcccagagaacatccctacagatattgtgaaggccggggagatcgccgtgaccaacatgtcaaggaagaacctcgggctgatcggtatcaggacaatcgatacagacgagttcggtcccacgggggaggcgttctccgctacaaacattgtgggggaggtggttggtaacattgaaggcctgaacaagcttaaggatggtagcactctttacatttacgaggtttacgatgaggaatga

SEQ ID NO: 3990 - DNA, 684 bp, synthetic construct
  source 1..684: mol_type = other DNA
atgagtctcctcgaagtgaaaaatctgaagaaaagctttggagacaacgtggtcctgaaagatatctccttttccgttgaaaaaggagaagtgctaagcatcatagggccatccggatcagggaagagcacattgctcagatgtataacagacctcgagacagaggacagcggtgagatcaactttgacggaacctttggcctcgtgttccagaacttcaatctgttcccacaccattctgtaatgaagaacatcaccaatgcgcccctgaaggtgcagaagagggacaaggctgaagtgtacgagcacgcacgggacctgctaaagaaaatggggctgagtgataaggaagatgcctaccctagtgaattgagcggcgggcaacagcagcgcgtctccattgctagggccctttgcatgaagccggatatcctgttctttgacgagcctacctctgcacttgaccccgagctgacgggcgagatcctggccgtaatcaaagacctggccgcggagcatatgactatggtgattgtgacccacgagatgaacttcgcccggaatgttagcgatactattatcttcatggatgagggtgtcattgtggaagagggctcacccgaagaggtcttcagctcggacaaccagcgaatgaaagagttcttaggcaagttttatgaatga

SEQ ID NO: 3991 - DNA, 654 bp, synthetic construct
  source 1..654: mol_type = other DNA
atgctcctgagtaaaatcttagaagagctgctctgggggatgggtaccagcattgagatattcctgctaactttgctgttctccatccccctagggctggccgtggctgccggaaggatgagcagcttcaagccccttcaatggtttatgaaagcttatatttctatcatgcgcggaacgccactgatgctgcagctgattgtggtcttctttggcccatactatatcttcggaatgaccctctcgcgagattacaggatgattgccgtcataatcgctttcaccatcaactatgcggcctactttgcggagatcttccggggcggcatcgaatcaattcctaacggccagtacgaggccgctcaggtactcggctataccagagttcaaacattctttataatcatcctgcctcaggtggtcaagatagtgctgccgtcaattacgaacgaggtaatcactcttgttaaagacaccagcctttcctttgtgctcgcaatccccgagatgtttacagtggccaagcagatcgccgcagctgaagcctccattagtgccttgctgattgcagggggtttctactatgtcttcaatgcgctcgtggcaattatcatggaacgctttgagaagcggttggactactacgacacatga

SEQ ID NO: 3992 - DNA, 825 bp, synthetic construct
  source 1..825: mol_type = other DNA
atgaagaagaagatagcaatcattctgggaatcgccctgctcgcattcctggtcatcggcgcctccagcgccggcttcctcgactttctagggggcgatggcactgccacgaatgatgacaatacgtttatcgtcggcttcgatgcagagttcccgccatatggctacaaagacgataacggggaatatgtgggattcgacctggacctggctcaggaggtctgcgataggaacaactggactctggtgaagcagcccatagattgggatgccaaggacagcgaattggactccggttcaatcgactgtatttggaatggattcaccatcaacggtcgggaggacgactacacctggtcggagccctacattgacaacaagcaggttgtggtggttaaaacagattccggtattaatagtctagccgacctcgatgggaagattgtggaaacacagaaggattcaagcgcgctggcagctcttgaaggggacaacaaaaccctggcggacacctttaaggacttgactcaggtggctgactataacacggcctttatggatctcgaaaccggtgcctgcgatgctgtagccattgatatcggggtagctcagtaccagatcagccagaaaggaagcgaccaatacaaaatgttagatgaggagatcagttctgaacagtacgggatcggcttcaagaaaggaaatgaccaactgaaagatcaagtccagaagacactggacgagatgtttgaggacggcacagtggagaaactcgcccagaagtatgacacctacggagtgcctggcgcgcttatacagaagtga

SEQ ID NO: 3993 - DNA, 978 bp, synthetic construct
  source 1..978: mol_type = other DNA
atgaacttcaacgagctggttaaatcacttcaagagttcattggtgtcagcaggaaaaactccatagaaaaggtgacaaaggctctgagcgaaacttataacatctctggagacgtcctgctggactttggagacgacgcatctgcaatcgacatcgggaatggtcaggtggtgctcctggccgccgatggcatctgggggcagctgatgagtgtcaatccttattgggccggctactgctctgtgcttgtgaacgtgaacgacatcgcggccatgggcgggcgacccatcgccatggtcaacacactgtccattaacgatgacgagatctatgatggggtgctgcagggcattgtagacggctgccgcaagttcaatgtgccaatggttggagggcacctccacccagacgccgaatttaactcattggatgtggcaatcgcgggaatcgctaaaaaggatagtctaatcacgtccgcgggtgccaatgtaggggataaggtgatagtagccattgacaccgacggccggcagcatcctcagttcgtcctcaattgggacaccacatacgaaaaagatgcaaagctggtgcaagatcagattagcgtgatgcaggagatagctgaagctcacctcccaaccgctggcaaggacatcagcaatcccggcaccttaggaactttggagatgctgttggaggcatcgggggttggagcctttgtggagctggagaggattccccggaaccctgatgtcagctgggaggaatggctgatggcttacccgggagccgcctttgtcatgacggccaaggaggaaaactgtcaggagataatcgatagactaagtccgtactccttcgaagtcgcagtggtgggcgacgtgattgaggacaagatgttagtgctgaaaagcggtgatgaggaagctgttctcttcgaccaacgcaaaaatcccgttcttgtcctcggcaattga

SEQ ID NO: 3994 - DNA, 633 bp, synthetic construct
  source 1..633: mol_type = other DNA
atgacactgctgggacaccacatccatgataaacttttcctctccaaggacaccctcgagatccctttcgatgaggaggccgacagtcccgagaacttcaagtcaatcatgtttaatgtgttcaagtcatatgtcattgagagcatcaaggaagtcgtgccaagttttgttgaaaaagaccacgaatacaacgtggtcaatagctatgaaggattcgtggaagaggactacgaatttgaagacttggatgacttcatccaggagctggaatacgggagctacgagggctccaacgaaatttacgtggatgaggacggctccctggtcgaagaggtctacatcgaggacggcgaagttccactagaggaagtttatattgaatatgacgatgtacccgtagaggagatctttgtggagcacgattcggacgacgatatttatgtagagcacgagagcgtggaggagatctttgtggagcatgacgacgggtctatagacgagatcatcgtggagcatgagcccaacgaaaatatagtgtacgaggatgcaccggtcgaagagatattcgtggaacacgagcctaacgaagagattgtgtacgaggatgcgccactggaagagattttctgctga

SEQ ID NO: 3995 - DNA, 1242 bp, synthetic construct
  source 1..1242: mol_type = other DNA
atggagattggagttgtggtacacggccccggaatcatcgatagcggctgggccataaaaatcatcgacattctctctaattacggaaacgtccactgccgtctcggcggaactatgggccgaactgcagttatcgacgcggctctggaggatgccatcgacattagcctgaaactcctccctagccagtctctcgaactcttcaatagggagggtgtggacatcatcttcctactgaactacgggaagtcccccgaaacgggcagagtctttgggtataaggtgttcaaccattactttaagcagatttccaacgaggactacctggctaccaatcacaagcctttatacgatgcaagcgttcccgtgatccaaatcgaacggccgggagaagaggacggcagtattatcagctggaacaccgaactgaacgagcagctaagcaaaagccgaaaaggcagattcaaattgggcctggggaagaagaatatggtggagagtctgtcctttaacttcgaagaactgttcgatcacctgaaaacatcgcttaaccttgtagaagtcaccccagaggaagtcgtgtccaactatttctccaataatcaggagcgcaaagatgaggaggacattgagaaaatcttgcggagttatgacgattatgacatcagccattacacctaccgcaagattcacggagtaagccctgacgagaacatcttcataaacggcatcgtggtcggctactccaatggggattccattgtcctggttgcccgggacgggttgattgccgacatcataaatggtacgatcaagtaccacggactggaaaagctcggtcccgttgatctggagagggtcatagtgaaaacaggtctgctgagaaagtctgatgacgtgaacccgcgcgtcttatcaaacaaggacattagccttaaggacacagagaggcacatctacagcggtgagatctcagaggatgactattcgtttaaagtggcctacgtggatcatgcagcttacgacatctataagttcaaggactttgacttggtggtgaccataggggatgatacttccctggtggcctcagatatcctttatcggttcgatattccaataattgggataaccgacggcgacctcgataaggtcgtggaaaacggatttgtgaatgagaagagtacaatcattgaagtggccagcggctttgacgacattgcggggccatcacatagttga

SEQ ID NO: 3996 - DNA, 507 bp, synthetic construct
  source 1..507: mol_type = other DNA
atgagtgacctgtactacgtcttagacgcatcggcgtttataaacggattcgaaccgaagagtgacttcaacattacagtttccgagatcacagacgaggtaaaggacctgaagagcagactaatcctgaatcaggccatcgatgacggtaaaatcataattcaggaggcccaaaaggagttcctggataaattggatgaaaccattgccaagagcggggatgacctcaggctgtcagggcccgataagaagcttctggctgtggctctggcactcctcgacgaaggcaaagagatcaaggtcttgacggacgactatagcatgcagaacgtgctcaagatccttgatatcccctacgaaagcattataaccgaaggcatcaaaggagtgtataattggaagaagacctgtgagggctgcaaaaaggagtaccctgccgattatccattcgatgactgcgagatctgcgggtccaaagtgtttaaacgccggattaaaacttactga

SEQ ID NO: 3997 - DNA, 519 bp, synthetic construct
  source 1..519: mol_type = other DNA
atgaagagtgaaacaatggagctgcataagaagaaggctccgatcaaggtgagctgtggaattataaccctcagtgaccgcttctccaacgacaaagagggaaaggagaaagacctgtccggcaaatacttgattgatgagctaagcaaaaagtacgacgtcgacgattacacaatcattcccgatgagaaggacatactgaaagacaccatcgagagcatgatcgataacggaatcgatgtgatcatcaccacgggtggcaccggcctggaaagcagggacattaccattgagactgtcgaacctctttttgagaaggaaatgaagggatttggtgaaatattccgggcaatttcatatgaggaactcggggcgggctcgcttttatccagagcaactgccggggtgtacaaaaagacgctcatcttctgcatgccagggtcacccaatgccgtaaaaacaggcatgaagatcttctatgaagagctggggcacctgaaaaagcacgcccagaaatga

SEQ ID NO: 3998 - DNA, 531 bp, synthetic construct
  source 1..531: mol_type = other DNA
atgtgcatggtctccaaggagtacctaatcgagattctgaaggaaaacaaagtattcgaacagggggaatttactctggcttcaggtaagaaaagcaactactatgtcaacatgaagcgcgccataacagagcccgagatcttgtctactatcgcaaagctcatcaatgagaagatagatgacgatacagacaagattgccggcccagctctgggcgccgttcccattgcgacggcagtctcgttggagagtaagaaaccgctcctgatgattcggaaagagaaaaagggctacggaacgagcaaacttatcgagggagatctgaatgagggggataaggtcatccttgtggaggacgtgaccacaaccggaggcagtctgctcaaggccatcaacgcaatagtagacaacggtggcgtggtgcagaaagcgttcgtggtggtggacagggaagaaggggccatggagaccttcgccaatgaggggatcaccttagaacctctgatttccgttagcgaatttttcgaatga

SEQ ID NO: 3999 - DNA, 285 bp, synthetic construct
  source 1..285: mol_type = other DNA
atgcggattgccaaggaactgattggcaaggaggtgctgggaacagacgtgaccgtgatgggaaaagtagttgacgtggatatcgatgtggaggacaatattattgaatccatcatcgtcagtaaagggggcatccaggagtcactgaacatctctaagagcgaactcgtcatcccctttgatatgataagcaagatcggggataagatacttttgaaagacgcattcggcgaggacctcgaccagatggcggacgagatccaagatctgaaaaaccagctatga

SEQ ID NO: 4000 - DNA, 114 bp, synthetic construct
  source 1..114: mol_type = other DNA
atgatggtattcggcatcgaagatccctggatttggggagtgtatgtgctgctcatcgggatgaccctagtgtgcgtcgcctacggcgcactgaactggaacaatgaggactga

SEQ ID NO: 4001 - DNA, 1650 bp, synthetic construct
  source 1..1650: mol_type = other DNA
atgaactactttctcctaggaattgtgtttatcgtttacttcctgatggtaggttacgtggggtacctagcctggaaacgcacaaattcctctgaagacttcttggtggcggggcgggaaacacacccatacatcatggcattaagttacggggcaacgtttatcagcacggccgctattgtcgggtttggaggagtggccggtaaatacgggatgggtatactatggcttgcgttcttaaatattcttgtagggatattcattgcctttgttttcttcggcaaacggactcgaaagatgggcaagaacctgaactccctaaccttccccgagtttctgggccgccgattcgatagtaaattcatacaatactttagtggagtgctgatcttctgcgctatgccgatttacgcggccgtggttctgatcggcgccgcgagatttatggagagttcgctcatgctggactttaacctggcccttttcatcctggctgtcgtgatctgcggatatgtgctgttcggcggcctgaagggggtgatgtacaccgacgccctgcagggaacaatcatgtttatcggcatgttgattctccttgttttcatctattgggtgctgggcggggtgactgaggccaacactgccctcacaaacatggctcacctctatccccctgatgccctcgccgaagggggcacaggctggaccagcttccccaagctgggcagcccattctggtggactctcgtcaccactatcatcatgggcgtaggtatcggagccctggctcagccacagcttgcagtaaggttcatgacggtgaagtccaataaggagctgcacaggtccctcctcattggagctgtcttcattgctgtgatgaccggtaccgcttacatcgtaggctcactgtgcaacgtctacttctatcagaacttcggccagattgcaattgactatgtggggggaaatatggacagcatcatcccaaccttcatctccaccgcacttcctgaatggtttgtgtacatattcctcttgtccctgctggcggcggcaatgagcaccctgtcctcacagtatcatactcagggtaccgcactcgggcatgatattgtcgacgcctttaaaaacagaggaaccacccgcgaatataccgatgaggagattttggaaggctctagcaaggaggagactcggataggctttattagcgtgagccaactggggatcttgattgctgtggtgctgtctttaatcatcggcctcatcctgcccggaggcatcgttgctttgggtacatctctctttatgggattatgtgcagcagcattccttcccgtctactgcgccgccctcttctggaaacgtgccacaagaaaaggggccattgccgggctgctgtccggtacgttcacaagtcttttcttgctcgtctttgtgtataagaagaccgctgtgggcctgggcatctgtaaggccctgacgggtatggacatgctgatcaatgtcatgccctggtattcaattgacgtgatggtctttgccatacctgtttctgtcatatttacagtggttgtgagcttgctgtcacctccgatggatgagaaggtcatcaagaggagctttgagggactgtcggaagagtga

SEQ ID NO: 4002 - DNA, 1302 bp, synthetic construct
  source 1..1302: mol_type = other DNA
atgatctggaatcagaatgccgaatgtatggataaggaggagaaagaggaaatgcaactggccctgctccagaaacaggtgaagcgcgtttacgaaaaggtgcccttctatagggaaaagtttgataaagcaggctttcacccagacgacctcaagacccttgatgacattaccaagataccatttacaaccaaggcggatttacgcgaggcctacccatttggactgttcgccgtgagcgatgatgagattattgagattcacagtacctcaggaacaaccggtacacctgtcgtctccggctacacacaaaaggacatcgacatttggggggagtgcacggcccgagccatcgcaatggctggcggggacaagaactcaaaaatccaaaattcctatggctacgggttgttcaccgggggattcggtatagaccacggtgctaaagtgatgggcgccacggtgatacccatgtcttctggcaacactgcaaggcagctgaagatcatggaggacttccagagcgacatcctcacctgcacgccatcctacgccatgtatttggcggagtcccttgaaaaggaaggatacactgcagatgacatcagcctgcacggtgggatcttcggagctgagatgtggactgaggagatgaggcgttcgctcgaggaaaagctgggcatcactgcacataacatttacggactgacggaactaatgggtcccggggttgctgccgagtgcaagtatcagacagggttacacatccaggaggatcatttctatcccgagatcattgaccctgaaaccgaagaaatcctggaagacggcaaaagaggggaactggtcttgaccaacctgacaagagaaggcatgccggtcatccgcttcaggacaaaggacatgaccgccctgcgccgggatgagtgtccgtgcggcagaaccactgtacggatggatcgcatcactgggcgatcggacgacatgctcaaaatcaaaggagtcatggtttacccaagtcagatcgagacagctatcctacagattgagggactcactgcgaactaccagatccatgtgagtcgacctcacacccttgacgagatagaggtgaaagtggaaaccagccccgaggtattctcagacgagatgaaaaagatagaagaatttgagcggagaattgccaagaagattcagagcgctattggcataagcgtggatgtgacgctggtggagcctgagtccctgccccggagcgaaggcaaagcaatccgggtcattgacgagaggaactttgattga

SEQ ID NO: 4003 - DNA, 432 bp, synthetic construct
  source 1..432: mol_type = other DNA
atgagcgtaaaacagctcagtgtcttcctggagaacaaagagggcaagctcaaaaaagccgtgaatgcaatgagtcaggccggagttaacatcagggccctgtccattgcagacagctcgaagtacggaattttgcggttaatcgtgtcagacaacgagctggctataaaggccctgaaggaggagaattttaccgtaaaggaaaccgaagtgatcgtggtgggcgtcaaggacgagcccaacgggttgaacacaatgcttgagatcctggaaaaggagcacatcaatgtggaatacctgtacgccttcgtcagctctaagacggatgaagctattgttgtcgtgaagatagggaactatgaagacggcctcaaagccctggaaaatgcgaatgcaaacctcctttccaaagaggatctggcggagctatga

SEQ ID NO: 4004 - DNA, 1278 bp, synthetic construct
  source 1..1278: mol_type = other DNA
atgttagatcggctgaaaagcattagtttgggaaattggatactcatcggaatggtgttaggcctaatcacaggcgtaatcttaaacctgtatgtgcacagccaattcattgacattatcctcatcgataacgtgttctacctgggaggcaacatatttatcaagctaatgaagatgctggtggttcctctggtcttctgttcgattgtggtgggggtggccagcattagtgacattcgcaagattgggaccatcggtgggcgaaccatcctcatctaccttattacaactgccttggcagtttccatcgctcttctgattgccagcttcatccatccaggggctggcctgcacatggctggccttgcaacggcctccaacgtgagcaccaacgtgaccattaccaacacaatcctgggaatggttcccgacaacccaatcaactccctggccaatggcgacatgctccccgtgatcatttttggcgtactggtaggaatcattttggctaagctaaaggaggagaccgaaaccataaacaaggtctttgaggaaggcaacacaatcatgatggagatgacgtcgatagtcatgaaattcgcccccatcggggtgttctgcctgatggcgaagacttttgccaccctgggattcgacggtcttatgccgctgagcaaatatgtcatatgcgtgctcatcggcctggcagtgcaggcattcattgtctatccgagtctgatggtcatcttcactcggctgaatcccatcaagttctttaagaaattctactctgtgatgttgtttgcctttagctctagcacatccaatgcgaccattccactgaacctcgaaaaactcagcgagctgggtgtctcaagggaagtctcatcctttacaatccctctcggcgccaccatcaatatggatggaaccgctatcatgcagggggtggcagtcatgtttgctgcccaggcgtacggaatggacctgggggccagtgcgctccttacagttattttcacggcagtgatggcctctatcggcacggctggagtgccttcagtgggcctgattaccctcaatatggtattcacttcaatagggttgcccgttgacgccataggcatcattatggggatcgatcacatccttgacatgttcagaactgctgtcaatgtgacaggtgacgcaatatgcactatcattgtgtccttcaagaacaagtctatcgatctggatgtttttaatggtaaaaaacaggccgagggtagttcctga

SEQ ID NO: 4005 - DNA, 279 bp, synthetic construct
  source 1..279: mol_type = other DNA
atgccctttaaaatcgacagtgccatcgtcaaaaaagatatggactccggcaaatatgacttggtggacccagaaggaaagttctcacaggcggatgccctcatggtcatcaatagcgacgatttcattaccgtgcagctgataattaacgctatcctacggaacgacttcaaggcatggaaggatgtaaaatgggaggggggcgacagcctcaagtctctgctggtgaagcttggttacgggaaggaggagatagttgaaatgctgaaggagttttga

SEQ ID NO: 4006 - DNA, 3177 bp, synthetic construct
  source 1..3177: mol_type = other DNA
atgcctgtggacaaggacattaataaagtgctgataatcgggtctgggcccattcagatcggccaagccgcggagtttgactactcgggttcacaagcttgcaaaagccttagggaagagggtctggagacggtgctcgttaacagcaatccagccaccatacaaactgatatggatatggccgatacagtttacacggagcctctgactgccgagctagtggctcagattatcgagaaagagaacattgatgcgatactccccaccatgggcggccagaccggtttaaacattgccacggagcttggaaaactgggtctgttggagggcataaaggtcatagggtctgacgtgcagacaattgcagatgtggaagaccgagacctctttgccaactttatggacaggctagatgagcccattcccaaatgtcatgcagtggaatctgtcgagggggccctcgaagccgtcgaggaaatcggataccccgtcatcgtccggccggcattcactctaggcggtaccggtggaggcatagcccacaataaggaggagctgatcgaggttaccacccacgggcttgacatgagttacatcaaccaggtattgatagacgaatccgtgttgggatggaaggaaatcgaatttgaggtcatgagagacaagaacgacacctgcattatcgtatgcaacatggaaaatgtggaccctatgggaatccacactggggacagtatagtggttgctcctattcaaaacctgaatgatgaggtctgccagcgcctacgcgacgcgtccatcaagatcatccggaacctgggcatcaatggtggctgcaatatccaatttgccctcaaccccgaaaccaacgagtacaagattattgaagttaacccccgcgtaagccgaagtagtgcgctagcatccaaggctaccgggtatcctattgccaaaatctcctccaaggtggcactgggcctgacactggatgagatccagaacgacattacaaaagagactccagcctcctttgagccatccatcgattatatcgtggtgaaaatcccacgctggccgtttgacaagttcaaaggaatcgaccggaagattggagttcagatgaaggcaacaggagaggtgatggccataggcaggacctatgaagaggccatccaaaaagctatccggtcactggatatcggcctgcatggcttcgagtatctggaatacactgaagacaacctggccaaccctaccgatgagaggctcttccatatgtactctgcaatcaaggacggcagaagcgtggaggagctggcagagctctctaagatggatgcattcttcctctacaagattgagaacatagtggagtttgaaaatcaggttacgaaagaggccctggaagatgaggagtttctgctgaaggccaaaaaactcggattcagcaatttcacactggcaaagcttgcaggaattgaagaggaggatgttaaagcactactggataaatttgatattaagccatcctataagatggtagatacctgcgctgctgagtttgaagcgaaaaccccctattactacagcagctatgacaaaggaaatgagctggtgaagtcggacaatcggaaaatcctgatcatcggcgccgggcccatccgaatcggtcagggaattgagttcgattactgttgtgtgcattcgtcccttgccctgaaggaccagggaatagagacaattctcgtcaacaacaaccctgaaactgtgagtactgactatgacgtgtcagatgacttgttcttcgaacccctcacctatgaggatatcatgggcatcattgagcaggtcgagccagagggggtcatcgttcagttcggggggcaaacaagcatcaacctcagcgtgcccctggccaaggctggagtcaagatactgggtactccatacgagagcatcgaccgcgtggaagacagggaaagattcacggaagtcctgaatgacctgcacatccatcaggccccctacggattggccaatagttttgatgaggcaaaagaggccgcggagagaataggcttccccgtgcttgttcgtccgtcctacgtgatcggcggcagggcgatggaaatcgtctatggtgtagatgagctcgaggagtacatgaaagaggctgtcaaggtctctcccgagcatccgatcctcgtggacaagttcctggaagatgctgtggagcttgatgtagaccttttgtgcgacggggaggacgtgttcattgcagggatcatggagcacattgaagaggcgggtgtccactcaggcgacagcgcttgtgtgatacctcctcagaccattccagagcacttgcttgaagtgatcagagagaatacgcggaaactggctctggaattagatgtcattgggctcatgaacatccagtatgctgtgaaactggatgaggaacgagtttacatcatcgaagccaacccacgcgcgagcagaaccgtgccattcgtaagtaaggccattggggtgccccttgcaaaagtggccaccagcttgatgatgggcaagacccttaaggactttaatctgaccaaggaaatcaagatcaaccacgtcgctgtgaaggaatctgtgttcccattcctgaagttgacagaatcggacagcgtcctggggcctgaaatgaaatccacaggcgaaagtatcgggattgacgagaacttcggcctggccttctataagtcacagctctcagcgggcatggacttgcctaaggaaggaaacctcttcatcagcgtgcgcgaacaggatcagcccaagattcagccgattgccgagaaggctcacgctctcggctttaacataatggctacgaaggggacagccaacagcatatttgacgttcccattacaagggtcaagaaggtttcccagggacagcctaacatcaaagaagccatcctggatggcaaggtggacatgattattaacactccgcacggggaacaggcttccaaggacggctacacaatccggcgtctcgctgtagagctgggaatcccatacgtgactaccttagccggcgcccgggccgctctgaatgcaatcgcagccgtgaaggaaaatgatttaaaagtgaaatcattaaatgagcacattgccaatatttga

SEQ ID NO: 4007 - DNA, 1080 bp, synthetic construct
  source 1..1080: mol_type = other DNA
atgggaaatgaggccaagctggctttggaagatgggacggtcctaaaaggtaaagcctttgggtacgaaactacgactgtcggtgagctggctttttcaacgggcatgtccggttatacagaaagcctaacagacccctccttcaagggccagatactgatgagcacctatcctctggaaggaaattacggggtcagcgaagattggtaccagtccgacagtgtgcatgtcgaaggctttgtagtgcgcgaagcctgcaagaagctctccaacttcgggactaaaaagaccttggacgactttctcaaggagtttaaagtatctggcatcgaagatatcgatacaagggacctgactttaaaaatcagagagaaagggagcctcaaggcagcccttgccaccgaggagattgatgatgacgagctcgtggccaaggcacgtgagcacacaagcatcaccgagctggatctggttccattggtgtcaacccccgagatcaaggcgttcggagactttgacaagacggttgcgatcattgactgcggagtgaaacggaatatcattaagtgtttcctggaaaacaatattggcgttgcccttttcccatatgataccgactatcaaaccattctggactacggagtggacgggcttatggtcagctcaggccctggcaaccctgagcgactcaccagcacaatagagaatgtggaaaaactgcttaaccggttcccagtgttcggaatctgcatgggtcagcaggtgatcgctaaggcattcggcgccacaacatacaagatgaaatttgggcacagaggagcaaaccagccagtgaaggacctgaacactggaaaagtgttcatcaccagtcagaaccacggcttctgtatcgatcccgagtcgctggctggcagtgacctggagctcaaccaaataaacctcaacgacggcactccggaagggttcctgcataaggaattgcctttacgcaccattcagtaccacccggagtccggtcccgggcccaatgataccaaggtcctgttcgaggagtttggccagatgattagggagtactga

SEQ ID NO: 4008 - DNA, 750 bp, synthetic construct
  source 1..750: mol_type = other DNA
atgtctcatttcgacaacagtgacttcaacaaggatctggatgtgaacaaccaatatgacccagtgaaaggcaacgacaaggccttcaatgggaagtattcactcaacttttcaatctctcacaacgaccccaatttctcgaatctggcaatgtccagcagtatcatctctgagaccactctggaggaagactgcatcctgctgaaaaagaaatccctgctcaagcggaagtctttaggctcccagaagatttactatcgagagattctggagttggacctgatcaagtccaccctatcatcgctgtacagttccataaggatcgtgtattccaaaaacgggtacagcaagcgggtcctcagtcttagcagttccgatggattcgctgtaaggtggttctacgacgccttggttgtgaagtattcctacgtcaagagcgggcttgacaaaaagtacgattttaattcaaatgagagcgactggatagaagcgaatgagagcaacaaaaacacgagtctcagcggtgatctcacaaatagtaacgatctgaacgattctagcattaaagaagacgatttgaacaattctaatggctccaacagcggcgatgaatcccacaattcgctgtcttccaagcagtctaaactcagcgactttgtgtcacagatgaacaaggagctttcagaggaggaaacacgcagcctaaaaaagaagatgaaatttgagagatgtagcagcggagaatactga

SEQ ID NO: 4009 - DNA, 390 bp, synthetic construct
  source 1..390: mol_type = other DNA
atgttcctggatcggttttcactcgaacgcaatgatctgaacttcaggaaatacaacctcgcaatcctaatcgctagcctgcttctgtacctgttgaacatttattttttaagttccttcggagatttcttcaaattttattttgacgacctctttgcaattatggtcctcttcagcttcctgaaccttgtttttccctataagatcgacaatttctggataattgtaatcatcaccatattcgccgccttcttttgggaatatgtggcgctgttcatcaagccaggctcggtgttcgactacctggacattctcgcttactttctatccatggtgatctacctgatcctgatttacgccttcgagggggagttgaatgtcagcttttga

SEQ ID NO: 4010 - DNA, 228 bp, synthetic construct
  source 1..228: mol_type = other DNA
atggaagacgaggtcatcgacgtagaggattatgaggttaaggagacagcaattgtggtcagcgatgacgaagaggataacgactactctaaaagttcaaacgacaacaattacacatccaacactaccttccggacggccaccatcagcctttccaatgaaaagctgatcatactagctctggtggcgattgtgctcatcgccatattcctgctcaccttttgctga

SEQ ID NO: 4011 - DNA, 231 bp, synthetic construct
  source 1..231: mol_type = other DNA
atgaaccagttctgtccaaagtgcggcgcaaagctgctagacccttatgccaagttttgcagccagtgcggcacgaatctgactgagaagaaagagattaacatcgatgaactcccggaggagcgcatcgacctgagggaagggatgacaaacaccaataagggaatgtacagatacaccaaatggggtcggcgaaagaaaaaacccgtgaactgggacatggaaaagtga

SEQ ID NO: 4012 - DNA, 351 bp, synthetic construct
  source 1..351: mol_type = other DNA
atgagaagtttagaggaaattggcgcgaaaatagaggaactgaatgataaaattgcaggaatccgggccgaagatgaggagaacctcacgaacgaactgaaggtcatcttggccggctccgagctgcagtcaatcatcctgacaagcactctcacaagcaaagagcagcaagtgcgggacttgctggacaagttcgtacagcgaggggacgagctaaacgagaggtacgaagaggccagcatagaggatgatgcagccgctaagaaccagctgcacgctatgatttggaccaatgacatccgcatcgacaccctcaagtgggtgcttgaagaggaagacgtgggtatttga

SEQ ID NO: 4013 - DNA, 1419 bp, synthetic construct
  source 1..1419: mol_type = other DNA
ttggttcttatttgccctatccttgctgaagaggcgcacgcgacgacggtctttctcacatccgacaacgtgttaggccacgatgaggacatgcagatgctaaacgatatcaagcagcagatcgagaccaagtcaaacgggcaaattacagtcatagtggatgagaatgcctccaaccctggagaagggactcgggccatgaacgctgattgcgacatcgctgtcacaattgcctacgcctgtgccggcaacctggtggacctggggagctacagcgtgcagtccaccaagaagatcatctacgtgaatgccggctcactcgaccttaccagcataaacttcctgaggaggagctacgacgacaattggtcttcatccagctttgcatccctgcaaaaccctgggcagtacctctacgattcgggcatcaccctgctccagcccgggcagaagttctacggggaaacggacaatggaaacctggaccactgcagctctgagatcgacggttacattgcagatgaggtgatgaagcaggtctacagcaatggcgttatccggaaactggactccgattatatcaacagacacaagctggacccgaagtacttagccgaagattccaaaaagatcgtggacggctttggcactccaatggcagattcctatggcagctacaccacccagcagctgctgtatatgagcgcgtcctatttggtaggatatagtctagatgtgccccaacaatttgcccccccagagaatcccgccgaatactcggcttttacaaagggaacctacagtttcaatgagtactgtgaaatggcagatattgtagtggactatatgaatgagcatggtaaggctccagatagtataagctataagggagctacaatcagttattatgacctggtctataacttcgcgctccttactcaggatgatttcgatgccgctcatatgaacttccctcagaatgccgacttccagaagtacaacagtaacatcctcctggacattctccccatagccatcatcatcgtggtcattattgcagtggccattataatcagaaaactgattaaaaagggtcggagaggcattaagcgtatcaagaaccggggcaaggacaataattactacagaaatcaggcaagtggaaacagatctcggaaatcaagaggaggtagccgcgacaattattccaggaacagtgcccgctataataattcacgcgggaaccaatcctcgcgcaaatctcgcaacagcggccgaccgaggaactctcgaaacagccgcgacagcaggaacagcaaaaacaaaaggtcaactaaattgttccacaaaaatgttgacttggaccagtacgataactctcgtagcaaggagccaaaacgactgaataagaaacggtga

SEQ ID NO: 4014 - DNA, 930 bp, synthetic construct
  source 1..930: mol_type = other DNA
atgacttctcagaccagcgaaaaagaaaatcaggagctgatcgacagtctgaacaacgagattgactacctgaaggagatcttgactagcaagatctttgaagaagagcatctgttaaacttcacctgccgtgacatcgaaacagattacgccctgaagtttggcgtttataagtacaaaataaagggatataaactgaagattaaaaaaacaaaaaggacaatcgagctcatcaaaaagatggtcaatcgacaggagataaatcttttcaacaagaaactcgaggagatgcagccaaatcaagccaaaatcaatgaaaccaagatcaacaaacctcgactcaatatgaaggagatcgaagaccacattgaaaatgaatttaaggaagaggacatcgaactcgagaccgagacggcgagaaccaacatcctgatcgaagagcaccgcaacaatctggatcgccgcgtgccggtgcgggagatagacgccctttataaggaatgcattaggaagatgcaccccgatctgctgttcaaccccacagagtatgaggagagcctatttttcaatgcaaaggaagcttatgaggacagggatttcgaggaattggaagcaacgtacaacctcattcacacccacaagatcgaggagaccccccaaacagtggaggagatggagagattcattgaacatctcgagatccatataaaactcgaagaacgggagatttcgaacattatcaactccaagccatacactcagcagaagttccttctaaaccagaagaaggtgaatgattacagagaggggctggtcaaatcccttttggaggtagaaaaggagtacattaagtgtaagcgggagttaactgacctgaaatcaaaaaacaacttgagttacaaactggatctgacgaagaaggacaactga

SEQ ID NO: 4015 - DNA, 447 bp, synthetic construct
  source 1..447: mol_type = other DNA
atgctcatccgcgaatttctgccatctgatctggcgagagtgtatcagatcgaggttgagtccttctcaacaccctatgatatccccatcctgaagcaactgtatgatatcggggccggatttctcgtagcaaccgaaaacggacaggttgtggcttatatcattttctggctgaaagaggaaaacctcgggcatattatcgctctggccgtcgaccggaagttccggggccagcacatagcaacgcgactacttatgatggcggtgaccgtcttaaggaactgcagcgtgccgaaaattaccttggaggtcaaggcccagaacactcctgccattagcttctacgagaaattcggctttaaaatagagaggaaggtgccaaattactacgaagacggcagtgacgcctacgtgatgtacttttacacagactccatcaagaattga

SEQ ID NO: 4016 - DNA, 414 bp, synthetic construct
  source 1..414: mol_type = other DNA
atgtgggatgaccttgaagaatacattgagaatctaagcaatgattacagctcaaagaacaatcggaagacaaagattgtagagattggcgtgggtaagttccagaccatcagtgaccacctgagggaaaatgagaacatcgagctgataatgaccgacatcgacccggcaaacgagaacgtcgtgaaagatgacgtgtttaacccaaacatggacatctacaagggggcggacatcatattctctatccgaccccctggcgagatccaagaagccattatgaaaatcagagatgagatagattgcacgttgatcattaagcccctctttaacgaagacctgaacatcaaagccaagggaatgaaactcaaaaattataaccgcgcttccttctacatttatcagaaggagtga

SEQ ID NO: 4017 - DNA, 2721 bp, synthetic construct
  source 1..2721: mol_type = other DNA
ctcatagaggaaatcctcaaaacctacaacaccacaattgagggtctgaccaatcacgaggctaaagagcggttagagaagtacggccctaataagatccaggagcaggagagcgacgggctgttaaaactctttctgagtcagtttgccgatgccctgatctttctgcttataattgcagcgataatcagctatctaattggtaaccatttggatgctgtggtgatagttattgttgtgattatcaacagcataatcgggttcattcaagagtatcgtgccgaaaacgccatgcaggaattgaaaagcctagtgagcaaggaagcccatgtaagacgcgagggcaagacaaaaatcatccccgctgagaagcttaccattggggatatagtcctgatcgaagagggcaacaaagtcccggccgacctgcttctcgtggagagctatgaccttacaatcgatgagagcctgctcactggggagtctgaagaggttaggaaaaatgcggattactccaatatgggcaatttggaggaaaagatcagaaatatctccagccactaccaggaggaggaattgcgagagaagatcgtctcgatgaatagtaatgtgctgtccggtcggggcacgggtgtggtgattgcagtggggatggacactaccatcggaaagatcgccaccatgatccaggaggaggacgaggagacgcctctggctaagaaagtggacaagcttggaaagcgcattggagctttgtccatcgccgtctgcattggagtattctttatagatttcttccaggactacaatatcattgaaggatttatgactgcagtgtccttggcggtcgccgcaattccggaaggcctgcccgccgtgctgacattgacgctcgcgctcggaatgcaaaagatggctaaatcaaacgccatagttaagaagctttcttcagtcgaaaccctgggtagttgcacattcatctgtacagataagactggcacactgacagagaatcggatgactgttagggaagacttccttctcgataacgacaagagtgtactgatctcgggcctttgtaataatgccaaatatgaaactgtggacgaaggcgagtatgaatctctagaaaaagacaacaatagggctcgcaacagtagtgaagaagacagcaaaaagacggaaaacagcaaagaagagagccagctgatcggcaaccctacagatatcgcagcctataacttcgcaaagggccacggctttgacaaactcgaccctgaacactcctacacccgtctggatgagatcccttttgacagtaaccgaaagagaatgagcgtgatctataagaaggagactcagaacgagaccgagtactacatatttactaaaggcgcgcccgagctgattctaaacctatccgataggatagaaaaagacgggaacatcaaagaaatcgattctgaaaccatctccaaaattaaccgcaagatcgatgagatgaccaataagacattaagggtcatcgggctctcctataagcagatagatgaggaagactacaataagatcaaaaatagccacaacgataacaagattcatgatatccaagaggaactggaaagaaacctcatcttcaccggcctgctcgggataatggaccctccacgagccgaggcgattgacgcagtggccagctgccaaaaggcggggatcgaagtcgtaatgataacgggagaccacaaggacacggctactgccatcgcccgagaaatcggaattttatcaaaggaggattgtgagagcctgagcaagcatgtgctgaccggtgaggaactggacagactcaatgatgatgagtatcggaatatcgtggaggaaatcaaggtttacgcccgggtctacccagagcagaaacgcagaatcattgatatcctgcaaagtaaagaccacatcgtgtcgatgactggtgacggggtcaacgacgctccggccctgaaaaaagctgccattggagttgccatgggcagcgggacagaggtcaccaaagagtctgctgacatgattattcaggacgacaactttgcaacaatcgtctcctcaatcaaagaggggaggaccatctatgacaacctcaagcggttccttaagttccagctctcgaccaacataggagccattctgaccatcactatcggctccctcctgcctatccccacgccctttactccaatccagcttctgtggatcaatattattatggacggcccacccgctcagtcactggggctggaggcctctgaggacaatattatggagaggccccccgaacggggcgagctgctggacaagaagaccttgattaagattacaatttccggaattgtaatgaccattggcaccctgtccctgttcatttatgagttgggactaaattcaccctacggtaagaccaaggccatcaccatggcatttacagtgttcgtgctgtaccagctcttcaacgcactgaactaccgctcaaagagtaacgtgaaaaacaagatgcttatcttttcactgattggaaccttcatactccaggtgctggttatctacgtgccatacttgcagataatattcaagacatgcccaattgagccattcgattggatcttggtgatcatcttatctgcaatcattctggtcacggataaaattgctaaccgcctcatcaactga

SEQ ID NO: 4018 - DNA, 123 bp, synthetic construct
  source 1..123: mol_type = other DNA
atgaacctgatcgccgatatcgccagtggcctcttttggatgagcctggtgatgatagggggtttcattgtcgtgattgcactgatgaccctaatcggaaagggcagctccgctgacttctga

SEQ ID NO: 4019 - DNA, 309 bp, synthetic construct
  source 1..309: mol_type = other DNA
atgaatcaggcaagaatcaagctgactggaacagacccagagaagttgaactacgtgtgcgaccagcttaagaaaatcagtgagcggacgggagtggatattagcgggcccatacccctgcctaccaaaaaactcgttgtgcccaccaggaaaagcccggacggcgaaggcaaggccacatgggaaaaatgggagctccggatacacaagcgcctggtcggcatcggggccgacgagcgagctatgcgccaagtgatgaaggtgaatgtaccagataacgtctccatcgaaattgagctaaagaactga

SEQ ID NO: 4020 - DNA, 1242 bp, synthetic construct
  source 1..1242: mol_type = other DNA
atggcaaaggagaaggaacatttgaatctagcatttattggccatgttgaccatggcaagagcacattagtcggacacttgctgctgaaggccggtgccatcgccgaacagcagctcgatgaaggggaagacaagttccgctttgtgatggataagctgggagaggagcgggagcgcggagtaaccattgacctggcccaccagaagttttctaccaataagtacgactatactgttgtggactgcccgggccatcgggacttcgtgaaaaacatgattacgggggcctcccaggcagatgcagctgtgctggtcgtcgccgctaatgatggtgtgatgccacagaccaaagagcacatgttcctgtccatgacgctgggcattaaacaactaattatagcaatcaataaaatggatatggtggactacagcgaggacagatataacgaggtgaaagacgaggtatccgatctcctccgaagtatcggtcgcgatcccgccagcactccttttatccctatgagcgcctttgagggagacaacatcaaggagctctctggcaacatgtcatggtacaaaggggacgccctgatgacagctctggacaagttggtgcccccggagaagcccgtcgacctcccactgcgaatccccattcaggacgtgtacagcatcacaggggtcggcaccgtcccggtgggaagggttgaaacagggatcatgaagcagggagacaacgtgatcttcgagcctgccggcgtgagtggcgaagtcaaatcgatcgagatgcaccacgagactttccctgaagcggagcccggtgacaatatcggattcaacgtccggggggtcggtaaaaacgatatcagaaggggcgacgtggcgggacataccgccgacgcgccaacagtcgctaaggagtttactgcacaggttgtggtacttcagcaccccggcgtgataaccgttggctatacccctgtgttccactgtcacacctcacaaacagcctgcactttcctcgatctgacgtccaaacttgatcccgctaccgggcagcccgaagcaacaaagccagatttcattaagacgggggacgccgctatcgtgcagataaagccaaccaagcctatggtgatggaagaagctgctaacattccacccatgggcaggttcgcgataagagatatggggcaaaccgtagccgccggcctgtgccttaaagtgactgataagaaatga

SEQ ID NO: 4021 - DNA, 2208 bp, synthetic construct
  source 1..2208: mol_type = other DNA
atggtgatgattttgagtcgccgagataaaatgatcgcaaaaatcaaagagctcatgtaccagccgaaaaatatccgcaatataggcatctgtgcccatattgaccacggcaagaccacactttccgacaacctcttggcaggcgccggaatgataagcgaagagctggcaggagatcaacgctttttggatttcgacgaacaggagcaggcccgggggatcaccattgacgcggccaacgtgagcatggtccacgaatatcatggcgatgagtatctcattaacctcatcgacactcccggtcacgtggacttcgggggcgacgtaacacgggcaatgcgcgcggtcgacggtgccgtagtcgttgtatgcgcggttgaagggatcatgccccagacggaaaccgtcctccgtcaggcgcttcgagaaaaggtgaaaccagtgctgttcatcaacaaagtggacagactgatcaatgaggtgaaactgggacctgaggagctggcaaacaagttcattggcattatcaatgaggccaacaagctgatcacaaaaatggctcctaaagataagaaggacgaatggcttgtcaaagtggatgacggcagtgttgccttcggttcagcatatcataattgggctatcaacattcccatgatgcaggagaccggcatcaactttaaagatattatcgattactgtaatgatgagaatcagaaagaactggctaagaaggttccgctggctgatgtgttattaggcatggtagtggagcacttgccatcccccgaggtgtcccagcaataccgatgccccaacatttgggatggagacattgaaagcgaggctgggcaaacgatgataaataccagccccgacggccctctggctgtcatggtcaccaatgtttcggtagataagcacgccggggaagttgctaccgggcgcgtctatggaggcacggtggagcaggggagtgaagtctacctggtcggaggtcaggcccggtccagagtgcagcaggtgggggtgttctttgggcctgagagagtgcctacggagaaggtgccagccggcaacattgtgtacattaccggagccaagggagctaccgccggggagaccatctgctctccggagaataagattgtcgagtttgagggcatcgaacacatcagcgagcctgttgtgacagtggcggtagaagctaaaaacaccaaggacctacctaagctcattgaagtgctgaggcagacggccaaggaggacccaaccattcacgtgaacattaacgaggagaccggcgaacatttagtttcaggtatgggagagcttcacttggaggtgatcggggtgcgaatcaataataagggtgtcgacatcctcacttccgagcccattgtggtgtacagggaaacagtggccggcaagactccaaaccctgtggaggggaagtctccaaacaagcataaccggctgtacctcgaagtgtcacccctggacgattccatatttgaagccttgcagaacggggacatcaaggaagggaagatcaaagccaaagaggaggcccagcaattcatagaccatggcctcgacaaggaggaagctagaagggtctgggatgtgtacaacaagagcctgttcatcaacatgacccggggtatccagtacctggatgagatcaaggagctggtcattgagggcttcgaatctgccctggaagaggggccagttgcaaatgagatagccatgggaatgaaattcactcttgtggatgcaaagctgcacgaggacgcagtgcaccgcggaccggcccagatcctacctgcaatccggaacgctattaaggggggtatgatgatggcggacccaacactcctggaacccgtgcagaaggtgttcataaatacaccaacagactatatgggatcggttactaaggaaatcctaaaccgtaggggtcagatcatcgacatgcccactgaaggcgatatggtcaatgttgaggccaaagtccccgtcgctgaaatgtttggctttgccggcgagatccggagcgcaacacaaggccgctgcctgtggagtactgagaactctggatttgagagactccccagggagctgcaaggccagatagtaagggaaataaggcagagaaaaggacttgctcctgagcccttcggcccggaccactatctgggatga

SEQ ID NO: 4022 - DNA, 561 bp, synthetic construct
  source 1..561: mol_type = other DNA
atggccaagttatttaacaagtgggacctcgatgaagtggaagtggaggacctgggccttaagcgatacatttgccttgatgagacgattgttcctcataccctgggccggcacgtcaaacggcagtttgccaaaagcaatgtgtctatcgtcgaaagactcatgaacaaaatcatgaggaccgagcgcaactccgggaagaagaataaggcctacaatatcgtaaaggaagctttggagattatcaataggcgaactaagcagaaccccgtgcaagtactcgtcaaggctatagagaacaccagcccacgggaggagacaacacggatcaaatatgggggtatcggctaccaagttgcggtcgacatttcaccgcagcgcagagtggacctgtccctgggattcctgacacgcggaactctgcagtccgcattcaagaacaaaaggagcgtggcggagtgtctagccagtgagataatcttcgcttcggaagaagatacccgtagtttcgccctgcagaagaaagaagagaaggagagagtggccaaagcagcacactga

SEQ ID NO: 4023 - DNA, 426 bp, synthetic construct
  source 1..426: mol_type = other DNA
atgcccggccttttcgccgcaaaaaagctgaaaaagaataggcagaattttaagtggaaggacgtggattacaaacgtagggcgctgcgcctcgatgttaaagctgacccgctcgagggggccccccaggcccgaggaatcgtgattgagaaggtgggagtggaagcgaagcaacctaactccgccatccgcaaatgcattcgggtccagctgatcaaaaacgggaagcagataaccgcattcgctccaggtgacggggctatcggtttcatcgatgagcacgacgaggtcatgatagaagggatcggcggaccaagcggcagaagcatgggcgacattcctggcgtgcggtggaaggtgagtaaagtcaacaacgtggccctatctgaaatggtatcaggaaagattgataagcccgttagatga

SEQ ID NO: 4024 - DNA, 405 bp, synthetic construct
  source 1..405: mol_type = other DNA
atgcgcttcattgctctcttcgagagtatgacaggtgccatggtcaaggattgcatcattgacgacgaaaattccaaggtcacctttgttgtgaaaaacggagacatggggctggctatagccaaaggcggcaccaccgtaactaaagtgaagaaggcagtcggccgaggggtggaaatcatcgagtacaatgaggaccccgaacagttcatcaagaacatcctgtccccagcggaactcaagtcaattaagattgtgacgaaaaacaatgatgagaagatagcctttgtgaacacagattctagcaacaagaggatagccatcgggaaaggcggaatcaacatcgagcgggcaaaactactggccaaaagacagcacaacattagcaatatcgtgcttaagtga

SEQ ID NO: 4025 - DNA, 300 bp, synthetic construct
  source 1..300: mol_type = other DNA
atgatggacgtggagcggggaataagggtcgccgtggacacaggagatgtgaccctgggctcagagaagagcatccagtccctaaagttgggtaaaggcaagcttgcagtggtcgcggcaaacagccccaaggaaattctggaagacgtggagtactacgccaatctctccgagatcccgttcattgtgtatgaagggactagtgtagacctggggtcggtttgcggcaaaccttttacagtcgctaccctcatcataaacgatccaggcgatagcacgatcctggaggccatggggtga

SEQ ID NO: 4026 - DNA, 1245 bp, synthetic construct
  source 1..1245: mol_type = other DNA
atggcaaaatatgacatttcaatgattaaggacaacaactactacaaagagcagtgcgagcacgctgaagaatctctcaacaagaaatggtatagcgagtcgattctcacaatggctatcactcttgaggaactgacggaggagctgatcaagtataccaaaaatatttccgatggaaagcttagtcagcgggacaagatctggatactgaaggataatggcatcaccaattacaacatctacaactacttgcgggaggccaacatcagccgcaacaaactggtgcacggcgagatccctaggaattatagcaatactttttccatgtataaaaactttcttaagattgtattttggtatgacgaaaactacgtcattggaaagctgaacactaagagtaagctaaagcaatacctgaataaagtttgtgatgattcacatatcctcaatatcatcgagcaggagattaatgatggcgccatcacggaaaatcatcagatcattaagcgccataacaaagagctgattgattatgttgaaagtctgaatatagagttagagattaaagagaaattaataaaagacatctattctggtgtgaccaaaaacaggtcccagatagaggaaaagattaagagagaaaagaaagatccaatcataggtgtggtgaacatcgtgaatacagagaacatgatgaagtacacgatccagtcgaccgacattgacaaagaagtcaaggaaaacatggagaaactcgaaaacaacacccacgagaacaagcagctccaggaagactacaacaaatacgggcccgagtccttcactaccgagacagtcaacatatgcaaaaacgaggagctgagcaagatcacaaaggaggacgaaatcatcttcaatgccaacaagagctacaataatcgaaagaaagatattaacccgaagataggcattgcaaacatcattaatacagaaaccctaatgaagtacacaatccaaagcactgacctggacaaggagatcgaggaaaatatcgggaaattggaaaacaacacccacgaaaataaacagctccaagaggattacaacaaatacgggcccgaatcattcacgatcgagacagtgaacatatgcaagaacgaggaactgagcaagatcttgaaggaagacgagattatcttcaatgcgaacaagtcctataataacaataagaaggaggagaccggagagaagaatcacaccctgtga

SEQ ID NO: 4027 - DNA, 1755 bp, synthetic construct
  source 1..1755: mol_type = other DNA
ctgctcgggggcataaatctcaacaatgaggacattataatcgggattgatttcggaaccacaaattcggccgcttgcatttacaaggatgaaaaattccagataattccgagcgctatgggttatgattacttccccagtgtggtagcagtgaacgagaatggtgaattgctagtgggacaccatgctaagaagcaaatggcctcaaatgccagcaattctgtggcagaatttaaacttaaaatgggtgaaaacgagactattaagttcaacggcgaagataagcttccccaggagattacttcctatgttctgggtcgtataaaacgcgacgccgaagcgtacctcggcaaacctatcaataaagcagttattagcgtccccgcgtcctttgataacgacgccagaaatgcaaccatggaagccggggagatcgccgggtttgaagtcgaagctctggtggacgaacctacagccgcctgtctgacctacagtctcacaaagaacttcttaggcaacatcctcgtcttcgatatgggagggggcacgcttgacatcatcatcggagcctttgacggttcggaacttgttcccaaagtcacgactggcgctcgctttggcgggcggaacatcactatggctctccgggattatctgcagagagactttgaagaacagaacggactgaagctagaggactacatcacgcctgaatacgaccccctgatcgacctctataacgccactgaaatcgctaagatagagttgtccagcaccaaaaccaccaatgtgcacatcgatagcatcgtcatgaccgataaagggcagcgcatcaacttggataagaacgtaaaccggtcggacctgaacaagctaagtgacgaggtggtcaaaggctcaaaggagaaggtgctggaggccctcaaggacgcgaaactgacaaaggacgatatcgacttcctggtgtttgtgggcggccccaccaagatgccgctgatcagggagagcatcgaaaaacttctgggcaagtccgccgctgagggcattgacccaatggtgtgcgtggctcaaggggcgtccatatataaggggggtccaattacagtcggcaccatcaattctttgacattgagtgttgtaatcaacgaaaaagagagcgacccactgatcccaaagaacacgcctcttcccgcagaggtgacgaaggagtaccataccatgcgggacaatcaaacatcagcaaatatccagatcgtggagggagagtccatcctggccaaagagaatcacaccctgcacagctttaccctcaggggactgccgcccaggcctaagggcgaggtcgcaatccaggtcaagctgaaagttgataagaatggaataatgggactgtctgccaaggaactcagcactaataagaagctgtccgcgacattcgactcaagtaaccgcatgtccagcgaggagatcaagaaggcagggctggacaacgagaaccttctgagtgattacgaggagaagatcaagcagcgaaatatcattaacgacgccgaggaggtgattttcgaaggaaaaaaactaatcgagaactactcaggccacatgctgatatctgataaaaacagagtgaacgagaacattgagaaactcgaggggctcctggtgattccaaagaacttcgaattaattaagttgattactaaggatctgcgaaatttaattgagaaaattgaatccgaggacttctattactga

SEQ ID NO: 4028 - DNA, 2052 bp, synthetic construct
  source 1..2052: mol_type = other DNA
gtggtaaataaagggtccaatgatgattttaactgcaataactgggagctgggccggatctttgcccgcaaggggaattttaccgaagcagacatccgttttgaggccgagctcaaccactcgctctcgcctaatagcctcgtccttgatgaccacggccatctgttgaacaggatggggaagtatcaagatgctatcgataagtttcgaaatctactcaatagtgacgagaactatgtgagcagcctgtttggtattggtatctcttacatcggcctcaacaagctcggtgacgctctgaagtactttgagaaggtgaacgaactcgacgaggaacacgcagacgcctggtactactccgctataatctacggcaatccattctacccgaagtatgatctgaacgtcgccaaaatccgctataagaactaccagaaatcaaaggagagctacatcaacgatcccaagtatttcagtaaacccttcgacaacctgagctgggaggagctgcacgattactataagtgcaacagcctattccggataattgagcaaagcctggataaagggattctcgacgagttcttgaacttcagcaacgactataaacgactctattgctttgacgaagaggggctggacaagcagttcgacattttcagactgttcgaaaatgacacgcctcttgctgacaagatcgataaattccatgaggacaaaaatatcgaagacaagttcgagagcgcagggtttgaggaggatttaatcgagggcttatcctttaaacttggcatgatgtccatcgacgacaagaaaatgttgaacgaactgatggattactccaagagttcacagttaagtttcaatgatatcaacgatctgatccgggaaaatgtgctggacgaggatatgagcctcgacgacttctacgaaaatcgcgaatatatagttaaaaatcgcatcaagaagaacaactccgaatatgagaggaacgtcgaaaagagagtcaatacagagttgaagaaccagatcgcaatcaacaaacgcctcaacgataacctgattgaaaaggacgaggtgatcgaaaagcttaatgacaatcttattgaaaaggatgaagtgatcgagaagcttaacgagaacttgaacgacaaagaggaagtgaaccagaagatagaggacaagctgagaaacaattatgagctgctgagcgatgaaaacataaaccaaccagagcaccggttcgataattatgattttagcacgaaggagattaagtcctccttctcgggcctgaaagaatcaatggactcatacttggaggacatggagtcttacctgaacgagtgccaggacgtcagttcgatgaatattctctcaggtatcaataaccagtgttaccaggatgacttggagtacattaaaaatgaatgtgggatctccgatgtggatctgaaaactctgaaaagcgcctttaaggacttctacaacggcaagtttggatctgcctcttacaacttcagtcttgagcggctaagaaagacaatcggaaaaacctctgagctcaagaagtacaggtacttcttaaaactgacttccaagtcccgagaaaagatactggaagaagaggactttaattggctcattattaaaaatctgaagctgaaagattacaagaacgagaaagagaagaagatcaataagggaaaaaaacttaaaaaggaaaagtaccccataggatggttcaatctgggcaacatctgcttcgactatgcgaactcccagtctgttaagaccaccgtaaaagccggaaacaatgcgatggacgcttacgagctggcctatttttgttataagtgcgccgaggacagtatttctaatcaggaagaaaactcaaagtacgagttcaactttaaggacacaaaaaacgaacaagagttcaaaaacaacgttgtgaggatgatttctaattgtgaaatcaagattttgcagcaggagattaagggcgagctaaaaaaactggataaactgcagggaaagttcaattggtga

SEQ ID NO: 4029 - DNA, 1638 bp, synthetic construct
  source 1..1638: mol_type = other DNA
atggtagacgccgaagccaaactggacgcaatcaaaaaggtggaaaaggtgttgaagaagaataagattgactttcctcagagttacattgatgaactggcaagtgcctatatcagaagagatctgacggacaaggaactcaacactctggttctgaaggtcgaagaggcttatgaacgtgctcatatcgaagcaggcgaagccgtaggaaccgtggccgcgcagagcgtaggcgagccaggaacccagatgaccatgcgaaccttccactacgcaggggtggcggagctcaacgtgacactggggctgcccaggctgattgagatcgtggatgccaggaaaaagatttccacgccaacaatggacatttacttcgaggacgagtacaagaacgacgaggagtttgtcagaaagttggccaaccaaatcggcaaaagcacaatcaacgatatcttagctgattatgacattgactacttcaattacaagattgtcactgtgcttgacaatgagaaaatcgagtctcgccgcctcgatatagacgacattatcagccgcgttcagaagacattcaaaaagctcgaaatcattaattatggcgacgatgagcttattgaagaagaggctaaagatatcgaagatgtcgactccgatgtggaggagaccgacatcgctaaggtcgacaaggtggacgaaactgggatggctaaagcggactctgacgctgaggagactgggatggcgaaagctgattcggaagaagatagtgaaactatccaagtgtcagatgaggaagtccaggagccgtccaacatcaatcttaaaaaatcagatgaaaacattacattaatctttgagcccagcaagcgaaccatcagagaactgcgcctcctcggggataaggtccgggacctacagatctcagggaccaaaggtatcggtaaagtgattatccggaaggacgatgccgagtgggtgctgcataccgaggggtccaacctgggcgcaatctttaagattgaggggattgacaaggtaaggtccactacaaacgacatacacgagatagaggtggttctcggaatcgaggccgcccggaatgccattgtctatgagttgaacaggaccctaagcgaccagggtttgacggtggacatcaggcacatcatgctggtggcagacatgatgacctccgagggaacggtcaagtccattgggcgccatggcatctccggggagaagtcaagcgtgcttgcccgggccgccttcgaggagaccggaaagcacctgctgcacgcaagtatccgaggagaggtggatgatctcaccggaatcatagagaacattattataggacagcccatacctctgggcacagggagcgtctccgtgacaatgaaaccagatgcctaccctataaccgcaggcataacgaaacggggtaaaggcaagagcggtggaagcgccagcgaatctaaggaggttaacagtgggatcgcgaaaggcggaaaaggcaagtcgggtggctcagcttctgaaagcaaggaggtgaatagcggaatcgctaaaggcggtaagggcaagtctggcggctccgcctctgaatcgaaggaggttaatagtggcatcactccctga

SEQ ID NO: 4030 - DNA, 2781 bp, synthetic construct
  source 1..2781: mol_type = other DNA
atgtcaccagatcaaatcagggagatgtctgtggtaaacatcacccgcccggatacctacgatgaagacggatacccaattgagaatggcctgatggactcgcgcctgggggtgatcgacccaagtttaaaatgcagaacttgcggtgagaaaggaggagagtgccagggccactttggtatgatagacctcgccagacctgttattcatgtgggtttcggtgatgacattcataagatactgcgtagcacgtgtaatgagtgtggccgcgtcctactggatgaggaagagatagaagagtatactgaaaagctgaatgagctgcaggaagctggcgaaagcacagaggatctcataaaggaggtttacaaaatctgtaaggccaagaaggcaaaggatgtctgccctcattgcggcgctgaacaggaggacattaagatcgtgaagccaatcggcattatagaggtccgtaaggaatacgatgagaacggagaattgctcacagatgccaatggaaatcctgtaacaacagattatgatctcacagcctctgaagtgagagagaagctcgagcgcattccagatgaagacgcctatgtcctgggcgtgaaccctgaagttgcaaggcctgaatggatggttcttacggtgctgccagtgccccccgtcactgtaaggccgagtatcaccctcgatactggcgagcggtccgaagacgatttgacccataagctggtcgacatcctgcgcatcaatcagaggctgattgagaacatggacgctggcgctccacagctgattgtcgaggacctctggcagctcttgcaataccatgttacaacgtacttcgacaatgaggccagcggagtgcctccggcaaggcaccgaagcggaaggccccttaagaccttggcgcaaaggctcaaagggaaggagggaagattccgaagcaacctgtccgggaagcgggtcaacttctcagcccggaccgtcatctcacccgaccccaacatcagtattaacgaagtaggcgtgcccgaaatgatcgccaaagaggttactgtacccacctacgtcaacgaatggaacattgaggatctgagggaggcgatcctaaacggccctgatgcccatcccggcgccaattatgtgagaaaatacaatgaccggatcaaagactacaataaggtccgcgtactggattccaataaggagaccgtcgccgaaatgttaacttgcggggacattgtgatgagacatctgaaggatggagacattgttttattcaaccggcagccctcccttcaccggatgtcgatgatggcccacgaagttagggtgctgccatacaagacctttagactgaacctttgtgtctgccccccctacaatgctgactttgacggagacgagatgaacatgcacgtgttccagactgacgagtctcgggcagaggcgaagtcgctgatgagagtccaggagcacatcctgagccctcggttcggcggacccattatcggggcgatccacgaccacattagtggggcctatctcctgacccgggacggcttcaccgttccagaagatgacgccttccaaatgatacgaaaatcccaccttttgaaatgcccttatgatgaatatcttaaaagggatctggatgagaaggaatataaacagcaaatcaaggaatacaacgaaaagctcaaacgtaaacaccgcgattggactgggaaagagttattcagcctgctactgccaagcaccctgaacatgaattaccgagccgaaatctgtcgaaaatgtgaggagtgcatggcagaggcttgcgagtacgattcttacgtggtgattaaggacgggcagttgacccacggcgcaatagacgaggccgcctatggttctttctcaggcaaaatcctcgacaatatcgtgaaggagtatggtccggcctacgcgaaggagtttcttgaccggtccactgaccttgctatctgcggaatcatgaagacagggattaccacaagtaccaacgatgaggaaatccccgaagaggccatcgaggtaatcgacgcccacctagataacgctgagcagaaggtcgataaactgattgagacctatgagatgggcgagctccagcccttgcctggacggagtgccgaggaaacgctggagatgcggattgtgcaggtgctaggggaagcgagggacgcagcaggggacatcgccgctggttacctcactatggggaagcagtcccccgacgattcctacgaccatgtgatggctgtggaaaaccactctgtggtgatggcaaagaccggagcccgcgcatccatgttgaacctcgctcagatcacggcctgtgtggggcagcagagcgttcgagggggccggataacacgcggatatctggccagaccgctgccgcactttagaaagcacgagctgggggctcgcgctaaaggctttgtgcatagcagctacaaagaaggcctcgaccctgtggaatttttcttccacgctatggggggcagggagggcctcgtggacacagcgattcgtacagcccagtccggttatatgcagcgcagacttgtgaacgcactggaagacttgaacgtccgatcagacggactggtgacggacaataagaatcaggtgatccaaaccgtgtttggggaggatggcatagacccagcaaagagcgactttggtaaagtggctaacctggacaagctgatcgacgagatgcgcatcaaagatgagggcaaatga

SEQ ID NO: 4031 - DNA, 1812 bp, synthetic construct
  source 1..1812: mol_type = other DNA
atggtgaaggcgaaaatttacattaacggaaaactgacaggaacttgcgatgagcccgaggagtttgtgaaggagatgcgcgctagacgccggtctggcgagatccataatgaaatgaacatcacctactatgatgagaaccatgagatctacattttcactgaccccggcagggctagacgacctctcatcctggtggaaaagggcgagcccctgctcaaagatgagcacatagaagctatcacaaagggagagctaaaatgggacaatctgtttgagctgggcctgctggaatatctggatgctgaggaggaggagaatagttacattgccatgaacctgagccaactcaatgaagaccacacccatctggagatagaccccagcaccatgctcggtatatgcgcgggaatcattccctttagcgaccacaacagctcccctaggaacacaatggaggcagggatgacaaaacaggccttgggcctgtacgtctccaactacgcattgcgtaccgatacccgtggtcacctcttgcaccaccctcagactccactggttaagacgcgcatcattgatgccatcaattacgatgacaggccatccggacagaacctggtggtagctcttatgtcttacgaaggatataacatggaggacgcaatgattctcaacaagtccagcctcgaacgcggcatgggaagatccagcttcttccgctcctatgaggcttctgagagaaggtatcccgggggccaggaggacaagtttgaacggccggaaaaaggagttaaaggttaccgctccgaggaggcttacaaaaacctagacgaagacggcatcgtgaaccctgagtcccatgttgagagtggggatgtcttaatcgggaagactagcccaccaaggttcctgggggaaattgacgagttcggcaccgtggcagagaaaagacgggagactagcgtcacagtgaggcatggtgaaaagggtatcgtagatgcagtgctccttaccgaaaccgtggaagggagcaagttgaccaaaatacgagtgcgcgacacacggcaacccgaatttggtgacaagttcgcctcacgccacgggcagaagggggtggtcggcctcatactgagtcaagatgacattccatttacagaagacggcgtcgtgccggatatcatcgtcaatcctcacgcgattccatcaaggatgtcggtaggccaggtcctggagatggtggccggcaaggccggctgtatggaaggccaccgtatggacgggacgccattcaacgacaatgtggaaggcgaaatcaagagagccctgcatgacaacggattcgagtctgccggctgcgaatcattgtacaatggcgtcaccggagaacggatcgaggcggagatcttcgtcggcgttgcctactaccagaagctgcaccacatgacgaccgataaggtttacgcccggtcgaccggacccgtgcaggtgctgacacggcagcctacggagggtagggctcgggaaggggggctccgattcggggagatggagagagactgccttatcgcccatggtgccgcccttgcccttaaggaacgactcctggatgagtctgacaagtatgaggcagtggtgtgtaatgaatgtggaatgctggcagtatatgataagaataagaacaagatgtactgccccatatgcggagacagtgaaacttatcctgttgagatttcatatgcctttaaactattgttagatgagctgaaaagtctgtgtatcttcccgaaattaatccttggggacaaagcttga

SEQ ID NO: 4032 - DNA, 1563 bp, synthetic construct
  source 1..1563: mol_type = other DNA
atgaataatgagacatgggggctggtggactcattctttgataagtatgatatcgtggatcatcatatcaaaagttataacgattttgtcgaaaatcggattcagaatattatcgacataacggaacctatcaccattgaaaacgagaagggcaactatacgcttcgaaccggcaagcttaccatcgaaaagcccttcaccaaggaggcggacggtagtaagagcatgatttaccccactgaagcacggctcagaaacttaaactactccgcccacatgtatttggaaatggcactgcacgacaataatagcgatgaagaggaagagctggaaaatgtctacattggcgagctccccctcatgctcaagtccagtatctgccacttgcatggcctcagcgatgaggagctggtgaaaagaggggaggacccgaaggaccccggggggtactttattgtgaacggttccgaaagggccgtcgtgacaatggaggagatcgctccaaacaagatcatcctggagcgcatcgatgagattgaagatagacatgccaaggcaatcgtgacctctatcaaaagcgggtttcgagctcgcatcactctcgagtacaaaaagccacgtaaaagcggcgtgtttctcagaatctcattcccctatgttccaggagagatccccctcgtgatcttgctgagggctctgggactgtcgacagacggcgagattatctctaaaatatcggatgacttcaacttccaaatgtacattgctgacgacctgcaggtttcagagaaggacttgaaactggattcagatctgttactgagcctgtccaacgaggagagagacgaatatctgcagaaggcagctatcaaatacataggtaatagggtagcgaaaggcatgaccgaagagtacaggataaaacgggccgaagacgtgattgaccgctacctactcccacatatgggaatcgagtctgataaacgttacgataaggccatctacctggctgagatgactgagatgctcctgcaggtgattgaaggacaacgggagcctcacgacaaggaccactataccaacaagcggctgcgggtctccggggacctgacggaagacttgttcagggtggccttctcctccctgacacgagacatgagctatcggcttgaacggagcctctccagaggaaaagagctttcgatcaaacaggccgttcgctcagacgtgctaactgagaacatcaagcacgccattgcgaccggtaattgggtcggcggccgcgcaggcgtcagccagctactggatagggtaagttacatggccacactttcccaccttcgccgcgttgtatctcctttaacacgaagtcagcctcactttgaagccagggacttgcacccaacccagttcggaaagatttgccctaacgaaacgcccgagggcccgaactgcgggctggtgaagaacctggccctgatgtgtaagattagtgagggattcgatccggaggacatagtcaacatcataagcactatggacaatgtggatatgatagattga

SEQ ID NO: 4033 - DNA, 249 bp, synthetic construct
  source 1..249: mol_type = other DNA
ttgaaattcgatatcctggaacacaatgccgtgcccaagcatgaaatcctaacaaagtccgagatcaagaagattttcagtaagctggactatgacgtatcacagctgccaaaaatcaagatagatgacccggtcagcaaggccattggagctaaagagggggacgtgctcaaaatcacacgggagagccagaccgcaggcacttttattacctacaggctcgtggatggcttcacggcgaacaaatga

SEQ ID NO: 4034 - DNA, 915 bp, synthetic construct
  source 1..915: mol_type = other DNA
atgactaacgaaatcattaaggagaatacggaaaagattgaggagatcctgaacgggatcgaggaggccatggagaacgttaaggctaaatcccccctgacccactgcatcacaaattttgtgactataaatgattgcgccaacgcggcattggcgattggcggctcaccgatcatgacgaacgacagtcaggaagttgctgaaattggaaacatagccagcgctatcgtaataaacatcggccaagtctcgcagctccagatcaattcaatcaaaaagtcctgcgaacatgccaataaaacgaatacccctatcgtctttgaccccgtgggcgctggagtgagtaatatcaggaataccatcaccaaggaaatggtcgagttctatgagctcaccgcaatccgagggaacatgagcgagatcaaggcaatagtgaatcttattgacctagaaatcaaggacaacgaaaagaaagactctgctggcaaaggggtggatgtggccgaatccgatataattaccagagacaacctttacacaaacggcctgattgtgcgcgagctggcgaaggagctggagactgtagtgatggcaagcgggcccatcgacatcatctccgacggtgaatacaccttcgccctcgagaacggcgatgccatgatgcctctgattacaggcagcgggtgtatgctaagtacaatcattggaacatatatcggtgccaacgagccattgattggggcaataactgccagcgctctgatggccattgccggagaaaacgccgccgaggcggtcaagaaggacaatctgggtccaggaagcttccggaatttcctcattgataacctgtacaaagtgaccgcagatgacatttctaaacgggctaacctctttgagatcgatttaaactga

SEQ ID NO: 4035 - DNA, 660 bp, synthetic construct
  source 1..660: mol_type = other DNA
atgtttaaggccatgaaaaaagaggataagatgaacaagagctccattgattactcagtttatctcgtgacagaccacaggggtaaaaccgacgaggaaatcctcaatattatcgaacaggcgatcaaaggggggacgagtgttgtccagatccgggaaaagactgcctccacgaaagacttctacaatctggccctgaaggctaaggaaatcaccgaaaagtacaacgtgcccctgattgtcaacgaccgaatcgacatcgcccttgcagtgaaaagcgatggcgtgcatatcggacaagacgacatgcccgcaaaggtggcgcgcgagatcattggcgaagagatgattctgggtgtgagcgcttctacagtggaggaggccatgaaggccgaatctgatggggctgattacatcggcagtggagccgtgttcccaactgccaccaaagacgatgctgattccgtatccaaggaggagttgaaagagattgtcaactcgaccagcataccggtcgtggccatcggcggaatcacaattgaaaatgccgagtcactgaaggacgctgagatagacggcttcagcgtagtcagtgcaataatgaacgcggatgaccctaaaaaggcatctgagatactaaaggagatctataacagatga

SEQ ID NO: 4036 - DNA, 1233 bp, synthetic construct
  source 1..1233: mol_type = other DNA
atggctaagttcaacacgatcgatgacttcgacgtcaacggcaagacggtcctcatgcgcattgacattaatagcccggtagaccctaattctgggattatcctcgatgacacacgcatgaagatccatgctgagaccattaaggaactctccttgaagggggccaaaacagttctactcgctcatcagagtcggccaggtaaaaatgactttactaccttcaagcaacacgccgaagtgctgtccaaagcggtgggaatggatgtcaaatatgtggactcaatcttctcatccacggctaaagaagctatcctggccttggagccaggacagatactgcttctggaaaacgtaagattctactcggaggagcagttgaagcgtagcccagaggaggaggccacctctgtgcttgtcaagtcccttagtcccttgattgattacttcataaacgatgcattcgcagcggcccacaggtcacagaccagcctggtggggtttaccactgtagttccctctgcggccggccgggtcatggagaaggagctaactgtgatcggcaatgcgctcgagaacgtgcagcacccttgcgtcttcgcactggggggaatgaaagccgacgactccataatggttacagagaatgtcctggaaaacggcaccgccgattacgtgctcgtgagcgggctggtggcaaacatctttatttgggcagccggctacgacatcaaatccactaatgaaaacttcattgaggcccggggctacctcgacatggtggataagtgcagggatctgattaaaaggttcccaggcaagatcatctaccctcaagacgtggcagttagcgttctgggagaccgagccgatgtgaccatcgaaaacattcccgacgcctcgatctttgatatcggcagacagagcctgattgagtattctaagatcatccgcgaagctaaaacaatatttgcaaacggtcccgctggtgtgtttgaagatcccaagtttgccatcggtacagaggacatcattaacgccatagcctcttccgaaggattttcaataattgggggcggacacatcgccgcagcttgtgtgaatttaggctatggcgataagatggaccacatcagtagtgggggaggggccagcatcaacatgctggcaggtaagccgctggctgctgtccaggccttagaggcgagcgccgagctgttcaacaataaagaatga

SEQ ID NO: 4037 - DNA, 675 bp, synthetic construct
  source 1..675: mol_type = other DNA
ctgagtctcaagacccccgtggtgatcctaaacttcaaaacgtatctggagtccagcggtcagaaggcccttgacttggcaaatgccctggagagcgccggggaggagtcgggcattaccatggtggctgtaccacaggccattgatatctaccggatcaaagaggaaacaagcattcctgttttagcacaacatattgatgccgtgtcccctggaggccacactggaagcaacctcttcgagagctttgtggcaaacggcgtggacggaaccctcctcaatcactctgaatgcaggatgaccctggcagatatcgccgaggtcgttcagaaaaccaagggggctgacctgatctcatgtgtgtgcacaaacaatatcgaaacaagtatggccgccgcaacgcttgctccagatttcgtcgctgtcgagccccccgaactgataggcactggaataccggtttctaaggccgaccccgaagtggtcgagggctcagtcagtaaagtaaaggctattaacaaggacgtgcaggtcctgtgcggtgctggcatctccactggggaggacatggcggcagccatcgacctgggggccgaaggggtgctattggcgtctggcatcataaaggcggaaaacccaaaagatgccctcctggacctggtgtccaagatttga

SEQ ID NO: 4038 - DNA, 915 bp, synthetic construct
  source 1..915: mol_type = other DNA
atgacatttactaaggaagagcaggcaaaactcgagtacagtggatacagattcgtcggggagcacgggcacgcggcggccaagacctgtcattggactcggaaaagcatcaaaaatgaaggggtgtgctacaaggaacagttctatggcgtaaagtcacacagatgcctccagatgtctccagccgtcccattctgccaccaaaaatgttccttctgctggcgcgacctctcccagacccgaacggaatgggaaggagagtatgatgatccaaaaactatcattgaaggtgcgattaaggctcagaacaatctcctgtgtggctttggagggaacaagaaagcagataggaagaagctggaggagagcaagaggcccacgaacgcagccatcagtcttgcaggcgagcctacgctgtacccggaaatagacgaacttatcggcgagttccaccgccaggactttaccactttcttggtgtcgaatggaatgtactgggagaagctgggcagcctggaaaacgaacctacacagctatatgtgtcactggacgccccgaacgagaaggtgtacaatgagttgtgcaacccccaaattgatgacggatggggcaaacttaacaaaacactagagctgatgcccagctttaagaacaacacagccattcggatcacctccgtcaagggcaaaaacatgttcaataccgatgaatacgccgagctcatcaataaggctgaccctacctatgttgaggtcaaggcctatatgtttgtggggtcttcccgcaaacgattaagtatggacaacatgccccggttccatgaggttaatgattttgctaaagagatagctgacaagacaggtagggagctgaccaagtactctgaagccagcagagtggtgctgctggagtga

SEQ ID NO: 4039 - DNA, 1125 bp, synthetic construct
  source 1..1125: mol_type = other DNA
atgaagttttttgaacacagcgcaaaaaaagtctttgagagtgaaggcatcaaaattttagaggggcacgtggtgtactccccagaggaggccatggaggtggctaccgaatttggcaggcccatcgtactgaaatcccaggtcttggtcggtggacggggcaaggctggaggtatcaagttcgctgacaaccctggcgaagccctcgaaattgccaatgagctgctgaaacttgaaataaaaggggaaaaggtgaagcacctactcattgaagagaaggccaacatcaaaaaggaatttttcttaagcgtgtccaatgaccgagccaacagaaggcccatcatcatggccagtgctgagggtggagtggaaattgaagaattggcaaagacatcacccgagaagatcatcagatataatgtgaacccactcaaggagttcctgccgtatgaggctcgggaaatagcccgaaagatgggggtaggctcagaacttatttcgccccttggaagcatcatttggaagctatataatgtttacgataaatacgatgcagaggtggccgaaatcaaccctctcatcctgacagacgacggcctgattgccgcagatgccaagctcgagatagagaatgacgctcttttccgccatcaggatctcgtgaagcagaaccgcttcaagcagaaggacttcgcgttcgtcaagctggacggagacattgcggttatcggaaacggtgccgggctcactctgaccggcatggatatggtgaccctgttcggaggcaagccagcgacgttcctggatatcggggggggagcctctgaggagactatcaataaggctctgagcctggtgctgaactaccctccggtcaaagtggtgttcctgaatgttctgggcggtattacaagggccgatgacgtggcaagaggcgtaatagcagccttggaggctaacaagtgggacgtcaacatcgtcatccgcctgaccgggacgaatgaggaggaggggcaacggctctttgacgaggcaggcattccctacgagatcagcttggaagaggccgcgaaaaaggccgttgagatgtgcaacgagataaaagcgaaagaggctggcaaatga

SEQ ID NO: 4040 - DNA, 582 bp, synthetic construct
  source 1..582: mol_type = other DNA
atgttcggcaagttcaaggtgaaaaaatacttctccgagctaaataaagcatattacagcaacgactttaagaaggccatcaagtatgctgacattattctggagatggataaaaataacctggaagtccttaaatacaaatacaactcactggcgaacatgggcgactacgagaacgccctcgtgtgtatagatgaaatcatcaccttggagaagagctgtatggcgttactcaacaaaggaacaaccctgtgctatatgaaccggattgaagaggggttcaagctgctcgactacgtaatcgataactgcgaagaatacgaggctgcattcatcaacaaatgcaatttctttttcatgctggaagagtttgacgaggccctatccctctccgataagatactgaatatgcacccagactgctcaaacgcctatgacacgaagagctttatctactataagagagaggagtatgattcgagcctcatttacgcaaacaaagccctggagaagaaccccaataataatatcgccctggagaggaaggaacgccttctgagtatcttgaatagtaaggactga

SEQ ID NO: 4041 - DNA, 546 bp, synthetic construct
  source 1..546: mol_type = other DNA
atgcggactgaggtgcggatagctgggtttggaggccagggagttatcatggcaggaatcattatcgggaaggcggcatccctgtatgataacatcaatgcggtccagacccagtcctacggcccggaagctcgcggaggcgcctcaagaaccgagatcgtggtcagcgatgaggagattgactaccctaaagtgacaagtccagatatcctggtcgccatgagccatgaagccctgatcaaatatatgggggacctcaaggacgaaggtgttctaatcatagaccccgacatgatcgttgaagaggagattgtggacttcgtaaaagagcacaagatcaagctctaccgagccccagctactaagaccgccaccgaggatgtcggcctgaggattgtggcaaacatcgtgatgataggtgctatcgtaaaggtcacgaatgtggtgtcggtggatgccgccaagaaagctattttggacagcgtgcccaaaggcacagaggacaagaacattcaagcattcgaagccgggtacgcccttatttga

SEQ ID NO: 4042 - DNA, 864 bp, synthetic construct
  source 1..864: mol_type = other DNA
atggtcgaagtaaaagaaagcccatataagaagtacctaagggaggaccgactgccccacatattctgtcccggctgtgggaacgggacagtgatgagcgccttcctgaaaggccttgagggcacggacatcgactttgagaacattgcaatggtgtcgggtatcggctgctcttcacgcatcccaggctatgtcaagtgcgattcactccacaccacccacggaagggctctgagcttcgccactggtctcaaggtggggaatccagacctagacgttgtggtcttttccggagacggggattgcgcctccattggaggaaaccacttgattcacgcggcccggagaaacatcaatctcacagttatctgcatcaacaataatatttatggtatgactggaggtcagataagtcctacgtcccctaaaggcagctttggaaccactgcaccctacggcagccgcgacatgccttttaacctggccgagctggtgagcgcggctggcgccagctacgtggcccggtggaccacaacacatccgttacagctctcaaaggcaatccaaaaggggctggagaacaatgggttctcgttcattgaagtggtctcccagtgtccgacctacttcggccggaagaacaagctgaaaacgccactttccatgttccagtacattaaggaaaactctgtaaacaaaagacgtgctgaaaagatggaagaggacgagctcgaagggaagatcatcgtgggcgagttcgcaaacaagccccatgatgagttgaccgatagtatcaaaaaactgatagaagagaatagtaatatgcccctggctatcaaatctgcctttgaggagctggattga

SEQ ID NO: 4043 - DNA, 1131 bp, synthetic construct
  source 1..1131: mol_type = other DNA
atggcagaagagcggtttgtccaaggaaacgaggcttgtgccctgggtgcaattgcagcgaattgccgcttcttcgccggttatcccatcactccaagtacggaaattgctgagcaaatgtcgatcttgctccctaaatatgggggcgcctttgtgcagatggaggatgaaattgcctcagttggggccatcataggggcgagctggagtggccttaaggccatgacagctaccagcggtcctgggatctcactcatgcaggagaacataggctacggcttcataacagaaacccccatcgtgataattaacgttcaacggggtagcccctctaccgggcagccgacaatgtccgctcaggcggacatgatgcaggtgcgctgggggtcccacggggactacgagcccatcgccctggcgccctcaagcgtacaggagtttttcgactttactatcaaggctttcaacttagctgaagagtacagggtgcccgtgacagtgcttgcagatgaggtcgtaggccatatgcgcgaaaagctcatcattccagatgagatcgaaattgtgaaaaggacaagacctgaaaagccagacggccagtacctgccttttgatgctcccatggacggaaccactccgatgcccgccttcggtgacggattcaacatccatgtcacgggcctgacccacgatgagcgaggctacccagacaccaatgatcccgagtcccataccaaactggtggaaaggctatgcaacaaggtcattatgaacagaaaggacatctgttccgtgaagaaagagcagtgcgatgatgccgacattgtgattgtcagttgcggcagcccatatcgatccgtgggcgccgcaatgaaaaaagcacgggaagaaggaatcaaggtaggatctctgaagatagacacgccatggcctttcccagaggaagaaatcgcagagattgccaagactgccagcgacatcatcgttccggagatgaatttgggacagatggtgcacgaggttgagagagccgctaaaggagaggccaatgtccacctgatcggcaagattggaggcatcctccacaagcctgaagagatactggccaaaatcaaggagatcagcgggtga

SEQ ID NO: 4044 - DNA, 207 bp, synthetic construct
  source 1..207: mol_type = other DNA
atgatcatcatcgatagtaagctgtgtaaaggatgcgacatttgcatagccacctgtccaaagaaggtctacagcaaaagcgacaaggtgaatacaaaaaacgtgtacctccccttccctgagcacgaggaaggctgcacgaagtgcgggctatgcgagctgtcctgtccggaccaggcaatttatgtagaaaaagaggtggaatga

SEQ ID NO: 4045 - DNA, 129 bp, synthetic construct
  source 1..129: mol_type = other DNA
atggacttgaacgatctgaacaaaaataatctaaagcagaagaaaaatcaccaagtgcttaaggacctgaagataaacaacctcatcattatcttcctggacctcacccagtacatcaataacaactga

SEQ ID NO: 4046 - DNA, 372 bp, synthetic construct
  source 1..372: mol_type = other DNA
atgggcgcaaaagaaaaatatttctccaacatttccaatagggagcgcgcaatatttgaaggagccatcagcatgggggccctgttccaccagttcgtaggcacgcccttcaacagaaagaccgctgaaagcctcgaaaaggcgatggaagagagctttaccctgcagccgtgcatcgacaaggtggaggtctcgatcgacttggatcggctggataaggctatgacagagttcgagtacacttctctaagtggtgacatgctcgatgttaagatctactcaaaagtggatgacgtcctggccgtgatccgaatagagtttatcgaagagcttaactacccactgatgtatgtggaggacattattgagtga

SEQ ID NO: 4047 - DNA, 762 bp, synthetic construct
  source 1..762: mol_type = other DNA
atggatttgaaaaatataaaaattgctaccatcatcaccatcattgcctttataatcattggcctatacgccctgacggaagtcaactacttcagctacaagaacgttgtggagcatgatgatattaacgcgtccgtagtaattatcccctccatcggggtgtttgagaagataaacaatgtgtccatcagccaaggggtctacatcgaccagatgtccaaccttccaaccaaaggagatgtggtgctctttggccacaggacactgcaggggagccccttcttgcgcctcgacagcctgaagaagggagacattgtcactctcgagtggcccgagatcggtgagatcaactacacagtcaaatcttctaagatagttcctgccagctatggactgtatctgaacgagagccatatggaaggggacattcacaatcaggagatttatctcatcacctgtcacccgcttggttcgtcagctgaaagacttattgtcgtgggagaactgaatagtacaagtctcatcaacgaaaccgctttggaggaaaatccacacgcgtcatgggcatggtacatcactctgggcttctttgccttaggcctcatcgtttcattcctaagccctgaggaggaacggaagatcatcctggcagtggtgatcataatcacgattattctggtgtatttctgcctgttcccaatatcgtcccagatctgggccgaccagctgggctggctgaatagtatgatgggcgtgaactga

SEQ ID NO: 4048 - DNA, 1932 bp, synthetic construct
  source 1..1932: mol_type = other DNA
atgtctaaccgattcaactccttcaagaaaggcatttctaaggtgaaaaatatatcgcccaaaatcaagggaaattccaaccgaaagaagaacaacagcaagaataaaaggtctaaaagcacaattgaatatatcgtgcccgaaaactctccactgagaaagaacagtaccgacctcgacagcgattctggatttttcaatagcgattacttggacgacttgcctgagggtgtgtcctacacccggcccgtgggggacttgtcggaaggggtgacttacacgcatcctgcggacgactcatacgatctggatggagtcgacaaacgctatgctaaatatattttcggagacgacttaagtgacagaaactttaaggacccccgggactcgagctacatggaggatctcgataataacgacggtctgaataatgagttcggcagaaataggaactttcataaaagtcggaactacgcagacaagcgctttaacaacgatctggataacaacggggagaactataaaaacgactcttacctcgatgagagttattctgatttcagctttaaaaaggacttggacaacggctatctgaatggcgacgcgtacctcagtaattctgatttttctgacttcgataaggactacctggacgactctaactttaagagcagtcactccaagaaggcctccctcaaatccaatggcatcaagagcaaactgcttaacttcaaagatggccttttgaataaggatgacaactccaagagccgctttggcaagattgtgttcatcctgatattcctcgtgttggcttcaagcatgttttatttcttcgtataccagccattccaggacgaactgaatctggaaaagaatgctaagctgaatgaattaaatactctgtataaaggtcccctggaagcccacgagaacgcctacattctgaagaaccaaatcgaatcggagaatgatataaacgagctaaagaagatcgatattttaatgtacgcgacgaaggattggagaacttatcacaaatccaaaatagtcagctccaaggacaattttggaagggtcatgctggcctacggggatgaaaacaaaaacctgatcatgagcgtcaaggatgcaaatgagttcgttggggacaatgacggacgggtcctatcaaacattcaattcgaaaaggtagacaccatcatcgttcctgtgtccatttcacggcttcaggcaagtgcagggctaatttcggtgggtagcatcgttgatatctactccctaaaggacaattattcctacgggggcgacgaggactccaacttcgagagctcatcagccctgaacgagtcctccgaagggcttgtagagaaccagtcagaggataacgaggacctcgggggtggcgaggacattagcaaaatgcctgtcgattcaaaccccgaagaggattccggcttctcacagaatggcgaaccggacgtgagcggagccacagtgttggccatcctgcgctctaaagatagcggcgtgatcgacagtagcatcagcaagtccaataccctcgtggagggaaaccttacggacccatacgaaaacaccagttcatacacaaacgatgtggaagagctgcttaaagccagcgtgtttaacagctatgatgacaataaggctctcgagtattacctcaacagttatggcataaagctgtcgaattacgagaggatgtcaaatctggctgatctcgatagtgagtatctggttctgctcgaggttccacgttccgacgtcagttttgtcatcaacaacatggacaaccttattctgaccatcccaacagagtttgccccgaattgggtgatcggagaactcaatgagacctattacgataacatctacaattacgacctgaacagctcctctttcatatga

SEQ ID NO: 4049 - DNA, 945 bp, synthetic construct
  source 1..945: mol_type = other DNA
atgagattaaaaagtgtgggcatgggctatttcctcgcagtcagcgacgctatttcaatcctgaacattgcattcggattcttagctattctgatggtgatcgacaacaatctgatatatgccagtctctgtatccttctggcagttgttttcgactcggtcgatggctgggtgtctagaaaacttaatcgggtggacccgctgggatttgggatgaatatcgactctcttgccgacattgtttcctttggtgcagcgcccatggctatcttgtactccatagggtcaagcatttcctcgtgggccggatacctgatcgccatcgtatgcatgattactctggtgtgcggtctgctaaggctgacccgctacaacgtgatagccgataaaatcaattaccgaggctttgttggcctcccaatccccgccacagccattatactggtgacctattatctcagcggactttttaatattgctgtggccgccgtcttgatgctgcttgcttcatttctgatgatcagcacaatccggtaccccaaagtggataactattacctcatcgggctgggggcgctaatgatcctgctcctcattttgccaatacaggtctttattggccctattaacctgcctgcgctcgtactgtttgtgctcgcactggtgtacatgttcatgaccttcctagagttcttcatcgacgatgacatgacattcgatagggataaggccagtgacaaggtaagcaacgtgcgcgagatcaccgaaagcaaggtcagctccagcgttactaacgtcaaggacgtcttcaagaacatgaaggacacgatcaaccagatctccaatgaggacttggatgtggggctgaaggaagatgctgaagaggagaaggaaaaagaggaaaaggaggtgaaagaagccgaaatcgtggaggaggtcgagtga

SEQ ID NO: 4050 - DNA, 852 bp, synthetic construct
  source 1..852: mol_type = other DNA
atgattgaggagagaatccagattctcaggcgggccgcccaaatctccaccgaggaccgggaggagaaggtatggtgtgtcatagcgggcaatgacagacttgtcgacgacatcgcctacaacgcaatcacccgccagggccagagtccagattatcctctgggggaaaacgtgtcaattactagtaagcattcatacaagaagttcgattgcatcatgcttaagggcgaaaccttaaaaatcagggagctgaagaataagacccacgaggaagggggagcctctttgcagatcaccacaacgtccctggaaaggcagccaaacctgctcgttgtgataggtcccgaagagagcatgaaacgttttgttggtcagacaagccgccaagaggtgaagattgacatcttgctagaagatcacacgacaggctttatcaaatccgagcccaagtcaacaaagattcccaagttcctgaaaaacttcttcaatccgatcatagagagcagcgaagtcatcctctctgtgctcctgatttccgtgaaggacgaaggggatatcgataaggtgaaaggaatcagccaggagaacagcctgtttggcattgacctgaagtcgactattcaggataaggaaatagcgcgactgaaagaacgcaaagcacgggaaaaggctaagaaggaggaggctgagaagaaggaaaaggaagagaaggaaaaggccaagaaagaatccgagaagaaggagaaggaggagaaagagaaagctaaaaaggaggagagtaaggaagacaaaaaagagatcgagaaaggagaaactaaagaggacaaaaaagaggaagataaaaaagactga

SEQ ID NO: 4051 - DNA, 1071 bp, synthetic construct
  source 1..1071: mol_type = other DNA
ctgagtattttcggaaatgaagacgctattgagattgaaccaacgcgggtcgtaaaaaatagtttagggattgacctgggtaccctgaacactgtgattgcaaaacccagcggagacaagtttgacttgtatcagattccctcagtggttgccgtcaagagggatgatcccactgctgtgcttgccgtgggagaagaggctaagaagatgctcggccgcactccggaggacatcattgcggtcaggccccttaaaaagggtgtgattgagaacatcgcacaggcacaagccttgctcattcgggcaatggaaataggcattaacgagggggagacagtcgaacgcatagtgatcggcatccctggcgacagcagcgaggtggagaagaatgcggccgaggaaatcgggcgaaaggccggtgctgagtatgtgctggtcatcagcgagggcctggccgccgctatcggtgcaggactgcctatagccgagccgatggggaccatggtgctcgacattggggcagggtcaaccgacatcgttgtcatatcccttggagggatcaatgatatagagacagtaaggtgcggaggcgacgacatcgacaatagaatcgtcgagctgattgaggaaaaatacaatgtggccataagcatccacgatgccgaggccgctaagatcgaggtggggatggtgcattgtagtgaggagttcgagaacctgaactacgaggtgatcggcaaatccttggagaccaacagacccaaaaaggtcgtgatcgattccatgctagtggccgatgccgctgaaccaatcatcaaacaggtaatcggcggcctaaacctcatcctcgaacggctgccagctgaactgatgatgggcatctacaacaacaccgttgcagtcggaggctcctcgcgactgcgcggcatcaaggaaagaatcttcgatgaatctgaaatccctattaagataagcgatgaccccatgacagtggttgctaagggaacggcgattgttgccgccgagccattagccctggaacctgaagtgcgtctcaaagcgatgaagtga

SEQ ID NO: 4052 - DNA, 240 bp, synthetic construct
  source 1..240: mol_type = other DNA
atggatatgaaaaccatttacctaagcgaagaagtctacaaccgcctttcactgttggccctggagagtgaaaactacaatgatctgatcgccagactcatagacgtgtatgagaatagctatttcgacgagctctccgatgcagaggctgacttttacaacgagaggatcaagtacttcgaaaatggggactatgagggcatccggaaggtggacctgaaattctttggaaagaactga

SEQ ID NO: 4053 - DNA, 660 bp, synthetic construct
  source 1..660: mol_type = other DNA
atgaacacactggggctggacgaggcaggccggggtcccgtgctgggacccatggtagtggccggcatcgtcatacctgagaagaaggaaaagatcatcgaaagaatgggggtgaaggattccaaacggattaccccaaagcgtagggctgtgctctatcgcaaactaaccagaatgttcgattatgagaccgtggagatcagcgccaaggacattgatctgttacgggcgaaaggagttaacctcaaccagattgagaagttggccatgatgagaatcattgcaaagctcaaggccgacaccattatcatcgattcgcttgacataaaggaaggaaggctggaggaggagatgcagaatttcgtgggcgagggctcaaaggtcattgccgagcacaaggcagatgacaaatatattgttgtcggcgccgctagtatcatcgccaaaactaaacgcgacgaaatcatcaaccagatcaataaggaatacataaggagcactggaaataaggatggcatcggttccgggtacccgagcgaccccaagacaaagaacttccttaaaaactacaaatacgacgagatgccagactttgtccgccgaagctgggggacggtgcaacgaataaaagaagcggaagaagctgagaaaagcctgtga

SEQ ID NO: 4054 - DNA, 618 bp, synthetic construct
  source 1..618: mol_type = other DNA
atgtacctgggacgaatcatttcagccggtaaaacagaggatggcaagccctttgtcgcttacagagtttcaagcaggagcttccctaaccgccaggtaaaggttctcgaggacgaagcggctatcattccaaaggagggctttgagaaggacatttttaaaaactcttatatcgcttacgactgtataaaaacggtgggcgacattgccataatcagcaatgggagccagaccaatccgatcgccgataaaatatccatcggtatgaacatccgggacgcaatggcctactccctaatcaccctggattatgaaaaggacgattacaacactccccggattgccgccgtggtgaaagggggagatgacttcgaggcatatatcggcatcgtgaccgacagtaagatactggtggaaaagatcgatgagggggctcaattcatttccacatacgagaagaacagtccagaagacgtggtctattctgccgagactcctgatgatgcatgcaagttcatcttcgacgagggggcctttgcggagttcgaaaaccccgtctgcagcgtggcggcaatcttcgacggcaaatggaatatttcgggactcaatccagaatga

SEQ ID NO: 4055 - DNA, 402 bp, synthetic construct
  source 1..402: mol_type = other DNA
atggcaattgacattaagcgccacaaggaaaagctgaggcaggacgagcccgaaatcaaactggttcccttcatcgacatactatttacacttctgatcttcctcgtggtcaccagcaccttcggagctgctacagtcgacgataatgggtcagggtctggaaagccgaacatgacggacactacaggcgatgcggagtattacctgatccccgttgccggtttgcagaaagtgactgtagatggcgtggatatgtcctccgagattaagggcaacgccatcggggtgcatgcacgggtcctcgaccagggcgacgtgcagattaaaaccagtgaacacgccataatcatcaaagcccctccaggaatgagccctcaagaggccgtgcacaccccagagtga

SEQ ID NO: 4056 - DNA, 840 bp, synthetic construct
  source 1..840: mol_type = other DNA
atgatcatagagatgctaacggatggattcaacatgattatggagatgctgcagagcggaggagtgatcacctacataatcctcctcctcggtatctacggcttactgatatccattcgcaaaatattttacctgaggaagatatcaaaaatcgacgctacagagatcatggggaccatcaccagctcgatggaacagggcggagccattgaggccctaaaaaacatcagtcactacaagaaccctgtctcaagaatcatgtccgaagcactcaagatcggctataagaacaaaacagaagttgaggagagcatggagcagatcttcatcgtcgaactcagcaagatgacaaatgggatcagcgccctgaagaccatcattgagttagctccgtttctgggtctcatcggcactgtgcttgggatttggatgaccttcaagaacctgggggtgaacccagatgcggccgcaatggctgagggcatctacattgcactgataactacaatcgccgggctgactgtggcgattattcttatgcccttgtacacgtatatcaaaggcctgattgacgacgaaatggacaaaatcgagttggcaacaaaaatgacgaattggagttatgccgttattaagattcgggtgtacgaaaaactgccatgtgtggtcgaggctcttcaagaggccgatggcatcgtaagtgtgaaggagatcaccgacccctattccaatattcagatctcattcaagcccagcatgttggaaaagagcataagcaatatcattctggagaaatgcgatgtcaagtccgaaattaccgaatccaagctgcgacagtga

SEQ ID NO: 4057 - DNA, 765 bp, synthetic construct
  source 1..765: mol_type = other DNA
atgactctggagctgttcggcttaaaaaaaattccgctggtcaagaaaggagatgacattgccaagattattgaagatgacttgaaagaggaagacatccagctggaaaatggcgacatcctcctcattgccgaaacactgatttcaaaggctgaaggaaacatcataaagatggatgacgtggaagtcagcgacaaagccatcgaaatagccgagaagtgcaagaaagaccccaagattgtcgagaccatcctacaggaaagcaatgagatcgttgccgtaggcccaaacttcattgtgacggagaccaagcacggctttgtctgcgccaacagcgggatagacgagtccaatgttgaggacgggctagcgacccccatgcctgaaaaccctgacaagagtgctaaggagatccgcgagtacctcgaggagaaataccagaaggagatagccatcataatcacagacacccaaggaagggcctttcgagtgggggccatcggaacggcaatcggttgttcgggtatcaaccccctgtgggtgcggattggggatacagatctttatggcagggctctggagaccaccgaagtggcgacagcggatgagctggcagctgctgcatccctgctcatgggccaggccgatgaaggcatccccatcgtgcttattagagggttcgatgcattcaacatcttgcgggatactgagactggaatcaagccactcctgagaccaaaggagtttgacgtgttccgcaaatga

SEQ ID NO: 4058 - DNA, 510 bp, synthetic construct
  source 1..510: mol_type = other DNA
atggtggaaatcaattacagttgcacaaactgtgacttctcgttcctggacaagaacctaatcttctatctggacaccgcgaacgaaacggagaggatagataacctcgaagagatcttgaatgataaaacagacaacctggagttaattgaaacaagcctgaataaagagagctccgacaagatgaccaaagcacttatcgccggctttctgtatgaaaattactgtcctcactgcaagcagttgataaaaacctacgtgcccgaggataacaagctctttactgaccaggagatggagaagattctgaagaaggaaattagcaagaacaaacaagagaataacaattttaagattctgtttttcgatttcaaaaatactctctaccgcgaccggagaaagatccttgagtccaacgaatgccccaactgcaacaaggagatgtctctggtcatctcagagaaaaccccgtgcccagagtgtggggagaagctcaaagaagatttctga

SEQ ID NO: 4059 - DNA, 906 bp, synthetic construct
  source 1..906: mol_type = other DNA
atgattaccatactgtccggaggcaccgggactcccaaactgatccaaggtataaaagaaatctaccccgaagaggagatctctgtcatcgtgaataccgtggagaacgagtactttagtggcggctatgtcgctgccgactgtgacacagtgatgtacacctttgcggatatgattgacgaccagttcttctatggcattatcggggatacattcaagatccgcaacatcctaattgagatgggaactacggagctgcttaaaatcggagatatggacagggcaatcaagattcagaagacgatcttgctggaggagggaaagaccctcagcgaaattgtagagcatcagaagaacaagctcggtgtgaaagcaaagatcatccccatgtcggatgaggactctgagataaagatcatcacgaaggagcacggcgaactggatttccacgacttcctcatcaagcaccagtgcgagggggaagtgttggaggtaaagtacagcgacgtgaagccaagccctaatgtgattggcactattaaagatgccgacaaggtgatcataggtccgtccaatccgatcacctcaatacggccaatcattgccattgaaggggttgaggaggccctgaaggaaaagaaagtcattgccgtcagtccatttctcggggaagccgctttcagcggccccgctgccaaattcatgaacgcatttggctatgaggcatcatccaagggagttgctgaattatacaaacctttcctcgacacatttatcatcgacaacgaggataaagacaaaaaggaagaactggagaaaataattcctaacatcgtcgttgcgaacacctttatgaagacaattgaagataagatcaatcttgccaaagtggtgctggagctgtga

SEQ ID NO: 4060 - DNA, 762 bp, synthetic construct
  source 1..762: mol_type = other DNA
atgatccagatgactttgatacaaattgataattacggtccctggaccgtcactccccggccacggactgaatctgacctgcagattttacaagcggagctctttgcagacgtgcagagacagattgccgccaagaaaggccttgtgttctttacgcgctttgacaacttgctggcagttacaaacggccttaacgaagaggatcatatgcgcatccagaggtcgattcgcaaccgttacccgatcacgataagcatgggggtaggggccgccgagaccgctcatgaggcccagcgactagcaaccatagccctgcagaaggaggggggagcccagtcctcaggcaggaaagaaattctcgcgatcaataatctgattgaaaaccctgaagacagtttcgtgcaggcggcccacattgacatcaacagcgtgaccgagacactgaccgacatcgagagtgcctttgacacatccttcatggtgaacaaggctcaacactacctcatgaccaagctgagagaaaaaggagctctcctgttcttcatcgggggggacaacttcatgtccccatgcaacggcctgagcgaagaggatctaacaaacatcctcaaggaaatcgatgaggagatcggcatcggcctgaaagcaggtatcggcagggctgataatatggaagacgccgcttatatggcagatatcggacttgagataatccgggagggaaataataaggagtggattcacgtcattgaggagctgtga

SEQ ID NO: 4061 - DNA, 714 bp, synthetic construct
  source 1..714: mol_type = other DNA
atggccggcatcacaaacgccgaatttgctatgaaactcataccttacggttttgacacagtcaccatcggtggatacaatacggactccgaatccatagacgcctgtgaaaagattattgcgagaggccgaaaggagttcaattaccccaaagaggagatctatagcgtgattgaaaatgaagtgaacgcaatcaaggatagtttcaacgtacaggtctctgccaacttgagggggagcactcccgacccactgatcaaaatcagcaagatagagaagctggacatcattgagatcaactgccattgcagacaagaggagctggtggcggtcgggtgcggacagtcaatgcttttacggccggacctcgaagattacatcagggaggtggttaaaaagagtgagtcgaaggtctcaatgaagatgcgggctaacgtggaaggggtggacaatctggagatcgccaagctggcagaagattgtggcgttgactatctccacattgacgccatgaaaatgggagtgcgcgatgctgatttttatctaatcaaggagatcgccgagaacaccaatattttcatcattgggaacaatagcataaattccatctctcaggccgagaagatgctgaacgccggagcaaacggcatttccatagctcgcgctgcaattagcggcaaactgaacttcgatttgaatcagatcaaaatctga

SEQ ID NO: 4062 - DNA, 981 bp, synthetic construct
  source 1..981: mol_type = other DNA
atggccggaactatgaaggcgtggcgaatcaatgaactgggcaagcctcctgtcttagaggatgtccccatacccgaacctggatttggggagatcctcattaagatgaagggtgcaggaatgtgcaggactgacctggaggtgatagatgaagggttcatcaccgtgccatttgtcggacccttcacctttggccacgagaacgcaggcaccgttgcaaagctcggcccgggagtagatacggtggaggtgggccagaatgtcattgtggacacattgcatgcatgtggtaaatgccagtactgtctgtccggccgggacaacttctgtgaagtggctagcgcccgtggtctcaaggaggacggcggtatggccgagtacatgattgccgatgctagggaagtcgctcctctgggcgacctggaccccacagaatatgtggcactggcggatgccggactatctccatacggggctgtccagactgccaaaccattcatcccaaacaatgggacggctgttgtgatcggggtggggggactgggcttctactgctgccaatatttagcgctgacaaccagtgccagagttatcgtagtgaaccggtcagctgataagatggcgaagatgacaaacttcggtgccgacgaattggttgtgcttgatgacaatgcctacgataagataatggagctgacggacggcaagggcgtcgatgctgtgtttgactttgtaggacgcgacaacactctcgagcttgccgcccagatcaccaaaggcctggggctcatttccattctggggctcgggggaggaacactgccggtgagctggaccaccgtcaaacccggggttatggtgagattgactcagggtggcaccattacagacctatacgagatcatggaccttgcaaaagccggcaaaatcaccgtgcaggcccaaaaatatcccttcagtaaggtgttccgcagctcgtga

SEQ ID NO: 4063 - DNA, 258 bp, synthetic construct
  source 1..258: mol_type = other DNA
atgagcaaactctcaaaactgcccaacatcgggaaggtgctggaaaagcagctcaacgatgtcggcattaagaccgacgaagacctgatcgatcttggcagtaaggaggcctggctcaaaatcaaagaagtggacgacagcgcatgcttgaatcggctaatggctctggagggagccatccagaatattcgctggcacaacctgtctcaggaggataaggacaacttaagggagttctacaattcccaaaagatatga

SEQ ID NO: 4064 - DNA, 660 bp, synthetic construct
  source 1..660: mol_type = other DNA
atggtaaggcccaagatagagcgtcggattgtgaaaaaacctagctacacatgcatccagcacggcgacatctccagagaggaggacttcgaaagcatcaagatgaatctagacgagtttgaagcgatacgcctgggggactatcacaacatcaagcagaaggaggctgctgaactgatgggcatatcccaacccacgtttcatcggataatcaactctgcccgcaagaagactgccatgtctctcattgaaggtagaaaaatcgaaatcaacaacgagaatttctatagcgaggataagatctacatctgcaacaattgcggcttccagtggaacaacccaaaaaaggagtacgcaaactgtccagactgcaaaagtgaaaatatcgagcgaattaaggtcaacctgaacgagtccgactacatcaataacaaccccaataagatcaaaacaaatagccagatttgcgatattgataataccgatgtgccccttaatgaacggaaatcatttgggggacctgggagtggtaggggaccatcaaaggcatgcgagtgtcctaactgtggccacattgccccgaaaattaaggggttcccctgcaggaacatcaagtgtccagagtgtggaaccccgctctgcggctcgaagcataaatga

SEQ ID NO: 4065 - DNA, 1611 bp, synthetic construct
  source 1..1611: mol_type = other DNA
atgtctttcatcacacttaaaaacattaataagtcatttaacggagaacctgtgctgaaggatatcaatctgactatagaggaagggtctactttgggtattctcggtcggagcgggagtggcaagtcagtgctgataaacatgttgcgcggtacgaaggaatatgctccagacagtggccaggtgctctttgacctggccatatgcgagaacaagaagtgcctgcatgttgagccggcgtccaaggctggcggaaagtgtccagagtgtggcgcggaactgcaagccaaacagatcgacttctggaatgcaggaaggctggagaaggccgccatccgccgcaggatctccatcatgcttcagcgaaactttgccctgtacgacgagcagactgtgatagacaacgtcttgaatgcaatgggcgacgagggcagatatgaagaggagaatatctacaatgccattgacctcctggagatggttcaaatgagccacagggtaacccacgtggcacgggacttatcggggggcgaaaagcaacgcgtcgtccttgcaagacagctggcgaaaaacccgatgctgttgttagctgacgagcccacagggacactggacccccagactgctgagaagctgcaccagaccctcattgagggtgtcaaggatgaaggaatctccatggttatcacttcccactggcccgaagttatgaatcacctcgctgatgatgcaatttggctggacaatggggagatcatagaacatggcgcccccgatacaattgtcgagaacttcctcaaaaccgtgcccaaagccgagcaggtggaaaaaatcgaacacaccgaggagattattaaagttcaggatattaaaaagcattattactcaattgaaaggggcgtggtgaaggcggtggacggcgtaagcctaaccatcaaccagggagaaatctatgggattgtagggctcagcgggtcaggcaagaccacattgacgaaaatgatgatcggcctcaccgagcccagtgccggagagcttgtcatcagactgggtgatgactggattgacatgaaaaagcccggtcccttaaaccgtggccgggtgacgccatacctgggcctgctccatcaagaatactcgctttacccacaccgagatgtactgggcaacctgaccgatgccatcagcctgaacctccctgctgagttcgcaaaaatcaaggccgcccatatccttgagacggtcgggtttgaaaaggacaagtccatgagcatgctcacaaaatggccggacgagctaagtggcggagagcggcacagggtggctcttgcccaggtgctgataaaagagcctaatatagtggtcttggacgaacctacagggaccatggaccctgtgacccgaatcatcgtgaccaactccatcctaaaggcacgggatgagctggatcagactttcgtgatcatttctcacgacatggacttcgtgctggatgtctgcgataaggccagcctgatgagaggaggaaagctcctaagcacgggaaccccagaggaaatcgttgccgagctgacaggggaggaaaaagctgatatgattaaggaccactga

SEQ ID NO: 4066 - DNA, 483 bp, synthetic construct
  source 1..483: mol_type = other DNA
atggcatgggatgacgccccgtcccacatctgccggggaggcgatgtcagggggctcgccttctgctgccccccagttaaaccatgccccgtcatgaacgcgctgcgggaagtgggtattaccccccaggagtttctggagatcaaacagaagttcgccagggaaacccgattaggggagggccctgcaacttgcttcggatcactcgtgtggtgttgtaagaccagtaagccttgtcccctgagagacatgaccttgaaccaaattaagatgactgaagacgagtacatgacactgaaaaagcagctttctgaagagatcctgaaggcaggcaagccaaaagacaatagcgctgaagccatggccctggctgagacatttaatataagcgtagaggaggcgaaaaagacgctagaagactgtgataacgacctgcgcatggccgtgaagttgctcaagcttaaagagctcgataacgagtga

SEQ ID NO: 4067 - DNA, 624 bp, synthetic construct
  source 1..624: mol_type = other DNA
atggggcttacgtccttgttcctggaggtggaaaacaaaaacgttttcatcctgggcactggcgaggtggccaccagaagggcacaccgctttctggacaagggagcaaatgtcattctagccggcaactcaatcgatgaagagctcagcaaaaagggcgctatcctaactccgattaaagatttggaggagctggtcaaatggagtgacattattgtgaccgcaagcggagacgatgagttgtgcgaatacatcgcctcaatctcccaagggaagctgatcaaccgggccgacaagcctgagaaggggaatatcattgcgccaacaagcttcctgatcgacgatatagaaatttccatctataccaatggacagagtcccttaatggctcgagagcttcggaaaaaaatccagtcgataatcacagaggaggacattctggagataaagcttcaggactacgccaggaagctcctgaaagaaaaggtagaagaccagaagacacgcaagcagtacctgctcaagattctcaacaacacccagataaagcaatgtctcaaggaaaagaacctggataaagccaaaggtctggcggaggagatcatcaatagcgaatttaattga

SEQ ID NO: 4068 - DNA, 1197 bp, synthetic construct
  source 1..1197: mol_type = other DNA
ttgataatcaatatacgagtagaccacaccctggcagacattgagactatggaaaaggtctcaaaagacctaaaggagctcttttccaacctgaaagaaaactttaacatcagtgagtacattgagatcaacacctgcaacaggtacgagtacttcctctatactaatgttgatgacgacagcctcgactgcgacaacgagtatgtcataattgaatacgacgatagcgccattctccacctattccggatgacgagcgggctggagtccatgatcatcggcgaggaccagattctcggccagatcaaggattccaagaagaaaagcgagaaggaaggccactgcggaaagaccttagacaccatcttcacaaaggctatacacgtgggtcaggtggtgcgcaacaagacaaaaatcaatcaaggctctatctcgatcggctcagccgccgtggatcttgctgaagagcatctgggagacctgcaggacaagcatgttctggtgatcggtgccgggaagatggggacgctggttgccaaggctttggcagagaaaaacctcaaggccatcttcgtagcgaacagaacctattacaaagccgtgaagctggctgaggagctggatggggaggccatactattcgacaatctcgaggagaagctgctgaacgcagaccttgtgatcagctctacagggtcgccgcaccctatcgtcaacaaggagaggctgatgaaagtgttcggagatgaagtccccgaaaaaatgatctttattgatatcgcaaacccaagagacattgaagatgatgtcaaggaattgggaatcgacctcttcaacattgatgacttacggggaattgccgagaagaataagaaacttcgcgagaaggaggtaatcgcagctgagaagatcattgaaaatgagttcaatctgctgaaagaatcctttaatctgattgaaattaatagcatccttggcagtctgcgcgagagcatggaagaaatccgacaaagagagagtcagaagggcatagtgaaattgaatgcggtggatgcgagggacatcaaagtcattgataagatgactaagtcaattgtgaacaagatcttttacgacatctctgagaaagttaagatatccgctaaaaacaacgaggaagatgtgattaaaatgtgtgaagccatcctgaaacggtga

SEQ ID NO: 4069 - DNA, 1128 bp, synthetic construct
  source 1..1128: mol_type = other DNA
gtgaaatctgacaataagagttcaaaaatcaaaaaatcagaggtgtatatcaagtcgagtagcgatagcatcgacaaggaggccgaggagctgatcctcgagtctgcagggtacccattcaactttgcactcctggaaggacctcatctggaaataagtgacaacgtcctcttcgagcaatacgccattgagcagtggagtggaacgctggtaaagactggctcttacctgttcgaccaaaagatcattccggactacgccttcaaggtgctgaaggtttttcccgaaaattccatcataagcgagaacacctctatcgtggtggctgacgtagataaggacaaacgttcctcgatcaagtcaaagcagtatgacgtgcattttgatgacatcgtgggtcaggagaacgcgaaaagcaaatccaagctgatttacaaatatctgcagaaccctgacaaatttggcacgtgggctcccaagaacgtcctattctatggcgctccagggacagggaaaacaatgctcgccaaggccctcgccaatgaactcgacatccgcctgtaccttgtcaagagcacctcattgattggggagcacgtgggcgacgctgcaagccggatacacgagttgtttgaggctgccagcagaaatgcaccctccttaattttcattgacgagatagacgcaatcgccctgcacaggtccttccagtccttgaggggagatgttgccgagattgtaaacagccttttgactgaaatggatggcatcagcccaaatgatggggttgtcaccattgcggctaccaacaacccttccgcgatcgactttgccatccgaagccgcttcgaagaggaaattgaatttaagcttccgagtgatgatgagcggcgggaaataattatgctgaacctggacactttcccccttgactacgatttagacatcgagaagctggtcaaagtgtctaaaagaatgtccggccgcgatattaaggaaaagctactgaagacagccctgcacaacgcaatcatcaatgacaagcagaccgtggatatggatgatgtcgctttcgccctcggtgtgaataagtataaagaagaggaggtgaaaggaatgttcgaatga

SEQ ID NO: 4070 - DNA, 837 bp, synthetic construct
  source 1..837: mol_type = other DNA
atgaaagataaggtgatctttggacccgcgggtaagcccattgatttcaagggaaaggcatttgaatctccagaatatttaggcccaagggggttgtacgccttcgagtaccagtccacgtatggcgtcaggatcggggagagcagcgcaattaaactacgcgagtcggcggagagaaatggggtactcatgtccatgcattgcccgtactacatcaatgtgtgttccaaagaggaagaaaagattgacagcagcatcgagcgactgattcaatctgctaaggtgggcgaatatatgggcgcctaccggcttgtgttccaccccggcttctactcaaaccggaaggctgacgtctgcatggatttggctaaagaaacctatcgacggctccttctgagatgtgaagaggagggcatagaggactttaccttcgctccagagaccacaggaaagcgttcacagctgggaaacatcgatgagataattgaaatgtgcgccagctttgaccatttcgagcccacaatcgactttgcccacgttcatgcaagagggcgcggaatactgaacaagaaagacgactacaactgcatattcagtaagcttgaagacaatctggacattgacaggctccattgccacttcactaccatcgagtactcccacaagggcgagcggaagcaccacactctagccgaaggtgatgaatacgggcctcacattaaagatctgctgctcaacctgatcgagaacgattggaaagccacaatcatctgtgagacgcctctcatcgaccaggatgccttgcgcatgaaaaagctgtatgacagtctgatctga

SEQ ID NO: 4071 - DNA, 1017 bp, synthetic construct
  source 1..1017: mol_type = other DNA
atgaaaagcgtagccatcaatggattcggcacaatagggaaaagggtggcggacgccgtcgccgcgcaggatgacatgaaggtgattggtgttagcaagaccaggccgaacttcgaggcaagaacagccgtggaggaaaagggatatccactgtatataggcatcccagaacgggagcccctctttaaggaggcagggatcgaaattgccggaactgtggaggacatgattcaagaggcagacattgtcgtggactgtacgcccggcaacatcggcccccagaaccttgagatgtacaagaaagctggcgttaaggccatttaccaaggtggcgaggaccatgagctcaccggcctcagctttaactcgttcgccaactatgatgatagttacggggcagactacgccagagtcgtaagttgcaacacaacagggctaacccggaccttgcacaccctgaatccactggttgacatcaagaaagtgcgcgctgtcatggtcagacgcggatcagacccaagcgaaatcaagaaggggcccatcaacgctatcgtacccaaccctccaaaggtcccttcccaccacggtccggacgttcagactgtaatgaaaggcatagacgtgactacaatggctctgctggtgcctactaccttgatgcaccagcacaaccttatggtggagatcgggaatgatgttacgaaggaggaagtcatcgaggccctcgaaaaacgatcccgagtgatggtggtggaggccgctgccggcctggactcaacggcggccctgatggaatatgctaaggatttaggacgcagcaggaacgacctgtacgagattcctgtctggaaagagtccataaatgtcgtggataatgaactcttctacatgcaggctgtgcatcaggaaagcgatgtggtgcccgagaacgtggatgcgattcgggcaatgctggagatggaatctgataatgaaaaatccatcgcaaagaccaataaagccatgggaatcttttga

SEQ ID NO: 4072 - DNA, 552 bp, synthetic construct
  source 1..552: mol_type = other DNA
atggttttcatgattgacctagaccagttaaaaaaggaaatcaatgatctgaccaaggactacaagggatttgagttcaaatacatagataccgattccatcgtagtggagccctggacaaggctcaaatgtcagtacggctgccctaattacggaaagaccctcgtctgtccgccattcactccaaaggccgaggagtttatcggcatggtgaatagctataagacggcaatcctcttccaaataagcctggcctccctggaagacgacattgggggtattactaaagtgtcggtggacatcgaaaacctgtgcgctcactttggctattacaaggcctttggcatgggcgcagggccttgcatggtgtgcaagtcaaaaggggaagaatgcagtttggatgcctgtaaatatcccaacgaagcgcggccctctggagaggcttgtggtgtcgacatccataagacaattgagaacaacggctacgatattctgggaatcgacgaggagaacaacagctatttctgctacgggatcgtccttctggagtga

SEQ ID NO: 4073 - DNA, 1086 bp, synthetic construct
  source 1..1086: mol_type = other DNA
atggcaaatactttcttttccaaaatagtgaaatccctctgggtcctggcctcctttatcccaaccctcaacggattggggttcgcttatatcggcgcgaaagagttcaaaaataactggattattgaaggggtgatctacgagattccctggttcctgctcttcatctttgtgaacaatgaggacctgggcgtgttctttgccacaataggcctgctgggtatggctgtgtcctttgttaggtcactctacgtctactataagcacaaggacatattgattgacgacgatgccgaaagtcgcatcagcacggagaagtccatcacgagcttttgggtgatcttctctgtcattatcttcctaaatgggctggggctgatatatgtcggatttaaaagaaacgttcggcaatggatcttggaaggtgctttctttgagttcctgtggctcctattcttcatcacccccagcaacaaggccttaaacagttttatcatcagcctgggatttatcggtatgattctatctgtcatccgcacatttatggtctactttgaagaggaacgaatggatggcggcttctacagtccaacagccgtgaagaaagagccccctgcccagaacccgattgaaaacaccatcaactcatacagtgagaacaaccttagcgatgacgacattgttcctgagttcaagggatataagacccaggtggaggatttgaaagacgcattcaagactaaggaggacaatgtgaataacctgctctctaagagattcaccaaagaggagcttagctacggccggttcaagtcagtggtaaacgagtttcataagacattctacagccaggcagattccactttaaccatgattaatctggcgcccgaatacagcgagagggtagatgagaccataaaaaacaagatcggccttatggactcgctgctcggggagatgaacaatctgctcgaagaactgattctgaatgacggacttccagagaagtcagatgaggaaatcacggaactgttcgaaaacatgcacaatctgattaattcggtggacgattataacaaggagtga

SEQ ID NO: 4074 - DNA, 345 bp, synthetic construct
  source 1..345: mol_type = other DNA
atgaacttcaataagaagattctactgatcattgccctggtattcatcgctagtgtgggcattgtggcagctgaagacgccacagtcgatccctacactttcactataccagacgactacactattgcgacatccgacgacacgacctgcgcaatgcagaaggacgcgacccacgccatcagctttgcaaccggcgtcagcgatgatatcgaagccgccaaacagaacttcatctcccaaggaaaaacactcctcaaggaggagtcaatgaactataatgacatggacatcaccctgcaggcctttagcgctgatgtggatgggacgaccatcatatgtctttga

SEQ ID NO: 4075 - DNA, 1653 bp, synthetic construct
  source 1..1653: mol_type = other DNA
atggagaataacgatctcgaaaatctgcgcaaactgatccaggacatcctggacttcgcaaagacccactctgataccttggacgaggactctgcgcccctttggtattttgcaaagggaaaatttaacatcactcttgacgcccttctgctaaacgatattctctgctttctgagctttctggggcttagtgacggaaacatcagtagcgacgagttgaacttcatcaactacgtgctgaatttcaacttcacaaaaagcgatttggagctctacttaaagaataatctaatcgatgattatagcgaatctcttcctccatccttctttgtgttctatgaatttgataagtttgccctggagaatgggaaactgactgaaagcatcgtagattccttattcgaggtcttcaacggcatcggccatctctttatagccctcgacaacgagtcgagcctggagaagaatattctggattcatttctggacaacattaaaaagcagctggctgacctccggggcttccagtacgaacttatggtgttggcgctgaaaaatgatctgatagacaatatgttggacacgaactcaattgacggcttcagcgactcgaatctggacacttctttcgactcggacttagacaaccctcaactggatgactctttcctcgataaggtggatgactttttcttcaacaacgaatccgacgatgacttcgtgagttccgtggacagctcaaatgatgacttaaatatggggggtgacgacagcctggatagtgatagccaatccaactcctcgtctccaagtgattccgacagccagaaagacaacaaaaagagcattcaggagagtctcgataagcttaacaagctggttggtctcgaggctgtgaaaagtgacgtaaattccctaataaacctcattcagatcagaaagctgcgggagcagcgcggaataaagcaaccagacatgtccctgcacctcgtgttttctggcaaccccggaacgggaaagaccacagttgccagactcctgtcagatatctattgtcagctcggcctgctgagcaaaggccacttggtcgaaacagataggagcggtctggtcgcaggttatgtcgggcagacggccatcaaaacccaagaggtcatccaggaggccatgggaggcattctcttcatcgacgaggcctacgccttgagctccgcaaagggagaaaacgattttggccaggaggcgattgataccattctaaaggctatggaagacaaccgggatgactttatcgtgattgtagcagggtaccccgacctgatggatgagttcctccattcaaatccgggcctggaatcacgcttcaacaagcacctgtacttcgaggactacaacccccaggagctgttcgatatattcgtgtccatggccagtgagaccaacctaaagctcgacgagaaggctgaggagtttcttaaagggcacttcgaagacgtttataatagcagggatgacaattttgctaatgggcgttacgtgcgaaatatctacgaaaaggtcctgtcaaaccaggccaacaggctggtgggcatggaagatatctccgatgacgatttgaacacacttaccctggaagacttcaaggacttttga

SEQ ID NO: 4076 - DNA, 1977 bp, synthetic construct
  source 1..1977: mol_type = other DNA
atgggaattaaagaatttttcctaaacaaagaaaaacgaaagatcgtggctattgagaaagacctcaataacaatctgagcatcctgggaggctatagcatgggcattaaggaatatttcatagagaaaatcgacattattttcattctaatctccataattgctattgccctggaccttctgggtgtggacatctacggaatcagtctgatttggatagcaatcatattctgcggcattccaatcttcaaggaggcggccataggtctgtacacggagtttgacataaaggctgacgtgctcgtgacaatcgctatcataagctcaatactcattggggaactgtttgccgcaggggtgattgcagtcatcatggctatcggcggctacctggaggagtacacagtgagcaaaacacgggcgggcatcgaaaagctggtggacctgaccccccgcaaggggagactgatcgaaaactacaacaagtccaacgaatcggaacgagagatctcagctgatcttattgaagtgggcgacatattgaaagtggtgccgggagagacagttccagttgacggcaaaatcataagtggcgagacatcaatagaccagtccgtactgaccggggagtccattcctgtcgacaagctggagggggatgaggtattcagcggaacaatcaacctgtatggttccttcgtgatgaaagccatcaaaaagggtgaggacagttccctccaaaggctcattaagctggtagaattttcaaatccaaacgatgccgagattgtcaagactgccgacaaatgggcaaccctcattgtggtgatcgcatttatctgtgccgtcttggcactagtgttcaccggtgagatcatccgtgctgtaaccgtgctcgtggtcttctgcccttgcgccctcgtgctcgccactcccactgccattatggcctcgattggaaacctcagcaagaggggaatccttgtcaaggaaggcatcaccatcgaaaagttggccaaagtggacagggtcgtcttcgataagactggcacgttaacctacggcaagcctaccctaacggatgtcatcgtctacgatgaggaaaccgaggagaaggagctgattcacctgctggcgtcactcgagaacttatctgagcacccgcttgccaaggcgatcgttaaatattatatggataattacgacgataccctgcttaagctgagcgacttcgagatgatcattgccaaaggggtaaaggccaatctgaacggcagcaatatctgtgcaggcaacctggagtttttcaaaagtttagggattgatatcccagaggagttcatcgaggagattgtgtctccctccctggaaaagggggctaccgccatctacattgccaaggacagtagattcttaggttgtgcattgctcagcgacgtcctacgcaaggatgcctctgatctggttgtgcaattgcggagactgaaggtggtttcaactctcctgactggggacaacaagcaggcagccgaatacatcgccaaagaggcagatatcgtggattatcagtacaattgcctccctgaagataagatctccaccatcaagaagtttcagagcctgaaacttaatgtggcaatgatcggggacggcataaacgatgctcccagcctgcgccaggctaatgtggggatcagcatgggaggggtcggcagcaacatctccatcgaagcctcggacgtctgccttgtaagtgatgacattaaatatgtgccccatctcttggctctctctcgcaagacgataaggacaatcaaccggggaattgcttttgccctgatcctgaatatcttggccacagttcttgcgatgtacggaatgattggccccatcgaaggtgcttttgttcacaacattggatctgtgatcgttattatctatagttccttgctgctgcggtacgagtatgcgaattga

SEQ ID NO: 4077 - DNA, 261 bp, synthetic construct
  source 1..261: mol_type = other DNA
atggattctgaaaatctccatagacggctgaagaagattatcggccagctcaacgccatcgatcgaatgatcgacgaggacattccctgtgaaaacatactgatgcagataaatgcttcaaaaagtgccttgcacagggtcgggtacattattgtggagggccacctagataactgcatcaagaacgcaatggaaaaaggagacaccgacgaggcgcttgccgacatcagctccatcctggagtattacagccgcctgtga

SEQ ID NO: 4078 - DNA, 450 bp, synthetic construct
  source 1..450: mol_type = other DNA
atgtctagtgagaagcgcaattccaaagatcagtcctacctgggctttgagcttattgaagtggaggactactatctcctgtcgaacacggaaaagctgctggaaaccgtgaagaaagactggtttaaaagcctcatggacgagatccgggagttggttggaaagcattacccagacttcgtgatttacctggcctatgtggatcacggagatgacggcacaatccttggctacgtgaatgtcagggaagatgacaacaagagggacgaggagtattcagaagtcgccctcaacaaggagatgctggagatctgcgagaaacacaaggaagataaaatattattcgtaaccattccgcggaagagaaagagcttcatcaagctgaaaaaagggagcatccgagaacacttcaaagaggctctactcaagctgggggcaaagcccttgtga

SEQ ID NO: 4079 - DNA, 1089 bp, synthetic construct
  source 1..1089: mol_type = other DNA
atgaccggggaaagtactcatgagcatacgcacaaagagcaaagacggcaatacacattcaataagctgaaggccttcggccaggagatcatagaggacatagagaagaacaaagtgccaacactaaagattccctcgcggggaactggcaacattgtgtacgatgaggataaaagatactacatcctgggggatcgatatgggcgaaggagcctcggaaacgttaagcaaatccgcaaattagggcagatggtctacgtagccaatttctgtaaggatctggtccagcgcgacaagaccgcgaccatccgggagatgtattatatcagcgagggttggggtatcgagtttaacacacagcaggaatccaacatcgtgggcgaggacctcgaagtggccctcggggccacccgtgaagacctcggattaatgcctgaagaagacggcgcatctgtgtacggtgatataaccttgctggacggagattatgagatcaacgcggcccgggccggcaaatcaggctacaccataagcccaactatcgaccaggttgagctcttggattgcggagccgacttcctcctggcagtggaaaccatgggcatgtttcataggcttgtgcaggaaaaggctcacgagagatacaactgcctgattgttggtcttaaagggcaggccgctcgggctacacgcagatttatcaaaagggtcaatgaggagctgggccttccagtgtatatctgcaacgacggcgacccctggggattccacattgcccaggtaatcatttccggcagtgcaaagctggctcacgtgaatcacgatttggctacacctgatgccaagttcattggcgtgacggcgtccgacattcaaaattacgacctccccactgatccgctaaaggacattgacgtcctgaggctgaaggagctgagcaaagacccccgctaccagacggacttttggcagaccgaaatcaaaaagatgctgaagcttgggaaaaaagcagaacagcagtctttctcaaagtacgggctggaatatgtggtcgatacatattttcctgagaagctgggattgaactga

SEQ ID NO: 4080 - DNA, 1800 bp, synthetic construct
  source 1..1800: mol_type = other DNA
ttgtcgcagcaggcgcaagagctctttgaaaatttcaatgagctaactccaagtgagttctttcggaaaaataaacagatgctgggattctcaggcaagattcggtctctgacgatcgttttccacgagctcataacaaacagttttgacgcagcggaggaggccggtatcctgcctgaaatcagcattaaactggacagactggggaaggaccattacgtgctgacccattcagacaatgggcctggcatccccgaagagtttgtaatgaaggtgtactgccagatgttcgccggttccaagttccggaacatccaatccaggggacagcaggggctgggctgtagtggctgtgttctgttgtcccagatgaccaccggtgagtccacccatgtcacgtccggctggatggagaatggggagctcaaaggggtcaagatggaatttaagatggacgtgaagcagaacaaaggcgacctcatcaagaaaagcgaatttacccctacaggaacgggggtgtgcattaagctccactttaaggaggtttcctactcgttagctgagcaaggcgcgttcgaatacatccgtagaaccatgattgccaacccccacgccaagatcacattcagggaccccagcgcccacaaatacatcttcaaaagggcagcagaaatcgttccagtgctcccccaggaggtgttgcctcaccccaagggggtgacagccgacgacatcattaccattgccaagttcactgacaagaggaacttcaagagcatgctgacaagttccttgagtagaatgtccagcaaaaaggtgagcgaacttcaggagctgaccggaatagatatgaagaaacggccgaaaaacatggagtgggcagaagccgagaagatcgtcgaagctttcggcaaaatgaaattcatggcccctccaacttcaggattgatcccgatcggggaagagcaaatagaaaagggtatgaaactcattctaaagcccgagtttattaccaccatcacaagaagcccagtaacctataagggcggtgtggcgttcattgtcgaggctgggatcgcctatggcggagatgcaggacgcatcgtgaacgagcagcgcaaatcagagatcctgaggttcgcaaaccgggtgccactaactttcgatgcaggcagctgcgccattacagaggcgctgcgatctattgattggagacgttacggcctgcgggacctcgacaacactcctcttaccctgtttgtgaatattatctctacgcaggtgccctacttaagcacaggaaaacagagcattgcccccgagccggaaatagttcacgagatcaggcaagctaccatgaaaatagcccgccgcctgcagaagcacatccgatccaaaaaggctgagaaggagaaggccatgcgcagcaagatatttgaggactatgtgcccgtcatcattgaagaggccgctagtcttgctgagactgaagtgccagattataagcctgtgctggctaaggtaacacggagggcactcgctgaaatcatgggtgaaaaggtcgaggaggaggaggaggaagaagatttcgtcgattcgctgcttgaagagcttgacgagtttggccacacggtcgacaaggagcattcagctcgcaaggacagaatccaggaatctgacctggatgaagccttcatagatgatgaaaagccacgaaagcgaagcaaaaagtccaaaaaaagcgagggcgccgatgaaggacagtctactctgtttgattcagaggaacaggaggaatga

SEQ ID NO: 4081 - DNA, 612 bp, synthetic construct
  source 1..612: mol_type = other DNA
gtgaacgagctgccggaaaccgactatctcagggttccctctgatcggattggcgctttgatcgggacaaaaggtgaaaccaaacacctaatcgagaacgccactaatactcatctggacattgacagcgacgactgcaccgtagctatttacccaggagagaacatggaggaccctcttggggtatggaaggccaaccatattgtcaaagcgatcgcacggggcttcaatccacacgtggctcttaaattaaacaaagatgacacctacctggaaataatcaaattgcccctgtatgtggggaagtccaaaaaggccatggcgaggtacaagggcagaatcattgggaaggacggaaagacaagagagattatcgttgatatggcagaagtggatatggcaatctacggtaagacggtgtcactgataggcgagctggataatgtcatggtggccaaggaggccgtggagatgatactcaacggcagccgccacaagagtgtctatgccttcctggagaacaagaagaatgaacgaaagatgaaagaatttaaggaggtcgtgggaatcgaaaaagatgagatcgagttccgcgacgacctcgatgactga

SEQ ID NO: 4082 - DNA, 234 bp, synthetic construct
  source 1..234: mol_type = other DNA
atgagcctgctggacaacattgataaaatccatacaacagagatgggggtaggacgcatccagcggaacctcggcattgacgtggaccccgtcgaatattgcatcctaaaaatcaaggataaggacgcagtcatcgaagagaagggcaaaaactactacgtgacggttgatgactgtataattaccgtgaataagcacagcttcaccataatcactgcccacaagaagaaatga

SEQ ID NO: 4083 - DNA, 780 bp, synthetic construct
  source 1..780: mol_type = other DNA
atggacgacgaaaatccacgcgtggctaaagcagatgcagaagtgcagaaactgatctcaagaaaacgcacgaaagatgccgatgaccgcaaggtcagtagcgagatattcgacaaggccaccttgcaagtcctctataagctggcgaatcagggccacttggatgttttaaacggggctatcagcactggtaaggaagccaatgtgctgaagggcataaaagaggacggctctatcgtggccgtgaaaatctataggatagccaccagtgactttaagaagatgcagtactacattgctggcgacccccggttcaacgtcagatcaagcaacaaacgacagctgattaacaattgggtaaataaagaatttagaaatctgacccggctaaaggatgcgggagtaaatgttccagaggcaatcacaagccttaacaacgtgctcatcatcgagtttattggggacgaggatggaaacccggcacctacagtgaagaacctgcctccccaagacccagcccacttctacgaacagctagtggagcagatggacaggttcataaacaaggccaacctgattcacggagacctctcctcctacaacattctgaacttcgatgagaagcccgtcatcattgacgtgtcccagtctgtggtccgggatcatatcattgctaacgagctccttgccagggatatcaagaatatcagcttcgaattttccaaaatgggggttgacacttcgatcgaggatctgaccaatcgactcatcaaggactga

SEQ ID NO: 4084 - DNA, 321 bp, synthetic construct
  source 1..321: mol_type = other DNA
atgtttcgaaggcagattctggcaaaaccccaaaacaaccagcaggaataccggcgtgtgcggaccccaaagaagggcgaaatcccgggcgtcgtcgagcaaataatgggacacgggaagctgaaagtacgctgcgcggatggaaacatccgcatgaccaggatacccggtaaggtgaaaaagcggatctggattcgcgagggggacgttgtgctcgtgaagccttgggacttccagagcgatcagaaggccgacgtgatctggagatacacaaggacggagagcaattggctagagagaaaaggctatctgaaaatgtga

SEQ ID NO: 4085 - DNA, 1215 bp, synthetic construct
  source 1..1215: mol_type = other DNA
atgggtgtggagtttctcaatattatcgagtcagatgaagctaaggagatcataaaagaaaagttcgaagagtgttataccgcccaaagcgaaatcatagacattgccgagagtgctaatcgaatcacatatagcaaaattgaaagtaagatcgatttcccaccattcaaccggtcactgaaagacgggttcgccatcaaggcagaagacagctacggcgtgaatgaggagaatcctaaaaagctcaaagtcattgacttcctggaggcgggatcgtttacggataagaccgttgagcttggaagctgcgtggagatcagcacgggggcccccattccagacggtgctgatgcggtaatcatggtggagttttcatacaagtctgatgaaaatccagagctcgaggacgatgaggtggagatcctaacaagcgtcactccctcccaggatatcggccaaaagggctccgacgttaagaaaggccaggtcatcctggatgagaacatcttgctgaacccacccaagattggggtgattgccgctcaggggatcgacactgtggaggtgtacaagaagcccaaggtgggaatcatctcaactggaaacgaactcctaacgaaccaagaggaactgaggccgggcaaaatctacgacgtcaacagcgaaatgatcagggcgggggtgaacgcctgcggagccgaaggtgagtgccttgggattgtgagagacaattatgatgacctgaagaacaagataaccgagagcctgaaggaatgtgacattctcctgtgctccggcggcacctccgctggggttggagacaacatccgccacatccttgatgagctgggcacagtctacattcatggtattaccgtccagcccggaaagcccaccatcctgggcgtggtagatgggaaaatcatcataggcttacctggcaaccccgtttccgcaattgtcattttcaatgtgtttgtggcacctgccatcaagaagctggctggcttcaaacaggaggaagagcagaagaccatcaagggaaaattggccaaacggatacacagccctattggccgcatgcagtaccagttggtcaaggtagaaggggacagtgttattcctatatttaaagactcgggagcaatattctccctggcaagtgccgccggttatacaaaaaagtctcagaaacagaacccgaatctcgtgtga

SEQ ID NO: 4086 - DNA, 468 bp, synthetic construct
  source 1..468: mol_type = other DNA
atggagatccaggaaaagacaattgaagaccagaaagtcgctataatgaactataaaggctaccttaaggacatggagattctgatttccaaactgaccggatggatcgagctagaagagatcgagaccgtgggggacctgttcgccatattctacaacaatccaaggactgccaaggaggatgaagtcgtgtatgatgtgggaatcccaatcaatcccgaactcgaccctgatgagactgaggagatacggattgtaacaatcatcgaacataaagtcctgagcgggctccactatggcagtatcgacaacatccaggagacctacaacattatggcagaatactcaatcgagaataaatacgacattatcggctctcccaaggaggtgtacatcaagagcaagtttgatgtggaggatgaagaggacatgataacggaaatccaattgccggttattaagatgtga

SEQ ID NO: 4087 - DNA, 309 bp, synthetic construct
  source 1..309: mol_type = other DNA
atggccgaggaagagaagagttctaagaagaagtccaagcgggagctggagaaggagcttaacagcaaagtggacaagattattgagaagaacttcgaagactttaaaagccaggatgaactggaagactttatccaaaaggccttcgacgataaggcttcccagtacaataagaaaatcgaactcaaagaaaaagagttggataagaagttcaaagcatcacgcgagaacgacaataaaaaaatcgatagaaaaatacgggagatggaccgaaagctgaaactcaggtataagaccatgctaaagtga

SEQ ID NO: 4088 - DNA, 1314 bp, synthetic construct
  source 1..1314: mol_type = other DNA
atgatttacgagatcgcagaagaggccaaaagagagataagcaaatattcagacacttatgaaatctacatcgaccggactgaactgctggaacttgattctcaaaagacggagctaaacttcgcaaaggaagatctgagcctgggcgtggggatcaggatcatcaaggatggagccataggcttcgccttcacaagcgacatggatgagattgcaaagacgtgtgagaatgcttatctgaatagtaagctcaacacaaaggacgaattttatagctttgccgaatacgaaaaactcccagtggtcaaaggcacgtacgataaacgattcaaggacctcgacctggacgagctgaccggctcacttaaatcggtcctgaatagtgtagaggactacggctgccaggtaagctccgggggattttccgccgctgaaggggagaccttaataataaatagcaacggcgtggaggcctacgacaactcgacaggctttgccattggagtgtcaatcaacgccgtcaaggacggtgaattgaccaccgcttacgactccgatagctcctgcctctacgacctagatggtatggccctcgtcgaggatatttgcaatcttgccatggactcccttgggggcgaagacatcgagaccagtgacagggacgttgtgctggactaccacgctgccactggattgttgtccacctttctgagcggcttcaacgcagataacgtgcagaggggaagatcccggatcgcggataagatggatgagaagatcatcaccgagaacctctccatttatgacgattccaccatcgatggtggactgaatagttcgcgctgcgatgacgagggcaccgcgtcaaagcggacctgtctggtggaggatggggtactgaagggattcctctatgatatctacacagcgaataaggacggagttaaaagcagtagtaacgggttcagaagctcctacctgggaacgccgagcgttggggcttcaaacctattgttcgactttaaaagccatcgcaacctcgacgacattgatgacgcattcctggtcacagacgttctcggcgcccacacagccaacccaatcacaggcgactttagtgtggaggcaagcaactcattcctggtgtctaacggtgataagaagcccattaaaaaagccatgatttctggtaacatctatgatcttctggcggacgctgaagctgtcgggactgagactaaacagcgaggctctttcattatccctaagatatttttacccaatgtgcgcgtggtggggaataacagcaattga

SEQ ID NO: 4089 - DNA, 705 bp, synthetic construct
  source 1..705: mol_type = other DNA
atggtgaaaatcgaagcaatcgcggtcgatgtggacggaacaataacggacggccggagacgggtctgccacagcgccttggacgcgctgcgcaaggcagaggatgctggcatccccgtgatcattgcaactggaaacatctcccacttttcgtatgctgtggccaccttggtagggaccaccggaggcctggtatgtgaaaacgggggtgttatctatcacgacggctacaacgacaatcgagtgatcgtcttaggagacatctctaaagctcagaaggcttacgacttcctctttgacaagttcggcaaagacattccgtttaggatagtggaagattccgatgccagggtgagtgaaataactttctacaagaatatgagttcagagccacttaaagagatgctgaaggacttcgatgtagaggtctacgacagcggttttgcactgcatctgaccgaccctgcggtcgataaggggacagggctagccaaactggctaacctcgttgggtacaatgttgagaacatcatgtgcattggcgatagcgaaaacgatattgactttctccttgccggaggcttcaaggtggccgtggccaatgcctgtgatgagctgaaagagattgccgattatgtctgcgagaacaagtacggtgacggcgtggccgaggcaattgacaagttcgtgttcaatcaggaatga

SEQ ID NO: 4090 - DNA, 954 bp, synthetic construct
  source 1..954: mol_type = other DNA
atgatggccagtatgaaagagatggcggacgctatactcaagcgcatcaacgatctagccgttcccgtaaagatcatgcatgtgtgtggttcgcacgagcatacaatcatggagcacgggattagatccctgctgcccccggaaattgagattgtggccgggccgggatgtcccgtttgcgtggtgcctagccgcgagatcgacgaatgtctgcagctcgtcgaaaaaggggtgactgtaaccacctttggagacatgctccgtgtgccaggctccaacggctctctggcagaggccaaggccgagggcgcagatgtacgagtggtctacggtattccaaacgccgtggaaatcgcggaaaagattgataatgacgttgtgttcatgagtgccggcttcgaaacaacagccccagccaccgcttccgagctcctgaagaagcctccggaaaacttctcaatcatttcatgccacaggctgatcccccctgctcttgacttcctgatcaacagcggagagaccaatctaaacgcactcattcagccaggccacgtctgcaccatcctggggacggagccatttgagaagttcagcacggaatacggaatcccccaggcggtggctgggtttaatcctttggatatactgatgtctgtttatatgatattacgacaaatcgatcggggcgagcccagaatagacaatgagtacaagcgggccgtgcggactgagggtaatgtcatcggaaaagagatgatggacgaggtcttccacgtggaaagcagggaatggagaggattccccaaaatcccagacagcgtgttggaagtcaacgacgagttttcccagtggaacgcaagggagaagtatgatattgaggtcaaggacgtgactgaagctcccaaaggctgcatctgcggccctattcttcgcgggctggcaaaaccttactga

SEQ ID NO: 4091 - DNA, 1725 bp, synthetic construct
  source 1..1725: mol_type = other DNA
atgtataaagataataaaatattagttgtgattcctgcgcggggggggagcaaaggcatcccgcgaaagaacattcggttcctgggtaaaaagcctctcattgcacacacaatagaaatgggcaaggcttccaagtacgtggatgagctagttgtgacaactgacgatgaggaaatcaagttcatcagcgaaaaattcggagcagaaaccatcaagagggatgggaagctggctgaggactctatcccattagacccggtaatctacgatgccgccattcagaaggaagggaagtcgaatgaaaaatacgatgtggtcattaccgtccagcccacttcccccttgttgaagacaaagaccctggatctggctattgagaaactcctgaaccccgacaatgaaaacaaagattacgacactatcatcagtgtggtcgacgacaggcacctgagctggggctacgatgagaaagagaagaagtatttcccactgtataaggaaagggtgaaccgacagtaccttcccaaggcatacaaggagaccggaagcatatttgctacgcgacgcgaatttgtgaaggaggattctcgtctgggtgagaatataggtctcattgaagtctccaagcaggagagcatcgacattgacaactatgaggactggtgggtggcggagcgcatcctcaataagaagaagatcctcatcaaggccgacgcctcccacgagattggaaccggccatatttaccggggcctcagcatagcctcgaagcttgtgaaccacgaggtgattttcctgcttgacgaggcgcaggaactgggcattgagatcgtgaaaaacaacaactacccattcatcacccataattccaataaaggcaagggtaaagaggcagatgaaaaagctaaggaagagattattgagaagatcgtggagtacgaccccgacattatcataaatgacatcctcaacaccaattcaaaatacactaagaccttgagggacaatggcttcttcatcgtaaactttgaagacgttggcggaggcgtcaagtacgcccacctggtctttgatgcactctacgagcacaagatacctcttaagaacctttattcaggacaccggtactatatcctgaaagatgagttttattaccagtcatttaagaaaattgacaaggaggtgaatcgcatcctcctgacgttcggcggcaccgatccaaacaacctgacagagaaaacgctggaggccatcctggagagtaaataccaaaacgagattgagatcatcctaggattgggatacagcaaaaaagaggaaatccaagaaaaatataaggacaacgagagaatcagcatctatgaaaacgtgaagaacatgagcgaacacatgcacaatgccgacctgatcttcactagtgctggccgcaccatgtacgaaatagcctccctgggggttccttgcatatgcctctgtcagaatgagcgcgaattaagccatatctttggaaacatcgagcatgggttcattaacctcggtcttgggtcaagggtcagtaaggaggacctaatcagaacactggaaaacacaatcaacgattatgaattgagaattgagatgaataaaagaatggggaacgtagacctgaagcatgggtttgataatattcggaagctgatcaagaaggaatataaaaattggaaagccgagcagctgaacaaatga

SEQ ID NO: 4092 - DNA, 840 bp, synthetic construct
  source 1..840: mol_type = other DNA
atggaatcaaaagacattaccaacattgaagagattataccaagcaatgacgtgtatcccttagtcaatctgctcttccagagcaagctcttcaaaagtaaggagattaacacaaactctctggcaatcagctgtctggacctgatcgacaaaaacagaataaagatcacgttcaatgaggagatcgagtcaatcaaaatcagcaagaaccctcttctgaagactaagggccagctggaaaaggaactggagctcatgaaaaacatcaaatttacaatcaatagtaaagagatgaaaaaactggataaacgggaccagatcatcttgaagatgtttaaggacatcaacaagaaccacgaatttgacctcaaatccatgtatgataagatcctaaagcaggatatagctatcaaatttgccaaatacttcaaggattattccaagtccctggaaagggaaaccaagtacagcttggaaaactataaggacctcatcaaggatggggagttcacctttaagggaaatgagataagcaatgagtggaaggaatttaaatcgtctctgaagtcggataagtccttatacagccaagacgcagagataattgacaaatacctgatttatggccgatgccttgagattgaaaaggatgtgctcaagaacattgagaaggcgaatccggactacgatagcgagctttacaggttcctacggcataatggtgctgacctgttgaagctcattttcgataaggccctggccaactccaagatcgagcgcaaaggagacggctcagtaccagtgggcaacagtaaatacttcgtccccgggttcgggtga

SEQ ID NO: 4093 - DNA, 1071 bp, synthetic construct
  source 1..1071: mol_type = other DNA
atgaccatcttcaatgaggaacccttcctgatcgccgaaatcggcgtgaactactacgacattgcaaagaaggaaaatatatccaatatggatgcagctaaactaatggtaaaggaggctcatgacgcaggatgcaatgccgttaaattccaaagctataaggcaaacaccatcgcctccaagaatagtccggcgtactgggacacaaacgaggagcctacccagagtcagtacgagctcttcaagaagttcgacagctttggtgaggcggagtaccgggaaatcgccgactactgcaaggaaatcggcatcttgttcctgagcaccccttttgactttgatagcatagactatctcgacgactttatggacgtgtataaaatttcaagcagcgacctgacgaacatccccttcatcaagaagatcgccaataaaggaaaggacataatcatatccaccggggctagcacccttgatgaagtcaagctagctatcgaaacaatagaaaacgctaacgacaaatacaaaaagggggaggctggtatcggaatcatgcactgcgtgctctcctatccaaccgcgaatgaggatgccaacctgctgatgattaagaacttgaaggacctttacccgaattacgagatcgggtactcggatcatacaaagcccgatgagaatatgctcattctgacaactgcctacctttacggcgccactatcctggaaaagcactacacattagataagacactgcaggggaacgaccactatcacggaatggacccagatgacattagaaagttcaacaaaaacattgagctgatcaaaactattaacggccaatatgataagatccctctcccatgtgaaggggaaagccggaaacaggcccgacgctcaatcattgcaaaggaggagatcggtgaaggcacgattatcaccgaggatatgctgacgtataaaaggccaggaactggcatttctcccagtgagatagataacgtcgtgggcaaaaaagccaaaattaccattcccgaggatgagctgattcagtatgactttttggagtga

SEQ ID NO: 4094 - DNA, 1527 bp, synthetic construct
  source 1..1527: mol_type = other DNA
atgacttttacagtaaaggagatctgccagcacatctggtctcttgaggagaaatatgagctgaaccacaaggagattcagggctgctacccatggcagctgatccggatgtacctctactacgagatcaccaggaagacgaacgtctttgagtcagctcagcagtccagtctttccctggcggacaaagtgaacaccttcctgcctttcataaagaacagcattctgtcaaaccccctgagcgggaaggataccaaagatgttctcatcttcgaccatcctagaaaagtcatactgaacggggagtaccaggacatctatagctatttcctcaaggacattctcataaaaaacaataagagctttgagacaatcgaatccccatacctaaacaaccacttccgcagcagtgcaaataagaaggagaataatgtcaaatacaatgaccgcatccttttaggctcttttataaacaagaccaagaatcggggcaagttgccctttaccgatgaagaaaaggacttcatcgaaacgatcaaaagagagctggagtcggccttcaaaatcgaaattaatctattcaacattattgaagaccacatcctgaatttccaatatgattataagaagtacattgagctgcttgaaaagcgaaagcccaagcaggtgtatctggtggtggcctacgaaaacaaggcgttggtagccgcctgtaagaaaaagaacatcgaaattattgaattgcagcacggaaccataagtccctaccatctcggttacagttacccaaagaacacaatgctgatgaacaacacaatcaaggagatcgaatacttcccggataaaatcctctcctttggtgactactggcaaaactcctcaagcttcccgatagagtccgataagattatctccatgggctttccatactttgaggacaactctaaaacttttatgaagatggccgatgaggacaaaaacaagaagcagattctgttcatctcacaaggcgtgatcggaaaatacctgtctgagttggcttatgaactggctaaagagctaaatgagaaaaataagaagaatgacctcgagaacagcgaaaataacgagtctgacctcgaaaataacaactatacattcatctacaaactgcatcccggcgaatatggaacttggagggagaattacgagtatttaaataaagctaatgaatttgacaactttaaagtcattgataagagcgagcctcctctgtacgagctctttgcaaaaagcaactatcagataggggccttttcgaccgcaatctacgaggggcttgccttcaactgcaaaacgttcatcattgacgtgcccggagtggagtatctggatgacttgattgacaagaatatcgtgaaaaaggttaaaagcagtgaagagctgattaatttcattgaagatgaagacaatttagatctcaaggaatatgataaggattacttcttcaagaacttcgacgagtccatctttgacgagatcctgtga

SEQ ID NO: 4095 - DNA, 1443 bp, synthetic construct
  source 1..1443: mol_type = other DNA
atgagtgaatacgtgcgattcatacagcggataggtctggtcgggattaccaacatcctaatctctctgagttctttaatctttattccaatcattacaaaatcctttactacagccgaatacggcatgtgggctcaggtaaacactaccatcgcgctggtgcccaacatcgccaacctcggtctgccctacaccatggtcaggttcctgtctgctgagaaggataaggaaaaaatccgggactccttctacccaatgatcagcctgaccttcatctcaaccgtgatcatctgcctgttgtttctgatcttcggacaccctattgccgatgcgctctttaatggaagcatgcaggtcttgtacatcacaactgccatctccttcttcgcttgcatgaacttgatgctcataacctactttagaaccttccaggagatgaagcgctattccctcttccttgttctgcaaagctatatcggggtctttgtgagcatctaccttacatacgccggatacaatatagagaccgtggtgctcggcctgctgacgggctatgccgcagtattcatcatgatggcctttctcattgtcaggcatctggggttcagcttcggcaagtggtccaacctaaaggaacagctggcctttgccctgccgaccattccaagcaatgtttcatcgtgggtcgtggacagcagcgacaagtatgtgattggcatcctgctggggtcggtggcagtgggatgctattcacccggctacgccttaggcagcatcttgctaatgttcctctctccatttgcagttcttcttcctacgattctgcctgagcactacgaaaagggtgacatggctgaggtcgacaagtatctctcctactcaatgaaatactatctgttgctcactgtgccggccgctgtcgggatgagtgtgctctctaagccattgctgtacatcataacaacccccgagattgctcttggcgggtatatggtaactccctttgtctgtctcggggcaatattcatgggcatgtatggcataaccaacaatatccttattctagagaaaaacacgatgatcctgggtaagctgtggatcattgtcgccatctccaacattgttctgaatctgattctggtgccttacctcaacatcattggagcggcaatagccacactgctctgttacatgctcgcttttggcgtgactgccattgccagtcgtaagacgatgagattgcctttcaatcgcaaggagcttgtcaaaatcctgattgcctccgcgattatgggtgcagtggtttatatgatgaaccccagtggaatagtgaatgtgctggtggctatcttagtgggagtggtggtttatttcgcaattatcttcgtgttaaaggctgttacacggaaagagatcgggatctttaaagatctggtaaaatga

SEQ ID NO: 4096 - DNA, 507 bp, synthetic construct
  source 1..507: mol_type = other DNA
atgatctcaaagattttcaacatcaaacagagcatcaaacgggcctactatacatatagggtaaagagagtgtccaaatcctgcggcgataacctcaccgtcaacaattactcctacgtcacgcccaagacaagtctggcagataacgtgaacttcaatggcatgaagatacaaggaaccgccaatgttagcatagggagcaacttccactcaggcatcgactgtatgatcatcactgacagtcacaactatgagggggaagcgatcccttacgacgagaccgtcatttcgaaggatgtggtgattgaggataatgtgtggattggcaatcgagtaatcatcctaccaggcgtctgcattggtgaaggggccataatccaggctggaagcgtggtggtgaaggacatcccgaaatgcgccattgctggagggcaccccgcaaaggtttttagctctcgcgacaaggagcattacgaaaaactgaaagaagagggtaagtttcattga

SEQ ID NO: 4097 - DNA, 1986 bp, synthetic construct
  source 1..1986: mol_type = other DNA
atgaaggtggtagtctgcgagaactgtggtgcaaagtaccaactgaacgatgacgatgatattaacgcattcgaatgctccaactgttctggaagtctcaaggagctggagagcttttcagacgaagagattcctaagcagtcggatgaatcaagtggctccgactcagttctggtgtactgcataaattgcgggctcaaattccagattgaaaaagacgacaatatcaatgactttgaatgtgccagctgtggcggtccgttagactacctttccaacaaaagtgaagaatctcaggagtctcagatctcccaagactctcagggttcagatagttattatgaaacagtgtcttatgtgcagtctgatgacatcattcctattcatgccgaccccaactattccgacagcgacgacatcattcctattcatgccgagtccgactcccagaccccatactacgaggaacttatagagagtgatgagatctacgctaaccagtacgaggatgatgatcagtactatgtgagcgagtacgagaaggttctgcaatcggatgctgattcctactacgaagacgagtatgacgatcagtactaccaaacagacctgcaggaggaaggcagcgggcagatcagcctggacgagctgtattataccagtgaataccccgcttatgacggaactgatgagattattccgatccacgctgaaaaacggtacatggaggattcacaggatagtgggtttgcgtacgggcctaacggaaaatacgcggaagactacctagaggaggagtacattgaagaggagtatgtggatagcgtcgaagaggagagcccctatgtcgaggtgatagacataccagaggacgagttgcccgaaacccccgtggtgctgacacgccaggtcctatccgaggaggaccaaaggctctttgacagggtgcagaaccagatggtatttgacagccctgaggaatatgaggcatttaaggccgccagatacaaatattacgtcggcctgctggatatccttaaggaggaatacctcctgagcatggagaacgaatttaagtcgggccggagcgtgaaaaacctcatcaaaaaaggcggagagacagtgaagcaaagcaacctttatgccgacgattccgatagtttggtcagccccgaaacggtggaattgatgaaatcaaaccgcaaatatgagcccaagaagtccaacgccgacgtgatcatcatcgctggattttttatagttatcgtgtccctggcgtactacttcttcgttagccagatcatgtatgtgctcattgccttcgcactcgggttggttattctggcctacggcgcctacaagaaatatgtcttcaatgaatacatcgcacgaggcaggatcatccgggaacgactgctggccctcccaaatgacttctacgtattctatgcagttcagcccccacagagtaaggacatcatcaatcacgtggtggtgggaccgacgggcatctttacaattctctctcaaagatacgactcaaaggattacaagaataagcttaagtctgacactgagaccggagatatgttaagcgaatccgcgtccatacaggactataggcagaagaagaataccctcgagctgcagacggattacgatgacaatcagtcacgcttccagtttggtaacgaagagatccacttcactcaaaacagccagatcaaacggaaggctctggaattaaacgaggacttggccattttccttgataagaaggggttcaacggcatctatatcgagccactgatcggcttcgtcaatgacgatctggccatactgaatgtaattctaaccaatgaggacctgttcatcgacgagctattcaataaggtcattcgtgggagaaaaagattggacgagctgaccgtggctaaaatagctcgcctcctgtcgtactactctgccaactgcgatgtctattga

SEQ ID NO: 4098 - DNA, 1173 bp, synthetic construct
  source 1..1173: mol_type = other DNA
atgaacatacttcacgtggctcacttcttctatccctgcctgagcgctggcggagtcgtgaatgcaagttaccaaattgccctcaatcaggtcaaagacaacaatgtgcacgtgtacaccagtgactcctgcaagcagcgactgaagttcgaagacggtagatacgacgtagatgtggatggaattaaagtggactacttccggaatctgtcaaaccggttcaagctcgcgaccatgttggacacgcccctgtccgcgtactttagaatccggaaggatatcaaaaaccacgacatcattcacattcacgagcataggcagaccctggccattttagtaagccactacgccaggaagaacaacattccgtacatcgttcaggcccatggctctgttcttcccttcttccaaaaggaggggctcaagaacatcttcgataaggcattcggctttaagatactccacaacgccagctgcgtatttgccctgactgaagtggagaaggagcagtacattaaaatgggagtctccgaggacaagatcgaaatagtccctttgggcataaacatcgaagagtatgagaatctcccagaacccggaaagttccgatcaaggttcaatatcgctgatggggacaagctgattctgtttgttggtcgcatccatgagatcaaaggcctggatctactcattgacgcctttaatctgctgatcaaggatagtagctcccctataaagctcgctatcgtggggccagatgatggctatctggacactctgaacgagcgcatagcagagaataatctggaaagtcaggtgattatcacgggaccgttgtataagcgcgaaaagcatgaggctctcgtggactgcgacctctttgtcatgccttcaaaatatgaatccttcacaacaagcgggcttgaggcaatggcctgtggcaagccattggtgctgaccaaaaacaaccatattcacgactgggtggatgggaacgtcggcatttcctgtgacgatgacgaaatctcgctaaaggaagccatgaaaaagcttctgtttgacgacgatctgagcgagacatttagctcgaacggtaaaaaactaatcaaagagaaatacaactgggatatgatcaatgagcagatcttaagcatctataacagatttatctga

SEQ ID NO: 4099 - DNA, 1788 bp, synthetic construct
  source 1..1788: mol_type = other DNA
atgatgttttccaacatctccaaggaccttaacatcgaacggaaggattatctgtgcctcttcctcctgttggtctacagcgccatcatcacggtcctgttaatcaatttcaacgagagtatcggcatatactgtagtgatgtctatatctatctgtacaactccctggtatttgcccgaatgggctataacaacacttatctatatctctctcccctggacttcggtctggtggagcttcactttttgttcagactcggctttgtgaacgaggtgtccatttacgcggttactggggtcttcagtatctttggaagcctgggaatttatgttctcctgaaaaggtatttcaattctcttctgagcctggccggcggtgtgcttttcaccagcttctccttgaacctgctctggtgggcaaacggaacgctggacctcccggcggtaggactctctgtgtgggcgatcctatttttgatccttgctgtggacgagagtcctaaatactacatcctgtcgtttgtctttttggtcttaagcatcttcactcgctacacctgtctctttctgatcccattgttcctgctctactacttatcgaaacacgatctgtttggcttcttggattcactgatctccgatcggaaagaggccttctcaagtctccggagctttctgaaaaccgaagagttccgttacctcatgatcgccctagttctggctctcattgtggccgtgctcttcatctcagtgattctctactatggggctgaactgagctttctagagcagggcagcacattcgcctccgggagtaagggcgctttggacgattacgcacatactacagacaccctgttctacttccatgactttctgaacttcctgttctcccagaaggtgattttccaggagaatttcattcccacccttaccggcgcaagctatctggcctatttgatcctattcatactgatcatcggaattagcctgggtatttaccgcttcttcaacaagaacaaaagtgaggacaaaaagcagtttgacaatgtcaattcttccattagcaatcttaaggagttctcgtttaagacaagccactttaaaacacttttgtacattggcctcctcctttcactggccatcgccatcctgggattcaagataaattcaataatcaccattgcattcctactgatcgggctggttatcatattttccctgctcaagtctaaggggcttgatcgcaaagactattccgtccctatttttatgataggatggtttctggtctatttcatcttcttcacctttttaaacataaaggtgaacaggtacatcattacagttttccccgcattcatctactttgtaatcctggctcttaatgaaataattgggctgttagacggcaaaagtctgaagattggtgacctcaacctgtcaaatatcattccaatcgtgctgattgtgctctgcatgttttcggcattcagctttacaagcacttttgaggataacctggactttaatgactacaagatcgtggccgattacctcattgattacgatggggactatgccagcaaggacattgctgtgtttaagcaaaggaccttcaattggtggcttaaggactccacgatcgctgtgaccacagatcagttggatttcctggaatcaagcaacataacgtactacatctgcgatgaagacctgaaactggagaactacaccaagatttataactataaagacatattcttatacgaaagagtgaataattga

SEQ ID NO: 4100 - DNA, 882 bp, synthetic construct
  source 1..882: mol_type = other DNA
atgaacccttatctggagattattaggcccgggaatgcagtgatggccgccatatcggtggtcttaatgatgattgtcggccactattacgacttgccaatcattctctgtgcagtgatcgtctttgtttgcactggcgctggcaatacaatcaacgacgtcttcgattataagatagatgaaatcaacaagcccaaccggccaatcccttcaggccgcatcagtctgaagaatgccagaaactactcctacctgctgtttgcaatcggaatcatcctcagcttcgtgattgattacatgatcaattccatttggccttctgtcattgtcgtgccagctgtggtaatcatgtacctttacgcccgcaacctgaaggccatgcctcttattggaaacatcaccgtggccaccctgacagggttctgctttgtaattgccgggacggtcatcgcgtgtgcgacctccagcctgcgaatattgtttattagcatctatctcggattgtttgcactattcatgacgctggcacgggagattgtaaaagacatggaagatattgaaggtgacaaactcgagggagctaggacattccccatcttatacgggaaaaaaatcccctccatcgtgtcaatcatcctcatcgttgtgaccactctgatgtgtccggtgctttacatatttggcatcttcaacgtgttctatatgattgtgatgatagtgccaatatgcatgttcctctactgcgcctatagtctgaaactgaatcccccggaggaggtttgcgctaaggtcagcaagaacctaaagatcgccatgctcataagctttgtggcgttcgttctgggtagtttcgactggttcagcatttttgccgctctgtga

SEQ ID NO: 4101 - DNA, 1371 bp, synthetic construct
  source 1..1371: mol_type = other DNA
atgaagaaagtgatcctaattgcattttatttcaaccaggtcaacgagattgcgtctaagcggctgcgggcattagctaaatatctgcctcagttcggctgggaagtggtggtcatcgtgccagacttggggtatgagccctccagcaatgcagaccttagctcccgcataattactaccgaatatgaggacatgttttcccacatctttactaagtttaagcctggagacaaaagcaagctgaacgataaaagcgataaccattccaccagcgacagtcagaagctcaaggactcctcgtctgtctctaaccccatcgcctcaaaggcaatcagcatagctggagaggtcttcgcctaccctgacggaatgaagtattggtacggtccggcctatgaggccgcttccaagatagttgaagaagaaaagattgacgccattatcagctccagctggccgattacctgccataccattgcaaaggacatcagcgataaatacaacattccttggatagccgatctcagggacttgtggaatatggacccctacatctcacacaccttcatcagggattacttcgaaaaacggctcgaattgaagacattcgagaatacggacgtactgacaaccactacagatttggctgctaaaacactagccacactgcaccccaataaccgtatcgtgccaatcctgtcggggtacgacgaagacgacttcaagttcctggagagtgtgctcgaggagaacaacgattcggattcgagtgaggactctgttagcgcgggggatagcaatagcagtgagggctctgtctccgccgagaacagtaactctagtgaggattccatcactacggtggactcaacggatagaaaactgaaactgatctacgccggttccctctatggcgggaaaagagacccaacccttctgttcaaggccatccgccagctcgaggacgaatccaaactggatagttcaaatatttccatagagttctatggagatagcggcaatctggaggagattgctcgcgaatactctctgcttgacatcatcaaaatcggtggcaggatctcccacgaagaggtgcttaaaaagcaactggacagtgatgtgctgttactcatatcatggaataacgaaaaggagaaaatgttcattccaggcaagatctacgagtactttgcgctgcagaagcccgttctaagcattgggtacaaggaaggatcacttaaggacctgatcgaggataccaacgtaggctaccacgtctcagatctcgagtctacaaaaaaggtgattctggacatttacaacgaatttatcagcctcggcaaggtggagtttaagatccgaaattga

SEQ ID NO: 4102 - DNA, 1095 bp, synthetic construct
  source 1..1095: mol_type = other DNA
atgtccaaaattaagattgcgatcgtcggaatcggaaactgcgcaagcagcctgatacaagggatctactactacaaggacaaaaaccccgaagatgcaattggcttgatgcactggaagataggagagtgggacccaacagacattgaggtggtagctgccttcgacattgacaagcgaaaggtgggcaaaacgattgatgaggccatcttcgccaagcccaactgcaccactgtcttccaggaggagatccctaaatccgacgttaaggtgtgcatgggccctgtcctggacggtgtcagcgaacacatggccgactttgaggaggactatacgtttgtagtggccgatgaagagcccgtggacgtggtggaagtcctgaaggagagcggtgccgaaatcctgctcagttacctgccagtcgggtcagaggaggctgccaggttctatgctcagtgtgccctggatgcaaatattgcatacatcaattgcatgcccgtctttattgtgtccgacccagagtgggatgcgaagtttcgggagaagggaatcccgattgtaggggacgatatcaaggcccagatcggtgccaccatcactcaccggacactcagcaatctctttaaagaaagaggagtgaagttagatcatacatatcagataaacaccggcggaaataccgatttcatgaacatgcttaaccgaaaaagactcgactctaaaaaggagagcaagaccgaagccgtgcaagcggtccttgctgagcgcatggaccctcatgacatccacatcggccccagcgattatgtgccctggcagaaggacaataaggtgtgtttcctcaggatggaaggcagaaccttcggggacgtgccgatggaaatagagctgcgcctgagtgtggaagactcaccaaactctgccgggtgtgttattgatgctatacgctgctgtaaattgggtctggaaaggggcatcgggggccagctaactagtatctcgtcctacgttatgaaacacccacctgagcagttcacagatgatgaggctgctgcaaaagttgaggcatttatcaaaggcgaaatcgagcggtga

SEQ ID NO: 4103 - DNA, 1722 bp, synthetic construct
  source 1..1722: mol_type = other DNA
atgaaagtgaaaataacagaaaccgcattccgggatgcgcaccagtccctgttagccaccagaatgcgaacacgagatatggttcctattgctgaagagatggataaagtgggatatcacgcaattgaagcgtggggcggagccacctttgacacgtgcataaggtttctaaacgaagatccatgggaaagacttaggatcttgaaagagaacttcaccaacactccgctacaaatgctcctccgggggcagaatttactcggctacaagcactacgccgatgacattgtcaccaaattcgttgagaaatcctatgagaacggggtggacatctttcggatattcgatgctatgaatgacatcagaaacatggagcagtccattaaggttgccaaggctcagggagctcatgtgcaagggacaatcagctacacaatcagcccagtgcacaccgttgacaagtttgtggagtttgccaaggagctggaagcattggaatgcgattcaatagccattaaggacatggcaggtctgatcagccctgctgtggtctttgagctggtgagcaggctgaaggaggaaacggacttgctcgtcaacttgcattcgcactgtacaagcggtatcactccaatcagttattacgctgcctgtcaagccggcgtggacattctggacacggccatctcgccactggcttgggggacttcacagccgcctaccgaaagcattgtcgcctccctgcaggggactgagtatgataccggattggacctgaagacactgaaccaaatcaagaagtactttgaaaccctgagggctaaatacgaaggctacattgaccccatcagtgagcgcatcgacactgacgtcctgatgtatcaaatccctggcggaatgctgtccaacctgatttcacagctcaaacagcagaacgccctcgaccgttaccaggacgtgctggaggaaatgcctcgcgtccgcgaggatatgggatatccccccctggtgacgcccacaagccagattgtagggattcaggcggtcatgaatgtgatcaatggcgaacgctacaaaatcgtctctaacgaggttaaagattatatgaaaggttactatggccgggcccccgctcccatcaatgaagaaatcgccaagaagatcatcggggatgaagagcggatcacctgcagaccagcagacctgatcgagcctgaatatgacaagttcaagaaagaggcggaagacctgaagaacttcgagaaggaggaggatgttctcacccttgccatgcttccgcccgtagccaagcagttccttaatggcgagatcaaggaagaggacttcccagagaagaaggtgatagacgatggcggaatcagtgccattcctacagagtactctgttgaggtggatggtgacgtcttcgatgtgaagatcatgcccaccggatacataaagatcgacggggagggcagtgagcccgccccagtgatcgagggggctattactgcatccatgcaggggatggtgctcaaaatcaaggtgaacacgggcgataaagtacagaaaggctctgtggtcgcagtgctcgaggcgatgaagatggagaatgatatttacgccgaggaggacggtattgtggagcagatattcgtcgaggaaggcgacactgtgaacgcaggagacaatataatggtaattaaaggcctagatgaatga

SEQ ID NO: 4104 - DNA, 606 bp, synthetic construct
  source 1..606: mol_type = other DNA
atggataaacgaataaattttgtctcaatctctcgcttcaccctccttgtggctatcttcctactcatcatcaataagattcagtttcacgcaaagattctggactatatggccctggccttagccattttcgctataatctgcatcatcatctttatcattcaattcaaaaagggattggtggagtttccgatcaaagtggtggttgaaacaaacgttgacaaggctttggccgacggggcgattacggaagagcaggcggaaaatatccccaagcgcgtggtccttaatgcaaacgatatcttcctcaacctggtctttaacctggcaatcgccaaccattttgatctcctgcctgtagacgtgctaagggagtatattccagacattcccccagccaacctcatgcggctgtacgaaaagtccagagagataagtgacgatctgaatgattacttcaggagccagaagttcctgaacaaagccgacgtgattaccagaagcgatgagataaaaacatacctgcgggagacttatccctggatggacgacgtcaccttggataacactttcgactacttcttcctgggcatcggtaacggctga

SEQ ID NO: 4105 - DNA, 1275 bp, synthetic construct
  source 1..1275: mol_type = other DNA
atggtgtttattattgaccctcaaaacgccggcatctcggggaatatgatcatcggcgccctcgtggacttgggggcagatggcgagaaggtcaagaacctgatggaagacgtggcttacgacttcggagaggtagaggtgtccataaccaaagtcaataagagcggtatcgaagcgaacttctgtaacgttaaaacgatccacgatgaagatgaaaacaaccaccatattcacttccccgacttcattgataaaattgactcactaaaagagctggacattgaaaacctcactgatgagatcctggacatggccaaaaatgtcttcaagcgcatagccatcagtgaaagccgcgtgcatggaaaaagcctggaggaggtgcatttccacgaggtcggggctgctgatgccgtggcagacgttttaggtgccatctgcgcttatttcgacttggatatggacaaagaaagggttgttggattgccgatcagtgtgggcggaggcactgtaaagacagcccacggtataatccctgtgccggcacctgccagcctggatatcctcaaaggcctcaatgaggacgaatttaacgacttctacaagggagaggcccagtgccgaggcgggcccgtggagagcgagttggcaacccctactggttgcgcactgtacatggaattttgtgatgaatttcttgagtttgcgccaatgatgtctccagagcggatcgcctatggctgcggctctaaggaatttgatttccccaatgtcatcagagtcataaagtcaaaggacacaaatgagaagcaccgggtctgtgtgatagagaccaatatcgaccacatgagtggggaagaactgggattcctattcgacctgctgcttgatgctggcgcgtccgatgtgtccatggtcccaatagtgatgaagaaaaacaggccagggcagctcattaaggtgatctcaaagccacttcttgtagaccatctcgtgaatatactgtttaagcagaccggaaccctgggcattcgagtttccgagaacacacatcgggggattgctgagaggcacttcgtacccctggacattaacattaatgaccgcatttataccatcaactttaagatcggtctgatcggggatgagatcatctcccaccggcccgagtacgaagacctgaaaagaatcagcttagaggaggacatccccctcacggagattaaggaagtggccaacacaatgattcgtgattttctggagaataacagagaatga

SEQ ID NO: 4106 - DNA, 1218 bp, synthetic construct
  source 1..1218: mol_type = other DNA
ttgtctaagaagaataaggctaacaaaaacaagaaaaagaaagagagtgaccagaccattcatgagcttgagattggaaaactgattaaaaacgaagacgtgctatacataaacaatccagattactttctgaccttcagcgacctggagataagcgatggcatagacatcattgaaaacatcatgattctctctaaagactatgtgagcttcaacaggcagtatgaagacgaaaagattagtgacgtggaactgatggaaatcactgaggaatacaaggagaacaacaatatcgagggcggatacatttcacagagcttcgacaactcccagttcatcatcaattcctacaacgacatcacaataatcacggtgatctcgaacgatctggaagtccagaagttcacggacaatctgaaagtggtgaacagctggaaggggttccacaatgcaaagatcaactttggacagatcattctaatagaccacgccttatcgccgaagctgctcattcagctctataagaccgccacaaagcagaaggcaaaattctttgaatctctgcacatgcccctccacatcaacaatatcctcaacaatgaggatttcttggtgattgcttccaatctgcccgaggagaccctcaaccaggattacatcatggaaatcggcctggacatcacaaatatggagtacgaagacgacaaactggacctcgaagagtttcaagagcggattgaagatggggtcaccatcagctgcgaggacgccatacgtaagatcaacctgaacatcggcattctcgactactttgtgagcgagggcattttaattggggatttggtagagctcggaatggaacttctggaaaacacggagcctacagatgagctaaaggagaagctgaaaaagcagttgcttaaatcagtcagtgacagaaacattaatgccctgattatggctgccatacgactggaggatgatttccgcaagcaacgggttcgggagatcgatctgaatgagaagctggtgcatttctatcctgatgagatcatcggggtagcaatcgccaaccaaatatccggcactaagggagtcctcaattacagacgctattcaaggcacaaaccaggtatcctgtatgggcttggccccatcctgtccaatacctttgcgggtcttgttgcgggttgtatgactaaaatcttggaggaatga

SEQ ID NO: 4107 - DNA, 837 bp, synthetic construct
  source 1..837: mol_type = other DNA
atgaaagagaaaaacaatgatgactattttgagaagcagaacccttccatcctgcgcagcattgggggcctgttcacattcagcaccatcctgccactgaatatctacaccactatcgatgagatggccaaaatgacatggttctggccagtactgaatggcatcgtgggtttgatcgctgccatcatcgcgtttatcctgtgcagatttgcccacctggacggcctcgtcatcggcgcaataatttatggattcctccttataatcaacgggtacaaccacttcgacggcttgatggacttcggcgacggagtgatggtccacggcgatcccgaaaagaagctgcggatcatgaaggaccccatgacgggtgttggcggaattgccacagggtttatcgtcggtacgatcaccatcgcactctattcaagcctgattgattactcctatatgataagcccggacttcattctgctcatcattgtggctgaaatcgcagctaagattgggttgacaacctgttgcatcacctcaaaggccgggaaggaggggatcggcaaatacttcattaaatacatgaacattaagaactacatcgtgggacttataatttgcttaatcattgcctccctccttagcatgcggataggaagccagataggaattttaggaataatcgggggggcttttggaggtgctctgactgccctcattgcaaaacgacatctgaagatcgccaatggcgatgtgcttggcacttctaacgaactaggcaggttgtttagtctgctagcgatgctcattgccatttcgatgcatttcagtgtgctgatctga

SEQ ID NO: 4108 - DNA, 558 bp, synthetic construct
  source 1..558: mol_type = other DNA
atgacaatcaacgtgctgaggctagatcaccgaattggacgcgacactcggattaccacccatgtctgcctcactgcccgcgctttcggcgcaagtaaagtttggctcgcaggggaggaggaccacagcatgatgcggagcgtgagagacatcgccgataggtgggggggagactttgagatcgaatacaacaattcatacatggaagtcataatgaactggcgggagaaggggggaaagatagtgcacctgaccatgtatggtgctcaggcccatgaggtggtcgatgaagtgcgtgagagctccgatgatatcttgattatcgtgggcggcgcgaaggtgcctacgaaggtttacaagaacgcggactggaatgtgtccgtcaccacacagccccactcggaggtggccgcacttgccattttccaacatctgctcatggagggtaaagagttcgacctggaatttaaagacccggtattcgaggtcatcccaacggcccacggcaaaacagtaaacgttcacaatgaaaacagaaaactgaataagaaggaatga

SEQ ID NO: 4109 - DNA, 1122 bp, synthetic construct
  source 1..1122: mol_type = other DNA
atgcagcggagaggcacaacgaatctgccactacacggcgggcacacgccacgatggctctttgatcggatgaccaaactttcaggggcaattactgaagtagtcatcgacgagtacggtccgaacgaatttctcaaccgcatctcgaacccctactggttccaggcgttttcctgtgtgctgggctttgactggcacagctcaggtacaaccaccacaacccttggagcgctgaagagctccatcgaccccgagaaacacggcatctacatctccggcggtaagggctctgcgagtcgaaagaccccccaagggattgtcagggctggcgagattttcaatctcaaaagctcgcatgtggacaacatggtaaactccagcaaactgagcgccaaggttgacaactcctgcattcaggatggctatacactctatgtgcataacttcttcatcaccgaaaagggagactgggccgttgtgcaacagggtatgaacactgaaacaaagtacgccaggcgctatcactggatgggggagaacgtggacagtttcctgcaggaccctcacaatggaatttcctgcgataaaaaggaaaaggaagctctgaacatggcctcaaaggacagtgtggaggctcagaagataagcgtggatttaatcaatgacaatcctaaccacctccgggactacttcaaaagaaaagactcaaatcagcttctactgactgatttcagcattagccaggagaatacccttaccctgcctccccaccatcaggtgttggatatggatctctctgacaaagagttccaagtcttgaagaatgcttgggagatacagccagagaactacgaagagctgatcctgctgaatggaatagggccgaaaaagatccgcgccctggcattgatttctgacttggtctttggggagcccgcaagctggaaagacccagttaaatacacgttcagtcatggaggcaaggatggattcccctaccctgtggatagggatgtctacgacaacagtatcgccactgtgaaggatgcactgtatcaggccaaactcgacaagtatgataagatgaaggccttaaagagactggatgactttatctcctga

SEQ ID NO: 4110 - DNA, 501 bp, synthetic construct
  source 1..501: mol_type = other DNA
atgaaaaggataaccacccccattagtgatgatgacatcaacgatctaaagataggggacaagatttccctgtcaggaaaaatgtactgtggccgggacgcggttctccctaaattgtccaaaagcattgaaaatggccaggaggacaagtatccattcgactttaaaggcatggccatcatgcacactgcattcagtgtggctgggatcgccccaaccacaagcaacaaggccgaaatcgaatctagcatggaggcactgtcatccgccggcgtgaaatttcatatcggtaagggttccctctctgatgagacgaagaagactctggacaagtacaattcgatttttatagtcaccccccccgtggctgctctgcttacaaacaacgtaatcagcaaaaagtgcgtcgcatacgaggaggaagggatggaggccttcttcgagctggaagtgaaggacatcccgggaattgtggccatcgcgcacggaaagagcctctga

SEQ ID NO: 4111 - DNA, 1167 bp, synthetic construct
  source 1..1167: mol_type = other DNA
atgaacaaggagccgatcagcgaagaagagattttcaaggagctggacttttaccagtctcaggattgcaaatatagcgatggtcgtattttgggatctatgtgtacacaggcacaccctatcgctcagaaggctttcattcaatttttggaaagcaacctgggagaccccggtctgtttaaaggaacaaaggccatcgaagataaggtgctcaaaatgatcggttcgttcttatccattgagaatcccgttggccacattgtgacgggcggaactgaggccaatattatggccatcagggccgcccggaatattgcccgggatgagaaaggcataagtcagggggagatcatcgtgccgcagtcagctcacttcagcttcaaaaaggcctcagacatcctcaaccttaagctgagggaaatcgtgcttgatgactcctaccagttggacgcgagtttcgtcgaggacgaaatcaacgaaaacactgtcgctatcgtcggcgtggccgggactacggagctcggaatgattgacccaatcgaggaactgtctaatatcgctctggaaaacaacattcacctgcacgttgatgcagcctttggcggcttttccatacccttccttaaagagatcgggtacggcctgccagaatttgactttagcctcaagggcgtcaagtccataaccgtggacccacataagatggggctggcccctatcccagctgggggaatcctattccggaatgaggagtacctggactccattagtgtcaacagcccttacctaaccataaaacatcaatccaccattgtagggacacgaatgggggcaacaagcgcggccaccttcgcggttatgaagtatctgggcaaggatggctacgccagactggctaaggaatctcttgataatgcaatcttcctggcagagagcgtgaagcagttaggttatgagctcgtagtggagcctaaactgaacatcgtggcattcaaccaccccaaactcgagaccgatgacctcgcccaattgatcgagaagcgcgactggaaggtctcgtgctcatcctgccccaaggcgatacgcgtgattctcatgaatcatatcaaaagagagcatatcgtggagctgatatcagacctgaaagacattagtgaaagcatctga

SEQ ID NO: 4112 - DNA, 2271 bp, synthetic construct
  source 1..2271: mol_type = other DNA
atgtatgtgataaagttcgaagacttagggaaagacgacatcgggattgctggtggcaaaggtgcgaatctgggagaattgacccaggcaggcatacctgtgcccccaggctttgtcgtcacatccgagacgtataagaagttcatgatggacacaggaatattcaatagtgttatggacatactggaccagacggatatcaacaacacaaaagagctccaggaggccgctgaggagatcaagagaatcgtgatcgagactccaattccagaggacatttccacttacatcatagaggcttataatcagttatcccaaaaggtcggcgtagacgaggccgatgtggccatacgttctagcgccactgccgaggacctgcctgaggcttccttcgcggggcagcaggacactttcttgcacgttcagggcattgacaatgtaatcgaatatgtacggaagtgttgggcttccctttttgaagcccgggccatcttctacagggaagagaacaactttgagcactctcaggtttacattgccgtggtggtgcagcagatggtcgatagcgagaaggcaggagtgatgttcaccgtcaacccaagcacgggtgagaacattgccttgatcgagggaagctggggactcggtgaatctgttgtcagtggaactgtcactcccgacaactatgtggtctcaaaggagaacaacgagctgctgaatatcacggtcagtgataagaaaaccatgtttaccaatgacgagaacggaacctccattcaagtggacgtcccggaagataagcgcaatgaacgagtcctctcggatgaggaactggagaaactggtcgagatggctaaaagggtggagggtcattacggcaaacctcaggacaccgaatgggccttccatggcggaaacctattcctattgcagagccgcccaattaccacgctcggagacgcggaggaaaaagccagcgaagaggatgttgacctggaagtgctgattaaagggctcggggcaagtcccggactcgccagcgggacagtaaaggtgatcttaagcctggatgagctggacaaggtgcaagaaggggatgtgatggtcacaaccatgaccacccccgacatggtccccgcgatgaagagggcaaacgggatcgtgaccgatgaagggggcgtaacctgccacgcagctatcatctcaagggaacttggcatcccttgtgtggtcggtactggcgatgccaccaccacacttaaggaaaacgacaaggtaacagccgacggcaagaaaggcctggtctacaaaggcatcatcaagggagaggagccggccgaggcagcggccgtccaagttagcgcaactcccctgatcactgtcaccgaagtgaaggctaatgtgagcatggccgaagcagcgcctaaggctgccgcaacgggggccgatggtgtgggactccttcgcaccgagcacatgatgctatccactggcgtgcacccccgaaaattcatcctggatggcgaagaggacaaattggtggatgtgatcgctgaaggcgtactgaaagtggctgacgagttctatcccaagcccgtgtggtaccgcactctggacgctccgaccgatgagttcatcacccttgaggggggcgaggacgagccaagggaacacaaccccatgctcgggtggagagggatcaggagagaactcgatgagccggaaatcctaaaggctgaatttaaggccatcaaaaagctgcatgacaaaggttacacaaacattggaatcatgattcccctgtcacagcacccttcagagctgcgacgggccaaggaaatatgccgggaggtgggcctggaacctcaggtggatgtggagtttgggatgatggttgagattccagcggccgccatactcattgatgagtacattgccgaaggcattgactttgtgagccttggcaccaatgacctgacccagtacacactggcagtggaccgtaacaatgaatttgtggccaaacattacagagaggagcacccagcagtgatggccttgattgagcgcacaatcaagcactgtgcggccgcaggggtgacatgcagtatctgcggtcaagccggatcggtgcctcatattgttgaaaagctggttaagtttggcattacatccgtttcaagcaatacagatgctgttgaggaggtgcggaagacggtggcacgggccgagaagaaaatcatgctcgatgctgctagaaaacagctctga

SEQ ID NO: 4113 - DNA, 483 bp, synthetic construct
  source 1..483: mol_type = other DNA
atggtgcgtgcctactcacggcgcgagtatatccggaagataccaaataacagaattgtccagtatgatatgggtaatctgagcgaggacttccccgtccgcctctctctggccgtgaaaaaaccagcccagattcgccataatgcgctagaagcagctcggattgcctccaaccgatacatgcaacgaagcgctggcagactgggctaccacttgaagctgagggtgtacccccacaacatcgttagggaaaaccctatggccaccggagcaggagcggacagggtgcagagtgggatgagaaacgcatttgggaaggccatctcggtagaggcacttgtcaagacaaatcagaaggtgatgagcatcgacgtaaaccccaagaacttcgaggatgctaaagtggccctgaaacgggccggcatgaagctcccggtgtcctgcaaaatcgttgtcgaaaagggggctgagctcataaagtga

SEQ ID NO: 4114 - DNA, 237 bp, synthetic construct
  source 1..237: mol_type = other DNA
atgaagataaagtcgaatatccggcttaaatataacaactcaaaaaacgccgagattgtctacaagagcctggaggtggataatgaggggttcctggaaagcgaactcaactccgacgaaatcgaatacaacatcaaaagcgacaagctgggcagtttcttgaataccgcagatgatctaattgcgtccgagatactcatcgaggacccctttaagaagcagccaaagaaagactga

SEQ ID NO: 4115 - DNA, 1230 bp, synthetic construct
  source 1..1230: mol_type = other DNA
atggaatgttacaatcaccccgacagagaggcagtcaccacctgcagcgtgtgcgggaaggccgtctgcccagattgcgccatggagattgccggcaacgtctactgtaaggattgtgtgaatgagattgtcacacagagcataatggaaaaggcatcaacccaggcccccaaggaggcagccgaacccatcactgaagaagtgcaggaggcggaagccgttgaggaagctatcgaagagccggtggaaatcatcacgcccgttcaacaagaggaagtggaagagatcatcccagagactccgaaaaaggcgcctgaaaactttgagcccgaggtggagtacgaaacagaatatgtagagacatacgatgaagacggtgtggaagactcctactacgagaatcctgaaatcattcccgaacctgagccggagtacaaggaacgcgagagaatcgttaaagaggaggccaaagcaaaggaggaggaggagatcattgagccagtgcacaaaacggaggacattcccaaggaagcctatatggacgacatggaggcagacttttatgaggaacagccttccaaagctccaagtaaggacctcgaggccaagtatgagaaatatttggaagacctctactacgatgaagatgagatcgaggaagaaatttacgaggctcccaaaacccagaaacggcggtcaaaacctcggagaccccaacgcgaggatagttactatgacgaggaccataagcgaagtccaagaaactattccaaccagggagaatactacatcaacccgcgcgaagaggaatttgaggaagaggagtttatcaccccaagccatagccgcaaacgtgctaggtccgaagagactgaaagctacgaggagctaaagaggaggatcgaacgaaattatgctaaggagcaggaggcgaaggagaatcggcgattcaggaggtctaagaagtctaaaaagcagaaacggcctgactatgagtacgatgagcttgaaaacatacaggagatgcactccttcccagagtatgagaaggaggacaagattggcatcctggatattatcctggccataatcctcattgtgctgatcatcctgctgatattgtacgtgatttacctgttccgcctgaacggggagtacttctcgttcattgactcactgttaggactcgtcagagatcctagcggctatataagctatgtacttaactga

SEQ ID NO: 4116 - DNA, 771 bp, synthetic construct
  source 1..771: mol_type = other DNA
atggccatccaggatggggactttgtcagggtcgactttactggcagtattaaggaaaccgatgagatctttgacaccacatcagaagacatcgccgaggaggctgggattttggtggaaaacaagaagtacgggccaataccaatcattgtcggcggaaatcacctgctccccgcaatcgaggaggcgataatcggaagtgaagccggggaatccgtgcacgtttcagtcacgcctgagaacggcttcgggcaaaggaaccccaatctgatacagctgatcccgatgaaagagtttaagaagcagggcatgacacctgtgcgaggcatgaagatcagcaccgagaacggtaacggcaaaatcattagcgtaaacggcggacgcgtgaaagtggacttcaaccatgaccttgcgggtaaaaacctagaatatgacgtgactgtggtagaactcatagaggatgacgaagagaagattaagagcatgatcgagctgcactactcctatccaaatatggattatgacaatattgagattaagttcgacggaagcaccgtgtctatcaaactggatgagatcacgcggttcgatcagcaatcctacatggatgtcacattcgctagattccggatctcgaaagacatttgggacaatatggattacgagaaagttcagttcgtcgacgaatttgagaagatcgtggaagaagctcccgatgaagaggtggaggcagaggttgaaaccgaggtggaagccgacgccgaggagtga

SEQ ID NO: 4117 - DNA, 1188 bp, synthetic construct
  source 1..1188: mol_type = other DNA
atgcccagtatcgactttataagaaatatcctcaaagaggacaagaaaacattttgtaatgactacaagaaagctcaaaagtcgctgtctgacgacgacggatattccaatggctctagtcagtcaaaacagtcttatgagaagactaatgaagaaagtacctccaatccccttatcgccgactttacggagtattctcccctccacaatgggcatttccattgcatgaagaccgccaagtctaagatccccaacgggcttttcgtggctatcgtgccaggcctttttgagaggagcggtcggggcctgccttatatcatgcaccggaacgtccgggcagaaatagcgattgaggtgggggccgatattgtggttgaaggacctcccatggggatcatgggatcaggccagtacagcctgtgtttatgcaagatgttccaggcactgaacactgatttcataccacgaggctacaggccgttcgatggctacgatgagatcctgaagcgcatttccatgggacatggtgtagcgccaaagccttataagatcgtggatatggacacaaaagaaacgattctcgagggaaagcttgaggaggacaattatgtcatcgtttccttttccaaaagcctgaagagaataggcttcgacttcaaggacaaatttatcttcgtccctcgtatcgaaggtgtgagcgggaccctgattcgaaaggcctgctccgaaaacaagctggaggacgtagagtcaatgctccctccggagacactgcgcatcctaaaaagagagctggataacgataacgctcccttgcacgaccagcgcgactacgaagtgatcctcaactcagcaaacaacttgtcctacgatgagctaattaaactgaacttcttcagtgaaaaactggccaacgagtttattgaaaaacgggagaacaaggagtttgaatcgatcagcgaaatagaggatgccattttctatggcttcagcagccactacaaaaatagggttctcagcattttggagacccagatgcgcggggatgtcatcagcaattacatcaatacctacccatttaacgtgagggtgctgaattacaagaacgagacagtgctgacccaattcgaggaaaaggtgttaaacgaccacccattcgtcaacagtattgaactcactaacgagtga

SEQ ID NO: 4118 - DNA, 198 bp, synthetic construct
  source 1..198: mol_type = other DNA
atgagcgaagaaaccaagataaaaagagtcacaatccacgtggaatccgagctcgattatgagttcaggcgcctggcgagccagaagttccggtttgagcccaaatggtacagtaaggcaattaaggaggccatcctgctgtggatcgagaacaatccagaagaggacttcgaggacctaccggaagaggacacgtga

SEQ ID NO: 4119 - DNA, 1254 bp, synthetic construct
  source 1..1254: mol_type = other DNA
atgttcgatctggtcctgaagaacctgaagttggtaggagagtcgggagaattttatatcgctatccaggatggtaagatcgcgaagatgtctaaaacccccatttccgccgacaacgagatggatattaaaggccagtatgtcctcccagggctgatagacccccatgtgcactttcgggaccccggcctcacctacaaggaggatttcaaaaccgggtccatggcagccgccaatggcggatttacctttgtgatggacatgcctaatactcttcccaaaacgaacacatacaaggcatttaaggataagctagaaatggccaattcaaagagcgtggtgaacttcggccttcactcagggcattcctcattcgaggagatggaaagaatactggaactgaatccaatgtcctttaaggtgtttatggatcttgagagtgacgaaagattgagggagatcttcaaaaacatttctaacctggacggaaaccccatcctcactgtccacgctgaaaagcagtccatcgtccgagaaaacacagaaaggctctctgaggacctggagcttaaggacaagcccatcagctatagctacgcccgcagcgccgagtcggagatcgagtcaatctcgcagacgatttccctgagtaaggaatttggcaacaatctgcacatatgccatctcagcacaaaaaaggggatggaattggcaaaggagaacaacattagctacgaatttacgcctcaccatctactgttcgacaatagttattttgacaagtttggcacaatcgttaagaccaatccacctctgcgggagagcaaggataaggtgaatgtgtcagatatcgacagcgacagtatgattggtacagaccacgcacctcacagcctcgaggagaaaaataaaggcgtgtgggactccagtccgggtatccctagcctggaaaccgtgctcagcttgttactgactgaggtgaacaaatccaatctggatttcaacctgataccgaagatcttcgctgaaaacccagcgaaacgcttcaacctaaaaaacaaaggattcatcaaggagaattacgatgccgacttcgttgttgtcgacctcaataaagagggcaccttcaacattgatgagttctacacaaaagccgagtactctccattcgacggcatggactatcaaggggctgcgaccatgactatcattgggggagaggtaattatggaggataacgaattattcatatga

SEQ ID NO: 4120 - DNA, 1233 bp, synthetic construct
  source 1..1233: mol_type = other DNA
atgatagtatttaatgaagatagctgcattaaatgtggcgcatgtgagggagtctgcccgacagccgctattgaagtcggcgatcatatcgtgtactgtgatacgtgcagcgaagaacccaaatgtgcagaggtctgcaccaaaggtgctttgcaggtggacgacatagccatcgacgaggaggggaacacccaggtccgattaatctttaacaagacaaagtgcgacgagtgtggagactgcgtggacgcctgtccttcgaagactctgaagctcgaccccgaggattctcaactcctgaaagggttctgtgtcatgtgtcagaaatgtgtggacatctgcccagttgacgtgatcggtgttcccggaatcaaagaaccggcgtctcgcgtaatcgaaccagagggcgcggtgtacattgatgattgcaaaggatgcggcgtgtgcgtggctgaatgccctgtggatgccatcaccctgagcgcttacggagagcctatcgaggtggatgaagacaagtgcatccaatgcggcgtctgttcacagtcctgtccctggaatgcaattttcatcgctggaaacgccaagcccgcaaagcggagcaaagtcatgaagtcctttaccctcgacgcggatgcctgcattggctgtaattcctgcgtggacgcctgtccaggggacttcattagtcccaagtctgacttgacagtagctctacccgaagcctgcgcggcttgcggtctttgtgttaacgtttgccctgtagatgcaattgatctagacgtggaatacggcgccagtaagttcgactcaactgagggaatctgctgggacggcgagaaatgcctctatgatgggggctgtgctctcaaatgtcctactgaggctatacgcgtcgtgacaaagagggggatggaggtgcctagcagacagaaggatatgggcgagcagagtttcatcatgtgcgtgaggtgcggggcctgtgccaatgtttgccccaacgatgccctgcagctggactatgtggacaaggagattgatggcgagacggtcatgagagaccggatcatattcaacccatccaagtgcgacgagtgcggggaatgcattgacgcctgcccatatgatatgctgcacaaagcatacaaggtgaacctgccaatcgcaggtttttgtaccctgtgtgagcagtgtctggccaagtgcaccccggaagcccttagcctgaagtga

SEQ ID NO: 4121 - DNA, 1413 bp, synthetic construct
  source 1..1413: mol_type = other DNA
atggagcctgttactcgtatagaaggccacgcaaagattacggtccaccttgacgaggccggcaatgtggaggatacgaggctacatgtgatggaatttcgcggattcgagaagtttctacagggaagacccgccgaggaggtgcctcggattgtgccgcgcatctgcgggatctgcgatgtccagcatcacctcgccgctgcgaaggctgttgaccagatctacggatttaacgatgatgatatcctgcccgccgcttacaagatgcgagagctgatgaactggggctcgtacatgcacagccatgcgctccacttctatttcctggccgcccctgatctggtggtgccgaacggaacccgaaagacaagaaatgtttttcaaattatccaagatatgcctgaggtggcacttcaggctattaagatccgcagaaacggactggacatcgtatccgcaaccggcgggcggcccattcacccaactagcagcacccccggcggcatttccaccgagttagatgaggaaacacaggcggacctgttggcaaaagccaaggaaaacgtggaactcgcgcaggcgaccatagaacttgcagtgcccatcctggaggagaaaatcgacctggtcaaaaccctgggctacttcggggacacccggcattgtgggatcgttacgaaagatggtgactgggacgtctacaatgggaaagtcaggataaaggacaaggacggctcaatctacactgaatatcgaaacctcgagtacaaggatattgtggcagaacatgtaaagccatatagctggctcaagttcccctatataaaggaactgggataccccgaagggatttacagggttgccccactgtcccggataaacgtgtgtgataagatgccggatgccgcccctttggcccagggcgccttggaagacttccgcgaccgctttggttacgcccaatatccactcctgtttcattgggccagactcatcgagctgctggcttctgctgagatggcggtggacgcactggagcaggacttatctggcgacaaattccctgacgcactcgaaaggactgctggggagggggcaggcatcgtcgaggccgcccggggtacgctgatccaccactacacaacagatgacgagggactcatcacccaggccaatattattgtggccacaatccaaaataacccagctatggagatgggtattcagcaggtggctaaagactatatcaaacccggcgtcgaggtggatgataagattttcaatctaatggagatggtgatcagagctcacgacccatgcctttcatgcgctacccacactatggacagtcagatgaggctggccacagtcgaagtatatgacagtgaaggaaacttgataaacaaaatctga

SEQ ID NO: 4122 - DNA, 927 bp, synthetic construct
  source 1..927: mol_type = other DNA
atggccgacaaggcgaaagtgggaacgatgtggctcggaggctgttccgggtgccacctgagcatcgcggacttccatgagagcctgttggatgtgctggagttagctcagttcgaattttcaccagttctatgtgatacaaagtacgatgaggtgcctgaattagacgttctcatagtggagggcggcatcaggaacgaggaaaatagggaacttgccgaaatgctgagagagaaggccggcctcgttatcgcatatgggacttgcgccgcctatggtggcatccctggtctcgggaacctgcacactgtggaagagctcacaaccgaggggtacattaattcctgcagtacggtaaacccagagggaatcattcctaatgaggatgtgccaaccctggagagccgcgtgcgcccgcttggcgaagctatacaagtggacctgctgattcccgggtgccctcccaagtcagacgtggtcgcagaggctatccttaccctactgaacggaggaactatcgaactgccgaccacaaacctttgtgaggtctgtccccgagagaagccccccgccggtctcgccatggacttcatcaaacggcagtttgagatcggcaagcctgaagacgacttgtgtctcatagcccaggggctggtctgtatgggcccagcaaccgtatcgctgtgcggcgcccagtgcccaagtattgctatcccatgccgggggtgctacggccccacagctaaagtgaatgatgcaggtgcaaagatgatctccgcgattgcaagcgactacggggtcaacgaagataagaccgtcgaccccgagcaagtagccgatcagctggatgacattgtgggcacattctacacgtataccttgcccgctgccctggtcccggccaaaatgcagaagggaggaaaatga

SEQ ID NO: 4123 - DNA, 426 bp, synthetic construct
  source 1..426: mol_type = other DNA
atgtcggaagatgtgaagatcgtaatgttttgttgcaactggtgttcatatgggggcgcagatacagctggtaccgcccgcatgcaatacccacccaacatccgggtcatacgcgtgatgtgctccgggcggattgacccgcagtttatcctcaaggccttcagagacggtgccgacggggtgttcgtggccggatgccacatgggcgactgccattacgatgcagggaattacaaactcgacaggcgaatgcgtctggtttataagcttgtcgaggatatgggcatcggccgggagagagtccaccacgactggatatccgccagcgagggagaaaagttcgctagtagcgtgaaaatgatggtggacaggattaaagacctgggccctagccccctgaaggcgcagctagatgcggagggatga

SEQ ID NO: 4124 - DNA, 420 bp, synthetic construct
  source 1..420: mol_type = other DNA
atgagcaaatactttctcgatgccaacttcatcatcgcaattttccgggaaatcgagacgaacaacgagctggcgatctccacttgcgaggagctcctctccaaccacgaatgctacataagcaacggggtgttcaatgaaatcatcacaatccttatgatgcgcacaaaggatattgaactgaccgtcaaggcctactactttatgaaggacaatctaactattatcaatgagttcgagataagtatgttcaacgacagggtcttcgagatgtttaaaagatacaatagcaagtcattcaaagtgggatttaccgactgttcgattgctttcctgtataaatactatggcctggactatattgttaccttcgataagaactttaaggtatttgatgacgtgaatctgttggacttatga

SEQ ID NO: 4125 - DNA, 246 bp, synthetic construct
  source 1..246: mol_type = other DNA
atgatagacattatcgccaataccaaaatgtacaaaaacaagcagaccatcattcccagcgaagtgcgcgatcggttcaacgtcgatgaggacactatcatagaatggggcgtggatgagtttggcgacctgcgaatcacgttcagaaagaaagtcacactcaaggatgttgcagggatgatcaaaaaggaaaacgacgtagagggtgactggaagattgacaggggagtgtatctgaatgagtga

SEQ ID NO: 4126 - DNA, 1224 bp, synthetic construct
  source 1..1224: mol_type = other DNA
gtggctaatgatgccctgcgggcaaaggacaaaaaggccgccttaggtactgatatagtgatcgaaaacttcagcaaagaggaagtcaatgcctttgacgtcctggacgatatcgatgacgtggacaagaagaccaaaaggacactgctaaaagttggggtggatacggagtctgaggagcgagccgggtcgttcctccagatggaccagtccaacgtattctccagttccatttccaactctgtcgaggtcatgaacactggcattgcccttgaaaagtattcctggctaaaggactacatgtggaatgcggtaaagccggacgcagacaagtacaccgcgcagacggcactgcgggaagtggaggaagagagttacagcggctactttgtacgctcgctgcctggaaccaaagaggttttccccgtgcaggcctgcatgtttattgcagaccaggatgttatgcagactgcccataacattatcattgcagaggagaactcggagcttcaccttatcacaggctgtgccacgggggaagacgtgagctcagctctccacgtgggagtgtctgagatgtatctgaagccaggaagcaaaataacctttacaatggttcacaattgggccgaacaggtggaagtgcgcccaaggactgcgatcctccaagcggagaataccacgtatatcaacaactacattctgacaagccctgtcaactcaatacagtcctatcctaccacccattgcaacggcgagaatgcaagggccttgttccagagtattcaaagcggaacaaaagattcaatcatcgacgtgggttcacgagccctcttaaacgctcccaacaccagcgcggagatcatctcccgggccgtcgccaatgacgaatccagcatctacagtagaggccacttggctggcaacgtgcccaatgtgaagggccacctcgaatgccatggactcgttctggacgacggcagcagtatctacgctgtgccagagctggaggccaatgctgccaacctcgaaatgtctcacgaggcagctgtcgggcaaatcgacgaagaggagatctattacctgacctcaagaggactgactgaagaggaggcagcttccatgattgtccgcggtttcctgagcatggatattacagggctgcccgatgaattggctgccgagacccagagaatgatagatatgagtctggatgggatgtga

SEQ ID NO: 4127 - DNA, 759 bp, synthetic construct
  source 1..759: mol_type = other DNA
atgttgcttgaggtaaaagatctggttgtggaggtggaaggcaagcgcgtgctgaatggcgtcaacctggccataagagaaggcgagactcacgtgctcttaggccccaatggtgccggcaaatccacactgttcttaactatcttgggatttcctaaatacgaagtggttgaagggtccattatcttcaatggggaggatatcacggggcttagtaccaccgaacgtgtgcagaagggtctcggagtaagtttccagaaccctccagcaatccggggggtcagcgtcagggacttgctgaagttcgaatccaagcaggacccagatgaagacctcaacccccgcatgcaagagctggcgaagaagctaaagtttagcgatgagtttctggaccgggacgtcaaccggggattcagcggaggagaggtgaagaggtcagagattctccaactgctggctcaggagccgctatttacaatgttcgacgagccagactctggcgtcgacattgagaacgtggagcttctggccggcgagctcaatgtgctgctcgataaggacaagaagcccggccagcgaaaaagggcagggctccttatcacccacctggggtatatcttgaacttcgttaaagcggacaaggctcacgtgctgatgcatggtataatcgcctgttcgggtgaccccgatgaaattctggaggatatcagaaaagaaggatttaaagggtgcgtgggctgcgccgagtgcggcaaatga

SEQ ID NO: 4128 - DNA, 270 bp, synthetic construct
  source 1..270: mol_type = other DNA
atggagaacgctgtagccaagcccaacccacacaggagggaagaaaaactgtggtccgagatcaagaattaccaggtggccacgaacaatgcacggattctgggagtgcttgacgaactcattatcaatgagaaaaccggtaagatcgtggatattgccgtcaagatcgagagcggccgcaacatccatgtcaaaggggcgaaacggcgaggcgacctgctcctcataccgttcacaaagctgagaaagctggagaacagcctattgtga

SEQ ID NO: 4129 - DNA, 633 bp, synthetic construct
  source 1..633: mol_type = other DNA
atgattatcgctctggtcatggcgggtggaaagggcctgcggctcaaatcaaacatcgaaaagcccctgttccccatcaacgacaaacccctcatggactatgtcctggacaacttgaagaagtccaaatacatagaaaagacggtggtggccgtgagcccaaatggggaaaacaccaaatcctatctgaaggatgatctgaatttttcagatttccacgatgacttttacaatagcacaaaaaccgatttttacctggacaccaagggaatcgggttcgtcgaggatctcagtgagatcctcacttgcttcgaaaatcatagcaaggatgacatcctccttttcatcaatgcagaccttccgcttgtggacgagaacataattgactacatcattgaatactacctagaccacgacaagcctgccttgtccacactggtgccagtagaaatctttgaggagtatggcattccttatacctacgatttcaatgggaaggtccccgcaggcatcaacatcctgcgcagtgagaacgtggtgcaggaggaggaagttttaattattccaaggtatgagctggttttcaacataaacactatcgagacaagcattttggcctcgaaatttctatga

SEQ ID NO: 4130 - DNA, 1479 bp, synthetic construct
  source 1..1479: mol_type = other DNA
atgagctttctcgataagatctttaataagggacccaagcccattattgcggaaagtcagtcccgcgatcttagtattctgaaagccgggaacaggccgcaaggccccggcgttatggtggcccagcaggacgaatactacgtcaccgcttcggtcgagttaggcaacaccaccaccaaatgcgtgattatggcgaccaacctcaacaacagccagtcttatctaatcaataagacggtgaatatgacaagggacgttcgggcccctaaacctgacgaagaggtcttcggcaaaacagtgtgggggatcgagcttagcaaggaatctgtggccgatatgattaaagacacggtgctggagtcactgaagaaggctcacgtggatatggacgaagatttggacttcgtggtccgaagcaccggggtcactgccgggttcgccaccactcaggaagtggggcagatggtaaaagccctggcagatggctgtttggatgcaggaatatcccatacaaaaatggctccagccatgagctcagcacacctcccaaagagacttcagaaatacactctcctggataatgtgatgtttgatggggcggtggtcagtgttgtgcccccaaaaggcaaggaagtggtcgctaatgaaatggaaggggagctggttacagccggcatcaaactgggcgctaagtggactgaggtagactatcggaacccttgcgtctcgctcgacttcgggtccaccctggccggacgcatcgtaaacaaggatgagccttacgccagcactgttggtaacttcctagggttggcgggggtgatctcagacagtttagctaaaggttccaagcagatcgaccagaagaatggtgcagccttggacctatttgacccgaaactcctgaaaaaggccgatgggaagaaacaccaagagaaagccaagcagtacgctaaagaggctcatgagctcattaacatctgcaaggtgcccgaaggcatcgatagattcggtaccgtcccactggacgccgccggagcaaaggcagcggggacatgtctgataggatgcgatgtgggaacaaatgcagacggccttgacggattggtggagataggtgccaagatctatgaggacgaaggcatccccacactcctggccaccatggaccacgtaagcgcaaatatcgtgtaccgagtcctggacgtggccttcgaggagaacctgatccttgacggctccattctgggcgtcacgggaagagcgggcatcacgggcaagaagccagagctgattctcgagtatgcccaagacaagttcaaggacgtggtgtttgttgaggatggcctggctctcggttctgcaatcatggctcggtgtatgaactccatgggaacccagaagaaccctctgggaggcaaccagggagagaggtgcattctgaagaagcgcatgcaggctcaaggtactatagaatga

SEQ ID NO: 4131 - DNA, 882 bp, synthetic construct
  source 1..882: mol_type = other DNA
atgggcggccaacccggagagtatccaaccgtgctcgcaggaactatcttttacggcggccacaagattattagtgatgagaaagcaggcgactttgataaagacgctgcggaaggcctgattaagacaatggaggagatgtctgatgttaccggaaatccatgcgtggtccagacgtttggtgctacagccgaggctatggtgaaatacctggaatttgtgggggacatctgcgacaagcccttccttatcgactcaactgctgccgctgcgaagatcgccggggttgagtacgtacaggaggccggactggcggaaagggcggtctacaactccctgagtatggccgccgaagctggcgaaatcgaggccgttgccaattcagacatcgacgcaagcattctcttaggtttcaacccaatgaccccgggggtccccggcaaactagaaatctgggagaccggtggctcggtgatcgacgaaggtattctcgaaatggccgagcggtgcggcatcacaaaaccctggatggacgtggctgtgactcctctggggcagggtgccgggccggccgtccgaacgtcctatgctgtgaaggcgaagtggggataccccgtcggctccgggatacataacgtgcctagcgcatgggattggctgcgccagtataagaaggaacacaaggaggcatggcctgtgtgtgatatagggagcaatatcgtgcaacagatggctggaggagacttcgtacttttcggacctatcgagaacagcagactcgccttcccagcctgtgggatggcagatattatgatagccgaggcagcccgggatatcggcaccgagcccattgaggcccacccattgaacttgctgctgtga

SEQ ID NO: 4132 - DNA, 252 bp, synthetic construct
  source 1..252: mol_type = other DNA
atgagcgaggaggaatcagtgccccagatcattgtctccaccgacgatatggccgccgcgatcaataagctggacgaagctgaggagaaagtagaatttgccgttggcgagtacttccagcgcttgggacagcaaaacgggcgggacatcggcattctctatggaattatactggggcttgtgatcctaatagtgtctatcgaatttggcctcgtgtccgcaatgagtacgatgctgacaagcctggtctga

SEQ ID NO: 4133 - DNA, 207 bp, synthetic construct
  source 1..207: mol_type = other DNA
atggtgcgctttagtaacaagccaaatacacgaggcattaggaacgcttccaataacgtcgagtatcgggcaaagctcctggggagagaaggaaggctattcgccggcgtaatcagcacccggttcagcggcatggccataggtatcggactggcgcttgctctcgccgtggtgatcccctacctggcaaaattgtgcgggctgtga

SEQ ID NO: 4134 - DNA, 738 bp, synthetic construct
  source 1..738: mol_type = other DNA
atggcggacaaaaagcctgctgctgataactggcccgtcgtcagcggagactacatcgtgggggacccggaaagtcccgttgctgtgaccaccctggcttctcacaatgaagatattccagcagctgccggagcagccatagccggaccgtgcaagacagagaacctaggcattgagaaggtggtggccaacatcatttccaatccaaatatccggttcttaatcctgtgtggggccgaggtgcagggacacattactggccagagcatccaggcactgcatgagaatggttgcgaccccgagaagaaaaagatcactggtgcgaccggggccattcctttcgtggagaacattcccatggaaggggtggagcgcttccaacaacaggtcgagctggtggacttgatcgacaacgaagacgggggcgcaatcacagccaaagtaaaggagtgcatcgagaaagatcccggggcgtttgaagaggatgccatggttattgaagtgaaagagggcgatgacgacgaggatgaaggcgaggagatacggcctatctccgctgaaaccgccctcctcgaagccagaatccgaaacatagacacacaggtgaagctggttggtgccgtccagaggaatatggcaggcaactattcaggaaaggtccagggcatcatgattggactgatattcacgctcgtaatcggctttttgcttctcatggccccacttctgggcgcatga

SEQ ID NO: 4135 - DNA, 321 bp, synthetic construct
  source 1..321: mol_type = other DNA
atggtgcttcccttaatacagtttatccccgaactgaacctgaaccttgaccctgagaccgggctcctcggcgcaggtggtggagacctgatcatcctgagcatggatgagatcaatggcgagatcgccaaggtcgaggcggccgctgatgaactcatgaacagtttggacccaaatagcgccccactggggtccttcccgggccgggaaggcaacttcgtgattgccggaacattgaccaatatggtgtacggctttattataggaatgttcctgatcatggccgcaatgcccattctgacggctatgggggtactatga

SEQ ID NO: 4136 - DNA, 819 bp, synthetic construct
  source 1..819: mol_type = other DNA
atgagcgcaggcggctcgggagcccctgccgagggtgccgtcaatgctaatgtcatgctcgccgtggggattatcggcggactgatcggtatatatgcgtcaagttttgagcccactattggcccagtcatcgcatgccttggggccgtttgcgcaatcctgtggggcgttctggcgattcgcagcgtagccagttacggccttgggacgggggtccccagcatcggttatatgagcttagggataggggtgatcggggcattagccggggtagggataattgcagcattcaaactgaaaggacttgaaatgctcggacccatactggccctggtcttcgccatgctcatcggactgctcgtggccattgtggctaagaagattgtgggaatgaagatcccggtgatggaacggtgcacagctgaaatcgctggcgccgctgctttggctgtgctcggcttctccagtgcaatcgccggtggatacagcatcgatctgttgctgaccgcggtggtggcgcccggcttcattgctctcttttacatattggtgacaatggcgatccagcacccattcaacgcctgtctaggacctaacgaggaccaggtaaggaccctgaaatgtggtgcctccactgccttcctgaccatgatcatcaccggcattctcgcaatttctgccggcggctatgcatggtttgccatcctggtggttggactaatcggctggtacgtctcatttaaaatgttcgttaacgcttcctacgaggctgccgcctctgtgaagtggtccggcctgtggccaaaggtggaggaatga

SEQ ID NO: 4137 - DNA, 702 bp, synthetic construct
  source 1..702: mol_type = other DNA
atggatcttttgatatttatcatatgcgttgtgatcgccgggatcattatgggtggaggggtgcacttcattcctgtaggcggcgcccctgccgctatggccacagcgaccggcgtaggaacgggtaccgccatgctggcagcgggcgccggattgactggactaattaccgccgctagcatgaccggtcagccagtgtggctgatcgtcttagcaggcgccgttgggtccatgctgatgatgggcatcaccatgctgatcgggaacttcatttatattttcggcgttggcgtcgtgccagcatcgggaaaagcagcagtcgacccaatcacaggctggaaccaggagaaatacaagacccccgggaccgagggacatggcatccccacagtctgctacataagtggcatcatcggtgggctcctgggcggggccggcggcggactggtctactgggccattaatgaatttgctacagcaaacctgactggatttgacgcgacggtgatcgccggtctggccgccatcctcagcgtcgggatgttctttatcaattcagtgacagcttcctataacattggagggactattgaaggtttcgtggacccgaagttcaagcggctccccacgggcatcctcgcttgtgcggtggtgagccttgtggctgctatcttcatggtgctgatgataggagggatttga

SEQ ID NO: 4138 - DNA, 873 bp, synthetic construct
  source 1..873: mol_type = other DNA
atggaccctattacacttggcgtggtcgcattgatgggggccgccgcaaccattgccggggctgcagaggacctggagtccgacatcggctcacagagtaaccccaacagccaggtgcagctcgctccgcagatgggacacctacaccgcatgataaataaggccgcttcgggggagccagtggcctacggatgctggtgcgggatctccggcgccatagcagcccttgcgatgggcatgggcattatacctatagtggccattgccatggggagtacggtcgctgcacttgtgcacgccatttatacagtcacaagccacatgggccggatcgtcgggcagtctcagtttgaacaaccattatttatggatgttctgacccaatccctgggccctatcgccgctcatggttttatagctagtttcggtatcgtcggaatcgcctatttgatgacgctgcccctcgacggactgggacaccccttcccactcccactcctcgctgtgctgtggggaattaccatcggtgccatcggaagctccaccggggatgttcattacggcgcagaatcagaataccaaaagttcgactacggtggcggtactcctgtagcgattcagggggatatcgtgactaaagctccgctcggtgcgaagaactctatcgatgtagggaacttctgcgccaaatatggaggccccctgaccggcttctgttttggactgatcgtgttcgtgagcttctggatcactgtggtattcggcgctctgggcggacagattgtggggattgtcatcgttatcctactgatcgcggccaattacttgctggaaaagagcacaagggcaaaatttggcccctacgaggagtga

SEQ ID NO: 4139 - DNA, 1653 bp, synthetic construct
  source 1..1653: mol_type = other DNA
atggcggataaaaaatttctggatgccatgacaaagaagtttaaggaggcgccagaggagaaaactacgaccttctataatatgggcgggtggactcagagtgagcggaaaactgagtttgtgaatgaaggcaaggctatcgcggaagccagaggaatcccaatgtataatcccgacattggcaacccccttggccagcgcgctctgatgtcataccagctgtccggtacagacactttcgtggagggggacgacctacattttattaacaacgcagcaatgcaacaggcctgggacgatatccggaaaacagtcatcgtcgggttgaacacagcgcacaatgtcctcgagaaaaggctgggcatggaagtcactcctgagaccataaccaactatctggaagtcgtgaatcatgcgatgccgggcgccgccgccgttcaagaacacatggtagaaaccaacccactgctcgtggacgactcctacgttaaagtgtttacaggcgacgacgatctcgccgccgaaatcgatcctgcatttgtcctcgatataaataaggagttccctgaggagcaggccgaggctctgaaagccgaggtgggcggagctatttggcagatagtacgggttccatctgtggtagggagggtctgcgacggtgggacaaccagccgatggtctgctatgcagattggtatgagcatgatttccgcatacggacagtgtgccggagaaggggctacgggggacttcgcctacgcctccaaacacgcagaggtgatcggcatgggcacttacctgcccatccgaagggcccgggccggaaacgagctcggtggtgtcccattcggattcatggccgatatctgtcaggccacccgcgtgaccgacgatcctgtggaaagcgccctggaagtggtagccctgggggccgctttatatgatcagatctggctaggcagttatatgagcggcggcgttggatttacgcagtatgctaccgccgcatacaccgataacgttctggatgacttcagctatttcgggaaggattacgtggaggacaagtacggagatctgtgctccgcccccaatgacatggacaccgtgcttgacgtgggttctgcagtgacattctactcactcgagcagtacgaggaataccccgctctacttgagacgcacttcggggggtcgcaacgcgctgctgtggtgagcgccgcgtcaggtattagcacagcattcgcaacgggaaacgcccagaccggcttgagtgcttggtacctggcccaatacctgcacaaggagcagcattccagattgggattctacggttacgacttgcaggatcaatgcggcgcagctaacgtgttcgcaatccggaacgacgagggcctcccccttgaactgagaggacctaactatccgaactatgccatgaatgttgggcaccagggcgagtatgcaggcatcgcacaggccccgcatagtgctcgtggagatgcctttgccgtgaatcctctcgtcaagatagcctttgctgacaagaacctgccattcgacttcaccaaggtcagagcggaatttgcgaagggcgctttaagggaatttgagcccgctggggaacgctcgatcatcattcccgcaaagtga

SEQ ID NO: 4140 - DNA, 753 bp, synthetic construct
  source 1..753: mol_type = other DNA
atggcacagtattatcccggaacgtcgcaggtcgctgagaatcgccggaaatttacaaacccagatgtggagttggaggtgcttcgcgaaataagtgatgaggatgtggttaagctgttgggccaccgggctcccggcgaggagtacaaaagcgttcatcccccgctcgacgagctcgatgagcctgatgacatcattagggaaattgtagaaccgatcgatggcgcgaaggcaggagaccgagtgcgatacatccagttcgtggacagcatgtacttcgccccagcccaacctttcctgagggccaggtcctatgtgtacagatacagaggaatcgataccggcaccctgtccggccgccagattatcgaagcccgggagagagatgtggagcgcatcagcaaggaaattctggagaacgaatactttgacactgcacggaccggaatcagaggtgccggggtgcacggtcattcactgaggctagacgagaacgggctgatgttcgacatgcttagacgccaggtactcaacaaggagaccgggaatgtggagatggtcaaagaccaaattgggcgggagctggacgaacctgtcgttctgggggaaccactggacgaggaaacgctcagggccaaaaccacaatctaccggtgcgatggcgaggcgtataaggacgacgaagacgctgtgacagtcttacgacagatacacgtcactcgttctcagtttggctacaatcccgaatattga

SEQ ID NO: 4141 - DNA, 597 bp, synthetic construct
  source 1..597: mol_type = other DNA
atgatcggcagatgcacacaccttgtggactgcagggagacacgcggccttggtgaaggcggcggaattgcccagcgcggaactttcgcggaatgtggcagcgatgtgctcgcagttgctatgtccccagggcggcggcacatcaccaagccggtctgcgagatcaccttcgggctgcgcgaagccaacctactgaccagcaccatgatactggacgcgggaagtggcgtgccccatgatgctccagctgggggggccggtaatgccttcggcctgactgacaaggaggtggagcagatgcagaagttcaaggtcatcgtggttcatctggggggcgtgaggaatcacattacatacaaggcacggctcatcctccgtaacgtgaacaagccctgcgtgattatatgtgagtatcctgtagactttgaagactttgccaaaatcggtgtcaaaaccgcaaaggtcatgcccgacgaggtaaagacggagggaaaaatcatgaacatagtgtcaggggtgattaggggacagactgtctctcaagaaaaactggatgagattatcagaaaagttcgattaacgttgggagatgcctga

SEQ ID NO: 4142 - DNA, 456 bp, synthetic construct
  source 1..456: mol_type = other DNA
atggatatcgagatattcccccacagaatcctcggcacagacacaaccgaaaaggtgctgaacgacctggagagccttgactccgtgaagaggactgtcattcaggggccgcgactcccaccccaagacgagatcgaccgcatctacggagatcgccggatcattgtggtaaatggcgaggaagtggaactgaaggttaaaacgggaaggatcttcgtcgaactctatgatgagagcgggatagaggagattcgtgccatatgcgataagcacattgacactgggtttgacattaataccagcaaggcgcagtacatccggaagcagaaaaccgtgacggatggattgaagtacggtgagaacacagaaatccctgaagaactgatcggcatcgcagacacccggagtaaattcaacgagcatgtctcaattctaagaaaagatggcctggagtga

SEQ ID NO: 4143 - DNA, 1332 bp, synthetic construct
  source 1..1332: mol_type = other DNA
ttggcaaagtttgatgataaagtcgatctgtacgacgaccggggctcactggtcgagagcgatgttccaatcgaagctctaagtccgctgcgtaatcctgccataaagaacattatcagcggcgtgaaacgcactgtggcggtgaatctggaaggcatcgagaagtccctgaaaactgcttccgtgggcggagcaaagtctaagatcctcggaagggagatggatcttgacattgtggctcaggctgattccattaatgctagcctgaaagagatgcttcaggtgactgaggacgatgatactaaatgcgagatactctcggggggaaagaggattctggtccagatccccaccatcaggctggattcttccgcagaatactccgtagccaccttggctacagcaactgcactcacccaggccataatcaaagagtttgacgttagcatgtatgacgcaaacatggtaaaagctgccatcctgggacgctacccccagtcagtcgaatatatgggctcaaatctgaaaaccatgctggacgtaccacagaagctggaaggccctggttactcacttcggaacatcaaggccaacgacttcgtcgctgccacactcaagaatacactacaggcaacggcgcttgccagtatcttcgagcaaacggccatgtttgagatgggcgacgccgtcggcgcctatgagcggatgcacttattgggcttagcctaccagggactgaacgccgacaacatggtgctcgggctcgtgcaggacaacgccaaggaaggaaccgtgggttccatcgttcaagacacaattgctaaggcggaggccgatggggtgatcgctgtggagaaggaactgacagactacaacatgtacgcaaccaatgatgccgcgaagtggaacgcatacgccgccgctggctgtacggctgcgattatggtgaacgtgggggcagcccgagcggcccaaggtattccaagcacaattctctatttcaacgacaatatcgaatttgccaccggcctgcccgggatagacttcgggagagctgaaggcgtcgccgttggattctcgttcttcagccatagcatctatgggggcggagggccgggcttgttcaatggtaaccacgtggtgaccagacacagtaagggatttaccatcccctgcgtcgccgccgggatggccctggatgccggtacccagctcttcagccccgaagcaacgtctggtctaataaaagaggtgtacagtgagattgacgagtttcgcgaacctctcaagtatgttgcgctggccgctgcagagattaaaggggacatctga

SEQ ID NO: 4144 - DNA, 1251 bp, synthetic construct
  source 1..1251: mol_type = other DNA
atgcaagtgatagctgatctcggtggaacgccggggaaagactgtagagggtattgcaaattctgctactttaggaaagtgaagccacttaccgaagccctgggctgtcagcactgccctcccaacaaggtgggatgtgagcgatgtctggaaggagttcaggaagcaggcaagccattccaacagccattcacagtcttaagcgaggtacagatggccttgatgatgaaccccgttcgggacgccaatctgaaggtcaacatcagcggggggggtgacgtatcctgctaccctcagcttgaagagcttatcgccagtctgtaccaatggcagctgccaatccacttaggctatacaagcggcaagggaatcgacgatggagacattgcaagccgattcctaaactatggcgtgaacgaggtgacatacaccatcttctcagttgacccggctctgagaaaacagtggatgctcgatcccactcctgaggagtccctcaaggcagcccagctctttgcagaaggggccgacttgcatgcggccgctgttattattcctggcgtcaacgatggacaggctctggtggatacctgcaataagctggaggagtggggtgcaaaggccctgatgatgatgcgctttgccaactcctacgatcagggcctgatcctaggcaacgagcccgtcatcgaaggcgtcgtgccacatgagccacttgagttcgaagagctggtgaaggagatcaattctgaatatgacatgcgcgtgaccggtacgcccctgggggaccctacgattggcgctccctttatcatagctaaggatgagtacgaggagttcctgggcatcctgcccgaagtgaggggagaggccactctgctcacctctaaaattgccgctcccttcctaaaaaagatctttgataagattgctcccgacaatgtaaatgtggtggcaactaaaaaggacatcgcctgccttatgacaaagcaggacctggaggcgctggacttggatgagctcaaagatgccgtcattctgccgggacgcgcgttcatccacatattggatgcggaaagaatcctctcctctgacggtaaacagcggttggtgggctttggccctgacaccctgagtgtggacggagagctcagctcggggatgagtgaagaggaggtcatcgagcacgaactcgggtcatttattgaactgatagaagccattaacttcttcgggatgcggaggctctga

SEQ ID NO: 4145 - DNA, 222 bp, synthetic construct
  source 1..222: mol_type = other DNA
atgaagattcgaaaacggataaagaaactcaaaagaatcaagaaactgaaaagaattaagaagctaaagcgtatcaagaaactgaaaaggattaagaaactgaaacgcatcaagaagctgaaacgcataaagaagttgaaaaggatcaagaaactcaagcggattaagaagctcaaacggatcaagaaacttaagaggatcaagaagctggaaaaggagtga

SEQ ID NO: 4146 - DNA, 915 bp, synthetic construct
  source 1..915: mol_type = other DNA
atgtatgaaacactgaccttcacaggtggaatccacaaaagtgaggaattaaaggagcttatagaggatctgggcgggttcgtactccagtccaacatactccagatggagctcgtcctgaacatggctgtgccgatcgatgatgttaagatcattgaggataaggcaaatgagcttctcggcgagctcagcgtggcccctatggctggcagcgagatcgcgatcgtctccccaaccctcgcacgccaccaccttccacacgccgcctgtgacatctccgagtacttgagacggtacggcgccaaggacaacatgatcggtctggcccgggggcatggaaagggaaccgctggaataagcgaaaccgaaaaggcattgattgaggagcacgacattgccatatttgccctgggaagctttaagcagtgcatcgtggataaggcttacctgtataacgacattgacatccccgtgatcgttactggcgcgccggagattgacctggaagagctgcccggtgtggatgcatatgtcccagggctgggcagaatccctcgccgactgaaacgtggggaaaacattagggcgttaaagcatctggtgcaaacaattgaagacctgcttgagaaacggaaaaaggaattggctcaagacccccccatcgtcccctcgattctagtgaaaaacgagatcgaaaatcaggtccctgccatcgaaggggtgttctctccaacgcctgtgacgagccagctgagcggcttgagggtaaaactggattacgacaattatcatgaagagatcgagaatgtggtcatcggcgagcagaagctaaaagacattgccaacattaaaaagtcacacttctacgattacatactggtggaactcctcactgagagttcactggttgactga

SEQ ID NO: 4147 - DNA, 1665 bp, synthetic construct
  source 1..1665: mol_type = other DNA
atgggtgtgaacatgtacgctgaaaacaacatattggtgggcgccaatgagaacacagaggtgtacttactctccaaattggcgaatcggcacggcttgatcgccggggcaaccggtaccgggaagactgtgaccctgaaaacccttgccgaggcctttagtgacatgggcgtgcccgtgttcctggctgatatgaaaggagacgtatcaggactggcgaagataggggaacctagctcaaagacaactgaacgaatggagaagtacaacctggcagataagggattcatcttcaagagctaccctgttgaattttgggacctttacggcgagaaaggcctgccgatcagagtgacaatctctgaaatgggtccccagctgctaagcaagatattgaaccttacggaggcgcaggagggtgtcctgaacattgtcttccgggtggccgatgatgaaaacctcctgctcattgacattaaggacctcaagtcgatgattaaccatgtgagcgacaatgccgaactctatgaatcaaaatacggcgcagtggctaagaagtccgccactacactcctccgaagcttgctggcccttgaagagcaagggggcgacatgttctttggcgagcccgctctggagctggaagacttcatgcagtgcgacgatgagggaaagggcataatcaatatcttagattccgtaaagctgtctaccgcaccggaactctattccaccttcctgttatggatgatctccgagctctacgaaaagatgcccgaagttggtgacatggacaagccaaaatttatcttcttttttgacgaggctcacctcctgtttgacgatatggctccagcggtccagaagaagatcgagcagattgtgaaacttatccgttcaaagggagtgggcctatacttcattagccagagcccatccgacatccctgacagcgtcctggcacagcttgggaacagggtccagcatgcactgcacgcctacacccctaaagagcagaaggcagtaaagactgctgccgagaccttcagaccaaaccctgctttcgatacaaaagaggtcatctccaatctgggaactggggaagcactggtttccgtgctggaagagaagggggctcccagtgtggtagagcaggtggacatactccctccccaaagctatatcggggccatcgaagacaatttcagagccgaactgatgagcatttcgccgctacgcggcaaatataaggaagctgtcgatagggagtctgcctatgagatgctattgaataagattgataacaacccaaacatccaaacagagatccctccagaggcccccattagggatattccgaatcaggccgagcaagcgccaagtcagccacaggctcagcaagccccccaacaggcacccagtcagccccaggctcagcaggcccctcaggaggaggcccccaaacagaaaggcctgctggatgatgtgatcggaatagcggtgggcaccgccgtcgaccagatgacaaagcaaaacaagaccacccggtctcgcaaaaccacgaagcagacaactgttgagaaagcaacgagtactatggtcaatacggccgcccgggaggttaccaaagggatcattcgcggactgtttggaaatatgaaatga

SEQ ID NO: 4148 - DNA, 369 bp, synthetic construct
  source 1..369: mol_type = other DNA
atggtggagttagatcgggaagaactttaccgccaactggaggaaatggagaacgacctgaggctgtatcccattgaggaagggcttgaagatgatatcattgactatatcaatggaaaagaactgagtgataacgagaagtgggacctggagaaccgactggaagacttcttctacggtgccaagctcaagtgcaggaagccaacctactacttcacggacggctttgagttttatgtcactgagatctacatagactttagaatcctggagcacgtgcggaaatccttcccgaagttcaatcagctatccgtaagctcagagatagagcagggcttttctaccctcagcgtgaaattgacactctga

SEQ ID NO: 4149 - DNA, 798 bp, synthetic construct
  source 1..798: mol_type = other DNA
atgaagttgaacattaataaagagacgtgcactggatgcaaactctgcgagactgtctgcattagggacaacatcatcgtggtggataaaaaggccgtggaagtggacaacggggactgttttgattgcggccactgtctggccatctgtccctccaactctatcagcctgaagggctttgacggtcagaaagaccgagtcggcgagtacaatccgaaagagattccagtatcaagcgaggactatctgaatctgctgaagcagcgacggagcattcgctggttcaaaaagaaaaagatagacaaagagacctttaataagctcttcgaagcagcatattacagtccctccgcgcagaatgcgcaagacgttgaatttgtggtacttgataacgaactggacgagttcatgcatctggtctatgatataatcagtgctgaagaggataagttctttagaatcaagcagttcggcgagtacttgcgcggagaaggagactacaagaaccaccctcttctctgggagggccatcagatgatcttagccttctctagaaacagcgccaacgccctcatcgcatcaacaaggctggagctatttgcttacaccatgggcctgggagggttctactcccttttcaccctgaaggccgatgagctcgatcacgacaggctaatggaatttttcccagggatagattcgcacaagcatatgtatagcgctttcgttatcggttaccctagagtgaaataccggcgcacagtgccccacaaggggattgacgtctactatcggtga

SEQ ID NO: 4150 - DNA, 540 bp, synthetic construct
  source 1..540: mol_type = other DNA
atgtccatctacgatttcgaggtgaaggacatcaacggaaatatggtctcccttaaggagtatgaagggcaggttctgctgatcgtgaactcagccacagaatgcggtttcactccccagtacaacgaactgacgcagatattcgatgagctcaacgaggagggctttacaatcctagattttccttgcaatcagtttggcaagcaagctccaggaacaggcgaggagatcgcagaggcgtgtcgcgcaaccttcctggtccagtaccctatatttgaaaagattgaagtgaatggggaaaacgaagagccgttatacacctatcttaagtctgagcagcccttcgtagacattaccggggaggatgccgagaggctgaaaggaatcctggaaagcatcaatccagactatatggacagcaacgacattaaatggaacttcaccaaatttctcgtggacagagaaggcaatgtggtggcccggttcgagcccactcaaagtttggatgacgtcaaggctcagattaaagagctgctctga

SEQ ID NO: 4151 - DNA, 459 bp, synthetic construct
  source 1..459: mol_type = other DNA
atgtcgattctggtggcttattactcaaggacaaacgtgacaaaaaaggtagccgaatccatcgccaatcagctggatgcagacatcgaagagattgtccccaaagtcaagtatgacggcaagataggttacatgcgcggcggtaaggatgcgattagtgaaaagatcatcgacctcgacagcctgaaatacaatcccgcggactacgacctaatatatctgggaaccccggtctgggccgggagagccgcaactcctgtgattagctacatcaagcaaaacgagggcagcttcaacgacgtgaagttcttcgtgacggccgggggaagtggatttgagggcaccatcgagcagctgggcaaatacgtggggaaggctccattgaagactctctctcttaccaccaagcaggttaaacgggatgaatttaaagatgagctcgcttccttcatcgagtga

SEQ ID NO: 4152 - DNA, 1113 bp, synthetic construct
  source 1..1113: mol_type = other DNA
ttgaccataatttcaaaaaaggtggaactgattgagctcttctatgatttaattttcgtgtatgccatcagccgactgacttcgatcataagcgagcccgtcaacggcggcatcgctccattcagtctctttgcgtacattatcacttcctttgtcattcttcaggcatggctctacttcacgaactacgtgaaccggtatggccaatggaagtggtacgaatacgtcattgccatcatcaacatgattgccgtgatctacatggcaaataccatatcctcgacatggaacaattattttgtttttaatgtgtccatgctgataatgctctttacggtggtatttttgtacagcgtgcacgccatcaaggagaaatcattaaagggggctgcgggtaacagcatcaccattctgctcgtggtatgctccatctatattatatccacactgagtatcctctttgggcacatggacgttgtcatttggctcaacgtccttgctatcctgaccggagcctttctgccctttttcctgaagggaaaattcgacaagtcaattatcaatttccctcacttgatcgaacgcttcgaattgctgacaatcattaccttcggtgaggcggtggtgggcataacccatttctttaacgtaaacaacttcgattttgtgccaatccttgtattcctgatcgtcataggcatgtttggaagctatgtgcttcagatccactacctagtcgaccaccatagggaggagagaagcctaaggctgatgttcagccattacttcatcgtgatcagcattaatctggttactgtggcctttgaactgatccacagcggggagatcaactattggataccgagcctgatggtgatcatttcactgattgtcttctacctctccatcatggccaataaggagtactactatgacggcctggagctgcggaaaaaggacatcgcactcatggttttgattagtctgataggaagtatcgctattctcctatctgttggcagcatctatgggttcttaattggggcactgatcatcacacttgccaacttcggagtgctgctgaataaataccagaagttcaatgataactga

SEQ ID NO: 4153 - DNA, 351 bp, synthetic construct
  source 1..351: mol_type = other DNA
atgttattcatttactacccgcgatgctccacctgccagaaggcaaagaaatggctcgatgaaaatggattcgactacgatgagcagcacatcgtcgacgacaacccagactacgaacagctgaaggccctgtatgaaaaaagcggtttgcctctgaagaggttctttaacaccagcgggaaaatctatcgggagatgcagctgaaagacaagctcgctgacatggatgaagaggaacaactaaacctgcttgccactaatggcatgcttgtgaaacgccccataatcgagacagaggatacatgtctcacgggctttagacagaaggagtgggaggagaagctgaagtga

SEQ ID NO: 4154 - DNA, 831 bp, synthetic construct
  source 1..831: mol_type = other DNA
atggattacatcaggcagaccgaagttatacagtggaatgacggagcttaccagaccatcaatgaggaaagtgtcgaagacgaatacacctacctgtttatcgactacttgcctccacgtaagtttagcacatatccaaaggatcttgaggacttcgcggtgggctactgccttggtgagggcctgatcaaagattactcagacatcaaatccatccagctggacggcaccaacatcttagtgaccacgactctctctcacgaccccgaggaggacctggagcaggaagggatagtgcaggagaaaaaaggcaactgcgaacacgcctgtgtctgtcgactattggaatatcagggggtcaactccgataatgctggaggcattaggtctgagctgaaaacaatcgagccaaacaccagcgacctgaagattgacgccagccaaatcatcaaggatatagagcatctcactgacgaggccaagatttggcaacgcacggccggagtacacgtggcccaactcaagtacgaggataagatcattattcgggaagacgtaagtcggcatgtggccgtggataaggtgatcggggctgcatccagagaagggtatgacttctccaaatgctatatttcgtatagcgggagaatgccggcagacatgctgattaaggtcatcagggtgggcatccccataatcctgagcaatgcggcacctgcagcctcaggtattgatgtggcccagaccggaaacataacaatgatcggcttcattcgcgataagcggttcactgtttttacagcgcccgagcgcgtcaacctcgatgcttga

SEQ ID NO: 4155 - DNA, 1206 bp, synthetic construct
  source 1..1206: mol_type = other DNA
atgaaatacaattttgaaagcatcatcgatagaaaaaacaccaattcactcaagtgggacctttttggggacgagtacccaatgtgggttgctgatatggacttttatgcggctcctttgatttacgagtccgtgaaccgcaaggccaatcatggcgtgtatgcctactcatttgtgaacgaggacgtctacgactcgtatattaattggtggaagaaatacgggctggacatgaaaaaagaggaattgctgtttgccacgggcgtcatgccctcaataacaagcatcatccgggccttcacagagattggagataacgtgctgattcagactccagtttaccacgtcttcttttacgtcatcctcgataatggcaggaacgtggtggagaatcagttgatttataatccagactctgacgacgtggaaaccgcatatgtgatcgactttgacgatttggagaaaatattcaaggaccctaagacaaagctgatgctactgtgtaatcctcacaaccccgtagggaagatctggaaaaaggacgatctggaacggatcgctgtgctggccaagaaatatgatgttatcgtagttagtgatgagatccattgcgatctgacagatcccgacatgacttacattccgttcgcgagtcttgatgacgacctgtccaagaacagcataacgtgcatttccccaagcaagaccttcaatatagcaggtcttcagagctccgctgtgttcactcaaaacaagggtttttatgaggtgctgaaaggccagctcgcaaccgacttcttcagccaccccaacatattcagcatcgatgccaccatcgcctcatacaagagcgaagattggctgaacgagctcagagaggtcctgttcaacaataaaatgatcgtgaaagaatttctcgaggagaatatccccgaaatcaggctggtgcccgccaacgccacctacctcctctggctggactgcagtaaacttaacaagaacgaggacattgaaagctccaactacgaattttcgaagaccttatctgagttcctgcgcgaagaggtcgggctgttcctatccccgggagtacaattcggccagaacggagacaatttcctacgaatgaacattgcatgtcctaaggatctcctcattgaaggcctgaacgctttaaaggagggaatcgacaagttcaagagttga

SEQ ID NO: 4156 - DNA, 519 bp, synthetic construct
  source 1..519: mol_type = other DNA
atggctgacttcgaagagatcatcaaaattaggcgctccataagagagtacgaggataaggaggtggaagatgaaaagattgaaaagatcttacgagccgggatgcaggcgcccggtagccggttgggtgcagagccctgggagtttcttatcataaaaaataaggaggtactgacaaaaatcggggaaatcaaacctagggtgaccaatgctccagtggccatcctgctgattgccaacatcgagcgggccttctacaagaccgtctggcaacaggacatgagtgccgcagctgagaacatgctgctggaagcggtcaacctcggcctgggaggcctttggaacggagtggcccctgatgaggagagaatgggcaagattgccgacatcgttggactcccaaaagacgataatctaaagcccttctgcattataacgctcgggtatccggcagaaggctgggagaacaagtttatggacaagttcgacgaaagccgcattcactatgagacttactga

SEQ ID NO: 4157 - DNA, 573 bp, synthetic construct
  source 1..573: mol_type = other DNA
ctcaacaagcctgtcttctacgatgctgactgcttggagtgcttcctcttcgtggacgccacatacattcttgaagagctatttagcaagataattatcccagagcaagtgtacaacgagatcatggaggaaaacacgccctcactggtaaaacgcaattttaaaaaactcaaggagggctttgtcgagattcaggaaatgccatttgggtcttcccagtacctggcttacaagtccatcgaaaagggattctggagtaaggcagggcagatctgtgggagtggtgaatcagcggcgatggctctggcccacctgaataacggaatcatcgcctccaacaatctgagtgacgtggaggaatatattgagagcttggacataggcctcattaccagctctatgattttaactaaggccctggaaatggagatcatctcggaggataccgcatccagcctgtaccttgccatgatagagaggggcatcaagctgccgcaggacagcttctgggagtatttcgataaactctatgaaatcgactgcaaacggttcctgaagaacgattttccctga

SEQ ID NO: 4158 - DNA, 723 bp, synthetic construct
  source 1..723: mol_type = other DNA
atgaacagcacagtgttagccgaaatcctgaggcacgaatggggcattgaaagcttcgcttcagtcaacattcgctctctggtctacaataacataagaaatctgactgtgctctggtttccaatgaaagccaacatctccggctgttgctcaaagacgaatgaggacaaggtaatattcatcaacaccaaccatagcatcggacggcagaatttcacattggcccacgaactgtaccacctgctctatgaggacatcgatgatttcatcgtgtgcggcatcaatatgaacacgccgagcgaaaggaacgcagacgaatttgctagtacattgctgatccccgacagtgccctctattggtttagaaataagaaccagattgacgactggtcggtggaggatctcatcaagtgcgagcagtactaccaggtcagccgttccaccatgcttaaccgcctaaaaagcctgaactggattagtcaagaccaatacgatgaatttggacttaatgttgtggcggaggttaatcggttgggctatgagaccgggctctacaagccttccccccaggaccagaaatactccagcattggagagctagtgcgactgactgagaaggcatatggtaagaaaaagataaccggggggaaacgcaaggagatcctgctgaaatgtttccggaatgatattctgtatgataacgaggtgaacaagcttgagtga

SEQ ID NO: 4159 - DNA, 327 bp, synthetic construct
  source 1..327: mol_type = other DNA
atgattgatgtagtcgcgaagaatctcaaggacctgaggaagaaaaacggttacacccaggagcaggttagcgattatcttggcatcacgcaaagcaatctgtccaaaatcgaaaacggagagcggaacttcaacatgacattgctggacaaattgtgtctgctgtacaactgctcccccgagtatctcattggggaaacagacctatacgagaagtcaaccatagcctttagaagcgatgaaaaggtggatcttaatgtggtggcaaaaatgaacgagatcactggcttcctcaagctgctgcgcagtttagacggggtcgactga

SEQ ID NO: 4160 - DNA, 822 bp, synthetic construct
  source 1..822: mol_type = other DNA
atgaaacggtcaatcatattcttaaccattatactttccctgttcctcgtcattggctacgccagcgccgggctttttgatttttcaagtgatgacgctggctccggggaaaatacggatgatgtgtttgtggtaggattcaacagccaattcccacccttcggctataaggaaaatggggagtacacaggattcgacattgagctggccaaagaggtggcccgacgcaacaactggaccttcaagcccgtgccaatcatcgattggaacacgaaacgcttcgagttggacagcaacgaggtggactgcatctggagtgaatttaccattgacggcagagaggacgactatacctggagccagccttacttcaacaacacaaagctggtcatcgtcagaggggattcggatatcaacgacctggacgatctcaagggcaagaccctggaggtgcaacagggtagctccattctaaacacaatcgaaaagaatgagactctgaagaggaaatttgccaagattgagcaggtggacggctatgacacggcattcatggacttggaatctggagtctgtgatgtgatcatcatagacagtggtctgggacggtacctggttagcgaaaagcacaatgacactaagatactcaatcagaccatttccaatgagaaatatggtgttgcatttgaaaaaggaaacactgaactcagggataaggtacagaagacactggatgagatgtacgcggacggcaccgtggagaaaatcgctcagaagtactctaaatacggcatccccgacggggtcatctatccggagtga

SEQ ID NO: 4161 - DNA, 444 bp, synthetic construct
  source 1..444: mol_type = other DNA
atgtttataatcttcccactctttagcgctaacctcattagtatcattattggaatcagcgtgctgattttcggcataggattggcatactcctcattcattacacacgagatctccggggccctgtcttcggtgatgggcatcttcgggattgtgatgataatctttggtctgtgcttcatctttgcaatcaatgccatttccttcctcgtgggactccagttctacatcgtggcctttatgctgattatgatcgcggtagtcggattcctgagtgacagcaatgtggcccggaccggcgccctgctgtacctcgtcctagggatcgttatcttgcttattgcgatgtttgccgctgaaaaccccatccttattacgatcatcttaggtgtcattctgatagcacaggggataatgggcctgatctatggcaacgagatctga

SEQ ID NO: 4162 - DNA, 1278 bp, synthetic construct
  source 1..1278: mol_type = other DNA
ctcctggatataaaactatttcgagaaaatcctgatctcatatttgactctgagaagaaaagattccggagcactgaaaatgccgagaaagtgattgaatacgacaccttatggcgcgagggggagagccggttgaactcgctgcgagccgagaagaacaaattgtcaaaatcattcaaacaggctaaaaaggacggcaacattgaagaggtaattgcccaatccaaggccgtcgctgaagagatcaaggaactaggtcccaagattgaagagtataagcaactccgtgaagattacaggtacaaggtgggcaacatcattgacgaggatgtgcccgtcagtgacacagaagatgacaaccttatagtgcggaccgtgggcgagttgccagactttgattttgagcccctgaatcacgtcgatctgatcgaaaagattgacggggctgacatcgaaactgcggccagcattgcgggggccaggttctactacctcaaacgcgacatcttgcatctgaacctcgctctgatccagttcgccctgaacgagcttgaggagcggggctacattcccctgcagactcccttctttgtcaaaggggaagtggcggctgagacatccgagctgggcgagttcgaggaaaccctgtacaaggtggagaatgaagacctgtacctaatcgcaacagctgagcagacactggcggcactccacagggatgaaatcatcaaccctgaggatttgccaatgagatactgcgccctgtcaacctgctttcgaaaggaggctggaagccatggtaaggacacgctgggaatcttcagggttcaccagtttgaaaagattgaacagttcatcttctccactccagaggaaagcaaaaacgagcatcaccgcttactggaggtgacggaggacatctataagaaacttggacttccgtatcaaatcgtggccatagtgtccagtgcactcaatgacaatgctgccatcaagtacgacctggaggcctggttcccgggtagcaagacctatcgcgaactggtctcctgcaccaattgtggcgactatcaggcacggaagaccaagacccgctatgggagggcaggatctggagatgcccagacactccacacccttaacagtacggccatcgcaacggaaagaactatgtgctgtatactggagaactatcagcaggatgatggcagcgtcaaggttccagaggttctcgtgccttacatggggggcaaaacagtaatcgaggccagaaagtga

SEQ ID NO: 4163 - DNA, 582 bp, synthetic construct
  source 1..582: mol_type = other DNA
atgatcgtggtaactacgccaatgtgcaagcagatagtggaatgggctggactcaaggaatttaaagttaacaagttcccggatgaggaggaaggcgacctggccattctgctgtctgagagcaaggtcaaaatgaactctttaaccctcaaactgaataccttcagccagattagagaaagcattctcaaagtgtccaactattgttttgaacacgatctgacagatcatctcctgagtgacgatgacatcgacgatatctttagcagttacgacttgaagtacgcaaatcttggcgatgacgactttgacaaaatcagggaatcaaactctaataagaaagtgaaggtctactccgagttcctaaaggacatcgtgttggatatcggggccctggtggttgatgaggactactcatatgtcgtgtatcccgactacctgaaggacatcgtggataagaacgaggacttcaccgacagctccattgtcttcatcgagatgcccagtcacggtaaggtatcgaaaaaccctcttgagcggacagaggagcgctacagcattctgataaattccctcatatga

SEQ ID NO: 4164 - DNA, 783 bp, synthetic construct
  source 1..783: mol_type = other DNA
atgcagatcatcaaaaccagcgaaacagaggccgaaaaagtgatcataaacctgagccaggaaaaaagccacagcaaagacgtttcaattatggtagatgctctccgggcaagtacgaccgtgactatagctctggactacttcaaggaagtgattcccgcattcactccagaggaggctcgcgagctgtccctcaagcacaacgcggtcctggccggtgagcgaaagggcgtgaaacttgagggctttgatattggcaactcgccgggtgagattaaggagtttgagaccaacaagaagtccatggtgcttacaacaagcaatggaatcatgaccatggaaaatatgcagaaccccaaacatgtcctagtgggggggttcattaatgccaaatccgtggccaaggcggctgtagagctggccgaggaggagatcgagattgtcatgggcgggtacaaccacgaatttgccattgaagacttcctggcagccggagagatcctcttctatatagaaaaggagctaaaggagaggaacatgactcctaaagaaaacgatggatcaaattacgaattgaaggacagggagggctttagtgaatatgccatcagcgcgatccttgcaagcagaaatctggagttaaccaatgaacaagttttgaagtccaagtctgggaagcgcctcagttatctgaactactctgatgacgtcgagctgtgcatgaagcggaacatcacggaaaatgtgggcatcctgaaagacggaaagatcgtgctctactga

SEQ ID NO: 4165 - DNA, 1167 bp, synthetic construct
  source 1..1167: mol_type = other DNA
atgcgcagggaatgcttaaaaatcataggaactgcacacgtgtcgcaaaatagtgtggaagaggtgaaagaagctattctggaagacaaaccagaggttgtcgctattgagctggatagaggacgatacatcagactgatgaacgaacgcaatggcattgtagaggacgaccagatccacattaccaaaatcatcaaggagaacaaagtcggggtgttcctggtgacaaccatcctgtcctatatgcagaacaaaattggggatgacctcgacatcaagcccggctctgaaatgatcggcgccattgatgccgctgaggagacgggttcccggatcgccctgatcgaccgggacataaacatcaccctgcagagggtgctaaaccacatgagcacatgggaaaagctaaaattcatttatggcatcatcggtggcctgctcagctccgatgatgaggaactggatgtagaggccttgaaggagcagtcggcaatcgatgaggccatgggttacttcaaggaaatatctccaggagcctatgaggccctcgtaaatgagagggatgcctaccttgcgaacagcattctgcacatccccgaggaccatgtcattgcggttgtcggtgccgggcacaaggagggcatcaaccgttaccttgataacccagaaacaataccgcctcatagcgagctgattgacatggacaagaaaggcggcatcccgtggctgaagataatcctggcattgattcctatctcatttgtggtgatattttttctggcttggatgaatggcatccatattgagggagacatcgtgcaattcattgtcataagcatgattatggggttcctgggcagtattctcagtgggtcaaagctagcctccgcaatcatcgggggattagttgctcctctcactatcatccaccccctcctcgcggccggctggttttcaggacttgctgaagcaaagttccgcaaggtgagaaagcaggacattaataatatagggaagatcgagagctttcgggacctgtggaacaacaacattttccgaatccttctcgtcgtggttggaacgaatctgggagtgagcttggcaacccttgtgattttgccctcccaggtcttcatccccctctttatgaaaatcttcgggggctga

SEQ ID NO: 4166 - DNA, 276 bp, synthetic construct
  source 1..276: mol_type = other DNA
atgtatgtcattttccggtgcgactgcgggcgggtgctgtacgcaaagcaaggggtgaagaccaggaaatgcacctgtggcaaaacgatcaaagtgaaaagccgccgcatcctccagaaggtagaaacagccaacgacgccagcctagccgtccagaagatgcaggaggaaatctacggcggaacagcattcaagactgctgacgagtacaaggcgaataaattcataaaccagctggatagacgaatgaaggagtatgaggatggtgacttttga

SEQ ID NO: 4167 - DNA, 1347 bp, synthetic construct
  source 1..1347: mol_type = other DNA
atggagatggactcgatcatcataattagtgagattctcatcatcatcattctgatcgtgctgaacggcctgttctccctggccgaaatcgcagttgtctctgcccgacgcatccggatgcaaaagattgccgatgatggagataaaagagcgctgctcgtcttagactctatggaccacaccagtgagtttctcagcacggtccaagtgggcataacctttacagccatcatcaccggggcactagggggcacgactttctcagagcccctgggaaactacctgagccagttcataccgtacagctatcagataagcttcattatcgttatccttctcacgtcctactttacaatattggtaggggagatcgtacctaaaagaatggcattgaatgaccctgagggatatgcattgagcactgccaagttcatgcagataagctccatcatttgcaagcctattgtcaagctcctggactcctcaacaaatctggccctgcggattgtgggcccatcacccaaagaggatgtcgttactgaggaggaggtcaagctccttatcgaagagggcattgaagacggaacaatcgccgaagaggaggaggacatcatcaaaagggtattccgacttgatgaccagaaggtggatatgattatgaccccccggaacgagatcatctggctagacctcgaagatgagattgaaattaacaaggctaaaatcattgccagtaagaggtctattttcccagtggctgatgcggaattggatgacttcatcggggtggtgcaggctaaagacctactcagtaaaatatttgagggcgaagatgtggacattagggctaatgtcaaatctccattagtggttcccgagaatatgctgtccatggacttgctgaaggaatttaaggaaaacagagagtatgtccatatggtgctggtcgtggatgagtttggtagcgtggtgggtctcatcacactgaacgacctgcttgaaggtattgtgggagacattccagggatcgatgaagaggacgatcccaaagcggtggagcgcaaggaccacacttggctcattgacggccgcttctcgatagaagactttaaagacctgtttgaaatcgagaaggagatgcctaatgaggtggaggacggctacacaaccattgccggcttcatcctttcacatgctgggaagatcccggagaccggtgaaatcttccacgaggacaagttcacctttgaaatcgttgacatggatggaaaccacatcgataagatcctggtgaccataaacgaagaggattccgataaactggacctggaaagcaaggaagactga

SEQ ID NO: 4168 - DNA, 942 bp, synthetic construct
  source 1..942: mol_type = other DNA
atggaactaatcattcaaataatcctgctgattatcggatttgtgctgctcattaaaggcgccgatgtctttgtcgacggggcaagtaatgtggcatacaacctaaagatcccaaccataatcgtgggactcaccatcgtcgcgttcggcacatctgctcccgaagcggctgtgtcaattacctcggcatttgccggcacaaacgcgatttccctgggcaacgttgtagggagtaacatcttcaacatcctggccgtggttggtgtctctgccctgctcggcacattgacggtggataaggtcttgataaagagggatttcccattcctggtggtatccagtatcggcctcctgctaattgccaccatattcggagagatcagccgcctctgcgggataatcttcctgattatcatcattgcttatgtctacgtccttgtgcaggaggcaagacaggacaaggaggccatgtctgaagagatcgaggttaagctttcaatacccaaagcggcaatctacatcgtcatcggtatcgccggcatcataatcggttccgacctggttgtggactccagcagctatatcgctagcgtgttcgggctgtccgacgtgttgattgggcttaccattgtggctatcggaacttcactccccgagctggtaacttcgatcactgccctgaagaagggcgacaacgggattgtgattggcaatgtgctgggaagcagcattttcaacatccttttcattttaggtatcagcggagctataatgcctctccctatcgctccggaaatggtatgggacattctgttaatgacagtgatcacgatcattggcgcagcctttgcctacaccaaaaatgaggtggataaaaaagaaggggccgttctggtggccctgtttattctctatatggcctttgtcattttgcggaattga

SEQ ID NO: 4169 - DNA, 504 bp, synthetic construct
  source 1..504: mol_type = other DNA
atggattcaaagaaactgattctcgtgactgcattggctttcctggccatcgtttccattgcgtcggtaagcgcctgggacctgtttggcacagcggacgagacgagttccacagccaagacgaccatcgccgggcacgatttcaatataccagacggatatcagaaaaacgagagctatgtgctggacaacgaaacaaccaactccaacggggctatcttctattcaaccgcagagagctactacaagggtgccgacgacattatctacatccaggtggcagactacagttacccggggtatgaagctaacctaaccactgcccaacttctcaagtctggcctgggagataaagagaccatcaatggtcacgaaggactgattgccgagaatgaatttgacggcttaaaggtccatgcattcttctacgctgaggacggcgattgcataacagtcatcactagcgatgataacctctttgaacagattatccccgaggcctga

SEQ ID NO: 4170 - DNA, 1356 bp, synthetic construct
  source 1..1356: mol_type = other DNA
atgaatgtgaataagaaaatctttctgcttgtaatcttcatcatatctatttcaatcgctggcgtatactgcgccgacatccatcaggatagcgacctgaccgccattttaagcaacgaaaccgatagtggtctgaccgccatcatgagcaatgagaccgatagcttcggctgctgttcaattgtcctccaactggatggaaatgagtccatcatgtgctaccggcgtgactccaactatacagcggacgtgtttattgaaaaggtcaattggcatgggaagcctgccatcaagcagtataagactgacaacaaatacttcaaccacgtcatcatcacaaacgacggctggatcatcggacttggtgggattgacgatgggatcgacagtgagatctgcgagaacatcacggcaaagatgattaccaaggactacagcatctcagaggattatctcacgcagatccaggagattaagaagaagtacggacgcggtcacgtggtgattaaggcgcctaacgggaattacggctttgctacacctaccaagctcaagaccgggacactgaacgttggcgagtacatctccatcccaaataactatgagctgtcccggcgcggatacgtcagcctggatgagcccgataagatagaggctatgataaatctatctaggacggacctgtacggagacgaccgacgtgaaataattacttatgacgtgcacttaaatggcaacaacaataccaccgacatttacatctccaacgaagatggaagcctgattgggaaagactatacgggctgtgtggacaacgtgatcttcaataacgtgacaatagaaggcaaagacattcccatagctcccaactacaaaagcctcggttcaatgtcgtttgaggtggacaaagtcaatctgagcctcacagatctggcattcatcgttgtaggcgtggttttggttattgcactcctgttcgtcctgttgctaaggctcatccgcttcattaaaacaaggcggtccagaagaagcgccccgagaagaacccggcgcgaaactccccgcagctcccgcggcagcgccccaagtcgaactcggcgggagagtcccagtcgtacgcggcgtgaaactcccaggccaaatcttagaaacgccagacggcgagataccgaggaagataggcggcgcaatgaccttagacggaacgtgttgcaaaacatagtggaagataaacgcagatcggagcctagaaggaacgtgcgccggaacacaaggaacaaccgaggaagacgccgagggcagaatcgaggcaggcagcagactaagaggccgccaaccctgtataggaaagagtga

SEQ ID NO: 4171 - DNA, 858 bp, synthetic construct
  source 1..858: mol_type = other DNA
atgagcatcaacaaggaagagtttaacgaaaagatcttcagtagaatcaataatctaatagacgattatcaactgatcaaagagggtgagaagatagccatcgccctgtccggcggtaaagactccgtgttaacgcttcacgcacttaaaaattataaggatagcgcggactttgacttcgagctggtggcaatcctcgtcgacgagggaatagacggctatcgccagcacggcatcgatgctgcagtaaataacgcccagcttctcgagatccccctaatccagaagtccttcaaagaagaggagggcttcgctttggatgatatctactcctacttcaagagcgcttgcattccatgcggggtgttcaggcgcaacatcctgaacaaaaccgcttacgaaatcggggccgacaagattgccacaggacataacctggatgacgagattcagagctttctcatgagctttagcaggggagacactgtgaagttctctaaattcgggccggagctcgatcagattcacgaaaaactggttcccagaattaagccattgtggaacacacctgagaaagaagtcgggatgtgggcgattctgaatggggtggagatccatctggacgaatgtccttactcgaacctgtctttgcgggccaaaattaaggaatttctcaacaagaccgagtcaaagcaccccggcaccaaggagaatgtgctcaactcatttataaagaccctggacgtggagaatgtccggactgttctgagtgagtgtgaacggtgcggagagccaacaagcggccgagtctgcaaagcctgtgaaatcaaggacattattagtgaaaaccgtgattga

SEQ ID NO: 4172 - DNA, 276 bp, synthetic construct
  source 1..276: mol_type = other DNA
atgggtattgaagagagcggcgtcggggagtacgttagtaaggcagtccagataatcgaagagagcgggctgaactaccaaatcaccgctatgggaacccagattgagacagacaatctcaataagctgtacgaagtgtgcgccaacgtgcaggaagccatcttcgaaatgggcgtgccccgagtgtatactgtactaaaaatcgacgacagacgggataaggagaacaggacgctgaaagagaaggtcaaatccgtggaggatcgcataaagtga

SEQ ID NO: 4173 - DNA, 474 bp, synthetic construct
  source 1..474: mol_type = other DNA
atggcccctgtggtggagcaacccgtcgaggaatgggacaaagacatagcgatcgacctgacaggggtgttctactgctgcaaagctttcggagaatatatggtcaaacaggagtacggtaagatcatcaatatgggttcaatccacagccgggtcgcactgaccggaggcctcatcaccggctatacctctgcaaagggaggagtgtacaaccttaccaagacactggcagccgaatgggccccctataacattactgtaaatgctatcggcccggcctactttgagtccgagctaacagccgatgttgtgggcgatgagcagttcgacatgttgattaaggccttttgcccaatgggcaggtgggggaaggaaggcgagctggatgggattgccatctacctggctagtgacgcgtccagcttctgtacggggcagctcattaacatcgatggcgggtggactgctatatga

SEQ ID NO: 4174 - DNA, 1104 bp, synthetic construct
  source 1..1104: mol_type = other DNA
atggctgatatcaaagtgagcatagccagccccatcattgaagaagaagagatcaacgccgtggtcgaggtcatgaagtcgggaatgattgcccaaggtccaaaggtaattgagttcgaaaaggagtttgccgactttgtcggtgcaaaatacgggattgcaactaattccggcacttctgccctgcacgtggcgctcctggctgccggaattggcaaaggggacgaggtcatcaccactcccttcacattcgccgctaccgggaactccatcttatacactggcgcgcggccggtgttcgttgacatcaacgaggacaccttcaccattgacccctgtaaaatagaagaggccatcaccgataagaccaaggctatcatgcctgttcagctctacggtcaagccgcggacatggaccctataatgaaaatcgcaaaggagcacgatttgatcgtgatcgaggatgctgctcaggcacatggggcggagtataagggcaagaaggtgggcaacctaggtgacatggcctgctttagtttctatcccacgaaaaacatgacgacaagcgaagggggcatgatcaccaccaacaatgaggagtttgccgaaaacgctcgaatctatagggcccacgggtcagctaccaaataccatcatgacgtactgggatacaacttccggatgacggacattggggccgctatcggcatcgagcagctgaagaagatagacggcttcaatgacaagagaatagagaatgcaaaatacttgaatgaaggactcgccgattgcgatctggtggaaacgcctgtggtagaggatggatataagcacgtctaccaccagtacacagtgaaggtcaaagacggcaagcgcgatgcccttagtgactatctgattgaaaacggcattggcaacggaatttactacccaatcccactgtacgaccaggttctgtatacagatatgggatataatcagagcctcgaggttactgataagacagtgaaggaggtgctgtcacttccgattcacgcaaagcttacaaaatttgacctggatctcatcatcgaaaaggtgaaaaaggcatccaaagagctatga

SEQ ID NO: 4175 - DNA, 1218 bp, synthetic construct
  source 1..1218: mol_type = other DNA
atggaagagtataaagacaatttcccccaggaggagctgaaaacctacacggaggatgagctcaagatcatagaggaaggtaaagtcaagataaaattcccagactttgataaggtctccagcgatgctcccgtcttctataatccaaagatggaatttaaccgagacaattccatactcgccctgcaagcctatcagaaggaagtggaccgtgagataaacatctgcgacctttttggcggcagcggcattaggggcatcaggtataagaaggaaatagaaggagtgggcgaagtatctgtgaacgacatcagccctctggctaacgagtttactcgcatcaatgcagagctcaacgatgttgaggttaacatcgaccagaaggaggcgaacatcgagcttcgcaccaacatgggactcttcgatgtgattgacatcgacccattcggaactccttcccccttcgtggactcagcagcgtacaatctgaaaagggatagcctgctctgtttgacggctacagacacatcgtgcctatctgggacttacccagagccctgcattcggaaatacaacgcaaagccctacaaaagcgagtactatcatgaaaacggcattcggatcattatcggatttgccgccttgaccctggcaaagtatcagaagcatattgaggtaaagatgtcccactctacagagcactacatgagagtctacctgaagatcattaaaggttcaaaggccacggacaaatccttaaaaaacattgggtacatcagccactgcaaaaactgtctatacagaacagagtcccatgggcttgcaacaagtgtgcccgacatctgtcctgaatgcggtgaaaagctggttactgccgggcctctttggctcggaccaattcagaataaggagttcattgagtcaatgattgagatcgcggatgagaaggaactcaataccaaaaagaaagtgctgaagttgctgaatagttgcaagatggaagccgatgctccggccaccttctatgacatccacaagatctgtcgctcgctgaaaatcagtgcccctaagctggatctggtgtttgacaagctgaaggaaaacggcttctacgctgtcaagacccactacagcccgttggggatcaaaaccgatgccagcagtcgggaactgatagaaatcgtgaaggagttagctgaggaagtggagaataaatga

SEQ ID NO: 4176 - DNA, 480 bp, synthetic construct
  source 1..480: mol_type = other DNA
atgtgtgcgaaagttaacgaagatatcatccaactagatgaaactgacatcagcatactgaaaatcataaatgatgacgtgagaatctcataccggcagatctcccgcgatctcggaatcagtgtcggcacggttcacaataggattgacaaaatgctgaagaccggcgtaatcgagaaatttgcacccgtcctcaaccataagaagctgggatacgccctgacaagcatcattggtgtgaacgtcaaaggccaggaattagaacagtgggagcacgacatttccaagaacaagaatgtggtgggcctgtatgacgtgaccgggcagtacgatgccatagtgattgccaagttcaaggacacggatgagctggacaccttcctcaaggagttgctgaaaacagggtgcattgagaagaccatcacacagactgtacttaacattgtgaaggaggacgtcgggtctgctgacatcctttga

SEQ ID NO: 4177 - DNA, 942 bp, synthetic construct
  source 1..942: mol_type = other DNA
atggttgtgtgtctccccgacacacaggatgatgcaccccgcatacctatccatttgagtagagtcggagtgaccggggtgaagaagctgctcacgctgaagaggaaggaaaaacgcccaatcatactacttcctacttttgacgcttttgtagatttgcccagcgatcagaaaggtacccatatgagtcgaaccccggaagccatcagtgaggtggtcgaagaggttgcccagagctcccaaaaaggcgtggagtccctttgcgccgacatcgtcacacggatgctggagaagcacgaatacgcgaagcgtgttgaagtgagcatggtcagcgactacatgttcatgaaggactcccccgtaacggacaacaggtcccaggagatgggcaaactcatagctaacgctgtcggcatccgggaggacgacgacacaatcagcatccggaagagcattggtgcggaagtcattggaatgaccgtatgcccatgtgcacaggaatctgttagggaggtggacaagaacaacttactaaaattcctggatgaagagacctgccaaaaggtgttggacactgtcacgttcgcctctcacaaccagcgaggagtgggcaccattctcatcgaggtgccagaggatgagtatgtcgatggggaaaagctcattgagatcatcgaatcatcgatgagctcgcctatttcagagctgctgaaacggcccgatgagaatgccgtggtgatgaatgcccacaagaacccggtgtttgttgaggattgcgtgagaacaatgaatgagaaaatcgtgaaagagttctcacatctgccagacgacactcttattaccacaagacaggaaaatcaggagagtattcaccgccacaatgccttcgcagagaaagtgtccactctggggtccctgaaggaggaactgaacatcaactga

SEQ ID NO: 4178 - DNA, 282 bp, synthetic construct
  source 1..282: mol_type = other DNA
atgattttcatggaaaacttcgaaaatcagaagttctgtcagagctgtgccatgcccatgacggaggaactctacggcaccaacgcagacgggagcaaaaacgatgagtactgcatctattgctttaaggacggagaatttacaagtgacatgaccatggaagagatgatgaacttctgcatcgagaagatggtggaggtccacccagagatggacaaggaggaggcctccaaaatgatgaatgaggtgtttccgatgctgaaacggtgggctaaggattga

SEQ ID NO: 4179 - DNA, 1185 bp, synthetic construct
  source 1..1185: mol_type = other DNA
atgaacgtcttagtttgcagcatgagcgctatggctgagacagcaggtccctacgggagggcaagagctcttgtggaggctctcaaggcatccggtattgacgtagccacttgcatggcggaagacattaattacaagcccatcgacgggataaaaaactattacttgaatgtgcctatgcctctaggactacctaagccaattgccacgaggacctttccgattgcccagaaactgggcatcattgagaggaagaacgtaggcagcttcgaggatgttctccattttaccggaaacatcgactataagtatctgtgtgagagtgtggcgaacatacgtaaggccatcaacgacttcaaccccgacataatttactctgaatttaatatcagcgccatattggcctccaaacttgaaaacaagcggctgtatgccactatcagctatcccacacaaaccgagtatgctagtaaccccaagtacgccaaaggactgaagaagtttctgagagaaaacaatctgcccgatgtcaattcctcactggatctcttcaattgggcggacaagtcattcgtgccaagcatttacgaattggagccaatcgacaaggacaatgtgactttctgtggcacctggaagaaccttaacgagggctctgtcttcaaggaaaacgacgagaacatggactcgacagatgagcgcaacgccatcctggtctacatgggcagtgggaccatcagcccaaacaagatgttcaaagaaatcaaagatgcattcatcggaacagagtaccaggtgtacattgcatccctcggtctggagaagagcgatttcgataacatccacatcgataagcgctgggacttctccaagctgttaaatgaatctgtgctctttatcaatcacggcgggcagaacagtgtggtggatggattcatctacggggttcctcagctcatttgcccgggccgggtctttgaacggatctataatggaaaatcagtggagaaggtcgatgccgggaaaatactggagattacggactttaaaggggagattatcaaatctgagagtgaaaaaatcattaaggatgactcgtttcgaaataattccaaatcaatcggcgacaagctgaaaagcctcaacggtatcgatctgattatagactccatcaagaaaggctga

SEQ ID NO: 4180 - DNA, 1344 bp, synthetic construct
  source 1..1344: mol_type = other DNA
atgaagatgtataaaatcaacgtttccaacattagtcgactgaggacgtatactgacggggatggtgtgtcaactctcatcgggtccatggggtgccctctgcggtgtgcgtactgcttcaatccatttagctgggacggttcccttgagcctaaaacgtatgccgtggacgaactgtatgaggaggtgaaaagagacaacatctattttctctccacgggcggaggcctcgtgtttggcggaggggagcccctgctctaccatgagtttatcaaggagtttattaagaaatacaagagtaccggttggaagttcaccctggaaacaagccttagtgtgaagaaggatatccttagggatatcatcgactacattgacttttttatagtggatacaaaggacatgaataaaaataggtacgagctgtacacaaagggagactacgaactcttcctgagcaacctgaaattcctgatcgataaagttggatctgatgggattagagtgcgggtgcccaagatccccaagctcaataccgtagacgacgtgaaaaccaattaccggaccctgaaagatatgggcttctctaacatagacgtctttaactatgtggagatcgccaagcacagaaaaatcagccgagtcgctctggagaataagaaagacttcgacgaacgcctctatgaaaacaagatcaaattcgtagaggattatatcctcagcgagattatgctgaaggttcccccgatcctggatttccacataaagaagttcccaaactcctttaacaaaaaatttgagttcttattcgagtacgactcgatatttaatgacgacctgttctttctaaaggaagtcgttatttcaaaattgcaggagtgttacgactatttggacctcaaatatggcttcttcgtcattttctaccctgtgggctacttggagaaccgcctggatgattcttgcttcgatctgagtatcatgaataacctagtcaaaagcttcgaagggctggacgagattgataaggaaaagcacgcattggagctgtgggaagagaataaatgggagtatattgaatttaagtacttctgtcacgacttgaaccacttaaagaacttttacgtgaacttcaaggatcatggctacaaactcgactcaaagtacattctgtcgaacgcctacgacgtgtgcccatccgactttgtagtccatatcaatctgcgcaagactggcaagacctacaatatagtcgaggaagattattcaacacaccttcttgtgcagaagttcgataaggatatgaacctaattagccaaagcatcttcgaaaagggaatctga

SEQ ID NO: 4181 - DNA, 270 bp, synthetic construct
  source 1..270: mol_type = other DNA
atgaaaggaaaggataagtgtgagctgctcaaaaacattcggcaaaagatcgcagatgagaataacatcgagtataccgccgtggagtgcacattccagggtgactgcaccggcacgtgccccaaatgtgaaagcgaactcgaatacctggacaaggagctggagaagaaacagaatgcgggggaaaacatcaacattaagaacatatttagcagtgacgacttcgacaagtccgagtacgggctattggatgaaaatatccttggctga

SEQ ID NO: 4182 - DNA, 426 bp, synthetic construct
  source 1..426: mol_type = other DNA
atggtagacgaaattgaccgcttcgatgggaaatacctgtttctgagcaacttctacatctgcgacgttgagtatgacggaatactctatccgcacacagaggcagcgtttcatgctcaaaaggtcttcgatgacgagacgaagatgaagttcactaatgtgacccccaagcagagcaaaaggctggggcgcaaggtgaaactccgggaagattggaatgaagtcaaggacaacattatgtacgaagtgtgtaaggccaaatttgagcagaatccagacatccggaaattgctgctcgagaccggcgatgccaccctaatcgagggaaacacttggaacgatcagtactggggtgtgtgccgtgggaagggcagaaaccagttaggcaagacactgatgagaatcagggaggagcttcgagaatga

SEQ ID NO: 4183 - DNA, 1533 bp, synthetic construct
  source 1..1533: mol_type = other DNA
atgaacgagactaaaaaacaagtatcctggatgccactgatcctcgtggcttttgcgtcattcattattgctctggacgccacgttcatgaatgttagcatctccccccttgtgattgacctgaacacagacgtggggaccatacagaccatcatcagtttttataccctgattaccgcttcattgatgctgatatcgtccaagatgcaggatgtctttggtaagaaaaagatcttcctaactggggccctggtctacggcctgggcgccttcattgcctcgatcagccagaatgcgatcatgctctttatcggctggtccctcttggaaggtattggcggggcattgatgaccccggctacaataagcatcatcagtgggacatatgacggccagatgcgtacgacggccctggcaatcagcagcgccatcgtcgggattgccgctgctatcggccccctgtttggaggtgtggtgaccaccttcctctcctggcggtacggatttgtgttcgagctgttaattattcttataatatttatcttccgcaagcgcatccctaacttcgcgtcaactgcctccaaaaaggacctggacattacgggatcactgctctcagccatcggcctgatcctgctggtcctgggagttttaatgattagcgggaagacaatcggcttgagcataggcctcatcattgcgagcatcatcgtgctgattggcttcggcctcttcgagaagagaaggaaggccaacggcaagatgcctttatttgatgtgagcctcctgaaggacaggaatttgtcccgcggcacattgattcggctgattactgccattgcaatggggggctccctgtttagcataagtatctaccttcagacggtgctcaagctctctgccttcaacaccgggattgtcctcctgcctctcacctttggaatgctgatattctcgatcatggcaccgaaattcgcgatcagactgagccacaaatacgccatgatcatcggtttctcaattgctattgtgggctgcctccttctgtcttaccagtttacactaactacccgattcatcgatctccttccagggatgttcatctatggtgccggacttggttttccaatggcactgtccgtggatacagcccttatcaacaccccccccgaaagccaaagcagtgcctccggattcgtcagtaccggccagagtctgggaatgtctatgggaactgcaatcattggaatcatcctaatcgtgggtgccgttgggggcatgcacgatgcaataaatacctacgctcccgacaaggtcacaaaccaggaatttcacgataacgtgcagggctacttcgagaaactgggaaatgttaatacaaccgagctcaagcatgagaacagcctaaaggaaaagattgtgagcaaggtcgtacaggacgctatgcggttggtaatgtatgtgactgcattgctgcttgctatcgggggggccctgactttcaccttaaaaaaacaaaaaataaaaggatga

SEQ ID NO: 4184 - DNA, 1590 bp, synthetic construct
  source 1..1590: mol_type = other DNA
atgggcaataaagaggaaaagaaagctgcgcggcaacgttttgatgagatcatcggcgtggccaaaagacaccacctggccaagctgttaaccaataacgaagatgatgaagactttgaagtgagcgacctacgatacgccatggaagagctagggcctgccttcatcaaattggggcagcttctggctacacgccccgatatggtcggcaatgatattgccgatgacctgaagctgctgcgcgacaacacgccagccactccctttgaagaaatgagaaaggtcattgagggtgagctcggaaagccactggaggaggtatactctgaatttaatgaagaacccctgggctcggcctcaatcggccaggtttacagggcgacgctgaaggagagcggcatggaggtggcagtcaaggtgcagaagcccggaatctatgacgttatcgttccggatgtcaagatcttgaataacctcgctgggactgtagacaaacatgtatccgggagcagaacctataacctccctgcaatggctaaggaatttgaacggagtatattcaaggagttggactacatggaagaggtgagaaacatcaataagataacaaataactttaaggatgtggagtacattaagatacctgaagtctatcccgagtactgcagtagcaagctcataaatatggagctcattgacggttacgaggttacagacctgttcgacaatgagattgaaggcatcaacaataccgagatcgcccaatatggaacccagtcctacctcaagcaggtcctgattgacggattcttccatgctgacccccacccagggaacctctttgtgacgaaggatgctaagctttgttacatcgactttggtatgatgggagtggtgaacgacacattccgctcaaacttcgcccagctgatattgctcctcctggatggcaactcgcaccatctgatcaatcaactgctctatatgaatatcatctccccagaacagaacactgacgagttcagggaagatgtggatgacctcctgaacagctacataggcgtggacctggatcagatggatggcatcttcgataaccttatgaatgtcatgatcaaccacaatatcatccttcctcgcgagtttatcatgatcggtcgaggcatactgctcatcgaggatgcgggaaaccggttagacccccatttcaaccttaccgccgaactggaggagtttgctaagaaaatgattaggaccaaattcgagccgggaaacctggtgggcggaggattcaactatattgtggagattgagcacttgttaaaagacctgcctgacaggcttaacagcacccttgacaaggtggagaaaggggagctggagctgaatatgaaccacacagggctcgatgacttgaaaaaccagttatccattgccctgattgtctctgcactgctggttggttcctcaattgcaattctagcagacaaagggccaaaagtgtgggacatcagtgccatcggcttcttcggttttctattcagcgcgatcctgggggcatatttggtgattaagtacattcggaaatga

SEQ ID NO: 4185 - DNA, 468 bp, synthetic construct
  source 1..468: mol_type = other DNA
atgtacaagaaactcatgatactggccctattctgcttcatcgtcattggctcagcaagtgcggccgacttcaaaatcaatgatggctttaacagctcactgtctgactacagcttctacaatgaggaccaaaacatgtacattaacatctgggattatgacgacgagattctttccgaagcctatctggaaaacagcagcagctaccggatcgtgtccggagaaaacaacacgtataactttgtgtttgactcgtataacgatatggaccacgtcatctcctacattaccaaaggatacgttgccctcgactgcggggtactggagatcgctgaggtggatggcaagaagcagatcattttggtgtctaaagaggggaccaatgtggacagtctgaagacatgttatgatgaactcatgaagttcaatcagaacaataatatagagcccatcgcagatgctatatga

SEQ ID NO: 4186 - DNA, 1938 bp, synthetic construct
  source 1..1938: mol_type = other DNA
atgcggatcaataagagtctgctgatgatctcactgctccttatctccatcctggcgataagcgcagccagtgcggccgatgacatggtagacgcagacattgacctggccagttcagaaatttcggaggtaagtgttgacgatgtgcaagctacagataaaaatgttctgtctgatgccgatgaggtgtcagtggtgacacagaatacaccttacaatgaaaatgcgaccattgatatctcagtcaacggcactctggccgatgacagcaccataaagctgttcattgacggtgaggacaaaggagacctgaatctctcagcagagggaaaagcaagttatgtgatcccagcttcgacgctcgacgtggggaaatacttcatcgaggcagtggtgcataatggcacttcctcatttggcggcaggtccaccctcaacatcactaaggtcactcccatcgtgagcgttagtgacgttacggtgaaatccggggattatataaccattccatttaatgtgactgatgacaagggtaaagcaatccctggagatgtcatcgtgacaatcgtctgggaaaatgatgtaatcagcaaacacattaagctaaacgacaattcctctgccggctttaatattgctgatatcattggaatatttggcggaaactccacaggtaacgggacaggaactgggattggggacctgttcaaccgaaacggaaccaacggaacaggcaacggaaccggcataggggacttgttcaatcgcaacggcaccaacggaacggggaacggaaccgggataggggaccttttcaaccggaacggaaccaacggaacggggaatgggacaggcatccccgggatcggcggaaacagcacaggtaatgggacgggcaatggcaccggcgacttcgatattgcctccatcctcgctatgctgatgggcggaggcaataataccggcgctaagtttgcctatgtctttgaaaagggagtctataatgttagcgttgagtacttaagcaaccgcaactacaatggcgccatcaacgacactgccaaactaaccattactccgctagaggatgttctgatcaatgccaccatcgagacggctaagaacatgtctgacaacacaacagtgtccatccttttaaccgacggttatgaaaaacccatagccggcggagaaatcaatgtgttcctgaacggggaggacaaaggcaaggtcactgccaatgaggaagggaaagcctccattgcctttagcaacttgctgaagggggactatgaactcctcctcaactataaggagaccaacaagaccttcgacttctttgtgaatgtggagaggatgggcaccgtcattgaatatgaggacatgaacaccacctctgtgaacgaaaaggtcgatggcagaatcggggagtacttccaagtcactctgaaagacaacgagggaaaggcgctggctaaccgtttcgtccagatcggtttcaacggtaaaatctacaacagaaccaccgacgataagggtcagaccaaattgcagatcaaccttttctacacgggtgattacacctttgcggtgtgctacctgggcgacgacgcctataacgcatcgttcattgtggcaaagatcaaggtaagcaaacagactccaaagattacaacaaaggatgccacatacaaagcagatgccaagaccaagaacattaaggtgacactgaagtctgctaaggacaatgctattaaagataagaagatcagtgtgacggtaaacggcaaaacctacactgctaaaacagatgagaagggggtggccactgtgaacgtgagcctctctaagaagggcacttacagctttacggctaagtacgccggtgactccggctacgcgcaggtcagcacaaaaggtatattgacccttaagtga

SEQ ID NO: 4187 - DNA, 246 bp, synthetic construct
  source 1..246: mol_type = other DNA
ttggagcttgtgatcttcaaggcagagaacaagctggaggagatcttcctgaatgcccagctcaagatgcaaaaggccaaaaatgagctaattaaaaacatggaaaaagacatcgagaaggcaattgagctcgctgcgatcgaagtcgaaacacagataatcaaggaaaacatagatattgctgtggacgccctggaggaaaccatcgaggaggaaaaagccgacctggccgaacggtttgagtga

SEQ ID NO: 4188 - DNA, 462 bp, synthetic construct
  source 1..462: mol_type = other DNA
atgtccgagatcttaccgaaaatcacaggacagatcataggccatttcaatgcattcaaaggctcaaggccagccttccacggtgagcacaccctcattgtaagaggaatcagccgggacaagattgaaatcgaagagatggagcctaagctagcagagctggaggacattctgaaggcgcgcgaagtggacgtcctgtcggatgccgggaaaaactttgtggagaaggtcgacagctacatacgagatgccgagtccattgatacagcccccgacagtggcgggctccttcggatgaaagagcagctggaaactatgggattgcacgtggagtacaagctgttcctgatgccctatgctggggcgtttgtggctatctggaaggacaaaagcggctttggtccactctacgtggaagttaccgcctctgaaagggaagagacggacaacgatatgaagtga

SEQ ID NO: 4189 - DNA, 1092 bp, synthetic construct
  source 1..1092: mol_type = other DNA
atgtctaatctttccaacattgattttgagaacctgagccgcaacgacctcatttccatcttagaatgcaaaaaggaagacattctaaagatcatggacctggctaattccaaacgggaaaacactttcgtcacctattcgaagaacgtctttatccccatcaccaagatatgtaaaaatgactgcgggtactgtgcattcaagcagagccccgatgatcctgacgccaccatattgctggaaaaggaagagattctcgccacgctgaaggaggccgagaagtacggctgcaaagaggcattgttcacaatgggagaggatgcagacgaggagccggctgtgaaaatcaagctggagaagcttggctacgagaatatgccggattacatttatgacatctgtaaaatgacagtggaggaaacagacctgctgccacacaccaacgctggtaacttctcatacgaggatatgaaaaagctgaaagaatacaatatctctatgggcatgatgctggagaacagctcagagcgattgatgaatactattgcccataagaagagtcctgggaaagatcctaagatacggctggagacgatcgaaaatgccggcaaactgaacatcgcctatacaacgggaatcctcattggaatcggtgagactaaagaagaaatcgcggattcgctactgaaaataaaggaactgtgcgacaagtacgggcacattcaagaggtgatcattcaaaactttaccgtcagtcctggcatcgaaatggagagccacgaagagcccagcctgctcgacatggtgagaaccgtggccgcggcacagttgctctttgatgaggacgttagcgtgcaggtgccacccaacctcaactatgagacaagccagatattccttctctgcgggaccgacgactgggggggagtttctccactgagtgaagactatgtaaatccctcctcaccctggccaacccttgaaaggctggagaagctcactaacgacgctggctaccagctaaaggaaaggttagccatttatgataagtacatcaacgagaaatatatcgagaagtcctacatcaattga

SEQ ID NO: 4190 - DNA, 1323 bp, synthetic construct
  source 1..1323: mol_type = other DNA
atgactaatgaagacaataaaaatatgaccatcattggagctagcagagggctcggcaaatggattgcccagcacctcaaagaggactttaatatcaccatcacatcgcgaaaccaagccgaagggcaggaagtggccaacgagctaaaggttagctacaataatgacaacattgacgccataaaggacgcaaacatcatcatcttcagcgtgcctatcgagcatatggccaccaccataaaggaagtggctccccacgcacctaaggggtcgttactgatggacgtggcatccatcaagaaagagcctgctgaagcactggaaaaatacgctccgaaagacgtggagatcctgccgtgtcatccaatgttcggtcccagggtccccaccctgaaaaggcagatagtggtattgacgccaattgaaaaccggagcaatagttggacacttgtaaaggaatatctggagaaaaaggagtgcgaaatcgtcatcacatctcctgatgagcacgacaagtacatgagcatcgtgcagggacttacccacttcagtttcataagccttgcttcaacgatcaagaagctcaacattaatgtcaagaagagcagaagcttttccagtccagtctatagcctcatgctggacatgatcagtcgtgttgtctaccagaacccctacttgtactatagcatccaaaagaacaacaaggagactgcctacgcccgcgatgcactgattaaagagagtatgcgcctcagcaaactgatagaagagggcgacgaggaagactttgtgaaggccattgccgagtcagcggagcatattgatgagatcgaggaggctctggtgcgctccgataaggcgatctccatgctgaaccagaaggccaacatcctcacaaaattaattggggaggaggtgggcctggaagatgcgttctccaaaaaggcctacataggcattgtgcggaaggtcagctcacagactgtaacaatcgagaacgagaacaatgaggagattgagctgaagatttcatctattgacataatggataaggatgagctcttccagtggaaaaagaagaacttgaagctggaatcctttgacctgaccgccaaattcccctccagcgctaacgaagactatttgcttaagatgtttaaaaggattgaaccagtgatcgatgcaaacatcatctttaaagacaaagagattgaaaaagatctgcggacgtataagttccactattccctcttcaataagcaagaaaaggattacgttgagaaatacatccagggcattggtggaatcctaatcaagtga

SEQ ID NO: 4191 - DNA, 771 bp, synthetic construct
  source 1..771: mol_type = other DNA
ctgaagtggaaaaagataggggacatcctcatcattgacgacaacttcgacctggacctaaacgacgagaagacgctgaaagatcttgcccaccgccacaaggtcaaatccatcatccggatcgaaaagatcgagggccagaagagagagcccaccatcgatatcctgtacggtgaggacacagagaccatccataaggagaacggatgcctgtttaacttggatttgagtaaagtgatgtgggctaagggaaataacaatgagcgattacggatagccaagctcgtccaaaaggatgagaccgtcctggacatgtttgcaggaatcggctacttctcaatcccaatcggggtgcacagccaggccaagcagatctattctattgaaataaacccaaatagctaccatttcctaaaaaggaatattgagctgaataaaatcaacaaaaaagcagggtatgatcggatgattcctattctcggggattgtgcaatagaagcccccaaatactccgcggacagggtccttatgggttatgtgaagacaactcatcacttcctccacccggcgatggaatgcgttaaggacggcggcataattcactaccacgagaccgttcccgataagctgattgaaactagaccttacgagagggtgaaggaaatggcctggaactgcggagaacgcgaagtggaggtgctgaacattcagcgaatcaaaagatatgctccaggcgtagagcatatcgtgctcgacgcccgcatttactga

SEQ ID NO: 4192 - DNA, 624 bp, synthetic construct
  source 1..624: mol_type = other DNA
atgagcaacaagaacacgtttgaggggactacaaccgtgggtattacctgcaaggacggtgttgtctttgcaagtgaacggagggcaagtatgggaaacctggtggcgcacaaggtggcggagaagatattcaaaatcgacaatcatattgccgccaccatcgccggcagcgtcgcagatgcccagaccctgatgaaagtcatcagtgctgaaacgagcttgtacagactgcgaaacggcaaggacataagccttgaggccgccgctgcggtcagctcgaacatcctccactcctcacccgcatatgttcagacactgatcggcggagtagacgacactggagcttcaatctacagcctcgatgctgccggggggatgattaaggataccttcattagcaccggctccgggtccacatttgcctatggggtgctagaggaccggttctacgaagatatcacggtagaggaggccacagaagtggccatacgcgcaatcaaagccgctacagaaagggataccttctccggcaacggcttcctcgtggcaaatgtgactaaggacggatttaaaatgctggagaaagaagaggtggacgctattattgagaagatcaatagctga

SEQ ID NO: 4193 - DNA, 1911 bp, synthetic construct
  source 1..1911: mol_type = other DNA
atggcctccaatgtgctggagcagattaaagaagagattacgaagaaattgccagaagaggttaagctggccaacattgaatttgaaggtccggaggtggtgatctatacgaaaaatcccgacatcattgccgacaatggggacctaattaggaacctcgccaaggacctgcgtaaacgcatcatcatacggtcagacaagtccgtgctggactcctacgaggacgccatcaagaaggtagaggagatcgtcccggaagatgctgaaatcaacgacataaagttcgatgaagtgacaaatgaaattgtcatagaggccaccaagcccggcctggtcatcggcaagtatggggtgacctccagagatatcgtccggaacactggttgggcgcccaaaatcctgaggacccctcccatgagatctgaaattatcgaccggatacgtaacaccctgctgaacaacagcaaagagcgaaaaaaattcctccaaaccctgggggcacgaatccaccaggggggaaaatatcctagcgactgggtcagactgacggccatgggtggttttaaggaggttggccggtcctgcatgctgctacagactcccaacagtagggtactgcttgactgcggcgtgaacgtggcaggccaggatgacaaaacctcattcccaatgcttggtgtgcctgagtttagcattcaggacctggatgctgtggtcctctctcacgcgcacttggaccactgcggattcatcccttacctctaccactatggatacgagggccctgtgtactgtacaagtgccacaagggacctcatgacattactccaaatggattatatagatatcgcgcacagagataacaatcctctcccattcaatgctaagcacgtgcaaaaggaagtgaagcatacaatcacactggattacggagtggttacggacatttccccagacatcaagctcacactgcataatgccggacacatcataggctcggcaatgtgccacttccacattggcgacggcgcacataaccttctatacacaggcgactttaaatacgaaaaaagccggttgcttgaacccgcaacgaccagattcccccgcgtggagagctgcatcatggagagtacctatggcggacacgaggatgtcacccccagtcgcaacaatgcagagaaggagttgatgaaaaccatctacaagaccattaagcggggcggaaaagtcctgctgccagtgtttgcggttggcagggctcaggaactgatgattgtgctcgaggagtatatgcaccatgacataattgagaccgtacccatccatcttgatggtatgatttgggaagccacggccgtgcatactgctcgcccggaatacttaagcaaggagctgcgcgatcagatcctgcatatgagccggaacccattcatgacagagagcttcaaccaggtgcagaacaatgccgaacgcaaggaaatcgtggagggcgagccttccatcatcttgtcaacttcggggatgatgactgggggaaactctgtggagtacttcaagtggctctgtgaagacaaaaagaacactcttatctttgttgggtaccaaagcgaggggtcactggggcgaaaaatccagaagggacataagcagttaccctttgaggatgaagatgggaagaccagggttttcaatgtagagatggaagtcaagaccattgagggcttcagtgggcactccaatagacgacagctgatggagtttgctaaacgcctacaccccagaccggataagatcattacctgtcacggagacccttataagactgttgacttggctagcagcattcatcggagctttaaagtggagacaaagactccagtcatactcgatgccgtcaggctgcagtga

SEQ ID NO: 4194 - DNA, 1020 bp, synthetic construct
  source 1..1020: mol_type = other DNA
atggtgacatattccgagtccggggtggacattgaccttgaggcattgaccgtgtctaagctggcctcgaagctgaaacccacactcgagtaccgaaacatcattacggacagtggccactttgccgccctcgtcgagcttggtgataaggccattgcaatgagcactgacggtgtagggagtaagatcctcgtggccaaaatgatggagaaatacgataccgtggggatcgacatgattgcaatggttgtgaacgacatcctctgcgtaggggctgagcctatagcccttgtggactacttggcagtggaggagccagatccaaaggtggctgaagagattgccgacggcctggtcaaaggcgctaccgaatccaaaatcgccataatcggaggggaaacagcctccctgcccggtatcgtcaaggatttcgatctggcggggaccgggatcggcttcgtggacaaggacaaaattatcactggtgcagacatccaagaaggcgacatcctaatcggactgcgcagtagcggtatccactctaatggcctgagcctggctaggcgggctatattcgaagatggaggattcactgtcgatgacaagatgcccaactcagacaccacaatcggggaggaactgctgaagccaacccagttatacgttaaggccatcattgacctgctaggccagggctttaatatcaaaggactggcgcatatgaccggtggcggagttaacaacctctcaagactcaaggatggcataggctttgaaatcacggattatcccgagcctcaggatattttcaagttgatttaccagcagggagtgcctttagaggaaatgtacaaggtcttcaatatgggaatagggtttacagtgatcgcaagcccggaggaggcggatgctgtcctggaagccctcaacaaaaatattgagagctatattgtcggaaaggtgatcggcgaggagaagattgttgtaaaaaccttcgaaggcacggaaataacttattga

SEQ ID NO: 4195 - DNA, 990 bp, synthetic construct
  source 1..990: mol_type = other DNA
atgaatatcagtgttaataaggagcgagagctagtcaaagaaattctaacaaagatcggcgtgaaggagaaccaagctgacgtggttaccgaagccacaatcgacagcgatctgaaaggattcacgtcacacggcctgggaagattcccacagtacatcagaggcatcaaacggggccatattcagattgatggggaatatgacatagtccaggagactgagtcaatcgcactcattgacggtaagagtctctttggccagtacatcgcccacgaagcaatgagcctcgcaattgagaaggctaaaaagacagggatcgcggccgttgggacattcaatgccaaccacttcggcataactggatactactcggatctggccattaggaatgataccatcggtatcgtgatctgcaataccgagcccggagtagcaccgcttggcggtaaaaaagccattctggggacgaaccccgtggcgataggaatcccgtccgacacgtatattgcggtagacatggccacttctgtcagcgctcggggaaaactgttggaagctcaacgcaagggggaagagattcccccaaacaccgcaatcgataaggatggaaacccaacaaccgatcctgaagctgccctggagggttccatcctgccatttggcggagtcaagggctacgcactgagccttatgattgagatcatgtctggccccctcgtgaacgctgcctttgggaccaaggtgaccgggactgccggtgactataaggaaaactgtaacaagggcgacctgttcgtggctatcgatcctagcaaatttgtgcctatcgagcagttcaaggccgacgtggaagaatttgtgaccgagatacgcgaatccggggacacattcatacccggcgacctggaggtgaagaggattgccgagaacgaggtcaaggggcttgacatcgatgagaaactctacgacaccttagagaacaatttgtga

SEQ ID NO: 4196 - DNA, 393 bp, synthetic construct
  source 1..393: mol_type = other DNA
atggtcaaaccggtaaaaattcacgacaacaacctttgggataagttcgtgaaggagaccgaatcctattgggctgttttgagtcccggcaccgtgatcgccatctttatcggggaaacagacaagaattttctgctgattgagcggaaagagggaactgtcgagtctaaattcaatataaataactcgttgaacatgatggatactggtctctttttcacaatcacggaagaggatgcctccgacctcctcgacgacagctcactgctaaccaccttcattaaggaagggaagctgggcatattctgcctggtggacgattacgcaatggcggagaagggacttgatacactgttaagcgacctgggctttgcaccaagctgtgccatctga

SEQ ID NO: 4197 - DNA, 384 bp, synthetic construct
  source 1..384: mol_type = other DNA
atggaggaaaaaatcgctctcgccgcttgcagtgggatgtcaccaaatgggctcgtggccagggtggccgtgcacgatctggcgatagacgatcatgagattctatctatttgtatgggtagcaccagcgcaaatgtggaaggattcacacgcgtgcttgataaatatcccattctggcgatcaacggatgcgaaggcaactgcgtgggcaaaatcctgaaggagaagggggttgacatcgtaggagaactgaacgtcggcgacatcctggccgaaacggagtacaaggctaacgacgccgcacggctcgacgatgagggcgagatctgtgtcaagatcgtcaaggacatcatagaggacaaaattaatgagttgtccgagtga

SEQ ID NO: 4198 - DNA, 1917 bp, synthetic construct
  source 1..1917: mol_type = other DNA
atggtgaaaaggaatatcgttcttttagatattgattatataactcatgacgagaaggctgtcatccgcctattcggcaaggttaagggaggagagtctaatgacatcatcgctatagacgactctttcgtcccctacctgtacattctgcctctggaggatatagataaatgcataaaagacataaacggtctcaaagaggaaggagaaattgaatttaccaaactggagaaggtaaacaagaaagaccttcaggtgcctaaggaatttatcaagatgaccctcaaccatccgcaggatgttccaaaatacagagacaaaatttgggacctgaactctgttaagcagctgagggagcacgacattccattctatcgccgctacctgatcgataatgccttagttcctatggcggaattggagctcgaaggcgagcttatcgactcattcgagacagtcgacagcgacgacgaatccctggaaatccttaagctaagctgcccccccaagactgcaaacactgattttcaggagtttcgaatgatgagctttgacctggaggtgcgaaaccctcacggaatgcccaatccagatcaagatgagatcattatgattgggatcgacagcaacgttggtgtgagaaaggtcatctccacaaaaggggatgaatttgatgacgatgaggagatggacttcatcgaaatcgtggagacagagaaggagatgatcgaacgcttcgtgcagacggtcaaggatgccaatatcgacatcataattggatataactcagataatttcgacttcccctacctgagggatagggcaaagcggtgggaagtggatttggatctcggtgtggacggcagcgggctcaaattcctgcgccggggctacgccaactcggcggccttcagaggcctgctccatgtggacctctatctcgtgatgagaagatacatgtcgctggatcggtataccctcgagagggtctatctggagttctttggcgaggagaagatcgatgtgccaggggagcgaatctacgagttttgggacaacggcggggatgagctgaagaatctctttaagtattccctagacgacgtggtcgccaccttaaagatagcgatggaaacattgcctctaaaccttgagctgacccggatcgtgcgacagcccttcttcgacgtcacccggatgagcacaggccagcaagccgagtggtttctggtgagaaaagcttatgaggtggacgaggtggtgccaaacaagccgaacatgacgatgaataacatccgtgaacgcggcagcaactcaggaggctatgtaaaggagccggaaattggtttgcacgagaaccttgtgcagttcgacttcaagagtctgtacccaaccctgattatttccaaaaacatcagccccgatgttctggtaactgataatatttcctacaatgccaagtttgaagactttgagacaggctacgatgaaatcgacagtgtgctggaagagactccaagtgaggacctggatgaggaggattactacgtctgtcctgaacacttctttaagttcaaaaaggagccccaagggttcattccctcagccatcgaggacgtcctgaacgaaaggttcagggtaaagaatcggatgaagcaaaccgaagacccggtcctcagaaaaagtctggacgtgcagcagcaggccttgaaacgtttggcaaataccatgtacggcgtgtatggatttctccgcttccggtggtactccttcgaatgcgctcaggctatcacggcatgggggcggcagcacattaaaaaggccatgaaggaagctgaggacttcggatttaaggccatttatgcagacaccgacgggttttacgcaaaatacgtgcctgaaatgaaaaaagaatga

SEQ ID NO: 4199 - DNA, 1086 bp, synthetic construct
  source 1..1086: mol_type = other DNA
atggtccttctgggggccatgatcgcatacggcctgacacccatcgctaataagattcaaaccaagattaaatatccctcgatttccatcttcttagccttgatccttgtggtcatcccattgatactgctgttcgcatacgtgttttatgaaatcacagtttttgcagacgtgttcttcaattcgagtgacctcgcgggcatggatatcaacaacgccctaaacgccttcgtggggaatctgccagtggagttgcagggcttcatcaaaccttatatgggttctctatccactgggctggagagcgctctctcctatgtattggcttacacagtgaagctggtgaaaggcttttccaacgtgctcattcagctctttgtcttaatctgctcaatctactacttcacccgggatggcgaccttatctgggagaacatctttgtgttcatccccaacgagcataaggctttctttgataggactttctacgagatcgcgaatgtcctgaagagcatcttctacgggcactttttgacggcagtgatcattggtgtgatgggcggtgtcggatactacctgctgggctacaagtttgccctgtttctgggaataatcaccggaatattccagctgattccgatattcggcccttggattgtgtactgggctctcgccatttacgccatattcgtcgccggagacattgtgcaggcagtcctgaccgtgctgtggggattcgttctcagcttaagtgacatgtatatacgccccgtactagccagcaactatgctgacatgcctagcctgattcttctcgttggcttcatggccggcccgtatgtgtttggaattgtcgggtttatcctgggtccactcatcctgggggtgtgttatgcggttatcaagtctctcaaagaagagctcgaaaaggacaattggaactccggcgacgaagaggggagcgatgatggggatagtgaggacgtaaaagaaatctctgacaaccttgatgaagtttcagatgataagaaggacagcaatgaagactcaaaagacctggacctgggaattgaggagaaaatttga

SEQ ID NO: 4200 - DNA, 810 bp, synthetic construct
  source 1..810: mol_type = other DNA
atgaacgtgccacaggttctggagattaaacggatcatagaggaaactccctcgatcaagacgtttatttttgattggaccatggtcggtgaaaacattcccactccaggccagttcgtcatggtgtggaacttcaacgacgagaagcccatgagtatcagctacattgacatcgctaaaggcgaattgggaattacagtaaagaatgttggggaatttaccaatcagctccacagcctggaagttggagaccgccttggtctgagggggccatatggtaacggcttcgacacggacctgcgggacatgaaagtcctggcaatcggtggcggcgtgggaatggcccctatcgccagctttgctgaggaggccctaaaaaacaaggcgatagtggatgtggtgtgtgcagcccagaccaaggacgagctcctgttcgatgaaagactgaaggaaaaaggggcgaccgtgtacacttgcacggatgacgggtcctgcgggttcaaggggtttgcaacccatagggctatagagctcatggccatgaagaagtacgattgggctgtggtctgtgggcctgaggtgatgatgaagccgttgtacggcacacttgagtcaaatatgattgacggagagtactccatggaaagatatatgaaatgtgccatcggagtctgcggccaatgctgcgtggacaatacaggctggcgcatctgtgtggagggccccgtattcagtacagatcagatgagcgagatcatcgaatttggcgagttccaccgaaccgcctccggattaaaagagttctattga

SEQ ID NO: 4201 - DNA, 837 bp, synthetic construct
  source 1..837: mol_type = other DNA
atgctcaagaccaaactctgcggaattagtctgaaaaatcccctgatgctggccgcaggtgtgctgggaagccacgcctcttcgcttaattggatcttaaatagcggggccggtgccgttgtgtcgaagtccttcagcaaggagccaaacgagggatacaagaacccaaccactgtagcggtggagggagggatcataaacgcgatcggcctgagtagcccgggcgtcgacgccttcatcgaggaactcgaatctgtaaacagaatcaagggccggtcaatcgcttcaatctatggcgcaactcccgatgagttttcctatgttgccggcaagatcgaaagtctggtggacatgatcgagatgaacatatcctgtccgcatgcaatggaaggctacggggcttccatcggtcagaaccccgatctgacaagggagtttgtctccgcagtcaaggatacggtcagcgtgcccgttctcgccaaacttaccccaaatgtcacaaatattagcgaaatcgccattgctgcggaggaggggggagctgacgggttgaccctgatcaactcactgggccccggcatgaaaatagatattataactggaaatccaatcttggccaacaagttcgggggaatgagcggccctgctattaagcctattgccgtgcgatgcgtgtacgacgcttacgaggcaacagacatccctattgtcggggtgggaggcatccgcaactacacggacgtggtggagttcctatacgccggggccagtgcagtgcagataggcacctccattatgtatgaaggtcctgaaatttttggccgcatccggaaatga

SEQ ID NO: 4202 - DNA, 1281 bp, synthetic construct
  source 1..1281: mol_type = other DNA
atggagtactatattacccagtttattgcagggttcattgcttttgatgaggacctgaaaattgccaactataagctctttgacgatgagaatattgttagtaataacctgaagattgaaaataaggaactgctggaagaggagatagaactcatcaacgagctgtcctctgatgactctaccatcatcatagaaacacggaagagacgctcccaatacaaagagctggacaattacgagaacattatcgtggagacgccaaataaagggggtgagcacttacgtaataacttggagagcatcctattggaaattggctttctgaacgacgataaagagaatatcgatgacgtggaggaaaatatcagtaatttagaagagccaaaccaggagaaatactcggaaattacaaaaatctatgaggacatagcgtccctcaaagtaaaggagtcctcacaagaagaggacaaactactcatccaggcaataaacaccgtggacgacctggatgagtcaatcagcaaacttgtggaacggattcgggattggtacaccatctacttccccgagatggacactatcggatctaacgaaacatatatcaaactgatcgccgagagcgaaaacagggaggacatcatcaagaaccataaggagcactttgatatcgacctggatttcagcacgggagccgacatagaggagtatgaccttattatggtgaaaagcttcgcagagtctatctactcactccagaggtcacggaaggacctggaaaagtatatcgatactaagatggaggaaatcgcccctaaccttcgagatctgttgggccctacactgggggccaagctgatcgctcacattggcagcatcaagcgcctcgccacttatcctgcaagcaccgtgcagatcatgggcgccgaaaaggccatattcagacatctcaagaccggcgagcgaccgccaaagcacggcttgatattccagcacccctccgtcaggggggcgaaatggtggaaccggggtaaagtcgctcgcaacctcgctctgaaaattacgcttgccgttagaaaggatgtcttcagtggagaatacgaccccaagatcgctgaggactacctgaagaaggtggaagagattgaaaaagagaacccgttccccaaaaagaccagcagtcgacgcaagtcggaaaggcagatggagaaggataagaagtccaaaaagtacaagggaaacaagaaaaataagaagaataagaagagaaagaaaaggaaatga

SEQ ID NO: 4203 - DNA, 651 bp, synthetic construct
  source 1..651: mol_type = other DNA
atggagatatttctgaaagatcaagacattgtcacaaggaatctaaggcccggaatcaaggtctacgatgaaaagctaatccaagaagaggggagcgagatcgagtatcgcagctggaatccgcggcgatccaagttagccgcggcactgctgaacggtctcgaaagcctgaagctggagaacgactctaaggtactgtacttgggagccagtaccgggacaacggtgtcacacatcagtgacatcgcgtacgacggcttgatttacgcagtggagttttcacctgtgagcatgaaaaagctcattagactctcgaagcagcggccaaacatcgctccccttcttgaggatgccaccaagccaaagaactatctgaacaaggtggaaaaagtggatttggtctactgcgacgtggctcaggagaagcagagcgagctcttcatgaataatatgaaactgttcctcaaggaggatggccagggcctcattactataaaagcccgcagcatagacgtggttcagaaacccaaaaaaatcttcaaggaagaggagaaaaaactgaaagccaacgggtattccatccttgaaaagattaagctggaaccttacgagaaggaccatatcgcttttctggttgaaaagtccttctga

SEQ ID NO: 4204 - DNA, 1221 bp, synthetic construct
  source 1..1221: mol_type = other DNA
atggaaatcgtcctgtgcgtaaccggcagtgtcgctgccgtggaaactgtgaagttagccagagaatttaaacgtcaaggccactcagtcaaggcattcatgacccaagaggctacaaagatcatccacccaaatgccctggagtttgcaaccgggcaggaggttgtgctagagctcacgggaaagatcgagcacgtgaaatatagccaggcagacctcatcctcgtggcgcccgccaccgcaaacacaataagtaaattcgcgtaccggatttcagataaccctgtaaacacccttctgataacggcctacggccatgacaccccgatcgtctttgtgcccagcatgcatgactcaatgtacgacgctgtgagtgagaatgtggccaagctaaaggaagagggaattgttttcctgaatcctcgcttggatgagggcaaggcaaaattcccagctatcggggatatcgtcctcgaatccattcgcacggtgaaccttgaccgagtgaaaaagaacctcacagacgacagtcttgacgaaagcgagattgaagatctgaacatggaaatgctcagcaaaatcgccggtttaaatgtactcataagcttggggggtaccttcgaggagatcgacccgattcggggaatctccaataggtcctctggtaagatggggctggaattggccaaagaggcttataggctgggagccaatctgaaaatccttgctgcccaccatgaagtggagatacccaaggtcttcgatgtgattgacgccaaatccagcagcgtgatgagcgaaaagacaatcgaactggtgccagactttgatgtattcattgccactgctgccgtcagcgacttcgcgcccattgtgaaggaggattacaagatttctagctcgctgaacctgtccttggagttcgaacctgttgccaagatcattcaccagataaagaagattaacccagacatattcctggtgggctttaaggctgagtataacatccccgaggaaagaatgatccagtgtgctaaaactcagatgcaggacgcaggcacagacctggtggttgcaaacgatgtttacaagaagggctgcgagtttggatcggattccaatgaggtgatcctggtcagtgatgagattaaaaaagtcgggctgaactccaagtctgagatcgcgaaatcaatctttaaggagatcgccaataaaatttga

SEQ ID NO: 4205 - DNA, 564 bp, synthetic construct
  source 1..564: mol_type = other DNA
atgaaaaagattatcgggattatcttcatcatcgtaattttggtcatcggagggtctctggtgtataaaaactacaaggactctcagaatacggtcgataagtcccaagagtcgatagagatcagcaaaaacggcattaccatgctaattcccggcgattgggtggaggcgaagagcgagtccaacactacggctatcgcagcggcagacccggcttctaaggactccgccggtttcagcagtgtgaacataaacattgaaaagaaaacaagttataactccctgtcgtatgagtttaataacaattacaaagccctgggacgggactcaagctacgatatcctctacgaaggaaatgtgtccattgccggcaccgaaggtatggaggccggctacacctcaagtaagaccggctttctgaaacagcacaaggccatctggttcaagcagggggatgacctctacgttatcctgtgcactgccccacagagcaagttcgcagaggaagaaagcacatttgactttatcataaataaccttaaattcaacaattcaacaaactga

SEQ ID NO: 4206 - DNA, 735 bp, synthetic construct
  source 1..735: mol_type = other DNA
atgaatcaagacaagatgaagctgatgcagattctgaagaacctagagagagattacaacgatgggctgatctccgaagagaagtacatctacctctcaaaccagtacaggcataagatcgacacaatcgatactagcaaccgaatacggaccatgcagggcaaaaagaaggtctctccgcgcccttattcaaagtacgaggacgctaattaccagaaaagcagggacgaggacgaaagactcgtggaaaaatacatccacaacccagaatcttataatatcaatagccggggcaagaaaaccaaaagcggaggaactagcccctggtacattgccctggccgtgattttcttgcttttcgcgtttggggctggcattagcttcggcatatttagcgagaacacaaactccgatgtaggagatatcataaccgcaagtgcaaccattaatgacacagccttccccgaggtcaaacagacctacaagtacaatcgcacgtcaaattatacgaaatactcctcaaactcttattcaagcgactacagctccgggagctcttataactcctacaactcctatggcggcagcggttattcaagtggaggctctggttattcgagcgggggtagcggctatagcagtggaggctccgggtactctagtggagggagtagctactccagtggaggctccggctattccagtggtgggtccgggtcggtgtcgatcgactga

SEQ ID NO: 4207 - DNA, 828 bp, synthetic construct
  source 1..828: mol_type = other DNA
atgataaacgacaaagtggccttcctgggccctcagggaacattctcccacgaagccgcaagcctgctcagcgataatctgattagctactgttccatccagagcgtaatggatgcagtcgagcgaggggaatgccggtacgggctggtaccaattgaaaactctatagaaggccccgtgagtctaactctggatagtctcatccataattttgatctgaagattagaaatgagataatcattcccatcaatcacaatctcttggcggcctctgatatctcagtggacgaggtggagaacgtctactcgcatgcgcaagccctcgggcagtgccagccttatctggagaggcacaatatggtcgcccattacaccctgagcacagcagctgccgctaagcacgtggctgaaaccggggaggacgcagctatcggcacgctcaaggctgccgaactgtacgacctgaaggtcatagacacaaacattcaggagaattataacaatgagacccggttcgtggtgttggacactgaagattccccaatcaccggaaacgacaagacgtccatctccttctcactgtttgaagacaagccgggcggactttatgagttactgggttactttgccagtgagaacattaacttgactaaaatcgagtcgcgcccctctaaagagggactcggccactacattttctttgttgacctggagggtcaccgcctcgatgagaacatcgccaaaatcctaaacaaccttgaggacaacacctcattctttaagatcttaggcagctatccagtttatagcagggaacttttcgactga

SEQ ID NO: 4208 - DNA, 819 bp, synthetic construct
  source 1..819: mol_type = other DNA
atgaagatcaaaaatatcatgtcagagaatgtggtcagcatagataagaacctcaatatctgcgactgcctacggatgatgtacaaggacaacttgagcagaataccagttaccagtaccaacgaaaacaaaaagtctctggtgggcatcatcagcgagaaggacatagcgaacaagctgggaagcgtcaaatatggtaatctggccccctcgcatttccacgtatcgaccgtaatggtaaaagacctgattacggtcgacgccgatgatgacctcacagatgtggcgaatatcctaattgagaagaacatcggggccattccggtgctgagcgacggcgagatggtggggattgtcactaaatccgatttcatatacctttgtaaggcaaaagcctatgagaaggttagcgtgaaagatattatgacccccgacatcatctcaatctccgccaatgaccgactgattcacgctcgcaaggtgatcatggactctggcgtcggacggctcctcctgactgaggacaacgaactcgctggcattattactagcaaggacattgccaaagctttggtgtcctttaggaagcacacgcccgagaagcatatggcttccaagattaaggaactggtggcaggtgattacatgtccacaaacgtgcagacaatcagtgaagatacaagtatcccagaactggccgacgcaatgttggagaccggatacaacgggtaccctgtcgttgattcaaacgatcagatcataggcatcgtgacgcagagcgaccttttaaaactgatctatgagatggaaacccaatga

SEQ ID NO: 4209 - DNA, 885 bp, synthetic construct
  source 1..885: mol_type = other DNA
atgaatcgggggtctgttgagcacgaaagcaaggtggccgaaaatgagggcgagatcatgactcttgctaagaaagaagtcatcagcatccctcagaccaagacaatcaaagaggcggccgaaatgatgatagagcatgaatttcgccgactcccagtgactcaacccgggagcaataaactgcttggtatcgtcacagcaatggacattctcgatttccttggaggcggaagtaaatttgacataatagagaagaaacacaatgataatttcctggctgccatcaacgaccaggtcaaggagataatgacgcgtggcgtgatttcggtgggccccaaggccacgattagggaatccgtcacaaagatgaccgagaacgggattggatctctgccgatcgttgataaggagggcaaactggtgggcatcgtcaccgagcgcgactttgccctggccctagcaggctccttgaccaacgagaccgtgggggacctcatgatcaaagacgttatcacaactacttgcggcaccccaattgagtcctgtagcaagattatggtgcggaacaacctcagacgcatcccagtggtggaagaggacaagctggtcgggattgtaacaagcaccgacattctgcggttcttcggggacaaggagatgttcgcatccatgacctcaaacagtggtttggacgtgttgaagaggcagatcagcgatatcgtgaaacctaatatctcagtaacggaaagctacgtgaaattaggagatctgtgcgatctgctagctgagaagaacattggtggagtgcccgtagtggatgataacaagctggttggaataatcacagaaagagacatcctcaacgcggtcctgagtaaaaagtga

SEQ ID NO: 4210 - DNA, 1113 bp, synthetic construct
  source 1..1113: mol_type = other DNA
atggcggaaataaaaaaacaggtgagaacaagggatttcatcattagtactgacggactgttattcgcgagcactaactacattcatcccgaggatcgcatcatttcgttcctgcgctacattccagacgagaacggggaccgcgaaaaggatggcatcaaatacagtaaggtgggcagcgatgaggcttatgcctacctgagggagaaccacccggattacctgtacttctgcgatgtgacaaatgttgaaatgatgggggttccgatcgataaggtcgaacggatcatcaagcccgaggagagacttaaaggtctgagggagacctacatcccaattatcaatgagaagctcgagaagggggaggatctcgattataaggaggaattgatgagcaagctaatcgatctgtccgacttttttcactatatggctagcattgactacaacgaccttggcattagcggctcaatactgcctggcctgcagaaggccgggacctcagacctagacttcgttgtgttcggtctggagaaccatcggaacgcaatcaaggcctacaaagaaaacaaggacaaaccagtctacattgaggagctcgacaaggaaatcacactgaaccgaatcaatgacgacttctgggactttgtctacgacaaacgaataaaggacgatagcctcaccaaagaagagtttgcttggtacgaagagcggaagagtaatcgcggcctgatccgtgaaaccctcttcgatatcttggcaaccaggaactatgatgagatcgaaggaacgtggggcgacacagtctatgaacccgagggatttgccaaagtcaactgtacaataaaaagcgcactgggggcctttgacaatcctgccgtatatacgatcgaagatgtggaaatccttgagggacccgacattgaaatttccgagctcgcatccctgacgcacacctatgctggggaggtgatcgacggagaggaagtggtggcccggggaaagatagaaaaggtgctcaagaatggtgagttcgagaaatacagaattttggtgggcaccactcgggagtccctgaatgagtatataaagttaagagagagccctgtatga

SEQ ID NO: 4211 - DNA, 4497 bp, synthetic construct
  source 1..4497: mol_type = other DNA
atgaagtacaaaaaagagctgatcttcatctgctttatcatttgtatgttaagtatggctagtgtgtgtgctagtgacgtgaatgacacatacataaaccagaacgacctcaagatcgataatcaagataactgtattaattatgaaaaagtcgtgtatacagaggagaacctggagaacaatctgatttcaacggaagactctctcgaggatagcaactcaattgagccgtcggactccttcaagcagaaaaactcccttaatgaaggtaactccgatgaacgtttaaatccagagatagacgtggctttgaatagtatccacgttaacgaaactgctgaggtcaatgtgaccgtgagaaatgcgagcggatacgtgctggtctcagtggacgaccagtccttcaataaggaccttacggactatcaggctcgattcaatatcaccggcctgggctttggaaatcacaatattgcagtctattatgggggggacgacaactacctgccaggatttaaattggaaactatctctgtggaaaagtaccaaacccaaataagcgagattgaaatcggtgaagtgtactacggggaagatgccatcatcgaggtcagcgttcccaatggcgttgagggggacatcacaatcaaaatcaacgacactctccagacagtgattacggaggccattcatgatggtatggccttattctcagtgtctggtctggctgtaggcagctattctctggacgccacctataatggaaatgactactacgagaacgatacggcgtccgccgagtttgaagtgaaaaaagccgatccgaatctgagcgtggtatcctttgaatgcacggtgtatgacaatgcgacaatactggcgtccatcaacgaagagatccacgacgagttcgtcaacatcaccgtgggagatgagaagtacgaggactgtcctattgaagactacggtatgatcgcattcacagggggcgttctctcaaacttttcctcttaccgcattctcatagagtatgggggcaatgagaacttcgagagcgctatgatcgaggccttcgtgactccgaaaaagatcactacctatggcctcgatatcatcgcccagaatatttccatcaatgatgatgagatcatttccgtggtcgtgcccgaccacgtggacgacgtggtcgtgtgggtagacgggcagagctaccgcaactgctccttcgagaacaacgtggctgtctttaacgtcacaggtcttggcgagggggtgtatacagtgaccgctacagtcaacgacaccgagttcgaccataagaacttcacaagcatctttaccgtaagcaaggttctcccttcaataggcatctcaatcaacgaaacggagatatacgtgggggacaatgtgaagatcattgtaagccttccgatcgacgtatctgaaaatgtctccattgtctttgacgaccgagaactgtcccagaagccagtggatggcaacgccaccttctacattgattgcctcagttatggcaacaagtcagtgccagctatctactatggtgatgagaagtaccggaccgcggtggaatcgattaacttcacagtcaacaaagtgccttcatttctaaatgtggctgtggagaacatctcaattagcgacaacgaagtgatcaacttttcactggccaatgacgccagcggcaacattacagtgattgtcaatgacgaaacttacatcgttgcggtaagcgggggaaagggtacccttacagtgcccaaactgaatcagggcgtgtattctgtgaatgctagttataatggtgatggcaaatacctcccctctctaaacaattcggagagcttcaaggtgctggtcaacagtgggcaaatggagattatcgacgagcggaacaacaccgttagcgtctacctctgggacggggccacaggaaatctaagcgtgaagatcgatggcaaagtctacaacgccacggtggtcgatggctttgcccaggttgtgatcagcaacgcaagctatggggctcaccatgcctatgtgctgtacgaggacaacgaaagcgacttgaagctcgagtccgtcgttgacgtgtttgtgccaaaatacctcagccccattggcataaactcctcaatccttaaggtgggggacattggatacattaacgtgaccgtgcctatgggggcaagtgggaacataagccttgagatcgacggcaaatcgtacttaatcgccatcgacaatggaattgccgagtttgaggttgagaacctgaccgcaggggataagacaatattcgtcaagtactccggcgataaggtctatagccaaaattcaacctctgaaagcctgaccgtattcaagcaggagtcctcgacccactgctctattgaggatatctctgtgggcgacgtggcgcagatcaaaataaccggcccaagtgacgtgctggggacagtgattgtcatcataaatggaagcgagtacactgcaagcattagtaatggcgagggaatactcaatgtctataatttgcagaacggtgactatgacatcgaactgagctatctggaaaactcaaaatacttgtcctcggaatacagggacaacctcagtgtgtctaagattcagacagccatctccagctctaacattgtgtgccagtacaattatgaaggatatctgaatgtcagcttaaaggacattaagggcaatccaatatcctgtgcagagctgtctatcgatctggatggagtgaagaacctggtttccgatgtcaatgggcaggtaaagatcccaacgaaggatttggacgcaaatgactattctgtgctgatcagtttcgccggcgacgaaaaatacctcccgtccaatgctaccgtgaacgtgactgtaaacaaggacattcctcagatcatcgcttccaacctaatcgcagactataaatcagacgattacctcattattggattggaggacagtcaaagcaatcccctggcgggcttcgatttgtctattgccctgaacgggatcgacggggattatgatgtgtactcaaccgattccaacggtattgtgaaagtgcctatcaaggatctggctgctaacgactacatcgcctcgattgtttttaagggcaatgcaaactacgatgctataaattccactgttaaggtgactgtggaaaaggccctttccagcctttttgccctggacctcgtgacggtgcatgagtcggatgattacatgatcatcgctctgaaggattcttgcggcaatcccctggtcggcttcgacctgtctgtcgatctgaatggtatcgatggggactatagtttcaacgaggtgtactcgaccgattccaacggtatggtgaaggtctctacaaaggacctggacgccaacacttatgacgtaaaggttaagttcgatggaaacgaaaactacaccgaatcaaacatcactggcagcatcatcgttcgcgaggacataatcatagttcctaatgcaagcattgcctttaccgccaatgatagttctgtctcagcgattctgtccaacctcgatggagtccctatctccaacgcctcgctggatatcagtgtcaatggcgacgagtccacactgattactgatgcaaacggcagggttgccatcaaaataaacggaaacagcacggtgattgcaagctacaaagacgaaaacaacctaagcacgaccgggtacctgaacgtcatcgtcaaagacaacataactgtagtcgaaaagaacaacaccatttatgtaaatcagaccgtggaggtgcccgtctacatcaaccagactgttgaggttcccgtctacatcaatcagactgttgaggtgcccgtctacgttaacgtaacccctaacagaactgcaaccatgattgtttacaataacatgacgaccgttgccgttgcgaaggtggatggaagagtgggagaatacttctacgtgagcttgaaggatgccaaaggaaacccattggcaaataaactggttcagatcggattcaatggaagggtttatgatcggaccacaaacgcgacagggggcgtgggactgcagatcaaccttggtaacgaaggcaagtacacgtttgccatttgcttccttggcgacgataattataccgggtcctttgaggtggccctcattacagtcagcaagcacagtcccaagctcactgcacccgccaaatcattcaaggccagtgctaagactaaatccttgaccgctaccttcaaatccagcaacggcaaccccatcagtggcaaaaagctaagttttactgtaaatggtaagacctacaccgggacaacaaacgccaagggagtggccactgtcaagatctctctgaacaaaaaaggcacctatagttgtaccgtgaaatatgccggagataccatgtacaaggcaactacgacaaagttcaacgtaaaaatagtgtga

SEQ ID NO: 4212 - DNA, 939 bp, synthetic construct
  source 1..939: mol_type = other DNA
atgctgagtatctcaacaataaagacatatatgttttgccctctgaaactctactttcagagcgaaatagacgaaatctatgacgaggaagagtacttcgttccaaagaccttgaaagacctccgtatcgacattcaagacctgttgcacaagaacctcagactggtaaaaaaggatatggagctgaaagagatcgaagagaccctgtccaagggagtgttcaatcagattgaaacgaccttcgagataatcgaggagctaaacgaaaccaaaaaagagaaggaacggcgggaaaagtctagcatctacaaggattcgaacatcgagtttcttgacgaagaccgacagattctcaatgcatccctggaggataacgacggtacgctggaggacctggataatgaggaggatgagatcaagaagctgaaggacgaaatcatcgatgaggtgaacctgaatctaaaaatcctcagcctgaaagcctcacaagctatgaagaacctcgagaaggacggaaacgaaatccagaaccttttcttccagagctccatgtacaacactctcattagggatttggggatagatctgattggcgtcatcgacaagatcgaggtggagaagggcaaatatttcccaattttactgaaaacttccaatcccccgagcaaaggggtgtggcagagcgatgaaatcgagctcattgcaaatgccttgctggtcgagggggaatttaatacatacattactgtgggattcgtcgagtatttaaagatcggcgaacgccggcccatagtcattgacacctttgccaggaaaaagttctttaagctgcttaccaaaattaacaagatcgtggaggacggcgagattccccatgtgaaaacaagtgttaagaagtgcagaaactgcgaataccgcgagctttgtgaaaaggcgtga

SEQ ID NO: 4213 - DNA, 660 bp, synthetic construct
  source 1..660: mol_type = other DNA
atgtcctcgatctcactcaccatcacaacgaaggaagagaaaggagtgctggatgagatcactgatgtgctcaccagccacggagtcaacatatcctacgtgcatctttatgtcaaggaggacgtgggaacactgaacctggaacttgagaatatcaacgagctcgatgaactgatccgggacctgaaatcaaaggacttcattttggacatagagatccacggcagcctaaacgacattttcggtaagagggttctcatctttgggggcggggcacaggtctcccaagtcgcggtaggtgccattaccgaggccgatcgacataatatacggggcgagcgcatcagtgtggacacgattccgctggttggcgaggcaaatatcacagaagctgtggaagctgtgagccgcctgcctagggtaggcgtattggtgctcgcagggtctctaatgggggggaagatcaccgaggctgtgagaaagatcaaagaagaacacgaggacattatcataatcactttaaatatgccaggcagtgtgaccaaagaggcggatctgattgttacagaccccattcaggccggcgtcatggccgtgatggccgtggccagcactgccgttttcgatgtcaagagactgaagggaaacaacaaattttga

SEQ ID NO: 4214 - DNA, 264 bp, synthetic construct
  source 1..264: mol_type = other DNA
atgaaattcgtgatacgcccttatcatatgatgagtctcggagggtatattgtagaatacgattttccatacagggacatcatcatcgtcaacaagacatccgagcacattaaattcgagattccggtcttcgatgagagctggatcgaagaaaccagagcactaggcctggaggtgatccccgtgcgaaaggaggacagctacctgaatatgtaccggaaggcgcacgctgatctcgacgcctttaaggccaaactggactga

SEQ ID NO: 4215 - DNA, 999 bp, synthetic construct
  source 1..999: mol_type = other DNA
atgtcttacgaaatcagccttatcagtattctcgaagtcgtcctcacactgataatagccctgttcatcggtgtgttgattcctggcatcgaaagaaagtacgtgcaggcacgcatccagcaacgcatcggcccccccgttaccagccccggactgtgggccagcatcaagttcctgtacaaggagaatatccagccaaatagtatggcgcccggcctttataaggctatgccggtgctttgctttattgtcgtattagccatattcctcgtcctgatgccttataactatcaattcatggcctttagcagtctgatcgccattgtgggatttctgaaggtggaggaggtggcctatgtgcttatggggtccttgtctgagtctgtgatgtccgctaacctgcggttccccgatcacataaagggggctgcccggccagactcactcgtgtcatccattgaagacatcagttcaaagagatccctgaggatgattgtatttggtagcttcccactgtacttggctctctttgtcccggcagcgctgagcaaaagcatctacctggccgacattgtcgcctaccagcaggccaacggccctttcctattcacgctggcagggattatcggagcagtggtgttctttgtcgggtatatgatcatcctgaatgagtacccgtttagctacattaaagcaaaatcggatgttattgaggggccctatatggagcttgcttccaaatatcgaagctttgtttacgtgactaggggctttctcattttcaccttgggcctcgtattttcagtcctattcctaggaatccctccagttctcttctcttggaagtttatcgctgctgtgatcgtatccctgatcttgcccgtgataatggcctccatcagtgcattcagcccaatattcacaaacaaacagctgtaccctaccatcttactcgtttcggcgatgggcgtgctggcgattgtgattgccctgttctga

SEQ ID NO: 4216 - DNA, 1176 bp, synthetic construct
  source 1..1176: mol_type = other DNA
atggaggaaaagaaagccaaaaagcaggagattatagaaacagagattcaaatgggtaccgtgcacccggccgctttggagccttatcgggtgcggtttttcgtagaagacgagatcatcaaagatgccgagatcactattggggtgaaccacaggggcattgagcgggtcatggaggggctccctgtcgaaaaggctaatatgctgactgagaagatatgcggcatctgttccaattcacatacatggaacagtgtgcgaacggccgagaagggtctcggagtcgaggtgccagatcgcgccgtgtatatccgcgtgatcgtcggggagctggaacgcctgcatagtcacctcctgtaccttggtcacgggtgcgagaccttggcgcatgagaccttctctatgcgggtgttctacattcgtgaaaccattatggatcttctcgccatgatcggcggaaaccgtgtgcagtacggctgtagcattatcggtggcgtccgacccagatgtgaattggacgacaacagaatccaaagaatcctcgacggcatggacctagtggaaaagaacgttctagacttcgcaaatcgcttcgtcaaggacagcgtggtagcaagccgcatctccggcacaggatacattcctcaggagcaggctcttaaactcgcggtcagcggccccactctgcgggctaccggggtcaaacgagacttaagaaccgatatgtatgaatacgataactttgactacgatataatcacccaagatacctgcgatgtacaggcgcagctgctgatgagagtgtttgagatatttgaagcaatcaaaatcgtgcggcaggccatcagggatctgcccgagggcaaaatcacagacaggagctgggaaatgattgacaccgacctgattgaaagctacatcgaggttccaagaggaacactgtaccactcctatgccattgaggacggaagggttcgccattgcattatcaggacgccctcaatgtccaacattggagccatgcagtatgcttgtatcgacaatcacataactgacgggcagctgtgtatcgttcagtgcgatccatgcttcacgtgctctgatagggcaatagaggtgtatgatacaaactacaacaagttagacaagagtatcctgaagtcgaatatccactga

SEQ ID NO: 4217 - DNA, 447 bp, synthetic construct
  source 1..447: mol_type = other DNA
atgagccttaaaaccctctcaagaagtaaagccatacacatcatgctggtttacacgggaggctgcaatggctgtgacatcgaaatcgtcaatgcggtgttatctccgaaatttgatatggagcagtatggggtcttcctgacttggaacccgcgcgaagcagatatcctcgtcgtgacaggacctgtaacctacgacaacaggaagccactcgaagacatctacaacgcaataccaaaccccaagctggtggttgccgccggctcctgcgccctaatggggggcgtctataagaactgccacggagacattcctagcgaggagattgagggccccgtggagaacgtgattcccgtggatgctaaggtgcccgggtgtgctgtacggcctcaggacgtgctggccggtgtcgtggcagccttgccacatctgctgaatgcggattga

SEQ ID NO: 4218 - DNA, 669 bp, synthetic construct
  source 1..669: mol_type = other DNA
atgaaagatgtaattaaaatcatgctgaacggaacctataccaactttaaacgcatcctctttgccagcgacagggtaactgatatggagctccggaatgcgatcctgaccggcacggtggaacctgacaagaaggtggatgagcaggcttgcattggctgtggaggttgtgccaacgtctgcccgactggcgcagttacaatgaagcccctccagacgccagtcaagattaaggaggggtgggtcaagacagaagtgccagagctggacccctttaaatgtgttgtgtgctactggtgccatgacttctgcccaatatattccttcttcgaagaggccgggaccatccaccccgggaatgtgggggagatcaacatcgacacagctgaactgcttagcgaacctattaagatctcgcaggaaaagatctcattcattgcccaatacctgtctgacaagagcctattgagcgagaacatcgtctcagacgcagatgagatcgagaatgtgggagccggcctggaacgagtgtccaagataaaggacatacaggataatattaacgagaagtacgagaaagacgccaaaagaagttctgcattagcggatgacagcaacgagagttctagcgagtccgatgaaagttccaaaaatgagggcggtgaatga

SEQ ID NO: 4219 - DNA, 1461 bp, synthetic construct
  source 1..1461: mol_type = other DNA
atgtatctgacaacgaataagtgcgatgggcaaggagactgtatacggaattgtccgactgaggcaatacgctttgtagataataaagcctttagctgcatgtgttgtggtgcttgcttcgaagcttgccccaaccatgccatatttaaaaataaatacggaggttacgtggtcgatagggcgaaatgtaatggctgcggtgtgtgccagttcacatgtccaattgaaagcattcacattgataacggcatcgtgaaaggcatctgttcaagatgtggcgtgtgcgaggacgtctgcagtcggaacgccaggaccgacactgacaacctggtgcttgacaagcagaaagtcttgctcaactccatgaagatggttgctaacacggtcggatatcgcgcaggggtgaagaagatcgaaaacatgaagctccccgtaaagtctgataagtctgcagaccgggtgtgcgtgagcaccgacatggagaaatgtgtgaagtgtggtagatgcgcctattactgcccgacccgggccatagaggtcatcatccaggatgagggattctgtgtggggtgcaagatttgtgaggacctgtgcccaacgggcgccctaaaggatggccaatatgataaaaacctctgtaccctctgcttggcttgtgttgaaaactgcattaatgatgcattaaaggttaaggactttaagattgtgcgaaacataaaagacagctcgatggacaatcctctgtgctcaaacactaaagggaccattgtcagttgcctcaactgcggcctgtgtagggaaaagttcgacagtcccgccttgattaagaaggagaacgccctgagatacgacccttcacaggacaaggactccgaagagaataatgagaaacgtcttgaagcgatctacaactgccccgttagcaccctgagcgaaaatgaggacaataagctcttcgggtactgcgtgtcctgcggcaaatgtacccaggtgtgtaacgagcaggcccgctctttccagaccatctcttgggatggggaagtcagtgacgattgtatctcctgtggtatctgcgccgagctatgccccaaagaggcaatctcccttaaacgcggaacaatcaacgttgatctggacaagtgtatcatgtgcgagacctgtggaatccactgcccaactgatgctattcctaagacaactagcacaaaatacaagatctccggcggattcaactacatcgacgagaacctgtgcgtgaaatgcggcctgtgtaaggacatttgcggcgaagaggctatctacacagtggacatatcaaacgaggatgtcaacctggggacgaagaataaaaatctgcgatttgtagtagacgatgataagtgtatctattgcggggcgtgcatgaatatctgcccatcgaagagctttattttcgaaagagagttcaatagggtgaactga

SEQ ID NO: 4220 - DNA, 279 bp, synthetic construct
  source 1..279: mol_type = other DNA
atgttcgtcctcgcgaacctcttaattgggccgataatcatctcagtgatctttgggttcgtactaggtagccgcatccatctggacgagaaaaacagtttcaagtttaccgccagcggaatcatcgcccttattattggggcactgatcgtgtcctacggcatcggccagttcccctactataatgatctcccaatagccacgacatttctgggtgctttgttcggccttctgattggcagcgcactgctgggaggacgggctaagggcgaccactga

SEQ ID NO: 4221 - DNA, 525 bp, synthetic construct
  source 1..525: mol_type = other DNA
atggctgaggacaaggacctcaagaccacaaagaaatctcccaactggaataaggacgagagcagtcccatactgaagatcatggtgttgccgatctcattcattattgccagccttggtatcatggtgatcttgggcggtcacataactcctgggggcgggtttcaagggggagccatgattgccggcgctatcatactgtccgtggttgtgtacacggtcaatggaagtccactgaaactctcgcatcggttcatcagcctgctggaatcagtcggcgctcttgcttatgtgctcctgggtttggccggactcgcactcaccggcagcttcctgtacaatgtgggcggcaacctgtacgggctggttccacaggcgatcgccgcaatcttcaaatatcctgatttaacaaacgccggaatggtcccctacctgaacatcgcagtcggactaaaggtacttgtagggctatccgcaattgtgattgccttttcccagtttaaaaagctggcggaggaggaatga

SEQ ID NO: 4222 - DNA, 396 bp, synthetic construct
  source 1..396: mol_type = other DNA
atgtccgacaaaaccagcatcaggtcgatactgatggtagtggccacaattatcttcgcctccagcctgttcgacgccctgtacggattcaagaacctcattcagcccggcataagtttggtgtataccgctattgggacccagcttgctccaaacatggttacacttgtcgtctttgactggcggggattcgatactctgggggagtcactgatcctcgtgactgccgtgctggtcgtgttgctgatctttggaaaaggcaagatcctcgataagaacgtgaacgcagacaatgggacggccgatagcaatctcacccacgaggcagatctggaaatcggcgattctgacctggaactagacggtgcggacttaaatgagggcgatgacgagtga

SEQ ID NO: 4223 - DNA, 336 bp, synthetic construct
  source 1..336: mol_type = other DNA
atgaccttgtatcagaagttcttagactcggtgaaggagctcaaatccagtttcagcaaagatcccaccacgatgaacaatgtttcaggagccatggccgccgaatttcttattctggtgggcctaatcctggctgctctcttctttcggcacatcaacatcgcggcatgcattgtggtcgtcatcctcgccgcaatattgttcttcacaaacatgccactggccagcaagataaagagcgaacagtccgacagtctggagaagatgctgttttacgtactcatcgtgctgggcatcctgatttctgtgatttactgggggcttaaatacgtctga

SEQ ID NO: 4224 - DNA, 1482 bp, synthetic construct
  source 1..1482: mol_type = other DNA
atgaactacctgattccactcatggtcgttattccaatactcgctgctctgattgtgaacatcctcggcggtaaagacaagacggtgaaggctttctccattatcgtaggactcgccattcctatcatcgcgatcctggccgccattggggtgcagtacttcggcggccacgatcccggcctgctggcaaactcactgcccagcaatctagtgggaacccttgtggcaagctacaacaccggtatcgtgtatatcttcgacaacatagaaagaatattcatcttcctcatggggatcgtcgcattcctgtccatctttacctacttcacagagaagaaggaagtcagtgggccgtacttgtacctcatctttatgggccttgcctccgtaatcgccctcctgctatcgaacgatatcttcaacatgtatgtgttctttgagataaccgctttgactcaggtggggattattgtagccagcagcacggaggacaattacgaaatcgccctcaaatacctgatcctcgggtccatcggcgggccgatgctgttactgggcgtggggtttgtgctgggaacaataggtagtgtgaatatcacagacatcatctatgccatcagcaataacttcgtagatccttactcgccaggcctggttatcgggtttgccttaatcttgttcggctggctatactccgcaggattgcctccgttccacactataaaatccgcggtttacagtaaggcccggcctaacggtagcgccatactgcagggcttctcagtgctctgcatgctggcgtttggcatcgctatgtataagatatttgcttacatccccggcttcaataccgccataattgtgttcgccattctggcgatggtgttaagcattgccatgtctgcaatggaggtagacttccggcgaatgatcgcctttctggctgtcggggaactgggattcatcgctctcggttttgggattgggactcaaatgtccattgcagctgccctcttccaggccgcgaacgaaatcgtcatcacagcaatgctctttattggattcgggtcaatctattatcttacaaatacttcagatacccgcaaactaggcggactgattggagtggacagccttatgggagttatgattttgctgggcggctgcgccttggcgggtgttccacccttcaatggctttgtcagcaaactgatgcttgtgcaggccgctctggaggcaggctataccgagcttgccatcctcgcagttattgtgagtgtggtgatcttctttacatttgtcaaggccttccatagcgtcttcttagagcctaaaccaaaggacctgaagtttgttaatgagaagattcccagggtcaccgtctttagcgtggctgtgctgcttataatctgtctggctctgggtctgttccccaacattgtcacggatgtgtttattccctttgcaggaggattgatctga

SEQ ID NO: 4225 - DNA, 369 bp, synthetic construct
  source 1..369: mol_type = other DNA
atgatcatggatattcaactggcttccctcttcgcctcaggcgcccttattatcatcgggctcattgccgcaatcttcattgacaacatcataaagaagataatcggcattgcctttatcgaggagggcgtcaatctattcctgatctgcctcggatacaaggccggaggggtggtgcccatcttcctgcctggcatgacggcagactggtttgcacagaacagtgcctatccactgccgcaggctctggttctcaccagcattgtgatcggtgcctctaccttggcggtaatgctggctctggcgatggtcctttaccggaaacacggaacattaagcgctaaggaaatattgggggacgaaaaatga

SEQ ID NO: 4226 - DNA, 231 bp, synthetic construct
  source 1..231: mol_type = other DNA
atgattgaatacatcataatcattgtcgcggtgatcagcgccatcatcgcactgctgcaggaggacctgctgaaatccgccattctcgttggcataagcggcttcttcatcgcagtgctattccacctgctccttgcgcccgatgtggccctcacacaggccattgtcgagggtgccatcgtgccagtatttatcgctttggctgtgtataagaccaagggaggggcttga

SEQ ID NO: 4227 - DNA, 567 bp, synthetic construct
  source 1..567: mol_type = other DNA
atggcgctggggctcgagggcatgaacctgatcaccatcatccagtcaatcctgctgattattagcgccctgatcattatcattgccgcaatcgggattctaaggatggataaagacatgcccaatgtggtgtacgcacggattcatatcctggggatgatagatgtcgccggaataatcgcattcatcggactcggccagccgttatttgccctcatctatatattcttggctccactactggctcacgcactcgcgaatgcttacttccacgccgaagatgacctgaataacccagtccttaaccctaacctgctcaacgaagaatctgacgagtccgagttggaggagtcggttgatgtggccgagcaggacggcgaggagcccgaagaaagcgtggatgtggccgaacaagacggtgaagactccgactccgaggagacctcagagaatgtagaggaggacagtgatagcgaagaggaagctagcaacgaagacgtggataataagacgacagaagaggatgtcgagaaccttaacaacagtgagggcgacgacaatgactga

SEQ ID NO: 4228 - DNA, 267 bp, synthetic construct
  source 1..267: mol_type = other DNA
atgataatggaactgttgctgattagcgagtgtttcctcatcatcgcactggtagtgttcttatttgcctccatgcgcatcattacatacaaaactgtctcaatggggcttataggtaccagcagtctgaccctggccattaccctcattctaatctgcgtgggcatgatgtggggcatcgagttcttcaaggacatcgccctcgtgctgcttttgctcggaatcgtcgggacgatcgcgtatgcaacatttctgcggagggcttga

SEQ ID NO: 4229 - DNA, 315 bp, synthetic construct
  source 1..315: mol_type = other DNA
atgttcctgtcccgcatttattatgcaattgcgtacctagtcgtgcttattttggagattatcaaagccacaatagatatggccggacggatcttcaagggcgaccagtacgatcccatcgtcatcgatattgacaccgaactgaaaaggccaatatctcaaacaatcctcgcaaacagcatcaccctcacgcccggcactctgagcgtagatctggactcagagagtcaggtgataaaggttgctgtgatcgccccaagagacgtgaaggacatcattccgtttgagccttacatcaaggggatgctggaatga

SEQ ID NO: 4230 - DNA, 738 bp, synthetic construct
  source 1..738: mol_type = other DNA
atgtcatcctacaagggccacacaatatttgcctttatcctgagcttgctcatgttttatgacccctttgcaatcgcactggccgttatcggagcaaacatccctgactttgaccatgagtttaagcgcaaccacgtgctcatcattatctccattggaatgatcctgagcatcttcctgtacctgctgaacctgccaatttacctcgggttgataatcgccttgctcgggctgattttcctcctgtcctctcatcggggctttacccactccatcttaggtgccgtagtgataagcattgccatattcctactggtctactttggcatggatctgtcttcttactttaatctgaacactattacgaatattccccttaactacgtgatcttagtcggcatccttatattcctggcggtcctattcttgaacaagcagctcgcctcgattttcatcctgctgatgcttttcttcatcaccctcgtttatttcggaatcgtgcccgtgttcaagatcaacgtgtatagcctgattttcagcgtgttcttaggtctattcagccacatgatcttggactcattcagtccggctgggatcaagcccttcagtcctttcagtgataggaaatgctataaaaaactgggcctcctgctctttgcgctgataattgctctttacttgattctgtttccaaataaacttgatttctaccttaatctgctcccacacttttattga

SEQ ID NO: 4231 - DNA, 747 bp, synthetic construct
  source 1..747: mol_type = other DNA
atgacccaggaaaagaacaatctcgatctggatcatatttcttatgagaccggcggattcatcagtgcgaacaagaacatccttaataatctgaatctaacaaaaaacaccaaatatatactgaaagagtcaataaaaggaacccctataatcaaactgggaactaactatcccaaggtcatgatggtggccggcatccacggaaatgaactggctcctcagatttcggccctgaacttgatcgaccagattcatgacttggacctgttaggaactgtgtacatcgtgccatttgcttgtcccaaggcaagcatgctcaattcccgctactttgacggtaaggacctcaacaggacaagccacatcgaggggtccgtgggggaccttatcctgaaaaaagcagttgagcttgaggtgagcgccatcggcgactttcacagcagtgcccccaacagtaatccaggtaaggaaggggtattttgcacggaagttcccacgatggccagctttagactcgccgatttcatctcaaaggtgacaggcagcgagaagatagtctactccagcgcgggcatcccgttcaagggggctctggaggatgaggccaacctaaagggcattccagctgtgacctgcgaggtcctctctgcaatcggctatgcaaacgaacggatttgctaccggtccattattcagatgaaggccttcctgcaatacttcgggttcttcgatcgatacatggaatga

SEQ ID NO: 4232 - DNA, 1176 bp, synthetic construct
  source 1..1176: mol_type = other DNA
atggaaaaagtggtgctggctttcagtggtggcctggacacaaccgtgtgcgtgaaactgctcgaggaggaatacaactacgaagtagtgactgcgtgcgtggatgtagggcagccgcaggaggaattggaaaagagccaaaattctgcagacaacataaacgcaggaaagcactacatcattgatgcaaaagatgaatttgccgaagagtatattgcccgagggatcaaggctaacgcggagtacgagggctatccactgagcacagctctggcacggcccctgatcgccatgaaaatcatagaagtggcggagaaggagggggccacggctattgcacacggctgtacagggaaaggcaatgaccagttccgcttcgaagcaatcatcaggtccatgtctgactttaaggtcattgctcccatccgggagatgaacctgacaaggactgaggagcaggcctacgccaaggagcatggacttaacctatcctatgataagatctactcgatcgatgaaaacctgtggggccgggccatcgagggggatgttctcgaggaccccgccaatgagccacctgaggagatttatgagtggaccaagtctgccgaagatgccaaggacactcctaccaaagtggcgattgagtttgaagagggtgtccccattgccatcgacggagagataatgggtctcgtcgacctcatcaacaaggctaatgagatcgcaggcgagaacggtgtgggccgagtcgacatcatagaaaacagaatgatcgggcttaaaagccgtgaaacctatgaggtgccgggagctaaactgttgattgccgcccaccaagctttagagcagttggtcctgaccacggacgagctcaggttcgcccagtacatgagcggactgtatgccgacctcgtctactcagcgctatggcaggaacctttaagagaagacatcgatcaggcaattgaccatatgcagcggcgcgttagtgggaaggttgtgatgaagctgtttaagggctccattcaaccactgtcccgcgagtcacccttcagcctgcacagcattgagcagataaccttcgaagataaggaaacggaacagagtgaggtagagggaatgatcaagtaccacggccttcaggctgccaattaccaaaaactcaatagatga

SEQ ID NO: 4233 - DNA, 663 bp, synthetic construct
  source 1..663: mol_type = other DNA
gtgccaaatacaggcagatgcaaggagttgctcgtcgaagacgcagtggtataccttaggcccagcgacaaccccaatcggaagacgaaatacagcctttattatgtggaaaacaatggtgccctggttgcgatgttctctcaggaggccaacaaaatcgtgttcgatgccattaataagaataaggtgaaggaactgtccaactactcaatcatcgagagcgaaaagaccatcggaagcagccgcatagatatttacttagcgaaccataagagcaacttcaaggataatgccgactccaaatccatcggcgaggactccaaagaagatattattgatgagacttacgtggaggttaaatcagtaaccctcatcaaggatggggtggcccagtttcctgatgctccgacagacaggggccgaaagcacctggaagagttgatctcgctcaaaaaggagggaatacgggctgtcgtgttctttctagtcgagcaccctaatggaaacagtttcagaccaaattgggaaaacgaccccaagtttagtgagaccctggtgaaggcatacgacgagggggtcgagattctggtctataaaactcgcaacgacttcgagggcatcgaactcgttggggactgtctggactttaacctgaacaaatga

SEQ ID NO: 4234 - DNA, 1569 bp, synthetic construct
  source 1..1569: mol_type = other DNA
atggaccctatcgacatgatggccacagattataactgtgagtacctgggcctgtcacgcctgtgcctcatggagaacgcagggaaaagtataagcgacgagatcgccatcctgagcacctacaaatacagccggccagtgaagatagtgatcttcaccggcagcggcggaaacggtggagatggctttgtagccgcacgacaccttctgaaccgcggctttgaggtggatgtctatgccctcaacactgcagaccagatcaagtctggtgacgcattggataaccttaagatcttaatgaacctggagccgagggtctcccgcctctctgtccaattcattaaggattcggccgatctcgataaaatcaagcttgacaacaattccccgtgcattgttctagactgcttgctgggaacgggcatcaagggaaagctgagggaaaaggtgagaaagacagtcgaactgatcaatgccatcaacggcctgagagtggccatcgacgtgcccagtggtctggaccccctgactggcgagatagccgacattgccgtcgatgctgattataccgtttgcttccacaaggtcaagaccggggttaagctggccggtgaagggaaggtggggggcatcataacctgtgacattggaatccccatcgaggctgagctatttgtggagggcggtgaccttctgcggctgaataatcggccctccagctctcacaaaggaaacaatggtaaaatccttattgtggggggcagcctggactactacggggctcccgcaatctccgctaaggcctccatcgccacaggagccgatctcgtttatatttacaccccaaaaagcgcagcccttccaattaaatcattctctgaagactttattgtaaaggaagctaaaggggactacctctcaattgatgacctggacgatattctagaaatggcatccaaggtagacgccgtgctaataggtcccgggagcgcgcaaaatgaggacacaatgaaattattcaatgttttggctatgaaaatcgacaagcctctcgtcctggatgctgatgccctcaaattggtggacttttcgttaatcaacaaaaaggaagatattatcataaccccacattacagcgagttcaaatccttctttaagaaccagattccacgagacattgagaggaacctcgataatattgtaaatctgaacgatgacagtgattttgtgaaggtgaacgacaagatcgatgctctgcagagcataacagcgtccttcgacggatcagtgatcctcaagggccagtatgatttcatcttcaacaagaataagctcaaaatcaatagaaccgggaaccctggcatgacggtgggcggaacgggggatgcactggcgggaatcgctgtcagtctgctctcacagggccttgacagttggacttctgccattttggctccttacctgaacggaaaagcaggcgacttggccatggacgctcaggggtacgggttcggagcccaggacctgactcagtatttgggcgcggtgatggcgaatctgattgactga

SEQ ID NO: 4235 - DNA, 1161 bp, synthetic construct
  source 1..1161: mol_type = other DNA
atgaaaaatagaaatgtatggcggatcatcatgagtgagattaaaaaatatatggaggatttaaagaaaaataaaaccggactgaaaggaatcctcgtcattatcctaatattcgcgtacggaatactggggagctactacataatgaacctcaacataaacaattctatctactatacaatcatcaccatcgccactgtaggctacggcgacataatccctgtgaccccgctggaaaagttcttttccaccagcttggccctaactgggattggactgatcgcatacatattcaccattatcattactagctttgaagaaaacttgcacgacatccgcagtggtcgtcacatggagaagaggttggccaagatggaggaccactatatcctctgtggtttcggaagggtgggcaccgcagtgtatgaagaactgatgaaaagaaaccaaaaggtcataattattgagaagaatgaagacaagctggaggacatcgaagagacggagaacgtggtcccattcaacgccaacgctacagaggacaagacccttaagaagctcaatattgacaagtcactgggggtgattgtcacaacgggcagcgacgtagacaatctcttcattgtgctcacaacacgggaaatgaacaaggacgcttggatcatctcacgcgcgagcaaaaaggagaacatcaaacgacttaagcacgctggcgccaacaaggtcatctcccccgaggtcagcggcggcactgacatttactttgccgcagtgcagccaaacctggtgcatatcactcagaagcacggcattgattatcttgagagggagtttgaaatcctgaaaaagcacaattgccatctggaaaacatcgaataccacttcccagggatcaagacacccgttacccggaccattggggtgttagatgaggaagagaaggatcacttcatcgatatggttaaaaacaatcccgaggtccatgaatcgatggatgtgatgtacgagaccgtgaacggagtgcattcccactggatctccggtcctgataaaagtcatgttgatatggtgattgaggagctgaagaaagaaggcaacctgctgggggttaatctcgactttaaggagattaatgagtttacgaaacagttcaaggagtga

SEQ ID NO: 4236 - DNA, 567 bp, synthetic construct
  source 1..567: mol_type = other DNA
atgaaggagtacctgagcgagaccaaatccatcgattacatgaatccgatcatccaggagaaggttaaagaactcaaggagcaatcctcagacgacgcagactacataaaacgcgcattcctcttcgtgcgggatgaaatcccacacagttgggacatccagaccaacacagtctcgaggaccgcctccgatgtcctgaaaaacaagacaggaatatgttggactaagagctgcctgcttgcggccctgctccgagccaatgagatcccctctgggatcagctaccagctactgaccattggcgaagacgacagcttcggccacatgattcatgctctcaacactgtgtatatggatgacctagataagtggattagaatggatgctcgcgagaatgtaggtgatgacgacgaggaatttagtctggataaggactatttagccttctcaccccgggaagaatttggggaggtggattatcaggacaataaccctgacctggacgagaaattgattaacctcctggagaagacggagaaccttttggaaatggagctggacttttga

SEQ ID NO: 4237 - DNA, 888 bp, synthetic construct
  source 1..888: mol_type = other DNA
atggagattaatggcgtggaaataaaagaaacatacgccgaaggcttcggaataaaggtgacaagaatacttgtcactgccgcaacggctaagcttgcaaaaattgccgctacagaagctaccgggtatgccacctctgtaatcggctgccctgctgaagcagggattgactgttttgtccccagcgaatgcacgccagacggacggccgggctacgcaatcatgatctgccacgccagtaaaaaggctctggatcacgagctaatggagcgaatcgggatgtgtgtcttgactgctcccacagctgcagcattcaacttactcgaatctgaggacgagctgaaaaccgctttcaagctcaagtacttcggtgatggcttcgagaaggattgctgcattgatggacggaaggtgcattcgatcccaatcatgagtggcgacttcatagtggaatccacgtttggatttaaggccggcgtggcgggcggcaactttttcatcctcgcgaaggaccaaatcaccggcgtgaaagcggcgcagatggccgttgccgctattcgcaatatccccggcaccatcacccccttccctggagggatggttgcctccggtagcaaggtgggatcaaacaagtacagcttcctgccagcctccaccaatgagaaaatgtgtgtgactctgaaagaccaggtggacagcgacattagggaggatgccgagggtgtatttgagatcgttattgacgggctggatgaggagtccgtcaaaaaggccatgaaagccgggattgtcgccgcctgttcagtggacggagtgctggagatcagcgccgggaactttgacggtaagctcggggcatatatcctgaacctgcacgatttgttctga

SEQ ID NO: 4238 - DNA, 1272 bp, synthetic construct
  source 1..1272: mol_type = other DNA
atgaaaaacaagaaactgataattttcctgatctttgggctggccatcatggccgcaatgctatacttcatcgggatagatcaggtagtcgacgcgctcaaatactcgaacctttggtttgtgttgctggccgtgttattacagattttcacgtatttcctctacacatggcgctggcagatcataaacaagagtgccggcatgaccttgggaatctggaagctgctgcccatggtgctcgtaagcctggcggtgaacaacatcactcccagcggacgtggtggcggagagcctgttcgggcttatctcctggccaaggaggggcactacaagttcgaagacaccttcgctaccgtaatcgccgatagggctctcgacacatttccatttgtcatcctcgcaattctgaccatcatcgccattattttcagcgtcagcttacccgtctactggatcgtcatcctcgttctgtgcgttgtgggcatcactgcaatcgttatcctactgctttacgtctgtatcaatgaggcattcggcgtgaggctgacagaatggatactaaagattaccaaaagattctataagaattataacgatgcccttgaaaaacgaattgtggaggctgtggctagttttcagtcgacaatgaacgcattgatccgggataagaatattatctactatgcactgcctctctccttcattatttgggtgtttgagatcctgagagtttacgtggtctttctagcctttggtgccaaggtatcccctataatcatcggcgaggtgtttatactcgcttcccttgtgggaatggttcccctgcttccgggcggcctgggggccattgacggggtgatgattttgttctattcccgctcaggaatcaccgccagcttgagtgccgccgcaaccgtcgtggagcggtcaatcagtttcggaatgacgacaatcctgggtctgatcttcctcatgaagtacgggactagcattttggacgcgtcattcaaacttgctgagagcgagaaagctgagaatctggaagagatcactgaagacgagcagaagatactggaccaactctccgaagatggcgataaatccgaggactctgacgaaaatagggaagaagcggtgctggaagtgctggacggcgagccaagcatcgaagtcgtggacgaggaaccgaccattgaagtcattgacgacgagccaacgattgatgtgctggatgagaaggaggaggccatagatgagaaagtgaagaactga

SEQ ID NO: 4239 - DNA, 1491 bp, synthetic construct
  source 1..1491: mol_type = other DNA
atgaagaggaaatacattacgaaggccgatttgttcatcgtgctccactaccttggatacattatgcagggacttggcgtggtacttatagtcccaaccctggtggcgctgatctacggcgagtacgaccccatcgctccctttatgatcccttgctttgtgagttttgtcctgggcacggctttcagtaagaaattcaaggactataccaagctgaggctgaagcacggtatgctaatatcatcctttgcatggctatgggcctcccttatcggcgccagtatcatggtcctgtcactgggcatccccttcgtcgacgccatctttgagaacatgtccgcatggaccggcagcggaatgacttttttcgtgaacgttgaggtattgccgaaatccatcctattcttacggagcctcgagcaatggctcggggggttaggaattgtgattatctttatcggtattttaatccgagcagggactgccgcctcccgcctgtacaaatcagaagctcgcgaggagaaaatcaagccaaacatcacaaacaccctgagaaaggctctcgaaatctatctcatctacaccgcagtgggcatattccttttcatcctcgctgggctgcccatctttgatgccattaacatcacattcacaagcatcagcacgggaggcatgtcgattaagaatgcgaatgtgggcttctaccaggacagcatagtctacctcatcagcatgtttctaatgatcttgggtgcgaccagctttaccatccactacaagattgtaaagacaaagggcaaagccctctttaaagatgtccagttccagctgctgattaccttgatcatcgttgctggggccttctttatagcgacgaataagatggtccctatcgaagaactctttaccattgtttccgccgtgaccaccacaggggcaaatgtggttgacccccatgtgctggccacatggaacgggtccacattgattgttctgatggtcttgatgctgattggcgggagctcaggatctaccggagggggactgaagctcatccggattattaccgtgctgaaaggcatgaacctgactgtgactaacctcgtgagccctgaagggcgcgtggtcaataccagaattggtggaaagaagataaatgagcgggagatcaaggaggcctctgcatatatcgtgacgttccttatgttcctggtattcggctggataattatgacaatgtatggctatgacccattcactgctctgttcgacgtgatttcgattcaaagcaataacgggctgagtactggaatcgtgtatggcggtctgccattgccgctgaagctcactctgattttcctcatgtggataggcagactggaaatcatacccgttctggtgctgttccgtactttttatggtcttgtcaaccctaagcgaaggattaagcagatgaaaaaaacaaacggaaatgataaaaaaaccaactga

SEQ ID NO: 4240 - DNA, 675 bp, synthetic construct
  source 1..675: mol_type = other DNA
atgtacattgtgattatgggtgggggtcgggtggggctctccctggccgaccggttgatcattcatggctacgacgtcacgatcattgaaaataatgacgagctgtgtgaccacgcaagcgaggagctcgacgcaatgattatctgcggaaatggcacggatacaaagactttggaagaggcgaacatcgaggaggctgatgtttttgtggccaccacagggaacgacgagagcaaccttctgagttgcatcctggttaaggaatataccaatgggaagatcatcgccagagtcagcaatcctgaccacgaggaggcctttaaaaaggtgggaatcgataaggtcatcagtccggagcgaactgcggcaggattccttgaaaaagtcatcacaaggcccaacgtggctgacctgatggccttcggagccggcaacgctgaaatactggatatgaccatccagaaccccaaggtattcggcaagaaggtgtcggagttttccccaaccaaggattacataataatctcaaaaaacaacgacaatcacgaactagaaatcccccagccagatgatatattaagcaacggcgacaaaatttccattctggtgaaacgcaacgccttcgaaaaagctgagaagaaattcatgggggcaggcggcctcttcggattttga

SEQ ID NO: 4241 - DNA, 648 bp, synthetic construct
  source 1..648: mol_type = other DNA
atggagaaaatcaagaacgtctactgtatcgaaggactgatggccgattcaaactcgtatttgattgataacaatgacggcgatggggactacaattatatactggtcgatacaggcactggacagtccaatgcgttcctgttctcacagttaggtgaaattggcgtcaaacccgaggatatcgacctgatcgtgaacacccactgccattttgatcacgttgggggaaatgactttttccccaacgccaaaatcgcaatccataaaaaggacgctgtggcactaagggacccagacagcgagctcacagtgagcagcctctttggtgccattgtgagaaagcacgatgtggacattgaactggaagagggagacaagatagctaatttcgacgtcatcttgacgccgggccacaccagtggaggcatctccctgtgggacggcgagatcctcatttgcggcgacaccatcttcgccaacgggggcgtgggccgcatggacatcggtgggagccccattgatatgaaggacagtctgatgcggcttaaggagtttgatgttgaatacctgcttccagggcatgggccttgggtaaagaacggtaaggagcacgtgaaaatgtcctgcctcaacatgggaatacgatga

SEQ ID NO: 4242 - DNA, 339 bp, synthetic construct
  source 1..339: mol_type = other DNA
atgcgggctccagccagcggcggcgccactaaaaaacccctaccggacgtggtggcgggaaacggcaagatttacctggccatcgaggtaaagacaacgactaaagataagatttatatcgaccacccccagatcgacgccctgatagagtttagcgatattttcggggcaaccccatacttgggtatgaaattcaagtataccaaatggctgttccttgcacctgaaaacatcctcaagaccaagaatgggaactacaagatagagaaggactactgtctggaaaaggctctcgaactggacgagatctgcggattcgatacacaggtcaaattttga

SEQ ID NO: 4243 - DNA, 1032 bp, synthetic construct
  source 1..1032: mol_type = other DNA
atgaactttctgaacgaaaaccactaccgggactccatgaacgagatagacagcatcgagactctcgagctcatcaataaagccaactctctgtcgctaaagaagggctatacggagataagtcttgaaagggcggtttttctaagctggtggtgcgataagggagactgcaaattctgctatatgtccacccagaaggataaaatcaaagatcctaagaaggcccgacgtagagtgaacaacatcttggctgaagcggagatgtgcagtcgcctcggttggaatattgaatttctctcaggcggctacaagtcattcaccacaagcgaaatcaaatccattgctgaaaacatccactcaattacaggggatggggtttggttaaacaccgggatcactgacgagcttgaggagtacgggaaggaaatcaagggcatcaccggggccgtcgaagccgccaatcctgaatttcagagggaggtctgtcctagcaagcccttgaatcaaatctccaatatgctggacaaagccggcgacctggggttcaagaaggctattacgatcatactgggtcttggagaatcgctggaagatgtggagtatctgaaagactacattaaagagcataagatagaccgggtgatcttctactccctgaacccccacccagagacaatctatgtaaacagttcccagccagcttctctctactatgcaaatgtggtgagtagcattcgcctggcattccccgacattgagatcatttgtggaacatggattgacaatctggcaaacattggcatcctcatcttaagcggcgccaatggaatcaccaagttcccactgtttaagatgttcggcacaaaatacggaaagagggtggaggaggaggtcaaatggactggaagaaccctgaaaggcacctttacggataaagataagctgggtcccgaaaagagccagataaatccggagttcgaccaatatatcaagcggtacattaaagagtctttgaagaacaagtaccagtga

SEQ ID NO: 4244 - DNA, 1356 bp, synthetic construct
  source 1..1356: mol_type = other DNA
atgatgtgtggactggagattcacgtccagctggaaacggacagcaaactcttctgcaactgccctacaaactatcaggaggcccctgccaatacaaacgtttgtccggtctgcctcaaccagccaggggccaagccctttcccaccaatgagaaggctattgagaacgccttaatgatttcgctgatgctaaattgtaagatcgataagaatttcacctatttcatgcgcaaacattacgattaccctgatctgccttgcggatatcagaaaacatctgtgcccataggatatgagggcgagttgaatggcgtacgaatcagagaaattcatatggaagaagatccaggccagtacaagcctgaccgaggtattgtggactttaaccggtcaggcatccccctcatcgagatcgttacggaacctgacatgcactctccagaagaagctcggaacttcctcaaggagcttatcagagtactgcaatacagtggcggcgcacggggagaggggactatgagagctgatgtgaacgtgtccatcaacggcggcaatagggtggagatgaagaacatcaattccatcaaaggggcgtacaaagcactcaactttgaagtcatccgacagaagaacctcatgaagcgcggagtggaggtcaagcaggagaccagggcgtacctggaatcccagatgattaccgtgtcaatgaggatgaaggaggatgccgatgactaccggttcataccagaccccgacctgccacccatgaaaataagcgacgagcagatcgacaaggtgctggatatcatgcccgaagcgccgcacaataaggtgaagcgctttgtaacagactatggcatagatgaggagagcgctaaggtcctgacctccgagctggacctcgcgcagtgctatgaagaagtggctaaggaagtggaccccgtgtttgccgccaaatggatgagggacgagcttaaacgtgtccttacatacaacaaactggacttcgccgacagtggaatcctagcagatgacctgattgagctgttcaacatgttgcaaaataaggaaatcactaccaaagcaggtcaaagagtcatagagcagatgccaaatagcaaacagaccccgagggaaattgccgaggagatggggttgattggggtggtgaaggatgatgaagttcttgccgctgccaaacaagccctcgaggagaaccctaaggcagtggacgattaccacaatggggagaaggctagcttaaacttcctgatgggtcaggtcatgcgcctgacgaaaggtaaggcagacccccgcgagactgttaaaatcctacgggacttgctggaggaatga

SEQ ID NO: 4245 - DNA, 852 bp, synthetic construct
  source 1..852: mol_type = other DNA
atggagggaaaaactatggagcaagagaaggccgctgtgcgggattacatgaccaaaaatgtaattacagtcaggtatgactcgctcaacaacgacgtgatcgccctgatgaaagaaacaaagcacgacggttatcccgtggttgatgaagagggacatattgtggggataatcacggcgtacgacctactcctcaaagattgggagaccgaatacgtcaagagcataatgtctcaggaggtcatcgtggcccgggaggacatgcacatcaacgacgcttcccgggtgatgtttcgccacggcatcagcaggctgcccgtcgtagacaaggagagacatgtcaaaggcatcatgaccaacacagacatcgtgcgctcccatatcgagcgtagcactcccactaaagtcagtgcattccgcgagacgatggaaaagctttacgatatcaaaaccaccctgacacgagaacaggtcccagttgataagatcaaaccaacacaggacagggtttatgctgatgaacttcagggcagaacctacgagttggaaaaggggctggcggagccgaccatcgtggtgaagactggcgaccgatacattctggtggatggccaccacagagccgtggcaaccgtacaactgggactggataagatcgactcatatgtggtggacttcaaccaggacattaccttaggtatggaaaagacggccgagaagcaggggctcaagaccttcaacgacattacaatcattgacgatgatcagcaccctctgattgccttgactgaaaccattaagacggcaaatcagaagcaaaaaataagtgagataacaaagaataaaaattga

SEQ ID NO: 4246 - DNA, 288 bp, synthetic construct
  source 1..288: mol_type = other DNA
atggacgaaaaaatcttgcgggaggtctataacgtgctggaaagtcggagggacagccccattgattcatacacgtccaacatcatgaaagacagcgataagaaggcagaagacaagattctggaaaagattgccgaggagtgcggggagaccatcatcgcgtccaagaacgatgagaatctggtgtacgagtctgtggacctgatattccacacactgctccttctagtctacaaaggcgtagagtttgacgagatcctcgaagagttcgatcgacgcagaaaatga

SEQ ID NO: 4247 - DNA, 648 bp, synthetic construct
  source 1..648: mol_type = other DNA
gtgtttatactcatctttcgagatttcgacccagagattcatgatgtctacaaggtggcagaactgatctacgatgtggactatagaacctttgttcacgtcttcaaatcgaaggaagagggtgtggaagccattaaaaacagactcacgtttgaatttgctgaggacagggaggatgaaaatgagctgttctatctattctttgatgatgaggacacagaagagaaggaaatcatcggaatgttcaatggaggtaaaggagttcagcactccctgttcaaggatatcctcgagcaattcaaacacctgaagttcagtgaggccttagggctttcaaaggtctcttttatggataacttcgtcctcgtagacgtaggggacgacgacttctacatttgcgagttggccatctgctccaatcagcgtggcaagggctatggcaccgaggcccttgaccagttgattcagctggcgcgggacctgaactgtaagagggtggtgctggacgccgacttccggaacgacggggcatttcgcctctacagcagcaaagggttcaaggtgtttaacaagaaaagcttcggattccccggcaaaaagaggggcatgcggaatatggaactgatactggataacgctcgcgagtga

SEQ ID NO: 4248 - DNA, 816 bp, synthetic construct
  source 1..816: mol_type = other DNA
atgatgaaaaagattctcaaacggctcgccgaaggcgagatttcaatcgaggagtgcgaaactctgcttagggcggagaatatccgtcaactggatgacatcgccaacattgatatctcccgcaaggacaggaccggtttccctgaggccatccttgcggacagcaaagactatgaagatcttctagccattgtcaagggcttctttgacgacgaatttgacctaaaggataacattatcatcacacgactgtccaaggaacggtacggcctgctgagtcaggatttgtcgtacctcctcgataatggcatcaaatttgactacaacccgcgcgcaagaatcctggtgatatataaggacaaactcgtggacttcaatccagaatacggtaagattgggatactgacggccgggacctctgacatacccattgctgaggaggccaaggtcatcgtagagcaggggggatgcgaggtcctgagcagctacgatatcggcgtggctggaatccacagattgtttcccaaaatcgcctacatggtggaagaggacgtgagtgcattcatcgtctgcgccggaatggagggggcactcccatccgtggtagctggactggtggacgttcctgtcatcgccgttccaacctctgtggggtacggcgtgggagcagatggcaaggctgctctgtattccatgctgcagagctgtgctcccggattgtcagttgtcaacattgataacggcttcggtgcaggggtgtatgcgttaacaatagtgaaaaacattgccaagaaggtaaaaatgagcaaggagtga

SEQ ID NO: 4249 - DNA, 2448 bp, synthetic construct
  source 1..2448: mol_type = other DNA
gtggagagtattaaggtcctggtggagggcatcgtccaaggagtgggctttcggcccttcgtgtatagaatcgctaccgagctggagctggtagggtacgtgagaaacctggggaacgtagtggagataattctgcagggcactgacaatcaattagctgactttatctacaaactccagaacgagctgcctccaatcgcgaagataaataatttgcgtactgaagatatcgaaatcgactccccatatactgattttacgatcaaggagagttcagacagcttctctgggacttcggttatcccgcctgaccttgccatatgcgacaagtgcctagaggaaatcaacgacccccagaaccggcgctacaaataccccttcaatgcctgcacggactgcgggcctagattcacagttatcgagaacgtgccctatgaccgggacaagaccacgatggatgacttcccactctgcgatgagtgcgagatagaatataaaaacccactggaccgccgttatcatgccgaagccagctgctgtgaggtctgtggaccgagtttaaaactaatgaaaaacgaaaccgaggaaggcatctccaccgataaggagggaaatgaaattaaggccatgaaacgaacggccatcgataccgagtccaatgaccccttaaaggacactgccaggcttctggatgaaggaaagatattcgcaatcaaagggattggcggtacccacctggtggcaaacgtgaaggatgagaaagctgttagcaccctgcgtgaaaggttgggccggaagaaccaggcgtttgcagttatgagtcccgacattgagactgtgaggaccttcgcaattgtctcagatgaggaggagaaaaccctgctttccaaggagcgccccatcgtaattctgaaaaagtcaaaggattacgactttgcagagtctgtgtccccccgacttcacaatatcggcgtgatgttgccttacgcgcccctccatcatctgctctttaatgaaacagacagccctgcctacatcatgacatcagctaatgtccccggtgagcctatgatgattaccaatgaggaaatcttgcagaacctggatgaaatagccgattattacctcattcacaaccggagaatcctcaaccggtgcgacgacagcgtggcccgattccgcaacaacgaactggctttcattagacgcagcagaggatacacaccagagccgtatgacctgaagggcaagtacaccgatatcaatccagacttcgacaatctgaacatcctggcccttggccctgaactggacgtcacctttacaatcctgaagaacagtaaggcctatgtctcccagcacatcggaaatacaaacaaataccggacctatgaatttcttcaggaggctataaagcatatgatgaggatcaccaagacagacagcttcgatgcaatcgcctgtgatctccacccccaattcttcacgacgaggctggctaaggagtatgcggaaaagtacgactgcccattgattcccgtgcagcaccaccacgctcacggaatctccctgctgaacgaccattatgatgataatgatctcaatgaaatgattattatcgctgccgatggggtgggctacggtgctgacggcaactcttggggtggggagatcctctacaccgacattaagggatttgaaaggatggcgtcccttatgccgcaaaagatgccgggcggcgacttatgtaccaagtatcctgcacgcatgatggcctcgatcctcagtaacccagaaagcgactacgagaacgagaaatacacaaaggagtacatagaggagttgctgaacaacaattacctggactcctttaagcatggctcggtggagataaagagcctatttaggcagatggagaccaacctgaatgttgggattaacacaagtactggtagagtgcttgactccgtgtcaaccgcactccatatctgtgatgagcgcagctatgaaggggaggcttccatgaagttggagagctatgccttcgagtacaaaggtgaaggctctctggatgacttcccaatcatcgtgaaagagtatgaagatgagaatggaaaacggttgattctcgatactacagctatcctacgatacatcatagacaaaatagaagagggggaggacctccacaagattgcagcggcaggccagaaggctgtcagcattggactggccaaactcgccatcgaaagcgccaaagagaaaggtattactacaatcggggccacagggggagtcttctacaacgaagccattaccgattacatcaaaacgtacattgaaaaggaaggcttcgatttcattcagcacattaactcatgtcctggagacggttctgtctctctcggccaggccatcgtagcagggactaatctgaataacttttga

SEQ ID NO: 4250 - DNA, 498 bp, synthetic construct
  source 1..498: mol_type = other DNA
atgaagcggaaagtgattatgatacttgccattttgctggccgtgggaatgaccctaacagccgtgagcgcggaggacagttggagttttaacttctccagcgaagagaactccgacggcggatcaattaactttgagaacggcaaactgacaatacaggggatcgagtttaccatcccagacggttacgaaatggatgaaagctcaaagaaggtggctgaagacgctgaggatttcgatgcaaaatattccgcatgcaaattcaccaagggcgatgacgagatcgtggtgaacgtcttctttacggacggggacttcgagaacctcagcgcgaataatgccgaccaggtcgagaagaccctgaacgacattaaaggtctctacgaagaaaataagtacggcgacaatactcccacattcacttatatcgaggatgggaaggtcgttaagatcaatgccccgaacgatgaaatcatcgagtcggtaatgggaaagtga

SEQ ID NO: 4251 - DNA, 843 bp, synthetic construct
  source 1..843: mol_type = other DNA
atgaaaaaatcgtcaataattattttttttgcagtcttcgaaataatagccatcctcctcttcattaccctgaatgatattttctacctattcaacttcacatacatcggcgcctgtctcagtatcgggctctatttgtacaacgtagacagcaagtattccaaatacgctagaaactttatccagttggccatcggactctatatgctggtgtatctggggattatctcccgcgaaaacatgatgatcgagggattctggtattatctctttctgggggtcttcgaggccgcagtgatccactatctcgttgccaagatcctgggcccattcctctttggccggggctggtgtggatacgcctgctggacggcaatgatcctggatcttttgccctacaagactccaaacaaaaaccttgaccatgagcgcaagaacttcggtttcatccggtatattctgttcattgcttccctgattggtgtgggattgctgtttatgatgaatgtgccgaatctgagcaccgtgatgttctacctgttcatagcgggcaacatcgtgtactacaccgtgggcatcatcctggcctacgctttaaaggacaatagggctttttgcaagtacatttgccccaccactgtctttcttaagataggggcaagatactctttacttaaggtcaagtacaagcgagaaaattgtatcagttgcaataaatgctatagggtatgtcctatggacgttgatatctgcaacaatgataaaaacaagaaaaacgggacagagtgcattctgtgcctgagctgtgccaaggagtgtggcaatgacgcgctgtttctatga

SEQ ID NO: 4252 - DNA, 516 bp, synthetic construct
  source 1..516: mol_type = other DNA
atggaaaacgaagggcagaatcaacagaacctaaatgacgtcgatatggaggccatccttgatgtgatggggtgcaagacgagacgtgacatcatggacctcctcagggaggagccacggttcgttagcgagatatcccaggagctccagatcggacagaaagcaattattgagcatctgcgcgctatggaagacattggcatcctgacttcgtccaccaagaaggtagtgcggggcaggccccgaaagtattacgacatgcctaacgatgtgaacgtgaacatcacaattaccaaaaacacatttaatgtggccatcagccaggatatgctgaatgccaatcacgtcccgcaactgccctcaggagacgaatggagcaagttgctggacatcgaaaagcgcatagatcagggccacaccgaggcgatcgaggagttgaaaagtcagatacggctgtacgacaacctgaaagaaagagcagagtacattttagaaaggacttacaacaagtattga

SEQ ID NO: 4253 - DNA, 693 bp, synthetic construct
  source 1..693: mol_type = other DNA
atggctaacaaaaaagaagaggaaaaggaggaagagagcgaggatgctaagaaaagcacaaaagacaagatcaagtctaagatttccaagtcttcagatgattccagcagtgacaatgaggaatccagtagcgataaagaggaaagctcgaaggacgacgagaaagacaaggagttagccaaattgaatgaggacctggaaaagaaggatgaagagataggagaactcaaatcccacatccagcgactgcaggccgacttcgacaactttagaaagcagaacgacaagcagaagcaagacctaatccgctttgccaacgagggcctgatcgtgaagttcctggatgtctacgaggatatggagagggcgctggaaaattcaaagaccgaggaggagcttcgggaaggtctcgaactgatttattctaagatgaaaggcactctggaaaaggagggggtcgaggaaatccccgccgtaggggagaaattcgacccgttcaagcacgaggcattgcttaccgtggacagtccagatcatgagaacaacgagatcgttgatgagctcatgaagggctacacgctcaagggaaaagtgattaaatacagcaaggtgcgggtgtgcaagaaggcaaaaaaagccgaaataaataaggctgaggaagcgaaagacgacgaggataagaaagaggaatga

SEQ ID NO: 4254 - DNA, 1896 bp, synthetic construct
  source 1..1896: mol_type = other DNA
atggcggatgccaagaaggagaaaatcattggcattgacctgggcaccagtaactctgccgcttccgtccttgtcggaggcaagccgacggttatcccaagtgctgaaggggcaagccaatacgggaaggcatttccaagttatgtcgcctttactgaggacggacaacaactggtcggtgagccggcccggcgtcaggccgtgaccaatcccgagaacacaataagtgccatcaagcgaaagatggggaccgactataaggtaactatacagggaaagcagtacactcctcaggagatctctgcaaagatcttgcagaagatcaaaaaagatgcagaaagcttcctgggcgagccggtggagaaagccgtgatcacggtgcccgcgtactttgacgataatcaaagaactgccaccaaagacgccggtaccattgccggcctggatgtggtgcgcctcgtgaacgaacctacagctgcaagcctggcttacggaattgacaagcaggatgacgacgatgacgtgaacatccttgtattcgacctggggggagggacccttgacgtaaccatcatggagtttggcggaggcgtgtttgaggtgcagtccaccagcggtgacacacagctcgggggtacggacatggacaatgcaatcatgaagtacttggccgatgagttcaaggcggaaacgggaatcgacctaatgaacgatgatcaggccgttcaacgcttacgggaggccgccgagaaggctaaaattgaactgtccacaaccctgaccagcgaagtcaacttgcctttcataagcatgggcgccgacggcaagccacataacctgataaataacctgaccagggccaaactggaggagctcgtggaccccatagtgaacaagtgcggtcagcccatcaaacaagcactagacgatgctaagatgaccaaaaatgacattaataaaatcatcctggtgggcggaccgaccagaatgccagttgtgcagaaattcgtagagaactatataggcaagcctgtggagaggggaattgacccaatggaatgtgtggccatgggtgcagcgatccaggggggggtgctcgccggcgaaatcaaggatctggttctcttagacgttacgccactgtccctggggattgagaccctggggggcgtgagcacaaccctcattgaacgaaacactacaattcccgctaaaaagtctcagattttctcaactgccgctgataaccagccctccgtcgatattcacgtggtccagggtgagcggaagatggccgcggacaacaccacactgggacggttccagctcgtgggcatcccacctgcacccagaggaatgccccagattgaggtcacattcgacattgacgctaacggtatcataaacgtgaccgcgcaggacaagggcactggcaaagaacagtcaatcacaatcacttcctctacaaagctctcagatgaagagattgagaaagcggtgaaggaggccgaaatgaatgcggaagccgacaaaaagaaacaggaggaaatcgaggttaggaataatgcagattccatgatctacacggccgaaaagaccatcaatgaggaggagatcaaagacaaagtctcagatgaggagcgcactaacattgaaagattggtcgctgagcttcgcgagctaatcagcggggacgacatacctgctatcaaggataagacagatgaactcactaaagtcgttcaggacattggggcaaggatctatcaggaagctgctgccgcccagcaggcagcacaaggggccgctggaggcgccggccctgacccctcggccggaccctcgaatgatgatgatgacggcacaatcgatgctgaatttgaggaaaaggattga

SEQ ID NO: 4255 - DNA, 1176 bp, synthetic construct
  source 1..1176: mol_type = other DNA
gtgaggaaattggccgagaagagagactactatgaggtgctgggagtagataggacagctgacgaaaaggagatcaaaaaagcttaccgtaagctggcacggaagtaccacccggatgtagcggaagaggacaagaaggaagaggctaccgagaaattcaaggagattagtgaggcgtacgccgtgttatccgacgaagagaagcgacagagatatgaccaatttgggcatgccggtatggatggcttctctaatgaagacatatttcgaaacgttaactttgaagacatcttccagggcttcggcggtggcggaggctttgaagacattttcgacattctgttcggcgggtcaagtaggtcccgccactataatgcagggcctcgcagaggcggcgacatctacactgaaacaacaatcacgctggaggaagctgccagcggcgtggaaaaggacatcaagatacgacacgacgtcttgtgccccgagtgcggaggtagccgcgccgagcccggatcggaggtggagacgtgccccgtctgtgggggcaccggtcagaggaagcagatccggcaaagtctattcggacaggtgatgaatgtggtccagtgcggcgagtgcaaggggaccggtaaaattatcaaggagccgtgtcacaactgtaaaggaaaaggaacggtcaaggaggacaagaccatcagcgtgaaaatcccagcaggggttgaaacaggcaaccggctccgcgtttcaggagaaggccatgcgggagatctggggggaggcaacggcgatctctacgtcgagattaatgttaagccccacaaagatttcgagcgcgatggcgccaacctctactacgagaagcagatctcctttgtgcaggccagccttggtgacactgtggacatcccaaccatagatggggccgtggagctcaagatcccagcagggacccagtctgggactgtgttccggctgaaggagaaaggtatgccccagatgcggagaagcaccaaagggaacctgtatgtgacaataactgtcgtagtgcctcaaaagcttaataaggaacagcaaaagctgctgagaaaattcgctcagattagcggcgatgaaatctccgtctataaaaaaggaatttttgataaggtcagggatgccattaacaacccttga

SEQ ID NO: 4256 - DNA, 771 bp, synthetic construct
  source 1..771: mol_type = other DNA
atgaaactgatgatgtacagtatcaaaatgcggtcggctaagggagggccccacgaggagggtggcaaacacatatccggtgccgaacgtattctgcgggaagatgaaattgaggaagagctaataaatgtctatagacgcgcgatcacacacgagaagggaaagccggactttatcaacctcaagatcgaggccatcgacgaggacaagatcctctataagaagcggctaaacatcattcagcacaaagtaagcagcaaggaggagggcctgaagctggcaaaggaacttctgataaagaacactgtgagcgaggaggccgctaaagagggcatctcatccattcagaagctcaaggaaagcatccatggagccatgctccttgacaaggacagtgggaaaagaattgatgacaagggtattaaaggggtccgagtgaccggaatagccagtgcagacattaagaaatacaaagaatccctgaagagggacggcagggaaggcctgcacctggaggaggcactcatccttgctagcaagatcgcctcctgtaaggcgatagtggccgaactgtgctggtcagatgatcccagctacgtgattgggtacgttggcacgaaagaaaactatcatcgcatccctatcctgaaagataagggaaatccagtggggggcagggttttcttcgtggatacaagccagttgaatgacaactacaccctggaggacttgatcgattacttggagaaacaaattgtcttaatcgaatga

SEQ ID NO: 4257 - DNA, 1245 bp, synthetic construct
  source 1..1245: mol_type = other DNA
atgaaccccaatctggagatgaaactaaaggaagagctggaggagctgaaaaacaacaatctcaatcggaccatcgatgacctgcggtttatcagctctacaaaggccatagacaaggacggcaaggagttcctagtgtttgggactaacaactacctgggcttgactcaccagccggatgtcattaatgcgtcgaagaaggccagcacatacggaacgggctccaccggtagtcgcctcacaaccggagcgagctttgaggctagggagctcgaggaaaacctctccaagttcaaatccaccgaatcaactctgatctttaacaccggatatatggccaatctggggattatctacactcttacaaaggaagacgacattatcttcagtgaccagctgaaccatgctagcataatcgatggaacgagaatatccaaggctaaagtgagggtctataagcacaaagacaccaaggatttggagaacctgattcaaactgagatcaaagaattaaaagagaaaaacatcaactcatccaatttcttcattgtgaccgatggggtgttcagcatggatggtgacatcgcccctctgccagagctcgtggagattgcaaacaagtacaactgctgccttatcattgatgacgcccatgccacgggcgtcattggcaaaaccggcaaaggaacagttgagtattacaaggacaaaactgggatagacttaacggaatctgttgatttgcagatcggcaccctcagcaaggccctcgctagtgaaggcggtttcgtgtgtgggaagaagacctacatagactatctcataaacaaatccagaccattcatcttctcgaccgcactgtccccctctacaatcgcgagtgccaacgctgcactgaatctcttgaagaaaaacagcaacgagtacctgactaagcttcagaataatacaaaacttatgcgtaatctgctcaaggagggcgggttgaacgtgattgacggtgagacccccatcattccaattatcatcggccctgcagaccttaccaacaagttttcaaaggaactggaaaaggagggaatcctggtctctgcaatccgcccgccctcagtacctaagggggaaagccggctgcgactgacggtaatcgccacccacacaaaggaagagatcacttttacagccaaaaccattattaaaatctggaatgatctgaagaagaaactagaatatgagaatcactga

SEQ ID NO: 4258 - DNA, 9531 bp, synthetic construct
  source 1..9531: mol_type = other DNA
atgaataagcgaatttttctctatatcgccctgatctttatcatttccctgctgtcgttttctgccgtcagtgctaatgaggacatttcctccgacaacctcatcctggatgagaatgtgtacgacgagaaaatcatcctcgacgatgtgcaggacaagaacatcatatctgacaatgattacgacgacgtcatccccgtggaaaatgcgaatgataatgccattttagcgggaaacgatgaagaacttatcttagacgagaataacagtgagataagcgaggataataaaaatgacaagaccaagctctccgatcccaacacctactcttttacccggctgaatcaagccataaacagtggagctagcgtaataaatctgacggacaactaccagtataccgagggggatgaatcattcattcacggtatcatgatcagtcgcagcataaccattaacggaaatggcatgaccatcagtgggagcggcgttgcccgtatttttgaagtttttacctcgaatgtgatcatcaataacatcacttttcgagatgcctatgcggaaggcgacagtaatcggcagaactatgggggggctatctttatgtacgggagcgacagcattgtccagcactgtaagttcattaacaacaacgctaataacgctgggggcggcgctatcgtgctggtgggttcaaacagccgcgtggaatattccgacttcaccggcaacaacgggcagaacgggggagctgtctatctgtatggtaataacaccaaggcgatttactgtaacttcaccagcaacaatgccagcgagaaggggggagccgtgtatacctacggaagcgatatcacagtcgagttttgtaacttcaccaacaactctgcttacctagagggaggcgctatcgattgggagggtgagagggggaccgtcaaacactccagcttcgccaacaacacggctaacaataacgggggggcgatctcgtggtacacggccaacgggacggtggagcactccaacttcatcaataaccgaatggctacgtttggtggcgctatctggtggtatggggaaaagggaaccgtgaaacattctaacttcaccaacaacagtggacggaatggtggcgctattcagtggtctaagaatgacggaactgtagaaaattccaatttcactaacaacactgccattctcgccggcgctgtgcggtgggtcgctgacaacgggacaatcaaatattcgcgcttcattaacaatcatggttatagcgctggggctatcgactaccaccttacctacgccaacattagcgggtgtttatttatcaacaatactagcgactacagagcaaacgtgtacgaggacctgtttgagagcaaatcgtattcgaattttaacaacaacatcttgctaaacaatggaggcaatgaaattaactttaataccagcgagggcttcaacgcagactataactggtttggagacaactcactgaattacctggacaagcccaacatttatagtaatacttggctgtttttacagcccatcgtgaaccatgacagtgtgttcctgggcgaaagttgcgaaatcacttttaggctgtactcctacgatggaaccgaggtgcacgagtacgacaatgccctggtataccccattaaactgactctcaattcgaactacggcaacgtcaatgacaccgtgggactggaagaaaaggccatattcaccccccagactctgggctacaccagcgttgacgtgtatgcagagggctcctacatcggctcagttccaatcaacgtgtatgtgccaagctttagcgacttgaacaggaccataaacggcaacgaggactccatcattactctgaataaacactacatctttgatccggagaccgacgctgctttcataaacggagtgatcataaaccgcactgtgacaataaacggaaatggctttaccattaacggttcgaacaatgcccgtatcttccaggtaacggcctctaatgtcgccatcaacaatgtcacgtttgccaacggatatgcaaatggcagcactgatgaggacaaagacgggggtgcaatccactggtcgggcgcaaatggtaatattgaaaactctacgttttataacaaccacgcaacaggggctggcggagcaattatctggcaggcccagtacggcaatgtcagcacttgcctcttcattaacaacactgccgacgatggcgccaacgtgtaccacaacaactatccatctgattcccactcgaacttcaacaataacattatgctgtacaacggaaacaatgaagttcatttcacagtctacaacggctccaacgccgactacaattggtttggccacaactccagcaattacaatgacgcaacaacgggcatcattggcgatatctggctctttctgaatgccaccgccaacccagacacaatcctgatctcaaacagtagcgagattagctacaagctttatgcgtataatggacgggagatccaagagtacgacaatcaccttctgtaccctatcacattgaccttgagttcgaccaatggaatcgtcaacgataatgtcgccctggaggaaaaggtcatattcacccctcagaaccttggaacggccacagtgacagctaaggcagccggcacggacatccagaccatatcaatcaaggttttcgaagccagtttcagtgacctgaaccgaaccatcaacggcaacgaaggctttgagataattttggataaaaattatgcctacatacccgagatagacgctgctttcattaatggaatcaacatcacccacacagtgaccattaatgggaacggaaacacaatcaacgggctggacaaggctcgcatcttccaggtaacggcgcccaacgtcacgatcgataacattacgttcatcaacggatatgccaacgacgacggtggagccatcaactggcagggccccaacggaatcatcattaactcagagttcatcaacaaccatgccactagtgccggaggggcgatccgctggtttgctcagtacggaaatgtctctgcctgcctatttataaacaatactgcagatgatggtgctagcgtatattataatgattatccgtctgactcccattctaattttaacaataacattatgttgtacaacggaaacaatgaagttcacttcactgtgtatgagggctccaatgccgactacaattggtttggcaacaatctcagtaattacaatgaaagacctacaggctttgacggcaacgtttggctctttcttaatgccacagccaacccactgacaataagcatctcagaaagctcggagataagatataaactttatgcctacgatggacggaacatcctggattataataggactctgctttaccccatcaacctgaccctcacctccctgaatggcaatatcgaggacatcacagaggacaaggccatattcgcgcccgagaatcttggaattgccacagtgaccacaaaagcagagggcattgacatccagaagatctcaataaatgttctgtacggaacaatcttctatggcagtttcagtgacttaaacaggaccataaatggcaatgaggacgcggaaatcaccttagacaaaaattatgcttataatccggagattgacactgccttcatcaatggcattgtcatcaacaggacactgactatcaatggaaacggttttaccattaacgggtccaacaaagcacccatttttcatataaccggggacaatgtgaccatcaataacattagctttgtgaatggctacgccaatgcatacgtgaatggctatgacggggaagatatgagggggggggccatctactggcaagggagaaacggcaaggtaacctactcgaacttcaccaacaacaatgcaaatgatggtggtgcaatctactggtttgggacagacgggatcgtagaatacagcaatttcattaacaacaacgcaaacgatggtggggcaatttactggtttgggacagatggtattgtggaatattcaaacttcattaacaacaatgccaacgacggtggcgcaatttattggtttgggcagaacggaaacgtcgaaaattccgtcttcacccaaaaccacgcgggctcttacggcggggcgatttactgctcgggtgctgagagtatcgtggagtactcaaacttcaccaacaataacgcctacaatgggggcgcaatctattggtttggtcagaacggcaacgtcgaaaattccgtcttcacccagaatcatgctggctcttacggcggggcgatttactgttctggggcggagagtatcgtggagtactcaaatttcaccaacaacaatgcatttaatgggggggccatctactggttcgggcaaaacggaaacgtcgaaaattccgtcttcacccagaatcacgctaccttcgcgggaggtgcgatttattgctctggtgcagagagcattgtgaaatatagcaatttcaccaacaacgacgccattaaggggggtgccatctactggaatgggcgaaacggcaatgtcgaaaattccgtcttcacccagaaccatgtggacaatgatggcggtgccctttactgggatgatagtgaagggaaagtcacttcgtgtatatttgtgaataatactgctgaaactaagcacagcggacaccttattttgcctatgggcagaggtggtgcaatctattggaacgggcgaaacggcaatgtcgaaaactccgtgttcacccagaatcacgttgacaatgatggaggtgccctttactgggtggatagtgaaggggaggtcacttcgtgcatatttgtgaataatgccgcagatgtggaggccagcgtttattacaacgagcggggtgcctactccaacttcagcaataacattatgttgaataatggcaagaacgagattaagttcaagattttcgaccgctccaatatagattacaattggttcggaaataatctcagcaattacaacgagaagccaggcgggtttgagggcaacatttggctttttttgaacgctaccgttgaccccaatatgctcctgcttggtgaaagttcggaaattacgttccgcctgtacgcctacgatggaacaaatgttatcgagtatgacaatgatctgatatatcctattaaccttacgctgatctcatcaaacggcaacatcaacgagactgttgggttggaggaaaccgcaatattcacgcctcagaacgtgggcactgccatagtgacggccaaggcggagggctttgacatccagaccgtatcaataaatgtgcgggcagccagcttcagtgacctaaacagaaccattaatggcaatgaagatgcggagataactttgggaaagtactacgagtttgatccagagaccgatggtgctttcatacatggcattatcattaaccgcacagtgacaatcaacggaaacggcacgacaattaacgcttcaggcaaggctcgtatcttccaggtgatcgctgataacgtgacactcaataacattacatttaccaacggcaacgcaagcggcgagggggctgacaggagcggaggcgctatccggtgggagggggctaacggtattatttcatactccaacttcacctttaaccatgcatacttgactggaggggctattatctggtccggtgagaacgggactgtcaagcactcctccttctctcaaaatgatgtagatggcagcggtggcgcgattaggtgggccggggccaagggcactatcaccgattccgatttctacctcaacagtgccacagacgcaggggccatctggtggcttggggcatacgggacagtgaagtactccaacttgatcaacaaccatgccggttcccgggggggagctatcatgtggagtggggaaaacgggaatgtgacatactccaacttctccctcaataatggcggcagtggaacggggtacgatggcgggggcgcgatcttttgggatcatttaaacgggactgtgtcatattccaatttctccaacaaccacatcaacggtcatggaggagctatcgcctggcacgagcagtatggcaatgtctcctcttgtctgttcgtgaacaacactgcaacggacggcgccagcgtataccataatgatcactcagaatcatactccaatttcaacaacaacatcttgctaaacaacggggagaatgagattcattacgacgtgtatgatggctccaacgccgactacaactggtttggcaacaatggaagcaattacaacgagaagcctgcaggcagcgtgggcaacgtatggcttttcctgaacgccacagccgacccaaaccccatcagcatcctggggagcagcgatgtgagctttaagctgtatgcctatgatggactggacctgatcgagtatgacaataatctcctgtatccgatcatattgagcctcagcagcagcaatggcaacataaacgacactgcgggcctggacgaaaagataattttcactcctcaaaacattggcaccgccacggttacggcaaaggccgaaggcatcttccagaccctaagcattaacgtgtatcctccaagctttagtgacctgaacagaaccattaacggaaacgatgatgatgagatcacgctggacaaatattatgagtttaatccagagctggattcagcgttcatacacggcatcatcattaaccgcacagtgaccatcaatggaaacggaagcacaattaacgggtcaagcaaagcacgtatcttccaggttatcgcgcccgatgttgtcctcaacaacattaccttcgccaacggaaacgcgaatggtgagaacgaggggggctacgggggcgctatcctgtgggagggcgataacggccgggtcgaagacagcaccttcatcaacaacaatgctagcggatacgggggcgcaatctttggaggcaactgctctgacaatgtgattttccaaaacaaccacgccggcatcgagggagatgactggtatgtccctaagcctgtgatctccgtcaatgacttcacatccacatataagtcaggagagaagctatacgtcaatgtgtcctatgtgggtactcagatagacggaatcaacgtgacaatcagcgtatttgacagctccaaccagttaattggcaactactcctgcctcagcggggacggctggacggtggatctggatgctggcaactataacgctttggtgtttgtagattcagatgaatacggctatggagaggagacaattgccctgacaatcaataagcgcgcttctcaaatctccgctaacccattgaacacaacatacaacggaaacgagaacattataatgatcctgaaggacaattataatgaatccattgccaatgcaacggtgctggtggactttaatggggagaaaaacctcacaaccgacgagaacggtcagatcgttgtgtccgctaatggaattgtgcctggagaatactgggcccagttcatcttcgacggcagcaagaactacgatgggtccgatgagaaggtgaaggtgattatcagcaaggcttctacaagcctaagctcagagaatatgaatgtgagctataacgagagcaagtacctgattgctacactgaaagatcaatattccaatcccctggccgaaatcagcattgaatttaaatcgaactcatcaactgtgaaaaacgagaatactgacaataagggccaagcgaagctcttgattgacttcaacccaggcacgtataatatcgatatcagtttcgccggaaacagcctgtacgatgcctcatatgcgactgtgactgtggtggtgaacccatctgacgacagtggcaatggcacggagcccagtggcaatggaagcagtggaaacgggactagtcccgaaggaaatggtacttctccaggtgggaatggaacctctccgagcggaaacggcacgtctcccggtggcaatgggacttctccctccggtaatgggactagccccggtggtaacggtaccgacccggggggtaacgggacttctcccagcgggaacggtaccgatcccgggggtaatgggacttctcctagtggtaatggtaccagccccggcgggaacgggaccgatcctagtggcaatggaacctctccgggcggaaatgggactgatccgggggggaatggcacttcttcaactgttaaagataccctcattggcattagcacatccaccgtcatttatggaaatgacgagctgatcaatctgacccttaccaccgccgacaaaacgcctattgatggggtgattgagctaagagtgggcaattctatctacaacgtaacgattaccgggggaaaaggctccaaggctctgtccaatctgacgataggcaactacaccgttacggcagactataaaggagattctgaatacaattcatccaccgccagctctagtttcaccgtgagagaccggatcgaaaccagaatcatctataacaatatgaccactgcccctgttggggccaacgatggcagaattggtaattacttcagggtcaaactggtggatgaaaacaaccaagccctcgcaggagtgcctatccagataggcttcaacggccgcatctacaacagaacaacagactctgaaggcggagccaagctacagataaacctggcaaaagaggatggctacacctttgcaatctgcttcaaaggagacgacaactacaacgcctccttcgaggttgcaaaaatagacgtgaacaagaaatatccaaaaccaaacagtgcaaattcagagtccgccgagccagctaacaaaacacagaagaacacaaggctcgaaacctccatcctctacaaggacatgaagaccgaatcagtcctcaaggcggaaggccgggccggaaagtacttcgagatccaactcgtagacaacaacaaaaaggctttagccggagttcctatcaaaatcggcttcaacggagtggtctacgaccgaatcacaaatgccacaggcggcgccaaactccagatcaacctcctgaaagtgacccagtacacattcgctatcgcatacctcggcgacagcaagtaccaggcctcattcgaagttgcaaagatcactgtgaacaaacagaccccaaaaatcacagccccgcagaagacctttaaggccaaagcaaagacaaaaacagtcactgccacactgaagtcacagaggggcacactgctcagcggcaagaagatcaagtttacagtaaacggcaagacctacactggaacaaccaattccaagggtgttgcctccgtgaaggtctccctcagcaagaaaggaacctacacagctacggccaagttcgacggagacgccaataccaaggcaaccagtgttaaattcaaagttaaaattagttga

SEQ ID NO: 4259 - DNA, 342 bp, synthetic construct
  source 1..342: mol_type = other DNA
atggcccgccacaaatccaacaagcggctgaataaaggggaagaggaggacccaatgtcgggagcagcgaaccttgtggatgctatgctcgtgatagccgtgggcctcctggtctttctggttatcagctggaacatgcagggaatcgtgttcaacgaggacatgaccccggaggagaaacaggaagtaatgcaacagatgcaacaggtgacggaactagaagaggggcaggaattgaatgacacccccgatgtcagcaatagtagcggtaagggctatacagagatgggcaaggtctacaaggactcatccactgggaagctgattatggtggagggctga

SEQ ID NO: 4260 - DNA, 645 bp, synthetic construct
  source 1..645: mol_type = other DNA
atggtcacagtgattcctggaagcgacctgctaacgtccgcactgaatgttgtgtctcagagcttacagattccagtgatagtctttctgctgattttcgctgtgtacgccgtaattacggtcggggggcttatctcagaatacagttctcggaagaaagtacccgtgaaagtgatcaaggacctgatctacgccataagtagaagcgaggatgtgacagagctggaaaacatccttaagaacgcacgcatcccaaagaatcagaagagggtgctcatcaacatagcgcggagcggagagctgaagaaagactcccgcgaggctctggccgaaaaattgattgagaatgaagaggacatcatcgagaaaaaactacaaaagacagatatcgtgaccaagattggcccgacccttgggttgatgggcaccctgatccccatgggtcccggtctcgccgccctcgggagcggcgatgtgaccaccctctccaacgcgatcatcgtagccttcgacactactgttgtgggcattggatcaggcgctgtggcatacgttgtctccaaggtccgtagacgatggtatgagcagtatctgagtaacctcgatgctctgtcgaaggccgtcttggacaggctcaacgaatga

SEQ ID NO: 4261 - DNA, 726 bp, synthetic construct
  source 1..726: mol_type = other DNA
atgttttgcggggagaaaatggatacaattagtatgctctggcagttcggcatattggcagccgtgcttgtatttgggatcaagctgggtctggccgttggcctggccaacctctccaagaagtatctggcgacggtctgcattggatacggggcaggagtgctcatcctggcgcagatttcctcctattttgctacggagatcaccgagcttatctacacctacaactctctgttcttcattatcatggcggttataatgattctagccggtatcttcacaatccgggaatggaaagtctttgagaagaatactaccgccgccacttgtgctgccgtgatcgccccttgcccatgctgtttcgggtccatcatcgtcagtatcttgctggtggccccaacagtcggcttaggggctgtggaccttagcgtatacgtggcagcagccctcgtgctgaccattatagttacctactttgctagtagcatattcgtgaggtatgttgacaaaccctaccccattgtactgggaaacttcatgttcttcctcggaatttatttcctcttgtctgccctggtcattccgaacattgcagcaatcatgaataagtcaatgggcagcatcagcatcgtgagcatggaatcgctggctggctctatagtggctttagtgctgctggtggtgatcggcatcgtcttttcacgcaaaaacaatatcctaagctga

SEQ ID NO: 4262 - DNA, 5628 bp, synthetic construct
  source 1..5628: mol_type = other DNA
atgaaatacaacaaaaagatcttctttctgtttttactgttgtgcctcatcattccccaggccatctatgcaggggatgtggacgacttatcggacgctggtaactacacgcgcgacaattcacccctcacaataagttccacttaccaaagttctacttacggctcagatgggggctacgacgacaaaaatgagaatatttatattctggataaagttagtgacggggataaatctaaaacatgctgttctaaggaccttagccttgataatgcttgctctatggataaaagctcgtgttctaagagcaactccgcttgttctaagggcatatcttccgacaaagattcatcgaacttgtctaatacatacctggtgtctgaaaataattacaacgactttaatgtggatatcgacctgaacgataaactgtcagatctggatctgaacaatgacctgagtcttaacaaagatctgactcttaacctcaattcaaataacgatatggattatctaaacctggaggaagtgatccagacagatggaacgttaacttatgagggcgacttggatcagacttatcttaacgacgagagcctgaaccaagatgtgcaaaatgatgattctctgaacaaaaacgatctgaaatccccattaagtgatgaaaacacatttaatatttttataattagtgataataccggaaataatctgtttgatgcagtggcatgtgaaatcttggacaattccaatttttccaatgtcaaattcaacattagaagcggaaaccagatcaacgctatgagcgaggatgagatctacgaactgatggctccctgcgacgccttcatcggccagtgggtaagctccaatgtggatgcagtattaaccagtcttttaaacaaccatccggaactgtcaaacaagaaactgttccttatcctggaaccacctacgggaaacatcaattcaagctccagtagcttgaacttggttagaaactctaccattgactacaagaagatcttcaatggaatttccaatgacgatctgataaactacttcaaggctaccaaaagaggcaacaacttcgaaagcattcaagaatacattgacaatgaaggaagctcgtttaacagcatctttaataatctggttctctataaggacataaacgacaaggccaacctgaaaaacgaattgctctatatcctttacctactgggccacggctgttcctatgagtcggcaaactttacaggcgtacaggcctctggaatattccgggacaggtggtacagctttgacgaatacgtgctcaccttcttcaacgagtccagaaacagaaccattgggatcttggagagtacaatgtatatccagtcccaacagctcgatttggttaacgagatcacagaacgccttgagtcaaagggatataatgtcattcctatttactgtccggctgggaacgccgagcagctaaatatcatggtgaagtattggaccagtgcctgtagcaacatcagcggcttcctggagaacccacaggactttgacatttacgtggatggaatcatctccatggtggcttatggtgtcgggggagagaacttcaccaatgccacaaaattctttgaagatgctaatgtgcccatattccgagcggtgcactctgagtacattaccaatgagcagtgggagctgagccctgtaggtctctcgaccactaaaagtgataaatggtggcacgtgaccattgcagagtcccagggaatctttgatgcgacatatgttgggggtgtggactcttacatttcaaacaggacaggcgcaatcatattgacttttgttcccgttcatgagaatatagaactcctgactgacagggtggacgcttgggtggacttgaagtatacgcccaatgaggacaagaacatatccatcgtatactacaactacccccctggcaagcagaacatcggtgcaagctacctggatgcaatcaccagtgtctataatatgctctacaccctgaaggatgaaggctactatctcaccgacctgccaaacaacgtgtcggaactggaggacatgatgattgcctgcggtatcaacgtcgctaactgggctccgggcgaagtcgagaagctggctaaccgatcaggtgtcgcccttctgcccgtggacgaatacctggaatggtttgactccttagacgatattgttaaagtccagattaccgaaggtcctgtggcctacattggccagatggtgaggcgggcggttctaatcaactacaccgatgaggtggagacaatggtcaacgactggtacaatcagatcaaggcactgctgcccgagaatcagactgtggccgccaccaatatactggataagctggtgaacagcctgaagctctacgctaacgcgtcgtccgatggcgacgagaatgcctccctctactatgatgaatttctgcggtactatgacgagtttaaaagtttgaatgtttctggactcaacggatggggtgaagctcccgggaatatcatgctggtgaatcggaatggaaccgactactttgtaattccagggctgacattcgggaacgtcttcatcggccccgagccccagagaggttgggaggccgacattgagaacctgtaccactgtaccgctgtagcccccacgcaccagtatctcgccgcttactactacatgcagacccgccaaagcaatgccatggtctttgtcggccgccacgccacccacgagtggctgccaggcaaggaagtgctgttatcatataacgactatgggtcgattgttgtcgggaaggttccccaagtttacttctatattactgatgggctggctgaggccatacaagcgaaacgacggggctttgctgtgctgatctcccacttggatagccccaagagctatactcatctgtatggtaatctaactgtactggcaactctcctggaggagtatgacaataatcatatcattatagagtctgattccgataaagacaatcaggctatcacgtaccaggtaatcaaggacaaccagactatcacgtatcaggtgatcaatcaagagctggaggacaatctcaccagagccatcaaggacttggtgatcgcaaacaattactaccttaccattggcttcacggcagaggaactgaacaatactgacatgttctccctaagcagcactctgaatgctttcctcaagaacactcaaaataccctgtatccactgggacttcatgcaataggtcagaagtggaccgacgaggacctggcgaacaccgtggccatcatcgtctctcatgactttgaatatggcggcaagaagaccaatctattcgatcagctatccttgtattactacggggagaaatattccaacctgactccactgaagcgtgactatatcctcaacaggtccgtggatgtctgcaaggccctgatctattgggacaccgagacagtgtctgacacaattggtatcggcagtccagagttcattgagtcactgaacatcgccaagaaatacattgacctgtacaatcagtgtatcagccttgagctggaagagatggtttccgccttaaacggagggtatgtgccagtcaatatcggcggggaaagtgtgactgtccctcaagtgctccctacaggcgctaacatgtaccaagaccagagctctgagcttccgacgcagaaggcctgggattacgctaagacactctccctgctaaccttggccgaccttaatgacactacagaaaagataatcatggggatctggtgcgtagagactgcaagggacgacggggccctcgtctccacagtgctctacctgcttggcatggagcctgtctggcacaacagttccagtgccggatttgacgaagagggcatccctacaggtaagaaagtggaggacctccctaatgtcatcgcactggaaaacctcacccggcccgacgggtgggcgaaaaagcgaatcgacgttacggtgattaccagcgggttgttccgtgatctctacagttcacaggcccggcttatggacaatgcctacaggatggcgttagcctgctcatactacacgatcgtgaacaacaagacaatcatggacagcgagtacgggcctcaggtctatgatgccctgcggtccatcatgagaagcatcagcttcaaggggatgtcaaacgaatcactggaggacaattatgtcgcgaagcactggctcgaggactgcatctattatctaagcctcggctacaactctaccgtctctggcgagtacgcaataacccgtatctttgcccccccaaacggggactacggtgcgggaatatcaaagctggtgtcaatgtcctggacctggaacgacacagacgagcttagcgagttctacattggcagaatgggcaacatgtattcaaaatattactggggcgacacaaaccctgtcgtgttcatgagggcgctctccgataccgaccacattgtggtgagccggaacaccaaccagtacggcgtattggacaacgatgacttctttgattactggggagggctcagcatgaccgttgaatacctctccaacaagacgccgaccatgaacgtcctgatgtacgcaaacaaggacaatgcttatgtggccacattcgagaatgtgttctacaacgagctgaatacaaggtatctcaacccggaatggatcaagggaatgatgcaggagggctacagcggttcccggtacatgtccaacaagttcatctccaacctatggggctggcaggtgacccgcccctcatctgtctcggaaaccgtgtgggatgacgtttacaacacctattataaggacaaatacggacttggagttaaatcctggctccagtcggggaacaatgcctattcattgatctccatgagcggaacaatgctcaacagtgcttactccgggtattgggatgccgatgacgcgacactgagtgatatcgccaacacgtgggcccaggccaccgtggccaatggggtagcatgctgtgactgcagctgcggcaatgtggctatgatgcagtgggcattcaagtacgtgaatgccgatctgcttgctaagctcatgcccaagttgtatgacgccacgcagaacccgctcttctacacaaatagcagtgacatgcctaccaactcttcgaacattgaccgccgaacgacaaacagcagtgccgagagcaacaatactgaaactgtgcagactaactccagctctaacagtcagcagagcgccaacggaaacactaatattccaggagcaagcggcggctatatggtcgggaccgaagcggatgcccagtcagacatggccagtgatagcgatgccggcatgaacgatgcaaatggagaaggccgctctgtggaggtcacgaagagcaccagcacgccagtggcgccaaaggacgtcagtatgcctatagctattattgtgtgcgtgatttgcctggtggccctgattggattcggttacttccgcaaccgcaaagacgacgatgactattacaacgatgatgacgacgatgattacgaatacaaatga

SEQ ID NO: 4263 - DNA, 5418 bp, synthetic construct
  source 1..5418: mol_type = other DNA
atgaaaacaaactacaaaatcatcctcatttcaataattcttctcggtctggtcatgtcgtttggagctgtcagcgcagctgacctaaacacagtccagtccggtgaggtgtcaggtggcgtggacatcgccagctcaaatcctggagtcgagaatggcgaactgacttacgagatcccagatagtgttgaaaacattcagtacgccgggctctttgttgacagctacacggccggatcatctaacttggtgtatggatctgaagctaacatcacgttgacaaaaaacggcgagagcgaacagatcgcaagtgaacgtctggttgccagtgtggggagtgctgacggtgaggtctatgtcattaacgaccacacaacaaaatgctttgcagactatatgatgacctataacctcacagaccgcctgcaggatgcaaagggaaatatcacaatcactgtaaatgccactccgatcgaagggtacaccttctacaataaaatcaagctgattggcctggtgtttacctatgatgatggcgatggcgaccagttccattactgggtgaacgcaggttcatcgtgggtaaagacagatagcggagagaccagcaaagctacatttaagcttggcaacgtgaactacgacccaactgtagccaccctcgataacttcgccctttccagccaggacggtgtctacaccttcaatggcaaggagatggatgagtccatcgtcactgagaccggggtatactattatatccatcacaagtttgacattctggataagattaagaacatgacaaacaccttggtgtacactcccggggaaggctcctactcattcagaaacgtgctgtcagtggtcaagctggtaaaaaccgtgccagtctacgcgaaagtcaacataagctctgaatacgatgacatcgtcttttccggaacagaaaatctgctcaaggtgggcataaccaataatgggaccggctcggcctcctacctcctggacctgtacgccgacgggaaaaaggtcaacagttctcaaatctctctggctgccggccgcgaagctgtgatatccctcatcgacaacacaatccggccctccgccgctgacacggtgagcggggcggataacaagaagatcaactacactgtggttgttagcgataagaacactggagaggtgctggacgagtccagcatcttccccaatctcctctataacgggtatttgggcaagggcttggcgtatcccgccgagaagatcagttcatttaagaacatcacagttaacggaggcatgatcattgagagtctaggggattccacttatcttgacgctagcatgacgggcaaaaccgattcttggactatcgacctgcctgacggcgctttcttcactgatgcctttgtctacgtgccatataatctggacaacggaaacgtgcccatgttcacaagcaccttcaacggggcggcagtgaatcccatagctagctacagggaccagcccaacataggcgaaaatgctaaaaacggatacgggttgttagtgtacgatgtgggggagctcatcaaggccggggtaaatagctttgccctgtcaaaggaagccggtatcgctggagtttacccaagcaccctcattgcattttacaacctcaccgattcagacctgctaaccagcgcattcatattcaatggggcagacctcctgtccaacgagtacaattcccttggaagagatgtgtccagcgataatatattatccatcggcgcttttgatggattggtaagtgctaagcttcacgtatttgctgccgattgccaagctggagagggtgacttgactgtgaacggcaaaagctataagaacgtctgggccggtaccaatcggagtgtcggcgattacgtggtggatctgggaaaatccactaacgcatcaaatgaggtgagcttcatttccacagccagcaatattctagcccttcagcaactggctgttgttcagtataacgtcccttcagtgaaggcaagtctggtctccgaatacagcaacgcggtatttgcagggaccaacaatgtcctgtctcttaacataacaaacaacggtaaatttgattcgatctatactgtggacttctacgtggacggcaaaaagcaaaacagcacggaaatttccctaaaatcgggtgccaacaagggattgtaccttatcgacgataccataaggcctattgatgccagcaccgtaaacggggccgacaatcccaaagtcaactacacagttgtcatcatcgacaaggagaaatcaatggtactggatgagattaccattacgcctagcctcctgtacaacgggaatctcggaaaggacctggcgtacccggcagagaatatcacgtcctttcgcaacattactgtcagcggtggcgtgattgtcgataccttagacgattccacctatattaactctcaggccacaaaccgcaccgatatttggaacgtcaacgtggcggacggcgatgtgtttaccgacgcctttgtgtatgttccctacaattgggataagaccaacggatacatgccagtgtggaatgccagattcaacggtgtggctgtgtcacctctcgtctcctaccgggaccagtcaaacataggattcttcggcaagaacgggtatggcttggtggtctacgacgtgagcaagctcatcaaaagcggggaaaacactttcacgctcgagaaagaagcgggcatcactgcggtctaccccagcaccttaatggcattctacaatgccactagttccaacagcctgaagaccatttacatctataacggggctgacctcctggccaatgagaacaacttcctaaacaggacggttgcctcggacagtcacttggacatctcctcttttaaggaagttatcagcgctaagctatacgttttcagtgccggtgctcagaaaggggaaggaaatatcatctttaacaataaaacatacaaagacgtgtggaatggtactgtgaacagtgtcgacagtttcatcatcgatctgggcaagtctccaagtgtgtccaatgacgtgtcctttgtctctaccggctcaaccattatggcactgcagcagctcattgttcttgactattatgtatcctctgtgaaggccaacgtgtcctctgagtactctggggctgtatttgctgggaccgacaatgtgctgaaagtggacctgaccaatgacgggcagggaggatcggtgtatgtgctggacttctatattgacggcaagattgtgaacagcacagaaattccgcttgatgcaggcaaaagcactgaaatctttctggttgatgacaaaataaggcctgttgatgccagcactgtcaatggtgccaataacgccaaggtcaattacacaatcacggtaacggacaaggccagcggacttgtgctgtacgaggccagtctcaatcctatcgtgctgtacaatggcaacctcggaaaggacctggcgtacccggccgagaatatcagcttctttgatgccataactgtgaacgggggcgtcatcatcgatacactggacgactccacctatctgggagcaaaaaccaccggccggacggatgtctggaaggttgaaatccctaaagacgggaagatcgtggatgggttcgtttatgtgtcatacaactgggacaagaccaatgggtctatgccgatttggaatgtaagtttcaacggcgtctccgtttccccggtggcccactacagagaccagtccaacatggggacgtacggcaaatacggatatggactggtcgtgtacgatgtgggggagcttatcaaatcagctgagaacaagttcaccttagagaaagagaatgggactactgcagtgtacccaagcactttgctggcattctataatcgtacagaaagtaataatcgcacgaccgtttatatgtacaatggtgccgacttactgtccaatgcaaataacttcctgggtcgaaccgtggcaagcaacgccgcgctggacctggccctgaatccaaatgatgagattaaaagcagcaggctgtatgtgttcgcggccagcggccaatctggggagggcaagctcattgtcaacaacaaaacctttaacaacgtctacaatggcagtgcaaatagtgtggacgcctacattattgatttaggcaagtcccctagcgcttctaacaatgtgtcattcatagcgacaggctcaaccatccttgcgcttcagcaattcgttgtggtggacgccattcaccagtccagtgaagagttgcagaagatgatcaatagcgctagggccggctcgacattgaatctgggaagcaacgtgttcaaggatgtctccaacgtgatcatcaacaaggacctgaccataaccggcgggacaatatatgccagagagggcgagaccatcttcgtggtcaccgaccgctctgccggaggtcctaaggaggtgaatatcactggcgtcaagttcgtgttagacaacgccaacacaattttgcaggcacgggccgtgaacggctccacaccaactagcattgacgtggcttccatcaacatcaaaaagaacaatatctcttttgtggatgacgatgtggtgccagagtcaattaccgttctcgacctgaagtcccaacggagttcaattgcccccacgagaaacctcaccatcagcggcaacaatctaattgccggtatctgtcccttcatgtttgaagtgaccagcttcaatggaaaggactctgtggttgtgcccgaggggggcaatatccccgacaaaaaagcttcggtgattcattatgaagacatggttacaactgccatcaacaccaatattgagggacgagtgggcaaatactttgaggtgaacctgacagattccaatgggaaccccctcaaggataagaaggtccagatagggttcaatggtgtggtatacgatcgaaccacaaatgccaccggaggcgtcaagctccagatcaacctgggatacaagggaacatacacctttgctatcgcattcctgggtgacgactattataacggcagcttcgttgtagcgaaaatcaaggtgaacactcagaagacaaagatttccacgtcgtcgaagacatataaggcaagtgctaaaaccaaagccatttcggccaccctgaaggatgcaagcagtaaccccataagcggtaagaaactgagtttcactgttaacggaaaaacctatagcgctacaacaaattccaaaggcacggcaacggtgaatgtcagcctgagcaagaagggcacttatagctttacggtaaagtatgctggcgacgatatgtatgcgggggccacgtcaagcagtaaggtggtgataaaatga

SEQ ID NO: 4264 - DNA, 10356 bp, synthetic construct
  source 1..10356: mol_type = other DNA
atgaagaatcgcaaatttctcatagtgagcttaattctgattgttctaatgctggccctcggatctgcgtacgccgcagatctgagtccagtgacgaatggaacggtgtcaggaggtgtggatgtggcaacggccaatccatacgcttctcagacaggaggccaggaaatacagtctggggagctgagctatgatgtcccggaggacgttagtgatgtccagtatgcaggcctctttgtgaatgtgtatggagggtcggcacagggcgactatggggcccagtccaatgtctcaattacatccaacggtgagacaagtcagattgccagcgaaagtctgaattatacggatggcagtggcgacggcactgtctacatcgtaaatgaccacatcaccaaggtctattccgactatcagatgatttataatatcactgatagggtgcagggggccaccggtcaaatcaagatcaatgtgacaaacaccaaacttgaggggtatgctaactttgacggccgcatcaagctgatcgggttggtctttgcgtacaatgacggcagcaataatcgctttgattattgggtggattccggtcaggcctggtcaaatagtgcggattcagtgaccaaagctaatttcactgtgggaacggtcagtcctttcctgagtgctaacatacggaatattgcactttccagcactgacgggaattattcattcaacaagcaggagctgactgggggggaactcatctcggactccatgttcaagtaccacaagtgggacgtaactgacctcttaaaaaacaagacaaataacctgacttttaactcaaccaagtcttttaagaacgtgctttctgtcctgacagtgacaaagaacctggaggagatattcgtgagtcctgacggtactggaactgggactactgccgacgaccctaccacgatggataaggccgctcctgccctcgcgaataatggtataatccatgtgctggatggtacctacacccagtccaaacggtacgacattagggccaactactcatccattgttgccgttaatcccggcaatgttatcttcgatggcaacaattcggttgcaaacatccgcgtgtatggtgccaatgtcactttggacggcttgacgtttacacatgggaaaggaactggggggggcgtgtacttcgattccgatgcgaacggcggcctggtgacaaattgtatcttcaaagacattaataataccggagcgggaggcgccgtttacatctccggttcgaaaaatgtgatgattgagaattgtaaattcattaacaccacgtccacaggtactggaggaggcgccatctacattgctggcgacaacgccaccgtgaaggaatgcagctttgaaaacgctactggaaaggatggtggtgcaatccgtgtcaattcgagagactttgcggttgtgcgcgactctaacttcacgggttgcgttgcaactaccggcggcgccattagttgggtaggcaaatatggaaatgtgaccaattgtacatttaccgacaatcaagctactggttcaagcaatggtgggggagctatctattggcaggagaactttggcctgatcaataactgtacattcataaggaataaggctcaggtgtatgggggcgctgttaattgggctgcagggaagatcaacgggaccatagtcaactccatcttcaaggaaaattccgctggacgagatgggggcgcctattactccgccgccggtgcaaatgagatgctcattatgtactgctcatttgaagacaatgaggctgatgcaaacggaggggctatgggcttccgggccgaccagtgctacctgcttgattgcaacttcaccagcaaccatgccaaacagaacggaagtgctgtcatgctctactccaatgtagccaatttccttggtatcggaaactgtaattttgtagataactctgccgacgtcctgaactattccattgtgaacaatgccggaaaattaaaactgtctgagaacaacatcacaaccaatgatctgcgtgatggaatctacacaaacgggtcaatattgactgacgtttatttatatctcattgtcaatgagaccaacgacgccgcctccaatgtagtttatgccgacatcggcgacgaagtgcctattgacgtgtacctggtggatgacaacagcaatctcattaacggcattggcctgagcgtggagatcaacggaaccaacatcactgaatttgatttggatggatacacatataagacaagctacacacccagtgagataggtacgtattatgtgacggggaactattccaaggctgagctgagcaatatcctcacaggctcaatcgttgtgggagaggaaccggtgtctgcgatagaaatcgctttccgaggcgaatacgtgaacaccacttatgccggggtggagaaccttatcgcagtgtcattgcacaacaccggctcgctggatggaaactatctggtggaattttatgtggatggcgagctggcaggaacggaagagtctaaggtgaatgctggctacacaagcgacattaactttattgatgagaaaatcagggacctaaacgagtcaacgatactgggacacgacaatctacaggctaattacaccgtaattgtgaaggataatgagacccaggaggtgataggggagtcctcctacttcccatacgtcctatacaacggttatctgtcgaagaaatacgagtattcggatgagtttataagctcattcagaaatgtcaccttcaatggaggctacttcattaacaccacgggaagctactctgggaatagtaaccccggactgactgacatttggacgcttcccgcgctgggcgagggggcaagctttgcaggggcttacgtgtatgtggcatatacctgggataagacagaaaacggcccctcggactgggcctccagttttaatgatgagtccatccctattgtggctcagtaccgcgaccagtccaacatgggtacaagcgggtcatatggatacgggctggtggtctatgacgtgtcctcgctgattaaggaagggcagaacaagtactcactgactaaaggggacacagcgatatatccccggacccttgtggccttctataacgtgactgaatcaagcaccgtaaagaccatgtacatgtataacggtgctgatctcctttattacgggagctataatgttttggagagacttgtgatgacagactctgtactgaacattagtacagagggcaatgtcctcggatctaacctctatgtgttcgctgccagcgctcaggccggggagggtaacctgctggtcaacggcgagaaatatgaggatgtttggaacgggaccaccagctctgtagaagagaaggtctttgacttgggggacaatccccttgcctccaatgaaatctccttcgtatctaccggatctaccattctggcactgcagcagttcgtgctggttgaatatgaggcctactctgccgacgtgacaatagcttcggaatacaatggggcttgttatgccgggacggagaatgcattgaaagtcaatgttacaaatgacgggctggaaaaagccaattatctgattgagctctacgcggacggtgtgagggtcgactatgagcatgtggaaatcgatgtgggcgaaagcaacgtcctaaccctgatcgacgacaccatcaggccagtgactgaagacactgtaaatggcgccgacaatcagaaggtgaactacaccgtctatgtgagtgccgccgggagtcttctggctgagaagaccatcactcccaccatttggtacaacgggtacctgggcaaggactacgcgtaccccaatgagacaatcagctatttcgacaccatcacagttaacggtggcgttatcattgagacgttaaatgacaccacttatatgggcgcgacagtgctcaaccgaacagatgtctgggagctcgatgtcccagatgatgtggagtttgccgatgcctttatctatattggatacaactgggacaagaccggtgcaaacatccccgtcctgaacctgacattcaatggggagactgttgctccgatggagagctatagggaccagtccaacttgggcagctccggcaaatacggatacggactgatcgtttacgatgtgagtgggttggttgaagctggagagaatacattgttgatcgagaaagagtttaacaagacggcagtttaccccagcactcttgtagccttctataaccaggaggtcccggatgtcattacaacagtgtacatgtatcacggtgctgacttgttatataacagctacaacctactcgggagggacgtggagagtaacagcgttctcgaagtggagttggtggacgaccttgcctcggcagaccttctggtgtttgcggcaagcgcccaggccggtgagggtaacctcattgtgaacaatgaaacatatgagaatgtctggtctgggagcacaaacagcactaacgtgtttggtgtcgatatattggacagtctcaagcaatccaatgaggtctcctttgtttcaactggaggaaccatcctagcactgcagcagttcattgtcttcgaatacgatgtcacttctgctaaagcgaaagtgagcacagagtattcaaattccgcttacgccgggaccgacaatgtgctgaagcttgatctgaccaataacggtaccgtggacactgtctaccatattgacttatatgcggacggcgacttggttgacagcatagaagcggagatcgattgcggggagaacagtacactatacctgattgacgatacaatcaggccagtgactgaaaacactattaacggcaacaacaacgctaaggtcaactacacagtggtaatcagtgataatgccaccgatgagatcctggatgaaattacaataacgcctgtgctggtctataacggttacttgggtaaggactacgcctatcctaacgacacaattcagttcttcgacgccatcacagtcaacggtggagtgatcattgacactttgaatgataccacctatctgggaacgaaaacaaccaaccgcaccgatgtgtggaccgttgatgtgccaaatgacgccgaatttgtggaggcctttgtctaccttgcctacaactgggacaagaccaatggcacctgccccgtcttcaataccacattcaatggggaaacggtcactcccatagctcactaccgggaccagtcaaacctcggcaccagctctgcaaaatacggctacggactgcttgtctatgatgtgtcagagtacatcgctgccggcgaaaatagcttcgagctgctcaaggattacgatgtcactgcggtctacccaagcaccctggtggccttctatgacgtggaggacagtcctattctgacaactgcttacatgttcaacggcgccgacctgttatacaatgcctataatttcttaggacgacccgtggagagtaacagtgttctctatattgattcagttgacgatatcgatgaagcaacacttgtggtgttcgctgccagcgggcaggccggcgaagggaacctcattgtcaacggtgacgagtacaccaatgtttgggaggggacaagcaatagtgccgccgcgtacatgatcaacctcactgattccatagctgaatccaataatgtgtccttcgtttccacgggaggaactatcctagcccttcagcaatttgtcatcgtgtccgagtacgccccatacgcgaaggcggacattatctctgagtacaagggcgtggcctttgccggcacaaacaatgtcctgaaggtcaacgtgaccaacgttgctgaggaagatgctgtcttcaatgtaaccctgtacgcggacggcgtggaaataggcagtcaactcatcgaagtaggcgcgtacggcagtgccattgccatgtttaccgatgagaagatcagaccggtgaccgagaacaccgtcaaaggggccgacaatgagaaagtcaattacacggccgtcgtgcgggacgtggacgacctcgttgaggatgccgaggctacaatcacgccggatatcctctataacggtaacctgggcaaggacttagcataccctgctgaggagatcaccttctttgactccatcacagtgaacgggggcatttacattgagatccaaaatgattcaagttaccttgcatcgggagcgaccaaccggactgacatttggaacatcgaagcccctgaggacgccgatttcgtagctgggtttgtatatgtggcttacaactgggataagacctctgcaggaatccctgctttgaacatcacattcaatggtgtgtctgtcgcgccggttgcccactacagagaccagtccaacatgggaacctatggcaaatatggatacggactgcttgtgtacgatgtgagcgacctgctggaggccggggataacgtgttcaccctgacaaaagatgccaacatgactgccatctacccaagtgttctcgtggcaggctacgaccaggaagtgtcggacagcatgaagaccatttacatgttcaacggcgcagacctgctgtccaatgcaaacaacttcttgggacgcgtggttgcctctaacagtgttctcgacattgagctgcccgacgatgtcattgattgcgcactggggatatttgctgccagctcgcaaaaaggcgaaggcaatctaatagtaaacggagaaagctttgaggatgtttggaacggatcttccaacagtgtccaggcctgcgtgtttaacctcacagatgacatcgaagagtccaacacagtgtcatttgtggccaccggaagcacgattctcgcccttcagcaattcatcttcgtggaatacgagcttgtttctgttgacgccaaactaggctctgaatacaataacgtggcctttgccgggaccgacaatgtcttggaatttaacattaccaacgacgggacaattcctaccgcatacaccattgagttctacatcgatggcgaattggcagacactctggaactcgaactggctaacggggaaagcgacagcctataccttgtggacccaaccatcagaccagtggatgaaaccactgtgaacggcgcagacaatgctaaggtcaactacacggtggttatcacagacaattcaactggagatgtcttggacataatcacgatcactccttctgtcctctacaacggtaacctgggcaaagacctggcataccccgcgggcgaaatcactttcttcgatgtgattacagtgaatggcgatatcatcgtcataggaatgaatgattccacctacttgggctctaagaccacaggccggactgacgtatgggacctgaccactaacgaagatattatctttgccgccggatacttgtatgttgcctacaactgggataagaccccggccggaatgccggtgtggaacaccacattcaatggcgtgacggtcactccggttgcacactaccgcgaccaatccaacatgggcacctacggcaaatatggctacggacttatcgtgtacgatgtaagcgacctgattgtggctggggagaacacattcaccttagaaaaagagaatggcaccactgccgtgtatccaagtaccctggtcgccttctataatatgcctgagtccagcacttatgtgacgacatacctatacaacggcgcagacctgctgtccaacgcaaacaacttcctgggacggctggtggcctctaacagcacactcgacatcgattcgtttgacaacatagtcggcgctgaccttttagtctttgcagcgagcgcgcaagctggagaggggagtcttgtcataaacggcgatctggttgccgacatctggaatggcagcagcaactccgtggatgcatacgccattgacctcggcaaaaaccctaaggcatctaatgaggtatcctttgtggcaaccggatctaccattctcgcactgcagcagttcatcgttgtggaatacaatgttccctcagctgaggccagcctcgtgagcgaatattctaatgtggccttcgcggggaccaacaatgtgctgcagttcaacctcacaaacaacggcgccctcaacacgtcttacattgtcgacttctatatcgacggcaagaaggtgaacagcacgcagatcgcactcaactctggcgaaagctttggccagtactttatcgatgataccatcaggcccgtggacgccagcacggtcaacggcgcagccaatgctaaggtaaactacaccgtcctcgtcagcgacaaggataccgggcttatattggatgaggtgaccctcactccctctgtattatataacggtaacctgggcaaggacttagcccatcccccagaggagatcgtcctattcgacaccatcactgtgaacggggatgtgatcatagataccctcgacgattcgacctacctgggggccaagaccaccggacgtactgatgagtggaacctgaccgtgccttccgacgctgacttcgaagtggcatacctctatgtggcctacaactgggataagactgccagtggaatgcctgagtggaacaccaccttcaatggtgtcaatgtcactcctgtggcccactaccgggaccagtccaatatgggcacctatggcaagtatggatacggactgtacatttatgatgtatcagacctcattaaggccggtctaaacacattcaccttaggcaaggagaacggaactacagcggtgtacccaagtacgctggtagccttgtacaatgttaacgagtcaaatgtgctgacgaccgtgtccctgttcaacggtgctgacctgctgtccaacgctaacaacttcctgaacagaacggtggccagcaataatgtcctggaactggatttcaccgtgtttgacgaaatcctatccagccagctctatgtgtttgctgcctccgctcaggcgggcgaggggaacctcatcgtaaacaatgaaacattcacgaatgtctggaatgggacttctaatagcgtagatgcctacatcgtggatctgggaaatgaccccagcctgtccaatgatgtgtcatttgttgccaccgggtctacaatcctggccttggagcagtttgtcgttgtcaaatccaaatatcaaaccagctctgacctgcagaagctcatcgatgctgccgaacccgggtcgaccttggatctgggggacaacgtgttccaagatgtggctaacgtggtgatcgacaagaacctgaccatcaagggcggttccatcatgggcaaagctggagagaccatctttgtaatccccgcaaaatccgccaacgggcccgacgaggtaaacataactggcgtggactttatcgtggaggacgcaaatgtgattgtgcaggcaacggctgacaatgggagcagccccacgtcaatcgacactccaaacatccgaatcagtgacaacttcattgacatgatcgacgggagtgtggtgcccgaatcagtgactgtcctgaaacttgactccgaaagaggcgtcctggcccctaccggggagctcaaggtcactgacaacgctattgcagctggcatcaaaccattcgagtttgatgtcacgggcgtgtccaacggcagcgacaccaatattccagagggcggtaacattcctgctaaacaggcgtcggtgatccactatcaagatatggaaacaaccgccgtgaactctaagattgagggaagagtgggcaagtacttcgaggtcaacctgacagacaccaatggcaaccccctggcaaataaatttgtccaaatagggttcaacggtgtggtatataaccgcacaacaaacgaaaccggcggagtcaaactccagatcaacctgggctacaaaggcacgtacacctttgcgatctcctacctcggagatgactactacaacgggagcttcgttgtttctaagatcaaggtgagcacccaaaacaccaagctgactactgccgccaagacctataaggcaagcgctaagaccaagacactgacggcaacactcaagtcaagcgtgtacaacaaaccaatcaacgggaagaaggtgacgttcacagtaaacggcaagtcctactcagccactacaaacgctaaaggtgtagcaacggtgaaagttagcctgtcaaccaagaaaacctacagtttcacagccaagttcgctggcgacgatatgtacaccaaatcaagtgttacaggtaaggtgactataaaatga

SEQ ID NO: 4265 - DNA, 351 bp, synthetic construct
  source 1..351: mol_type = other DNA
atggctagacgacgctgcaataggcggttcgaaagtgaggaagaagatccgatggccggaaccgccaacctggtggacgcaatgctggtcattgccgtaggcctgctagttttccttgtgctggcctggaacatgcagagcgtgctctttaacgagcagctcactcaagaggaaaagcagcaggtcatggatgcgatgaaccaggagatgaccgaggtccaggagggccagatcttgaatgaaactccagacacaagcaacgcaacagggcaaggctataccgagatggggaaagtgtacaaggacccctcaacgggaaaactgatcatggtgcagaataactccgcttga

SEQ ID NO: 4266 - DNA, 747 bp, synthetic construct
  source 1..747: mol_type = other DNA
atgactttagccattggcaacactctgatttttgctgacgaggctatctatcagggcgccaacaatggactattcgccatcttctcaaacacaaacggaacgggctttcccttcctggatagcagcctcacggccataacccaagccctgcagatacctgtcatcatccttcttctcatctttctggtgttcgctgtcgtgacgctcgggaagctgctctccgaatacctcagccggaagaaggttccgatcaaattaatcaaagagatgatttacagcatctacgatgctcagtctgcggaggagattaaaaatatagtaaacagttccgacattcagtcctcacagaagaccatcctgtgcgagctcgctgacagtgaacacctcggtaagaaaagccgcgagaccctggcccggagactgattgataacgaagaggacaagattacccaaaatctgcagaagactgatatagtgacaaggatcggtcccaccctgggactgatgggaacacttatcccaatggggccaggccttgcagcattgggcaccggggatgtgacaaccctggcaagcgcaatcaccattgccttcaatacaactgtgatcgggattggcgccggcgccgccgcgtactttgcctcgaagatccgcagacgatggttcggggaatatctggcgaacctggacgctttgatggacgcaatattggacaatatcaacaaaagggatgaccgtctagaatga

SEQ ID NO: 4267 - DNA, 4113 bp, synthetic construct
  source 1..4113: mol_type = other DNA
atgaatagtaataagacctatgcagtgttgggactgctgctcttgttaatcttgtccatcggcgcgattagtgcagaggactcgatagatgacatgagtctgacagacattaattctgcagataattctaacattaatcagatcaatgccattgacaattctattgacaccagtaccgattcttcaattgacaccgacaattcgattgagacaaatctggacagttcaattgaggataaaaactctaccgatgccaagaacaccctttcctctaacagtcttgcctctacatataagataactgaaaaagactacttaacttactttgacaaagatggaaacatcttatctggcaaattgaaaagtggagatacgatcgatctctccggcacctttagtaaaaaggcgtttgtcataaacattccactgaccatcacaagtagcgacggcactgcaaagctcctgaactccaacataaaccttgtaagtggcgctcaaggttctatggtgtccaatctcaatatgaatacaagcgtggagaagactcccgccctgagcgctgtcaatgtgacaaaggtctcctttgtgaataacacagtgctctcgactgcaaccggctcgtatgccttgctgctcaacacggtgaacaattcagacgtgctatttaacacattccaaaccacctgctttgtggagggctgggggcatccttctgccttggtacttagcggttcaaactacaacaacatcagttccaacaacgttattgttaacgattcaaatggaatctacctcaccggatacctgggcggaggaagcatgggggattccacccaggggtcaaacacctacaattatatatacaacaacaccgtgcacagcgtgaggggggtggaatgggccaaggataaggatggaaacaagccactcccctcgtcattctgttatggtatccaggttatgggtgcctacaacgagatcattgagaacacggtgtataatatgtaccggggcataagcgctacccagactggaaataaagttgtcaacaataatctaagcaatatccatgggacctggtactctggcggtacaaatgacgatggcgccgactacaccatatatgtaactaccaactctattgtcaaagacaatagtatctcggactccaaaattggggactccactgcagcgatccacgcggcagccaacacgaatgtgactaacaatgtcctctccaatatcgaaggaaccggcgtcttgattgaagggaacaatgttgtctgcaacaagaatagcctgctgggcctcacaaacgacggaatcatcgctaaaggaaatgtgagcaacattgacatttcaggcaacataatcaatgcctcagaaaccgcggtgtccctggtgaaaaccagtagatctctcgctcctcatgacattaccgtcagtgaaaacaccatcttcactaccaaggagaaccccatcagctatgaagaggcctactcgaccaacataactgtggaaaacaaccgaataatcaaggaagcctccaatggcacagatcctagcaccgagggtaacgggacctactacattatcgattccaacttctataactatttcgacaacacaggataccttaagagcacaatcaaggagaacgacatcttgatcttcgtgggcccaatagagagcaaggacaaaatctacataaacaataaggtaaacatcacaggtattgacgccgtcttcaaagacacaaccatcattgttctggacgacggcgttgtcattgatggaatcacaatcaacaatcccaatgaggctaaaaacgaccgggaatggggtattcaggtaaacggcgcgaaggacgtaacaatcaaaaactgtaacataactatctatgatgccttctccgcctatgcagtctatctcattgactcatcggattgtaagctaatcaacaacaatcttgaagctaaaggcgactatttaacgtctgccgtgctgctgtacaatacaaacaacacagtactaagcggaaattcattaaagacaatcgggacgggtcagaattacacgttcctcaatgagtcctgcttggatggttgtctggatgggtgcctcgacggctgtctggacggttgcctggacggatgtctcgatggttgcctggatggttgccttgacggctgcgcagacggatgcgctgacggctgtctggatggggcacaaggggtcaaccacataatctctggaatattccgcacctatggcctgttcatggtctacagcagtaacaacaatgtcaccgacaacaaagttgatgtgagctctgccctggaaaaaggctatgctacgtatatcgagagtactaatgctattgggggcatctttatccaccacaacagcaataacaacatcattaaatcgaataatataacactgaatggtaacgacccattcatgtacggcgctggggtggtgggggggaacagcaaccacacggattatgtttcctcaaacaaccaattcgagtccaacgccatcaatgtgaaatccccttactacgctatcggcatcttgctgggctacaactcttccaagagcactctgaaatccaataagatttccctcagcgcaaacaattacagctacaatatcgctagttacaagagcagtgagaacactgttgacggaacggtgaccgtcctcaaagacactatagttacctccacaaacatcacggcacagtcaaacagtccgattgtgctaaacctcactgttctggatgaagacaataagaccgtgactgtgggcagcctgctggcttatgtgaacaacactcttgtaaatagtacatcgatcaagggccagagcacctccctggggattggcgcgtaccccaaagggacctacgaccttgtggttctgtatgtgaatgggggaatctacagggtaggagctggagcatgccagttcaatgtcagcgatgtgattaatactgggaacggcacaaaagatattcaaaacgctttagataatgccaaggatggtgcaacagtggacctgggaaaccaagagtataacaatgttgtgaacgtgcagatcaagaagaatgtcacaattaccgggggcaagatctctggggacgggagcaatccgatctttgtcatcacgcctaaatccaaagggggaccaaataatgtgagcatcactggggtcgagtttaatctgggcaatgggaacattgtggccctggctacggccgacaatggaaccagcccactgtccattgacactgcacagatttcaatcaagaacaatgtcttcaacgcggttgatggagcggtgcccgaatccatcaaggtcctcgagctggacagcgagcgtggcgtcctatctcccaccaacgacatttccgtcaagagcaacaccctgtcaagcgggatcaatccctttgagtttaaagtgaccagcgtggccaacaacaattcaatcaatgtgccgtcaggtggcaacctggcgcagaagcaggtgagccagatccagtaccaggatatggagaccatggctgtgaacgccaagattgagggaagagtgggcaaatactttgtggtcaacctgactgatgatgccggcaagcctctggccgacaagttcatccagatcggcttcaacggtgctgtttatgaccgcacaaccgatgaaaagggccaggccaaattgcagatcaaccttgggtacaagggaacctacacctttgccgtgtgcttccttggtgatgataactacaacggcagctttgtggtggccaaaatcaaggtgaacactcagaagacgaagctgacaacggcctcaaagacctataaggccagcgctaagacaaaatccatttccgccacactgaaggacgccagtggcaacgcgattagcggcaagaagctgacgttctctgtgaacggtaagtcctactcagcaactacaaacgctaagggggtagccaccgtcaaggtgagcctctccagcaaagggacttacagtttcactgcaaagtatgccggagacgatatgtacgcctcttccaccgccagcggcaagatcacgataaaatga

SEQ ID NO: 4268 - DNA, 3495 bp, synthetic construct
  source 1..3495: mol_type = other DNA
atgataaataaacggataattagtcttagtctgctgattatcctggtctttctcatcatcgggcttagtgcagtcagtgccgaggattcgtcaaaagctgccgatctggacctgaatagtagtagcgtgagcaatattgacttaagttctaattctgtggctattgagtctaattccaatagcatcgctagtgagagtagttcgaacattgtcttggacaacaaatcttcagacactacagacattcaaacagatagcgattctagttcagacgacaacctaaatcacgatagcaatagtaaaatcaaatcagacaattcgaaaaaggtgcatacgatcaccgaatctaactatagtctctattttgattctaacggctacctaaacaattcattagtgtcctctaacgatacgatcaatttgtctggtaacttttcttcaaagtattttcgcttctctataccgctcaccattacgagcctggagaacgatgccttcctacgcaactctccaatcattatcactggcgtttccaacgaaaactatgtatacgacgcaattgtgtcgaacctgaccattgaaagcgacctggcgaacatatcggccgtttgggtgattggttccagcaatataaaggtcctgaacaacaatatattcacgaccgggcacaacggatatccgatcgctttggatagctttgtatacaactgcattctggcaaacaatacaatcaagacaatcgtgcctgtcagcgaagcgatgagctcgaaggacatcgatgaggacaaccagacaaacaactccgacaacagcagttggcagcattcgggaatcagcctacgtgatgcccactacaacactgtcgttgacaacgacattactgttgagaactcctacggcgtctatctctgttatggggcgtccatttcaaactacaatgtcatcgcgaacaacacaatccgagccacctccgaaacgccctccttttggtgttacggggtttacatcactggaaactacaatctgatatacggcaacgacttctatcacctttaccagggagtccattcaagctacccatacaactctattgtgtccaacaatttctatgacattgacggactcgatgacaactacggtgccggcggggactttggcatctatggaggcaacaacacactgatcgcaaacaactccatctataacgccaaattgtacaatgcaggcattcttgtggggacaaattctgaagtttatgggaactacattcaaatcaacagctccggggagggcatccgcattggtgataaggagggggggtcatactcaaaggtctataataatacggtggacttccttgacgggaaaggcatatgcctctacggcgagccaaacagcactctggtgtatgataacatcctcaattccatctcgtccattgatagcctggacctgagcgctgaatctaaagggtcggggctcggcatcggtatctattcacattaccagagccgggccaaaagaccctacaacattagcacctgcaacaatacaatatacacgtcaaatgactacgcaatagacatctcccagagctccactaaggcctacacctgctatggcaacctggtctttggaaagggcatcatctatcccatggaggtggtgtacgtgcccgattacggggagggaaacgtatacgaggtgagcgaagataacttttacacttacttcgactcttccaataagcttagcgataaggtaaaggacggggacagtctcatctttgtgggagagttctccccgaagggcaagatcaccttaaacaaggaagttaacctgtttggctacggtgctctcctcaagaataccacggtcttcatcaacgctccaaactgccgggttcacaacttcaccatcgtcaacaacggcattgatgaatacaacctgtggggagtctatgtgtttgaggccgacaatgcaagcatcgtgggtaacaatataagcattttggataagaacacatcctatggcatctatctctgcgattcctatgacaataacgtttcagacaataccatttcctgtcaaggggacaacctggtcttcagcctcctgacatatgaggcttacgacaccttatttgaaaacaacaagatattggctatcggaacagatgagctctacccctattatgagaccatctgtatcgacggcgttcacagtatttctgagctatcaaagacctatggggtgattctggattcctcctctagaaaccagttcatccacaacgacattgaggtgacctccaccctggaaggcttccatgtgccttacaacccttcagtgaacatcctcatcggcctgtacatctattacgccagcaactacaataacataagcgaaaacaatgtgtacgtgcacggacatgatcccttcctgtacggagtcggttcctcgggcgacgacacaagtaaaagcgtgacctacgcttgcgagaacatattctcccacaataatatcaccgtggaaggtgactactttgtgatgggtatgattctcaggcacaattcaaaggacaccatcgttgattccaatcatttcagattgaacagtaataattacacctacggaataaccctggagatcagcgaaggggcgaaggtcacaaataatgtcctgaacagcactggaaatgccgggatctatgccatggagctgtatgcctccaataataacgatattaaaagcaatgagatttacgcctcggcaagctacagcagcgtggcactttatgcctcaagcaacaataacgtgactcacaatgtgatcaaaacctacggaaataaggtgcaggaacctgcgcagggccctgagcaccccgactctgttgatctgttcaatacaggaatcagtctccagaaattttccagcggcaacaacatctctgataatattatcgaaaccgatggagatgctgccgtggacttcgatgagacttccaccgggaatacagtgggcaacaacgagcttagttctacaaaaggcgggggaaatgctgctgtaaatgacaggaccggcaagaacatggtgtatggcaatacgggaagccggtacgtgcccaattccaatagttcctcaaactccaacaaccagaatagtggtgagaggaataccgtcccaacgaatggcagctccaaccgatataatgatggcggagaggaatcaggctcaagcgccttcgggcaggtggacctgggcctgctggccactgcaatgtctagcgtaggggaaggcactggagatgtcggggaaactggtgacggcgagtctgacctgattgtgagtgagttggaagaggtggcctccaaatccatggccggtggactgtctgtaccagtagcagcgttacttttggtgctgatgttctgtttcagcttcctgaatgccaaggacgaggatgacgagaacgacgatgagaacgaggaatga

SEQ ID NO: 4269 - DNA, 5055 bp, synthetic construct
  source 1..5055: mol_type = other DNA
atggatttcaagaaagccatccccctatttgctttgttgctcttgattctgtttatcatcggctcttcaagcgcagcgtcaagtgatctaagttcaagtcctgccgataatgaaaacctcgaaattgacagtttcgactccaatgaggacctcacagtgaatacgaatacaaactatattgagagcggcaacaatttggagattgactataaatccaactcgaaagagtccgtgaatgcaaccaacgatataaaagaagaaactgtggattacaatgaggatatcagcgttgaaaagaataatctaaagtctagcaaattgagttcggtgtataaaataaccgagtcgaactactctaactacttcaataaaagtggcaacatcctctctaatgtgaaccccggggacacattggacttttcaggttccttcaacaataaggacttcaaaatagacattcccttgaccgtgaccagcagtgacggtgctcaattcatcgactgcagcttcaagttcaataagggctctgacggctctaacatatccaatctgaacattaactcctctcgcctccagagtccgctgatctacctggattctgtcagcaacatgaatgtcttcaacaacaacctcttctcctgcgcctcaaaatcctatgccctgtgttttagcaatgtaagctactcctctgcttatcacaacaccctgcagactacagcatttgttgtgggatggggacatccctctgcctttgtcttggccggggcaaataacttaaacatctcctcaaacaatgtgatcgtcaacgattccaacggcatctacttcaccacatatgttggagacacaattagcgcgaacctgatcaatgagaataattacatcttcaacaacaccgtgcacagtgtccgaggagttgaatgggccgttgacgaaaatggaaccactcctctcccatcctctttctgctatgcgattcaagtgatggggagcggaaataaactgctgaacaacacggtctacaatgcgtacaggggcataagtgcgtccgggagtaatagtgtcgttgccggaaacgtggtgtacgatattaaggggaattattacagcggaaacacaaaggatgacggcggagactacggaatcaatgtagggccaaattccattgttgagaacaataccatttataactcccactttaacaagaactctggggtggccatttcggtgggttctaacacaacggtcaggtataacaacataacaaacatcaatggcaccggggccgatctgtccaaaaacttcatagaatttagccataatcgcattgataacgtgtcagataacggaatcagggtgaaaggccaatatggtaacaccaatatctccgataacttcatcaattccacagacagttcaatcactctgctgagaagctcaaaggacaaatacccgtcccggatcaatatcgagaataatgatttctataccgacgtctcccctatctactacctggaagggtatattggcaagctgacagcaaaggacaatacgctcaatgggtcctccatcagcgacattagtattgacgtgccgagctccagcgaaaccaaggtgtctataaactcaaccaaaattgatttcaacgaatctgtgctcattatgcccactgtcagcgcctacggtctgtcacttgaaggcctggtcgacattattgtcaacagccagaagattgccactgtgcctatcggatctaattacacgttcacgccaacggaggcaggaagttttagcataaacgctaacttcacaggtaatgaagagtataagccatcggagtccgcggtgctcattctgactgtgacccccaaggagactaccacttccatcatcataagcccaagcacggtggagcttaacgatactgttgtcattagtccctttgttcggtacaacggcactctgctggaggggttcgtggacattctcctggatggggaaaagttagataccgtagagatcggctctgactacagttatgtgcccaatagttcaggcagtttctacatcagcgccagcttttctggcgggaatgggtatggggcttcggtgtccgacatgctcatccttactgtcaatgagtccagctcaatcgaggacccggatgaccccacgaatttgacagtctcgtccatccttatcagccctaacacggtggaggtgaacgatacagtccttatcagtccctttgttcgctgcaatgggaccttgttagagggtctggtggatatcctgatcgatggggagaagttagattccgtggtgatcggctctgattacgcttatgttccttcgactgccggcactttcaacatcagcgccagttacgctgggggaaatggctatgagccatcggtgtctgatattgtggtgctgactgtaaatgagaagcaaatcatcgataacggtacagacaataatgggacagacaataacggtactgatacaaacggcacaggcactaacggaacggacaccaacggtacagacaacaacggtactgatacaaacggcacagatacgaacggcaccgagaacaatgggaccgatacagatcagatcaaaataatcattaatgacgacaattactccgactacttcgataacggctatcctatcgacctggatgtggatggcaactacacgctaatcatcgactcactcaacaacaaggacataatcatcccatccggattcaacattaacatcatcggaaaggagggctctggcaccataaacaacggtacaattcaacttggggacggcacagatgaggtcggtgacgtgaagatatccaatctgacctttaacaattataacaaggacgctatcgtcattaacgaaattgcctacgacctcacggtggagaacaacaagatcatcatcaataccgaagccagtccgggaaacctatactttagcgtgtatggaatcaatgccaagggctacgtggactcactggctgtcagagacaacgatattttcctaaacggttccgccccctacctgtatggtgttagtttgggaggctacggggccatcgctaacccccagaatatcttcgtgcagaacaatacaatcaatatcaacagcacggccagtatgggcatggctgagggcatttacttagacaaccctattaatgcagctgtgctggacaacaaaatcaacatagagtcaatcaatgatgtatatgtttacggcatgcagatcgcggactcggccttcagcgccataggggagggaaagaccggtgtcaaatccccttatgacataatgatcgagagcaatgacctgaacctgaaaagcaaatacatggtgtatgggatcaccattctggactacggctgtgacggcagcctgaacgaactggggcagcctatgaccaatatgatggacctggacaccacaatccagaacaacaatctcgtggccgattctgagaaggcagtgatgggaatcgtgggaaagacctacaatatgtctgtgctgtgtaacaatctgtcggtaattggaggaagcattgagggcgttgcatcccacgatgcattaggagtggataactacgctcttggagtccagtactctggaaaggattatacggtgctggtcaaggacaacaccgtgagcacaaatgtgctcgcggagtacctgaacaataaagactacgaagcctatgtttcatttgtgaacaataccatataccatattgacggcccatctagtgggaatgacactccagagaacggcactggggacaacggcactaatactaatggcacagatatcaacggtacagacactaacggcacggacaacaatggcactaataacggtactaatggcactaacggtaccgataccaacaacaccgacaacatcactaaacgaacagttaaagatctacaggaacttatagacaacgccactagtgggtctgtggttgatctcggcaactttgaatatcttgacgtatcgaacatcgacatcagcaaggatatttctatcgtggggaacaataccgtcatccggaccgctggtgacggcaagccagtcttcaacattaaggaaggcctttcctcagtgtcaattagcggaatcgaatttatggcaaataacggggatgtgctgatccgggcgaaagcagtcaactccacgagccgcttggctatcgaaacccctgaaatcaacataattaataacaccgtaatcaagtcagacgacggggttgtagccgagtcagtcaccgtgctcgaactcgattcgtctcgttgcattctggcccccacaaatgacatcaaggtctccaacaacaccctggagattggcatgaacccctttaactttgtggtggagagcgtcattaacgctgcggatgtgaatgttccagtggggggcgaccttcagagcaaagtcaaatccgtaattcactacgaggatatggataccgttgccgtggccaaggctgacggcagggtagggaaatactttgaggtgaatctgaccgacagtgatggaaatcccctctccggcaaattcgtccagataggattcaacggtgccgtctataatagaaccaccaacgaaacagggggggtgagactgcagattaacctcggatacaagggaacctatacatttgctattagctacctcggggacgagaactacaatgggagctttgtcgtggcaaaaatcaaggtgagcacacagaacacaaagatcactagctcatcaaagacctataaggcaagcgcaaagaccaagacgctcactgctacccttaagtcctcagttaacggcaatctgattagcggaaagaagctgaccttcaccgtgaatggcaaaagttacaccgccaccaccaactccaagggcgtcgccagcgtaaaggtcagcctgtcaagcaagaagacctatagcttcactgtaaaatacgcaggagacgacacctactcctcttccagtgccagcggtaaacttacgataaaatga

SEQ ID NO: 4270 - DNA, 8907 bp, synthetic construct
  source 1..8907: mol_type = other DNA
atgaagctgaaaaagttttcagtcatcctggcggtcttgcttgtcgcaatacttgctattggggccgtgagtgctgagtcagtctcagatactgatgtcgccgctgttgccgctgtggatgatacagccggcacagtgtctgtggacgactctatagatgatgtgtccgtggacactacggacaacgatgttaagaacagtctgagtgctgttgccctcgaagacggggagagtgtgagctacgagatcaacgacacttcttactccacatacttcaaggacgacggtactgccactgatgaactcagtgaaatgggtggctataccctcaatataggaacccttactaataaggacattcagataatatctggttccgacattaatatcaccgccaaggatggggaaggattcattaacaacgggaccatcattctggggggcgatgaatttcccgggagcataatcgtgtctggcttgacttttaccaataccaataaagacgctattcaggtgctggattataccactgatgtcagtatctatgacaacaatatgaatattataggaatcagctcgctgtcatctgatcccaatttcagtgtttatggtgtgagtgccaatgggtttatttcaggcctgtatatcgagaataacaccatgtctgttgaaggcgatgcgctgtcatatggcatcgaggtgggagcctattcggatggggcctacgctctatcaaacccgcaggacatcctgatatctggcaatacgattgatgtatctacttccggagccatggctgagcccatgtacctctctgatgtgtgggatgtaacagtggtgaataactttgtgacagccgaatcagtgaatgcgccagcgtatgggatacaggtggccgattccgccatgtgggcatcctacatggacccaaactacgacggtgatttatcgtctccgaacaatgtactcatcgatggcaatacatttattctgaacagtgactttatgatttacggtatcacgacaataaattacgggtgggacggtatagagatggaatcgtatgctttgcctttaaacataaccgtttctaacaataatgtgtatgccaactccaagaaaggggtgatgggcattgcagggcagatatataaccttactgtgatagacaacactgttattgccatcggcggttctgcggagggtttgtatactggggaccttcttggcaacgggacgtatgccctctatattgattacgatggcaattacgctgaagatacgtactatgtggttgttaaagacaatgatgtgttcacaaatgtcacgaaggagtatgcattcaataatgattatgagagagtaattttcgagaacaatgaagacctcaagaccttcgtgatcgacgacgagacttactccatcttcttcaacgatgatggaaccagtgatgtgctcgaggacatggaagattacaccctgatgatcgggcctctgaacaacaaagacattgtgctcgactcaggttctgagatcgtcattctggggctggatgaaggctacatcaataatgggaccatcgtccttgacggtgtttccgacgtctatgtgtcggacttggtcttcgtaaatgtcaataaggatgcattttacattggagatgaatcaaacgaaattgtaatcgtggacaatgctattgtgctggttgggaaggctgccgagtccacgaacccttacttcagtctgtacgcaatatccgccaacggatacgtcactggattgaacattacagacaattccatctatattacaggggatgccccctattcctatgggatctctctcagtgcatacgccgctgagttcaaccccgaggatattacaatctataataacactattgagatgagtctgtccgagggatcaagtatggcggaggctatttacctcgattgcccgtcagatgccactattgaggagaacaatattaccatagaaactgtgggaaatacctttgcttatgggattcaagtggccgacacactgcccgccgcctatgagtatgcgagttatcgaggggagttaacctcccctgagcttgtgactatcaaaggcaacaccctgaacataagcagcgagtatatgatttatggtattaccgtacttagtgaaggggcgctggtgaacggctctggcgatctggccctttgccagtttgagttattcctaaatgtcagtgaaaatacaatctatgcggactccaccaaaggtgttatcggccttgcagggaaggtgtacaatattaccatgaacaataacgacctctacgtcacgggcggcgacgctagcgatgtgttttcctatgacgacctgggtgtgggaacctacgcggtcggcattaagtataatggcgattcagaggacggtaactactatgccgatgtgtttgagaacaatatctttaccaatgtatctgccgaatacataaacgacgagaccgtgctggacgaatacgtgttctttaataatttcatcccactagacctgggaatcgtcctcgaagctgataaggacgctctggagataggcgacctaatcaactacacaatcaccgtggtaaacaacgggccaaatgctgcttcggatgtgtatgtttcctttgagctcagtgacattctcctcctggtgacggctcctgaagagtatgatgcggagtttgagctcctcaatgtttccgacctggctgtcggtcaggagaaagtgtacaatatcgtcgctcaggtaatcgacggaggatatctcttatctacagcttatgtggattgctacgaggatgacacctatatggataacaatactgcaagtctggatatgatcgccgtgcctatagttattgatgatagcaactatgctaattacttcaatgaaaacggatacttgaaagacgacgtgattgccaccggcacagttgtgttgtttgggaatctgaccaataaggacttgtttattaatgcccccctgctgatctctgattgtaaagacacgaagctggtcaacacgaccatcgccctcgtggagggggcagacggaacattgatttcaggtcttgtctttgattacaccgccaaggacagcggattcgctatcatctctgtgaatgacggggtgagcgatgtgctcatccggtctaacaatatcacggtgacagacattcctgattatgtcactgccgtggctattggagtgtacggagcagtcaacggctctgaggacatcactatcgaggataatttcatcaacatgaccggtggcaacgcttacacctatgggattaacgtacaaaactatgatcaagggtgggttccaggcgagggggcgtccggcgttgagatcctagagaataccatcatcttaagtgggaccggcatggaggaagcgattttcctgtcggggctggaagatgtctacgtttacaagaacacaatcgtttccgcttcgttcggcgagaatactggttgtgacgcctatggcattgccgcagcgaatgtgagcgaactgataatcgaggaaaaccaaatgggggtcggctcaaatcagatggcctttggaatagctatcaccaccaaatctaatgatgtggacgtcttcaataacagcattgacgttgaaggtacaggggcgattggcgtgggcgtgcaggatagtaccgacgtttccgttacattcaataccatctgtgcctacggggatgacttcaccagcatccaaacctacgacagtttgggaactgccaatgcagccatcctagatgagaccggagaagcactcatagaaaacaataccatctacgagtacttccctataaccattagcgatgacaactatgctacgtacttcgatgagagcggcaagatcaaaaatgattccggcatcgcagggggcgatctgatcttcctggacgagctgaccaataaggccctgacgatagacatccccttaaccattaaaggggtgcctctcaacgccttggtcaacactacaatcaccctcctggccgatgccagcggctcaaccgtcaccaagctgaatatggagtttacgggggacgagaacaccggatcggtgggcattatctacgtccttggtgccagcgacgtggagatcacggataacgtcattattgtccccgcctttgtagacaagactggcgccaaatacgggtccagcctgtacgcgattgaggtggagagcggggccgacggatgcagttacatagacatctcagacaacgtgattgacatcatcgggtctgcaaggtacctgtacgggattgacgtgttccagacctggggcagcgaaaacaaaaacagctacgtggctatctgtgataacttcataagtgtggtaggggcgtccaggatgtcggaaggaatctacgcaagtggggttgacgaattagaaatcctgaacaacacaatcacttcagtaggtcaggctgccgcatacggtatcggaactgacaccctgacagactccatcatctccgacaacggcatggaggttaatgccggaacccaagcgtatggaattaccaacacctacagcgacggcgtggaaatcacagcaaacgtcatcagctccacgggtgaaggtgccatcggtatcggcacaaactccgaagatgtcaccatcgccaaaaaccagatcacaatcaacggtaatgattacaccacaatcacttcagcagacacgctgggcacggataacgcagccatcctagacacaactggcgaggccacaattgagaacaacacaatcacggagaattgtccaataacaatcaatgacggcaactatgccacttacttcgacgagaacggcagtcttaaaaataattccggcattgcagatggagatctgatcttcttcggtgaactcagcaataagaaattcaatatcgataattacctcatcattaagggtgctaacaacaacaagctggtaaacactacaatcgcgctaactgctggcgcaagcgggtccaccttaagcaggctcaatatggagtttactggcgacaacactacaggctctgtgggacttatctatgtcctgggcgcaagcgatatcgaaatcagccagaacacaatcaccgtgattgactttgtggataaggcaggagccaaatatggctccagcctgtacgccatcgaagtggaaagcggcgagaacggctgcagcttcatagacatttccaacaacataatcgacattacagggtcggcccggtacctgtacgggattgacgtattccagacctggcaggctcccatgcgcaacagcgacattgccattacaaataacttcatcatgatcgacccggcaagcagaatgtctgaggggatctacgcaagcggaattgacaacgccattattgccaacaacacgattatctctgaaagcgacgctgctgcatacggcatcgggactgacagtctggccaactccacaattgctgacaatgtcgtgcgggcagcggccgccacgcaggcatacggaattaccaacacctatagcacaaatgtggatattgtcaacaacactgtcaatgccgaggggataggggccgtcgggataggcttcatgggctcggagggtgttactgtggctgacaatctcattgccatcactgggggagactacacgtcaatcacttcctcagacagcctcggaaccgccaacgcagcgatcttggacaaagacaacaaaggaactatctcctacaataatgtgactgaaaacatccccgtcaccattaacgacggcaattatgacaattacttcaatgaggatgggtacataagaaatgactcaggctttaatgatggcgatctggtcttctttgagaagctcagcaataagaacatagtgctggatatgccgttaaccgtgaaaggggcgcccggaaataaattggtcaacactacaatcacggtcctggatgatgccagcggctcgaccatcacctgcctggatatggagtttactggcgatgagaacacaggctctgtaggaatcatctatgtcctgggcgccagtgatgtggagatcagctacaacaatattaccgttcccaatttcgtggataagaccggcgctaaatacggctccagcctgtacgctattgaagtggagagcggccaggacggctgcagttatgtggacatttcaaacaacataattgacattacagggtcggcacggtacctgtacggtattgacgtattccagacctggcaggctcccaacaaaaacagctacatcgccattgccgacaatgagatcagcatccagagtgcctcccgtatgagcgaaggcatctatgccagcggaatagagtttgcagaaatctcaaacaacatcattaattcagtgggcgaagcagctgcatacggaatcggaactgatacgctgtccaattccataatcgaagacaatgacatcgtggttctggctggaacccaggcttatggtgtgaccagcacctacagtgacacggtgaacctaacaggaaataacatctccgccgtgggggtcggcgcgatcggagtgggctcaaacagcgacaatgtaaatatcgataagaacgagatcagcattctgggtcaggactacactgccatcacgtcagcagactccctcggaactggaaacgcagccatcctggataagggaacgaagacgacaattggaaacaacacaatcgaggaagtggcgcccataatcattgaagacaacagctacgacaaatacttcgatgaaaacggacagattaaagaggacgctccgataggctcgggcgacgtagtctatatgggtgtgttgaccggcaaagatatggtcttcgacattcctgttgcaatcctacccgccgacaacagcaagctgaccgactccaccattaaagtggtggaaggtgctgatgggaccacaatcaatgggttggacatcgagtataccggcgatgagaacacgggctctaagaacatcatcaacgtcgttggcgccagcgatgtgaccatttccaacaacaacataatagttccagactttgtgaacaaggccggatcaaaatatggctcctctgttgcagctattgccgtggagagcggtgcagcaggcactgacaatactacaatcacaggcaacaacattgaagtaaacggctctgccaactatctctatggcattgacgccttcacgacatggggagccaataccaccaactctaacctaaagatcgagaacaacaacgtttccgtgaatggcggagcccgcatggcggaggccgtctatgttagtgactctaagaatgtgacaattgataataatgatgtggaagcttcgtctgaagccgccgcttacgggattgcgaccgatcaattgtcccatgccaaaatcactgacaacgatgtggcagtcctggctggaaccactggatacggaattaccgctacaacctctggcgaggatgtcctgatcgagtccaatgatgtggaggtgcttggtatgagcgccatcggtgtgggactgtccaaccaagacgctgcaatcgtcaaggacaatacaatcgacatcatcgggggggactacagttcggtcacgtccgccgacaatttgggcacggctaatgccgcgatcttggacaaagacaacaagaacaccaacctggtggtagaaaacaacaccatgaccgaaaacggcaaagcagtcaacaccacccacagcgggaacagctctgccgagcttcaggcaatcattgatgcagctccagccggctccactgtggacctggatggcgtactctacgccgacatcagcaatgttgtgatcgacaagaacctgaccattaccaacggcaccattgtaggtaaagcgggagaggcaatctttgttatccctgccaagtccgagaacggtcctgatgaagtgaacatcaacggcatggagtttctggtgaatgatgccacggtgatcgctaaggccactgctgacaatggaaccacccccacctccattgacacgccggccatcagcatcaagaacaataccatagacatggcaaacgacgacgtcgtgcctgagagtgtgaccgtgttggaacttgacagcgaacgaggagttctcgctcccaccagcgagattgcagtggagggcaacacaatcgccacaggtgtcgatccattcgaatttaaggtgaccggggtcgccgacgatagcggaaacgtggttgtggagaagggcggaaacatcccagctaaacaggcttctgtgatccactaccaggacatggagacaactgccgtgaactccaagatcgaaggaagggtgggcaaatacttcgaggtcaacctcaccgacacaaacggcaatccactggccaataaatttgtccagatagggttcaacggtgtggtctataaccgcacaacaaacgagaccgggggcgtcaagcttcaaataaacctcggatacaagggaacttacacctttgcgatctcctacctgggagacgactactacaacgggagctttgtggtgtctaagatcaaggtcagcacacagaacaccaagctgacgacggccgccaagacctataaggccagtgcgaagacaaagacactgactgcaacactcaagtcaagcgtgtacaacaagccaatcaacggcaagaaggtaacgttcacagtcaacggcaaatcctactcagcaactacaaacgctaagggggtggccactgtgaaagtgagcctttcaaccaagaagacatacagtttcacagctaaattcgccggagacgacatgtacaccaaatcaagtgttacagggaaggtcactataaagtga

SEQ ID NO: 4271 - DNA, 534 bp, synthetic construct
  source 1..534: mol_type = other DNA
atggagattattgaactgatcgcgatcatcatcctcgtggccgccattgtattcctgatctattattacttccagaccgtcaatggaggcagttttgatatagatgacctgaaggaccacctcaccatatcaaagagggaggccgccacggccacagtgaacctggatgatgatgaagcggaagaaaaggtgtctgtcgggaaaaagattaaatacacctttaaggacatcgataaatcatactccaacacgacagatgcattttccaaaagactcgacgccttcctggacgaacggagcgaagagttaatcgagaactggtcgttggtgaccactgacgacttggaatccctggagaagcgctgcgttacagcttgtgacagcattgatgacctcgagaagcgattcagtgaatacagcaacgtgaccaatgagaaacttgaggacctggacaaacggatcaaggcacttgaggaagacagcgagctgctagaggaggacgctgaaactatagagaaggaggcagatgagtga

SEQ ID NO: 4272 - DNA, 405 bp, synthetic construct
  source 1..405: mol_type = other DNA
atggctaacgaaatcataccatccgaaattttcatcctgattctggtggtgatactggcatttgtggtcattatcattgccctgcagtggaagaaggtgcgccagtcagacaacacactcaagctcatggagaaagagatcgagctgaaaaagatcgcgatggttgaaaaggaccttgagaataaacgactgatggaaaatccgatcagcttacccagcgaacagcaagagcagctaacccaaatcagggactccacggctaaggtcatgagcgatgtaggctacctgcacagtgagatcaacgagcggctcgcaagattggaggcccagaccgagcttaagaaattggagaagatgctggccgaaattgaagataaagagaagaaactcaacaaggggaaatga

SEQ ID NO: 4273 - DNA, 930 bp, synthetic construct
  source 1..930: mol_type = other DNA
atggtcgacgaaattaaatcttatgaagaggctggcaagatcgtgtccaaagtcagaagcgatgcatcaaaaatgattgagaacggactaccaatcctggaccttgtggagtttgtagaaagcgagatcctgaagagtggggcaggaatcgctttcccatgcaatgtatcgataaatgagataaccgctcactacacctctcctgccggagatacaaacaagatggtgaccggggaccttgtcaagctggacttgggagccgaagtcaatggctacattgccgactctgccgttaccatcatggtgccaggcgacaacctggaggagctctttgatgaggacactctagaaaagaatcagaggatcatcgacgcctcagccgccgggctggaggctgcaataagcacggtgagggcgggcgtgaaagtctgcgacgtgggacgcgctgtagaagaggccattgctgaatacggtctcaatccggtgcggaacctgacagggcacagtcttgagcactggaacctccatgccggcatttccgtgcccaactatgacaacaacgatcctaccatcctggaagaaggccaggcagttgcaatcgagcccttcgcaacggatggtgagggcatagttaatgactgcccctacgcctacatctttagctttatgcaaagcaagccgttcaggatgaaaaacactcagcggatgctgaatcacatcgaaaagaactatagatacttgcctttctccgggcgctggctgacagagagcttcaatgagcgtcgagtcaacacaggcctcaagcagttaggagatgcgatggcgatttacccctatgccgctctcaaggagcggaccggggcctgggtgtcccagaaggaacatactatgattgtggagagtgatggttgtaaaatcaccacgctgtga

SEQ ID NO: 4274 - DNA, 4416 bp, synthetic construct
  source 1..4416: mol_type = other DNA
atgaaagtgtataaaatgatcctgatatccctgattcttgttatcttgagcatctcctgtgtgagtgctaatgatctgaccaatgacgctattcagggcgatttgagtgacattgactattctttcactatcgatgacgacctcagcaattctgacaacagcttagacgtgtcgagtgatttaaaagagaacagttgccttgatgaaatcgacctggataaggagtctaaccagaacacgacaaagatcctcagtagcaaccagttggactctaatttgctggactcaaaccaacttgaatcggatcagctgagtagcaaccagttggattcgagtctgctcaatagcaaccagctgaaccttagcaacacctacaccgtctcccagagcacgtattcaaaatactttgataagaacggctatgtgaagacatccgtggtggccccatatgatacgatagacctgagcggcaacattatcagcaaaaacttcatcttcacgattccatgccacattacaagctccaataatgcaaagctcaccaactgtatgattaagtttgaaaacatgactgctgacggccgttcaagtgtctccaacctatacattcgcaacagcgtcgaatggtgccccggagtgtttctggaggggtccaccaatgtggacgtctacggcaatgacatttattgtaccggggctaacggcaacccagtccgggtgatctactccaattactcaaacatctttgggaacaagctggagacatactttaccggctacatgaacctttcctggaaacgagccggtatcctgctgggagactcgcactacaataacatcttctcaaacgacgtaaccataaaggacagtaaccctatctaccttacaacctacggatttgaaaagtccaatcacaacacaatatacaataatactgtacgtagctcggccatcagtgaagacagcggtctctccaacccctcggcctgggcttatggcatacatctgatgggcgactataacatcgcgctcaacaacacgattcacaacgtgtacaggggaatcgactctgaaggcagcttcaacatcctcgccggcaacattattttcaacctcacaggcgggtatttcgaggggaacgacgggacagagggtggagactacggaatccacgcatcctacgacaacatcgttgcaaacaatacaatattcaacagcaagctgaccggctctgccatctatctgatgcccaataatactgcctatgggaatattgtctacaatatcagcggccataacggccttgaatttaattattacgccgataactgtaaggtatacaacaacatcatcgacgtgcctgtggagagcccgatttatgtgttcggacggatgaacaacctgctcatcgaaaacaacatcctaaccagtgtagactcctccagcatcctggtgaagaagcagtccaactcaaagtaccccaccgacgtcaccataagaaacaacctcatcatggggtactcaaagaccttcaaccagagcccgatcgactacagccagatcaaaagcgacgcaaacattatctcattcaataatagtattgccgtctataacgacacatacttcaactacttcgctgagataggcaacgtgagggattactccgactggatcgacctgaacaacaccataaactactcagactcctataattacaatgcacttgtctttgtgggaaacttttccagcatcacagacaacataaccaaaaccgactacattattcctctgaaggatattgtaaacagccggatctcagacgtctatcgcaatgtgccgtacaacgagtacaaaagcatgatggaaactttgaacgagatctatactgacatcgtgttcaatgggccatctcctgtagatctcagaggagtggacagcggaggcaactcctcagactccaaccaaactcccatggatggcaacggcagtatgaatgaatcctctgacaacggttcagataacagcaccaatagcagtttggacaatctggatgatgaggtgaaggattcctacgagaatctcatcgataatatcaactcaactgagaatgcgtcagatgtttacgtcataaatgacgctaactacgccctctatttcaatgaagacggtagttttagagacgatttccccattgagttcgggaatacactccggttcgccaatctcacaaataaaatgtttaaaatagacattcctctgaagattatttccgatagcgaagacagcagtttgctaaattgctttatttccctggaaggtgagagctccaacactatcatttctaatctgaaattcgaactggataatctgagtagtaacattgactttatctcgataaaggatggagttagtaacgttttgatctacaacaatacttttaaactggacatcgattcctctgattctcttattgattctcctctgtctgacgatgcatccctgtctgccataaggctctacggtagcgattacatttcccgaaacattttcatagagaacaatattattgacttcaaatctaattttggccaactgtatgggatttacttatctaataagatggattaccttaattcaaaaaccaacccaagcgggtttatcatccgcaataacgtcttctcgatcgatagcaacgggctgatcaacgcaatctattcagattctgttaaaaatctcctattggagaataatttgttcaaccttagctccaacggcaacctggaggattcgtcattgatctatggcttggatctagtgaaagtggacaacctcaccatgattaacaaccagtttagcatcaattccacttacctcgcctgcggaatcaattcaagcgatagttctgggtttaatctcagcaacaatcaattttcagtggactccgcctacctggcttatggcctgaatctgaaaaatacaaataatttcaatcttcataacaatgatttttatatcgatagcggcagtttcgcccatgcgctggacctggacgattgcaataacttcaatattgcaaataacctgatcaatgccagcggtgcagatattaagagaaacctaaacgcctccaatttagcggtgttcatccaggacgacctgaacgacaatgtcctgaagaacggatatctttacatcagcgagctaaacgggtccctgaagggcaatgggctttacgaaaacgattttaagtctcctatcgtccatacggataacagcacacgggacctgcagaacttaatagactttgccgtggaaggagacaccgtggagctcggaaacatggtgttcgctgacctggacaccattaatatttataaaaacctgaccatcaacggcggcatttttgtgtctggcaattggaggcccctcttccacatcctccccaatgacgagttattgaatcacagttcctctgacagttacaattcgtaccggtcctttgactatctcaacatccagaatggggcctactacctcgataatgccgatctgctgatactggcagaggcatgcaacggtacagacagtctttcaatccaggttccaagcttaaacatttgtgataatgagttcatgctgctggatgacagcacagtggctgagagcataaacatcctgaagctcctatcatcccgcgctatactggcgcccaccaacgacatctccattgaaaacaacatcctggtcagcgggatgaacccgttcgtattcgaagtgagctcgataatgaccggttcggacattgatatcgctcacggcccattgaaccccaaaaaggcctctaagataatcttcgaagatatggttaccacagccttcgactccaatgttgagggaaggattgggaaatacttcgaggtgacactgaaggatgagaatggaaatgccttgtccaataaagccattcagatcggatttaacggaagaatctataatcgaaccaccgatgagaacgggtctgcaagtctccaaatcaacctggcctataaggggacttacacattcgcgatctcattcctgggtgacgagtattataacggcagctttgaggtggctaagatcacggtgaaaaagcagacgcctaagctggatgtgtccaacgtcacttataagagcagcgctaagtctaagacatggactgcgaaactcactaccagctacggctcactgttaaaaaacaagaaggtctatatcaccatcgacggtaagacttacaccacacgcaccaactcgaagggaattgctagtcttaaggttagtctctccaccaaaaagacttacaagtttacggttaagttcgagggtgatgacacgtataatagcctgactaagacggccaaactgacgatcaaatga

SEQ ID NO: 4275 - DNA, 885 bp, synthetic construct
  source 1..885: mol_type = other DNA
atgaacgagaaaaacgagtccgcctttcccattcgatgtgaccccgaggatgagatattcgtgaaatgcatgtcccggattaaggagttcccccagtatatcacagggtacgacgacatcgagggaccatatgagagccgctttatctcttcaggataccggaacctcaatcttgattccgtcaggatcagatcggacaaaagcagcatcaatattgagcaccacagctcaataagccaggaggcaatgagacggaactacgaatacgctgtcaatgtcttcaacgccactggccaggccgtttatccatttatcttttacacgggcgacctgcccgttgacaaaattacctacatgaaccagctgaattacttccatccgcagtggtttatcttaaaggaaaaggatggcatgaagagattgaacaatattaaatataagactgataatgatatagacatgcacattttcgagttcctagattacatttggctgccaaaattcaagctggaaataacaattgaggagtgcatcagggagcttgtgaagctctataacaagctgtctgcggacgaatttatcttgaacttcaccaaggaatgtctcgccctgtgggtggggcgttatataaaagaccaagacgaactcaaatacatggctaggtgcctgaacatgtccaagatcgaagaacgcccttttgaggagtcactgcgcggggtaatcttcgcacgaaagctagaagaggccgaggaaaagggtgtggaaaagaatcggatcgacttcatcaccaaggcgctgaaacagatgagtcctcaagaggtgtccgatctcttcgatattcctatcgacagtatcctgagtgtgcagaaccagtacagcaagtga

SEQ ID NO: 4276 - DNA, 846 bp, synthetic construct
  source 1..846: mol_type = other DNA
atggcattcggtacatataaagacgtggtgtcagccagggccacggataaggccatccagaaggtcgcacaggatgggggaatcgtaaccgcactgctgacatacgcgctggaggaaaacataatcgaaggagccatcgtggctggcaatactgaagacccctggaaacctgagccgacaattgccatgactccagaagagatcattgccgccgccgggaccaaatatacctttagccccaacgccatccggctcaaggaggcggtgcgccagtacgggctggaaaagataggcactgtcggcactccgtgccagattatgggacttaggaagatgcaaagctacccctttgctacccgattcgtcgccgacaagcttgcattgattatagggattttctgtatggagaacttcccaagagattccctcaagaccttcattgagggtaagatgaatagctccttagagggcgtcaacaagatggacatcggaaagggcaaattttggatcacagacgtggaaggcgaatccggcttgcccctgaaagagacccacggctacgagcaggcgggctgcaatatctgcctagactatgttgccgagctggctgacgtgtctacaggatcagtagggagccctgatggctggtcgacggtcttcacccgtacagacagtggtgcagacatctttaccgcagctgtggaggctggagtgatcgagacgaagcccatggatgatgttaaaccaggtctggagctgctcgaaaaactggctaacgggaagaaagacaaagggcggaaggaaattgagagacgcgtgaacatgggactcccaagtcctttctga

SEQ ID NO: 4277 - DNA, 960 bp, synthetic construct
  source 1..960: mol_type = other DNA
atgctggctcgcatcaagaacagcatccgcaaatttttgggactggaagccaagccggacgccgaagatgatgaagccaaggctgagactcaggacaaactgaaacaggagattaagaaggaagtggaggctcagtcaaagccagcagaagaggcgaagaaagaggccgatgcgaaagctgaggaagaagcccaggcgaaaaaggaagcagagtcatctaaggccctgaaggagagctccacacaggaggttgaaaaagtggctgacaagccaaagataggatatatccatatgagtgggtgcaccggcgacgggatgagccttacggagaattacgacattctcagcaccctgctcacagatatggtggacatcgtgtacggcacaacgctcgtcgacctctgggagatgcctgagatggatttggcccttgtcgaagggagcgtctgtctgcaagatgagcacagtgtgaaggaactgatggaggtcagggagaaagccggactcgtgtgcgcattcggcagctgcgcaatgactggttgcttcaccagatatgcccggggtggccagctagcccaacccaaacacgagtcctttgttccaatttcggacttggtgaaggtggattgcgctattcccggatgccccgcatcccctgagatcatcgctaaagtggtggtggctctgatcaacggggacatggattacctacaacccatgttagacatggccgcctgcaatctggcgtgtggctgcgacctgcagaccaacgttgtcagtaaggccctgtgttgtggttgtggaacatgcgtattagcatgtccaacccgagcccttgaaatggtagaggggcggccgtcccataataaaaacagatgcatcaagtgtggcgcatgtactacgcactgccccaggacctggttccctgccgagcagataaagaaggacctcggcctgtga

SEQ ID NO: 4278 - DNA, 474 bp, synthetic construct
  source 1..474: mol_type = other DNA
atgccctacgatgccgggcggctggttgtaggttgcggaaacgtcctgtttaaagatgacggcttcggtccaatggttatacacgccctagaggactactttaaggaaaacaatctggagatgcccaaagatacccagttcattgacgcgggaaccggcgccacacatttcatatttagcatgcctgacgacaattggaagaaggtcattgtggtggatgtggtggaatggaacgccgaacctggcacactcaagatcttcagcccgtacgacatgcccaaagggaagtatgaaaacgctcacacgtggcccgtagaggagcctctccacgatttggtggacatggggatcgaagtggtcatcgtcggatgtaagccaaaggagatcactgcaccggacgtggatatgggcctgaccgagccagtggaggccgcaatccccaaagctattgagatgatccttaatgagctgtga

SEQ ID NO: 4279 - DNA, 1158 bp, synthetic construct
  source 1..1158: mol_type = other DNA
atggagatcgacgatgaagggatagtgaccaaaggtcgctactttagcatcacaccagtccgaggcctcgagaaaatggtgacaggcaaagcccctgagactgcccccgttctgtgtcagagaatctgcggggtctgccccattcctcacacactggccagcgtcgaagcgatggatgactccctcgacatcgaaatacccaaggctgctgccttgctgagggaactgacaatttcagcctctaacctgaacagtcatgctattcaccatttcttggtggctcctgattttgtgcccgaggatcttttcaagactgcagtcgacagtgttggaaccattaggaagaacgcccagtatgtggtagatatggtggctggcgaggggattcacccaagcgatgtgcgcatcggcgggatggcccggaacatttccgagctggcgcggaagaaactgtatgcccgactcaaagccctggtccccgtggtggacaatcatgtggaattgatgacgaacctcatcctagaaaaggacataccggagggactcggtgtcatagacgcgcctgtgtttgctagcgatgttgtttacgggaagagagacttctttgaccttgaccggtttactgagatcgttccggaggcctggtatgacgaccctgaagtcggcaaaagggcctgcaccaccatcccattatacgatggcgtaaatgtggaaaccgggcccagggcccgcgtagacaagttccagggctacaaagagagaggggtggtggcacaacacctgtcacgagcccgtgagatgaagacgtacctgtcccgggctatcgcgatcctggatgaactggacactgccgctaatacccttgcagatttcgatccacgcggcaccaacaagctaggcattggtgtcatcgaagcaccaaggggaacggacgtgcacatggcacaggtaaaagacggaaagaccgctttctatagcgcattagtccccacaacgtggaacatcccaaccatgggtccggccacagagggattccaccacgagtggggacctcacgtgatcagagcctacgacccctgtctctcgtgcgcaactcatgtgatggtggtggacgatgaggataagtctgttgtcgagaataagatggtgcggatttga

SEQ ID NO: 4280 - DNA, 555 bp, synthetic construct
  source 1..555: mol_type = other DNA
atggacaactccaatatcataatctcagtgattattgttctctgcattgccgccggcgtgactgcatacgggatatccgagggggacaacgcagtcttcagtgacctgacggggttttccccttcgagtacagatagcggagataccgggataggaaatacaacaggaaacaattctcagggcggcggaatcaccgcaggtcagaccaacgtggctaccaacacgggcggcagctcaagcggaggctcaagtgggtccggcagttcaggatcgggttccggcagcgggagcgggtcctctggctccggcgggtcgtcctccgggaatggcggagggaacaccaacccaagcccgagtcccagcaaaatcagcgccgcccaagctaagaacattgcggctggcgccatcgccgaagagggcgcttatatcagcagcgtaagtgacactggatcagcctacgtctgttatattagcaacgcagagggtacaaatgtgggttacatcactgtgagctacggtggagcgatcatcgaaggtgccggaggcgcgccctga

SEQ ID NO: 4281 - DNA, 603 bp, synthetic construct
  source 1..603: mol_type = other DNA
atggataactcaagcattctgatctccgtgatcatcgttttgtgtattgccgccggagtgaccgcctacggtctaaccaacgacagcaacactgtattcaatgacctgtctggatttacgcccgacgaatctggagacaccgggatagggaacaataccacaggtggaaacggaaattcagggagtgggattacggccggcacaacagactctggcagcggcactgggtcgagcggcaccgggaccggctcaagcagcagttcaagctcaagctccagttcgtccagcagttccagctcctcctctaacacccagcagaaggcttggaagcctaaagtcagtccagagaaggccaaggcactcgccacaagtgcagcgaggaactccggttggcccggcgcatactgctactcggctacctataattctggcggatattacgtctgccttctgaaggatgatgctggaaacactggttacgcgcacatcgggtctggcacaggccggttcctcgagggctcctggagcaaacaagtgactaaagagccgaatgaagtggaggacgattataaagaaaatgaaacatccaacatcacggagtga

SEQ ID NO: 4282 - DNA, 1194 bp, synthetic construct
  source 1..1194: mol_type = other DNA
atgctggtgaacgcagacctgcacattcacagctgtttttccatggccacatccaaagacatgctgatcgagaacatcgcgccaaaatccctcgaaaagggcttgaagctggtcggcaccggcgacgcattccatcccaaatggctggacatcattcggcagagcacagaatacaagggcgatgggatctactcacgcggggactgtgacttcgtcctcacaactgaggtggaaggcaagcataaggtacaccacgtgattatcattccagatctggacattgctcacgagctcagcgctaagttagtgtcctctaacaagttcatagacggcagaccgaagacacccctggggggagctgagctcttggagctggtgcgggaatatgactgcatgatcggacccgcccactcatttacaccctggacgggaatgtataagtattacgatagcatctacgactgttacgataaacgtcctgatttcgttgaactgggcctatctgctgacactgatatggcggattgcatcaaggaattgtctgatttcgtctttctgtccaattctgacgcccacagcccttggcctcacaggttaggcagggagtttaaccagatagagatggatgacgtttccttctcatcactaaagaaggcctttaagcacaagactgtaaaagcaaattatggaatgcttcccaatctgggcaaataccatatgactgcatgcaccaaatgttataagctggttgaccctatcattgccaaggagaacaagatgatttgctcttgcggcggtcggatcaagaaaggggtggactaccgcatcagcgagatagccgactttagccagccaaagcacccgagccatcgaccaccttatgtccatctcatgcccctgggagagctgatcagtatggtctacgataaaggggtgacaaccaagaccgtgcaggggatctggcagaagatggtggataacttcggtccggagattgacgtcctcatcaagaccccccttgacgagatcgaaaaaatagatagtgatgtgtcccttgccattcaaggattcagagaaaaaacgctcaacataacgccaggtggtggcggaaagtacggggaaatctcgttcagtgaggattttaataaaaccgagaaaaaagagagtgtgaccacccttgactcgttcttctga

SEQ ID NO: 4283 - DNA, 564 bp, synthetic construct
  source 1..564: mol_type = other DNA
atgagcaagaagcgctgtccatgggccgaagacgtagaggaaatctatgtgaaataccatgatgaggagtggggcgtgcccacctacgacgaccgggagctcttcgagatgctcgtgctggaatcatttcaggcggggctatcctggatcaccatactgaaaaaaagagataactttaaggaggccttcgataactttgacgttgtgaaggtcagtgaatatgacgatgccaaggtcgaggagcttcggaacaacgcaggcatcattaggcacaaggggaagatcaatagcgccataaacaacgcaaacgtctttattgagatccagaatgagttcaaaagcttctcgaactacatttggggcttcacagacaataaggttctgaaggatacggaagaaaactataagacaaattctccgctgtccgataagatcgctaaggacctgaaaaaacgaggtatgaagttcgtgggaactaccattatctactcctacttggaggctattggagtgatagacaatcacatccacgaatgcttcaaatacaaagaggaaagtgactga

SEQ ID NO: 4284 - DNA, 477 bp, synthetic construct
  source 1..477: mol_type = other DNA
atgaagtccagcgtgctcctggaggaaatcaaagagaatattcagaattatgacatcgaccacataaaagagaacctgaagaaagaggatataaaccccatctcgaagcaggtcagcgagttcaacttgaagaactacgacgagattatggagaccaagatctcagaggaagatgactttgagattagtgacgaaatgatctactcaatgaagaatgaaatcgaccttttcttcaagggatgcagtcctgaaagcgaggactcctttaaaaagttcattgaatccatttgcctgtacctaagcctgatcgccaaaaagccactgcatccggtgggtatggatttcaaaaacggcaacacggtccacgaggagatcgaggacgggaatactgtatattactgcgatctcaaggaatactttggcaagcaagaaaaggattactatacctgtaaattttgcgtgtgtaaaacagtttga

SEQ ID NO: 4285 - DNA, 1008 bp, synthetic construct
  source 1..1008: mol_type = other DNA
atggccttcaaagacatatttaaatttaaacaaggagaaaccaccttcatcttcgtaggcggaaaagggggcgtgggaaagacaagcattagctctgccaccgctctgtggctcgcaaaacaaggcaagaagacgctgattgtcagtactgatccagcccattcactgagcgactcacttgagacaaagataggccactatcctgtggagatctgcgaaaacctctacgccgttgagattgacccggacaaggctatggaagaaaagcaacgcgccttggagagccagaaatccatggccacggccgaccaactgctcgggcttgattttctaggtgagcagatggatttggcgtctgcctcccccggcgcagatgaggctgccgcctttgaggtgttcttaagcgtgatgacttccaacgaatacgatgttgtggtctttgatactgcgcccacaggacacacccttcgactcctgtccttccctgaagtcatggactcgtgggtgggcaagctgatgaaggcacggtccaagctgggggctgccgctagcgcgctgaagaacatcatcccatttatggatgcggagaatgatatccagtcctctcaggagctagaggagaccaaaaagcagattaacgaggcaaaggccgtgctcagcgaccccgatcggaccaccttcaagatggtggtgatccccgaggagatgagtatctacgaatcggaaagggcaatcgaggcactgaacaaatacgacattacaacggacagcataattgtcaatcaggtcatgccagacatctcagactgcgacttctgtcactcaaggtatatgctgcagcagaaaagactggctctcattgatcagaagttcagtgaccaggtcgtagctcaggttcctttattcaaggacgaagtaaaaggtaaggagaagctgctgaagctcgccgaaatcttgtatgaggggaaagataatgacgaagtggaggccagtgtgatccagctgtga

SEQ ID NO: 4286 - DNA, 132 bp, synthetic construct
  source 1..132: mol_type = other DNA
atgttcgtcgaagagatccccgaagagaaattctacagcaaccgcatcagggacgagtttattgaggaggtggtggaaaaaatagaaaacaacatcctccagaataagtatcggaagtacctggattactga

SEQ ID NO: 4287 - DNA, 150 bp, synthetic construct
  source 1..150: mol_type = other DNA
atgttctacgaagagcgagtggaagatcagttcagcacctaccgcaacagagaggaatttattcgggaactgctagatgtggtcgacaataagataacagacgaggagatggaggacatctatcagctgctcgacatccccaggaactga

SEQ ID NO: 4288 - DNA, 762 bp, synthetic construct
  source 1..762: mol_type = other DNA
atgacaatctgcataagcgcaatctgtacggagaacaatgaagagcatatcgtgtttgctgtggaccacatgatcaccacgggcttagggcagttcgaacacagtatcaacaagtacaacgtgctgaacgagaacgttgtcggaatgatggccggcaacgcccttttgatggactatttctttgacgaggactacagcgagaatagcttctcagagatccttgacatattcgaggaaaagttcaaggagaagaggctgaacattattgaaaaggaaatcctcgatgtttatagcatcgacctggacttcatacgcgacatcctcaaagggcccattacaaatgatttccaggcggctatcctgaagaagattgcaaaaaccaaactagagtcggccatcctgctcatgggctttgagaacaataaggcgagaatcgccgaagtgtccgactacggcattggaaactttaatcggattaacttccataccatagggtcaggttccattcaggcccaaaacactctgatgttccagaaacactccaaaaaagatgatctgcgaactacactgtacaacgtgtacaaagcaaaaaagaatgccgaggtcatgcaaggggtagggcaggacaccgagattggatttctgaacaatggaagtatcgtcatgctcgataagaagaatatgggcatcctcgataatgtgtatgccctggaattgaactggggcaaggagcacaaggaagtgggtgctctagatttttga

SEQ ID NO: 4289 - DNA, 1080 bp, synthetic construct
  source 1..1080: mol_type = other DNA
atgctggagatcaagcatacaatatgccctagttgttccgtggggtgcggcctcaacatcgtctccaaggacggcgcagtggtaggcacgtacccctacaagaggcacccaataaatgaaggaaagaactgttctaatggtcgggggtccattctgcagtttgagaacaagatcaatgctccctcactggttcagaatggagagctggtggagtcagatgctgactcgatcatcgccgcaatcaagaaggagctggatgccatcgatgccagcgagctcgcaatcatctgctcggacaagaacacaaatgaggaaattgatgcgattaagaagttcgccgaagacttcggaaccgataagatcggattttacggctacaatttccccaagttttccggagagatagcaaattataacgatatcaacaacgctaaattcattttggcaatcggtgacatctatggcgagaatcctttagccgctcgcagaatcgtgctggccaaagacaaggaggccaagttctttaacatagatgacgttgaaaagtccataactgccctgaacgccgacgagtacatccagtttagtgataaggccacgttcgctgacgctatcgccagtgtgaagggcgagcttaacgaggaagcggtaattgtcttaaacaagatcgccgatgctgaagacttcaaactcgtggaggatctggccagcgaaacaggcgcgaaactgctcccgatcctcaacgggccaaacagcaagggagctatggacaaaattgacccattgaccaaagatgaaattatagacctaattgacggctcaaaagtgctgattgtcgtcaacgataacttgctcgactatctgtctgagagtgacattaaagggaaagcattcattgcaaatatttccaatttcgaggacgaatttaccaaatttagcaacgtcgtgctgcccgggaaagcgtgggtggagaaggaagggactttcaccaatgctgaaggcctgacccaaagctttgccgccagcgccgaccttggtgagggtctaagcgaaatcgagatcttcgagaaacttgcgtga

SEQ ID NO: 4290 - DNA, 1155 bp, synthetic construct
  source 1..1155: mol_type = other DNA
atgtcagagaatctcatgcttgcaaaaagtaaagaaaatgaaataactgatagcggagcctgcgggggcgccgtatccagcatttttcagtatctattaagccagggaattgtggacggggtccttacgcttaacaaaggcgaggatgtctacgacggaatccctagactcctcaccgacgctagtgaggtcatcgaaacttgcggttcactgcactgtgcgccgacaatggttggcgacctgatttccagttttctaagcgatcagaagatagcggtggcagtgaagccttgcgatgccaaagctgtgaacgagttggttaaacggcaccgcatcaatcctgagaacatcattacaatcgggctgaactgtggcggaacagtacgccccgagacggcccaggaaatgatagagaaattctatgaagtggaccctgctgacgtggtgaaggaggaaatcgataagggtaagtttatcattgagatggccgacggaagcgagaagggcatcaagatcgatgacttggaggatgaaggctacggacggcgtgacaactgtcaaagatgcgaactcaaggtgccccggaatgcagacctggcctgtggtaactggggctcggagcccggctggacctttgtggaagtcaataccgaaaaggggaatgagattatcgagggcgccaaggccgagggcttcattgagaccaaggacccctccgagaaggccctggaaatgaggggcaaggtggagaacatcatgatcaagatggggaagaggaacactaagaaacagctggaggacgaggctctgacactggaggagtgggaaaaccaatggaacaaatgcatcaaatgcttcgcatgcagggacgtgtgcccaatatgctggtgtcatgaatgtgagctcgaaaagtcatacttcaaggatgacggacaggcgccacccgatcccctgagcttccacggggtacgactgtcccatatgagcccaagctgcgtcaattgtgggcaatgcgacgatgtttgtcccatggagattccagtctctaaactcttccacaagttgcaggtgaaatacgaagggcagaccggatatgtggctggtgtcggcgatgaaaaacctccgctgtactccccacagaaggagaacttctga

SEQ ID NO: 4291 - DNA, 402 bp, synthetic construct
  source 1..402: mol_type = other DNA
atggccgacgatattaaaatagtggggttttgttgcaattggtgctgttacggtggggccgatactgccggaaccgcccggatgcagtatcctcccaacataaggattatcagggtgatgtgcagcgggcgtatcaacccgtcaatggtcttcaaggcatttcgcgaaggagctgacggtgtattcgtgggcggatgccatatcggcgactgtcactacgacgctggcaactacaagtggaatagacgggcactgatgacaaaggatatcattgaggagtttggcattgacaaggagagattccgcttcgagtggatcagcgcgtccgaaggggaaaagttccaacggaccatgaaagagttttataatacgatcagtcagctcggcccacgaaacaaatga

SEQ ID NO: 4292 - DNA, 2874 bp, synthetic construct
  source 1..2874: mol_type = other DNA
gtgacgaataatgagatagaaaagaaatggcagaagaaatgggctgacgctaagctattccagtcagatcccaatgaaaaagagaagctgttcctgacggtggcctatccatacccaagtggggccatgcacataggccacgggcgtacatacaccgtgcccgatgtatttgccagatttaaacgtatggaaggctacaatgtgctgttcccaatggcctggcacgttaccggtgcaccggtcatcggtattgctgatcggatcaagcggaaagatccctggaccctggacctgtacgaaagagtgcacaaggttcctcatgatactctgcccagcctcgaagaccccattaacattgttaaatacttcagtaatgaataccacactgtgatggatgatatgggctattcaatcgattggaggagagaatttcgaacgatcgaccctacctacaagaaattcatcacatggcaggcgaaaaagctgaagtcccttgggctaatcaagcagggggagcacccggtgaaatattgccctcatgatgagaaccctgtgggcgaccacgacctgctcgaaggggaaggcgttggtgtgaacgagctcaccctgattaagttcgaggtggagcctggactgtacatcgtcccggccaccttccggccggagactatctttgcagccaccaacgtatggctcaacccagaggtgcactacattgaagtggaagtgaagacaggtgccaatgcccgggaaaaatggataataagcaatgaagccttcttaaatctcagcaatcagcatgatttggagattgtgggcgatattgaccccaagccactgatcggcaaatatgtcaaaaaccccctgaacggagagccattgcccatattccctgccagctttgtcgatcccgagtatgggtcagggacagtatttagcgtgcctgcgcacgctcctgccgactatattgccctgcgagaccttaaggagaacgaagagctcatcaaggacttcgatatcaaggaggaggtggcgaaagcggagccattgaacgtggtgaccgtggagggctatggagagttccctgcggtggaggtggttgagaggatgggtatcgaaaaccagaacgaccctaaggtgcaggatgctacggacgagctatacaaggctgagcacagcaaaggatacatcagcgaccatatcgagaaatatgccggcaaaagagtcgccttcatcagagatgagatcaaggccgacatgattgaggcaggcagcgcagacatcatgtacgactttgccgagcgcccagtcatctgtcggtgcggcaacaaatgtgtggtcaaggtcatggatgaccagtggttcataagatacggcgatgaggaatggactgaaaagacccagaaggtcctggcccaggagacaattatcccagaggagatacgctcaaacttcgaatactatctcgattggctggacgactgggcctgctcccgaagggtggggctgggaacaagggtcccgtgggacgaccaatggctgattgagcccttatccgactctacaatgtacatgtcctactatacgatcgccaagtacttgaaggatatggaccccgaagacctgaatgaagcattctttgaaaaggtcttcctgggggtagacagcgatgagatcacagtccccgaggagaccgtgaaccaaatccaggaggaatttaactactggtacccactagactggcggttatctgcaaaggaccttgtcggaaaccacctgagcttcctgatgtttacccatgcagctatctatccggaggagaaatggcctaaaggaactgtggtcttcgggatgggactgcttgagggcaataagatgtcatcctccaaaggaaacgtcattctcttggctgatgcgatcgaacagtacagcgctgatgtggtaaggcttttcctgatggcaagcgcagaaccctggcaggactttgactggcgcgaaaaagaggtccgcgggacccaaaggcgtcttgagtggtttcgcgagtttgcacaaaaggttgaagacatcaaaggcgagaagctcgacctctccaatattgaagaggtgcccctggagcgcagtatcgacaagtggatgatcaatcaactgaacatccacatcaaggaggccactgaagccctggaagttttccagacacgccaagccctccagcatgctttgttcctcctgaaaaaggacctggatcactatctgtaccgagttcaggacctgattgaagccaaggacccggccgtgatctatgtcctctcgaccttgctcagcaattggatcaggctgcttgctccatttactccacataccagtgaggagctctggtcgaaatatggcggggagggattcgttagttttgcgaagtggcccgagtacaacgaggatctaatcagcaaggagatagaaaggtccgagtcccttgtgcagaacatagtaaaagacataaacgaaatcaagaacattgtagacacagaccccgaaaagatccacttatacttggctcccgaatggaaatgggagctctataagatagctgatgaagtgggaaaaccagacatcggccagatcatgggcaaggccatcaaggcagacatttacgataacaaaaaggaaatcgccaatgtggctaaacggattagcaaggaaatgattaagacccggtacattggtaagattgatgaggagactatcctgaacgatgctaaagacttcattgaaagtgaggttggtagcgagattgtgattcatacggatgactcgtatgatcctcagaataaggcaagaaatgcgatgccctataagcctgccatttttatggagtga

SEQ ID NO: 4293 - DNA, 1374 bp, synthetic construct
  source 1..1374: mol_type = other DNA
atgaaaaagaacaaactcgagaaaggctgtgagaaaatgtccgccgacgataagaagctagaccagataattaagacaatcgaagccaatgacattaaatttttgagactggaactcgcagacatacacggcttgcccaaaagcatggccgtgcctcttaaaaatgcaaatgatgtagaagatattgtgaatgacggactgctgtttgacggttcatccgtcgcagggctcgctagcatcaatgacagtgacctgctcgccaaaccagacataaacaccttctcgaccatcccctggaggcctgaaagcaagggtacaagccgcttcatctgtgatatatataccacggagggcaccccttatgatggagaccccagaggaatcctgaagaagaccctggagaaggcggagaaacggggctaccagtacaatgtgggtccagaaccggagtttttcatcatcaagaaggatgaaaacgggaactacgtccctgctgacgaagccgagtactttgacgtggagccattagaccaggggacggatatcagacgcgaaatcgtattcggcctggaggagcttggtttcgatgttgaggtgagccaccacgaagtggcagcaggacagcatgaggtggacttcaagtatgcagacgctcttaaaacagccgatgctgtcattacctttaaggaggcggtgaaggccgtggcgaataacctgggcgttaaggcgactttcatgccaaagccattcattggaatcaacgggagtggaatgcattgcaaccaaagtctattcaaggatggcgagaacatcttctatgacccgaacactgagactcaggtatctcaggaggcgctgtacttcattgggggccttttgaaacacgcccaggctctctcagccatcctgtccccgacagtgaactcttacaaacgtctggtcccagggtatgaagccccctgctacatagcctacggatttaagaaccgcagtaccttgctcaggattcctgcctcccggggccttgggacgcgaatcgagtgccggtcagctgacccctcctgcaacccctacctagcatttagcgcactgctggaggctgggttagacggtatggacaataagctcgaccccggagaacctactgaggagaacctgttcgccttttccgaagaggagattgccgaaaagggcatttcgaacctgcccacaagcctctgggaggcctatcacgccctggaagaagatgatgtgatcattggcgctctcggcgataaggtttttaatcagttctacaatatcaaaagggccgagtgggatgcttaccgaatccaagtcttcgactatgagcgggatgaatacctgaacgtctga

SEQ ID NO: 4294 - DNA, 918 bp, synthetic construct
  source 1..918: mol_type = other DNA
atgtgtggaatcgccggtgtgatttacaaagataaaaagactcaccctgtgggggaggccttaaccagcatgctggagtcactacagcacagaggccccgatagtgcgggttacgctatctacggcagcctggatttccctgaaaattactatcagctcaatattgaggtaaagcggcgacgcggagccctggacaatctgaaatcgcttctgaaccagatcagtcccatatacgaggaggaaataattaagtccgtaggcgacagcgatgtgtataagtgcaaaatcgccctcgatgagttttccctcttgcagccgtggatcagggaaatagacgagctcgaaaatgtgagggtcatcaacgggtcacacagcttcgagatgatcaaggacgtcgggaaagtcaaggacattgccgagcggtttgacgttcagagccgcatgggaacgcacgggataggccatacccgattcgcgacagagagtggcgtggaccgctaccatgcacacccatatcaaagctacatcatcccggacattactgtggtgcataacggacagatcaccaactactggaaaatcagggaccccctggaaagaaagggacacacttttgaatccttcaacgatacagagtgcatcgttcactatatggccgacaagctgaatcaaggctataaactggaagaagccctggaccaggcagtgattgacctagatgggcccttcagcatcctggtggggacgcctaacggcataggcattgctaaggacaagctcggccttagaccaggagttatggtggaaaccgatgaggtctttgcaatcgcttccgaggagatggcattgcatgatgtcacagactctaacgagatcgaacagattgccccaggtgagacacgggcttacaccatttga

SEQ ID NO: 4295 - DNA, 648 bp, synthetic construct
  source 1..648: mol_type = other DNA
atgaaagaatacatcattaatgccaaggatatggaagagaaggaactgaaccgcgctataaaggaacaggctgcacatcacgacaagctcattattaacaatcccgagtccagacacaatatttgcgccggcttaagtgaggatgtggacattgagatcaacggttctgccggatacttcgtgggtacgatggtgaacgggccaaagatacacatcaacggaaacgccggctggtttgccggagacaatatgaccaaaggggagctaatcatcgagggcacagcgggcgacggtgcgggacagggcatctatggagggactgtcatcgtgaaggggtcgacaggcagtaggactggcgagatcatgaaagggggcaccgtgatcatcggcggcaacagcgggttcatgaccggcctgcttatgatgggaggaaagctcatcattttgggtgatgtaaccgatgacgtcggggaatccatcatgcggggaagcatatacgttctgggcgaggtcaagagcctggggaaaaacgcaattatggaggaaaccacagacgaagatctcaaggatctggaggagactctgacgaaatacggtttcgaggacatagactattcaaactttaaaaagattgtgaatatccaatga

SEQ ID NO: 4296 - DNA, 1095 bp, synthetic construct
  source 1..1095: mol_type = other DNA
atgagtgaacataaaattgcaatggtgggcacgccatgtgaaatcatggcagccagcaaactgcaagattacaccgatagccctattgaggttaagttgggcctgttctgcatggagaacttttcatacaaatactttgtaaacttcctgaaggaatacgacttaaagatggatgacattgaaaagttccagattgacaaaggatttctcttcctcatcctaaaaaccaaggagaccgtgaaaattcccctgtccgtggctaaacggatcatcaggaaaaactgcaacatttgtgtggagctgacgtccgagaccagcgatatctccataggcagtataggtagcgatgacggctggtcaacattgatcgtgcggagcgaaaagggggaggagattgttaagggagcgatcgagcaacgtttcatcgaagtggaagagctagaagaatccaagttccagctgcttaacaagctggcccagggcaagatcaaccgcaatctggagcacatagagcagagggagtttttagcccgacccgtactctaccagagggagaaggacgacgatagcatcagcaaggaaatcagcgagtcggacttttcggacctgaagagtaacgtcatagacattggggcttgcgtgctctgcggcgcctgcgaatatgcctgtccggataacctcattataatcgacgacaccaaacccagaatgaagggccaatgccctcctgactgccatgcatgctttgcggtctgtccacgcactttcatagaggaacacctgcggaatgataatgagaagcccatcggggactatatcaatgtctacacggtgagatcccttaagcacagccagggtcaggatgggtcaatcgtcactacaatcctggattatctgctgagcaatgagatcgtcacagaagcccttatcgttgataagaaggacgatttggcttggaaaccgtacgccaagctcaccaaggacattgaccaggtcgtaaaaagtggaggaaccaaatattctgtgtgtcccgtgttcaagccactcaaagagattaatgaggagtcatccactacagaagagggggtgaactga

SEQ ID NO: 4297 - DNA, 1488 bp, synthetic construct
  source 1..1488: mol_type = other DNA
atgtccttcactgtggaaaggaaaatcgaaatatgcaggcagaacaatgaccgaccagggtgctgctggtacctgtgtgacaatccaaacaagtccgcctgtaagaactgctacagctgctactctaactgcccgcacggcgtatatgaggtcatcaatgatgaaccactccccatccatcaggaaaactgtgtcggatgcaagatctgcgaagagatgtgtccgacacacgccatctacgtgaggcctttagtggatgaggggcgaggaatctggtcaaacagcaccatggttgaaatcaagcggaaaagccagaccggttcatacaaggtccggggctgcggccttacccgacgcatccctagtttcgacgacctgagcatattgcccgctcaggtcagtaggccacccatcgactcgtacagggagacctgcaagacatccgtagtccttggcgaccggtttgccgagaacccaattgaaattgatactcccatcatgattggggctatgtcatttggggctctgagtaaagaggcgaagatcgccctggccattggaagcagcaaagtcgggagtatcacaaacaccggcgaagggggaatgttacccgaggaacgccactatgcagacaagctcattgcccagtacgcgagcggccgtttcggtgtgtcagcaagctacctgaacaatgcagaggctgttgagataaagattggccaaggcgcaaagtccggtatgggaggccacctcctagcccataaggtcactgccgaggtggcacgcgtgcggaacattccggaggggacctccgccttgagtcccgctagacacatggatatcgtaggtcccgaggacctgggaatgaaaatcaatcagctacgggaaatcaccgattggaaagtgccaatcatcgtgaaattcgcctctggaagagtggagcaggatgtcaagattgcagcaaaggccggcgccgatatcattgttgttgatggtatgcaagggggaaccggggccggccctgaggtggtgaccgagcatgcgggcatccccacaattgaagctatcgttaaggccgacgacgccctgaaggagatcaatctcagaagcgaggtcagcctcgtggctgccgggggcatacgctccggcgcggacgtggcaaaagctatagctctcggtgccgatgccgtgtatgtggcgacgtcggcactgattagcatcggatgcaaggtctgtcaatcctgttcagaaggcatatgtcctaaaggaattgcaacacaggatcgcgccctgcggagaagactggaccctatacgcaaagggcagcaggtggctaattatattgaggccatgacacaggaggtgacgtccctgacccagcaggctggaaacactgacattgagaatcttgaaaggcaagacctggtggccttgacgatggaggcgtctcagctgactggcgtgcctatggtaagccagcgttattga

SEQ ID NO: 4298 - DNA, 2643 bp, synthetic construct
  source 1..2643: mol_type = other DNA
atggccgccttcgatcgaatcaaatcaggcatcccagggcttgatagtgctctggataatattcggttaggagacaacgttgtttggaatgtcacaaacctaaatgagttttcctattttgtgaatccttacattaagcaagcaaaagaggacaacagaaacctgatttacatccggtttgccaatcatcctcccttaatcgaaatgactgaagaggatttccgcctgctcgaaatcgagcagaacaatcccgaaaccgagttttccatgatagagcgtgatgggatcaagatctacctggttaatccatacaaccaattcgagacattcacgttggaagtgcacagaatcatagaaaaggagggcttcgatgccttctatgtcttcgactgcctcagcgacctgcaggcggtttggtccactgacctgatgatgggaaacttctttaaggtgacctgtccattcttattccagctggatacggtggcctacttccccatcatccgaggaaggcactcatacgatgccattgcaaaaatccgtgaaaccacgcagctctttctcaacgtatactcgaactctccagaggaagtgtacgtatcccctctcaaggtgtggaaccgatactcgcagaccatgtttttggggcacaagttcaacccccggaccggctttgtcaaggtcttgcaggacggtcaggaggtcagcaaatactacaagaccatcaatagcgataaatacatgaacggacagaccttagacagctgggaaaggtatatgctgaaagtccgcagagaatacgaagaggggaagaatatcgacgaagagtgcgacaagatctgcgagctcatgatgacaaaggacgagaagatgctgtccaaaatcaaggaatacttctcttttgaggactataccacgatctatgaccgccgcgtgggaagtgggcttgtgggcggtaagtcctgtggtatgcttctggccagaaaaatcattgagaggaactgcccagagatttacaacaatatctttgagcccgacgactcattctatataggcagcgacctgttctacacttacatcgtttccaatgacctgtgggacctgagggtaaagcaaaggacccctgaggggtactataaatacggaaaggaactggaggaagcccttaaaaacggcagctttagtgaccagaccaaacgggagtttataaagatgctggattatttcggccagaatccgattatcgtccgttcgagtagtttccttgaggatggatatggcaatgcttttgctggaaaatacgaaagcgttttctgtgtgaaccggggctcgctggaggagcgactggccgcctttgaggaggctgtgaaggtggtgtattccagtactatgaacatttcagccctcgaataccggaaaataaatgggttggacgacactgatgaacagatggccctattggtgcaacgcgtgtcaggcagttaccacggcgactatttcttccccacagcagcaggtgtaggattctcatacagcccatattccccgctgccggacatggacaacagcaagggcatgctaaggcttgtgatgggtctgggtaccaaggctgtcgaccggacaaaaaaggactatcccagaatcatcaacctggacaagcccgaagtgactatggctaaggatattaaggaaaagcacagatatagtcagcattatcttgatgttattgaccttaaggagatcagcctgcacgacattcccgtggatgaggggttgagcgtcattccacggtactctaaaaacatgttggtggagcatgacagagaggcggagaggatgtttcgcgatcggggccagcgcagggagattgtctttgtgaactgcgaggggatcgtgaaaaacgatgcattcatagaaaccatgaaggaaatcatgagcaccctccagacagcttacgactatccagtggacatcgaatacactgttaatgtgggggaggataaaagtttcaacatcaacctactgcagtgccgccctctgcaggttatggtgaacaatgaggctattgaaatgcctgaggacaagaacgtgttcttccacatcaaagaatcctctatgggaatgtccagaaagaacacgattgacacaatctgctatgtggaccctcataagtattatgaatacccttacgctcaaaaaagctctatttcacgagtaatcagcgatgtaaatgcctatctcaagagcaacaacaagacagcgattctcattgtcccaggccgcatcgggacatcatctcccgagctgggcatccctgtcgtctttgcagatattagctacttctccgcaatcctcgaggagtcctacagcgatgccggatatatgcccgagctctcctttggcagccacatgttccaggatctggtggaagcggatatctactacggtgccttgtttgagaatgagaaaaaactggagttcaataaagacatggtctacgactatccgaacatactgaaggatataaatcccaacctcagcgaggagatttatgacatgatacaggtgatagactttgatgaaaacaaggccgagctctaccatgatatgaataaggatgaaaccctgtgtattttcaaatga

SEQ ID NO: 4299 - DNA, 1356 bp, synthetic construct
  source 1..1356: mol_type = other DNA
atgaataaaagtaaaaaatgtgccgaaaaagatctggctcacatctggcaccctgcctctcagatgaaggattatgaagacttccccccaatcgtcatagaccatgctaaaggcgtccacctctacgacgtggacggcaaggaatacaccgacatcatcagctcctggtggtgcaatatcctgggtcattgcaatgaagaggtaagccaggccttgaaggaccaacttgatgagctcgaccacgtgctgtttgctaacttctcccacaagactataatagagctatcagagcgtctgatcaaggtcatgccaaagggcttgaaccgattctcctttgtggacaacggcagcgcttcagtggaatgcgcactgaagatggccttccagtattgcgctcagacggggagggcccaaaagaaaagattcatgtgtttcacagatgcatatcatggagagaccctgggcgcactgtcggtgggagccctggatgagtactccagtgtgtttgagccaatcatgattgacacaattaagatcgaggcgccggattgctacagatgtccctatgggaaaacacggaacgattgtgactgccagtgcttcgagcacgctgagagggcatttgaagaacatggccatgagacctgtgcaatgatcatcgagccgctaatacaggggagcgcggggatgaagatttatccccccctctacctaaagaagctccgcgaactttgcgataaacacgatgtccttctgattgccgatgagatcgctaccggttttggtcggaccggaaagttctttgccgtggaccacgccaatataacgccagacattatgtgtgtgtccaagggtctcacgaacggatacatggccatggctgttgcctgcactaccgacgagatttacaacgctttctatggggactatgaggacaatatagcctttatgcacagtcacacctacgccgggaatcccctggcggcaagcgttgcaaacgccacactgaaaatcatggaacgggaccgaattatcgaaaacaaccaggaaaaggccatttggctcaacaaacgcttccacaacacattcgatgaacatcctaatgttggcgagatcagacagatggggttgatcaacgcaatcgagcttgtggaggataaggagtctaaaaaaggatttgattcaagcttgcgcatcggctacaagatttaccgggaagcgctgaaggacggactcatgctgaggcctttaggcaacgtgatgtacttcaatccccctctggtcatcactaaggaagagctcgatgagagcctggcgatttgtaaaaaggccattgacaaggtactgttagactga

SEQ ID NO: 4300 - DNA, 1599 bp, synthetic construct
  source 1..1599: mol_type = other DNA
atgacaaaatttatattcctgattatcctgctgaaatttatgcggaaggaaatcttaattgccgctatcgcaatcattctcatactgtgcggcggggtcttcgcagccagcaacatgcagatagcggacatcgccacgttcagtttgaacgcaattgatctcgaggataggggaagcctgatcgtggacagcgaagatatcactgcctcaaagggctactataattcctcggcttctgacgagaacgtggtgttggtgaaaaattacagcttaagactcagcaacagcattgtcaataagaccggcgacaccggaagctcgggggacgatgccgacttttacgggatcaatagcgccgtgctggtaaatagtaacggaagtgtcgaactgtctgacgttgagatcgagactaacagcaaaggttcaaatggagtgtttgtaacaaatgctgtttctgactctaactcaaattcctcatcctcctctggcagcccgattgttgattccaccgagcggcatgatggtaagagtgacgctgaggagcctgggggggtgcctcccgaaaagcctgtggaggacggaccctcggtatatggcggttcttcagggggtaaaggtgcccttagcgatggaaaccaatcgatgcccgcgccaggcgctagctcctctgacgtggaagggagttccagtgcagacatcagtaacgtccgaatcaccacccacggggacaagtcccgcggcctggatgcaacctttggagggaagattattgcttcagacgtggaaatcaacacagacggccagagctgtgcggccctggcaacagacagaggcgaaggtgaggtccacgtgaaaaactgcattctcaacactggcgtggatgagaagagcggccgcggctctccaatcatctattcaacgggcaacatcaccgctgacaattccgaaggctgtgcccatgtctcccagatcgcctgcatagagggaaaaaacagcattgcgctatccaactgtgagttctccgcaggtgccggaggaaacagggaggacaacggagaatacgtggatctaggaggtgtgttcatctaccagagcatgagcggggatgccgatgtaggcacctcgctgttcgatgccaactgctgcgtgctgtccattgaagaggactccgaatactataagactgctccgatgttccacgttaccaatacaaaggccatcgtcaagcttgccagcacagaactgaacttcggcagcggggtgctcctcaatgtttccgggcagagccaatgggggacggtcggaagtaatggcggggagcttgagttcgatgccagtgacgagattcttgatggggacgtcttcgtggattccatcagttcattgaacatgagcctcgcttccaccagctttataggcgcagtgaaccccgacgacgactttggcgagactaacctcgtcatcgactcagattctgattggacattggacggtgacagtcacctgagctcactggagaataatggagatatagactacaacggccacaccctgtatgtggatggcaaggcgtacacggagtctaatccattcaaatga

SEQ ID NO: 4301 - DNA, 699 bp, synthetic construct
  source 1..699: mol_type = other DNA
atgtccaaagggctcttcgtactgggaactggcaccgatgttggtaagacttatgtgaccggcctcctcctcaagtacatcagagacaacggctacaatgcgagctactttaaggccgccctgagcggcgctatcagggacaatgagggcaaactgatcccgggcgatgctgtggaggtgataaatatggctggcctggaagaggatacggacttcctggtgccatacatatacgagacagcagtttcgccccatctcgcaagtcagattgagggaaacccagtggaactggacaaagtcaagcacgcgtacgaggaagtgtcaaagaagtacgactatatcgtcatggaaggaagcgggggcatagtctgccctattcgctatgacgggcaaggatgcaaaagcaacatcttgcttgaagacatcatcaagtgtcttgacttgaacgtcctgctggttgccgacgccgggctgggaaccattaactctgtaatcaccacagtggattatctgaaaaaccgggatatccaggtgtgcgggattctgctaaacaactttaaggacatgcccatggagaacgacaatctcaagatgattgaggagctgggtggtgtggatgtcattgccaaaatctacaagaatgataaaaatttatcccttgatgtgcagttggacgtgctaatgaactatttcaagtga

SEQ ID NO: 4302 - DNA, 981 bp, synthetic construct
  source 1..981: mol_type = other DNA
atgtacaatattatcgagctgaaggacaaagtactgaacaactacaaagtcactaaagaggacgcactgaacttgcttgatgtgcccctggatgaactttccgatgccgccaacgagatcagagagtttttttgcagcaacaagtttgacgtgtgtacattgatcaacgtaaaaaacggccggtgcagtgaagactgtaaattctgtgctcagtccaatcactacgacaccgatatagacatatatccattcctatcaaaggaagagctagtgggtaagagcaactccctcctggacgcgggattcaagcgaatcagctacgtggcttcaggcagaaagattagggacaaggaatttgacatcgtggtgagcgcattagagcaactgaacaaggatagaacggatgaatttcatctatgcctcagtctggggctcctcagcgaggagcagataagcactctcaaaaacctgaatgttgaacgcatccacaacaacctggaaagttcaagggactatttttcgaatatctgtacaacccactcctacgacgagaagctggataccattgaccttatcaaagacaaaaacctgatggtctgcagcggggggatcttcggcatgggcgagagcttcgaggataggatcgatctggcgattcagctgcgagatctgggcgtcaagtcgattccaatcaatgttttaaacccgatcaagggaacgcctgtggagaataataagattctctccaacgatgaggtctgccgtctgattgccatattccgcttcatcaaccccgatgccttcattcgcatggctgggggccggaccctccttggagacaatggccggaaggccttccagagcggtgccaatgcagccatcctgggaaatatgctgaccacaagtggggtggaattggaagaagactttaaactcttggaggagctcggattcgagatcacttattccattgacgcttga

SEQ ID NO: 4303 - DNA, 714 bp, synthetic construct
  source 1..714: mol_type = other DNA
atggacgaaagaggtaagaaatacctgctaaaggaagatcgggaatttcaaactgatctcggaattatcaaaaaggaacagatggagcgtgccacaattggcgacaccataatcactcatctcgataaagagtttaaagtcatcaaacctaccgtcaacgatttcatcgacctgatggagcgccgctgttccatcctcattcagaaggatatcgggactgtgctggcccggacgggcctgggtgcgggagaccgggtcatcgatgcggggacaggcgccggtgcaatcgccttgaactttggcaatgtggtgggagacaaggggcaggtgtacacctatgagatccgggaagacttcgcagagattgcaaagcgaaacattgacaattttgggataaagaacatagaggtaaaaaatcaggacatcaaggaaggaatcgatgaagaggagattgacctggttttcctcgacctgccaaagcccttcgaaatcttcgaggatgttaaaaaggccctgcgcctgggcggctggctagctgtctacgccccctacattgaccaggctgaggtggcttatagaattgccaagaaacttgatttccgagacttgacgatccttgagaccttagagagggaaatggagataaggccacaaggaacaaggccgaagaccagaatggtggggcacagcggctatctggtgttctgcagctga

SEQ ID NO: 4304 - DNA, 2529 bp, synthetic construct
  source 1..2529: mol_type = other DNA
atggtgacttacatcgaacacccgctgattaggccaaacgctgcggaagcccgaatttatcagcaggtgttagcggcgaacgtgctgaaaaatgggaacactatgattgtggcgccaaccgctctcgggaaaaccatcatcgctatcctggtcgccgccgacagactgcagaaactcaaaggtagtaaggtactcatactggccccaagcaagccccttgccatccagcatgaggagaacttcaagcactttctaaacctgccttgcacatctatcactggtgccgtcaagacagatgagcgggaaaaacggtgggatgcctcctcaatcatctgtgcaactccacagacgatcgaatctgacctgttaaatgagcgctacaccctcgatgacgtgtccctgcttgtctttgacgaatgccaccatgccgtaggcagttactcctatgtctaccttgctcaccgctacgtcaaggagtcgaataaccacctcattctgggcctcaccgctagtcccgggcatgacaagagcaaaatcaaagaagtgtgcgaaaatctattcatacaggacatcaccatcaagactgaggacgatcccgatgtcaagccctacttcaatcctatccaaatcgactgggtgagggtgcagctgggagaggagctggaaaagatacgcgatcttgtcaacaaggccttgaaggttcggctgaaaggcctgaaatcgcttggggtgatcaatacggtctctgtgacgaaacgggatgtgctcaaggcccggtcacgggtgcaacgaaagatcggtcagtctgtgaaccctccgaaggagtgcttccaggcaatttcaatcctctccgccgtaatcaacctgcagcactcccttgagctgctggaaacccagggggtagtgcccttcaacgactatataaagcgccttaggaagaagaccacaaaggcagcgaaaaacatcttactggacccgaacttttcaaaggccatctattttgctaaggaggctgaggagaagggactggagcatcctaagatgaataagctagtggagctcctcaaactggaactgggggtggacgaggctcagaccagactcacttccttaagaaacgacagtgactcttccatggatgagaaagtgaaggaggacagccccaagattattgttttcacccagtttagagacaccctggacatgattcatgaacggtgtgagagggaaggcatcaaaagtgttaggttctttggacagggaacaagcgacggcaaaaagggcctgacccaaaaggagcagaaaaagattatcaagtcattcaagacaggcaactacgatgttctaatctcgacaagcgtggcagaggaagggatcgacatacctgccgttgacctcgtcatcatgtacgagccggttccatctgaagtccgaatgattcaacggagggggcgtacgggccgcaaatcctctggcaggatgaaagtgttgatcactgaaaagacacgagatgagggctactattggaccagcatgcgccgtgaggacaagatgaagactcagctggccactcaagaggccatcgaggagctgaagctcaatgccgtggagaagatagaggtggagaagagtgcgaaagatctgggcaaacgcgagaaagtcattatcgaagaccccagagatgatgacagcagcgacaacttcgaggaggaagctaagaacgaggacattgaggagataagcttggaaaacgacaatgaagagaagcagaaggaattgatggaaaaggaggccaaaaaaaaacaatctttggaagattccattattgaggagctggcaaagtcaagtacgagcgatgaactggtggtgtacgttgactcgcgcgaaggaaatagtagggtgatacgggccctggacaccatcggagtcaaagtgaaagtcaatacaatggcagtggccgactaccaggtaagcgatgatgtggccatcgaacgtaaaacggcaagcgactttgtagattccattgtggataagaggctcttcaagcaggctaaggccatgatggaagagtttaaaaagcctattcttatcctggagggagatgacttctataccggcttcatcaatccaaatgcaatacgagggtccatggcttccattgcaatcgattacggaatcagcatcattcccacaagaacccctgaggacaccgctgcaatgattaagagaattgcaatccgcgaacagcagggtgagaaaaagagcatacagatcagaacagagcggaagcctcagaatctgtgggagcagcagctattcatcattgaatccttgccaaacattggacccgtccacgccaaaaacctcctggagcacttcggttcagtgaaggcggttctccaagccgacgaaaagcaactgcaggaagtcgatggcatagggaagaaaacagctaaaagcattaaagaagtggttgatggcaagtatttgtattttaaaaagcccgagaagaacgagaaattgatttga

SEQ ID NO: 4305 - DNA, 15201 bp, synthetic construct
  source 1..15201: mol_type = other DNA
atgaagtttgagaagatcagtatgttgatatccattgtcctcatctcgctcattgccctcggcgccgtgagtgcagctgacgacgtcgctgcagatgatgcggtggccccagcaacggtcgatgaggttcagacaatcgataatacaataacaaatgacgatatctcatatgagtcgacggacataattgtgaatgacactggcgactccgctgattcgaaggcaaaaaccacctcccttagtgcaaatgcagtgaacgaaggggagactttgtcttttacacagctcgctgctgatgtctcgtccagcccctccatgttgagcggggcgtattataagtatgatccctcaaccgacaccgcgtttgagaatgggatcaccctcaccaatggcctgacaatcattggtggcggggcgaccattgacggggataatcaggcccgcatattcaatatccccgagggcgtgagcgtgaccattatgggtgtaaccctcataaacggggctgccgacgagggtgccgcgatttataactccggcaagctgactctcatgaatgccaaggttaatgacaacacagccgtcaagtctggtgggggtatttataacaacggcggggaagtgctggtgacctccagtgagtttgatgggaacgatttaaccgacaggacagttaatggctatggtggagccgccatttactccaatggcgggtcggtgaccataacagatacaaatgtgaccaacaacctgaagaacatagtgcaccggggaggaactgggacgtacacaggggacctctccagtgccgccgttacaagtaataacgccgacctcacggtcaccaactctcggtttattgccaacagtgggtcctacggtggggcaatttactctggtgagagcacctctgcaaatctcctagtgagcggatctacctttgaggacaactttgccttcaatgggggcgcgattgatatagtgggaacttcctataccatatctgactccacattcaagaacaataacgttaagggcacggggagcaccaattctaactacgccagcgggggggccatctgcgtgcaggatgcaaataacccaggcttaatcagcggatgcgactttgaagcgaactccggagtggttggcggggcggtcaactgcgagaacaccatggttctggactgcacgtttacggacaacactgccaattcagcaaactcggagacctttaatggaaaaactaataatcgaggaggatttgccggggccatttacaatgaaggaacaatcacaatctctgattgtgagtttgatgacaatgccggaaggggcgaagggatacgggtgaaaaatgcggaaatttcggattcttccttcacaaataccaggattgacacatgccaaaattccaatgtgcttctcactaacaacacctacaataatccagatagggacgtgcaggcagcaagcggcactcaggtgacggtggacgtggccgacggtgacatccccaatgctaacacagctccttatatcgtgggagatctgactttcactgatctgcaggccctcatcgacagtggctcaagtggtatcagattgaccggaaatgttattaaaactgctgaagaggaaaccacctttgccgacggtctgaatgtggataagaccgtcaccatttacggtgccgaggggaaggttatccaggcgaatagtgggaagatcttcaatgttgcggaaggcaagaccttgacactccggaatgcgacgctgcaaggttctggtgagaccgccatcaccaattatggaacagtttatctgtatttggcggacaataatcaattcactgactgcggcgatgtgctcattgataatcacggcagaaccaccgagaccggtctgaccaccttcacgcagctaaataatctgattggcctggtaaatggcggaacagtttatatcggggagtcgaaaatcactaaggctgaagatgagaaagaagcctataaaaatggaattgttatcgataaggacctgagcatattgggttcatacaacacttattataagtatgtgaagacctccatcaatgctaacaatgacggcagaatctttacggtggccgaggggaaatctctgagcctaaagtacatcaacgtaaccaatggtgccgctgatgagggggcaggggtttacgtctcggaagacgccaccttaatcgccgatactgcaaactttattaaaaacaccgccgttactaaaggtggagcaatctactctgagggcaccgtggacttaacgaatgttaacatcaagaacaataccatcagtaaaacagatggagtgatggcggatgacaacgggggggcagccctctacaataatggcggaactgcaacactcgataaggtcaatgtgacagacaaccagaaaacatatgttatcggagatatcatggatggggtcgtggtatctaagggggctactaccattaccaattcctacttcgccaacaactctggccgttgggggggagccatcactcagactggcaccgatcagactctgacagtggaggacacaatatttgaagagaacacagccatctttggggctgccatcttcgacaattccccccttgttgtaaaggactgcaagttctacaacaacagtgctatcggtcctggaagtccagggacgtccaacagtcagggtgcggccatcctcgtgatggatgacaccgcctctgccgatatcagtggctcggagttcatcaataacaccgccgattgcgggggtgcagtgagcttagccggggtgggctctgatagttccatcgacgattgtacctttattgacaacacagcgtatgctgatggtggggcagtgtacttctggacggagagtgctagcgtgaccgtgaccgactccgagtttatcagtaacaccgctccatatgggggggccattgagaatgaagggctgggcgacctcatcgtggatgggtgtgagtttaccgaaaacactgcctcccttagaggaggagccataatctcatccggagacacatccgtgtccaactcaaagttcacggataatgaggcttccggaaacaccaatgcaatatacctttataattcggggtcatcactgtccttgtccaacaacgtgatcacggggagtgatgatgcccagatctatgtgaaagaggggattgatgtggtaaccccattgaaggttaaaatactgaacaatgagacggttaacatcaacatggttccatatgatatcacggccactgttacagatgataaaggcaacaatatcgtggacctggcattccgctttacagtaggtgatgatgtcgtcgatggaatcagtattgacgccgcaacaggggtgtacacagccacatttacgcctacacaggccggagaatttgttgtgtcaaccaaccttgcaaatgcggatgaagtgcaaacaggaacgctgaacgtctttagaaccctgactgacctgaaagcaatcatagatgccaacactaatggcaccattgacttggatgggaattacgcttacaatgccgagtttgacagtgcacttacagacgggattgttatcaacaaggatatcgtgatcaatggcaacggattcacaatctgtggtgagaacagcacaagactcttccatgtaaccagtggtttcctgaccttgaagaatgcaaccgtgtgccatggtgctgctgaaaagggggccggggtctatgtcgaccatggaagtaaattgtctaccgattatgtgactttcactgaaaacactgcggttaaacgcggtggagcaatctactctgaggggatggtgtacataggcaactctgtgctggacagcaacaacatcactttcagaagcgcaaacgatgacaacggtggagcagctgtctacaacctcaacggccagctgacaatcgagaaaagcaacatcaccaataaccttaaagacattgtgatccggaacggcaacgccggcgacctgttggtgggggtagtggtaactaccggcgacaccttgattaaagactcatactttgccaacaacacaggatcgtggggtggcgccatcagctcactgggatacatgaacaccgacgattacacattaaccgtaaaaggcactacctttgaaggaaacaacgccaccttcgggggagccatctttgtggagagttccaaccttgtggtcgatgactgtatctttaacgaaaacactggggtgggtaagggaagcgacggaacctccaacacccagggcggagcaattgtggtgcaccctactggatcaaaggctaccatcaccaattccaagttcaacaagaacagcgctaacactggtggtgccgtgagcctcgccggtgtaggccaggatagccttattgaaggatgtacattcactgacaacacggccaatgatgggggagcggtgtacctctggactggtggcaatgctattgtcactgtgaaagacagctcattcagcgacaacacagccaatttcggaagcgccatttctagtgacggtactctgagcctatcccacaatgaaatcgccaacgattacaccattactcccataggtagctatgatggaacaattgtgtcagcgatttatgtgaccacattgaatggcgagactatcatcacaggcaatccaactcagaatctgacggctacaatcactgatgataatggaaaccccatcgtagagaagggccttgtcctcgaggtctacggcgaagaggtggaaacaagctatgataaaaccaccggcatccattctgcaattcacaccttcactaaacccaacagttacaggataactgcaaagggtttcgaccaggatcacaccactccagggtatattgtgtacactggaggaactttcaatgaattgcaggacttgatcaatgcagccgaagaaggagccaccattaccctggaccacagcattgtatacgatgaggagtttgacggcgtgcccttcctggatgggattacagtgaataagaccgttacaatcgtgggggctgagggtgtggaaatctgcgctaacaatctggcacgagtgttcaaggtaacggacggagcaaccctgaccctgaaagacgctaccgtgtgtcatgggactgcccagaaaggggcgggtgtctatgtggatgctggcgccagcctgattgccgacaatgtaacattcacgaagaacacggccgtgaaacgtggtggagcaatctactcggaggggatggtttacataggcaactctgtcctggacagcaacaacatcacgttccgctctgccaacgatgacaacggtggagcagctgtgtacaacctgaacggccaactgacaatcgagaagtctaacattaccaataacctgaaggacattgtgatccgtaacggcaatgcgggtgacctgttggtgggggtcgttgtgaccagcggcgaaacgctgattacagactcatactttgcaaacaacacaggatcgtgggggggagcaatcagttcactgggatacatgaacaatgaggactacaccctcaccgtcatcggcaccacctttgaaggaaacaacgccaccttcggtggagcaatctttgtggaaagttccaaccttgtcgtggatgactgtacctttaacgaaaacgctggcgtggggaaaggcagccctggaagcgcaagtacccaggggggagccatcgtcgtgttccctagtggcaccaaagccactatcaccgattcccgcttcaacaaaaacagcgctaatacgggtggcgccgtgagcctcgccggggtggaccaggacagcctgatcgagggctgtacctttaccgagaacacgggtaatgacggcggcgctgtctacctctggactcagggagatgccaccgtcactgtgaaggactcgaccttcacgggcaacactgccggctggggtaatgctatctccactgacggggcactgaaactggagggcaacacaatcagttcaacctccgcagatgttgggaactgggcggggacaatcgactccaaagtgtatgctcaaatcctcgccaatgacacatacaactggcatatgggaggcttcgtaattaacgccaccctgactgatgacatggggaacctgattaacgaccacaacttcaactatgtcattaccaaagaaggcgccaccgattcgatttccgtgcccgccactttctacactagtctgggttactaccagggcacgttcactcccgccgacattggaacttacttgatcagcctggattatgctgttgaggaagtgaacactagcgttgtggtggtgtcccggtctcttattgacctggccaacatcattgccgctgatgaggacggcatcattgacttggacgatagctatacgtacattgaggagtttgacagcagcatcgtggacgggatcgtaattgggaaagacgtaactataaatggcaacggacacactatctgcggggatgataaggcaagactgttccatgtcacagacaaagctctgaccctgaataatgtaacgctttgccacgggaatgctctaaacggtggtgctgtatatgtggaatcagctgcgactcttaacgctaataatgcagagtttaatgagaacaccgcgacttaccggggtggagctatctggtctaccgggacggttaatgtgaaagactccagcttcgacaataacaatatcacttaccgcgcccgcaatgtggataatggtggcgctgctatctttaacaatggcaccctgaatgtcgaccattccaactttacaaacgaccttgtcggctatgtggtacggactggagacacaaacagccctcagcttatcgacggtatcattctgagctctggcgtggctgtaatcaataattcccactttgaaaacaacagcggtacgtatggtggtgccatcaccgctgtgcctatagccagtctggggtctacagctacctccctgactgttgagaattgtgagtttatcaataacctggcatactgtggcgcgggaatctcaattaatgccgacggcaacggcaagaccacgtattcgattaagaatagtactttcataggcaataatgctacaggtgtaggcagtactggctcgacaagcgccggtggagcaatatctatagcccgagactccgaggggaccattacagattccaagttctacaacaacaccgccaccactgggggagctattgatgtgagcgctacccgcagttcttccaaagtgacaatcgacaactgtgactttgagaacaacactgctacagccggcgatgggggcgccgtccgcattagcaaaaacaatttggaggtggctgtcaagaactccaacttcacaaacaacgacgcaactggggatggggccgccatttacaacaatggcgtgctgacactggagggcaacaaagtcacgtccggggaaaccgagatctatgtcgggcccaatgggtcagtggtgaactcaattgtcaaagccatcttcctgggagatgcagaggacaatacaatcctggcgttcctgggcgatgaggtacatccatatgctaccttgacagacgataatggcaatgccatatatgacgtcgacttcaacatcacagtggacggcgttgagtatgaaacatcctatgatgactcaacgcaacagtatacggccacatacaccatcttacacgcgggagacaacattgtgagcactaactatgacgcccagaagaccgatggcaagtatgatgttcccaaagccaacgccaccattgtcgtgactactgaaagcattagtgtgggcgacaaggctactgtgaacatcaacctcacaggcacagacggggtcggcttgaacggaacggttaaaatcaccatcaataaggccttcacggatacggtagttacggagaatgggattaatgttaccgaagttgagggcctggaaatcggcgaatacttcgtgtacgtctacttcgaaggcaactctgattataaccccgaatacaactacaccctattcagggtgaccggtaatgtgtcctacttcaatgtgaccattgaagatgtgacctatgacgatgccgccacgattaaggtgaccgtgcaagatggtcccatagacgaccctgacaacggcgtcacgggcattgtgctggtgacaatccaaggaaaggatgtcaactttgagaatacctatagcgtgtctgtgatcgcgggcgaaggatcatacactgtggaaggcctagcacccgggaattactcatatgctgctaagttattagccgatgagctgtacaatgaagcgtatcttgagccacagaacttcacagtgttcgagaacccctactctgaactggaagttactgatgacggccctatcgcctctggggagactgttaacattacagcgaccctcactgacttccagggcaaccctatagagggagctaccctcgaagtctatgatacaggcgtatggattgccaatattactaccaatgcagaaggtatcgccgagacctctatcgataatcttggatatggtctgcacgacatcaccgtaatcttcaatgacacggtccacgacgtccagactgagaccgtgaccgtctctgttacaccgaagaaggggacattcacagacttgcagtacctgatcgacactgcggatggacgacttgtcttgccatacgacttcgcatttgacgcagcttatgacgaacagttcttcttaacaggcgtgctggtggacgacaacattattatctctggcgctggacatatcattgacggcatgaaaaaggcaaggatcttgtacatcaatgctcccaacgtcaagatattcaatgtgagctttgtcaatggtaagtctgatgtgggggccgccatctacaccgaggccgattacctcctggtggacagctgctacttcgccaacaacgaccctgaggctggtgctgcaatctatgccgaaagcggggtgactgacgtcgaagaaacgatcttcttcaataacaccgctgtcaacggcggtgccatctatgtggagtccggggccacactgaacgtggctgattcagaatttaatcaaaacacagccacctaccggggtggcgccatctggagcaatgggaccgtgaatgtcaaggactcctcctttgataaaaatgatatcacttaccgagtgaagaacgatgataatgggggagctgccatctttaacaatggcaccttgaacgtggtcaattccagatttacaaataacctcctgaactacgtcatcaggacgggagatgataatcaccccgaactggtggacggtgtgattctcagctcgggaaaagccaaaatcagcaattcccactttgagaacaacagcgggacttacgggtctgccataactgccttacccataggcactgagctcagtgacctgaccgtagaaaattgcgaatttataaccaacctcgcctactgcggcgccgccatctatgtcggcagtgggactacactgttttacattaatgactgcgtgttcatcggcaataatgcgacaggcgtcggcagtaacggctatgtggctacggggggtgccattaagatagctaagaaagcgacgggcataattgcagacagccagttctataacaactctgctgcgaacggtggagcgatagatataagtgctaccagtggtaacactgcctcagtgctgattgatagctgcgtctttggatataatgtggccgaccagggtggagccatctacattgacaatcggaccacagtcaacctttatgacagcacactctactacaatgagggggaagccctcaattaccacatcttcctgaatggagacgcaactctgggctttgaagggaacaacttctacacaacaatacctaccatcgtggccgaggacacctacgcttacggggaaaccatcaccatcaatggtacattcgattggggagttaacaacaaacccatcaacatgatctacaccattaacggggcccccggcacggcagaggtggttgatggcaactacacaatactcattgacaatcagccagatgtcggggattacactatcgtcattactgcctttacggatgagaacggaaatgtgtaccatgtcgaaaccgcgcagaaaacaattagtgttacgaaagcaacccctatcctctcggtggagggggatgagtaccttatgcctcccagcgatgatgctaccgtgaccatttctcttaccgataaagacggaaacgggatcaagggcacagttattgtcacagttgccggcgagacctacctcgtggagactgacgaggatggcgacggcgagctcacgattaatgacctgcccgcgaccacttgggccattgacgcgaagttcataggcaacgataactataatgaggttgtgaacgacactgaagagattacctttatagctgatgtggcatacttcgacataattatcgaggacggggtgtacggcgacaagcttaccgtcatcgtggaaaacgccactgacattgacggcaatagcttaaccggaatggtcacaggcatgatttctacaggcgatgacgacatctcattcatagtgtatgtgaataacgggcagggcaccaacactaccaccaccgctggcggagttgggaaattcacgggagatgcctacttctatgatagcatgatggagtttatgtccggcccggaggaatgcagtgcatatgtgagcccagccaatgcgacactctatctagtgccctgggatgcagatgacctatcatcagacattgcctatggcgataccatcgagtttggcgccgccgtcttcggggtgaatctagaggaactgaacggtactgtgtattacatcataaccgagctcaataaaaagggggagattgcgattgtgaacggctctggggctgtgaacctcactgacattttagatgtgggaacctacacggtcataagctacttcgtcgatgacaaaggcaactacgacccagagtcatccgtgaactacacgaacttcaaagtggccaaggccacccctaccctgaatgttgagaacgctcaacaggtatatgctgataccaatacaataacattcaatgttacaggcattgacgacaaaggggtcaaaggtaccgtaattgctattaagcctatttcagaggacgtgtctggtgcaatctacgaccccgagaccggtctcggagagctgacattcaatgggctggtggtgggcgacaacccaattgtggtcaagttcctgagcgacgacgataactatgccaatgccgagaagaccatcaacataactatcactcaagccacactggcaatcgactctacaataaccacgcaggaaattgtatatggcaaagatgtggaagccgatgtcaccgttaccggcatcgtccaagaagacactgtgattgcaaatgtcagtctgtacgacaacgctacaggagagctgcttgactcctttaacatcgcccttggcttggaagacagcatctcattcgaggaccttgaggtgggcgactactactacacaatcgagtttacaagcgagctgtacgcgggagacaacttcacatctgaggtgttcacagtgaacacagccgaaatccttgacctggacagctccaatgtggacaatgtgtcctacggcgagggaatcgacataaccgtgtatgtagacggaatgatcgagggcgacctcattgaagttaacttcactgtcgttgacgcaacaaccggggacgatgtattcaatggaacgtacaacatcagcaacggggatgtgatcacagtgcccccactggatgttgggaagtacagctatagtgtctcattctatggagatgataagtataacacgggcggtgcagattccattgcggccgtcggaagctttgaggtattggatatgtcggatgttgacgtgctggtcactgcagatgaaagcatcacgtacggggagaaggtcactgttgaaatcgaccctatcgtgtcggaggggggactacccgtgacaggtactgccaccatctatgtttatgatgaccccgcatctgtagatcctgtatatgtgctggccgacgtggagctggataaagacggcgctacggcagtccttgataccatattgcctacgggcgagtactggattgttgtggactttgagagtgacgatggctactatgatggcagaggcgtcacgtcaaccatcgttgacctggctctagctaaactgtccatagaccccatcacagtgacctatggcgaaaccatccctatcaccgtgacagctctgggcaacggcggggaactattaaacggaaccgttgagtttaagatctacgggccaggatttgagggaacagtcaccgtcaagaacggcactggagtaaccaatattacagaaaggtttgatgtgggaacctacaccatcatagccgcctttggagatgatggggctaattacgaaggattcaacattacttccttagaaatcactccggccacccccatagtccgggtcactggcagtgaagttgaatatggcgaaccgagcactgtgacagtcagtgtcagtgacattgatggcatgccattatccgggaaggtcatcgtgactgttgactgggtcgttgacgggctgacccaggtcattgacctggacgattccaatgaagcttcattcgatctcagcccatatgtccatcagggaacatacgatgtaaccgtgacctacatcgcaaacggcaactacggcgaggccgtcaacgacactgagacagtgaatgtgactgcctccacgaccgccacagttaacgtggaggttccagaggacgtgtcatacggcgatgagctaacgatcaaggtcactgctgaggacggcgctggcgaacagatcccgctagaagccgtcaatgtaacggtgaacggggaaaccaaggagtacccggtggacgaaaacggcacagttaacctgggcgtcttgccggccggcgataatgagatcaccgtagcgctcgacgacggcacgcacaagcccacaaaaaccgaggctacagccaaggtggccccggctgaagcggtggtctttgttgacactgacaacgataacccaagctatggagatgtcgtggtggtcacggtcaatgctaccaacaaggacaaacccatagatgccgatgcctgtcttgtggtggacggctacctgatcggctactacgatcttgaggacggccaggtggagatctctattaaggacctggcccccggcaaacatgaaatcgaggtttcagtcgcaaacggaaactactcagaagggagctacggacgcgcaattgtcaatgtcgataaggcaacccctgtaatttcagcagagggcgagacagtcgagtggggggaagtggcaaccgttaaagtgaatgcaaccggggcaaacggcgagaaactgaacattccgctggtagtccgcgtcatctgggaggtatccggcgtcgacgagctgatcgagatcgagaacggcaccggagaggccgctttccagatctccaactatgttgctcctggaacttacaacgtcacggtcatcttcctgggaaatgatgagtattacccagtgaacaacactgaggccaagattatcctgaccgagccaaagacggttgagatggaggtgtccatcacccctgacgagtacggcaaagcgacaaatgtgacggtcaccctgaaggacgtggcaagcaaacccctcgagggctcaactgtcaccgtgacggtggacggcaaagaatacgctaacgcgacaatcggcgaagacggaaccgtaaccgtccctgtagagggcctggaagctggcaaccacaccatcgctgtcgacttcgacgacggggagcactccccggtgcatgaggaggaaaacatagccattgagccatcaactgacgcgaccgtggaagctaccgtaaacgtgggcgagaacgaaaccaccgtggatgtgattgtgaaggattccacaggggagggcataaatggaacggttattgtctatgtggacggcgaacctgtcgctaacacgacagtgggcaacgacacttccagcgtctccattggccaactggctccgggcgaccacacagtggacgttgagtttgtcaaccctaactatgctcccacaagctactccacccacgtgacagaatctacgtcactcactaacatgacagtgaaggtggacaagaagaatatcctctatggggagtcagacataacggccaccattgagtttaccagcgagggcaaagctcttgacggggtagtggaggtgttgctcaacggtgaggcacagaacgtgactgtgaccggcggaaaagcaacggtgaagttcagcgacctcgccgccgatcactacactgtggtgagtaacttcgccggaaacgctacatacgctccgtccagcgactccgcaaacttcgtggtggaacgaaaggcaaccaagttcaactacaacgacatgaataccacagccgtcaacccaaacgttgacggaaggatcggcgaatacttttacttccagctggtggaccaggacggaaaggccctggcgaacaagagcgtgtccatcggattcaacggaaaggtttacaaccggacaaccaacgaaaccggctgggcgaagctccagatcaacctgaggatcgtattcggatacacctttgccatctcattcctgggcgacgacaactacacaggcgcattcaatgtcgccctgatcaacgtcagcgcccaaaccccgaagctatccacaagcagcaaggtttacaaggcctcggctaagaccaagacgctcacggccaagctcctcacaagctctggaaacgtggacaagggtaaaaagctaacatttaccgtgaacgggaagtcctactcggcaacgaccaacgataaaggggtggcctctgtgaaggtgagcatctcccagaagggaacttacagttttaccgtcaagaacgccaaggacaatacatatgccagcgtctctaagaccgcgaagctggtgattaagtga

SEQ ID NO: 4306 - DNA, 1794 bp, synthetic construct
  source 1..1794: mol_type = other DNA
gtgttcaaattgcagagtctggagctctctggtatgtctgacgaagaactgaaaggtcttaacctggagggcaagacctttggcgtcattggagtctgtggcgtggttggtaaccttgtggctcggatcatcatggataacgggtacgaggtcatcggtacagacatctcatctaaggaagattgccggttctactcatcctttgacgactacgatattgaaatattcttcggcggccaccccgacgaatttttcaagcaaattgacttcatcgtgccccctccaagcatgagtgatgacgcgaaagttctggagcttgcaagagagaaggggattgatattcttcacctaggggacattttcaaactgttcaaggcaaacaaacccattctgtgcattagcggcactaatggcaagaccaccacaacgacgctcttaaagcatattgcctactccaacggaataagccccgccgagcacaacctgaaggggatgcaggggaacaacgagttcatcccatcacttcagacaaggctccatggggacgtggctattctggaaactggaacagacggcacgccgggcggattgaagtctgtcatcgacttgacccacccaaattatggaatcttgacgaacatcaccatcgaccacctggttgaccctgatgaccataaggacggcgtggacgaaagtctaagcgccatttcactcgatattggtgacgatgaggtatcccacatcgaccgcggatttctggaatatgcgcgtgtgaagggtgagttgatcgaggggatcgaagagaacgacggcctactgatttacaatagcgacgatcctaccattgtcgggcttttggataaactgaactacagcggcaaatcgattagcttcggggtggaaatcgatgagtttgacaatttcgagctggaaatcgacgagtttgattttgactcctccttcgattctgtttcccctatcaaaatccacacaaagccatgctggtgcggcagagatatcaagatatacgaaaccatcagcggcagcggattctatgaatgccagtgtgggataaagtatgaaaagcccgtatacatcgcaaaggacatcgatttaatgaatcgcagcttcaatctggcatctcgagacgatgagttcgaatttaagctgaccctggacggactccacaacgtgtacaatgccgtgggcgccataatcgctgccaaagagtttttaggcctatccaatcaggacatccaaaaaggcctgtccaccttcaaaggtgtggctggccggatggagatcatcgataaaatagaagacactaccatcatggtggattatgcccataatccggcaggggtcgagaccatactcgatgccatatccaagatctatgacaagacttgtgtagtgattacagtcagttcggagtcaggggttgagggggacttcgatatactggattcagctatcggaaaagtggactatattgtccccgcgtcgcacgactgcaggtacgctgccgataagctgattgagctcacaaaggagaacaggcaggaagagctgcatctgaatagtgtgtacactctcgacgagctgtgcaaaacttttgtactcacagatgaggatctgaagcaggagtccattaaaaccctcggagcaagcgaagaccaggtgataggaggtctcaaggaggccctgaaccttgacacggatatcatcctcatcatcggagaggctgcctttaagtttgagagcgccattaaagacttctgtgatagtctgtga

SEQ ID NO: 4307 - DNA, 1497 bp, synthetic construct
  source 1..1497: mol_type = other DNA
atgaatgttattgtggtcggggcaggaaatgccggtcgacctgtggcacggctgctcaattatgccggccacacggttaaaatcactgatcccaaaaacattgaggactttcacatggatgtgcagaagacactcaggctgatggaaagcgaaggggtagaattggacctgggagtgttcaagcccagtctggatgggatcgacacagtctatctctctccaacagtgcccgaaaactctccagcctataagatcatcaaggaagctgatctggacgtgttcaccaatgatgactttggcagattggccgacagcttcatcgacatcgacatcatcggaatcaccggcagcgtgggcaagaccagtaccacccatatggtgacggaaatattccggactgcagggtaccaggtgtggatctgcagctcgatgactcaaaacttagtgagcgaagtcattgtggacggcatcatcaagggaatccctgagaagtctgacatcgcggttctggagctgccgcacggaacagccggcctgatggcagagctcaagctgaaggtcggggcactcctcaacatatacgaggagcacctgtccgagttcgggggctccatggagcgctacacccaacgcaagatgttcattgccaaaaacagcgaaaacttcattacaagcattcactgcaaggacaccgtgaaagaagcccgccccgatgccatcttttacgcaatggtgaaagacctcccggcgtacgacccctccaagaaatccctcttctttgacaagatagccaactttgaggagatcgccatcggagagggccaagtatgcaacttcattggggacagtgccaaaggcgcgattgaaattggctataagtttagaaacaagtcaaatgagctaagaaaaggttcgttccagtccgagttccatatgatgagctactattatgagaacgcggtggctgctacggccatcgcaatggcctacggactgagcgtagagataatcaaggaagggcttgccaacttcaaaggtctgtccgtccatatggagtatattggcgactacaatggtagggaggtgtatattgatgcctcatacctaattgaaggtattacggtcgctttagactttctgggcgatcgaagtcttgttctgcttctggataactttgatacttccacttaccgggataagaaagaaaccgggaagctgatgggcaaatacgctaatgtcatggtggccacaggctttaatgaggtctatcagagggtagatcttgagcctgctcaggagctattggacgcagctgtcgactcagatgctgttaaagtgatagcgggaaccatgcaggagggggccgagctcgctatcaaatactcaaagccaggagataccatccttcacctgggtcctcagttgatgcaggacccagaaggaatcatggagaagatagtgacaggcctggaggaagggtgtaagaagtacaaatga

SEQ ID NO: 4308 - DNA, 972 bp, synthetic construct
  source 1..972: mol_type = other DNA
atgaaacgacccaagaaaatgtacaatccagaggacatgtttatcaaaagaagcaatacatacctgggccgggtaatgcacagtttcctgaagctcccaggccgatatgtcaacagcaggaccaaccagtaccctgacttcttcggaaaggagcgcaagaccgacgccacgatcttagtggacttggaactggaaatggaggaatctgaagtactcgagagctcctacgaagtgtttgtgtccgagaaggagactgaagagatcccgcaactggcggagtgcctccacaacgagaaaggcaagatgattatcgacattgaggatgagagttcaaaagtggataagcagactctggcaaaagatttcgagtataactatatcattcattatgagtcaggattacccgtttactctgtcataacaacccctattccactcaaacgctgcaagacatgttacatcagtggcaacaccgtcttcaagcccattataaagtcctatgatgaaatggatggtgaagctaagctgaaggagtttcaagaaaagtacgagaggggagaatatttctcggacttggaggggtacgaactcatcagcatccccagaatgtacggtgagaaaggcaatgaggtcattgaggaggtttgcatcctctttaataaaataaaaatgaaaaacgggcgcgtgaagatccagctggccaggtgtctggactgccttataaacaagtatggcgggacccttgaggaaatcaatcgcctggagggactgatcaacatgacgaagctgatcaatcttgaaaaggaatacgaggaccggctgcggcaggaaggcgaggagaaagggagacagaaggggaggcaggagggacggctagaaggcaagttggagctcgcccgtcagttcgtggaagagctaggtgtggataaagtgtccaagattagcaaaattgaaaagaacctgctgctttga

SEQ ID NO: 4309 - DNA, 354 bp, synthetic construct
  source 1..354: mol_type = other DNA
atgtatggccagaagggaaacgaagtcattgaggaagtttgcatcctattcaataagatcaagatgaagaatggacgagtgaaaatccagcttgcacggtgtttagactgcctgataaacaagtacggcgggacccttgaggagattaatcgcctggaggggctgataaacatgacaaaattgatcaacctcgaaaaggagtacgaagacagactccgccaagagggcgaagagaagggacggcaggaagggaaactggagctcgccaggaaactggtgaaggagtacggtgtagatgaggtcgtgaggattagcggcctgagcaaggaaaaaatcctgaacgagaaaaactga

SEQ ID NO: 4310 - DNA, 1236 bp, synthetic construct
  source 1..1236: mol_type = other DNA
atgtttctcactaatgaggaggaaaagatggccaacggagaatacggggagaccattcgcaaaagcatggacatactcatcgccctcggagacatttatggtgccgagaagttcgttgacatcaagtcggcgcaggtctcgggggtgtcctataagaccataggtcaagccggcctagaatacctggaagacttggcaagcacgagcgagatcatatataatgaaaacggcacaatcagcgataaaagcgggatcgcaacaatctccgccaccctgaaccccgctggtaccgaccttgacaactgggaggactttgggttcccagctgactttgcccgaaagcaggtagatatctgcaacgcctacggagccctcggaataagcacaacctgtacctgcactccatacctcatcggaaatgtgccaaggttcggcgatcacgtgtcctggtctgaatcatctgctgtggcttacgtcaatagtgtgatcggggcccgcaccaaccgggaaggagggccgggggcgctcgctgcagctattgtgggaaagacgcctctgtatggcttccacctggaggagaacagaaaggccaaccttctggtcgaagtggagagcgagctggagagagccgacttcggcgcgttaggctatgccgttggtcagatagttaaagatggaatcccttacttcaaaatgcagaacaaaccctacgaggtctccaatggcaatctaaaggcactgggcgccgcactggcgtcaagtggtgccgtggcactttaccacgtggaagacgtcacacccgaatttgcaaacgcagctatcgatgatgtggagaacaagattacaatcaccaaggacgatattgtgagtactcgggagaaattatccactgccgatggctacgcagacttggtgtgcctgggctgtccgcatgcttccctggaagaggtcaaggaggttgctgagattgttaagggtaaaaaaattaagaatgagctgtgggtctgcacgagtatcaacattaaagaggctgcgaaacgtctgggctacctggagacaattgaaaaggccggggggaagatctgctgcgatacctgtatggtagtggctcccatcgagcagatgggctatgaagtgatcggcgtgaactctgccaaggccgccaattacgtcccttcaatgtgtggactcagggtaatttataatgatatcgaggacctgttggacttcgaatga

SEQ ID NO: 4311 - DNA, 960 bp, synthetic construct
  source 1..960: mol_type = other DNA
atggatattggaaaactcgttggaaatacaccaatgattaggatcgactacgagtacgagggtaaaaccggcagtatttacactaaacttgaattttacaactattctgggagcataaaggaccggatagccttatatatcatcgaaaaagagaaggaaagaggcaacctgaaggatggccaggcgattatcgaggtgaccagcggtaatactggcatagcattctccgccatcggtgcgctattcggccatgaggtgcacatattcatgcctgactgggtcagcctcgagcggcgaaagctcatccaaatgtacggagctgaagttcacctggtgtcaaaagaggacggagggttcaagaaggctctggagcttgtagatgacttcgcagacgaaatcggtgcctataagcccttgcagtttgacaatgaacttaatgtggaagcccagtatgaaactaccggccaggagatcattgatgatttgcccgacgtgaacgccttcgtctcaggaataggtaccggcggcacgctgatgggaatcggcaaacgcctaaaggactacaacccagagtctaaagtgtttgccctggagccaagtacactctccatcctgaaaatggggatggacgaaggcagtcacctgatcgagggcatcggggacgatttcattccggggatcgtggatgaggacgtaattgatgatattgtcctcatccatgactgcgatgcaatcaacatgtccaagataatcgcccagaagctggggctcgggatcggaatctccagcggggctaacttcctggcaagcgtcatcatggataatgacgacctgaagattgctacagtgtttcccgatgacaacaagaagtacatcaccacgaaattgtcggagcccatcgacgagaaccctgaactgatttctaacaagattaatattattgactttgaggtggtctga

SEQ ID NO: 4312 - DNA, 1299 bp, synthetic construct
  source 1..1299: mol_type = other DNA
atgctgaagaagcatatcgagaatgaagacattattcgcctgatttctcacaacgatgctgacggactgtcagccgccggtgtcatagcaaacgccatcaaggaggaaggcggacagtttcacatcacgattgtgccccggctcaagccggacgtgatcagagacgtctcgaaggaaaaatatgaattgtacgtgttctcagatatgggaagcgcttgcatcaagcagctcaatcggctgaaatctgacgtgatcgtagcagatcaccaccagccaagcgagcacgagccaaaggataatctcatccacgttaaccctcacttattcgggatcgacgggagtcgccacttgagcggagcaggcagctcctacttagtggttcgtaatatgaacaagaagcacttggcctatatggcgctgatcggggcttttggcgatatgcaatgcgccaaccggttcacaggcataaatcagctaatcctgaaggacggccaagaggctgggaacttggaactgcatgaggacctgaaaatcgtctccaaggcccaagagccgctatacaaaagtattgcttacaccctgaaccccgccctccccgggttaactggcaggctggataactcccaggagctccttgagaaaatgggggtgagctatggcatttccttcctcgatctggaggacgaggagaaggatgtggttaaggacgagctcgtaaaggtcaatccacagatatttggtgacgtctacagtgttcccagcgaacaccctgtactgagggacctggaagagtattcatccattctggacgcctgtgggaagaacaaggagtacggcctggccctgagcataattctgggcgaaagggagaaatcgctggacgaggcgcttaaacttcagaagagatacagggaggacctgaccaaaggtttcgaatggatctcccgggaaggcgctcagcagctgggcagtatccagtatctctacagcgaggacaaagtgcttaaaagcattatgggtacaatcgcaggagtgggaatgtcagccaagatcctaagcgatgaaaaacccgtcatcggcctctccagactccataatgatattaaagtcagtggacgagccacccgcttccttgtggcacgaggagtgaacctcggcaaggctttggccgatgcctctgtgaactttggcgggcaggggggaggtcatgacatcgcggcaggggcgatgataccttacgaggccaaggataatttccttcatttgctggatcagattgtggaagaccaactgcagtga

SEQ ID NO: 4313 - DNA, 399 bp, synthetic construct
  source 1..399: mol_type = other DNA
atggctcggccggactggattatgtattccaacgaggaaatcgaggagtttattgtgaagttcaaacgagaggggaagactgcaagtcaaattgggataatcctccgggaccagtacggcatcccaagcgtgaaggaagtgaccggggagaagatcacggaaatcctaagacggaacggacacgctgatgagtaccctgaggatctgatgaacctcatccgccgcgccgtaaatatcagggaccacctggaagagaacccaaaggacctgcatggcaggcgaggactgaccatcattgaaagccgtataaggagattgggtcgctactatgcggcaaatggccagctgcccgagggctggagatacgatcccacaaaagccgcccttctcgtcaaatga

SEQ ID NO: 4314 - DNA, 558 bp, synthetic construct
  source 1..558: mol_type = other DNA
atgatcacattcatcacagggaacgaacataaagtaatagaggcagagaatatcttccaaattttcggggtgaagctcgagcacattgatcttggctacatggagcctcagggaaccctggaggatgtgtccaaattcggtgcaaaatacgcctgccaggaactcaacaggcccgtgatcgtggaggacgccggtttattcatacgagccctgaacggcttcccaggaacttattccagctacgtgcaggacagcctgggaaacgaaaatattcttaaactgatggacggaattgacgaccggtacgcggaatttaggtcagttatcgggtattgtgcccccaattcggagcccaaggtcttcttggggcgcgtcaagggccagatcgctcacgaggaaagaggcaacctcggctttgcttttgacccaatctttctggtgccggaagagggcaagaccttcggggagctaaccacggaagagaagaatcagtttagtcaccggcgcaactctctggagaagtttatcaactggtatgtcagccaagatgatgaatga

SEQ ID NO: 4315 - DNA, 1698 bp, synthetic construct
  source 1..1698: mol_type = other DNA
gtgatttctttaggcattgagggaactgccgaaaagacggggattggcattgtcgacagtgacggaaacgtcttggcgatggccggcaagcaactgtacccagaggtgggagggatacacccacgtgaagcggctgaacatcacgcgaaatggattccacagctaatcccacaggccatggaggaggccggcctggactacaaggatattgacctgatctcattttcacaggggcccggacttgggccggcacttagaatcgtcgccagctccgctcggagtcttgccctcagcttaggaatccccattgtgggagtgaatcactgcatcggccacgtggagatcggcaaactggatacgggggcaaaaaaccccgtcacattatacgtcagcggtggcaacagtcaagtcattgcatatgaaagtggccgctacagaatcttcggagagaccctggacatcgccatcggaaactgtctggaccactttggccgtgagaccggcctgggccaccctggaggccccgtggtggaaaagcttgctaaagatgggtcctatatcgacctgccttatgtggtaaagggcatggacttctctttctctggcttgctgtcctctgccctgcgggcccatgagaacggcgagcggatagaggatatttgcttttcccttcaggagaccgcctttgcaatgctggtggaggtcacagagcgagcactggcccataccgaaaaggacgaggtgctactctgtggtggggtttcagctaacagccgcctccgcgacatgatgaagatcatggcagaagagcattatgcgaagttctacatgcctgagatgaaatattccggggacaatggtgttatgattgcttggctcgggcagctgatgtatgataacttcgggcccctcgacattaaggacaccgcaatcattcaacggttcaggacagacgaggtggatgctccctgggtagacaaccggaaggagaagctcaatctgccagaggaactgaaggccaagggggccgaatcggatatttttgaagccaaatggctgggaatggacgccattgtaaagcagagggtctcgaaatcatacaggatacgagaaatcgacgataagatccgcaggcagagaactaaaagcgaagctaaaatcctttcagatgtgaaaaagacaggtatcagaagcccgatcctgtacgatatcaacttggacgagaaatacatagtgatggagaagctaaatggtcctctggttaaggacgtgatgcacaaactggattacgacaaaaggaaggaactgtcttacgctatcggggagaacatcagactgttccatgatggagacatcatccacggagatctcactggttccaatatgatcttgctcagcgacgattccaacgactccaatgatgatttcagtaaatcggacgacgatttcaacaatggcgttaatctagataatctggactttgcaaacaatttggctatttttgacttcggcctcggtaagtacagcgacctcctggaggacaaggctgccgacctcttggtgctcaagaaaagtttccagagcatagattatgatatagccaacgaatgctttaactggatactggagagctatgggtccgataagatcatcgataacatcgcggacattgaaagccgcggccgatacacccactga

SEQ ID NO: 4316 - DNA, 1065 bp, synthetic construct
  source 1..1065: mol_type = other DNA
atgattgaaggactgaagacctacggctcagacaagatcgtggatgaactgaaagacttgaagaaccccatttttatctgtaccatagcgacgaccgagacaagcaaaatccccggactgacaggggcaggggccactcccgagctgaccaaatacacccctgcaggggatgccgagctaatcctcgagggggaggtcaaatgcatgaaggacatcccacagaccgtcatcggcgaggttgtcactccaacaccgtccatgattacaaagggttccctggccctctgcgactgtccggttatggtgctggacgccggcagcgaaatcaaggcccaaacggatgtcttcgacattagcgacgggaagcatggcatggacatacggaccggaaaggctgtcgaggactcagaggaactcttcgaaaaagggtactctctaggcgagattttatctgaaaagcacggctatatcgtggttggcgaaagtctgccagctgggacaaccacggcccttggcgtgctggtaggcctcggatatgatgcgaaaggcaaggtaagcggttgcatgaacaccaaccctcacgagatgaaaaacgagctggtggatgaagggcttaagaatgcggggattgtgccaagcaaggacaataacccctttgatgtcgtcaacgctgtgggtgatcccatgctgcctgccgttgccggactgatcatgggttcgagtgtgcccgtcgtgctggctggaggcactcagctcaccgcagcttgcgccatcgtgaaggcattggacgacgagtttgacttttcaaacacctgtcttgctacaacatccttcgtggtaaaggatgagactgcgaatattctggatataatcagccagatcgatgatatcactgtgaatgcagtgaatcctaacttcgagatctccaaagtggaaggattgaagaactacacgaaaggttatataaaagagggtgcaggagccggcggagccatgttcttagctctgctcctcggcaacgacattaatagcattagggaatccatcgaggacgcctgcagttga

SEQ ID NO: 4317 - DNA, 201 bp, synthetic construct
  source 1..201: mol_type = other DNA
atggccaacgacaatttccaggtgaacaagcagttcgcgaagttcaaaggaaaaaacgtgctcataggcctcaagaactgggaagaggtcgaaggaaagatcatcaccattgataactttctgaatctggtcctagacgacgggaatggcctgaaagtgatcaaggggggcaaagtagcatttattagcatccaagagtga

SEQ ID NO: 4318 - DNA, 147 bp, synthetic construct
  source 1..147: mol_type = other DNA
atggcaatcaatcagctggaggccacgctgcaggccgtgacccacacactggctaagctggagaaggaaggctgcagcgatgagaaactcctcaaagaactcagggaggagcgggacaagctattgcatgaactgaaccttaactga

SEQ ID NO: 4319 - DNA, 783 bp, synthetic construct
  source 1..783: mol_type = other DNA
atgatccatatgaagatcctgctctctaacgatgacggggtgaacgccagcggaatcctcgctgctaagcatgcagttgaagacctcggcgatgctattatcgtggcaccatcgaatcagcaaagcggcatcgggcacgcgctgaccctctttgaaccactacgggtcaataaggttatcttagccgacaatgacattggatacggagtgagcggcactccgacggacgcggtgacaatcgcccttttcgagctgcttgacgaatgtcccgatctcgccatctccgggataaacaccggtatgaacaccggtaaggccgagctaaccacgtccggcactttgggagctgccatcgaaaccgccacattcaacattcccacaattgcagtgagccagcacgtgtcagatgacgacctgaagttcgacgaaggggaaatagagatcgattttagttcaagcgtcaaggtcttgagggagctggtcaaaaagataatcaaagacggcttccccaaaggcatagacatcctgaacctgaatgtacctagccacccagattcctacgagcctgtgatttgccccttgggcgatcggatgtattggccggtggtagagaaaaggcacgatccaagaggccgcgagtattattggattaatggggatgagtacgtgggaaaccctaaagacagtgatatcgacattctgaatcagaacattcctacaatcactcccctgacgctggacatgacccacaacatggactaccttcgagagtggtacggttga

SEQ ID NO: 4320 - DNA, 711 bp, synthetic construct
  source 1..711: mol_type = other DNA
atgctgtcgattgggcaatgttacttagaatttgtgaataaaatcctcaaggagggtaaagagacctacaaggacagcgatcaccatcttaaggaatatcttggcaattattactatattgacgatccactggacctgaaattcagagcgaagtaccagcacatgactcccgagctgatgctggaggagatcaagaagggacggtatgacatcgacgcctgcccaattaagggggatgcactgtatgagtatgtcaagtcttttgaaatccgggacgatcagggcttcgtctacacttaccccaaccgtatcctcgagcattttggcgtggatcagtttgaagttatgaaagagagaatcctaacagccacaggcagtaaccgagccgtggccgtaacctacgatcctaaactggaccatgaccgcgaagacattccgtgcctccagttcgtgcagatgctcgtgagggacggggaattgacgatccacgtgatattccggtccaacgacatcttcggagcattctacagcaatatgttcttcatatgctatatgggaataaagatgaaagaggaagtcaacaaggagattatgggagagaaactgaactttggcggtatccactaccactccacctcagggcacatctacaataacgatatgcgcgctgctaggaagttgattagcgcgaacaaggctgccctgaaatga

SEQ ID NO: 4321 - DNA, 1200 bp, synthetic construct
  source 1..1200: mol_type = other DNA
gtggagaagccacaactggtgaattttatcgccaaagtgctggaggattctggctttaaagtctacaagaactttaagacttcccagcagaccgtagacatatacgccgtcctcccaacctcgatgggcgattttggtatggttgtggcttgcaagaactacgacaaggagtgggaagttggaatcgatgtcctgaaggaaatggaggtgatcgggaagaaacttaaggcatcaaaggtcagcgttgtcaccagttcaggattctccagccaggcaaagcgctatgccgaagagaggaagatcaaactggtggaccgcaacgaccttgtggccttggctaaaaaatacaacaacaagaaaaaacaggagaatgagccggtaagactgcgcaaggaaagtcctgccaacatcgatagggattccttctataatagggatgtgtcgcgtgactacatagacaacgtgaatggcacccaatacgatgccggcctcaatagagtccccaacccgtatgacagctacgaggagtatgagtcggacatcgattactatgagaatcaggtggggggaattgacctgagcggctacagcgcgtatgacgatgacctgtaccgggccgaatttttgaacaggcaccctagcaacgagtccaactataatggactgctcattgccaacaaccgagacccctacgtaaactccaaacctagttccaacagccgaagtctcttctctcgcaataaggcgactgaaaagctcagcagcctaaattcaagagggtacaccaaaaacacaaacaataacaataaccggcagcgaaatagccggaccaccacggtcagtcggaacaagtccccctcaagaaacttcatctcttcaagggacaatgctttgtctaagttctccagaaatgaaagccggagcagtggcggtttaaaagaaatgattaagccaatccttgggaatacaattgtgtcaatcattgttgtgatcgttgtggcttatctgattgcattcatcctggggagcatagtgaaagtccccacaggatacctcggtctgactgagctggccgttgcactggtgttgtcttatggcctagtcttctacacggaccgcggctccgatgtgcttgtaaaggggacaatcatcttctttatttccttagtggtgctcatgatcatactgattgctttctga

SEQ ID NO: 4322 - DNA, 924 bp, synthetic construct
  source 1..924: mol_type = other DNA
atggcctttgatgaaaatggtaaggtctggatggatggggaatttgtggccctcaaagacgccaagatcagtgtgctttcccacgtgatccattatggcagcgctgtgttcgaagggattcgctgctacgaaacggagaatggtcctgccgtattccggctgcaggatcatgtccacagactgtttgattccgccaagatctataagatggacattccatttactgaagaggaaatctgcgacgccatcatagagacaatcaaggtcaacaacttgaagagctgctacattcgtccaataacataccgggggttcggcgaactgggggtaaaccctctgaactgtcctgtggagaccacaattgccgtctgggagtggggggcatacataggagaagaggagatggaacagggcgccaacattgggatttcgacatggaggaagcccgcacccgggaccctccccgttcttgcaaaggcggccgcgaactatatgaactctcagctggcaaatctcgaggccggtgagcacggctacgatgaggcaattcaattagactaccacggccacgtggctgagggaagtggcgagaatatattcatcgtggagaaaggcaagatcgttaccccggacctcggctcttccatcctacagggtatcactcgcgacagcattatgaccatcgcgaaagacctgggatatgaagtctcccaagagaccatctcacgagaaaggctgtacctggctgatgaggtgttcttcaccggcagcgctgctgaggtgacgccaatccgggccatagacaataggcagatcggaatcggatcacgcggccccgtgacgaaagagttgcaggagaaatacttcgacgctgttaacggaagaagcgaggacattcataactggctgacttatgtggaatga

SEQ ID NO: 4323 - DNA, 825 bp, synthetic construct
  source 1..825: mol_type = other DNA
atggacatcctgcaggccattatcattggactggtccaggggctgactgaatttctacctgtgagttccagcgcccacctgatcttcatccaacaggcgcttggcctgtccaacgtgccactggcctttgatgtcctcttgcatgtgggaaccctggtcgccgtgttcgtatacttcttttccgacatcattcagatgatccaaggattcttctatagcctactggacctccgagatgggaatttcatccccgaaatcagacgggacccctataagaagcttgcatggctgactatcatcgccacgatccctgttggcgttgtgggcatcctcttcaatgacattattgaggaaatgtttacaggactcaccatcccggcattcctgctcctgataacaggttgtctgttatatgtgtcccagcgcatgaacagtggaaaaattgatgtacagaacataaccatcaaagaggctctccttatggggtgcggccaggctatagccgtgttgccaggtctcagccggtcaggcaccacaatagctgccggactgtttgccggcctagacaaggagtttgcggccaaattcagcttcatcctctcaatccccgcaatcttaggtgctgcggtggtgcagttgaaagatctcagcggcggcaacattgagattggtgcctgcctggtggggtttatcgtagcagtcattagcggctacttcgcaatttcgttcttgcttaagatagtcagggagaagagcctggacatatttgcttactactgctggatcgtgggggtcattgttctggtggggagtattcttctgtga

SEQ ID NO: 4324 - DNA, 1002 bp, synthetic construct
  source 1..1002: mol_type = other DNA
atggtatacgtaggtatggatcacggaaccaccgggatctcatttgccataatggatgatgagaaagttcttgatgtgttcaagatatctagagaagacagtaaggccggacgtgtatcagctattgaagaactctccaaacgcattgatctggaagatattgacttaatgataattacctatgctatgggagatggaataagcactattctgcccatggaaaaggtggagaaccggggcatcctctccatcggaggcgccggcaaagtcacgggagggggcacatctgtctatagcgagatagagaacgcgaatctgccggtgctgatgattccaggtctgcacaaggactgcgattggctggaccccctcttccgcgccgcatattcccaccatgccagtcctgaaaaggtcagcattgtctacaacgcctacctcgagacccagtgggagaacatggtcgtggccgacatcagctccaatagcgtggacctgctaatcgaggatggcaagatcaagggcgccattgatgcctgttgcggtgcaatgggtatcgtgcacgggccattggacctcgaaatgatcagagacatcgacgaggggaaacggacggccaacgaatgcttctcacatgccggcgctgtgaagatagcgaatgtggacaataaggtcgcattgatgaaggacgagctactggaaatgtactccaaaggggacgagagggccgtgttggctatcgacacaatgatcatgaccgtggctatggagattgcagggctgatcgctgttagcaagaatgagatcgatggcattgtgcttacaggcagcatggggtcgatgaaagagcccgttgactttgaggcgggcctgaacaagtactttaagaacaaatacgagactaggattatcagttctgaatcgggcgctatcggggcagcacagatcgcgcgagacatcttcaacggaaaacgggatatcatgggtatcaaagtggactattga

SEQ ID NO: 4325 - DNA, 996 bp, synthetic construct
  source 1..996: mol_type = other DNA
atgaaaatgtactatgatgacgatgtggacgctgaggttgtggccgataagaccattgccgtaatcggatacggaagccagggccgtgggcaatctaggaacatggctgacagcggactgaatgttattgtcgggctaagggagggaggaagctcctggcagaaagctattgatgatggcatgaatgtaaaaacaatagaggaggcggctgaagctgcagacatcattcacatcttgctgcccgatgagacccaggaaaaagtgtataaggagcagatcgcgccctacgttgaagcgggaaatacaatatcattctcgcacggctacaatattcactttggcctgatccaacccggcgaggacgtgaacattgtgatgttcgccccaaaaggccctggttcccgggtgagaaccacttatctggagggattcggcatcccggggctggtcgccattgagcaagacgccactggcgacgcactgcagcttgccctcggtatggcaaaggctgtaggccttacgcgggccggggtcatagaaacaacatttaaggaggagactgagacagacctcttcggtgaacagaccgtcctgtgcggggggctcactgccctcatcaaggcaggatttgaaacgctcgtggaggccggctaccagccagaaatcgcttactttgagacctgtcatgaagtcaagctgattgtggacgacatctatgaaaacggtatggcgggcatgtggcatgacgtgagtaacactgccgagtacgggggcctaaccaggggaaaccgcgtgatcaccgatgcaaccaaagcagagatgaaagcaatcctgggggaaatccaggacggcacattcaagaaggagttcgccgatgaaaacgccacggacgccgctaacttgaaggaaatgagagctgccgaggagcgggagaccatcgaagtcgtggggaagcgattacgcatagcctgcggtctgcagaaggaggatgaatga

SEQ ID NO: 4326 - DNA, 492 bp, synthetic construct
  source 1..492: mol_type = other DNA
atgagggagaaaagccatgtgattagtaccctggttgaacacaagccaggcgtgctgcagaaagtggcaggcctgttaaaccggcgcggatttaacattgacagcatcacggtcggggcatcagaagttgaaggcctggccagaatggtattcgtggtgaaaggtgatgaaaaggtgctagagcaggtcatcaagcaattgcacaagctcgtggaggtggttaagattaaagaccttgatcccgagtatgtcctgaaacgagagctctgtctggtgaaggtaaaaacaaccaaggaaaagtccagaagcgagataatcgagtacgccgacatcttcaaggccaaaatcatcgacgtctgcgatgatttcatcactatggaggtcaccggcaatcccgagaagattgactccttcttgaggctcctgaagccgtttggaataaaaaagattgctcggacagggcctactgctatcgcgcgcgggcatcactga

SEQ ID NO: 4327 - DNA, 1896 bp, synthetic construct
  source 1..1896: mol_type = other DNA
atgcgtggcggagacgctattatcaaagctttaatggataaaggggttgacaccatattcggttaccctgggggaacggtgattcccttctatgacatgctatatgactcagacctgagacacatcctggtcaggcacgaacaatgcgcggcacatgccgctgaaggttacgcacgagcttccggcaaggtgggtgtctgcctggccacatccggcccaggggcaaccaatctggtcactgggatcgccaatgcatatatggattcaagtcctataatcgccattaccgggcaggtggtaagcaacctgattggcaacgacgcttttcaggaagtggacatcatagggatcaccatgcctatcacaaagcactcctaccagccaaaggacgccaatgacattccaagcattataaataccagtattgagattgcttcgacaggccggaacggccccgtgctcattgacgtgcccaaggaagtccaagagatggaattagatgaatacgtgctcggaaccatccctacccctggctacaagcccagcgtgaaaggaaatgataagcagatagccaaggccgccaaaatgctgttggaggctgaaaagcccataatcctggccggcggcggtacgatccttgccgacgcatcatcggagctgcggcaggtggcagagcttgtcaacgcgcccgtggccacaacccttatgggtaaaggggtcatcgatgagaaggatgacctgagtatcggcatgctgggaatgcacgggaagcaggtggccaaccagtctgtaaataaaagtgactgcctgctggccgtgggcgtcagattctctgataggaccactggaaaattggagaagttcatgcctgatgctcaagtgatccatatcgacatcgatcccgcagagattggaaagaacgtgccagtggacttgcccatcgtaggggatgctaagatagtcctggccaaactcgctgatgaattggccagcagccgctttgctgaggagtttgatgatgatgaattgtctggctccaagattatcaagggcctgatggaaaatgatctggcgaaagagctgtacaagagcaaattggtcaaagaaatcgaaagctccaagttcaaggagaattatgagtttaattacgacagttacagcccttggctcaagtcagttgttgactttaagaacgctacaatcccaagggtgagctacagcgacattccgttaaagccacagcaggtgatcaaggagatcgcaagttccattacggatgatacgatcgtgacaactgatgtaggtattcaccagatgtgggcggcccacttcctcgacatttcaaagccccgcaagttcatctcttccggcggtctaggaaccatgggattcggcctgccggcagctatcggcgccaaagtggcctgtccggacgatgccgtccttgccattgtaggggacggcgggttccttatggtctcccaggagcttgccacaatcaaggagcatgacatcccggttgtcattgcaatgctcaacaaccggaagctggggatggtgtatcagtggcagaacaagatgtacgataaacgctactctgaaactgacatgggaaacactcccgactttgtgaaactcgcggaaagctacggaatcaacgccgtgaaagtcgaggaggttgacaagactcaggaggtgctgtccaaagcactcaaagacaacgaggccatcctactcgacatcaccgtggagaaggatgagtttattccaatgttccccccaggcggagcgataacagacctgctgggtgagtataaatatgagagcgacgttaagaacgttgacctcgagcagaaggaatcggaggattctcaaaccgtggaagggggcaaatga

SEQ ID NO: 4328 - DNA, 1377 bp, synthetic construct
  source 1..1377: mol_type = other DNA
atgatatttagcaaactggaaaataatcaattgctgaagaagctcctgaacggcgagattaaaatgaaagtactggtggttggaacgggggccagagagcacgccatctgtgatgcactgaaagatgatgtggacttatacgcttatatgagcaagaacaaccctggaatcagcaagatttccacctttaaaaaaggcgatgagggggaggttgacgaagtggccaagttcgccaaggaaaatgagatcgagttggccgtgatcggacccgaagctccgctgggaaagggaatcgtcaacgcgcttgaggcggtgggtgtcccctgtgtcggtccggcccaggagagtgcccgcattgaaacggacaagtcattcatgagaaacctctttgagaagtaccagattaaaggctcgcttacatataaggtgtttgacaactacgaagacatcagcgcattcctggatacctatgagaaggatgttgtggtaaagcccgtgggtttaactggggggaagggggtgaaaatcgtaggggaccacctcaaagataatcaagatgccaaagcctatgcaaaagaagtgatggacaatgcaatggggggatttgcccaggtgatcatcgaggagaaagtggtgggcgaggagttcaccatccaagccttctgcgatggggaaaacctcgcggccatgccagccgcgcaggaccacccacatgctttcgaaaacgaccagggactgatcacagggggcatgggcagctactccgatgtgggaggcctgttgcctttcctcactcaggaggactatgatgaggcggtcgacattatgaaagagaccctgaaggctatagctaaggaaacaaccccatacaaaggtatcctatacggccagttcatgctaagtaaggacggccccaagctcattgagtacaatgcacggttcggggaccctgaggcaatgaacgtgctgcctctcctgaagacccccatggtggacgtatgcaaggccatcgtcgacggcaagctcgaggatgtcgagtttgaagacaaggcttctgtctgcaaatacatagttccagacggataccccgacactccacacgcaggtgagcttattgagattgatgaggaggctatcgaagctctgggagcaaaggtcttctatgccgccgtgagccaggaggatgacggcgtccacctttcaggctcccgggcattgggcattgtggctcagggcgatacaatcgccgaagctgagaagatagccgaagaagcctgcgggctggtggagggcaatgtctaccatcgaagggacgttggtaccgaagcgctgatccagaagcgcatagaccatatggaagctattaggaacgaatga

SEQ ID NO: 4329 - DNA, 897 bp, synthetic construct
  source 1..897: mol_type = other DNA
atgaatgagtgcgtgatcttcatgtctaagcaggctaagagcaagaatactattatcaagaaggccaagaagctggaacgacaagggaaatacataaaggccctgaaagtgtgtgactcgtatctggacaacgagagatctgaggagactttgatccagctgaagatagacatcctggtcaacctctacaacaacgacacattcatcaatgagatcaatgagaacaaaagcaaaattacggactttatcgagagggatgaagagatagagcttctcaagctgtacaacacgctggacaattacctagaattgaactcccagaacatggctgatgagcgcaaggttggaacctatctcgccggtggcctcttggtggacaacctggagaccatcctggtactcaatgaaatggcgaaggacaataaggctgagaacaaggagccatttaaagcaaactccgacttgttagagttcatatacaacgtcaagaagacaagctatcagtatctggacctgatcctgccgaactcacttgaactactggccaactccaatttcaacattgaggcaatcatctcaaagattagacagttcctggagcccaaaaaatcgaccgatagtaaggaagaaagcatcaaagaaaatgaagaggatgattcagaccagtccgatagtaaaaacgccctcaaatctaaggacgataccgagcttatcagtgattatagcattgaagatgagatgaagggcctgaaagaaatgattagctacttaaatgataagaatgaatttaaaaaagccctcatttaccaacggcgcctcgtgaaacttgcaagggaggagaacattcgggcggaacaggaccacgactccaagcagaagacactgagcgactactga

SEQ ID NO: 4330 - DNA, 915 bp, synthetic construct
  source 1..915: mol_type = other DNA
atgcggagtctgctgtccgtctgtgacatagaagaagaggtggaaacgatactcaatattgccagtgactttaaggccggcaaaatcgaggagaagcccctgaaggaccagaagctcgctatgatctttcagaagtcctcgacacgcaccagagtctcttttgaggttgggatgtatgagctgggtggcactgcgctgttcctcagcacaaatgatatccagcttggccggggcgagcctattaaggacaccgctaaagtcctgagcaggtttgtggacgtgatcatgattagggcaatcgaacacgacgatgtcatcgagctcgagcgggagtcagacgttccaattatcaacggcctgaccaaccttgagcacccatgccaagcattggccgatatgctcaccgtgaaggagcacaagggtgggttcgatggaaagttcgtttatgtaggggacggcaacaatgtgtgtaactcactactgcttatctgcggatgtttagggatggatatggctatcgcctgcccggatgaatacaggcccaacgaagaaattaccaaaaaggcgaaagaatatgccaaagccaacaattccacaatcactatcacgtccgacatcgaggaagctgtgagcggcgcagatgtgatctacactgacgtatgggtgagcatgggagatgaggaggagtctgagaaacgacgtgcagacttcaaggactaccaggtgaaccaaaatctgattgacatggctgatgatgacgtcatattcatgcactgcttgcccgccatacgcggagaagaggtgagcgccgaagtgattgacgggcctcatagtgtggtctacgatcaggccgagaacagaatgcatgcccagaaggcggtattgtattacttcctaaaagaactgtacaaatga

SEQ ID NO: 4331 - DNA, 984 bp, synthetic construct
  source 1..984: mol_type = other DNA
atggaatttaatgaccctgccttggagcatttggtgaacaagatcactgttgcgctgaacgagaacaataaggaggatgctgcccactatatggacattatcatagataagtacccagaggtggcaaatattctgatgaactctatcgagtttcagaacataatggcccaaaacgaagatgtggaaggtgaggaagcatcggatgactttgccatccagcccggcagtgctatggaactggatgaagagaaaatcattaatgacatgaatgccatgctggatatagagccaaccacggcccaggaatacattcagaaggggacagtcctaacagtcacggaggagtatgagaaggcattggagtgctttgacaaggctctggagctcgacgagaacaatctttcagccctgatatccaagggaaacaccctcgagcttatggaaaaattcgatgatgccagcaaggtatacgatgatgtgatgaatactgaggtggaggaggtctatgacctgatgagcaaaggatatatcttcgagggccaccaaagatacaatgacgccctcaaaacatatgacaaggcgctgcagaaggaacgctataacgccaacattctattcttaaagggaagttgtctcatcaagctggaacagtaccagaaagcaatcgacagcctggaggaggccatcgaaaggtatagcgaaaacccctacgagaccattttcgagctcgaaaacgcataccacaacaaaggcgtctcattgcatgctatcggggaagatgacgacgcgctggaagccttctcccttgcactggggctgaacccggaatactactactcctactacgagattggcatcatccaggaggaccgagagaagtatgacagcgctctcaagaactataataaattcctggagtacgacaataccgactctgaagttgtggaggctaaagagcgggtggaagagctcttaaaagaatga

SEQ ID NO: 4332 - DNA, 1722 bp, synthetic construct
  source 1..1722: mol_type = other DNA
atgtatttcaaaataaagacggaagctgaagaggcgctgcggaaagccgtcgaccagtttgactgcgagtttgatgaggaaattaaattggagtttccccctaatcctgaactcggtgatctggctagtacaatctcattccaactggctaaactgcttcgcaaagctcccaatctcatcgctcccgaggtggtcgaaaaaatcgagcttccagagatctttgaacgagtggaagccacagggccttatgtaaacttcttcatcaatcatgacatctttgccaagcagctattggactcggtggatgaggactacggtcagctcgctgcagtggatgagaagatcatactagaacacacctctgcaaacccaaacgggccgttgcatatcgggcatatcagaaactccgtaatcggagactcattaaggagattgttaacaaaggcgggctacaatgtggatacccagtactacgtcaatgatatgggccgacagctggccatgattgtatatgggatggaagagctgggcctgaagctcgaggaccagccagcgtccaagatcgaccacaaggtgggagagctgtacttcaaggtaaaccagatgattaaggaagacgagagcctgaacgatggcgttgacgccacgatccgcaaatacgaaggcggtccaagcgagctggatgagaagtttgagtacgctgtcaacagctgccttgaaggtgtgaaggaaaccttgaaaagaatgaatgtgaagcacgacgcctttgtgtgggaaggacagttcgttcgtactggcatcgtcgacaaccttacccaggagctctatgacataggatatgcaaggcaggaagaggtgctatacctggacttaagcgagtttgacattcctaaagagctagtcctcagaagggccgatggaacttccctgtactctacacgcgacattgcgtatcacatatacaagtctaaaaactgtgacaaaatcatcgacatattcggcagtgaccacaaactggccgcccgccaggtggagctggcactcgagattctggaggaaatcgagccaaacagcgataaaattgaggtcattttctacgagttcattaccctgcctgaagggtccatgtccacacggagaggagtcttcatctcagtggacgagctcatggatgaggccgttcggcgggccactgaagagataatttcccgccgcccggaccttgataaggagaccatcgataaaattgctgaagagatcgggatcggcgcaatccgttattacatcgcaaggctctctcccgaaaagcacataaccttcaagtgggacgaggccctgagctttgagcggggatgcgcgtcaatccaatatgcccatgcaagagcctgcaaactccttaagaaggcccaagaggaaaagggcattgatctggccgacttgacggtggaggatacttggtccctggatgaaaacgagaaggagctggtgaagctgattgccaaattccccagtctggtggaagactcggctaagattcggcgggtccaccccatcgctcaatactgtcaggacctcgccagcgcattcaataggttctataaggccgagcaggttattggctctgatgtggaaaacgcaaggctgctgttggttgaaaagagccgaatcaccctccgaaatgctcttgacctcctgggggtgagtgcgcccgatatgatgtga

SEQ ID NO: 4333 - DNA, 414 bp, synthetic construct
  source 1..414: mol_type = other DNA
atgaaggagattgctatctacctcatcctaatcataatcgtgctcattgccgcacagcacctgaatgtcgtggtcagcgggtccatggaacccgttatgtaccggggcgatattgtggtactgcagaaggcaaaccttttcggcatacatgaatttgacccccacgatgtgcaggtgggggatatagttgtgtacaacgccgcctggtatgacagccccgtgatccacagggtgatcaacactgcggagatcaacgggacaacctgcttcgagatcaagggagacaataacaacaagagtgacccttattgggtgaccccagagcagatcacagaccgcgtcattacgattaatggccaaccattggtcattccgaaaatcggatacatcaccctgtgggtaaaaggtctgtga

SEQ ID NO: 4334 - DNA, 1656 bp, synthetic construct
  source 1..1656: mol_type = other DNA
atgaatagcgataatatcaaaaaaggggtgcaaagggcaccccaccgatcacttttgcgtgcttgcggactgaacgataatgattttgacaagccattcatcggaatcgcaaacagttataccgatatcgtgcccggtcacattcacctcagggaactggtcgactatgtaaaggaaggcatccgagaggctggagctattcccttcgagttcgacaccatggccatctgtgatggtatcgccatgaaccacgacggcatgaaatactcactggccagtagggaaatcgtcgtgagcactgtcgagagtatgaccatgggtcattgcttcgacgggctggtcctcatgcctagctgtgacaaggttgtgccagggatgcttatggctgcggcacgcctggatattccctcgatattcctgactgggggtcctatggcgccaagcacgtacaaaggaaagaatgccgatctgataactgtgtttgaggcggtcggcgaactctcatcaggaaaaatcacggaggatgagctgtttgaattggaatcctgcgcctgcagtggtgctgggagctgttcaggcctatttaccgccaacaccatggcctgcattaccgaaaccctggggatgagcctgccctactgtgcaacaacactcgccctcagcgaggagaagaagaaattggccattgagaccggaaagagaattgtggaaatggtgaaggaagacctgaggccctcccagatcatgacacaggaagccttcgagaatgcaattgctatggacatggccctgggggggagctccaacactgccctgcatattccagccatcgcatatgaattggaggagaagggcgtgcatgccgatttggatctatttgaccagataagcgataaagttgcccacattgcacttctctctcccgctggccaggacactatggcggacctccataacgacgggggtatcccagcggtgttaaagacaatctcctctaaactggacacgagtgtcatgacctgtacaggaaaaaccctcgaggaaaacctgaaggatgctagtgtcacaggaaatggcgttatacacacgttagacgaccccatccacgaagcaggcgggctgactgtgctcaagggaaacctggcgcctaacggctccatcgtgaagtctgccgccgttccagaggatctgatgcaccttaagggaccggctaaggtctacaacagcgaagaggaggctgtggaagcaattttcgaccatcagctgaaggagggggacatccttgttatccggtgcgagggaccgaagggcggccctggcatgcgcgagatgctgaaccctacctcggccattatgggcatggggataaaaaatgtgggcctaatcaccgacggccgcttctcgggtgggacacggggcccgtgcattggccacgtatctccggaggccatgagcgggggtcctattgctgccctgaaggacggagacatcattgagatagacatagcaaatggaaacttatccgtagagctctctgatgaggaaatcaaagaaagaatcgagaaagccgatctccccgagaagaaggtgaaaggctggcttaacatctacagacggtccgtgtcctccgccgacgagggcgctatcctgcggtga

SEQ ID NO: 4335 - DNA, 324 bp, synthetic construct
  source 1..324: mol_type = other DNA
atggatattaagggaacaccaataaacgtcgaagacatgattcagtaccagaaggactcagtggtaagcatggagatcatcaagaaagagctggggactgtgaccctgtttgcattcgaccagggccaggggctaagcgagcactccgctcctttcgacgccatggttcagatcgtggatggagaagctgagatcacgctcgccggcgagccccatacagtcaaaaagggcgaaatgataatcatgcccgcgaatgtcccacacgccctgcaagcagtgaacatgccgtataagatggtgctcaccatgattaaaagtgattga

SEQ ID NO: 4336 - DNA, 1299 bp, synthetic construct
  source 1..1299: mol_type = other DNA
atgagtgatttcaacatgttttgttatcaatgcagccagactgcccggggcagcgcttgtacgaatgccggagtttgcggaaagaacgctactgttgcaaggctgcaggataatctgatcttttcaatgaaagggataagcgcgtacaattatcactgtaaggagctgggagtgtcggacgaatctgtggacgaatttctgacaaaagggctatacacaaccctcaccaacgtcaactttgatatcggcgacttggtccaactggcccttgattccggtgaagccaactttaaggtgatgaagatgcttaaggaagcccatatcgaaaacttcggagagccagtgccagctgaggttaaggtgggggcccaggaaggcccgggaatactggtaaccggccatgacctcaaagcattggaagagctgttaaaacagtgcgaagggaccgacgtaaaggtctacacccacagtgaaatgctgcctgcccacgggtaccctgagctcgcaaaatacgagtctttggccggtcagctaggcggctcctggattgatcaaaggaaagtctttgcggattacaacgtggccatcctcggcacaaccaactgcgtgctgccccctaaagacgcttatgcggaccgactgttcacgatggacattgtgaagatccccggtgcacaggtgatcgaggattatgatttcaagcccttgatcgacaaggctatcgaactgggggggcttgaagcggaggagctctccaccattagcacaggtttcggactgtctacgattctgtcccttgcccccaaaatcaaggagttggtcctggagggcaagataaaaagattcttcctggtggctggctgtgacagtcctaacccacggatgagctattacagagagtttgtggagaatgttccagaagactgcatcgtcctgaccttagcctgcaacaagttccgcttcaacaacctcgagctcggagacatcgagggcatcccccgcttactggacctcggccagtgtaatgatgccattgtagcaatcgagctggcagtcgcactctgcgagctctttgagatggagcttaatgatctgcccctaacaattgtcctcagctggatggaacagaaggccgctgccatcctgtggacattgctataccttggcaaaactgacatgttcattggaccggtgctgcccgcttgggccaatgatgacatactgaatgtgctggtggagaacttcaatctcactccaatttcaacccctaaggaggacattaaaaaggtgatggggtga

SEQ ID NO: 4337 - DNA, 795 bp, synthetic construct
  source 1..795: mol_type = other DNA
atggagaatattatcgaatcactggagaagttcggcttgactcggtatgaggcaaaagcgtacataggcatgaccaacatcataagcggtaaggctgaggacattgccaaggcctccgagataccgcgaagcaagatctactccacattaaaggaactggacaagaaggggttcattaccataacccacacccggccaatcgaatataaagtggtccccccaagggaagtctacaaacggaaaaaggaggagctgatcaaagagctggaagactcggaggagaaactggatgagatctacaacagccagatatctgaggtccaggctcctatctggctgataaaaacaagcaagaacattatcaataaagaagttgagattgtgaagaagacaagaaaatccctgaacatgcgcgtgggattcctcctggaaggggaaggggaggagcttatcaaggccttcaatagtatcccaagaaacattcccatcaaaattcttgccagcccctactgctacatcaaccaggaacgcatcgatatcattgagctgtttgagagtgcgagattggaaaacctcgaaatcatcaaggcagacatcccttttgtgaagattatcattagggatgaaaaggagctattccgcacgattgtaaaattcacgggaaaggaaaagtctgtgctccccgagactgctgtgggcgtgctcaatcaatattcagacatctgtaagaactttgatgagcgattcgttaatcagtttaataggattaaggccaaaaagagttccatgaactga

SEQ ID NO: 4338 - DNA, 756 bp, synthetic construct
  source 1..756: mol_type = other DNA
atgatgctcaactatctgtttaatatactgaataccaacacctttctgctgaaccccaaagagagagtgatccaggggattctgttgttcattctaatgagtgtgttttccctcctgttcatatccttcatcactctggcaagccctaacctgttcttcccacttttgatctcgttcgagcttttgatgctctttctgggactgaacattagcctgcactcgatctacaccaactactttaacatgttggtgtctgagaaccctgttctgctcagttacgagggagtcatagtcaacttactatgcctctccctgggggcttttagtttttggctgagcatcgcgattttcatcggtcccttttgggccttcttctcattcgccctggcatggctcctgcccctctggataatgttcttcaggcgggatattttcaatgaaaagagcaaggtaatcagcaaaaattcagacaagcttataggctactccccaatttggttctacctcttcgggtgtgtgagcctcttcatcccctttcttgtcatgttcaaaatcgtgtttttttccaagttcaatttcttagccctgggcctgataatcatcacgctcatcgaaacaattttaatcttctgcccggactattgggataagatcctgccatttgacatccgcacaaagaagggcacttttatctattttttgctatctattctgatcctgtcttgcatttcaattattctttacaaaatcgtgtga

SEQ ID NO: 4339 - DNA, 399 bp, synthetic construct
  source 1..399: mol_type = other DNA
ctctttgaggccggcatgattgcgcttccgaccggtctgcctggactcgccctgctggggttggggacggtgctgaccgcctacggctcgggcatgttcgacgatctcggaacagaccacccagggtatgcaaagcccgaaaaccagctgaacttcggactgtccatggggttgaacttcatcggcttaggtgctagcgagggcctggcacggggggtgctctataaagaagtgcaggaaaagctagtaacaggatttgtcccctccatcaaagcctacggaaaaaccataatggacgagtcactgggcaagggcaatgccaagattagcactgttatctgggcttacgtggagaatagtgtcatccttgcgattgagaatagcatcaacggcggttga

SEQ ID NO: 4340 - DNA, 777 bp, synthetic construct
  source 1..777: mol_type = other DNA
ctgttgaaagccatcttcaagggtggagacttccaatgctcacagggcaatgggacaatcatcttcgaattagcagacaactccagcaaattgatctttggccccgatggctcggtggcaagtttaatcagcagcgacatattggagaacaactacctgaacggaggcatggacctgggcaccttcaatttcctaaagaactccaccatcatttccaacctcaagagcatagtcaactcatcctactacgatatcaattgtttgtctaactggataatctctctcgtaaatgattcggacattaacttcacagccatcgtctcctacctgagcgaccccaagcttgtggccagcgttgtcggcggactgctgtttgaagccgggatgattgcgcttcccactggtctgcctggacttgccctgctggggctcgggacggtgctcaccgcttatggcagcggaatgttcgatgacctggggaccgaccacccaggctacgcgaagccggagaatcagcttaacttcggcctgtcaatgaccctgaactttctcggcctgggtggtagtgaagggtttctgaggggagtgctgtacaacgaggtgcaggagaaactagtcgttggattcgtgccaagcattaaagcctatggcaagacgatcattaaggagacattttatgacgataatggggtgctcgcaggtgtggctaaaagttattttgataatattctccagaatatcctctttgacactttcctgaagtggggggtacggtga

SEQ ID NO: 4341 - DNA, 1089 bp, synthetic construct
  source 1..1089: mol_type = other DNA
gtggctaaaaaagttctcatcattgtgactggccggggactgggcggggatgccgggatcgctttgaacgtgtacaatgccctgaccaaaaggggaatggagtgtgagatagcattggacgagtccgcccccggtatattgttcaaaaagaacaacatggaatggaataaggtgatcatcccacaggctggcggccactcggccacgctgaagacaactgtcaacgcggcaacacgctctgttaaggctctatttaaaacaagaagcctaatcaaggaaaagaaattcgatctggtcctgggcatcctgggagggggcgccatcattggtgctcttgcggcaaagattacccgaacccccagcgtgagccttctgatcactcctctggacaccaagatctgcggaaagatcgggacgcccataatcctgcctgaaaacaacctgttcctggagcccaatatcccagataggatggtaaagtccttcctgcctgtcaatgacaacattagtctcggggataagaaaaaggccctggataagctgaatgaacattgcagcgagctcaagaagaaaaacccagatgctatggagtttgacccgtctaagcaaacaatcgtattctcatcaggttccagcctcttcgaaaagacggcccaggcaatcgaccagtttagcaaatacagtgacagattcaacttggtcttatgtggagatcccctcgaggaggagttttataagtatattgacgaaactaagattatcaatgtgggctttatagactgggtcaacgaccttctgcaccttgcagacctggcagtactcaccaatgacggccttatgctccatgaggccatggtgtgcaacctgccggtggtcattttaaaacgggtgaaatacggccgctaccacgatatggtttccatattcaagggagcgaccattgagtgcgacctcgaagacctagatgaggccattttcgatgtggtggacaactatgatgactacgccaaaaacacagctacctacaaggaggccatcctcagtgttggggacaatatcgccgatattgtggaaaaaagctttaaatga

SEQ ID NO: 4342 - DNA, 459 bp, synthetic construct
  source 1..459: mol_type = other DNA
atgaagaactggaaaatcattggcctcatcctgatcatcctactggctgtggtgtcagtgagcggctgcattggtgatgacagctcatccgataccacaagcatcagtgcagatgccctgaatattacggaggatggtacctacgactccaaggaggaggtagccgcctatatagatgaataccacaagctgccgtccaactacattaccaaaagtgaggccaaggcgctcgggtggcatgggggcagcgtcgaaaagtatgccccagggaaatgcatcgggggagacatcttctccaaccgccagagcattcttcctataggccatgaatacaaggaatgtgatatcgacactctgggagctgacagcaggggccccaaacggatagtcttctcgacagacgactatgaggtttactacaccggagaccactatgcaagctttgagcacttgacttga

SEQ ID NO: 4343 - DNA, 240 bp, synthetic construct
  source 1..240: mol_type = other DNA
atgaacgagatcgtgctgttcggggaggacatgaaagaagatccgcacaaatacattaaggagacgctggacttccccgattactatggcgagaaccttgatgcactctttgactgcctcagcgaggtatacaacaagacaatcatcatcaaggacagcgtcttggtggatgaagatataattcagaccttcgtggacgccaatgacgaaaatccagacatggacctgatactagattga

SEQ ID NO: 4344 - DNA, 1827 bp, synthetic construct
  source 1..1827: mol_type = other DNA
atgcgggtgttgctgattcactcagattatataaaatatcaggtgaaaaacaagactcccgtggctgaagagattgaggaggctaaagaatcgaatgccttcgaggaggccctggtggtctttacagccgtggagaaggaagatgagaaaaatccgaatgccgtggtcaagaacttagttgccgaagtgaaaaagacaaatgaggaggtgaatgcggaaaggattgtactgtacccatacgctcacttgtcgtcatccttgagcggcccgaaagtgggggtgcaggtactcaaagacgcggaagctgccctgaaggaagagggattcgaggtgttcagagtgccattcggctggtacaaggcatttgaactgtcctgtaaggggcaccccctctccgaacttagccgcaccatcggtgccgaggaggaggcggaggaagaggaggaagagaaaaaaccctccaaatggctgatctttgatgatggggagacaatcgaacctaaggagtacaattaccagagcaaagaccttgagaaactggttgcctatgagctcggcgagggggccagtgacgagggcgagcctccccatgtcaagatcatgagggagaaggagctatgtgactatgagatcgcctctgacataggtaacctcaagtggtaccctaagggccgtctggtccgggacctgctggctgactacgtatacaacttcgtggtggacctgggtgctatgcccatcgaaacgcccatcttctatgacctggcaaatgatgccatcagggaacatgcagccaagttcggagaacgacaatataagactgccaccaaaaaggacctgatgctcagattcgcatgctgcttcggggcctttcgcgtgttgggagattctttcctcacctggaaaaacttgccggctaaggtgtatgagctctccacctacagtttcagatttgagaagagaggggaggtggtcgggctgaaacgcctgagggcattcaccatgcccgatatgcacagcttctgtgcagacatgccccaggcactggaggaatttgacgctcaggtggacatgtgtgtccagacaggagtggacctggacgtgaactacgaggcaatcttcagggctacggaagacttctatgaggagaacaaggagtggatggaagccacagcaaaacggatcggcaagccactcctgctagaaatcctgccagaacggaagcattactggtcctgcaaaatcgattttgcggccatcgactaccttggccggcctattgagaaccctaccgtgcagattgatgtggaaagcggcaagcggtttggcatcgagtatatcgatgaagaggaaaatcctcaaaaccctataatactgcactgctcaccgactggaagtgttgaacgggttatctgcagtctgctggagaacaccgcaaaagaggatggaaaggctccaatgctaccaacctggctctctccatcacaggtccgcatcttgcccataggcgaaaagcaccttgaatacgccaaccaactcgctgataagattgccgcggagaacatccgtgtcgatcttgacaacagcgatgacagggtcgggaagaaaatacgcagcgcgtccaaggagtgggtcccctacattattgtaattggagacaaggaggttgaaaatgatgtctacagcgtgaccgttcgcgagagcggtgaaaaggtagacatgactgctgaagagttaattgccgaggtcaaggccaagacggagggcatgccctttagaagacttccattacctcgaaacacagccgaacgaattaattttaaatga

SEQ ID NO: 4345 - DNA, 1041 bp, synthetic construct
  source 1..1041: mol_type = other DNA
atgctgaatttaaataagaaaactatcattggtgtgatcctctgctttatcttggccatcccctcatttttgctaggcaatctgtttccaattattggagggcccatcatcgccatcctgctcggaatgataatcgccagcttttggaaggacaagggaagcgctgaggaggggatcaacttcaccagcaagtacatccttcagctggccgtcgtattcctcggcttcggcctgaacctcggggtcatcgtggccacaggaatccagtccctgcccatcatcattggcaccatctccatcgccctgatcgtggcctatataatgatgaaagtccttaagatggagcgcaactcggccatcctcatcggtgtgggcagctccatttgcggcggctctgcaatagctgctacagccccggtgattggtgccaacgatgaggaagttgcccaaagtatttcaatcatattcttcttcaacgtcatcgctgccatcatttttcccatgcttgggcgaatgctaggcttttctaccgtgaacggagatgcattcggcatattcgctgggactgcgatcaacgacacttcctccgtgactgcagctgcagctacctgggacaatatgtggggactagggtcagcaaccctcgataaggcagctacggtgaaactgaccagaacactggcaatcattccaattacgcttgcgctgtcctacattattggtaagaaggataatggagaaaagagtaacgaagagggattcagtctgaaacgggcctttcctacattcatagcgttctttattctggcttcgatcataacgaccgtggccgtttttctcggtgtggacgccagcctgttcatccctatgaaagaaattagcaagttcctgattgtcatggcaatgctggcgatcggcctcaacagtgacatcgtgaaactggttaggacagggggcaaaccattgctgcttggcgccagctgttggatagcgattaccatcgtaagcttgattttacagcacctgctcgggatttggtga

SEQ ID NO: 4346 - DNA, 1239 bp, synthetic construct
  source 1..1239: mol_type = other DNA
atggtcaaaaaagacgatacaatgtttataggggaggcccttatcggagacggggacgaactggcacacgtggacctgctcatcggccgcaaggatggtcctgtcggaaacgcgtttgccaatggactgagccagctgtcagtgggccacacgccactgctctcggttataaggccaaacctgatgaccaaaccggcgacaatcataatccccaaggtcactgttggggacctggatgatgcatccaagatctttggtccagcccaaaccgctgtagggagagctgtggccgatgcggtggaggagggaatcattcctaaaaacaaggccgaggagtgggtaattaacgccagtgtcctcattagcccagctgcggaggattaccgcaaaatttaccagtacaactatgccgccacaaagctcgcaattaaaagggccctggacggatatcccgacatgaaaaaagtgttatatgaaaaagatcgtggaacccatgccattatgggcttcaaggctatcaagttgtacgagcccccttacttgcaggtggccttggaccttgacaatgaagaggctatggcacggatcatcaagcagcttcctaatcgggagagaatcctgctggaagcaggcactcctctggtgaagaagttcggggtgggaattgtcggcaaaatcagggagctcgcacccagcgctttcatcattgccgacctgaagaccttggatgtgggaagggtggaggtcaagatggcagctgatgaaacagccgatgctgtggccatcagcgggctgggtaccattgaatccattgagaaggccatccacgagacccgcaagcagggcatctattcaatcctggatatgatgaatgtcgacaacttcacggaaaagctacagcaaatcaacaaggacttaatgcccgacatagtgctactccaccgaaatgtggacctcgagagtaagcttcgagcagaaggcaagaacctcgacgacatatccgcgtggggtaatatcaaggaaattaaagagattacgggcggcctggctgcggttgccggcgggatcactcccgaaaaggccgaagaggcctttgagaaaggtgcagatatcatcattgccggcagatacatcattggcagcggggacccccggcgggctgccgaggacttcctggctcatatgccggtagatccaaaccacatgcgcgtggttatggaagatgacgagcagatatga

SEQ ID NO: 4347 - DNA, 315 bp, synthetic construct
  source 1..315: mol_type = other DNA
atgggtttttgtaacagctgtgggagaccaatggggcgcaacgactatgggaccaatgaggacggcagccccaaccaggactactgcaaggactgcttccagaacggcgagtttacagagccagatataaccattaacgaaatgatcatcaggaatgcagaacgaatgctacgccgtaaccgggacctgcgggaagaggaagccacgggaattttgtgcaatttcctcccgaacctgaaaagatggaatcccaatcccgatgatgagatcgaagacgaggatgagcctgtgcggggctacaggggcggattctga

SEQ ID NO: 4348 - DNA, 1014 bp, synthetic construct
  source 1..1014: mol_type = other DNA
atggattttgtaaagggaattgtgaaaaagtacttcaggtcgtataatcgcaccctcaaggacgggaccaaaaagacctacaaaactgagcaggtgcaggtcacaatccccaagtccgacaatgtcttcgacgataaggaggaggtgtttattctgtccaagaaccagtttgacgagattcaggacaatgaggagctgatttcagcaatggaactgttcaacgccatgcagtctgaggatatcaaaaacctgaattactccctggatgaagccaggcaggagctctactcaaacagttccaagctggagtccttcacactggagttggatgacagcaaattggaactggacaagtccaataaaaaacttctcattctgaaagaagactgctcgaatttaagagatcagctggaggagagcaagcttaccattgtgaacttgaaagaccaattggataacaagaacttcatcatcgaagacttaaatgagtacgtcaatagcctgaataataaggtggattcactgaacggagaaatcgataacctcaacacgatcaacgcagagctaaacgacaacctcaacaatctgactaacgaactcaacaacaacgaactgaacaacggcctgggcaacggcctaaatggattcaacaacggcaatgggctgaatgggaacgggtacaataatggtcttgacaataatggtctcggcaacggcttaaatggcaacggatatgacaacaataacctttacggatataacaacgggctcaacataaacaataatcatctgttgagttctacagtggacgaggacagtgaagtactgatcagtgatgtgaaaagcagcgtgagctttgactattctgattatatagagctccaacgggagtacatagttctgctccgaaagtatgaagaggcgcaggaaaacctttacaatgagaaggttaaggtcatccactaccggagcctgctagagaaatttaaggctttcatcgcccgcctggaatga

SEQ ID NO: 4349 - DNA, 17958 bp, synthetic construct
  source 1..17958: mol_type = other DNA
atgatctcgttccttataattctgctgctgaataagggaggacactttatcaatactaaaataattaactcgattctgatcattctgatactgttctgctttatatctttactggggaccgcttcggcggaagacatttacacggatgatatagcatcaattgatgcctcaaacgattttgagagcattgagatttctaatgaggaagtgtcaactaatgcggtggaaaacctcgatgtgtctgccgatgacagcgactacgtggtcaatggcagttcatccaagaacgtactcactgcaaacgagctttctgcaacctatgatctgtcggggtccagcgtgcagaatatctcggatttatttaattccggcactattcagtccggcgacgtgatatatctaggaaaccagagcatttcctcctcatgggacgaatggacaggaaatcatcttatcaatgtcaatgtctccaacatcattattagcggaggaagcagttcaaatccggacggcacatccacaatcaatgccaacggggcaaaactctttaacatacaggcatcaggggtgacgctcacaaatatcaaagtgataaacgcccatggggggaatggaccgggctgtatcaactttgatggcagcgattgttcaatcataaattgtgaatttgaaaactgccagtatgcccaaggcggcgctattcatggaaccagctctgccagcaatttgatcataacaaattgcaactttacaaataatgtagggcgatggggaggaagcgggggagccatctatctggaggggtctggctgcaaagtgacggactctcgctttgaggggaacaccgcccagaattatggggcaatttactgcgcgggtgatatcaatttgaacaactgtaatttcacgagcaacggcccgggagccatttacggcggtggaaacactgaggtcatagactgcaattttatcagcaataccggcagctcggtcactgtcatctcgggaggttcgacaaaagttagaaattctaatttcaccgataatgccggcgcttccatctacagtggaggcaataccgaaataaaggatgtcattttcaccaataacggcgccggaagctacaacaacaagaatgtgggctccgtgtacagtggaggggctacaaccgacgtgagcaactctaaattcgacaataatgctggaatagcaatctatgccaacgaaaatgcatttgtggacggttgtaacatcaccaacggtggtgtcgccatctacagtggctcagacgccaatatttccaattccatcatagagaataacagtgctgatcaggcaatagtttacatctatgggattggaaaagtcaacaactccaatttcacaaacaacaccgtgtcaggccatacgcacgggggagcactcagcctgatcggtgacaatagcgaggtctcagattctatctttgccgacaataccgccggggcgtccggtggggccatatacactaccggggaaaatacaatgatcaaaaactgcagtttcacggacaacacggtgatgcaggattatggtcacgctggggccgtggatgtggtgggcgttaacacaaagatcatagattgcaactttacaaataatagtgcgccgaacggcggagcagtgtacgggggaagctatggactaagcctgtccaactccgtatttgaagacaataacgcttcgaccgggggtgctttatatatttaccacgacgatttcgctataacaaactgcaacttcaccgacaatgatgcctcatcccagggcggagcgatctacattgcgtcggagtgccacaatgagcagatgactggatgcaatttttccggcaatacggctccacgcgggtcagccatttactgcgatggagacggcaaggttacagactgtaatttcgacgtaaaaccggacctgacagtgtccggtggcaactcatctctgacagtgactcttggatcagattactcaaatgtcgtggtaggtgatatcgaaggggtgtccggaggatctgtgacgcctctggtggatgcacaggtgaccgtggaaatctttgattctcgcgggaacctcgtggactccgttaccaacgcaacagatgagaatggcaaaatcaaatatgattactcgggcctgtcgtatggaagctacacttatcgagcctctcacatggacggagatacgttaatcaccaaagaaggtactctcaccaggcaggcttctttggacgtgcgcactggctatccagcactgacatccacactgggccttcaaaccagcatcgacggaacagccgtcgagaacgatccttttgtcaatgaggacattacagtggagatctttgattctcgcggtaatctggttgacagtgttaccaacgccactgatgagaatgggcaggtctattacgactacagcaatctccagcggggaacctacacttatagggttacctctagcgacggccaaaccgaggaagggcccctgtccatgggcgaggttgtaggggacaacttttcagccattcaagccgcaattgacaacgccccaagcggaggagtgattttcctacagggcaagacttacctaaacgatatccagggacagatggtcatcgataagcccatcactatcataggcaccgacgggacggtgttggacgcccaaggaatttcacgagtctttgagattaccagtgacgcagacaacgtaaatctggcaaacatgacattaaccaatgggaatgatgtctatggtggggctatctacctgcaatcaggctgtgacgacggcacccttacagatgttgtttttgacagcaacaccgctgagctggctggtggcgccatttataacgcagggggcaatagatggactatagataataccacattcactgaaaatgaagcccacggtgagaccaactacatataccgtggcggtggtgccatttggtcttgtgatgcggagatgatcttgtcaaataccacattcgtgaataaccaggcaccatatggcggtgccttaagaggtgcatttgacatctacgattcactgtttgacaacaacacggctaccgacgggaatgggggagctattgacgtgacaaccgaggagtttctgtacgataccctaattctggaatttagaaattctacattcgtgaacaatgacgccaaaggaagtcggggagatgaccgagcccaggggggggccattcacatctatcaccttcaggaggttaacatgtatgattgtttctgcgagaacaacactgccgataggggaggagctgttgatttctacgagctgggaaagacttgggtcgataattgcaccttcgtcaacaacaacgcttcttccgaaggcggagggctggcgattttctgcaattcatccacattcaaggactccaatgtttccaacaacatcgcagggaccgatggaggcgctatttgggttatcggccacaattccctgttcaacaacgtgaccagcgagaacaacacagcatcaagaggaggctcctcttacatcgaaggtgaaaacaccacaatctacaatagcaccttcaataacaacaatgctctctacaatgaaagccttggcagccagtcaggcatcggcggtgccctcgacattctcggtgacaactgcaaggttattggtgtcactagtgtcaacaacaccgccgagcttggagggtccacattcatccgcggtgacaatacactcgtgcagaacacgaatctaagcaataatacagccgtcttcaatgagagcagaaacgagacatctggtattgggggtgccctcgacgtggtgggcaacaattgtcagatcatcaacgtcacttccgataacaacaatgcgtatcgtggtggctcaacattcattcgggggaatgacacagtcatccgcaactccacattcgacaataacaatgccaccctgcgaggcggtggactgaacattgctggggaaggatgcaccatattcaatgtagatgtgtcaaacaacgctgctggcgaaaacgggggaggcatctacgtcattgctgacggtaccgaatttcgcaacatcactgctgacaataacaccgccgaaagagggggaggcgcattcgttgaaggcaacgacatcattatcgataatggcactttcaatggaaacaaagccattttcaatgaaagtaagcccgacgaatcaggcatcggaggggcgttggatatcaaagggcatggctgtaatgtaaccaatgtagacagcttcaacaacaccgcctaccggggaggctccactttcattcgtggcgacaacacctatctcgaaaactgtaccctggacgggaacaatgccaccctccgcggcggcgggctgaacatcgccggtgagaactgtaccatccacaacgttgacatttccaataacacggccgggctcatgggcgggggtatctacgtaatcgctgacggcactgtctttcgcaacattacggctgacaataactctgccgagcggggtggagccgtttttgtcgagggcaatgacatcataattgataatgccaccttcaacgacaataaggcgatcttcaatgagagcaggccagacgactctggtctgggtggggcactggacattaaaggggacggctgcaatgtgaccaatgtcaactcattcaataacaccgcttatcgtggaggttccaccttcattaggggtgacaacactcacgtggagaactgcaccctggagggcaacaacgccaccctcagagggggagggctcaacattgctggcgagaactgcacggtctacaatgtggatgtgtccaataacacggcggggctcatgggcggtgctatctacgtagtggccaacgggacagagttccgaaatatcacggccaacaacaactctgccgaacgggggggaggcgcctttatcgagggcaacaatgtcaccattgacaatgccacattcaataacaacagggcgattttcaatgaaaccaggccagatgaatccgggctggggggtgcattggacatcaaaggcgatggctgcaatgtcacaaatgtcaattccactaacaacaccgcgtatcggggcggatcgacatttatccggggggatgacacatatgtggcaaactgtaccctcgacggcaacaatgccacccttagaggcggaggactgaacattgccggggaccgctgtatcatcgacgacgtggacgtctccaacaacaacgcaggccttatgggcggcgggatctacgtagtctcaaacggtactgaatttagaaacatcacagccgacaacaacactgcagagcggggcggcagcgcattcatcaacggtaccggcatcacaatcagggatggcgagctcaacaacaacagagctatctacaatgagtccagacccgacgagtccgggctgggcggaggatttgacatcgtaggggacaacatcctggtggatagcgtgcactccaacaacaactccgcctaccggggaggttccacgttcatccgcgggagcaatgtgacagtgcaaaattgtaacttggacaacaacaccgccaccgtccgtggtggcggacttaacatcggcggaggggacggctgcaaggtcatcaacgtcagcgtgtccaacaacgatgccggtgaggacgggggcgcggtgtacgtgattggcgacttcagtctctttgacaacgtcaattcaactaacaacacagcccaaagaggaggttcctcgttcatcgccgggaacaatgtgactgttataaactgtaacctggacaacaacacagcttccaaccgggggggaggtttggacgttaacggttcagggtgcgtctttgagaacgtcactctctcaaactgtcacgctgacaaggagggaggcgccgtgtatgtgcgcggagacaacgtaacatttaacaacgtgacatcggagaacaacacagcagaacggggagggtcaagctttgtggccggtgataactgcaaagtgattaattgtgaccttaacaataacaacgctacctggagaggtggcgggttggacgtgacaggcacaaactgcctctttgagaacgtgaccctgtccaactgccactcagacgaggatgggggggcggtgtatatcagtggcgatgacaacaggtttgtgaatgttacctcagtgaataacaccgctgtgaattacggcggttccacctacataggaggcacaagcaattctgtagagaattgcaccatatccaataacatagcttacaacggcgggggaatatttatagagggagaggattccaagttcacaaacaacaacatcaccttcaataaggccatagctactgacgaggaccatgactttaacattatggggggaggagtcttcatcctggggggaaattccaatttcaccaataacaatatctcttccaaccacgctaaggataatggtgggggagtgcagatattcttcggacctgacacctttatggacaagatttacgcatttaacaacacggccgaaaacggcgggttcgccaatctgctctactgtgacaacctcaatgtgacaaattccaccttctacagcaatcatgctacaggcgacatatcactggacagaggggaggggggcgctttccacatgtcctatgccactaacatcgacgtgcaagggaactttagctacaacaccgccacaaacggatctgcaatatattctgacgggtccgacatccgggtacacgactcatccttctttgacaaccaggcccactcctggttcctgcttataacccccagtgacgagacctatctgaaaggccaggatgtgatcattaacatcagtcacatcggaggggataatattgcgaacgccatccacaaccgagatgcggagagcagtatcaccgtgcgcaacgtcacttatccattttacaacaatggagttcttataaacaaaacaaccccaattgatgaagatattcccatagagatcatcggatatgaaaactccgataatgggaatctcatatatatcgatgacctcgaggacaatcaggtcatatactacaacattaccaatagggacacaaatgaatccatattggtcggtttcaataaaacagacatcagcgggacagtgagcctaagactcaccaatttgcccgcgggcaattatgtcgtcagcgcatattatccggagactacttactatacggaaatccggaatgtgtcatcatttagagtgattgatgtggacatggtggcaaacaagactgttgataatcagacctccaatgtgggcgacatccgggattggaatgtcacaatatggaacgacggtgcgagcgaagctcagaacgttaccatcattgacttcctacccgacggcctgaacctgactgataatctaaccattcatttctataacggcacggggggcctatggaacaatgcggtcctgaatctgacgagcaataacctgacgttcagtgtttacaacaaggccgacggcacctggattaatggggtggccagttatgatgagtcaagcaatacctggacatattatgtcctgagtctggcggataacagaacatttgcttacagtgtgttcaatcaatccgactacactgatgcgtttggagaggccaggtactacgaggacatcaacagttggacctaccgaaacatcagctatgatgtggacaacgccgattggtattactacacatttgagtatgatgaccatacctatgtttacggcgtgttcaacgggtcgtacttcgtggatgcatttggcgaggccaggtattatgaggacatcaacagttggacctatcgcaacatcagctatgacgcaacaacaggaaattggtactattatacctttgattatggtggcaatacctttgtttatggcgttttcgacgagtctttcttcgttgatgcatttggcacagccatctacgacgacggctcgtggaattatgagaacatcagttataatgcaacagatggcaaatggtattattacagcctgaactatggggatgattccaataatgtaacttactatattttcaatcctgagaatttcgtggacgtctttggaagcaattatcactataacgccgaaaacaacacctatgtgtatgtgaatgcatattacgacgccgagaccgatagcctcatcagaaacgacaccatctacaacgtcagttctggcatttggacaattaacaaccgcctggtggtgcccgaactggtgagcattaatccaaatgtaagctacatcagcccggagaagatctatctcgtgaataagattagtcttagcatagcaaaccatactaattcgaccgacatttctctggacgttggccgctttgatggaaacggctccgtgctgatgaacctcgtcaccaatgtgacgaaacgagggaactttaccaatatcgtgaatgtgacgacagatagtccggaaaagaattacactaacaatgtggccaacaacagcactatcgtgtacaacgacctggtcatcaacaagactgtcagcgataatctaaccaatgtgtcaggcatcgtcgactggaatgtcacagtgttaaacaatggtacgttcgaggccgtcaatgtcaccatgaacgattacctgcctgatggtctggatctgactaatttgacagtcaaggtctacaatggcactggaagtttatggactaacgccacactggaccttagcactatgactctgtctttcagtgtgtacaacgagactagtggtgagtggattagcggcattgctgcctatgatcaagccgcaaagacgtggacgtactatgtgcttgcattggatgatgatgtgctgacgtacacagccttcgacgaaacattcttctctaatctctttggagacgccttctacaatgagtctagcaatgtgtggacgttcgtcaatcgcacatatgacgaagtgaccggcgacttgatcagcgaggtgaacaccacttatgacaacaatactggcatctggactatcggggataagacatttgtggagtacaaggtcaacctcaccctagttaatggcacgaactctacaaatcttacgctgggcattaatagtttagatgaaaacagtacaatggtcatgaacctggtaaccaatgtgaccaaatacgggatcttcaccaatgtggccaatgtcactacggttacccccgagaccaattataccaacaatgtggcgaacaatacgaccgagaccctcactaacattaccgtgactaaggtgtgggatgacgctaacaaccaggacggaatcaggcctactagcgtgaacattactttgattggcagtgatggcagcgaacggtctgtgctggtgactggaactggcggggtatggaattacacgttcacagacttacctatgttcaacagctctggggatagcattgtttacactgtcaatgagtctgtggtgcccaatggctatgacgtctcctacaatcaatccaactggacagtatacaacactcatgtgcccgaagtgactaacattactgtgactaaggtgtgggaagatgctaacaaccaggacgggatcaggcctacaagcgttaacatcacgctgatcggtagtgacggcagtgaacggtcggtgctggtaaccggaacgggcggtgtctggaactacaccttcacagatctgcccatgtttaacagctctggggattctattgtgtacacggtcaatgagtcggtggtgcccaatggctatgatgtcagttacaaccagtccaattggacagtatataacacacatgtgcccgaagtgactaacatcactgtgacgaaggtgtgggaagatgctaataaccaggatggcatccgaccaagcagcgtgaacattaccttgatcgggagtgatggcacggagcggtctgttctcgtgaccgaaaataacggcgtctggaattacactttcacggacttgccagtgtacaatggaactaccgaccccatcgtttacactgtcaatgagtctgtggtgccggacggctatgaagtcagttataaccagtccaactggactgtctacaacacacacattccggagctggtaaacataaccgttacgaaggtgtgggaggatgctaacaaccaggacgggatcaggcccactagtgtgaacattaccctcatcggcagtgacggcacagagcggagcgtgctcgtaaccgagaataacggggtctggaactacaccttcactgacctgccagtgtacaacggaacaaccgaccctattgtgtacaccgtcaacgagagcgtggtgcctgacggctatgaggtgagctacaaccagtccaactggactgtctacaacactcacatccccgagcttgtgaacataaccgtgaccaaggtgtgggaggatgctaacaaccaggatggcatcaggcctaccagtgttaacatcaccttgattgggtccgatggcagtgaacgttctgtgctggtaaccgagaccgacggcgtctggaattacaccttcaccgacttgccagtgtacaacggaactaccgatcccatcgtgtacacggtcattgagtctgtggtgcctgacggctacgaagtaagctacaatcagtccaattggactgtgtacaacgcccacgtgcctgaggtgaccaacatcactgtgacaaaggtttgggaagacgctaacaaccaggatggcatcaggccaagcagcgttaacatcaccctgatcgggagcgacggcacggagcggtcggttctggtcaccgagacggatggcgtatggaattacacattcacggacctgcccgtgtacaacggaactaccgaccctatagtgtacacggtcatcgagtctgtggttcctgttggctacgaagtcagctacaaccaatccaactggacggtatacaacacgcatgtgcccgagatcgtaaacattacggttaccaagatttgggaggatgctaacaaccaggacggaatcaggccaggcagtgtgaacattactctgattgggagtgacggcaccgaacggtctgttcttgtgaccgaaaacaacggggtctggaattacacattcactgacttgccagtgtacaacggaactactgatcctattgtgtacaccgtcaatgagtcggttgttcccgttggctatgaagtaagctacaaccagtccaaccggactgtatacaacacacatgttcccgagatcgtcaacattacggttaccaagatttgggaagatgccaacaaccaggacggaatcaggccaggcagtgttaacatcaccttgattggtaccgatggcacggaacgctctgtgcttgtgaccgaaaataacggtgtctggaattacacattcacggacctccccgtgtacaatggaaccaccgatcctattgtttacaccgtcaatgagtctgtggttcctgtgggctacgaagtcagctacaaccaaaccaactggacagtatacaacactcacgttcctgaaatcgtaaacatcacagtgaccaagatttgggaagacgctaacaaccaggatggtatccgaccaatcagcgtgaacatcaccctgatcgggagtgacggcaccgagcgctctgtgctggtgaccggaacggatggctggaattacacattcaaagacctccccaagtttaacggcacaacggtacctatcgtgtacactgtcaatgagagcgtggtgcccgtgggctatgaggtcagctacaaccagaccaactggacagtctacaacacacatgtgcccgaattagtgaacatcaccgttaccaaggtttgggaggatgccaacaaccaggacgggatcaggccaatcagcgtgaacatcaccctgatcgggagtgacggcactgaacgctctgtgctggtaaccggaacagacggatggaattacacattcaaagacttgcccaagtttaacggcacaactgtgcccatcgtgtacattgtcaatgagtccgttgttcccgttggctatgatgtctcctacaatcagtccaattggacagtgtacaacactcacgtgccaaatgtgacagagattaacgtcacaaaggtctggaacgacagtaatgataaatacggaatccgaccatcgaatgtgactatcgagctgtttgccgatggaaagaaggtgaacgagaccaatctgaccgccagaggcgcttggacatacacattcagcgggttgccccagtataacaacggcaagttgattaattacaccattggcgaggtgcgtgtagacggctacagcgtgctaattactaataatactgtgggaaattggactgtgacaaacacacctatagcggtgcctaacatgacagtgcaaaaaatcgctaacgataaagtggtctacatcgggaatgtgaccagctttaccattctggttcggaacacaggggactgtaacctgtccggagtttatgtagtggactctgattacagcgcaggtcttagttaccttagatacgagaacgggtcccgtgattggacctatgacggcgcaaagtggactctggtcggaaatctcaccacggataacccaacggccaactttactgtgtactttaccgtagtcgataacgggacactggttaacaacgtttcggcaggctccaatctcaccaacgaaaccaatggaactaataacacgacggcttaccgccctaacatgaccatccagaaggtcagtaatgacgaggtggtttatgtgggcaacattaccagtttcactatcgttgtgaccaacacgggtgactgcaatctgagcgacatcgtggtgacagattctgatttctccgctgggctgtcctacctgacttatgctaatggcaccaggaactggaattatgacgctgtagggcacacgtggagtttggttggtgacctgaccaacgggagttctgccgagtttaccgtgttcttcacggtgatcgacaacggtaccctggtcaacaacgcaagcgtgagatccaaccttaccaatgaaaccaacgcaacaaacaacaccacggcgtaccggcccaacatgacgatccagaagattagcaatgatgaggtggtgtatgttgggaacattaccagcttcaccatcgtggtgactaacacaggcgactgcaatctgtcggacatcgtggtcactgattctgatttctccgccggtctgtcatacttgacttacgctaacggcaccaggaactggaattatgacgccgtagggcacacttggtccctggtgggcgacctgaccaatggctcctcggccgagtttacggtgttcttcacggtgattgataacgggaccttggtaaacaatgcaagcgtgcgctcgaatctgaccaatgagaccaacgccacaaataacactactgcctacaggcccaacatgactatccagaagatcagtaacgatgaggtggtgtacgtgggtaacattaccagcttcactattgtggtgactaacaccggtgactgtaacctgagcgacatcgttgtcactgactctgacttctccgctgggctgagttacttgacatacgccaacggcactcgaaactggaactatgatgcggtcggccatacctggagcctcgtaggtgatctcaccaacggtagtagcgccgagtttactgtgttcttcaccgtgattgataacgggaccctggttaacaatgcaagcgtgcgcagcaatctgaccaacgaaaccaacgccacaaacaacacaaccgcgtaccggcccaacatgaccattcagaagatcagtaatgacgaggtggtgtatgtgggtaacattaccagcttcaccatcgttgtgactaacaccggagactgcaatctgagcgatatcgtggtgaccgactctgacttcagtgctgggctgagctacctgacttatgctaatggcacacgcaattggaattatgatgccgtggggcatacgtggagtctcgtgggagacctgaccaacgggagttctgccgagtttactgtgttcttcacggtgattgacaacgggaccttggtcaacaatgcaagcgtgagatccaatctgaccaacgaaaccaacgcaacaaataacactaccgcttacaggccaaacatgaccatccaaaagatcagtaatgacgaggtcgtgtatgttggcaacatcaccagtttcacgatcgttgtgaccaacactggtgattgcaacctctccgaaatcgtggtgactgataatgattatagtcttggcttaaaatacagcagatatgagaacagcagccggctgtggaattacaatgggggcaagttcactctggtcggtgacctggctcctggcaattccgcaaacctgactgtgttctttatcgtggtggacaatggaacactcgtaaacaacgccagcgtgaaatcgaaccttaccaacgaaaccaatgcaacaaacaacaccacggcgtacaggcctaacatgacggtgcagaaggtcagtaacgatcaacttgtctacgtgggcaatgagacctccttcacaatcattgttactaacacaggcgactgcaacctgaccggggtgtatataaaggatgatgatttctccaagggtttacagtacaacaacaagttcgttcctgtgaaaggcacctggacctacgccggaggccggtggaaccttgagggccagctgaccgtgggggataatgccagcataacagtgtactttaccgtaatcgacaatggaaccctggtcaacaatgccaccgccggttctaatttgaccaatgaaaccaatgcgacgaacaataccacggcttaccgacccaacatgactgttcagaagatctcaaacgacggcgttgtctatctcggaaacaccacgtccttcaccattgtggtcactaacacaggggactgcagcctcagcgaaatcgtagtaactgacaacgactactcagctgggctacagtacagccgctacgcgaataccagctcgaaatggaactacgatggagataagttcactctcgtcggcgacctcgctccgggcgcgtccgcgaacttaacagtcttcttcattgtgattgacaatggcacactcgtcaacaacgcaagcgtgaagtccaacctcaccaacgaaaccaacgcaacaaacaacactaccgcttacagacccaacatgaccgtggaaaaactcatctatgaggacacagtctatgtgggagacacagctatctttaccatatttgtgaagaacactggggactgcagcctctccgacgtggtgatctgcgagtattggttcagtgaagggctcgagtacaatggggtttgggtccccaacggcgaccgcaaatgggactatgacgatgaaacacggacatggaccttgataggagatctcgcccccgaaggtttcgcctcatttgtggtctacttcaacgtgaccaaaaacgggacgctctataacaacatcagcgccaagtccaatctgaccaacgagacaaacgccaccaacagcacacgggcctatctcccaaatatgacggtcatgaaagtggccaacgatgaaatcgtttatctggggaataccacaagctttacaatcgtcgtaagcaacaccggggactgtaacctgtcagaagtggtggtgaccgacacagactacagcaccggcctaaaatataagaactatattaatggctccgctaattggaattacaacaatggcgaatggtcattggtcggcgatctcacaccgggctcatcagctaactttaccgtgttctttaccgtggtggaaaatggcaccctagtaaacaacgcttcagcaagttcaaacctgacgaacaaaacaaacacaacaaataacacaaccgcctacagtcccaagatgacagttcttaagattagcaacgacgagagcgtttacgtcggaaatatcaccagctttacaattctggtaagcaacgtgggggattgcgatctgagcggaatatatgtgatagatgatgattattcaaatggtttactctacaatcgatacgagaacagctcccgcaagtggaattatgatggttccagatggaccctcgtcgggtcccttgagcccggagatagcgcaaacttcaccgtcttctttgacgtggtggagaatggaacgctggtaaacaacgtgtccgcgggctcgaacctcaccaacgaaaccaacaataccaacaatactaccgccaaacctgtctgtgatttgattatttacaaggccgtgaatgccacagagatcctggtttacgatatcgtcgagtggaagattaccgtggtaaatcttgggccggacacagctctggatgtcattgttaaggatcttctggacaatggacttgaactcatttccgtcagcggtggcaattacaataatatcaccggtgaatggaatatcggcgacctggagccaaatacgcccgtgagcttaagcttagtgacccgtgttctggtaaacgggactatcgtcaacactgctactgtcaataccacaagccacgagtccaattatactaacaataatgccagcaactttacagaagcggactatctctgtgatttggtcatctctaaagccgtcaactgcactaattgtaatgtttcagatctggtacagtggaatatcacagtgactaaccttggtccacatgatgcctcgaatgtcatcgtcaaagagatcctgccgaaaggcttggaacttattgattataatgtgtcagttgggaactttaacgaggtgatcagtgagtggtctatcggaactctggagaaggatacggcagtctcgctggtcctggttactaaagtcctgatcgacggcacgttaattaatatcgccacggtgaataccacgaccctagacaacaactacactaataacgtagcaaataacactacagtggccagtccgatctgcgacctggtcatatcaaagatcgtgaatgccacaaaagtgaatatagacgatatactcacgtggacggtccgggtgactaataacggtccttcagaagccctgaacgtctgtgtcagtgacattctgccagaaggcctgatgtttgttggctacaaggccagcacaggcaggtacgacgacgaatccggaacgtggacagtgggaaaattgtcaagcggcagctccgccaccattaatatatatacgaaggtcatcgagctcggaaatatcactaacccagtttccgtaaacaccacgacggtggagtccaattactcaaacaataaggctaacaatactacagaggtttatccgatcgttgacctcgtcattgagaaatcatctgacaaaataaagtataacgtcaacgatacaatgcactggattataaaggtcatgaatgaaggaccctgtgacgcaattgaggtgtacgtatatgacgcacttcctgccagcacaaaattcattgcctacaactcatctaagggaactttcgacgcggccaaaggaatctggtccatcggcgacctggcaaatggcgaggaagtgacattagacatatgttgtaaggcccttatctctggaaactttactaacaatgctacggtcaattgctcaataacagacaagaacacatcgaacaattttgacaatgcaacgatcgagatcgctgacaacaagtccgataatccagaccctattcctgataagccaaaacacggggtggacattagcctaaggacaggcaaccccctgctaatattcttgatggccatctttgccatctttggaggaataggactacggtgcaggaaggagtga

SEQ ID NO: 4350 - DNA, 597 bp, synthetic construct
  source 1..597: mol_type = other DNA
atgaagattctgggaatttgtggaagtccacgcgatggggcatcaagttttctgctcaaaagagcattgaacgagctggaaaaagaggaaaacttcgaaacaaagtttattagcgtgaaagacaagaacatatccccttgcacgcactgcaatttttgccttgaaagcaaaggggagtgttccattgaggatgacatgaacgaaatctacgatagcttgaagcaggccgatggtatcatattcgctagcccggtgcattttggatctatctccgcccaactgaaggctgtaatcgaccggtgccaggcgctgatcatggaggaccttgacatcttcaagaataaggtcggcattagcatcgttgtcggcggggacaggtgtggcggccaagagctcgccatccagcagatcaatacattctacctgttaaacaagattatccccctaagcggcggatcattcggcgccaacctcggcgcctgcctatggtcgcaggacgaagggaccgatggggtgaagaatgatgagtatggtctgaaaactctcgacatgaccataaaccacttcaaggagttcctgctggagtttaaacagtga

SEQ ID NO: 4351 - DNA, 1569 bp, synthetic construct
  source 1..1569: mol_type = other DNA
atgagcgaggagtcaagcagttccaaagtggcaaaaggcagcgccattatcctaatcggaaacgttatcttccgggtgggcggatatatctaccgctttctgatggctagcctcttggggcctgccgcttatggaattttgggcctgacaactcctttccaggggatctttcaggtgctctctgcggccgggctgccaccggctattgcaaagtacgtttctgaatacaatgccctggatgagaaggacctggctcgccagactatttttacgtcccttaagattatggtcttcctagggcttttcttcggcttcatcatggtattcgtagccgccccaatcattaccaactactatcacaagcctgaggctctgctgcccttgcaggccgtcggtctcatcactcccttcagcgtgatcgtgggcgggttccggggagccttccagggcgtctataaaatggagtacatcctctacacgagagctatcgagcagatattcatgattctcatggctaccgccctggtgctcctgggattatccacccttggtgcagtgctgggtagtgtgttgggttttgtggcctctgctatctctgcagtctacatcttcaaacggtatatgggcaaatacatccctccggccaacccagattttaagtttcccttgaaggatgagctgaagctggcgaagacgctgattttcttcagtattccagtgaccgtggcagcccttgctgaaatgggtatctacagtatctgcacactgcttatgggcgccttcctccccgcagcggcaatcggctactttaccgcagcagaccctatcgcaaggctgcccctggtcgtatcaaattcgctcgctacaaccatactgcctgcaacctctgaagcctatgccctgaaggaccaagtgctccttgaaaaatacgtgacagctccctataagtacggaatgttctttgtgattccaatgtgcgtcgggatagctatcttcgcgagaggaataatgggcctggtttactttacaaacgcggcctatatgaacggcgccgtctcgttagccattctcgtggtcggaatgactttctacagcgtatacacaatatccggaagcatcgttcaagggattgggaatccccgaatccccatgtatatcctgattatcggctgtgttatcactctgggtctggggtggtatctgatcccgctgtttgggatagaaggcggagccctggctacgacaatatcctcatttatcatgatggtgccaatgttcctgatacagtttaggatgaccaaaacccatgcgccttattcattcctaattaaggtgactgtggcctccttgataatggccatcgtgagcattatcgttcccaacaatgtctacggcctcatcaccggcattgtggtctgcccgattgtttacgtgatcatggtcattctccttaagaccctaagccacgaggacgtggcggagtttcgtaaatacgccaataagctcgggccaatcaggaaatatgccaacaagttattggactttattgataagcacagttccgactga

SEQ ID NO: 4352 - DNA, 693 bp, synthetic construct
  source 1..693: mol_type = other DNA
atgacagacgtgaaagcgggggtcgaatacaaaatcaacatcgatgggaactcctttctcctggatgagaagaaattcaacctgcttttgtacatcaatgaaagtgggtcaatcacagaggccgcaaaaaggactaaaatctcctaccggactgctctacactatattgagaagatagaaaccacactgaacattgccattgtaagcaccaaaaagggcgggaccgggggaggcggaggtaccaaactcaccgaagaaggcctgcagatcgttaaggagtgcaagaagatcaatgctatcatggagcttcatcgcgatgtcaacgagctggaagcggagatccttgaggtggatgccagcaagggcatcatgaagatcaagatggaagacctgacgatgaccatgcccctgaataagaaatatgtggtgggcgataagattctggccctgatcagctatgacaatattttcataatgctggagccacaagcaagtagcatcagaaacatcttcaagggaatcgtgactgagatgcgactccaggatgagatggtgcgggtcaagattgacattggcggagtggacatattctcggacataacgctatccgcaggtaaagacctggacttgaacctcggaaaggaggtttacattggctttaaggccctctcaattgccacattgaaattatga

SEQ ID NO: 4353 - DNA, 105 bp, synthetic construct
  source 1..105: mol_type = other DNA
gtggcacgggtcagcaacctgagctactgtcacgtgtgcaccctctgcgctatgaaatgcggccccgatgccatcaagatcattaggaatgccccagacgagtga

SEQ ID NO: 4354 - DNA, 603 bp, synthetic construct
  source 1..603: mol_type = other DNA
atgaatatcgaaaaaagggatatcatggagcggactgcaaaagtctcacggaagactagcgagacagacattgagattgaaatgaacattgatggaaaagggaaatacgacatagacacaggggtcaagttctttgaccacatgctagagagcttttcccgccacagctttattgacctgaacatcaaggccataggtgacatcgagatagatgaccaccacaccgtggaagatgtcggcatcctcttgggcgaggcgttcgctaaggccataggggataagaaaggaatccgaaggatgggtcatgcgattgtgcccatggatgactccgtggccaccgtagccatcgatatcagcggccgcagctattgcaatatgagtctggactttagaaacgacaagatcggagaccttagttctgacattattgtgcacttcttcgagtccttcgcctcttcggccaaaatcaacatctacgggacctgtgaaggctttaatgatcatcacaaggctgaagctgttttcaaggcattcgcaaagtcaatctacgatgcctgcaagattgagcatgacgagatcctgtccacgaaaggcgtgctctga

SEQ ID NO: 4355 - DNA, 1221 bp, synthetic construct
  source 1..1221: mol_type = other DNA
atgatgaactataactacgatatcgatatggagaatccatttgagcccggtaaatcagtgtctccggaccggttcaaaggccgggagaagaacatcaaaaagattctcagggacatgggtaaagtgcagaaggggaacgtgcagcattttttcttaacaggcaacaaaggcatgggaaagacttccctggcagaatttgtaaaggaatatgtcgaaattaactacggcatgatcggaatatacgtgtccaacaagggaaataattctctcaattcccttatcacagctataatccaagcctttttgaacaaaattcctcgcaacgtgctgtttgaaaagatcaaaaccctcttttctagcatcgagagtgtagaaatcattggcaatcgggtgagcttcaagcccagcaaaagcctgattgttgatattgagaaggacttcccatactacctgaatcagatcattaaggatctccctaccaacaatggggtgttccttataatcgatgacattaacggtttatcggagtctaaaaagttcgtggactggtataagcgcttcgccgacacgatcgaagttaataggggggacttcaacctgcccctgtacgtcctcttcgccgcctatcccgacaagtttgacagcctagtctatgaagagccatccttcggcagaatcttccactatgatgaaattgaccgtctaagcgatctggaggttaaggaattttttaaagacaccttctccagtgtgaataagcagatcaacgacaactccttggaactgctgtcgtacttctcagggggcatccctctgataatgcaggagatcgggtactcaatctattggttgtcagaaaagaccaccattgatgaggaggacgtcctgaacggcatcatggaggcaattggagagctggagtcaaagcagataagaaacatcgtgaaccagatttccagcgatgactttgaagatcttctccttaagatagcgagtcaaaagcagcaaagttacatcgagacagactttaaggagaaactcaattgggacgagtacaacatctgggatgagttcctggattgcatgattaagctgggagtcatcaagacgagcaatcgaaaaagcaatttgaagttcagtttctccaatcagttttacttcacttacttctggctgaaaagcctgaacctccacgaggaatttgctaaaatcgagtcttga

SEQ ID NO: 4356 - DNA, 501 bp, synthetic construct
  source 1..501: mol_type = other DNA
atggccagtattgactattttgaatgtgaagactgtggattccggtggaaagatcagggcccactcctcttcttcctcaacgagaacaacaaaatcgaagaatacatcctactgatctcaaacatgaacctggacagtaattccaatatcagcggtgatatcatagagacctattgcacaaattgcgataagaagatcaagatctacattatctctacgattaaaagcccctatgatgaggactcggctatagagtccatacgcaaactggcagatgagaaccagatcgacaataaggcccttaagccgttcattagatctagcgacctgaaggacaacttttacatcgtcgacctgtacaggaacttctatagcaataaggactaccactgtcctaattgtgatagtattatttccaagtacatcttatcaaaaaacaagtgccccaagtgcgggggcgagattagctccgtggacgggctgtgcttggataaattttga

SEQ ID NO: 4357 - DNA, 837 bp, synthetic construct
  source 1..837: mol_type = other DNA
atggtggtgaagataggtatcgtcaagagtggtaatattgggacctcaccagtgttggatctactgctagatgagcgggccgacaggccaaacatcgatgtgagggtctttggatctggagcaaaaatgaaccctgagcaagttgaagacgtcgttcctaagctcgaccagttcgaccctgacttctgtatttttattagcccaaaccccggcgctccaggccccgcccgggcacgcgagctgttgagcgagaaagatcttcctgccatcatcattggcgacgcacctggcaaggggaagaaggatgaaatggatgagcagggtctggggtacattatcgtaatgtccgaccccatgatcggcgcaaaacgcgaatggttagacccaactgagatggcgatctttaatgccgacatcctgaaggtgctggcagaaaccggggctctgagactggtacagaagactctcgatgcggtgattgccgccgccgatgctggcgaggagattgagctccccaaactcatagttacggccgagaaagctgtggaagcggccggatttgccaacccctacgcaaaagctaaagccatcgccgcctatgagatggccggagccgtcgcaggccttgacatgaaagggtgcttcatgaccaagggcttcgaaaatttcatccccctcgtggcggctgcacatgaaatcgcttcggctgccgcgaagctggctcaggaggccagagaaatagagaagtccaacgacacagtccttcgaacaccgcacatgaaggaaggaaacctggggtgcaaggtggatctgatcagcaagccggtggacaaatga

SEQ ID NO: 4358 - DNA, 669 bp, synthetic construct
  source 1..669: mol_type = other DNA
atgttaaaaatcttggccgcggataaaatggacaagaagttaatcgtccgctacataatgctcattgtaggtgtgatcatcatgtctatggggatcgccctgagcatcaaagcaactctcggcacctcccccattagtagcgtgcctgctgtcctctcaattgccttcccctggactgtgggcgagttcacaatagtgttcaacgcacttcttgtgatttttcagatggttctcctgagaaagatcacgatctcccagatagctcagatgttggtgtgcgtcctcttcggatacatgattgacttcagtctgctaattcttaacttcccgaaccccacagattacatcagccaatggattctctgtatcatcagctgctttgtgctagcctttggcctgctgattgaagttaagtcggatatcaccatgctgccaggggacggttcagttgtggccatcgcggaagtgacaaatcgggactttggccagatcaagccatttttcgacctgaccatcgtatccattgccgccatactggccttggtgttcctgggccacctggagggggtccgagagggaaccatattcgcagctattgtggtcggactgatcatccagttttacgacaggatcttcgggtataatattgacgcatatctggctgattga

SEQ ID NO: 4359 - DNA, 315 bp, synthetic construct
  source 1..315: mol_type = other DNA
atgaagaaggtaaagattaccgtgatgaaaaaggcccggtacgacgacctcatcgagaaatacgaaaacccactggagcacgaatgtgaggtcgagctaggagatgtcttcatcgcaaatggctgggaaaaaccggaggacttctgcagctcggcgtgggatagcatctctccctttgtgctggccctctccagcgggggtgaagacctttatgatgggtggatgaaggacaaaaagtcagccatgatatcctgcaacgatggctttcgccctgtgagtttctacctggaggcaatggacgaggacgctgattga

SEQ ID NO: 4360 - DNA, 1125 bp, synthetic construct
  source 1..1125: mol_type = other DNA
atgaatagtaaaaacatcgctattgccggggagatcaccccctcaaagaccatcattcccctcattcagaggctgaacgagctggataaggaagataaactgaacttcaaaataaacaagatctacgggctctaccatggggagagctctaaattgcttctggagccgtattgcgatgagctttatgatataggtcagggacggcgaggccaaaagaagaactcgacggctaaattggcctacctgatctcccgggacatcataaaggctttcaacgctctaaaaggcaataacatagacctcctcatcactgcaggcaatgcgggggatgtacgcaagtccattgtcgcagccaacctcctgaaaatcccgatcctgcacatagagcaggacatctacaaccccattgaagttatctcccacgccaatctcgtcaccgttcccaaagaggattacaaggactacttggagaggaaatacaatttaaagaacgtggcatctattgacggctatcctatggccaaatatgtggacaaccacatcaaagacaacaatctgattgacaaggaagagatctacggcgaatatggagtcaaggaatttgtgctggtggtgctgggcggggacctgaaggacgacgagattgagccactgatacgcagcgtggaacagttgaatctcaagactctcattgccccttataggttcgacagaaacctggtggaaagccttgtcctgtcaccaaacatcaaggttctcccacagtacgtggacctgttaagctttatgaatgcagcctcccaccttatctacgccgcgggaatgggactcacaatcgaggcgggtgtcttcaacatccctagcctaaagattgaaggctttcataaaacccacgggagcgtagacctggcacgggaacttaacattcccatcgtcaaaattgacgagatcccagatgccttcgagaagctatccgctcatcaggataataatctggtgaaaaacagtgaaatcgccattgataagttggtggatctgatcaatggcttcgatgagaatggtctgcaaaagagcggattcaagtcaacaaagcagatctggaacagtcgtaaggtgtttagatga

SEQ ID NO: 4361 - DNA, 1182 bp, synthetic construct
  source 1..1182: mol_type = other DNA
atgaacttagagaacaaaagcattgacctgttgaacccattcatcatcatcgctatggtcattgtattcataatcattgccctgcctatgtggtatgcttaccaaaaactgcccagtcccagcatggacttatttctctacatagggctcggccttattttcttcatatttgggattctcatcagcaatctactgctaaacagatttttaaaaaaggatctctctttggattcccttaaggacactatcaaaattagtataagcaaaaatccaaaaaagctgtcgatcttcgaatcctacagtcgcaaggaaatgattctggtcatcatggtgctgatcgggatcatcctgcagataatcaacatcgtgcggctgggagggataccactgttctcagccacactaaaggctgaggccgccggaaagatctggctcgcatcctacataatcttcctgccctttattaacatcctcctggccgaatttaaccgtgattcacattatctgttagtatttctgggcttgctgctgtttacgttgaccggctaccgaaccaccccgattgccatcgtgctgtctatcttgattaccctctattacacgagaaacataaaattcaagtatcaggtcctatttctcgggctcttcctggtcattgcagtggctcttctgctcgctatcgggttcatcgcggttcaggcaatctcgtggcagcactggtccctgaatcctatcgaacttgtgagttacagggcggcctttacactgaatgtgctgggccatgcaatcagcaatcagttcgccactgccggaaagcttttctactccaccctgaccggctttttcactcacacagaccctagggttctggtcggtcaggccacgttgggccgcaaccactcaatcacatctaccatcttcggcccggcccttcttgactttggcctcattggaatgtgcattcaaatgctcctgatcggattcattctgaagaccttgcacagcattcagaagcacaagaaggaggtttacagcgcattctatggaatcctgctggcacagacaataatttggatcgagacaggtcccactgatgtggtggtgtggatcttctatttgattgccattgtgctcatggcgcttttctttctgaaaggttccagccgggacctcgaggcttga

SEQ ID NO: 4362 - DNA, 16956 bp, synthetic construct
  source 1..16956: mol_type = other DNA
atgaggaacaagaagattttcatttttactctgatgattgtcatgctattatcgcttgctgcagtttcagcaaatgatctggataatcttgaggtggacgatggcaacgttgtgagcacggacacggttatcaatgatgtgcccatggagagtacgagcagtgataagatcgccctgaacgtagactcgacccagtctaatactaccgagatactgaatgagaatgaaataataacaaacaacagtacgctcagcattgatttgaatgagtcgatcacaaatgagatcagttctgaccacgaggactcataccaggccgacagtaatcaagaggattcctatttcacgtcagatggaaacatttatgttaaagtgaaaacttccatgcttaaagcggacggcgaccagatctattatatccaccccgccgggagcccaacagcaaccggaactcgcgacgaccctttggatagtatgaatagcgccctgaatctctttacgtcagatggaacacacaccattgtggtgatggatgggatttataaagatacctactatgactataacaatacagacgtagacacaaacctcagcaacctgattataaagtccgatgaaggggcaagtccacacttcaacctgagcacgtcagattaccgaaggtctctgtattgggcctttacaggagagaacatcacgatagatgggctcaagtttactgattcacagtacggctcttttaatgaggatggggtgtacaaataccatacagtgctgagattcattaattccactaatgttttggtggaaaactgtgtgtttgacaatgacggatacctgatcaatgctactgattcaagtgatgtggtgatcaagaattgtaatgtgtccaatagtaatcgatcaaatgtgtttaacgttttgaacagtagcttcactgtgcaggattcgaatctttccaagattcgggacagctacattaccaactcgtccttcaagctaatcaacaacaccatctgtaacaatgtaaattcaaacctgttcaccgtgaaaaactcatccctggatattatcaacaacacgttcaaggacagcaattattcatcatattatgtgttccggatttataacaataacgaaacctacgcgaatttcactggaaataatttcaccaacctgacaggcacagattacctgctgcaggtcaactactacgtgaacgataataccactgtgtcatttgtcaacaatagcctgaaagacgtgagtttaggtctcaatattagatactccaatctgactatggacggcaactcctttgacaatctgagtctttcgtcccggccctcttactctggcatcagtacaagttactcaaatgtgtccttcaccaacaacaatttcaccaactctgactcttacatctaccttggctatggagtcaatgcgacaatcgagaacaacaactttactgacaatatcccatcatactatgggcttctccgagccgaggggaacagtcatgacatcaaagagaacaacttcacaaacaacaagggcaattgttcaattattcaacactactctggcaatgctaccattcatggcaatcacttctacaacaattccctgaatggctgtggtcatgttatcaatgtgacgagtacttcaggttctgagatttataaaaacgactttgtaaacaacagcgccgacaacgggacggtctatctctacggaagctctaacgtgcacgataacaatttcaccaataacagcgtcaccgggctcggaggagctatctattcctacagtttttataatattaacacgacaatcaaggaaaatgtcttcgatggaaacaatgccagctttggtggtgccatctactatgaaaactaccccagctataataataagagggagattgtgaacaacaccttcataaacaactccgctgactttggtggggcaatctactcgaataaatcaatcaacaacatcatcgatgataatgactttataaacaacagcgctcaaattgggggagctatctttgtggactatctatacataaacgatttcagatacaacaacaccaacaacaccattagcaacaacttgtttgccgagaataacgcgcagagtggtggagccgtggtgctgtattcacagaacagcaccgtggaaggaaaccggttcatttccaacaatgccagtcgctatggcggcggggcattgattaccagcggaaataactctatcatcgtgaacaacacctttgccaacaacaccgctcagctctacggtggtgctatcggaaccaacgactctaagataattgacaataagttcgaaaacaacagtgcctatcaggccggcgcgatcctgacaatcaactccacaattcacaacaatgatttcgtgggaaatgaagcaactcgaggtccggccatagtctacatagacgactttaattacacggcactcacttactacacttataactgcagctgtgagaactgcagcaattgcagtggatgcagcgactgtgaatgctgtgtgactacgatagtcgacccagaaactggggatgagataaaaatcatcaactgcagcaactgtgacggttgcaattgtacttgcgagaactcgaccgtcacggagcacaatataaccttactgtacaacaataccggcattgatatcgacgaggacgtttacgcctaccatgaaaatcagctcttaagggttgccaaggaaaacaacggaatgtattacctgtatgacaatgttaacgtgacaagcgctgaaaactacacttattgggcgtattgcatagagcagaacaactcctacccttggctagggaatggaactctgggggtgcacgtggacgatctctactttgtcagaaacagtctcgacgactcttacgtgggggattaccttaagatactcatttcgtacttctaccataatcttgatgaggacaagatcaatgtcaaggagtacatctacatctttacagacaccgactatcggagcaacaatgaccgcatcatccaaaagattattaagctcgccaataatgagtcaacagttctggagaatgggaacaactggataaacggagtgtacaactgcctcgaattttcaacattcatcaaccctaccacaaggcagaacctgattctgatcaatggatgcgaacctctagacaagcctgactttaacatcacgaaaaaagccaatgctacacacgtgaaaaccggcgactacatcaactataccatccttgttacaaacaacggaacatgcaacctgcacggtctgaaggtgactgaacgtatgaacagtatgctcatatacatgggcttcgatgacgtgagcgataattggacccagacaggggatatggaatggatgctgaaccgaaccctgaaggtcaacgagtcggcggaactgcacatctacttcatgacaaacaaggtgaccagctataccaacattacaaatgtcattgaggccagaagtgatgaaagtgacacaaagatagcagaggagcatattgaaaccatctacccgaaactggtgtaccgaaaggtcagcgtggaccccgttgcctatccagagtccacaattaggttcatcctgctcgtgaagaacataggtactgccaatgcctacaatgtagccattgaagacagtggctttagctcatcccagctgctgtaccaggggacctggtccaactacaagggaacctggtataactcgggatctagcgcaacatcaaccgggcgcttcactcttaatgggtatttggcgcccaaccaggaggcgggggtgtacgtttcctttaaactgaaggagggtgtcaaagggacaacagtatccaattccttcaatgtctacttaaacaacacttgggatggaagcgcttccaattttacaagggtggtctcttctgccatgaaggtggaaaagctgtgggtcgacccccttcctattgcaacaatcggcgatgaggtcactttcgccatcaatgtcagcaatgtgggagaggccaatctgacaggagtctatgtagaggacttcttcccaagcggcttggagtacattagattctataacaccgacgcccacaactggacgcattacgaaaccctcgacggcacccataggttcatcttacaaaacaccctaccgaacagtcagaccagcaggacactttcgtcctccatcatttacgtggtattcaaggccaatgagataggcgatctcaccaatacagccattgtcaaaagtgactacactgaaaatgtcactgataatgaaacaatcatcatcagtccctacggaatgaaggtggagaaattcagcaacaacccgatttcacaatctgacaatcaggtgtcatacgtcatcagggtgacaaacacaggcatctacaacttgaccgatgtgtacgtcaatgagagccagaacgagtacatggtttatgaccatttcgaggatagttccaacaagtggatctataacgactcaggcgacagcccacgttgggtttacaatggcagcctggagaataatacctattccgacttcatcgtctattataacatcactaagatccccgaaaacggactgatcaagaacaccgtgagggtgtattcaaacgagactgtagagcggaatgcaagcaatgaaaccaaagtctacaaattatccctttggaaggtgtccaacaatcccgtttcccgcctgggagaccagatttcatttaccatcgtggtcaaacacgaatacaatggaaattcttatgacaaggacctttatctggacggcgtcttcgttaaggaactgatccccgacggcttgacctacgaccactacgtggacgagagcggcaaatggtcctatgattacaataccgacaactgggtgtatagcggtacgttagtgcctaacaccgagaccaactttaccctcttctttaacgtcaccaaaatggagaacctgacaaatgtggtgattctcgggaccaatcaaagcaataatgtaaccgtcaacaacagctccgacagccggtactacagcatgctggtagacaagataagcttgaacgagaccgtcttcaaaggaaacatcacagagtttctaatcaaggtgacgaataacggggacctgaacttgactaatgtcactattcgcgaagtcattcccgatggattggtctacgtgggatatctgaataaaaccggcaagtggatttatgaaggcggaaatggagcctcgagcgacgatcagccaatgtggacttaccagggcatactggccccaggagaatctgcagagttcatcatcctattcaatgccaccgagacaggcacatttttaaatatcgtgtatggcacctctaacgaaaccgaggaatttgtcgcagaaaacactacaaaggttctgaatcctctcctttacgtcgataaggtcaccctgaatcagacagtttaccgcggggacttgactgcattcgagatattcattgtcaacatcggtgattgcgacttacacgacctttatattgatgagatcttcccggacggcctggtctactacggactcgtggacgatacaggttcattgtcctatgatgagaagacgcaacgtatcagctttgacggaacattgaaggttcgcgaaactttggtattcacagtcattttcaacactacaaaggtaggcaacttcaccaacaaggttgaggtgggctctaacgaaaccaagaaggagtacgctaataatacgacccaggtcctggagaaggacctcaacgtcacaaaggtggcaaacaacaaaaccgtcgtcaaaggggacaagacagagtttaccattgacatcactaatgttggcgaatgcaaccttacaaacgtgtatgtatacgaggagtccttcgagggactgtcctactatgcctacatcgatgagacaggcaaatggtttaaaaacggcaataaatggatctacgatggtgtcctgaagcctggcgaaagcgtgaagttcactgtggtgttcaacacaaacgagacaggcaactttaccaacatcatcgtggcaggtgccgatggcatcccaaataagacggcaaacaacacgacagaggtgctcatttgcgacatctccattgaaaagctcacacttaacaagaccgtgataagcggagaggacacccagttcgccatccgggtgaagaacatcgggctgggcaatcttactgatgtgaccgtaacagacagcttccccgagggcttgacgtacaagaccttcattgacaacagcggaaaatggtccaaaaacggcaataaatggatttacgatggggtcctcaaaccaggtgagtctgccgaatttatcgtggtatttgctaccaatcaaacaggtaatttcacgaactttgtaagtgtgagcaccaacgagaccaaatccaagaacgcttccaacaaaaccgaggttgtcctggcagatgtggaaattcagaagatcaccctcaataaaactgtgataagcggggaggagactctatttgagatagtggtcacaaacaagggcattattgatctctccgatatcactgtcactgactccttccccgaaggcctgacttacaagacgtacatcgacgaatccgggaaatggtctaacagcggcaacatctggacttatgatggagtgctggcccccggtgagtctgctgggttcattgttgtgtttgatacgaatcagaccggcaatttcaccaactttgtgtctgtgaagacgaatgaaaccaaatccaagaacgcctccaacaaaaccgaggttctagtggcggacatcgagatccagaagatcacactcaaccggacagtcatcagtggtcaagagaccatgttcgagattgtggtcacaaacaagggactggttgacttgtccaatgtcattgtggctgacagcttccctgagggcctgacctacaagacgtatattgatgaaagcggaaagtgggccgtcaacaataataaatggctgtacaatggggtgctcgctcctggtgagtctgccgggttcatcgtggtgttcgataccaatcagacgggtaatttcactaactttgtgagtgtgagcagcaacgaaaccaaaaccaagaatgcttccaatataacagaagtcctcctggcggatatcgccatccagaagatcacgctcaaccgcacagtggtgagtggccaggagaccatgtttgagattgtggtcaccaacacagggatcatcgacttgactaacgttgtggtgactgacaccttccctgagggcctgacttacaagaccttcattgatgaaagcgggaaatggtctaacagcggcaacacttgggcgtatgatggggttctagctccaggcgagtctagtgggttcatcgtgatatttgacactaaagatccaggcaactttaccaacattgtgagcgtgatatccaatcagacaggcaataagtctgcccgcaacattacggaggtgatcgttgccgatgtgggcatccagaagatcactcttaaccggaccgtttatagcggggaggagactcagtttgaaatcgtggtcaccaacacaggcatcatcgacctgacgaatgtggttgtgacggacaccttccccgaaggcctgacttacaagaccttcattgatgaaagcggtaaatggtccaacagtggcaacaaatgggtgtacgatggcattctcacgcctggcaagtctgcgggattcatcgttgtgtttgacactaaagatatcggcaactttaccaatgttgtgtctgtaaacacaaccgaggtagggcccaagtactcctataatatcactgaagtaattatcaaggagaacaagaccaaccacaccaatgaaacgcctccagggcccaaccccccagggcccagcccacccggtcccaaccccccagggcctaacccccctaagcctcacgttcccacccatccgcacaagcctatagttccaactaacccgaaccagcccaagttggtgaagtccaacaagaatccgttatctgacgtgaaagcaggtaaccctatagctctgctgctgatcgtactcgtggtgcttggttctgtgccatttgcatcctgcgatagcggggggactagaagacgtagaaaaaccaaggagagaaaagctgcgaaacataaggagatcgacaagaagaaaggcatcatcattctgtccggatgtctgctgctgatggtttctgtgtcggccatttcggccgctgacacgggggatctgggctatgacgatgctggcagcgacgtggctgtgcaatcagtaagtcacgaaccggctcagtactcctactcaactagcgagaacatggcctatgacagttatgactatggcgactacaatgattacgggggctatggcgactatggcgattatggcgattatgacggctacgacacgtacaacgactactacatcctggacaacaacgagaccgtctatgaagatggcatggaaaattcagctgatggaaacagcgccgacgcagctaacggtcaggcaaatcaatatgctgaagacgggtctgacatggaactgtacagcatcgatgacgaatcttacgattccaacgacaactacgacaattacaaggagtattcctatgatgatgattcgtcccgcgaagatgcctcttcaattgtacggtataatgactgtaccgtaaacggcgacaataaagtcaaatcgatctacacctcttcttcgctcgccgaaggggagggcgttgtggtgtacgtttccctggacgggcggacaggtgctgaggggacctacgacgatccgctcctcactatcggggccgcactgactaaactgtccaccgtcagttctacggagaccaaaaccataattttgaaaggcgggaactattcaggaaacaattatagatatttatctactcgtcttaataacttgatcataaaggccgaggacggcgccgaggtgaatgtggatctgaggggaatgaatcagaacagtttgtattggaccttctatggtgataatgtgacggtgagcggcatcaactttatgaatgccaatatgacatcgtacaacctgaacaattaccacgcggtactgaaatttatcaacagtagcaactctcgtgtggaggactgttcattcagcaacctgaagtcctatgggatcttagccggaaacagtactgatgtggtaatcagcaactgtaatttcacaaacggaagctcgagaatgttcagtataaccaattcaagtgtcactgttgaagactcgatcatgaagaacttctctaccagctacatccgcaattccaccttcaccatggtaaatagcaccgtgaccgatttcaacgatgacgacatctttaacttcgcaaacacggacctcgatatcagggacaatacattcaagaatctgacattcccaaacaaaaccaattttcagcggtttggagtgttctacgcctgggatgacaatgctggcatcagttataatttcataaacaacacctttgccaatttcactgggacagatgcgtacatgatttaccggtcagcatcctcttcagtcaaacccatgtgcaaagtaaacttcaccgacaacaacgtgtcaaacgtctctgtgggcgtgaacatctattatggcaatatcacggttgaaaataactctttcgaccacatgagtccggccaatacgctgcggttcagctattcaaacatcgacatccgggataacaacttcaccgattctaactctacccatgtttattcagatcggtgcaacgggacaatcgaatacaataatttcatcaacaactctgcactgcctgtgtcagccgagtgggggaatttgaatatttcctttaacaatttcactgacaataagggcaacttctctgcaggagccatccaatcgacgggggtcgtgaatatctttaacaatactttctgtaacaattccgcccgcgttggtgcggtgaatgtggccagcatcagtagtaacaaaaccatttacaataacacctttgtcaacaacaccggtgtttccgggaccctgtatgtcaatggcaatgcaacagtgcatgacaacagattcatagacaataacgtaagcgaaaatggcggggccatctacgcagcatatgataatagctataacaattattataatatctcggctaatattacggacaatattttcgatggcaatattgccaataagggtggtgcaatctattatgaacagtacaatagcgcttacggccttgataacctggcaaacaacacatttgtcaacaacaaagccgagtacgggggggcaatctattcaaataagacagtgaatgtcacgatctccgagaacgagtttgtcaacaacagtgccaccattgggggggctatctttctcgacaattacacctctgcctttaacaccggaaccaacattacgctaaacaatttcacaaacaactcggcgcagagtgccggagccgtagtggtgtacggaaacaacaccaatgtgatcggcaataactttgtggggaacaatgcgacacgctacggggggggtgcccttgtgactgatggggctaatgggttgatttacaacaacacatttgaaaacaacaccgccttcctatacgcaggagccatcggcaccaacaactccaagatcatcaacaacacgttcactaacaacaacgcctatcaggccggagccattctgaccatcaattccactatacacaacaacacattcagtggaaatgacgctacacgcgcgcccagtgttggctatatcgacaattacaactacactgtgtcctcttactacgtgtactactgtagcagtgaagattgcagcggatgcactgcatgcgaatcctgcaccagtacaatcatcgaccctataaccggggcggaaatcaaggtgatcaactgctctaacggtgatgttcccgagtgcatctgtgaggattcagtggcaacactctataacatcagcctattgtacaataatgaaggtctcaatctggatgaggatgtgtacgtgtacgatgagagcaccattctgagagtggcgctgaacaataatgacatgtacttcctatatgaaaacgcaagcattcccaacgccagcgagtaccactactgggcatactgcattgagcagaacaactccaagccatggcagtggaacggaactacgggggtgctggtggatgacctgtactttgtgagaaacagcctggacggctcttacgtgggagattacatcaaggtgctggtctcctacttctactttaacctggacgaggacgtctataacttgaaagattacgtgtatgtatttaccgacacggactaccgtgctaacaccgatagggtaattcgacgagttattaacctgacagaaagagaggacacatctcttgtgaacggcaataactggattaacggagtttataactgtctgtccttccattcctttatcatgcctaccacaagacagaacctgatcctcattaactcatgtatggccatgcagacccccgacttcaatccgcagaaaatagccaacaaggagaacgtcggcaccggagacattgttaactacacagtcactgtgtacaacaatgggacggtgagcctgcacaatgtgactgtgaccgagaggccaaacagcatgctgacctacctatcattcacggacttccgcaatcagggatgggtgcagactggggagatgacttgggtcctgaataggcccctgaaggtccatgagaccggtacattcaatataaactttagggtaaataatgtcacctatctcacgaatatcacaaactacattgacgtaggctgtgatgaggtgtcaaacaaatctgcgttcaccaggaccgagaccaaatggccacgcatacaggtgcagaaaatcactttggaccagaatgtgacgcccggttcgacggtgagattcttgctcctcgtgaagaatatcggaacccttgaagcaagcaacatcacgttggtggacaattttaataggaacgaactcgagtacgaataccggtgggattcatacaaagggaattggtccggaggccacgggtggggggggagcagctcttcgtggcacgtcgacacactgtacttgaaccaagtcctctatccgggtcaggaggctggagtgatcatctacttcaaggtgcctaacaatgtaacagtagggagcgcttacaactccgtaaatgcttaccggaacgggacatctgagggttattcatccaattacacaatcatacagcggccttacttttccatctggaaaaccctggttagctcaaaaacctcaaccataggagaggaggtggtattccagatcaacgtgcagaatacaggttacgtgaacctcactggtgtttatgtggaggacatcctccccataggactgaaatatcttaggttctacaatacagataaccataactggactcattttgtggacgaggacggaaaacatcgcttcctactgcagaacacgcttcccacctattactccgacagtcagaactatgtggcccgactctacatcgtctgcaacgcgacagaatatggtaattggtacaaccttgccacaggatacacagaacagaccaataagagtacctctcaggcaaatgttacaataattccatttggggtatcaatcgagaaagtcagcaataatcccatatcccaggtgggggaccaggtctcctttaccattagggtacgaaacacaggaatatataacctgacggatgtctatgtaaatgaaacaaggaactcctatatggtcttcgaccactttgtggacaattcaggcaagtggattctcaatgaatcttacgccacttcaggcgtgcctagctggaactataatgggacttttgaagtaggagctgtcagcgagtttgacgtgttctacaacgttactaatatcaattattatggaaacataacaaataccgcgtatgtctcttccaaccaaactaccaacaggtcggtttccaatcagaccgctgcctataatatcaaggtgcgaaaaatcagcaataacgccacagcaagggtgggcgatcaggtgtcgttcacgatccagatatcacgggacggctattcttgggagagtcctttctccctatacggcattcacgtgaaagacctggttcccgatggcctggtgttcgaccacgccgacaacagttactattggatttataatgagtccgatgagacatggtactatcgttcggggctgacagcaggccgcaccatcagccttacactgtactttaacgtgaccaaggccgccaacatcaccaatgttgccattgtcggcgtcaataacagtacagtgaaaaccgccaataatacgacaaacagtatttaccacaacctgcaggtggaaaaggtcactctgaacgaaacagtgtacccaggaaatatcacagaatttctggtgcgggtgaacaacaccggtgacaataacctcacaaatgtgttcgtgaaagaaaacattccaaacggactcgtttactatgattacatcaacaagacgggcaagtggaattacacggaggatgatgacggacctatatggctgtacgacggcattctcgctccaggagccttcggggaatttattatacggttcaatacaaccgtgcctgggatctttgtcaacaatgtcgtggccggctcgaatgaaacttccaacaagtccacggagaacagtaccaaagtcttgggtccaataatctctgtgggaaaaatcactttaaacaagaccgtttatattggggagctaactgaatttagaattaaggtctctaacgatggggactgtaatttatctggcgtatatgtggtggaatacatcccagacggccttaagttcgttgaatttaaggatgagagtgggctgtggacttacaatgaatcaagccgcaccttctactacaatggaattttggaacgggatgattccctggagtttgtcgtggtgtttaatgccacccgggcaggcaacttcaccaatgtggttcacgccggatctaacgtgactaacgaatccgtggcaaacaacactactgaagccctggatgtacgcatggacattcagaaggtcaccctgaacgaaaccgtgttcactggtcaggagaccggttttgtaatcgtcgtttccaataccggactgaaggacctcaccgatgtccgcctgaaggaaatttatccagatggcctggtgtactcccgcttcatagatgattcaggcaagtggtttaacagaggtgattactggatctacaacggggtgctggccgttggagaaagcacgaacttcacggtgatcttcaacacaaccaagagtggcaccttcaacaacacaataattgtgagctcgaacgaaacaggtcccaagaacacttcaaataccactaaggtagtggtggccaacgttaccgttgcgaagatcacccttaatgaaacggtcatgtccggcgagcaaaccagcttcgacattgttgtcaccaacgacgggatctacaacttgaccggggtggtcgtgaccgacgccttccccgaaggcctggcctacagcggcttcgtggatgcttccggcaagtggatctttgatgattccaaaggcaatgcttggatttataatggcacgttggcgccgggtgagtctgcaagctttacagtggtcttcgacaccgacgaagtgggtgaatttactaacatagtcaaggtgtccaccaaccaaacccaggataagaacgcgtccaatatcaccaaggtgatcaagctcatcccaaatgtcgcaatccagaaggtcactcttaaccgaaccgtctacagcggagagcagaccagcttcgaaattattgtgcggaataacggagagatgaacttaaccgctgtgaccgtgacggacgccttccctgagggcttggcctacagcggcttcgtggatgcttctggcaagtggatatttgatgatgcgaagggcaacgcttggatttacgacggcattctggctcctggggagtctgccagctttaccgtggtctttgacaccaaccaaacaggcaacttcaccaacattgttaccgtcagctccaatcaaactaaagagaaaaatgcctccaatatcactgaggtgatcatcaaatctgttcccggcatcgagattataaaaatcacaatcaaccgcaccgtgtacagcggtgagcaaacctcatttgacatcgttgtaagcaatgatggtaacgtcaatctgagcaacgtgactgtgatcgactccttccctgaaggcctcacctacagtaacttcattgacgacacggggaaatggtttaacataggcaataagtggatctataatgggattctgctccctggggagtctgctgggttccgcattgtctttgacaccaacaagtcgggaaacttcacgaaccacgttaaagtcacaagcaatgagactggggagaaaaactcatccaatgttaccgaggtaatatttgctgatgtcgctatccagaagatcacgctcaaccgaaccgtctacagcggcgagcagacctgcttcgacattgtggtgactaatgtgggtgagattgacctgactaacgtggtcgttgccgactccttccccgagggactggattacagcagttttgtggacgaaagcggcaagtggatctttgacgatgctaagggcaacgcttggatttatgatggcattttagctcccggcgagtccgccggctttacagttgtctttgacacaaacattacagggaacttcacaaacatcgccaccgtgagcagtaatcaaacctccgagcgaaacgcttccaatatcactgaggtgatcaagctcattccagacattgctatccaaaagattacccttaacaggactgtctatagcggcgagcaaacctgcttcgatatcgttgtcactaatgtcggggagactaaccttactaatgtggtcgtggctgacagcttccctgaaggactcgattacagcagtttcgttgacgagagcggcaagtggatctttgacgagactaagggcaatgcttggatttatgacggcattctggcccccggcgagtccgcaggatttacagtggtctttgacacaaacctcacaggcaacttcactaacctcgctacagtgtcctgcaatgagaccgaggataagaacgcttcaaacattacggaggtgatcaagctcgtgccagacatcgctatcataaaggtcacactcaaccggacggtctatagtggccagcagacgtcatttgacattattgtgtctaacgtcggtgagaccaacctgacgaacgttgtcgtgactgacactttccctgaaggcttgacctataacagtttcatcgatgagactggcaaatggatctttgacgaagaaaaaggaaatgcctgggcttacaatggtacgctggcgctgggcgagtatgcaagcttcacagttgtcttcgacacaaacctgacaggcaacttcactaactacgtaagtgttacaagcaacgagactggagagaagaacagctccaatgtgactgaggttattaaagtgcctaagaacgacactcctccggtcccggttcctccagagccagtggtgcccccggaaccggtaactccgccagagcccgtgatccccaataaaaaagttcccagacatgagcttcccagaaccgggaatcccctgatggtcttactcattgcccttgccgcagtgggattaagttcggtgagacgtaaacgggagtga

SEQ ID NO: 4363 - DNA, 1509 bp, synthetic construct
  source 1..1509: mol_type = other DNA
ctcgggctctttagggtgaaaagaatcccggatgaaaaacagataaagctgggcattcgcactctggattttaacatcccagaggatcatatctctcgatttgtgggggatttcattgacgaatactaccctctgttaggaatcaaggagaacaagaagaagaaagggcgggacagttttccggtgaaggagatgcttaagctcctgatttacgctaagatcgagcacattgatagtatgaggttcctggcggacatggtcaaataccacgacgtgtataagttcgtgggaaacggcatttgtccctcagaacggtcccttcagcgatacagggagaagtacggcaaatattacaatgaattgctcaaagccaccctgaagaaggctagcgacgtggattacactgacttcaacgaggtgtccattgacgggaccatcaaaaaggcgtacaattcaaaaaataaggtgatcacagagaaagaaactgagattctaacccggtacttcgaaggcggccgggttagtcaggaggagctagataagctccacaagcccgcccgagagatcctcgaaaataagaagatcagcaaccaggagaagctctacctcctggatgacattaaaacgcagttcacgctgtctggtcagaaatcggtgcccgtaaccgacatcgaagcccggtggatgaaaagcaagaaggggaactcacagatcagctataatatccagtctgccgtcgactacgatacaaaaatgatctgcgccattaacgtcgtacaagcccccacggaccattaccaattgcctaaaatcgtggataaggcaataaacaacacaaacgtgatacctaggttcgtcctggccgatacaatctatctgaatgaagaaagcctttcatatctggcggacaaccaaattaatggagttattccagacagaaagcagtccaaggagaaaatcgggagactgaacaagaacccctatcacaaggatcacttcaaatacttccctgagattgatgcatttgaatgtccagaaggccagatcatgtactttttcaacaagtacactgagaagaatgacgacttggacaagccagacaaaattaagcgcctgtattccaactatggtgcttgcaaggcttgcaattgccgtgagaactgccttagctccacccagacccaccgcaccatcaccgaatacggcggaagtctcaagaaggccatgtgggagaaaatggagactgaggagtatatggaggagtatgcaaaaaggtcctcggtcgagggaccctttggcatcctgaaggagcaattccatatagaaagcgaagtagtgattggtaaaacaaagacagaggaaagaatcctactggacgccgtggcttataatctgatccgcttatttaacctggagcaggaaataaagaatgacaaagaagatatagttgacttctgtgagaaaatcagcgtccaggagaaattggaggtccgcgcaaccatattttga

SEQ ID NO: 4364 - DNA, 690 bp, synthetic construct
  source 1..690: mol_type = other DNA
atgctggagaaggaagtgaaacagtataaaagggggaacagtttcacttaccggatcgatctctctaagaaggacaacttcgaaggaggcgagaagataatgatctttaggatgagcgaatacgaggcttacctaaacgagatagaagatctaaagtcgcagatcgaggagaataataagaccatctccgaactgcgggaatcccgcagcgaggccaactccaatatcaacaatgtagttgacaaccacaacaaggagatcgcagataaaaacaaggaaattatggatctgattgaggagaacaagtcagctatccagaaatgctatgatattattgaggagaaggacaagctcctgacacaggccaacgaagagattagaatcgagagggaaaaaacagatgccactcgcaaacaggcccaggaagacattctcaatgagcgaaagcgacatgacgagctgacgctggagaaggataaacaattgaaacttgtcaacgagcaactgcaggacagtctcaaagacatcgcctacaaggataaggtcatcaccgcagaccggctgcttatcgaaagatacaaaaatagaggcttcgtggatcgtctgctgaatcgcttgcccgacgacagcgacctcaaaatagacgacgtgaaggaaacctatgtgttagaggcggagaagaaggaatga

SEQ ID NO: 4365 - DNA, 138 bp, synthetic construct
  source 1..138: mol_type = other DNA
atgatcctgagtctgcacctattctgctatgggtacttcttcatcgactttgatgatatcgtgctcagcctgcatagcatttgtaacctcttctttatagactttgacgacatagtcattgcctccatcggctactga

SEQ ID NO: 4366 - DNA, 1443 bp, synthetic construct
  source 1..1443: mol_type = other DNA
atgaaagtcgtactggctggcactggaagcgcagttggcaaaactacaatctcaaccggaatcatgaaagcgctgagtgatgaaaatgtccagccatttaaggtgggccccgactttatagatccttcctaccacacaatcgcgacaggaaatgtgagccggaacctagactcctttttcatgacggattttcagattatcaattcttttgaacgcgcccttaagaaatccaactctaatatgggtatcatcgagggggtccgcggtctgtatgaagggataagtcctatcggagatgtaggaaacacggccagcatcgccaaggccatagacgccccggtggtgctgttgatggacgcacgcagtctcgtgaagagcgctgccgccgtggttctgggctttaaggctctcgaccccgacgtccggattgagggagtcattctaaataaggtcaaagggcagcggcactataaaaaggccaaggaaagcgtggaaaagctggctgacgtgccagtgatcggcggcattccaagagacgacaagatcacagtagaggaaaggcacctcggcctggtgcctgctctcgagaaggaaagaattacacgcaacattaacctttggggcgagatcgcagaggagtacatagacttggacgcactcaaggacattatgaagacaagctccaagtctactgcccgggacaacaagaatattgcaatggagaagcatgaagatgacttcaatagagagcataccgaggccatcgacctcgaggtgaccaatgactcaaagccagggcaactgtggaaaaccggcaacaggaacaaggtcaagatcggggtggcccaggacgagatattcaccttctactataaggagaccctggaatcattggaggaaaatagcgcagagattgttccattcagtccccttaaggatgagcacctgcccgatgtggacgccctgtacatcggcgggggatatcctgaagtgtttaaaaaagagctgtccgataacaaaaccatgcttaatgatatcaacaaattccataaggaaaatcgtcccatctacggtgaatgcggagggttgatctacctgtccaaatccattgacggcctggacatggttggtgcggttccctacagctcggagatgactaataaggtgcaaggcctgaactatgttgtggccagggccaaccaggacaacctcatatcaaatgagggcgatgtattccgagcgcacgagttccactataccaaactcaatatcgataaaacggattctctggtgttcgatgtcttacgagggaggggagtgctaaacaacatggatggggtctgtgtgaacaacactctggctaactacattcacattcacgcttgctcgcatccgaacttcggttacaacttcaccattaacatcagtgagttagatatctga

SEQ ID NO: 4367 - DNA, 1116 bp, synthetic construct
  source 1..1116: mol_type = other DNA
atgtcaaccctggagaagatgcaggtgctggcggactcagcgcagtatgatctgtgcgactacgtgagccactcgaagagcagccaagtgaacctgccaggtatctaccatgcaacaggccacaacggatgcaagatccccctctttaaaacactgatgagtaataagtgcaaaaacgattgtaaatactgcatcaatcagtccaaacgtgatttcacccggctcgagctttccccggaagagcttgcaaaggcctttctccactactacaacaacggctacgtaaacggcctcttcctgtcctctggtatctctaatgaaatcgatgagacaatgaacaaaaccatcgagaccgcccggatattgcgacgcgactatgggtaccaggactacatccatcttaagattattccaggcagtagcaaggattcaatcaaaagggcgatgtcgctggccaatagggtgagcctaaacatagaagctgccactaaggacggcctgagtgagattacctcaacgaaggactacaacaaggacatcctcaagagaattgactggatgcatcagattgctaagaaaaatcctgattatgccaaatccgggcacaccactcagctcattgttggagccaacgatgaaagtgattacgagatactaaagcgaatggacagcctgtatcgcaaggctgacctgcggcgcagctacttcagcgccttctcccccgtggagggaacggactttgagaaacgggaagcttgtagcagtgatagaactgcccagctctaccacgcagacgccctcttgaatgactataagtttaaggtgaaggagctggtctttgatgaagacgataagctgttcctgaacgaggaccctaaaatcttggcagctcgggaaatggatatcttcccagtggaaataaatacagccccctatagggagctgatcagagtccccgggatcgggccgaaatccgcaaggagaatcatgtccattcgaaagaagatgcctttcaaaaagctggaggaccttcagaaattaggagtcgttattaaacgcgccgagccctatattcaattggaaggcgcttatcaaaactctttagacaattactga

SEQ ID NO: 4368 - DNA, 216 bp, synthetic construct
  source 1..216: mol_type = other DNA
atgagtctggaggagattcccttcgaagagcagctgcggggcgtcatcctggagggagagatcgaacgcgccgaactaaagggcgtggaaaaggggaggaacataatcatcattaaactcttggaaacaatgaatccgcaggagatttcagagagcctggaccttccactggatacgatcctcagcatacaagagtcccacaccaaaaacgtgtga

SEQ ID NO: 4369 - DNA, 888 bp, synthetic construct
  source 1..888: mol_type = other DNA
atggccgatgcgaaggacagcaaggacgataaagtttatcatcttgaggacctcctcttcgtaaagtgtctcgtgcaatttgaggagtttccccagtatattactgggtttaaggatatccgcaactcattcgacagtcgttttgcatcctcctctaacttctccagtttaaatctggactgcgtgcggcagagagaggacttgagtctgattgatatcgagcaccacagcagcatcaggccagacctgatgaggcgcaattacgaatatgccgtgaacctgtataacgtgacgggatacaccgtccatccgttcatcttttacaccggcgaccttccagtcaacaaaatcatccgcatgaatgatttcaatacatttcagccccagtggtttatccttaaggaaaaagatgggatgaaaagcctgaataacattaattacaaaaccttcaacaagatcgattggaacgttttcgacgctatagacttcgcctggatacctaaattcgatattgacatgtcaatcgaagactgcatagtggaactggccgaaatctacaaaatgatgcccgccgacaacaagttcctgcagttttgtcgggagtcactcaagttgtggacaggtaagtacataaaggacaaagagagactagataaggtcaaggagtgcctgaacatgtccgagctggaggagattcctttcgaagagcaactgcggggagtgatcctcgagggcgaactcgaacgagcgaaactaaagggcgaggaaaaaaataggattgactttatctctaaagctttgaagcacatgtccccaaaggaagtgagcaacatgttcgagctgcccatcgaatacgtcgatgagattgcaaattcgtatagcaagtga

SEQ ID NO: 4370 - DNA, 1536 bp, synthetic construct
  source 1..1536: mol_type = other DNA
atgtacgccattaacatggaacagaacaagaaggaactgaatatccccgatgaaatcaagatctttgacaccaccctgcgtgacggcgaacaggctccaggaattgccttgaccgtggatgagaaaatcaagatcgctcagaggttggatgagttgggcgttaacgttatcgagatgggtttccccacggtgtccagcggtgagcgaaaggctgctagagagatggtgagcttagggttcagcagcgagctgtgcggccttgcccgggtggtgcaaaaggatatagatgcattgattgactccgacctctcgtatgcacacctgttcatcggcacttctcccctgcacagagactataagctaaagaaatcgaagaccgagattctaagccaatccatggagatggtggagtatgcaaaggatcacggcctcaaagtggaatttagtgctgaagatgccacacgcaccgaactgaactacctgatcgagttctacaagggagtggagagcgccggggccgacatcattaatgtgccggacacagttggcatcctcgtgcccagtaccacacggactctgatccgcacccttcgcaagaaaattaacctccctatcagcttgcacttccataatgacttcgggttagcggtctcgaactccctcatcggcatagaggaaggggccaaccaagcccactgtaccataaatggcatcggcgaacgagccgggaacacctctcttgaagagctggtcgtcagcctgaaaatcgcttatggagcaaacctcacagtggatacaaccaaactctatgacacttccaatttcatcggctccattacagggataaaaatgcctcctacgaaaccgatcgtgggcgacaatgcatttgcacacgaatctggcatacatgtagatggaatcctgaagaacagcagtacctacgagccaatcgcccccgagatagtagggcacaaaagaaggatcgccctggggaagcatactggccatgctgccatcaaaagtaagctggaggagttcaatattgaagtgacccagaaacagtttgacaatatctacaatcaggtcaagaccctcggagacaagggaaaatgcctgacggatgatgacctaagatccattgctatcactgaaataggaacaagtggcaaggaatacattaagctcctcggtctgagcgtcatgacaggggagtccgtctcagcgacagcgactattaagctgtcaatagacggaaaaattatggagacttcccagatcggagtgggtccagtggatgcctctgtcctggccttaaagacactggtgcaggaccgggttaatattagccttgatgagtaccggcttgaagcgatcacgggtggtactgatgcactggctgagacctttgtagtgatttcagacgacaaaggaaacaaggccacggggagggccacccgcgaggacgttattctgtcaagtgtcattgcggtcatcaactcaatcaacaggattctggacatccaggagaactgctga

SEQ ID NO: 4371 - DNA, 792 bp, synthetic construct
  source 1..792: mol_type = other DNA
atggctaccgtggactcgttcctaccggacttcattcagaccaccttcttcagcggctacactatattcaatacagtcatctacactctcattctgctgatttttattatcgccatcatcaagatgttcaagaagataaaaatcgaccccatctccataatctatcctatcatcccctatatctttctggggtctctcatccgagcactggttgacaatggggtgtatcccaagacagtgttcttaataacccctggcctttacatccttgtgggcctgatcacaattgcaagcctgctattcagtctctttctctacaatcggaaaaacatcgactatcgctacaccctttcaatcattggagtcattctgctcatcccgaacatcatcatgattcccagattgaacattattccagtaatctatgtgttgatcacgtggatcatcgcgagttccatatttgtcctgatttcctacattatcccattcttcaaggacaggataaacctgagcataattagcgcccatatgttcgatgcttcaacgacatttgtggctgtcgagttcttcaactacagcgagcagcacgttttggccaatactctttatcaattgtttgatacgtctattacaatgtttcctatgaaaattattgtgatcgttgcggtgctctacataatcgatcagtacttcgatgacgaaaccatcaagtccctgctgaaattaaccgtctttgtactgggactggccccaggtctgcggaactttctcactatggccatcggggtgtga

SEQ ID NO: 4372 - DNA, 666 bp, synthetic construct
  source 1..666: mol_type = other DNA
atgaagtttgatccacatattcacagtgtgttttcaggggactctcgttcggaaccaatcgacattctcatccaggcccaaaagatcgggctcgacgcaatcgcaatcagcgaccacaatgaaatcaaaggctcccgactcgccagaagcattcctggagacattattgtcgtgccctccattgagatctctacagagaagggccatatgttgggactgggagttgacgagatcattcccaaaggcctgtcagctgtcgagactgtagacagaatccacgacgctggtggccttgctatagtgccccaccctttctcctattaccggcacgggctattctgcaatgtggattctaacttaggagtggacggtgtggagaccaagaatgcgcgctacatcttcggatacagtaacaagcaggcccagaccctggctgagcgaaaacggctggccagacttggcgccagcgatagccatttcttggaaagtatcggggatgcctacacagaggtaaacaccaaaggctatgattccgtcgatggcatactgaaggcaataaaacaccgccgctgtagggccatggggcatggtacgagcaacttcctggttgcgaaagaagtctttgtgaagaaggtgctgcggaggtatccgaagagggacgaatga

SEQ ID NO: 4373 - DNA, 1077 bp, synthetic construct
  source 1..1077: mol_type = other DNA
atgaagattctggctattgatgtgggaaccgggacggaagatatcctgctgtacgatacagaaaaggaaattgagaactctatgaaattggtgattccttcgccccacctgacgatcggacagatgataagcgaatcggagtctgatttatactttgacggcgtgatcatggggggcggcaaaatcaaggaccgctgtcttgaacatatggagaaaggctataagatagtattcgaagaactctccggcaaaaccatccgggacaacattgaacaggtcaaaagcttcggttttgaggtggtcaaagagggtagctttgacaaggagctcaatgaagattcaagcctgaagtacgccgattatcagaagatctccctgaaggacgtggatgtcgataagctgatcgacatcttcaagtcatttgacctcgacctggaggtggatgagctgatcatcgccgtgcaggaccatggctacagtgaggatatgggagaccgagacttcagatttgaaaagatcaaggaaaaattgccagagccccttccgccggaagtttttgcaatggaaagggaggaagtgcccgagtatttcacccgtatgcagagcgtgatccaatccctcgaggagtcaaatccagaatttaagcccgtccttatggataccaaattcgcttccctggccggggtctgctacgacaaggaagtgctaaagctcaacagtttcattgtcatggacattggaaacgggcacacaaccgttgcgtccatcgagaacggcaagatacaaggggttttcgagcaccatactagagacctgagtcctgagcgcttcgaggagttggtgctggcactggccgacggcacaattaagcacgaggacgtccacgatgaggggggtcatggcgccttcgcactaaatcctatcagcaagatagagaaggtagttgtggccggtccaaaacgggccctggtagagaaaacaaacttagactactatcacgcggctcccgggggagacgtgatgatgactggaactgtgggcctcgtcaaaagcatggagtacctcaggaaaaattga

SEQ ID NO: 4374 - DNA, 1302 bp, synthetic construct
  source 1..1302: mol_type = other DNA
atgcaatacagaattgatctgactaatgatgaagtccctaccaaatggtacaatattaatgcggatctgcccgtagagctacctgctccaaaaaacagtgaggggaaggatcagatatcaaccctgcctcaaatatttgtgaacgagtgtctcaatcaggagttctccacagagcgttatatcaagattccaagtgaagtcagagagctctaccagaggttgggaaggcccacccccctgtgccgggccagaggattggaggagaagctcaacacaccagcaaagatctattataagcgggaggacacctccccaacgggcagccacaagctgaactcggccatcgcccaggcctattatgccaaaaaagagggcatcgaacgaataaccaccgaaacaggcgccggccagtgggggactgccctgtgtctggcagcttcaatgatggacatcgagtgtacagtctatatggtgagggttagctacgaccagaagccattccgcaagaccatcatgcagctctacgacggcaacgtccacgcctcccccagtgaaaatactgaggtggggcgcaaggtcctggcagaaactccggatactccggggtcccttgggatcgcaatttctgaagccgtagaggacgctctcaagtatgatgatgtgaaatacacccttggcagcgtgctgaaccacgtgatcctacaccagaccacaattggtcaggagatcaagttacagctggagaaagctgaggaggagcccgacacaatgattgcttgcgtagggggaggcagtaacttcggtggaagcctgttccccttcattaaggacaaaatccagggcaacagcgacacggaatttatcgccgtggagccctcggcgtgccccaccctgaccgaaggtgaataccgctacgactttggggacaatatgggcttcacgccgctgttaaagatgttcacactcggccataatttcgtggccccttctgttcacgcgggaggacttcgataccatggtatgaacactcaaatatccttgctcaagaacgaggggtacatcacccctgtgacagcccatcagcgggatgtgtttgcagccggtaagatgtttgcgatgtgcgagggagtcatcccagcccctgagaccaaccacgcaattaaagctgctatcgatgaagctaaaaagtgcaaagaaacgggcgaagagaagactattgttgtgaacttcagcggccatgggctgatggactttaaaggatacgcaagctacatggacggctcaatggaaaattccaagtga

SEQ ID NO: 4375 - DNA, 777 bp, synthetic construct
  source 1..777: mol_type = other DNA
atgggcgagaccatcgccgtaatgaatcagaaaggcgggtgcggaaagacgacaactgttgtgaacttggcaacttccctcgccgccatgggcaaggctgtcctggtggtggacatggacccacaggccaatgccaccacctcgtttggaattaataagacagagatcaaaaagacagtgtacaccgctctggtcaacgaatgtagtgtgcaaaaggcaactatccccacccgaattgagaacctcttcctcctgccaagcaatatcgacctgagcgggatcgaggtagagttaagcaaggaagacaactaccacattgctctgaagaaactgctagagcccataaaaggcattttcgattatattatcatagacttgccgccttccctggggattattacgatcaactcactgatcgctgccgacagcgtcatcataccgatccaggcggagtacttcgcacttgagggtctggctgatctgatgaatacaatcaaccttgtggaaacgaggctaagatcccccactccaatcaaggggattgttctcaccctgtacgatgcaaggacccggttaggccgggaagtctatggggagcttaaaaactacttcaaaggaaaggaatacatctttaagacagtgattcccagaaacatccgcctggccgaagcgcccagttatggcaagccttgcatagcctatgaccctgagagcaaaggatcaatagcgtacctcaaaatggcccgcgagctcttgaagctggatggtgaaatctga

SEQ ID NO: 4376 - DNA, 747 bp, synthetic construct
  source 1..747: mol_type = other DNA
atggccaaaaagcagaatagcggcctcgggcgcggactagattccttgattccgaagattaaggaaatcgagcaagacgtcgaggagggcctgtccctggaagacctcctcaagaaatcagacgacgaggaggaaatcgaggagaccgtcgaggaaacagtggaagaggaagccattgaggaacaggaagacatcagcacagaggaaactgaaacggaggaggagcccgacgaagaagaggatgagcccgttgtcgaaaaagatgagacagaagaagagaagatcgagattgaggatgaacccaaggaagagctcgagaccgaagctaaagaggaggagacctcaaactacaccaacatcttcagtaacgacgacgaaatagtaactgagaacagcacaaaaaccatagaaatttctagctccaaaaacaacgacaagaatatcgagagttcagtgaacctgaacaaagagactgaggagagcatcaaaataaatgaggataaaacgaaggaaaacgactctgatagtgtgctgtccgagaaggaggagaagctggtgtatgaggtgatcgagacggttgaaaagaatccaagaatcacactgtggtcggcccgatccgctgcggtgttaaggtaccttcggaagaccgagcctgaatttagcatcagcaatgaagcatcgaaccttattgatgaggcaattgcccagaagtacccagaaatctggaccttgttcaatcacctgtga

SEQ ID NO: 4377 - DNA, 759 bp, synthetic construct
  source 1..759: mol_type = other DNA
atgaagctgggcttttccctgctgtcactgttcatgaaagaagttgatgagatgctggagatagctgtcgagaatggattcgacagtgtggaactgctcgccgagggaccgtaccggcaggacatcctattggaacggaaggagattacagaaaccttccactcctacgacttagacatatacattcatggggtaaacgtggacataaaccttgccagcctaaacgaggggatcaggaaggagtctgtcaagcagacgaaggaatgtcttgacctggcagatgagatcggcgcgattggggttactgcacaccccggaaaaatcggaaggcctgaaaagtacctgagagaaatggccttagggttcctgactgaatcgacccacgagctggtggcctacgctgaagataaggaggcgaagatcagtatcgagaacatgccagaacgcttttcctatctcggtaatcgagcatacgagctcgagaacctgaccaatgagacgggctgcaatatcacaatcgacctcggccacgtgaacacatgcaaagaccagctcagcttctttgagatccccaacatcctttattatcacattaacgataacgatgggatcaaagacaagcatcaggccattggtgatggcaccctggacttgaacctgctcaaatatgtggacaatggcatcattgaattgaataattttgataatgtcctcaaaagcaagaaggtgattgaggatttcctggccaaaaaccaatga

SEQ ID NO: 4378 - DNA, 807 bp, synthetic construct
  source 1..807: mol_type = other DNA
atgattaaaatgacgaaaaaagctatcgtgtttgataactctggtaccctgcttgagcgatttcgcgtcatcaaagacctatctaccggggaatttatcactcatgtaaacagtctcgacctaatcgacagttgtctcaacgcagccctggtggtgcttcagttcaacaccaaccggctgaaggatctcgaccccaatactctgatcagcgattttgtattggaaaataatattgattttgacattagctactattcaacagacgtttccaaagaagaaattaaggccatcctggagaaggacaccgctattatcaaagacatcacagacactttccctctgttaaaggaacgggtgccggggatggagctctgcaacggatcagcagtcatcattgacatcgaggaggagcgcatctcctatacgatcacctccgccgggcagttgttcagcggcgtcaaggacaccatagccaagctgcaagacagcggcacagatgtgttcattgcttccggcgacaggtcgggagatataaggaaactggccaatatcacgggcgttccagaggaccacgcctttgcgactgcaagcacagacagaaaggccgaaatagtcgccaatctgcaggatgagggctacaaggtcatgatggtgggtgatgggccaaacgacattttggcattccagaaggctgatgcggccgtgctcacaaccgagcagaaggatggagatttccccgacaagcttaagtcttacgctgatttcgtgatagaggacatcagtgaagtgctgcaaattgatttctga

SEQ ID NO: 4379 - DNA, 951 bp, synthetic construct
  source 1..951: mol_type = other DNA
atgcacctagacagcccgctcaaaatcaagaacatctgcctgtccaatcgcatcgtcatgccccccatggctagggaggagtcgatcgacgggaaggtcacataccctctgattgaatactataggatgagagccaagtccactggcctgattatcgtggaacacgagtatgtgcgtgaggaagggaagagctcccccaaacagcttagtatggcagatgacagcgtgatcgatggctacatagagctgaccgagagcatccaccgggagggctcctttgccatcgctcaaatcaaccacggccggtacgggtcaatttcttcaaacaacgtcaatctgaatgggatctccatagaggaaatcgaagacatcaaaaaggcctttgtggaggcggcagtacgaagccagaaatctggattcgacggcgtggagatacatgccgcccacgagtatctcttgaaccagttctacagtccatacacaaacaaacggacggacgagtacggcggcagcctcgagaaccgcatgcgattacataatgaaatcattcgcgaaatccgcgaggctgtgggtgatgattatataatcgccattagattcggagcatatgactatctggagggtggatcgaagatggaagacattccagccgcagtcaagtccttcgtggaaagcggagttgacatgattgacatcagtggtgggctgtgcagataccagaacccatacagtagggagcccggatactttaaggacctgagcaaaatagctaaggaatcttgtgatatccctgttattctcaccgggggggtgaagaaagccaaggatgccgaacggttgattaatgagggctattgcgatctgattggcattggtagggctcttctcatggatggagattggtcaaagaaggcgatacggaaggtaagaaagatcaaatcagacaaatga

SEQ ID NO: 4380 - DNA, 282 bp, synthetic construct
  source 1..282: mol_type = other DNA
atgagggcccgggaacgccgagcccgtctgatgagtctgtatatctacatcgtgatgaccatgatacaaaccaaagtaagcgcaaggaaccagacgactatcccaagcaagatccggaaaaaatacaacgtgcagcccaatgacattgtggagtggaaggagaaccgcaacggggagctgacagtcacattccggaagagaatctcctttagagacatgattggaaagggcacaattaaaactaccaccaatgctctcgatctcgaaaaggacctatactga

SEQ ID NO: 4381 - DNA, 1059 bp, synthetic construct
  source 1..1059: mol_type = other DNA
atgttcgaaaaacggaagattaagagactctcgaatcatctgaacaacagctatgatgccgaggattatgtgtcagcgctctcgtattgcgacatgatccttgacatcgatagcaataacccgcacgcactgttcaacaaggccaagattttggtaatccagggagagctcttagaggcaatgtcctactataagaaggctctgcagaccggtttcttcgacatgagcacttgggttgacgaagtctcttactacatggacggggacatttcttcaacaaattacaaactgtccaaccgaaacgaaatatccctggaactgtgcgagatatgcctggagaagtatgctaaggacattttcttcagcatctataaaagccaagctctggataacctgggccgttttgaggaatcgttgaacgccatctccctagatttaactcccgctgatggggagctttacgtgttccagtgtatcggccagtgttttccactcagcaatctgaacaggtgggaggatctcctggagacatcctccaacggactcaaattgaagagcgaggaccctagcctgaacagtttcaaggccaaagccttgtactacctgaacagattgaatgagtcagaaggcttttttaataagtacattcaacttaccaatgacagtagggcatataattttctctcaaagatcgagttcaagcgcaaaaactacaccagtgccctgaaactaatcaacaacgcaatacagctttctaagaaggaacaccttgatttactcgagtcaaacgtcctgatagaagacgacggcatctacgagaatgattactacatgaagagcctcatcctgctgaaactcaatgaattggacaagtccaacaagattatcgactgcctaatggagaaggaggagagcgccaagaattattgtctgaaagcgcgcatcctctatgaaatgaaggactaccggacgagcctgagtttcgtgaataaaagcctggatctgaaatccgactgcagtgaagccattgaacttaaagagaaactgggggagttttga

SEQ ID NO: 4382 - DNA, 1119 bp, synthetic construct
  source 1..1119: mol_type = other DNA
atgttcaccaagataaaaatcaacaaactgtttaaggaactcgactctgccctgaataaccagaactttgacaaggcgctgattatccttaataacatcctaatcctcgacgagaataatttaggggccctatacaaaaaagccttgattctgtataacaagggggaatacgagaagtccctcagcgtgttggatcatctgctcagcatcgactattgcattgacgcattcctgctcaagggacgggtatattgcaatctgaatgactacgaaaatagcctcaacagctacaaggaggcatccatcaacttcgacctggataaaatgaacaacgagatgacttattacgccagccacccgtccctgtttgacaagggcatccacaccaaaatcttcatagatctgtgcaacatcatacttgacaatgcagatattatcgaggtccgactgttcaagtcctacgtgctgtctgaaatcgggcgcagtagagatgccctcaataatgtgaattacatcttggcccataaccccaataacgaaaaagccatttctctcaaatcatccatactgataagtctgaaccactttgatgaggcgctggccctgattaacgagggtttaaatctgtacccaaacaaccttcagttaatcgatacgaaggctaggctgtattacgctttgagcgactacgatgaggctctagagatctgcaaggagtataattccatggacgattttggcaattactatctcctgtcaaagatagagtacaagaagggcgattactcactggctttgaagaacatcgacatcgcattggacaagttctttaagaatcctaacttcgacgacaaaaaggagtttagtcacgcttattactggtacaaatcgctcatcctcagcaaattggatcggttcgacgaggctaacaagatctgtgattgcctaattgagaaagaggaaagcgccaagaactattgtctcaaatcaatgattcttttcaaagagggaaactatacagatgcgctgattttcattgacaaggccctggaacttgactgtgaatgtgataaggcactggaactgaaaaacaacattgaagacaagctttcgagttga

SEQ ID NO: 4383 - DNA, 1506 bp, synthetic construct
  source 1..1506: mol_type = other DNA
ttgagcaacaatcaaatcagcggttgcagctacgccctgtatctggatggaagcgataatggctcattcatcggcaacaagatcttcaataatgattacggcatcttagccaaatactcaaatatcaacctcttcaagaataatagtgtcttcaataactggattgccatcgaggactcctccaaatacaatcagttcctatccaacaacatccacgataactatcaagggattcgactcatcgcttccaatagcgctctgatagagaacactaatgtctataataactatctgggcatccttaagtatagctcgtcattcataaacaaatccgcatctgtgtataacaacacccttataaatgttcagtcgctgaacgatggggaaatagtgattcaggacaacatgtggtactgcggccctgccgccctctcaatcatcttcgaaagcctcggactgagcctctcacaggaggacattgccaagattgccggaacaaataccaacggtaccagcctttacggcctttaccaggcctgcatcaagaaaggattcaatccctccgtattaaagatcaatagctccgacctcatgaccaatgacctggccgtgcttctcataaatgaggactaccacttctccgtgatctatagcattaacgacaccgacatcgtgttgaacgacccctcgatcggactgttcgtgctaagtcgggagacattcgacgaaatgttttccggctacgttctggacgttgagccaatcaaagacagggtttctaacgtcagcattgccaaaatgaagactatagtggggactgtgttccccgcgctggcttacggggggtacctggcgctggccggggtcacggtcatcgccggctccctggcaattgtgtggaacagtaactcacattacaactccaaaagcattcagaaaccacattatacctggaagccgaataataaaatccactttccacgtaacgtcaagtatcccacaagcacaggaaacaacggcaatcgcccgaaggtgagttacaatcccgtaaccagttctattagcggcaacaagtactacactaataacaaggtgtatacctataactacaagagctccaacagaaaggtgtcttcttctaacgcggcaattatcgcataccaggaagcgtataactattacctcagtactaagaataacgagcgggctaaagtggagaagcccacgaacattacaagttataattactttctcaaggatgtaaaagcatttgagaagggttcctacaaattttctctaggacctaaggggccagatgacgacctgtacgatagtgccaagatcgtcaaggcactgtatagggatgctacgagaaactataattacgggaaatttttgatcaacacaggcaacaaatctcgcggtatttgttacatttttctggctacctttgaaatatcgtttatccctgctattatctacaaccagctgtcattgaacccttga

SEQ ID NO: 4384 - DNA, 1404 bp, synthetic construct
  source 1..1404: mol_type = other DNA
atgaaaaagggggtgctcatgaacatccttgagaaattaaacgctattaaaaatcaggagataactgctaaggaaaatgtcgaatcttatattaaagtcattgaggagaaaaacgatgagctcaatgcgtttctcgagctaaacaaggaagatgccatcgctaaggccgaggagatcgatgccaaaatcaaggcaggcgaggaggttggagctctcgccggactagtgttcgggatcaaggcgaacataaatgtggaagacttgatcatctccgctgcctccaagaccctggaagattacattggaagctacgatgcaactgtggtcaagctcatcaaggccgaggatggaatcattatcgggataaacaatatggacgagttcgccgcaggaagctctactgaaacctcatactacggggctgtcaacaaccccgccgcccccggacgaatcccgggtggtagcagcgggggaagtgcagcggcagctgccgccggcatgtgcgacatcgcaataggctctgacacgggaggatcgattcgcaacccatcctcccactgcggtgtgtacggtatgaagcctacctatggcgccgtctcaaggcagggcctgctggacctgtcaatgagtcttgaccagataggcccaatggcccgggatgtgaccgggatcaccctggctttggatacaatcgtcaaatacgaccctacagagtgtacaaccttaaaatgggacgcgcctaacttcactgaaattgcactgagcgtaaaggataaggagaaacctctagagggtatgaagatagccacgtgtaaggagttcaaggaggtcacaaacgacgaaatcaatgagatcattgacgaaagtgtggccaaattggaatccctgggcgccgaagtggtggagctcagctttgactatattgacatctgcctgccaacatactatctcatcaactatgtggaatttttctcggctacccgaaaatacgacggccggaaatacggcagtcggatcgaggaggtctgcgggcccgaagtacttcgcagaatccagatggggtcatacattagccagaaggagtttagcggcaagtattaccaaaaagcactgcaagctaggtccctcattagaaatgccatcaatgacatgcttgagggtgtggacctgattgtaggccccacggttccaaagctgccccataaactgggcgaggaactggagcctatggaaatgtatgcttacgatgttctgaccgtgattgcgaacctggccgggatacccgctgcaagcctgaaggccggggaagttgatggcattccggtgggcctgcagttgcaggccaagccacaggacgatgccaagatcgtgaaggctatggcggcattcgagtatgcccaatga

SEQ ID NO: 4385 - DNA, 570 bp, synthetic construct
  source 1..570: mol_type = other DNA
atgatgagtgagctggagaaactaaaatccggcctggtgtactgctatgacgatgaggaagtctccgcaataaaggacaatgccatctatcagagcttcagatacaacaatatcgaccccaatgacaagcagaagcaatatgatgccttggaggagattctcggaagctgtggggatgacgtctggatcgggaaacgatttagcttcgacaatggcaaaaacatccacatcggaaacaatttcacagggaactacaacttaaccattctggatatccgggaagtctacattggagacaatgtgatgatcggcccgcacacccttataaccactgtgggccacccactggagccaaagggccggaggaagcatctggcaatggctgattcgatccatatcggtgatgacgtatggataggagggaacgttacaattctccccggcgtgaacatcggaaacaacgtggtgatcggtgctggcgcggtagtgacgaaggacattcccgacaattcactcgccattggggttcctgccaaggtggtccgcgagattgaaaacgatatcgaatga

SEQ ID NO: 4386 - DNA, 864 bp, synthetic construct
  source 1..864: mol_type = other DNA
atgacggataatagttccaacatgggcagcaattcagacaaaaaggagtttgatagcgatagaaaagagttcaattcagacaaagagttcaactcgaagaaggagttcgattctaaaaaggagtttaactcgaagaaggagtttgattctaagaaaaaagacttcaattccaagaaattcaattccaactacaaatccaaccggagccgcaataacataaacaccatccaagatctgaaaaatagcatcgaactaaaggagaacaagattaacgacttaaaggagcttctggaaatcaaggacgaggagaagcaggaggtagaatatgagctgtccctaaaggaccaggaactgaacgacctgcaaagcaagctcgacatcttaacagtggaaaatgaggaactcaccatcgagctgaatgaaaaggaaagcaaaatcagcaagctgaacaacgctctggtcaaatgcaagtacgaaaaggacaaggtggacctcgtgctgaagaacgaggtcaacatcgaaaaatcaaggctgaaggaaatggataatctcaacaacaccatcaaggagaaaatcgccattatccacgataagcaggagcagatcaattatctccgaactctcatcgatgactacaaagaccagaccaagaacaacaccgacaaccttgacttgcagcttaaaaagattacaaaaacgtacgaggggctgctcaatcagaaggatagtattatagaaaagcaggaacaaaatataaatgagctgattgagtctcagaagcagatagccaaagacaacaaagcaactattacacggttggaattggagattggaaaatatagggaggagctgaagaaaagttga

SEQ ID NO: 4387 - DNA, 795 bp, synthetic construct
  source 1..795: mol_type = other DNA
atggtgaaatgttcaaagtgcgggagtgaaaataagagcgaagcaaagttttgccacagctgcggagctaaactggatataaaggacccctataatctggacggcaaatcacgggagtacggttcgacaactggcaagagtgcaggcagcgctagcgcctactacgaccatagcgccaattctggtgggtccagtagcgattccaccggaggaatcgataacttcaggaacatgagcaactttaaaaagatcatcttcgcctgctgtgcggtcttcattgtgttgttcatcctctcccttgccgcgcaggcactaggattcgatatggaaccttacagcgagaacaaaaccgcctatcataattattcaagtctggacctggacgacgacggggcactgtgcttggaagagcttgagattgaatactccaatatcagctcctcaaagatgagcgacatctttaaaaagtccgataagaaccgaaaccacctgataagaggcgctgagtatgatatgctgaactactacgtgaatgagcactttaaagacctcgagaagaagaagaacgaaaaaacgagcagttccagcagctcctctagctctagttccgggtccagttcatacaagtctccgttcaccaccagcgggtcctcggatgatggcgccgagacatgtcccttctgcggtagcgaagctgtatatgagtctggaaactcgtataaatgtgccgagtgcggccgcactatttcaaatccagacgacctcgacttaaactacgatgagggctactattga

SEQ ID NO: 4388 - DNA, 1227 bp, synthetic construct
  source 1..1227: mol_type = other DNA
atgaaaaaatgcagcaagtgtgggtcagaaaatccagataacgccaaattttgtcacaactgcggcagcaaggatttcggaacgaacgagaacatctgtcccaaatgcggcgagtccaacgtgaaggaggcaaaattctgccacaagtgtggagccagcctgagcagcaattcgtccagcggcagctccagttcttacaaccccaccggaatgaacggtccattcggtgccggtgctaatgacaagcccggttctgtcatgaacgggccttttggcgctggcgcgaatgacaagcctggctctgttatgaatggccccttcggcgccggagccaacggcgtcgctgattcttttgccttcgacccgagcagtaacgacaaatccagctcgagtagcaactccaactccagctccaacagcaattccagttccaactacagttctagtagcaactctaattccagttctaactccaatagcagttccaactctaattcaagttccaactctaattccagttccaacaaccaggggtccacggcctcttcggcgaatcaatctaatagcacagcctctaccaagaatcagtccaattcaacaatctcgtcgaccactgccaatacaggaaatgaagggcctggattaaagaaaatctgctgttgctatgtgcccgtgattcttctcgtgctgttcataatattcgcaatccttttgaatgcgttcccggagaactttagcgcaacttacgatgacgaattttaccaattggacattgatggggatggccggctgtccctgtcagaggctagccagctgaaccccggaatgtctgactcaagcattagtagctacttcaatgaggctgacaagaacaacaacgggtatctgatcggccatgaatttgatgacttctatagtgatgtgaagccatattcctcatcatcaagtagttcttcgtcatcaaactcccacaagtactccagttcaagctcatccagctcatccagctcatctagcagctctagcgattacgactcttccagtgacggttatgtgctgacctgtccatactgcggaagcgaggcaatctatgagtcgggcagctattacaagtgcgcagactgcgggagcatcatccataatccagatgacctggagctcaactaccaggaaggctacatggacctcctcgcccctattgtccagattaacctagggggggtatga

SEQ ID NO: 4389 - DNA, 390 bp, synthetic construct
  source 1..390: mol_type = other DNA
atgatcaagatggaaatcacaggaatcgtgacaaccgggctaggaaaggctgcctactttctggggcaggacttctacaaaagccagttcaacgagaaatgtggttttacgcctttccccggcactctgaacctgatcgtggaggagaataagctcgaagacatccggctcatgaaaaactcctgcaccaacgttattaagccagaccaaggcttcggcggagtcaaacacatccgcgcctatctgaacgagaatattgtgggggcaattgtatttccggacaagaccacccatgatgaaaactatttggaatttattagcaaggacaagcttagggataaatacaatttcaaggatggcgatgaggtggtcataactatagacatctga

SEQ ID NO: 4390 - DNA, 1710 bp, synthetic construct
  source 1..1710: mol_type = other DNA
gtgtcttggctcgttgtgctcatagtgtttctgcttgctagtataaaatcgactaagaatccctctgtgtcggtggtgataccagccttcaatgaggaggcgacggtagctcaggtggtaaccgtcgctcgcaagctatcatacattagcgaggtcatagtggtggatgatgggtcgaccgataaaactgtcgaggaagcggaaagggcaggggcaaccgtcattagccataaaggcaaccaaggtaagggggtggctatcaaaacaggatttaaaaattcccatggtgatatagtggccttcatagatgcagatgtgtccaatttcactcctacaaagatcgacaagattatcaagccgatcctggaaggtaagacagacatcacaaagaccaaatttgcccgggagagtggccgtgttacagagctgacggccaagcctctattaagtttcttcttccccgagctgaattacgagcagcctctgagcggtcagtttgcaggaaagcggtctgccttaaacaaaatcaaatttgaaaaggactacggggtggacgtgggcatcgtactcgacgctgacgttcatggcattagcattttggaagttgacattggagacatccaacacgacatgtcttccctggccgatctcaacaaaatggcgaacgaagtggttagaaccatcatcgaccgagccgtggattatggccgggtcactatgatggatacccttgggaactacatcaggatggccatcatgggcctctccctgatcattctgggactgttcatgattttctttgtgccattcatccccctcgtcatatccgttttagtggctcttgttggaattgctctgactatcgcctacatcatcaagatcgtgcagcgaagcatccccatcctgaggaaaggggacaccagtacggccctgaagagttttgtgaagatgcactttcctgtgatcgtcagcggcttgattctcattctaatgctgtccaccttcctgagcgccgccacatttaacgacggcaggatctcagtggagctgactagccgcaactttgtatactccccctcagacgactatcaccagaccattagcgtgagagggccgtataccattgacagcgccattgagaatgaaacagatatggttcgcatcccaccagatgcgttgagcacgttggagatgtctgccaacgatacgatgattatcgacggcgagtactatagcgtcaacacttcaagagagggggaagtggatgtattccgcctctcaaaagcagtacggcacgatctggatctgtatcctcgggaagtcataccaaacagtcgattggctgaggtcttcaatggtgtcattgtcaaccacaacatcaacttcaacaattcctctgaagtcatggagggatatgtccagttcagcatcagtcccaaggctacaaatgcaactttcttcaatcttaccctggataacgagagcctcctttcaagcgtgggcaatttcaaaaacgattcctactataccatcgcctacgacgacgatattctctgcgcctttacaggagacgacatcaagaagggaaatgtgacctttgagtacgcaggcaaggacggcatgatagtgtttgaagacagaaacaacacctctatcaggaacttcattgactccgaccgcgactccttcgttaagctgtacaccctgtga

SEQ ID NO: 4391 - DNA, 315 bp, synthetic construct
  source 1..315: mol_type = other DNA
ctgattgcccttgtcctagcccccacggtcctcagcctgttcacttctagcgtgacagccgcggcattggtgatagtcggtatcctcatgattgtgcagctcaaagaagtggattgggacaacatggtggtagctgcatccgtgttcatgaccatcatcatgatgctgctgacctattcaatttccttaggcatcgcctgggggttcgtcacctacgccgttgccgcgatcgctacaggcaaggctaaggagtttagttggatcatgtggctgatggttattatatttgccgcatacgtgtttttcggactgtga

SEQ ID NO: 4392 - DNA, 996 bp, synthetic construct
  source 1..996: mol_type = other DNA
atgctgaataagtttttcaagttggatgaaaacaatacggatataaaaactgagtttctcgcaggcttgacaacctttctcgccatggcctatattttaggggtcaacccaaccatgcttgcagagggcggaatgccggccacaggcgtgtttttcgcaaccgctctggcttcaggggtaagctgtatcatcatggggctagtttccaagtaccccgttgggctggcgcctggcatgggtatgaacgccttgtttacctacacaatcatactggccatggggaacacttgggagacagcccttgcagccgtattcgtgtcgagcatcatctttctgctgatcaccattagtggcctccgggaagcaatccttaacgcgctaccatttgaccttaaacttgcgattggggccggtattgggttcttcctcgctttcataggactgaagggcgctggaattatcgtggcagaccccgctacgctcgtgggcatgggaaccatcctgtccgcccctgcgctcctggccgtgatcggcatactgctcactttgatactctacattaagaaggtccctgccgctgtgttcctgggcctggtgataaccgcaattttaggtgtgatctttacactgttcgggttcggcgcgggcgatccattgatgcccgccattcccacagagttcatttcctttaatttcgacacttctgtagtgggagcatttttaaaaggattttcacaactgttcacgaacatcccgaacctgatcatgatcctattcagcctcctgttcgttacattctttgacactaccggaaccctgatccccctggccaatcagtgcggtttcgtcgatgaagaggggaaggctgacggaattgacaaagctttcctgggtgacgctatcagcggaatcattggcgccatccttggcaccagcaccctgactgcctatgtggagagtgccacggtcctggtcctcgtggtcgaacaggtgtga

SEQ ID NO: 4393 - DNA, 9240 bp, synthetic construct
  source 1..9240: mol_type = other DNA
atgtccattaagcgaatcctgctgacgagtcttatgctgtttatcataatattttcaatttcgtttgtgagtgccaatgagaatgtgactaatgacgtgtccacgaatgagctgagcacacagacggtgtcgaacgatataactacgtcggagagcataagcgatactagtctcgacagcggagaaaaccgggggctggatgagatcaagtcgaatagtacagaggagtcctcatcgtccaatctggaccttgaggatggcactttgaataacgatgagattgaaagtgatgattgtttgacgaaaaatggcaaggaggcgaccctgcaggcaaataaacttagtctggacattaatatgagtcgagggacagcccaggatgtgctggacgccatcgtacgaatttccagtcaagggggaggtactctctatctgaatgggggcacctatacggaaggaggccatgccagagtgtataataatgacacggatagtttccgtaatatcgtgaggaacgatggcatcgtggacatttcaaatgtgcgcgttgttggtgggagcgtagacaatcctaatcaatatgctacctttcaaccaaatacgcgtgatagtacttcactggcctttagcggttacggggtgtgggatggtaatggcacgagatattaccctgattccgggtttaatctgactaacgtgacttttgagaatttaaactgtaccgggagattctttagttttaacagcgggtatttgacagattgcgtttttaataatctggagtcctatcagcacctcttctttgtaacgggagcttacaatgatgggggtaagcccatcgttctcactaattgtaactttaccaattccaaacagacttacaggggtgacggccctggggatggtacggatggaaccgggcagtttggtgtggtgttcggggctgagatgtatggctgtaacttcatcaatacaagcactgctactcacgggggtgctttttgtcttagcgacgagtggataagtgctgcgtgcgtgccatcgaagctggtggattgtaattttatcaacattacttctcgatggtttgcagtgtacatacatggcaattactccaataccacccgctttattacagaaccccaggtggtggaaaactgtagctttattaattgcacagccaccggggagtttgggggtgccctcggaatcagtcataacaatgtgattatcaataacacggagtttatccataacgtcgggggcaaagggtccgctattatggtgggtggcatcaataatacgcatgacggattcttgggggtgaatacgcaggggaataatattacgatttataattgcacctttgaggacaatattgccaaaattgaagggcagagcagcgctcactcgactgatccgccattcacgacgtaccccaccggttatggaggggctgtttatgtgtatggtaatcataccaaaatcatagatagtacatttaacaacaacactgccgatgattcttgcggtgctgccatctacattagaggtgacaataccacggtcgtcaattctgagttctataaccatacctccgagaacgggactatctatttggtggggaacgattgcaaaatcaaggattccctgttccacgacaacgatgcggactctactggggcttgcattttcgtggagggaaatagggccgaaatcggcaatactacattcgtcaacaacaccgctccgaatggggggtgcgtgttcattatcggtgaccataccctggtagacaatgacaccaaattcatcacaaacaatgctacaaacggggccggaatctatgtgaacggatcaaacaccatgattctaaataccagctttatcaacaataccgctgtgaacggctccggtgcattcatctatggtcacgacacggacgtcaacggctcttactttgagggcaacgatgctaccaacggtggcgcggtattcattgagggcaacatcaatgatatttccaacaatactttcctccgcaacaatgctaccaatcaggggggcgccgtgtatattgacggaaaccataccaaggtcaattataataacttcacagagaatgaggcgattcccattagcgaggatcaggagaccgggctcggtggcgctatcttcatcaggggaaacgataccaataccactgccaacactttcctccacaacaaggcccgtaacggatctgccatctacacagatggaactaacttctatcttcacaatgatcatttcctggagaaccaagcgtggagttatctgctgattacaactgccgaccctgccgaaagcctgtataaggagcaagatattgagatcaacgtgttgtaccgcgctggagacaatattatcaatgctattcacaacaggaacaagccaaatgagactcacttcatgaatgtaacctattcccacagtgagtttgggaatatcacaactagtcctgccgatcagtatgtcgaaccggttgacggcgtggaaaacagtcgagagggcgagctgctgtaccaggacgatcgtgagaactatcagcagatcgagctcagggtggagcatgagaatggggatctggccttgccaaggacaccctttagaaccaacatctacggcaatgttaacactaccttgaataagtcttccttaaggaaggggctttacgtggtgggggctgagcacattgaagattggaactataagttcattatgaatagtactagtttccgcatcctggatacaatggacatcatggtgaacaaaacctcggataaggaagagtacttccaggacgagatagcggaatgggagctgattttccataacacggacaatgggactgacgctgaaaacgtgacaatgaccgatcacctgcctaatgtctttgaactgatgaatctcagctacatgttctataccccaacagaggccattacaaatgctacgctctacttaaacaataataccctgcgctacggagtatataactccagcagtcagcaatgggtctatggcgatgcacgctataatgccagcgccaatagttggacatattatttctttgactatgacaatgtcacttatgtctacactgaatttaacgctgatgactttgtacctgtgttcggccctgtcatatacagcaactccactgatgtctgctatgacaatatctcctacaacattcccgaggaggactggtactatgataccatcatggtgaacgggcaggaggtgcggtacgggcatttcaatgcaacagagtttgagcagtacttcggcccctcatactatgatgaggacaacaagacttgggtttggattcataggggggaggacccactgaatccaggccaggagactgatcttcgcactatctatgatcctgagtctaacatctgggttatagatgattatatgcactatcccgagagaaagaccgttaccgagaaggtcgtctttaccattgttaacgacacagcaaacaatctgacccatctttcactgtacgcacgggactttgatgtgaatgtgacaggctacgttaatttcacgacgaattgcacacgatcaggggactacacgaatgtggtgaacgtgacgaccccagactatgactgggacttgtcaaacaacgtagctaacagatctgtgctcgtcgacccgctgcccaataagacagtcagcaacacgacgccctactaccacgactatgtcgactacaacctgaccatcatgaacacgggcaattcaacctacgaccagatcctaaccgttgtcgacagcctgcctgagggactagtctacaatacaactgtgggcattttgtacgctgaccagatcggcgagacgctggtggaaaaccagggacgcacagttacctggaacgtgacaaacattccggccaataccaatgcaaccatcattgtaagggtctatgtagatgctcttggaaacttgacaaacaacatgacactcatagctcccagcggagacaacagaaccgttaacgctaccattactccggttacctataccgatgtttctgtgaacaaaacagtcgaaaaagaggagtacttcatcaacgacactatagtgtggaccataaccgtatccgttgcaggaaatggttcaaatgccaccaacgtcaacctttcagatgttctgccgccggaagtcgaatatatttccacaaacgggacctacgacaatgccaccaattcctggtacatcggcaacatgaccaatggaagctccgtgagcatcacaattgatacccgggcaatcagagtggcagagaatgttaccaacgtagccaacgtgagctgtaacgaaaccgaatgggactatgaaaacaaccgggacaacgccactgtgagcattattcctgtgcctcagaagaccgtcaacgaaacaaatcccacatttggcaaatacgtggattacaacctcactatcatcaacaatggggccgagccctatactgacacactgaccgtggtagacaacttgcctgaaggcctagcctacaataacaccgtgagcattctatatgctgatcaggtgggcgacacaattgtggaaaacaataaccgcaccattacatggtacgttactaacattcccgccaataccaatgcaacaataattgtgagggtctatgtaggcattctgggcgagcagatcaacaactacactctgatcgggcctaaaggatctaacagaactgtgaatgcttcaattgttgtagaacctaaagttgacatatccgtggagaaaacaagcgacaagatcaattactttgaaggcgaaaccgtgatctggaccattactgtgtcaaatgccaacaatgcaactcctgcgaccaacgtgaccctcaaggacatcttgccagaggaggttgagtttgtgtcggccaacgacacatacagcaacgagaccggcatctggtacatcggcgatatggccaacggcacaagccggacaatcgtgattaatactactgctatcagatccaaaacgaatgtcacaaacgtcgccagcgttaactgtacggagaaagaatggaattacacaaacaatgtggacaatgcaacgataaatatctaccccctgattaacaagacggtgagcaattctacccctgactatggagatgaagtggaatacaacctcacagtgattaacactggggacgtaatgttcaacgagacggtcacccttgtggacaggctccccgaaggagtcgacttcatcaaagtactgaacgaggatggtcttaaggtgatcagtttcgatcactctaccaagaacctaacttgggttgtcactaacatttcagctaacacaaaagccaccatcaccatcctggccaattgtaccctggtcgggctccaagaaaacacctggaccatctacggccccgagggcatgaaccgcaccgtgaacgcaacgatcgttgtgggccccaaagtagacgtgtccgttgagaagactagcgacaagatcaactacttcgagggggaaacggtcatttggaccatcaccgtgcacaatgccaacaatggaacaaacgcaacaaacgtgaccctgaaggacatacttccagaagaagtcttatacgtgagctcaaatggtacatacaacaataataccggaatctggtacataggcaacatgaccaatggatcgagccgaaccatcgtgatcaacaccacggcaataaaatccaaagcaaatgtgacaaatgtggccaacgtaagctgcaatgaaaccgaatggaactacactaacaatgtggacgatgctgtaatcaacatctatcccctgatcaataagaccgtgagcaatccaaccccagactatcacgaagagattgaatacaacctcaccgtggaaaacactggcgacatcatgttcaacgagaccgtgacactcgtcgacaggctccccataggagttgacttcatcaaggtggtgaacgttaccggtctgaaggttataagtttcgataacactaccaagaaccttacctggaacgtaacgaacataacagcacacacaaaggccacgataacgatccttgcagtgtgtaatgctattggagtccaggacaacacttggacaatctacggacccgaagggatgaaccggaccgtgaacgctacaatcgaggtgaagccaatagtggatgtgtcaattacaaaggtggccgaccaagagatataccacatcggcgacaacgtaacctggatcattactgtgcacaatgcctggaacggcaccaatgccaccaacgtcaacgtcaacgacattttacccaaagaggtcgagtacctcacccacactgttacacaggggcagtacaacaacagaaccggaatctggactatcggcttcatggccaacggcacgtcccagaccctcacgatcgtctccgtcgccaagatcaacaaaaccgacatcaccaatgtcgcgaacgtgtcctgcagcgagaaggagtggaactattccaacaaccgggattacgccacaatagaaattgtggacactcccatcaacaagacggccagcaaaccggtcccagactaccacgaagagatcgaatactacctgacagtcacaaacctggccaatgagacctataacaaaaccgtgaccctcgtggatagcctaccagagggagtcactttcctgcgagtggtaaatgaaaccggcttacgggttctcggcttcgaacgccggggcaatcaccagatctggaacgtcaccgatatcgaacccaacacaaccgcagtgattaccatcctcgcccggtgtgacgcggtcggaacaaaaatcaacaactggacaatctactaccctaacggagatagcgagaccgtgaacgcaacaatcgaggtaaagcccatagtggacgtgtcgattacaaaggtggccgaccaggaaatctaccacataggcgacaacgttacctggatcattactgtgcacaatgcgtggaacggcaccaacgccaccaacgtgaatgtcaacgacatattgcccaaggaggtcgagtacctcacccacacagtgacacaaggtcagtacaacaaccgaaccggaatctggactataggcttcatggcaaacggcaccagccagaccctcacaatagtttccgtcgcaaaaatcaacaagaccgacatcaccaatgtcgcgaacgtcagctgctccgaaaaggaatggaactattcaaacaaccgggacaacgcaacaatagagattgtggatactcccatcaacaagactgcctcgaaaccggtccctgactaccacgaagagatcgaatactacttgacagtcaccaacctggccaatgagacctataacaagaccgtgaccctggtggacagcctccccgagggagtcacattcctccgggtggttaacacaagcggcctgagagtgctaagcttcaacagcactgaaaaggtccaaacctggaccgtgacagacatcgaggcaaacacaaccgcagtgattaccatcctggcccggtgcgacgccgtcggcatagaaatcaacaactggacgatctactacccgaacggcgatagcaagaaggtggagacgcccatcgatgtacagcccatagtggacctgtcaactacaaagacctccaataaggacgtgtacttcctagacgatacggcggtctggaccattaccgtccacaatgcctggaatggaaccaacgcaacaaatgtcgtcatcgacgaactgttcccaagtgagtttgagatcatcaactacacaaccacaaaaggccggtacgatccgagcgcgcgtgcctggactattgatttcatggagaatggcacaactgagacactggtgatcacctcggtggcaaccgtggtgactccattcgtggacaaccctgtgaatgtaacaagcgatgaaagggattggaacctgtccaacaatccatccaataagtctgttaaagtcatcgacattccagatccagagaaaaccgtgaacaatgcgactccttactacaatgataccgttgtttatagcctgactatcaaaaacactggagacattaagtacacgaacaagttaacagtgattgatagcatgccacagggactggaatatgtcaaaaccgttggtataagtggtgctaagttaatcaaggaggtggttaaaggacaagtgatcacgtggacaattaccaatatctctgcccactcaaatgcggtgatcaaggttcgcgtcagagccaaggccctgggcaacctcaccaacaacttgaccattgtgactccacatgccaacaagactgtgaactgcaccattactcccgtgcctattgctgacttggccgtcacgaagacaaatgaccattatggcaaagactgccttaactccacttttgtgtactggacgatcaaagttgtgaactacggccctaacaccgccgtgaatgccatcgcgaaggacatcttacctgaagggatcatctacctttcagatgattctgacggagcctacgattacgaaactggaatctggacaatcggcaacctggcaaaaggcaagtctgtgacaatgaccatcgaaacaattgtggatgctatcgacactcggatcaacaacaaagtggtcgtctcaagcgacacctacgatccggacaaatccaacaaccgtgacaacagctctataaaagtcatttcaatcgctgacctgaagctcaccaagacagctaacgtgaccaagacttatgtgggagaaaacttcacgtacactattaccgtggtcaacctggggcctgatacagccgtgaactctcgggtatacgacgtcttgccaaaaggagtgaaactcctgtccttcaacgagagcaagggcagttacaacccccagacaggcaagtgggccatcggagacatggcccttggtgaggaggtaacccttaaggttaacgtccgcgccctgacaactggcaaaattgttaacgaggcgcgcgtcgaatccgacacgtacgacaacgacacgtcaaacaacaatgactccgcgactgtcatcgtgatcggcgacaatcctcccatcaagatgctgcccactggtaatccaatactaattgcactcttgtccctgctggcaattgttggcgtcacactgagaaggaagagctga

SEQ ID NO: 4394 - DNA, 2187 bp, synthetic construct
  source 1..2187: mol_type = other DNA
atgatgattgctgataccttatcccaagagcttaatatcaagatatcacaggctgaaagtgtgatcaaactgatcgatgatggcaacaccatcccatttattgcacggtaccgcaaggagcttacaggttccctcgatgatgaagtgctccggaaattcgatgacaggctcaaatacctgagaaacctggaggagaaaaaggagacagtgttgaatagtatcgaagagcagggcaaactcaccgatgaactgaagcaatccatcctggactgcaaaaccctcgtggagctcgaagacttgtaccggccctacaagcccaagcgcagaacccgggcaacaattgctaaagaaaaaggcttggaagagctggcaaacattatccttgcccaggagatcgaggttccactggaggaaatcgctgaagactacattacgaaagatgactctgtcgaggaggagttacgggtgaacactgtggaagaggcaatcggcggtgcacaagacattatcgctgaaatcatatctgacaatgccagcttccgctccctaattcgggagctaagctatgaagatggagaactcatcagtgaagccaaggacaaggatgcggattcagtctatgacatgtactatgaatacagcgaagaggtcagcaagatcgccagccacagggtgctggccatcaaccgaggagagaaggaaaagttcctgaaaattaagatcagtgctcctgaagaggatattatcagctatctgaccagacacgtgcttatcaataagggcggaaagcccaccaagcctatctataacaagtacactgaagagactttgaaagaggccatccaggactcctacaaaaggctgattgctcctgccattgaacgagagctgagaaatcagctctttgaaaaggccgaggacaagtcgatcaagctcttcagcaaaaacctggagcagctcctgatgcaggcccccatcatcaacaaggttgtccttggctgggacccggccttcagaacagggtgcaagctggctgtggtggacgaatacgggaaagtccttgacactaccgtggtctacccaacggagcctcaaaacaagatcgctgaaacccgctcaactgtgcgcgacctgatcttcaaatatgatatcaacatcattgccatcggtaacggaaccgcttctagggagtccgaggcgattgtagcggacattataaaagacctggatgttcagtatgtgatagtgaacgaggccggcgccagcgtatactcggcaagcgaactagccacggaggagtttcccgactataatgtcggggagcgaagtgcaatctcaatagcaaggcgtctgcaggacccgctggccgaactggtcaagatagatcctaaatccatcggtgtgggacagtaccagcatgacatgaaccagaagaagctaggtgagtccctggacaatgtggtggaaaagagcgtgaataatgtgggggtggatgttaacacggcctcggtatccctcatggagcatgtggcggggatcagcaaaaccgtggccaagaacattgtaagttatcgcgaggagaacggcaagttctatacaagggatgagctgttgaacgtcaagaagctggggccgaaagccttcgagcagtgtgcaggattcatgaaagtcaaaggccccaatccattggacaacaccactgtgcaccccgagtcctacggggcgacaattgctttcttaagcttcttaggctactctattgaggatctggagaataagaagataaaggaatcagacctggacctcacagacaagcagtttgaggacatggcccaggaactcggaataggttcaataacattgaaagacatcgcgaaagagctgaagaaacccggccgcgacccaagggatgagatgcctcagcccatccttagaaaggatgttctcaccatggaggaccttgaaaagggcatggttctgagcggaactgtccgaaacatagtggactttggaatctttgtggacatcggggtccatcaggatggcatggttcacaagtccgagattacggatagccaatacgtcaatcacccgatggactttgtaagtgttggggacataattgatgtgaaggtcttggatgtggacatcccaaaacgtcggattcagctgtctatgattatttga

SEQ ID NO: 4395 - DNA, 1050 bp, synthetic construct
  source 1..1050: mol_type = other DNA
atggaacgcgtcaggctgcagtacattgatctgttgaagtttttcgccattttttcgatcatagccctgcacgtgtttctagtgtggcccaaggcaaaggtcatgggcataaaagtttattcactgtcaagtattgtccgcttcggggtgccggtgtttatcatgatcagcggcgcgcttcttctgaaccgggacattgaaatcgggtctttcctgaaaaaacgaattaatcggatcacataccctttcctgttcttctacatcatcacattcatattcatagccttgaccaaccatacccacgagcagcaaaacatctttgctttcagatggtatttctggacgatcctgggggtgtatctcagcatacctatcatcaacaagtacattcagcacagctctctgaaagagatcgagtatttcatttacatatttatctttgcatcaatattctatcagtttacgtacttctttgaaattaaacagtacttttacctcaccctgttcctgtccccactgggatacttggtgctggggtactacctttctaagaaggactttaatctcagtaccagcaagatgattgtgatttccatcatcctattcattctgtctacctccataaagatttgcggccagctaggatacatacccatcactgagaacttcgttgccagccagtcagtcatcctctcttcctggctcgacgtgagcttcattggcatccttcaagccgcgtccttcttcctgctctgcaagagcatctacgaggcttcgaagggtatctttagtccaatcaagaagttcttagaatcaaacatcatttcgaaatttgttcttagcgtaagcagggcaagctacggaatgtatctcatcaatctcattcctacagtgattgtgtattactatattcagcccatgaatctgactggcagtcaagtctttctggccatccccctcatttccattatcatcttcttggtcagttggatcatcatcgtgatcttatgtaaaattccatacatcaaatatgtatccggttattcctga

SEQ ID NO: 4396 - DNA, 3537 bp, synthetic construct
  source 1..3537: mol_type = other DNA
atgaaaacccgcatcagtgtcatcatcccaatttacaatgttcatgagtttctcgaggattgcatagagtcggtcctggcccagaccatcaaccactgggaccttgtagatgattatcagaggaaccttcaaatcattctggtggacgacggctctaccgacgacagcggtgagattgctaagtcttatgcagccaaatacgaaaacgtggaataccgctacgaggaaaatcagggactcggccatgcaagaaactacggatgcgaatttgctgagggggactatatcatctttatagattcagacgacatcatccccccaaaggcctatgagcgcatgtatcgcatcgcgcttaaaaacgacagcgacctgacgatcggctctgtatggcgatttaatagtaagctgacttgggcctccaacattcacgaaatcgctttcggcggaacaaaagagctgactcacattaaggagagccctgagctattttacgacaccacggcttggaacaagcttatcaaatttagcttttggaaagagcatggtttccaattcccggaagggatactctatgaagacattccagtgaccatgcccatgcactatctggcaaacaacgtttcaatcgtctacgagaactgctatctgtggagagtgagggatggcatctccaaaagtattactcagactacagatgacctgaaaaacgttgaggacaggctgtacgtgatgggactggtggataagttcttcaacgaaaatgtcaaggaggaggaactgcatagggtaaagaatttgaaatggataaagaacgacctcatgatcttcatcaacaagctcaaaagcatggacatagacgagagccaggaaatcattgacctgctgctggactacatcgaccgtaacatagacccaaaatactttgatgagataaacgagatcgaaaagctcaagtacgagtatctgtttgagagggacttcgaccggctcttgaaattgctgaactatgagcacgtgaatttctacactctgaatatccactccaaaggttccgatgttgtcattgaaggagataaggacgttttcaagacctcaagtttcatcgtgaacgatttcatcaaggaagggaaaaaagctaagtacattcaaaaggtcaatctagaggaagaggccctggaagtcagcggttttgtggtgattcccggtttggaggcaaaggaatttaaggatgtggaatactccttctatttggtgaatagcgaaaatcgcaagaagatcgccttgcgtcatgagcagatctatctggggaatatcaactcctatcgtcttcggtttgggaagaaattctcgtacaaggcggccggctatacggtattcgtgccgtacgagttaatcgaggacaacgaggacttcctcggagagaacaaaatcattgtggtctttaagcaacgaggagtcacccataatattttcgcaggaaacgcgaaaaagaacgtccgcagcaggagcgaaaaccgggcggttctcatcgggaaaacctatatgtccatcgggtatgacaagaataacgagattataatcaatgtgtcaaaagcccggcattcttatgatcggatcgagattgaggacgacgatctctgcatattcggcccctacgacggggatgtcttcctccactacaataagagtttcatcagtcccgagagcaacattccatttgcttacgatgacggcaatcagtgttaccggctggatctggataacatccggagcaccgaaggccagatcctatacgacaacggagaatccctcgtgtacaaagataaagagctgttatgtctgtattcctcgaaaggccagtgtgtgatcagcagtcttctggatcacaatatcaagatcaataagttcaagaatttttcattagtctcggagattagtgaaagaaacaacgagattgacattgtttcaaggcttcactctctggaccttggggatcggcagttgaagagcgcaaccctgtatttctttttagacaagaaccagagctcttatcctatcgccgaggctaagataattaaagacgtgtctaccacacaggacagtcatattggggataatgcctacattgatgataaggacagtgaggatattgactcgtcctccctgaatggagaaaatacttacgagctgaattttaaattcaatatgaacaataagataatcacagaaaacctctaccatggttactttgacctactgattcgctatgacttcggcgacctggtcttttcaacaccgatacacctgctcgatgacttcaaggcccttcttaagaagaaggtgttccactttactatctaccggggcaacgcctggactttaaggataagggcaaagaaaaaatggaattggtgggatggcaggcccagaatatacacacgagcatacagaatcttcaagcacttgccaatcaacaagaaacgaattatgtttgagtccatgtggggtgccaaatacagctgtaatccaagatacctctatgaatacatagacgagaaccaccctgactatgaatgcatttggtccttgaacgatgagcacatccccatcaacggaaacggaatccgggtacgccgttggaccctaaaatacttctattacctggcaacgtctaagtactttgtggacaacgtcaatttcaacgagcgctacgaaaagcgagagcctcagagatacgtgcagacaatgcacggcacccccctgaagacactggggttggacgtgccaggggatttccctacaaaagccagtgaggaacgcttcattgaacggtgtagccgatgggattatatcactgtgcagagcgagtatgtggaggacattgccagaagctgcttcaagttcgataaggacttcctgagatacggctacccgcggaccagcatgctctatacaatgaacaacgaagaggacataaataagataaaggaaagaatgaacatccctctcgataagaaagtgatcctgtacgcccccacgtggagaaagaaaaataaggtggaaatcatgttggatttccagtcatttaaggagagcctctccgatgattatatcttaatcctaaggctccatcacctgatgtttagcgcggatttcgcccccattgaggatgactttgtttacgacctttctcgccacgactccattgaggaactgtacttgatttcagacattcttatcacggattactcctcggtaatgttcgactactccattctggacaggcctattattctgtttgcttatgacctggaggattacgctgagaagctccggggcttttatatcgatattcaagagaacaagcccggccccatcctgttcagctcaaaagaagtggaggacgccatcagtaacatcgaaaaaaccgaagaggataccaaatatctgcgagaggagtttcgcaataagttcattccttacgaatgcgctaattcttccgagaagatcttcaacgatctcgtttctggcaaatga

SEQ ID NO: 4397 - DNA, 3675 bp, synthetic construct
  source 1..3675: mol_type = other DNA
atgaaaactcgcgtaagcgtgatcatccccatctataatgtttacgaatttctggaggagtgcctggaatccgtcgttaaccagaccatcaatgatatggagctgactgacggctacgagaggaatctgcagatcatactgatagatgacggctctacggactccagccctataatcgcaaaggagtacgcccaaaactacgaaaacatcgagtaccaccacgaggtcaatcaaggattaggccacgcccgcaactacgggtgcgaatttgcggaaggggactacatcattttcctggactcagatgataagctgtctcccaatgcctatgaatggatgtataaaacggccattaggaacgacagcgatatgaccatcggaggcttctggagattcaactccaaaaagtacaagatttccaacatcaataaaatagctttcaacggaaacaaagagaaaacgcacatcagcgaatctccagagctcttttatgacacaaccgcttggaacaagcttatcaagcacagcttctggaagaaacacaacttccagtttcccgagggcatactctatgaggacattccggtgacaatccctatgcactttctagcaaacaacgttagtatagtctacgagaactgctacttatggagaattagggagggcaagtccaaatcgatcacacaaacaaccaccgaaatcaagaatctcgaagacaggctgtacgtcatggggctggtggacaagtttttcgatgagaacgtggatgatgagcggctccgccatgtgaaaacaatgaagtggcttaaaaccgacctgctgatctttattagaaagctacgcagcatggacaaggaacaggggtacaaaatcatgtcactaatccgagactacatccagaataacattgacgctgatgaatttaagtacttgaatgagtatgaaaggctgaagtatgagtatctgatggacgacgagattgacaagatcgtgagcatcttgaacttcaaggctgagaatattaaggagacgaaggtctaccagaaaaacgggcatataatgttcaacgccgacaaggaggtgtttaagcagagccccttttacatcgaccagtacatcagggagcgatacaaccgtaagtacatccaagacattgagatcagggatgacggatttcttatacggggcttcatgctgatccccggactggatatcaaaaactttaaggaccgggagcacagattccatctgaccaatgccaatagccataagaagatcaagattgatagtgaagatgtggaaactggtaacattagctccttcaacattcgatttggacgtgggttttcatatgatgctgcaggatataagatcttcatccccttctctaagatatgtgatgacgaggacttctttggggagaatcgaatttctgtagacttcaagctcaacggcatctatcagagccccttcctttcttatgagaaaaaggagctctgtcagaatttctttttagggtatgcgaaaaaggacattcgtcaaaaaaccaatatgaaagctgtgatctacaaaaacacctatttcctcattagatacaccttgaaggatgagatcattatcgaagcactcccgttaaaaaactactttaaagagatcagactcgatgagaacgttctgaagctggatagtgaccacatcggtaacctttacatttactacgaggcggactcgatcaatgaggaggagaaaatagctttcgagtacgacaacgaggacaagagctaccagatcgatatccggaagctcaagaagaagccgggtaaaatactgtgtgatggggaaaattccatttacaagagtaaagaactgattctgctggattccaaatacggacaatgtctgatcagtaccctgaatgattactacttggacatttattattttgacagcttgacacaggttctggacatccgccagaatcgggaccggatcgatattgatgccaagctgtattccaacaggttcaatgagacacgcagcacgtataaggcagatagaataaaaacagccaaactctacttcaaagacgactcgagcaaggagaattacatactctctgacggcatgatagacaggcagaccggagacattaaattcagcattgacttttccaacaaggagattactaaaaacctatacgagaagatccacgatctctatgtggaatatgcttatgacgagacttctacggaagaagaggccattgtgaacaaagaagtggatgaaagtgagtatgattcagtctcaaaagaggaaaaggaaaacaacaaaatcgaaaagaccgaaaatgaaccagttccagtggagggccggaacaataagatcaacgaagagtcccgatttagtactgaactctatctgttcaagggtgatgacaaaaccatctctaaaagttactatgagtataaggtctatcatgatttaaaaggcttccttaaactaaaggtccttaaacgctggcccgtctacgaagacacccctgggaaacggcttaaacactcgcagatatcctataaattgttctcaaaactgcctattaataaaaagcgcataatgttcgagtcaatctggggtggaaagtacagctgcaatcccagatacctgtatgaatacatagacgaaaactaccctcactatgagtgcatctggtcctttaaggatgagcattaccctatcaaaggaaacgggaaatgcgtacgccggtcttccctgaagtacctctattacctcgcaacttcgaagtacctcatcaataatgtgaacttcaagaagcatttcattaaacggaaaggccaggtggagatccagaccatgcatggcactccattaaagacaattggcctggacgccccaggtgagtttcccaccaagaagagccagaaggactacatcaagaagaacaagaattgggattacctcactgtgcagagcgattacgtggccgagatcagccggacatgtttcaaatatgaaaaggacttcctgaagttcggataccctcgaacagacattctctacacgaagaacaacaaggaagacattcagtccatcaaagaacggatggggcttccatcagataagaaggtaatcctgtatgcccctacatggcgctttaagaacaattttgacttgatgctggacttgaagtcctttaaggaaagcctgaaggacgaatacatcttgattctccgcttgcaccacttctcagcgggtggctggaagcagccgctggatgatgacttcgtctatgacttctcaggctacggcagtatcgaggagctgtatctgatttcggacattctaataaccgactactcctctgtgatgtttgattacgccatcctggacaggccaattatcctgttcgcatatgatttggaggaatatgatgaaaagctgaggggcttctacatggatattgagagcaataagcccgggccaattctgcacagttccaaagaggtggaggaggccatccttaacattgagaagactgaaatgaagtataaggatcttcgtagaagtttcaaagagagattcaatcagtacgagtgcgaaaacagcagtgagaaaatttttaataaagtgatcgacaaaaagaagaacaagaagtga

SEQ ID NO: 4398 - DNA, 2091 bp, synthetic construct
  source 1..2091: mol_type = other DNA
atgcaagatcctaagatttctgtaatcattcccatatacaatacagaagactacatcgaggagacactgctgtctgtgattaatcagactatctttgacgagatagaggtcatcatagtggacgatgagagcaccgacaattcaaaatacatcatagagaaatatgccctggactacagcaacattcaggtgttccaccagaagaacgaagggcagggaatctcacggaattacggcctgtctaaatccaaaggcgagtacatccactttctggactctgacgactacctgccacccacggcatatgagaccctatacaacatggccctgaagaatgaaagcgatattgtgattggaaatgtcttgcggtttgctctctacaacgtttgggaggagagcctttacaaaaacgcttacaacgacttcgacgaggacatcgccatcatgagcctcaacgaacgaccgtccatactctgggacacccttgtcaccaataagttgttcaaccgagaatttctgattaggaagaacatccgattcccaaacaagaaaatcagtttccaggacatcccattttcactggagagttatatcttggctgatagtatcagctttagtaaggaaatcttccactattggcgcctgagatccaatcaaagctccgtcacacagcaggacaagagcctcaagaacattaaggaccgccttgaaatcctgcggatcgtgcagaacctcctggaaaagtacgaagttgaagaggagataaggaactacgagtactcaaaatggctgaaccatgacctgaaattctttctgaaaaggttcaactattatcctaaggagtatcatgaagaactctttgaagaggtctacgggatagtgaagatcatccccgacgcgctgattgacagcctcaatagttataagaaggtgcttttcaccatgatccgcaataaggactacgagaacttcctcctgttcgcacctttggagaacgagctatacaagaatcctgagatcccatcgttcctgaatgatgaatataagtcctacttcgattttgagaaggcgatggaagaggaggagctgaatattgaactactggactttaagaatgacaatgacaacctgtacatcgattttgatggctaccttaactacctcagcccgaacgataattacaagatcatcgcaaagctcgtggatgagaacgattatgagaatccccttttagtaaatcatttggagaacaagcaaatcgccattcccttctacctgctgaaggataagaagcgtgcccagatcaaggtcatttatgaatttgagagcttcaaaaaaactgcttatctcaaaaacagacacagaaaatccattgagcgcgagaagttctttatcgatttggatttgggcaaaaattcctatttatatctcgacatccgggaaaaaaacatcgagaattacattgacattattgacatcagcttcaactccaaggaatttacgataaaagccaaatcgaaaaagtcgattgataaaatcagcatggagaacattattagcttcgaaaagatcgcctatcctatctacgatctgaaatatgaagagaacgaggataacaacttgaaaaatgaagagaacggggaatatacgttcaaattcaaaattccctattacgacattctcaagtcagcagtgaaaaagtgggagctgaactgcgatgaatacttcaattcaattaagctatccgagacatttgagtttttcactgaaacctacaagatcaagtttgtaaatacaagaaacaagatcctcatcgagaacgaaatattcaatccaattaaaatgatttacgccctgaaccacgaaaacactgaccttaaactgaatatcaagacactgaagggtgaaaacagtcggctcaacaaagagattaagaagaccaacgaaaagaatgagatcctgaatgaggaaaacaaaaagcttatcgacaagaacaagaccttaaataaggagaacaaaaaactgaacaagaagatagaggagtataaatccaggaaggtggttaaaatagtggatagtttaaagaattga

SEQ ID NO: 4399 - DNA, 639 bp, synthetic construct
  source 1..639: mol_type = other DNA
atgatccttggcacttacttaatcatgcccatcttcaatcgctggatcaaggactgtagtattagggaagtggaatacttcttggccatttggctaattacgtgcatcttcgacaatactttactgatcggattccccgtgaccctgacctactttacagggcccatcggcatggtggtgctgggatattaccttcggcacacggatagaaagatattcaacagccttccatatgcattggccttcctgctcatcggcatgatcgttataatgctctgttcctacttcctcagcagtccagagggcatgtacgtcttcgatcgatattccattctactggcgattgaagtagttggaattttcaccctgtacaaggtcattgacaaaaaggagctgaaaatcttccacaaggagaatggtttttttcggcgcgcctctttctcaatcgcaaaatatagctacgggatctacctctgccatgagtttattatgaacatctttatcataatatttctgaagcacgccccgtttaaggtgaccttgctgctcgtctttgtgtgcacactggggacatcgtgggctctcctggccctgctgaacagagtgccttatctcaacaggattatcggtgctaaatga

SEQ ID NO: 4400 - DNA, 294 bp, synthetic construct
  source 1..294: mol_type = other DNA
gtgaactgggtcgtaattccagagtattcattaatccctagcctgaactggtttatcacggattttctggggacctgctgtcggtgcggtgtggacatattcctgatgctcagtggagccttgagcctggggcgcgactgggacatcaagtcgtttctcggcaaaagaatccccaggattacctacccgtacctgttctgggcgacactgcttatcagcattatgctggtggcagtctacttcaatcccgatctactcaagctttttttcggcatatcccactccttcatctga

SEQ ID NO: 4401 - DNA, 1008 bp, synthetic construct
  source 1..1008: mol_type = other DNA
atgatgatccccaaagtgatgataattcttggcagtgccagcgataaggatatagcaatgaagtccattaagattctggagaagctgcagattccgtatagcctgaaagtggcttctgctcatagaacccacgataaggtgaaaaagctcgtgaaagacgccacagataagggcgtcgaagtcttcatcggaatagccggcctggcagcccacctccccggcgctatagctgcatatacccaccgccccgtcattggagtaccagtggacggagccgtgggcggtctggatgccctctacgcctgcgtccagatgccgtttcctacagcggtgacgactgtggggatcaacaggggggacaatgcagccatcctggccggcgagatcattgccagctacgacgagaaggtgggtcagaacatttccgacctcagggttgaataccaggaaaaggtcgaagcaggtgagaaggagctgatcgaaagcattgagggggaatacttccaaaaagacttcttggaggaggagaaatacgagaagatcgagtttgaagagctcgacgacaccccagatgtcatgatcctggccggaagctattcagacatggaaatcgctaaaaatgtagcgatcctactggaacggatgcgaataaattacaaactcgattacatctctccaatcagacatgctaaggattttgaatcatatatgagtaaacggaacaacgctaagatcttcattgccatttccggcctgtctgcccttgtagcaggcagtgttgtcgctcttacagaaaagccagtgatcggggtgccttgttcgaagaaattaaacggccaggacgccttgctgactatggccaacatgccccctggagtgcccgttggaaccgtggggattgacaacggtcgcaatgcggcaatcgttgctggggagatcctagccatctccaacaaggagatcgaggagaacctgaaatggataaagtataagaatgcggacttgtga

SEQ ID NO: 4402 - DNA, 1263 bp, synthetic construct
  source 1..1263: mol_type = other DNA
atggccgaagaactgaacattatccagattgatgaagagctagacgctgaatacgaggctgcaaaggtgttgcgcaagtaccctaaggacacagtcatgctcaacaatataaaaggctacgacatccccgtggtctcgggtatctgcaatacaagggagaagatcgctcagtccttgggctgccaggtggatgaaatcctgtacaagatcatcgatgggatgaacaatccaacgccaatcaccaaattcatcgacctgaaggatgaatacgacagcaaacgcgtggacttaggaaagatccccatactcacccactataaacgtgacgggggggcctacattactgctggggttgtctttgccaaggaccctgagacagggattcagaacgcctcaatccacaggatgctcgttctggagaaaaacaaactggctatccggatcgtcccacggaacctctacacctacttccagaaggcaaaggatatgggcaaagacctcgacatctccattgccattggcatggagccgtccattctactggcatgtacaactagcatcccaatcgatgcagacgaaatggaagttgcaaaccgattcaagaatggcgaactggagcttgtgaactgtaaaaacggcataaaggtgcccgaggccgacattatctttgaagggaagatcttgattgatgagaccgctccggaaggacccttcgtcgacctgactgacacttatgactacgttcgggaggagcccgtgatcaaactgagcaagatgtatttaaaaaaggagaatcccatgtatcatgctatccttcctgccggattcgagcacaagctgctgcaaggcatgccgcaagagcccagaatcttcaatgccgtcaagaacaccgtgcctaccgtgcagaatgtagtgcttaccgagggaggctgctgctggctgcatgcggcggtgagcatcaagaagcagaccgaaggcgatggaaagaacattataatggcggccctcgccgcccatccctcactgaaacacgtggtggtcgttgacgaggatgtgaatatatttgacccacaggatatcgagtatgccatagccacgcgcgtaaaaggtgacgacgatataattattgtgcctaaggcaaggggttcttccctcgatcctaaggcgagtgagattgatggaaccacaacaaaagtcggtgtggatgccacgaaaagcattctggagccacacaagttcgaaagagtaagctttagtgagtga

SEQ ID NO: 4403 - DNA, 972 bp, synthetic construct
  source 1..972: mol_type = other DNA
atggataaggtgggcattatcggggcaggtagtctcgggacagctttagcgcagaccgtggctaataacgtagacacagtttacctgcatctgcgccgagaggaactggctaaaaccatcaatagcacgggatataacagcgaatactatccaaacactaagctaaaaaacaatatcatagccacgactgacatgaacgacttgattgattgtaagatcatatttctgtccattcctagctctgcattccggtccaccctggaaaacctaaaagaggtcatttcggaagacacaatcctggtgacgacagccaagggcattgaatatccctcactcaaatcaatgggtcgcctgatcgaagagtacttcgatgagaacttcgtggccctgagtggcccaaattttgcgtctgaaattgtcctgaaccttgccaccgtgtctaacattgcgtctcggagcagtgagaatgccataaaggtcaagaaggtcctctccaccccggagtttaaggtaaaaatcattgatgacgttgtaggccttgagatctgtggagtcatcaagaatatcaatgctatagccaacgggatctgcgaaggaatgaacatcaatgagaacgccaggtatgccgtcctgacaaagggcttcgaggatactgggaggattatcgaggcatttggtggcaaaatctccaccgcaagcgagtactgcggattcggcgacttggtgctcacctccacatcatcggaaagcagaaaccacacccttggaatgctctacggccaaagaatcatcgtggatgagaaggccagcgggatcgtgttcgaggggaaaaactccatcatggccataaaggacatctgcaataataccaatactaacagtgtggttgtgaactttgtgtacgacgtgattgttaaacagattccccccaaaatagctttcaaggacttgtggaacaatattgaggagtga

SEQ ID NO: 4404 - DNA, 1092 bp, synthetic construct
  source 1..1092: mol_type = other DNA
atgatgtccgaggacagcatcttgcttactatcaaaagctttacagacctccaaacggaaataaacaacacggccaacggcggcatcctgatcctggagggctattacaagtacaatagcaatctggactccaatttcttacagaagggtgtcctcgtaaataagaacattaccattttcggaaacgggtgcgtcattgatggaaataatacttcgagcctcatggagattaacgcgaacaacaacaccgtgaagatctacgacctgaatttcattaatgggcaccagaacacttggaactacggcagggttagtatcacaaattccatcgcttacttcaacaactgttcattcctcaactccaccaacgggtactatggtagtgtctacatcgccaagacctcgcaagcacatttcaacaattgcatcttcaataacaattacgcaaagtttggtggagctatcttcaataacaatattatgtattgtaaaaattgtagctttgagaataacagtgcccagtctggcggtagcttgtgtataaacggcgagaataacggagtggaaaatacaaacaattatacgtacctggaaaattgctccttttcagataactccagcacagcccacggggcagtgatctactgcgatgagtggtcaaaaggttgcttcaacaattgcagctttgaaaaaaacagcgcaaccaccagtggaggcgccattaccatcgatggggcgaatatcgacatcaacaactgcagtttcaacaagaacaaaaccggaacaagctcaacatacaacggaggcgctatctggatcattaaaaacgatataagcggggcctctaatgtgaacatactgaacacttcctttagtaataatagcgcttcgcaggacggcggggccatttatctgaacggaacttgtgtgcttaagatttccaactcttcattcaacaacaacaccgccactcgctatggcggaagcatacggaactaccagggcacagctaccgcgtatctatgtggctttctgaagagctccgacgccacgtacggcaccatcaccaagaatgggtgctatgggccctga

SEQ ID NO: 4405 - DNA, 717 bp, synthetic construct
  source 1..717: mol_type = other DNA
atgatcggtgtgattctggccgccgggatgggcacaagactcatgcccctcactaaagacatcccaaaggctctgctcaaaatcaatgagactaccctgcttgagcggatgattaagaactgcatcaatgcagacataagcaagtttatagtggtcgtgggctataacaaggataaggtgatcgatctgtgtcccgaaatagcggaaaaatacgatatcgaaatcaagaccattgaaaacgaaaaatacgatgtgactaatacctctgtaagtacctacctggccagcaaattcatcgaggagaacgacctggacgactttattctagtcaacggtgacaatgtggtggaccctgagatcattacgcgcctcgcagttagccagaatacaggcatgattatagataacttcaaggagctgaacgaggaatcattcaagcttatcatcgatgatgagtcctttaatgaagacaagacaatagccaacggcaaaatcaactccatcgggaaagggttagacattccatccagcacaggagagttcatcggagtgtcgaaggtcgtatcagatgacgtcgcccaattcaataggatcttggagaaattgattgaggaggacccgcagaactattacgattttgcttataaggacctgagtctgatcaagaccattgacttcgttctcacgaacggactaaagatggaccggaatcgatga

SEQ ID NO: 4406 - DNA, 1221 bp, synthetic construct
  source 1..1221: mol_type = other DNA
atggcggaagagaaacggagctttaagaagctcatcaaagacatcctgtacatcagtgccaagcgcagcgccagagccctttattatattggctcatacatcatccccgcaaacgagaaaataatcctcttcgaaagcagcaatgggcgaaactacacggggaatccaaaatacatctatgaagaaatcgtcagccagggcctggacaaggagtacaagtgtgtctggtccttcatgcatccggataagaagatcccaggtaatgccatccaggctaagagatcctttttcaagttcctctattacaccttgcgtagcgggacatggatatttgactcccgccacttatactacctgaagaagaacaagaaaaccaaatacatccagacatggcacggcactcccctgaaaaagctggccctggacatggactacattgacatgagtgggaaccaggatattgaagcataccacgaggagtttcggaaaaacacatccgcctggcagtacctcatttcacaaaacgagtactcgtcaaatatattcaggagggctttcgactttaagggtgagatgcttgagatcggataccctcggaacgacattctggtaaacaaagacaacgaaaaggacattgatgagataaagacccgcctgaacattcctaaggacaagaaaatcattctatatgctccaacttggcgggacaatcagttctacaccaaaggccaatacaagtttgccacagagatggacttcgataggctttatgaagagttttcggatgattacgccctgatcattaaattccattacttggtgaaggagaacatggactggtccaagtacaatgatttcatcatcgaatgcgatgcagactgggacatccaggagctgtatctaattagtgacatgatgatcaccgattatagttctgtgatgttcgattattccatactgaaaagacctatgatcttctttgcatatgacctcgatgactataaaaacaatctcagggacttctatttcgacatggtggaagatgtgcccggccccatctgccagactaacgaagagttggttgattttattaaaaactacagcgaaaatgcttataagaacacgtttggagagaaatacgagaagtggaatgataagttcaaccaatttgacgatggaaaggcgtctcagaagattataaatctgattaaagagcgatga

SEQ ID NO: 4407 - DNA, 1053 bp, synthetic construct
  source 1..1053: mol_type = other DNA
atgaaggaatctagcttttacatcaaactatatgaagagaacaactccaccgaccatatctcgaactcaaacaagtccgtacaatgcaacctttgtgctcgtgaatgtaagatcaaaaataataatacagggttctgcaaaagccagaaaaacatcgatggcaagttattcgccctgaactaccagcgcatcgccagctaccatatagatccaatcgagaagaagcctctctaccacttccttccaggctcatccacgtactccatcggcgggtttggctgcaacttcagctgtctcaactgccagaactatatgctgtcaatgaacagttacaacgaaaacaacagtattaagattctgccagagcgaattgtgaaaaatgcactggacaacgattgcctctccatatcctggacctataatgaacctacactctactttgagtttgccgaggaaacttctcggttagcgcacagtcagggcctgaagaatgtgttcatcagcaatgggtacatgggcgaagaagtcttgaaagaaacagtgagtttcatcgacggattcaacatagacctgaagttctttgacgatgagctctatagaaagatttgcgggggcagactagacatcgtcctggacaacctccggaccatttacgagtcgaagaaaaagtacaacaatcacctggagataaccactcttttgatcaatgacctgaatacggagaaggagcatattcgggcaatcagccggtttgttctggatgagctgggtcctgaggtgcccctccactttagcaggttctttcccatgtataaaatgacagataaggcccccactgacattgactatcttattagggcccgcgaaattgctatctctgaggggctggagtatgtctatctgggaaatatgcccgcggataacaatacctactgcccggagtgcggtgagttgctgatcgagcgcaataggtactgcaatcgagacaaaaacagaatcaaggatggatgttgtgtgaattgtggacacgaattgaacttcgtgttcgactga

SEQ ID NO: 4408 - DNA, 1242 bp, synthetic construct
  source 1..1242: mol_type = other DNA
atgaaaagcactttgaaagtctctgacatcggtgaaaagcaactcatcgagcgaatcatagagaagtcaaaattatgttccctaaagaaccccttcgacctcgatgatttcaactccaattacccaagtagcaattttaagaccagcattggagacgactccgccctcctgaaccagaatctcaatacgaatcactatctggtggcatcatccgatatgctgatccagtccagccattttccaagggagatgacgtactaccagatggggtataagtctgtcatcgtgaatgttagcgacttggcaagcatgggggctaaaaacataggattccttttaaacatagctatccctaaggacaccagcctggacaacttcgacgatctcatttgcggcattatccgggcctgcgacaactacaatattcctcttgtcggcggggataccaacgaggcgagtgagattatcctgtccgggaccgcaatcggacaggtagaaaagggcaaggccctgatgaagcacggattcaaggaaggagacttggtgtcgattagtgaccaccttggctacgccgctctgggctttgagcttctgaaaatcaaggaagagaatatcgacaaatacaacgacataattttccagattaacaagatcgaccccacagtgaaggacttggctctgtttaaggccttgaagcccgaggccaaatatgaagagggccggattctggcgagccacaacagccaggaaaaccgcatctccgcaaccgacatcaccgacggcctggcgagtgaattttatgagattctgaacgccgataaaaagtattatctattcaacaaagatactgagtcccacaacccgaacgattcgaatgattctaatgacctgaacaatcagcagaacaaccagaataacacaaacaaccaagacgtgattgatgaatatgatgatagcaactactcaaaaggcatcagaatctacgaggacaagctgccagtggacgacgaatttaagcaaatagccgatgttctcggtatcgattaccttgatctgttcctgcatattggggaagactttgagctcctcttcacaatcaataaagagctaaagagccagctggaaaacgatatgaatttctacgtcatcggtgagattacaaacaataacactgtggagatcgtactctctaatggggatataaagaatatcagttcaaaaggatacgagcatctgaaatga

SEQ ID NO: 4409 - DNA, 684 bp, synthetic construct
  source 1..684: mol_type = other DNA
atgaatttaatcaagggactggacaagaacaacgggcttgatctgatactgcatgcgcccggaggagatgtcggggccacagaatctattatcgattatctctacgaggtgttcaacggtgacatccgcgtaatcatcccacaaattgccatgtccggagggacaatgattgcatgctcaagcaaggagatcattatgggtaagcagtccagcctgggcccgattgatcctcaattcaatggcatcccagctgagatagtcatcaaagagttttacagggccaaaaacgaaatttccgaaaagccagagaccatccccttttggcagactaacatctcaaagtatccccctgccttcattatcctttgtgagaacgcaagaaaatggagtgacgaaatcttggacaagagcctccgatacgcgatgtttgacgggtcggacgaggaaaaaatcaacaaaatacggctggaactcggctctcacgagaatacgaagagtcacggccggcacctgagtgctaaggactgccaggagctgggcctaaaaattagctacttggaagatgatgacgagttccaggacaccgtgctctccatccaccatgcctgcatgaattttttcagcatcaacaaggattgttgcaaaatagtggctaataacgacagcaagttcttcattcagtga

SEQ ID NO: 4410 - DNA, 168 bp, synthetic construct
  source 1..168: mol_type = other DNA
atggccgtggaatttaatgaggtgatcaaaatgaacgaaagctatgtaaagaggctataccgggatctgggaatcccgtactaccgccccaaaaaagacaagggcgacgaggagttcgatttcttcccaaagtatgacctcatgcactggattcctctgaaggtctga

SEQ ID NO: 4411 - DNA, 321 bp, synthetic construct
  source 1..321: mol_type = other DNA
atgttcaagatacgcaagctgtccaataagattatcgttctcctgatctgcggcctactcatctgttccattcaggcctgctcggccagttgtactgcagtctacgtggggcctgatgtcagtgcagacgggagcaccatcattgcccggtgcaatgaccaccagggagtgtggggcaaccatatcacagtgaccccaagggtagagaacaagtcaagcagactgatggctgtgtgcgaagacggtagcgtgaaaacggagcttccggctaccacttacaaatacacagccacaccctatatgaacagcaccaaagcgtga

SEQ ID NO: 4412 - DNA, 1452 bp, synthetic construct
  source 1..1452: mol_type = other DNA
atggacaaccagaatcagtggaatagtagaattgcgtttttactgtcaatgattggcgcggctgtgggactgggcaatatctggcggtatagctacgttgtgtacagcaacgggggggggactttttttattccatacctggttgcaattctcatcatgggaatcccatttcttgtcctcgaatatgggattggtttccgccacaaagactctttctccaacatcctgaagagcatcaaccccaaactcgaatacatttcatgggcattggttctgattatctactttgttctaatctactatctggtgatcgtgagttgggatttggtctacttaggctcgagcataaatttcagttggggcgctgattctgctctttatttcgtgcagaatgtcggaggcagctcgaacctctccaacatggcaagcttcataatccccaccaccatttccatggtcctcgtgtggatctgtgtctggtacatctcccacaaggatctgaatgagggaatcggtaaggcctcaaagattctcatccccctgcttttcggcataatggccttcatcattgtctttgcactgacccttccaggtgcaggcatcggcataagcgccttgctgaaccctgattggcaaatgcttttgaacgttaacatttggctggcggcctttagccagattatcttctccctcagtatgggtgagtcaattagtctgacatatgccagctatctccctgagggctctaagctcaccgacaatgtgctgattgtggtgtttgccaactgcgcctttgaggtctgcacggcgttcggaatcttttccatcctggggtacatgtcctacacgtccggaacaccgatcgtggaattggtcagcgagggcacaggacttgtatttgtggtgttcccaatgattttcaatatcatgggggccatcggtcacataatcgctcccctgctcttcatcgccatcttgttcgctggaattacttcagctgttgcagtatttgagccgatgatcaactcaacagtccataagctgaactggtcccgaaaaaaggccgtgacggtgtggtcgatcgtaggctgcatagtgagcctgttattcaccaccggcatcagcagctatctggtcggaatcgtggacagcttcatcaccgagttttgtatcctgctgctcattgccattcagtccataatattcacttggttctacgacatcgaaggcgtcattcctatattgaacgaaaacgacagggtgaaagtggggaagacatgggtatttgtgctaaaatacatactgcctatcctgctattcttcatgtgggctagtggggtgtatcatctgcttctgaacgccaataccttcgagctgatcgtgtatgggctaattacagtgttcattatcattctcacttacgtttttaccaatatccccgagaagagctga

SEQ ID NO: 4413 - DNA, 462 bp, synthetic construct
  source 1..462: mol_type = other DNA
atggaaacaattctgaccaacgaaaaagacgaacggttcatcgagctgagcaacgagctgaacaatgagtattactccaacatcggagaggacagcttgaaatatctcgactacaacaccctcgaagatccacacgtggtgctcctggtgttaaactggggcaaccccatcgcctgtgccagctatcgaatattcgatgagcagtccgttgaaatcaggagggtctacgtaaagaagagataccgcaataaaaaaatagcttacaagcttgtcaaggccctggagaagctggcaatggagaacaatttcaaatactcaattatcgagactggtagtgagaatatggctgcgatcaacctgtataaaaagctaggctacgaaaagattgacaattttgggtttttcaaggacgatgatgcatgcatctgcatgcggaaggagtttaagacgcttattttctga

SEQ ID NO: 4414 - DNA, 468 bp, synthetic construct
  source 1..468: mol_type = other DNA
atgcaccaaaaattcatggaagaggccatcaaagaggccgaaatctccagcaaggaggggggattgcccatcggcgcggtcctggtaaaggagaaccagattatcagccgcggccataacaggctgattcagaaggattcatccatcctccacgctgaaatggatgccatcgaaaacgcagggagacttaatcacgaggactaccagaagtgcaccctgtatacaacattaagtccctgtccaatgtgcagcggggccgtgattctgtacaatatcccgcgggtggttatcggagacaatcagaccctgatgggcgcagagaagctactgaaagacaacggtgtggaaataattgtcctgaacgacgataaatgcaaagagctcttcgaagactttgtgaacaataaccctggaatatgggaaaatgagcttgctaaggtgggcaacactacggagctcaaggagtga

SEQ ID NO: 4415 - DNA, 969 bp, synthetic construct
  source 1..969: mol_type = other DNA
gtgattattatgagtgaagacactgctgtgctgttactgtcccacggttcgtcactcccttacgccgaggaagtttttaaggacatatgcgcgaaatttaaggagcagactgagtttgacgctgaggttggctacatgaaagtggccaagccaagcctccctgaggcaatcaatatcctcaaggagcgcaaccccggtctaaaaaggatcattgccacccccgtgtttctggcccctggaatccatacgaacatcgacattcctataatcttgggccttgagcccaaggagaccgacccacgccagcccgacggcaattacccagaaggccactacctctatggcctggaggaggtggatttcgatggagagttaaaactgatcgatgccattgggccgaatccacgactcattgaaatcataaacaacagaatagacaccgctcttgaagactccaagctagacgatgatgcaaagacagccgtcctgcttgtatcccatggaagccggctgaactacaataaagagttcatctcatgcgtgttccagcagtttgaagaacaaaccgattatgtctgtgacttcgcattcatggagctggtcgatcccaacattccaacgacaatcaacaagctggtgagcgaaaatgaagtggaccggctgattgtagtccccgtcttcatcgcgccgggcgtgcacactacaagggacattccgacaattctgggcctgatcgaggatgatggtagcgggcatcaccaccatcaccatcatgatcacgaccacgaccacagtcacgaccacgggcatgaccatgaccacgggcactctcacggacaccaccaccatcatcatgcccacggggatgagaagatggagttcgacggagaaatcctgtatcctgaacccatctgcgatgatgacatcttgatcgagatactcgaaaccatggttaaagaggctttgtga

SEQ ID NO: 4416 - DNA, 399 bp, synthetic construct
  source 1..399: mol_type = other DNA
atgtcagacactgtgcgaacatggcgccatatccagcagcggtacaacctcattggaagcaagtgcacgacctgcggtcaggtgttcttcccgcagcgcgtgatctgtcccgaatgcaggagaaaagggaatatagaggacatccaattttccggaaaggggaagattcacacctacagcgtgattcggacacccaccagtgactttaaaaagatagctccatatgcggtcgccatcattgagctggaagagggcgcaaaggtcactgcccagattgtggacgccgatgttgacgatatacaaatcggcgacccagtggagatggtcttcagaaagatcagggaagatgggcctgatggcgttatcagctacggcttcaagtttaaaatcgtaaaatga

SEQ ID NO: 4417 - DNA, 1158 bp, synthetic construct
  source 1..1158: mol_type = other DNA
atgaccatcaaaaagtatttcaaaacaagaaaaggcacgaagaagagtgtccaggaacgcgattatgacagcgattacagcaacaaagggctccacaaggagtcaagaatcaaaaacctacttaatgacaataaaggaaactatagcatcgtcattagcgccatcctactcatttcctttctgatcctctcgatcattgtgctgaacacagttctggaggaaagggaggagcacaccgacacaatagcatcaaaccagtaccaatacatcatcgaggactacaagcgaaatctgcctaacatcgagcgggaggccttggaagagctgagcttgtatgtcattgagaataagcgcccctgttttaactcccgtgatgacctcaaggagatcatcgatgaaaaactggctcaaaagaatcaggagtactaccagaactacaatattgagattaactcctcaatcatcgggattgaaaacaccagcgatcccttttcctacaagttcaaaacttatatttcaagtgtaaagggagacttttcctatgaggagatcgacgaatcgtacgtgaactgctataacctgaaagatcccgtgcctgtgctcttttgtggtgatgattcgagcttccgaatcgaggactacagtcttttaggtgacagcgactttggaactcatgactccaacttcgaaaatgatgattcctcttccaatcagaaggtattctatggccacagcctggctaaattcctcagaaggcaccatgtggagaactactcattctacgagaatgccagctctccattcataattaaacggtgcccatacgacccgtacaagcatcacggcgatgacaatggccgcatcatgaagaactgccgggacaacgggtactatcacgaaagcgcagatggcgcgtgctacctgtgtaggctggaaggaaagagcgggtgtgaccattatggctttgaaacgttcataaacccccagaagaccaatgagaccggcggtgtctccgcctgcggctctgaccacgtgatattcagtgatgacatctacccaggggtggaggttatttataacagtgaaaatgggttgaacgaaatactgtaccttgaccctcatggacacaaggtgaagtatggaatgagtgagtactga

SEQ ID NO: 4418 - DNA, 1017 bp, synthetic construct
  source 1..1017: mol_type = other DNA
atgtactccagcgaattgattctgtccctcatcctgattatcttcatcatcggcatcatggccaacataactgacagcgtcaatgaaaaggtcctgagccaggaggagctgtcctccctagaggccatcagcatagaatcggtggattatctcttgaacaatcccggaagtccaatgaactgggaggaagatgaggggctgaataatggaattgtatcacggcgaatcatccccggccttgccataaataaaaaatccgtggagaatggcttcttttatgaggaaagcagtagtgacgaggagatcatccctaactccatctcatatatcaagctcttaaagctgcaaagcaactacgacgacctgatcaatcggaacctctttaactcgaccctgaaatcctccataaccatttacccccacagcgatattgacatcatcgctatgggggacgatctggaatcatctagtgatgttgtggcgataaatcgcacagtgagatgtgactaccttagcaattttgtgatctataggttcaacgacttcgagctgtacggtgagaattacaaaaagaccgaactctgcaaccacgacagcaatgtcaatctatctaaccacagcaacgaccgacgctacttctggctgtgcaagaacttcagaatctatcggagttctttgaacaactataattattacctgatttctgactcgtcaataaggcacgcaaacagttactacatcctggaaagccttaaccgtacaagggacgacatggaacgcctcaacgatgaggtgattgaattaaacccgttctttgctgaggatatggtaaacagctctaacgagatttactcaattcattttaaggttccacacgatgatattgacgattttaaaactgtgatggtcgcaatccataagaacatgaccgacgagattgtctccaataaccagctgcggtacgattatttcaatagcggggaggtggacttcgtgctcaagacggcctacagatga

SEQ ID NO: 4419 - DNA, 435 bp, synthetic construct
  source 1..435: mol_type = other DNA
atgagcaccacaatccggattaacaaggacgtgaaagaactgctgaagttgaaatccgttgagacgggggtgtcgcagatcgatctggcaaatcggtacattctatatggcatcaagtacgacgacacccccagtaaaccgataaagtcaatcgaagagatagagaagctcctgaactacgatgagataagagagtctgtcgaagagattgaccttaaagactacgaatacgaaattccccagggcattagcctcgtgaaagagggagaagagaacaaacctatcaataccgaggaagaaattaagaagatcctgaaatatgataagccagagggggacgacgtgtcccgcagcatcgccggtatcatcaagacagaggaagtcactgatgcggtaaagctcaagaaagagcgattaaaggagaggtataagtga

SEQ ID NO: 4420 - DNA, 393 bp, synthetic construct
  source 1..393: mol_type = other DNA
atgattttcctggatacgacctacataattgcactgatcaacgaaaacgacaagtaccataagaaggctctaaaattgatggaggacgtggactacgaaaagaagatgactaacagtgtcgtgttcgtagagtcactgaacatgctcgacaaacgcagcacacagaaggatatcgataacattgttaataagctttatcagctggacaaaatacactgtgtcaatagcgccaatatcaagaacagcctcaatatctttaaattctacaatggctcgatcaactttgccgactgcaccatcattgactccatgatcacatatcggatcaacgagataatctctttcgattccgactttgataaggtgaaagggatcaaaaggatttatatttga

SEQ ID NO: 4421 - DNA, 2289 bp, synthetic construct
  source 1..2289: mol_type = other DNA
atgctagttaaaaaaatgctgcgagacctgtcggaccacaagattcagtttgtatccatcttcctgatggccttcctcggcgtgttcgcctttaccgggatcaatggtgaggtggttggaatcactgatgtgtcaacacactactacgaagacaccaacctggctgatggttggatatatggcgagaacttcgataaagacactctaaaagatatcaaaaacatggaagaggtcaagaatgcccaccgggagatggtcgtggacacggtagccaactactcttcggaccccgacataactctccacatcctggaaggaaaacaggagatctccaaattccacctgtttaaaggaaaagactttaaccctaacgacaaggaaggcatctggatcgacaagcgctttgcagatgcgcgggacctcgatattggagataagatctccctgaaattcgatggaaaaaccgtgtctaagaccatccgaggaatcatctacagccccgaatatgtctactacatccaggaagggagcatgatccctgacttcagccaagtgggctatgcattcatgccaagtaagggggctgattttgacatcgagtacaacagaattacgatcgacggcaagaaggagctggacgcgaaagagttcagcagtgaggtcagtgagctgttaggccaatacacctacgcccagttcgtgccacgcgaagacaacgtaggggtcagcacattgcaggatgagatagaccagcataatatgttttccgggattttccccattatctttgtgatggtggcccttctgaccctcttaaccacaatgagcagggtgatttccagtcagcgcacacagattggtacactgaaggcgatgggatacgacaacactacgatcattctccattatctcagctacgggttcttcctatcctttgcaggctccctcttgggccttataataggtcctctcaccctgccctatctcttctacccaagcatgtcagcaatgtatagccttccatactggggtcccgcatggaatctcagtttcttccttgtggccgctcttatggtgatcatctccgtgcttgtgacgttcatctctgtcaagacaatcaacgatgagaacccggctgactcaatcaagcccaaagtgcctaaggcagttagctccggaataatggagcggacaaagatatggaaaaagatggggttcaacgggagatggaactacagggacgccaaaagaaacaaggtaagggcaatcatgagcatcttcggcgtgtttgcctgcgcgttgctgatcatgtccgcctttggaatgtacgactctatgaatgacgttcaggactggcaatacaaccagatttacaattacaacagcaaattatatctggatgagaacattacggatgctcagctgagcaccgtcgtgaaggacaccaacggcgaagagatgatggagcaggccattgaggtcaagtatcgggggaataagcataccgcttcgatgacggtctataacgatagtgaactctttagaccaaccgacatcaatcgtaactacatagagatagatcccgatggcgttgccattagcgaccggctggctgaagtcttagggctgaaagtgggggataaggtgaggtggcacctggtgggcaatcctaaatggattgatagcgagatcactcagacctattcaactcccttcggccagggaatcatcatgtctgaaaagacctatgaaaagtatggcggcgatgactacaattattcaactaatgtggttttgaccgaggataaggacattaagaactacaccggagtcaccagtgtctcgacaagggaagatattgtaaagggctgggaggacatgactgaagccatgaacctgatggtttatgtgctgataatctttgctgtcattttggcggtggtggtgctgtacaatcttggcctgctctcatttacagagattcagcgcgaaatcgccactctgaaggttctggggttcaatacaaaaagcttgcgccgactgctgctcactcaaaacctatggttttccacaattgggttcattttggcaatcccaggtgcctacattctcatggaggccatgatgggcagtaccggagctgactattacttcccgataaatatctatccgttgaactttatcatcagcctgattatgacattcggtctgtccattcttgtgaatctgctcttttcaagaaagattaagaaggtgaatatggtcgaatccctgaagagcaatgagtga

SEQ ID NO: 4422 - DNA, 705 bp, synthetic construct
  source 1..705: mol_type = other DNA
atgaccacaatgatagaatttcaaaatgtgagtagagagtaccagagtggcgaccacatattaaaggcactggacaaccttagcctaaagatcgaaaaaggggagtttgttgttatcctgggacccagcggggcaggcaaatccacatttctgaacctgctgggaggcttggacaccgccactagcggaaaaattatcgtcaacggggaaaacattgccgattacgatgataatcaactaaccaaatacagggcgaaggaggtgggcttcattttccagttctataacctgatcccaaatctcaccgcaaaggaaaacatcgagcttatgtcggatattaccaatctcaaggtggacggcaataagatcttggatagcgtcgggctcttagaccatgccaaccagttccctgctcagctctcagggggagagcagcagcgcgtctcaatcgctcgggccattgcgaaacaaccggctatgctgctgtgtgacgagcccacaggtgcactcgactccaatactggtgtactgattctttccttgctccagacaatgtgccacgagaagaacacgacggtggtgatagtgactcacaacgccaagctggccgacgccgctgacaagctgatccgaatcaagaatggccagatcgaggaggtgaaaatcaatgaaaacccactggatatcaacgaaattgagtggtga

SEQ ID NO: 4423 - DNA, 1332 bp, synthetic construct
  source 1..1332: mol_type = other DNA
atgaagatgattcgtcaattcggggaatcctccatcgctctggtcgtcaacctaatactgttcttattcaacggtatcaaatacatctttaccctgcccaatcggatctacgtctatataaagctctttttagaagacacggatgccgtattgaaggagagcctgattgctctgtctatctgtgcggttggggatctctgcgcagggatcatcctggggaacatggaatttttcctaaagacctatcccggcctgatggtcatcattccaggggccattggcatgcgaggaaacatctttggctcgtttggcagcaggctgagcacacacctccacattgggaccttgtctcctgagtttaaacggtcagagatcctgagcgagaacattacagcatccctgatcctgactatggtactatccattctgctggctgttatcgctaaaggcgtctgcattgccttcggatttaaaagcataagcatctatgacttcgtgcttatcagtttcatcgccgggcttatttccactatcattatgctgcctatcacgatgttcatcagtctgaagagctttgagggaggctgggaccccgacaacatcactaccccattcattgccgctgtgggagacttcttcaccctgccagcaatcattttaagcgtgatcattgtgggattcatctccataatccccatagtcaagatgatcgtctttgtggcggtgatctttgttacaatcgccgccctcattgcaggatacacagccaaaagcgatgttcggcatattgtgaggcagtccacgcccgtactcttcatttgctcactcctgggaacctttgccggtggcattttgaacgattcgctgacaaccttgctcaagaatcagactctgctcacgcttgtgccactcttctccggggaaagcggcggtttggtaagtatattaggcgcacgcctctcatcgggcctgcactcaggcctgatcgaccccgtgctcagacctaagaagcataccgtcgagaattttgtcgcgatactgaccctttccgtggtgatgtacccggtgatcggcttcctcgctgagtcaagcaccatcgccttcggcaatatcggggtgggaatacttgaaagcatgtcaatcagcttcttggccggtatgattctgattctgctaatgttgctggttgtgttctacatctctaccatcagttaccgcagaggactggaccctgataatattgtgataccgctttccactagcctcacagacagcataagtacactgattcttatcgtggtgagtcttggtctcctgaactatgtgttttga

SEQ ID NO: 4424 - DNA, 609 bp, synthetic construct
  source 1..609: mol_type = other DNA
atgcctagcgtgaaagacattctcatcgagatgaaggacatgtcggagctgatggtcgacctggcctattccgcggtgctctttaacaaccgggccgcggctgaggaggtgatcaccttggagaacaagcttaacagcatgaactacgagattaaaaaacagtctctggttgccgcaagaagcctagaggacgcagaaaagctaacaaccttgctggagatcgcagaagctgcagaatccatcggcaatgccgctaaggacctggccgacctcacattgaagggattcgaaccccacccagtcttcaaaatggtgatggaggagagtgaaaagaccataatccgcctcaatgtggacgaaagttcagttctggtgaacaatagcctgggggaccttctgttactcaaccgcactgggatgcgaatcatctccatcaggcggggggattcttggatttacggcccggataagaacacggtgatcatagccggcgatgtactgatagctaagggctcagaggccggtactgagattattgaaaaacttgccgagggagagatggatctggaagacctggtcaatatggaagacttcattgatgataattga

SEQ ID NO: 4425 - DNA, 1365 bp, synthetic construct
  source 1..1365: mol_type = other DNA
atgatgatccacctgattggtattgggaatgataaaggaaacatcacgctgaatgctttcaaggcgatcaaagaagcagacgttattatcaactacaatgatatcgaccttagtttctttgacagcgagattaaggacaaagagatcatcagcgcgattgacttgatcaacgacatagatttggaggatgatctcgatctgaacgatgatgtagccgagaacatcgactcggatgaggacctggatagcgaaatcaacagtgacgacctggaatctaacattatcagtgatgaccttgagtctaatattatctccgatgacttagagtccaatatcatttccgacgacttggaatcgaatgtgggttcagatgatctggaatccgacattgacagcgatgacagctctgacatcgatctcgaagatgacctaaagagcaacccattattggagcgcatactccaggaaaacttcctgattgagctagccatcagcaagagcttggaatccaagcaggtggctctcatcgtctcagatgacccgaatatcctcggcctctccaatcgcttcctgcaaatcaagtccaagtacagcgacgtcaaatacaaaatatatcctggggtgtcttcaataagccagagcgcatccatagtgggggcacctctgggggactttgccctgatagacctctcaaacccaatcacatcgctgagcgaaatcgaggacaaggtgaagcacattctggacgccaatctggtcctggccatcaagaaccctatcgacgataaacgggaggatggaagagaggcttacaacctcattaagtcaatcataaacgaatacaacgacgaactgctcactgcaatagtctatagtgacggctattactctatcgatgagtttaaaaacatctacgacgaggacattgacgaaaattcaatctttttcattggaaataagctttcctacattctggaggaaagtatggtcacctcctccgactatattgtggagaccaaacttatcagttggtctattgagttctttgagaggtacctgaacggcgaggtgccaagaggccttgactatgactgcgatttccttccctgccatgtgaacctggaagcctgcgacttttgctactgtcccttctatccctgcgccgacggggttacaggcggagaatggattaaggacagggatgtgtggagctgtcagcactgtgattggatacacctggaggagccctgtgtagctatccgagagggcctggatgacatcctgaaggagattgacgatttgaaggataaacatatcgagctactgaaattacggcgtaagagtctgctcaagaccctcaaatga

SEQ ID NO: 4426 - DNA, 786 bp, synthetic construct
  source 1..786: mol_type = other DNA
atgaaaatatcacggatcatcctaatcctgttgctctttgtggtatttttcgagataggactgttcagctcatataccatcgtcaatgccgaagttccaaacccccaggagctgtgggatatgcaggtcaacactgtgagttcattcttcagccctgagaatgtcggcggccttctgattaaggacccagacaacattaacgtgacaaataaatacgatctggccacagaactggcggaagtggccgaggtggatggcgtcaatgtggaaaatatgacaatcaccaccagtgcagatactgacgaggagccattcaatgcaacggtaacggccttcggatattccaccccgaaaggaaattccggttccatcgtgattagcggacagcccgattataagattgtggctagcgtgcagatcaagcacaccatcaacggctacgaagcggatttggacactatcaacattgagtccatcttaaaggtctacgacagcaacgacgctaagaacgttagctactccggttacgactcaggacccagcggcgcctcgcaaagctacagctattccagcgactcgtccagtagcaacgacaacgcctacatctcgtcagattcctccagcggcagttcaagctatgacagcggcgcatcttcgtcatctggctcctacagtggagggtccagttacgatagcggggctagctccgggtctgggtcttcttctgggtccggcagtggggacgttgtgattaacctcctcagtcctatatttagctttatttga

SEQ ID NO: 4427 - DNA, 1974 bp, synthetic construct
  source 1..1974: mol_type = other DNA
atgacagctgaaaccctgcttaaatttgcgcgcaaaggaatcatcctcacaccaggggcgtatgatttgattctaggctccgataatcctctggacctgtccagctcaattattctcaagttaaaaagcggaaagtactctaatgaggacctggtgccggtcgatgagaagcagataaaagagatgatgaaagcgctgggcatcagtgtgaaggagaacaagggcctcgatcatggctcgctggacgacttcggtagtcggacgagtggcgagggtctggaacgcaagattgaaacaagaccggaaaagactgtggaaaaggcagtggagccccagcaggccgtggaaactagagagcagaaaccacagcagaccttcaagcccacacaggaaaaaactgtggagaaacccatagagaagccacaacaaaccttcgagcctaaccagcaacggaccgtggagaagcctatcgagaaaccccaacagacattcgagactcctgctaagcaaacccgggcagaaaaaccaattaaacctcagattaagcccattagtgcagagaagcccacagaagcaccacagaggcaggaaactaaagaaatcgaaaagaccatagaaaagcctaaatctgataagcccaaagttaacgcaggctatcccagtgatcacattgtgaagatcgacaatgttgaggtgtctgaagagacgaagaagaaataccggagaaacctgacagagtcgaaggtcaactttgacgggttcaaggtcctaaaggacacgagcaacaagtcatacacaagcggggagatcggaaaccttatcgaatatttccagaacaggtacaagaagcttagcgacattctgtccaagaggcccgaactccggacgtggcagaaaatcaacgagatcaccgagactcagactgacctcaatctgatcgtaatgattaccgacatcaaaagcacgaaaaacggccattacttcatagaagtggaggacgacaccggctctatgcccatcctggtaagcaaggataacgaccagctgattcgagccgccaagaacctgatgaaggatgaggtcattggtattgtcgctcaaaaaaggccgggcaatgagctggccatctgtcaaaacatcatcgatccgggcgtgccccgcatcgctaaaaaggaagtgaactttggaaccgtatttacctcagacattcacatcggaagctccaccttccttgaagacgcctttacaagattcatcaaatggattaatggcgatttcgggagcgaggagcagatggagatggctaataacgtgaaatacatgatcatcgggggcgatatcgttgacggtattggggtctacccaaatcaggataaggagttggcaataaaggacatcacagcccagtatgacgaggccgcccggctggtcggcgacatacgtagcgacgtaaagatcatcatcactcccggaaaccacgacgcctcacgagtggctgagccacagcctgccgtccctgagaagtatgcgaaatccctgtacgaattgaacaatgtggagtttctctccaacccaagtatggtgtccctcgacgggctagaagtgctcatttaccacggtcgcggaatagatgatatggtgatgggttccaatgacttttcacacgagcgaaatgaccttgtcatgaaagaatttttaaataaaagacatttggcccctctctatggggagcgcaccccactggcttccgagctggaagatcacctcgtcatcgatagggtcccggatgttctgcacaccgggcatgtgcacataaacacctacacaaactataagggaatccattgcattaattcgggaacgttccagactcagaccgagttccagaagatctacaacattgtgccaacccctgccgaggttcccatcatcgatgttgggggcaattacaagcagttgaagtttatagactga

SEQ ID NO: 4428 - DNA, 588 bp, synthetic construct
  source 1..588: mol_type = other DNA
atggaaaaggagatagtgaaaagcgtcgtggagatgagcgcctatgtgttcgagcggggccttgtaagcgggaaggccggcaacgtgagcgcacgcttcaagacagaccatggtgacatagtcgccatcacgcccaccctgaagtccctagcggacttagaggataaggacattattctggttgattcagagggcaacaatctcacgaaaggcaagccatcctctgaactgggaatgcacctggccatctaccgagaaaagccggatgtgtatgggatcgtgcacacccactcaccttacgcaaccggattcgccttttccaacaagagaatcaagcggctggaggggttcgggcagatcaaatcggaatacattaaagacatcgactactataagcccggcagtgaggaactggctaaaaatgctgctgaagcattgaaggaagaggacgttattgtcctcaggaaccatggagtcatcgccactggttctactgtgaaagaggcggccacacttgtagagtttgtggaagagagtgctaagacccagtttgtgacactcgtcttgaatagcctggatgagaaatga

SEQ ID NO: 4429 - DNA, 492 bp, synthetic construct
  source 1..492: mol_type = other DNA
atgaaaatcgaatttgacaccataggcacaatccactcaccctttaaagagctagaggggatgcctatccagccaaccggtgcgaagggcattaaaggggagatccacattaaagatgaatataagcccggactcaaggatatcacggggtttagccatctgatattaatctaccacctgcataaaaccaatggtaatgcactggaagtgaagcctttcatggacaacaagacacatggagtcttcgccactcggagtccgaagcgcccaaacaacatcggcatgactgtggttgccctggatagcgtggacgatgactgcgtcctccacatatccaatgtagacattctggatggcacgccacttttggatatcaagccctacgtgccccaactccacgaggacaccattgtggacctgaggattggatggttcgagaccaaccacaaaaaggctaagacacagaaggccgacgacagattcatcaactga

SEQ ID NO: 4430 - DNA, 249 bp, synthetic construct
  source 1..249: mol_type = other DNA
atgacaaatgagacttttgaggaggtctcacagatactcaagcacatcatggagaacccgagtgtgccacgaaacatcaggcgcgcggcagatgaatccttcaacacgctcaacaatgaagaagaggacgaaaccgtgcgggccagcgctgtaatcatcaaactggacgagataagcaatgaccccaacattcctgtgcatgccagaaccctgatttgggagatcctgtctaagctagaagccatttga

SEQ ID NO: 4431 - DNA, 357 bp, synthetic construct
  source 1..357: mol_type = other DNA
atggtcaagaacgaaaagttcataacagtcatctgctttaataaattccacggaaagaagatcttcaaaatcgggagcattctcaagctggttaaagagcccgacaacgcctatgacgccgaggcgatccgaattgagatgagatacgcaggtaaggtgggctacctggcaaacagcgtgaagacggtagtgcggggcaccatgagtgccgggagggtctatgataagataaatgatgaggctgcctacgctcaggtgaagttcatctcaaacgaaaatgtgatcgcccggattctcgaggaggaagagatcaaagacctaaaacgcgatccagaatccgacctgaactttatttga

SEQ ID NO: 4432 - DNA, 1008 bp, synthetic construct
  source 1..1008: mol_type = other DNA
atgtcaaacacagagaaaatcaatgtgaacgtcgagtccaataaagacaaggggttcagtgatgacatcaacacaatcttcatcaacttcaatggtctaaacattagcctggagctgatggagaaacagtcctataaaaatatggacatcattcctataaagacggacagcttcgcaaagaaagacttcatcacgctgaagaaaggctttgagatgggccttgtggaaataaaggagctagagaatgaggaggtaaacactgtcatctgcaaaaacgatgccgtggtgcccctgatcctcatcgacggtgatgagatcatcggcgccaagcaaaaccggattatgaatgaaagcctgctcattccggcgaagtcgcaggtgaaaatcccagtcagttgtacagaacacggccgctggcgcttcaagagtaacgagagagagtttcagcactctgattactccctgaacttcgagagccggagaatcaagtcaattgccagaaacgaatgccgagactaccagtctgatgtctggagtcacataagcgatctcgaagacaggcactcctttcgctcaaggaccagcagtatgaacgacaattacgagcattccaagaccgctcaggacgactacatcaagaatctgatgattgcagatggagctaacggtctcatttgctttatcaacggggaatttaaggggctggagctcttctacaaccacagcatctataaggagtactacgaaaagaccttgaggagctacattattgaagccatctcgtatggagggaataataccgtgggcgaggagctgtttcgagtgattaatggcgaaatgaacgacttgtctagctccgaatttatcgagtatgaaaccgttggccttggaaagaacatacggttcgccactaaaggaggatcagggtctggccttatattcgaggatgaattagttcatatgacttacttcaaggaggattccaataaaaactatgaaattctgtga

SEQ ID NO: 4433 - DNA, 1026 bp, synthetic construct
  source 1..1026: mol_type = other DNA
atgatcaccgagctgtactccaactcaatctatatgttactgacaatcctgctcttttccctggcagtggatctgcttctaggtgagttcccaatgcagatccaccctgtagtctggatcggcaaaatcattagctttttcaagaacatcctaatcaaatacgacaataagatcgctggattgatcctcagtattgctgtcatcattgtgtcaagccttatcgtgctcatcccaatggccattgcaaggtacctcctgccctataacgatatgatgatttatctcttcaagctgatcgcgattttgctgctgacttcgaccttttcggtcaagctgctgctggactctgcccgggacgtggaaaaggaccttcgcaacaataacttgaacaaagcacgtcaagccgttagctacctggtgagccgggacactaatgaattgaataaggagcacgtcatatccgctgtcatagagacactcagtgagaacataccggactcctatgtgagcactgtattctactattcaatcgttggaatcatagctagcctctgtggcattggagactttgatgtcatcattctagccgttctggccgccttcatccaccgagtggtggatacgatggactccatggttgggtacaagaccaaagagctctacaatatcggttttatccccgcgcatctggacgatgctttaaactacatccctgcacgcttctctggcgctttgattgtggtgtctgccatgtttctccggctgaattggaaaaatgcattgtttatcatgagaagggatgcaaacaactgcgacagtcccaatagcggctacacgatggccacagtagcgggcgccctgaacattcagctcgagaaggaaggggtgtataccttaggggataacataaatccaataaacgtggactgcattgaaaaggccgtggacctggccagactgaccattttccttgtgacaattttcttcatgttcgtcttcatggatctgattcttcttatgctgtga

SEQ ID NO: 4434 - DNA, 465 bp, synthetic construct
  source 1..465: mol_type = other DNA
atggctgtgatagacgaggagcaggtgagggaatggttaatggaggaagacatgattagagagaagatttacgatgaaaatgccaatttccactacatcatcaacttcccaaacaacaatgcaatggatgtgatccagccccggaccaaggaggacgtgctccttattggctgcgcaaccgaagtgagccaggttgagcaggacatgattaaaaacacggacaaggccatcaatcaggagttcatatggaacgtacgctttgccctgaacgaaatgctactcgactttgagttggagcacccggatgatcaactcaagcgattcatcatcactgaagacattttcagcgatgggctgacaaaacatgtcctggtcaagtccatcaaaaaggtgtttaaagcgaagctgcaatgtatctggctgctgggcaagacatatggaaccgtccagatgaagaaagagtga

SEQ ID NO: 4435 - protein, 388 aa, Methanobrevibacter ruminantium
MTNIFEDLQEESVGVSIFKDKKPLDHRFLPENLPHRKKQITEIAKHWIEALNGNTPSNITIYGKTGTGKTAAAKFAKEQLIEASRDKNVFIKVEYIRCTDFTTEYQVLTYLCQRLGRDVPNRGWTKGEIVNTFRDILRRNAFGRNLILIVILDEIDILLEKDGDGILYTLTRTDNIAILSISNYLDFKQFIKPRVASSLRDKEIVFPPYDAEQLADILHERSELAFEENTLEESVIPLCSAMAAKEEGDARYALDLLENAGDIAVEEGSEIVKGKYVRQAKDVIEYNKVKDVIITLPTQQQRVLAAIMKLTQDNEEITSGKLFEVYKDISKGDSVTYRRIFDFINELEMLGIISTNTISRGRGKGRTNIIKLQTDSKLIQDNLSAVLY

SEQ ID NO: 4436 - protein, 234 aa, Methanobrevibacter ruminantium
MTRLIEFKNVNKEYKSGDYILKAMDNVNFTIDEGEFVVILGPSGAGKSTLLNLLGGLDSVSSGEIIVNGSHIESFDDDQLTNYRARNVGFVFQFYNLIPNLTALENIELMKDVVDFDINGLAVLDAVGLKDHADHFPAQLSGGEQQRVSIARAIAKRPSMLLCDEPTGALDSKTGALILALLQDMCEKLNTTVVIVTHNAILSEAANKVIRIKNGQIESVIVNEMPKKVSELEL

SEQ ID NO: 4437 - protein, 755 aa, Methanobrevibacter ruminantium
MLKRKMLRDIWNYKVQFISIFIIAFIGVFVFAGLTAEADGFEASIDSFYQRSNLADGWIYSNYLVDDFLKQVYLLGATTSMERQLVVDSQAELDGKPDITLHFVENNTISKYYPLEGNELNISDSEGVWLDKTFADARNLKIGDTIAFESNGIKIEKKIRGLGYSPENVYSLVPTQTVPNYTARGFAYMSYKAFPSDNITYNVLNVKFDGRPEIFSELLSYRLDGYYELYLPQSNQYSVNAVSDSIAHQSSLNAVFPILFTLISMLMLSVTMKRIISNQRTQIGVLKANGFSNRSIAIHYMSFGFLLVTSGSILGAILGPIVFHFVVHESRIYYFKFPVWAYVGLERFIFVIVIISLISLIVSYLSIKSIVNEPPSQIIKPKPPKMVSSGFIEKLAIWKRLSFNIRWNYRDIKRNRFKSLMTIVGVMGCTILLISGFAVYEQMEISKDWYFNDVNHFESKLVIDDNTDLSQIDSIAHKVNGDEIMESSIEILKGDANFASLLVLNDTDLITMTNDNREKIDIPKNEVSISKKMADILDLKVGDTIDCHLLDSNKLVKIRIDRIHSTPFTQGLVMSADKYEELGFNFTPTSIITSEHVNKSYDGVKSTIYSEDMVRGWDQMQKTSMMIITSILFLAIVLAVVILYNMNLLSFIEMENDIATLKVLGFKSKYLTKLLATQGFFFIIVGFILGLPVAYYILTLLMPAFGNKIYLIPNISVLNMAFSFLIIVSVFIVMNLYFSRKIRKLDMVDALKTFE

SEQ ID NO: 4438 - protein, 745 aa, Methanobrevibacter ruminantium
MKNRMILIISLFLISLLAIGAASASEDITDTIEAPAADEVVTVDSEIQEIETVDNNLEEIETDTNNIEEVEAADDEVINETAETEIKDETEITDETIISEEKVQIANDEKIVQDGLLGFSINLTDLLGGESSSLNLSKLLSGDNLNLNLSKLLSGDNLNLNWSELLSGDSFTLNWTDLLGGDSLTVNWTDLLGGESTTLNWTDLLGRDSLTVNWTDLLGEDFTLNLTDLLGRDSLTVNWTDLLGGDSLTVNWTDLLNGDSLTFNWTDLLGDNLTLNMSSLLGGESTTINWTELLGDNLTFNMSSLLGEDFNLNMTSLLGEDFKLNLTNIFGDNLTAIFGENLTNKLEELFGDDFTINMTDLFGEDLALNMSDIFGDDSIFNLSNILGESTTINWTDLLGEGSTLNISKILGESLTLNLTDLFGESSTLNWTELLGGESLTLNWTELLGGDSFTINWTDLLGNSTTINWTDLLGRDSLTVNWTDLLGGDSFTINWTDLLGGETLTINWTKILGNDTSLIDNITSLIDDISPFVDNLTTAVKDLINKFLKEEKTVSVINYEDMTTTAFDSKIDGRIGKYFVVKLTDDKGKALSDKFVQIGFNGRIYNRTSDENGTVKLQINLGYKGDYTFAICFLGDEKTNGSFAVAKITVKKQKAKLTGTAASYKASAKNKYISATFKTTAGSPIAGKKITFTINKKTYTAKTDAKGVAKVKVSITNKGTYAFTAKYAGDDTYATITSASKKLTIK

SEQ ID NO: 4439 - protein, 319 aa, Methanobrevibacter ruminantium
MYFKCKLKECNIIFGHNNVISIKDFEKEDIKFILDEAEKLEDIAQSKEKSEELSGKILGLLFYEPSTRTRLSFETAMKRLGGDCISLGETSNSSVAKGESIADTAKMFESYCDAIVIRHDLEGVSRFLSDVIDVPIINAGDGAGQHPTQTLLDLYTIRKHFGKIDGLNIALLGDLKYGRTVHSLSYALGMYDVKMTFVSPEELKMPKENLLDLEKNNIKYKETSNLKDIIDEIDVLYVTRIQKERFPDIEEYEKIKGAYLINKDLLEGKELIVMHPLPRVDEIDYDVDNTKYNKYFEQAANAIPVRMAILKNLIRHRYE

SEQ ID NO: 4440 - protein, 167 aa, Methanobrevibacter ruminantium
MKTAIIYASKTGTTKKIAKALVDKIDGEVLTIPIARAKSACLLKYDFVIIAGSIHYGRIQGEIKSFVNKNYKTLQGINYGLYITCTNQGKAEEYLNKSFSEEIVKSAFVTACFGAEINPNKGDMITKRIINSNLKRFKKENKEPPSIDWELVDEFADKINKRTIKKK

SEQ ID NO: 4441 - protein, 268 aa, Methanobrevibacter ruminantium
MKFLRFKKKINELGKDNSIKIGFYDGEKIIELKGDILDYFNSNLDEIKENMIESYSLEDIEIEAPVNPSKIICIGLNYKDHAKELNLELPKKPVIFIKPNSALNSTEKNIIFPNISKQVDYEGELAVVIGKATKKVSKEEADDYIFGYTIINDVTARDFTLGDGQWTRGKSCDGFAPIGPFIETDLDPLNQRIVTKVNGEIKQNSNTSMMIFSPQEIIEFISQTTTLNPGDIIATGTPPGVGPMDAGSTVEVSIEEIGILKNYLIKEE

SEQ ID NO: 4442 - protein, 483 aa, Methanobrevibacter ruminantium
MNQNAQWNSIITFILAMIGLTIGIGNIWRFSYVLYSNGGGSFFIPYFIAIMVMGIPFLILEYGLGFSLKKSFSKLMHDIRPEFEVIAWMLVIFVFIVVIYYMVIIGWDFVYFLNSFSFGWGSDPNSFFMTYVGGTREISQIGRLLLPTLICTTVLWIIFWFVSNRDVDEGIGKISTILMPLLFIIMIFIFLYSFTLPGFDIGIKTLLKPNWSLLLDIHIWLAAFGQTIFTLSIGQAMVYTYASYLPRNSKLVDEVLLVVITNTLYEVFIAIGVFSILGYMSLKSSIPIEKLISEGTGLIFVVFPKIFSEMGFVGQIIGPLLFLSILFAGFTSALALFEPFLSSLCDKFNLSRRKGVTILVIVAVICSIPFSTGISSYLVGIVDKFVNDFGILILIGVQAIIFGWFYGVEKVMPVLNELSTFKVGKSWVFTIKYLLPVLIIIIWVNGVVGLFSNTNSFELIVDLIITFVVVGFSVLFTKLGVKE

SEQ ID NO: 4443 - protein, 249 aa, Methanobrevibacter ruminantium
MIFYYTGTGNSKYVAETIAKSNEEEIISIPDCIRENKFTFDVKEDEIIGFVCPIYSLGIPDSVRIFLKKLRLNYNKKPYIFLVATYGSTVGNIKSIVSKYFKKIDGFFNVKMVDNWVPKFDLTDQNYIKQAEEYGEKRLEEVNNLILLRKTGKYLENENKIFSGFIYKVGYDFIRNTSNFKLDDNCIGCGICRNNCPTNTIKIENKRPVWKRKKCDMCFACLHRCPQFAIHYGKRSIEHGQYLNPNVKL

SEQ ID NO: 4444 - protein, 287 aa, Methanobrevibacter ruminantium
MKIKIAVPSKGRISEPSIKILEKAGLGLKDSTNRKLFSSTYNENIDVMFARAADIPEFVDEGICDMGISGYDLIEEAGADVKILTDLQFGATKLVLASPENSEINTKDDLKDGMTIATEFPNLTRKYLEENNLNIKIVKLTGSTEIAPFIGIADAITDLTSTGTTLNMNHLKIVDVILESSIKLIANKNSYTEKNNLVEAVSTSIQGVLEAERKKLVMMNVAKENLCEVQKVMPAMSGPTISQVLSEEETMAVQAVVGEDEVFDLVNKLRNAGARDILVVPIERIIQ

SEQ ID NO: 4445 - protein, 67 aa, Methanobrevibacter ruminantium
MSIPVAPIGRIIKDAGAERVSEDAKKELNAYVTAQAEAVAKKAIEFAAMAKRKTVKAEDIELAIKNL

SEQ ID NO: 4446 - protein, 339 aa, Methanobrevibacter ruminantium
MGRRKKQDSTLDSYFPDSDLIEEKKKKDEACKICGNPIEDATFQRCRKCLNKLALIDDLRELLEYVSPGESFREIDLINKGFKSLKLNILISKFLKEQLILINLDGLFTLNNIDFLNAFIKKYGEKEKPLKETDYLIVRDDKSAFYIDVNNYSDYIKIRFNPRINKWQVDFFNENGLANTKSFIDSNDANKEAIYYIKQLGVIGSSADDKKEEKSDKRLYSSHEGIYYSPSRGMWGAKVKGYKGFKFIGHFSSEEEAYEARCKYLENKERTRQKYISEKRGLKSGLRNQSSGELIYFSKQKGKWIVRLKNKEGQIVNVGQFDTEEEANKAKEEFIKDNS

SEQ ID NO: 4447 - protein, 106 aa, Methanobrevibacter ruminantium
MSELKLDLVFDDYQIKRAKPARGSSVIHVNKRWIGKEVSIIPLPFDVDEKFIDETKGEDGLYHLELAVKEIFSKTVSDRKDVGFFYLKESLLGLFFLIIEAPDIVY

SEQ ID NO: 4448 - protein, 487 aa, Methanobrevibacter ruminantium
MYEKEDILIDYINNEINTVPFSLNDKLKIRNEKFRCREEFYEIKNYVDDFLEGNYTNRYIVLPGLRGLGKTTIIYQLYQYLLREKEINHNQILYISCDDLNDYMDINILDVVNCFLKLHHNSNLRTLDKKIFIFIDESQYDSNWAGAGKRIYDKTNNVFLIFTGSSALNLEYNADSARRLLKKSITPLNYGHFLKLKYGFHYDEFSDALSDLIFLGDEKKAIQCEREVYSKLYNLEGYNDNVWDDFLRNGGFPISFYEKNDDNVSQRLREVVKKVLISDIANISTISSEKYINSIRLLNFLAVQKPGDISQNKLANFLNVSPTTVKGIIDLLEKTHLIFHTEPYGSAAKRSKKSWKYFFASSSLKHALVKDLGSSMRDVKSYEGILLENLVASTFFNWTNRKNISFNLFYDANDDEKNKTTVDFIIKEGFNKPIPIEVGIGKKGDKQISKSISDYRADYGIVISNKTKFIERQGNVIYLPPRSFSFL

SEQ ID NO: 4449 - protein, 1281 aa, Methanobrevibacter ruminantium
MKLYKNSIIILLLILILSIGAAAAVENDYSNADLDISNDFVLSDNSNEILIDSSGSLDDSSSALVSEGSSNGLDSYYSNDLVLNDSLSSRSSVIEDSCSIDSTTIEDKALEKSLSSNELAEGTKTYTDLLKDIKSAKNVLNLKYDYIYDSTIDKSLKKGIVLTFDEDYELTINGNGHIIDGNGIAGGFNFENGEFVINNLSFQNCKISSLILTSCDFTTNYVTFSNNYDKSSGACVYLDNSYFYSSHDNFIDNYAPSGSAIYGECSVIDVYDGLFESQKPIDWSFIYGWDETEIYIEDCLFRNTVSNYSTAVYGDYIIEISNSHFTNLFSKFTGGAIGVRNASLTVEKSEFNNVSSLRNGGVIYADMNVDEEKSSEETIIKDSSFVNSKSDFGGAVLQLGGKLKIYRSNFTENTANYYGGAIYTSNVSFYTSKSKFSNNVANEMKGSAIYFDNGDLKIENSNVLSNPSCEGAIYIYDSFYNISGSTFSNNDVAIHSFFDRTRTVKNSKTGKSTTVKSSLNNNTWGGDRNKLNNVEYPYFVSNLGQDIILNPVKINATIKDKYFNLVDLGLVTPVKDQGDSGACWAFGGAAALESAILKATGVSLDISENNIQSAGLRYSLYGKPSLTEGGYDYTALAYYLSWLGPNNSSIDEYDQFGKISPQLFSEDNYHILDVIFLDPANTSSIKDGLIKYGALSASANGADSDSNDFFNEKTYAQYCNDDEASANHIISIVGWDDNYSKNNFLITPKGNGAWIVKNSWGSDWGKNGYYYISYYDESLRSCYAVAYLLNNTLRYNKLYQYDLTNYDDFDDGDYDGVIYSNKFTSNGDDLIAAVGTYFEYEDDDYVISVYVNGKKAYQQKGTSAFVGYNTIKLNKYIAVNKGETFTVAISSSAMPYVDDTRIHLPKGSSFLTVDGEQIDLSQRGQIACIKVYTFNDTKITRDQSTYYGSDKKLAIESELEGTTISLTDSNCKSLGSAKVVDGVAQFDLVLGPGTYFYTSSYAGEKIINSFKVFSTIGGVSNKNIGYKATASFSLSFKDENGEILNNSQFTYTLDGKSKTLTTLDDGTYNISFKNLAIGTHKLSVKNLISGQVSNATIKVVSRFSGAKDISMFYFDGTCYKVRIMGNDAKAVGKGQTVTVVLNKKTYKLKTDANGYISLKIPNTLTPNGAKAKVYSIKMTYAGQSLSKKITVKQVLKTNSLTVKKKAKSFSIKVTLKGKTVLKYKVLTIKFKGKTYKVKTNAKGIATLTLKKAVINGLKKGGKYTFTVTYLKDTIKATVSVK

SEQ ID NO: 4450 - protein, 168 aa, Methanobrevibacter ruminantium
MNKKLIEYLIIATVIILILYGCYSLIDYQSNGYQFRMVNATDSMNISCPSSSAYSVSGDTVEFRNGLNSFYNMDVSKLNSSDGKVKNILNQYSKFHKSGTLDLKNETCYVLTVELEDDKGFNYHSMIISVDSFDKDSLSFNKEATVYLFDGNNREFVVDTVYGSQVVI

SEQ ID NO: 4451 - protein, 312 aa, Methanobrevibacter ruminantium
MSPYELIKDDGEVVNLGGSPDESQDFDVSLERLNDKSLADSDGDGKHDVFISYSTKNSDIANEICYLLEKNGLECWIAPRNISSGKNYVDEIADGIKSTKIVVLVFSKYSQESKYVNNEVMMAFSYNKPIISFNIDQTEPNDIMGYYLKVAQWLPAYPNPKSQYETLVTDALKLCNERPRTVITSLDGFIPEDISKQKKNWISLILLFTPIYWASFIYMGLVSKKKSWTLLGFLYAIPTVIGLLLYFQVFTRLFLIYPIFRLFNLIFILCWILAIIHGLVIRNEFLTRYSVLGLMSFDKDLFEYLYGMYYKM

SEQ ID NO: 4452 - protein, 291 aa, Methanobrevibacter ruminantium
MSHDVFICYDEEDKDCAEAICRIFEENNIKTWIRSRDVSSKDAARNLTEAIRNSKCFVLVYSKNGKNTNYIINETDIAFSKEIPIILFKLDETSIPKDLEFILISKKKIVAYPHSKRQLKTLVKETSDILDRPTDDIKLDSNSVKTIERSNPKRKENNIKKAIGAAALIAAVLILIYLFVIVPTGQNITDSGVFSMDVTHVEVDELAKGNKYTIYGESYNLPSDSDRYFMNLQFFDDKDNVVYEVNSTADEFKSGIIWSGDINKGDIKHIGFKLTDMDNKILSQEDYNLGL

SEQ ID NO: 4453 - protein, 406 aa, Methanobrevibacter ruminantium
MVKMKFKRSLILAVILIILFSLGTVAASENIVIDESSDSNLVIDHAKDNYLFNGPIKDNYLSSSSISDNYLSKGVLDDSYLSRSDLDDSYLSMDDGKGSIDLTNHNQLSNSDDKQLKTSNLEDEKQLESVNKGDKLLKDSNDNVDLFINMDVKTSLTNKQYNRAGSEVPWIITVSSLNGTSYNTQVRDVLSENLQYLSHNATMGTFDPENGIWTVGDLESSKNASLTILTRLKRDGTYINKAYATTDSNDVNLLNNFLIISIRTGSSKITSNITETSDEREGIQHNVHYASMVDTDFIYRYEEDSSEDDGGNEEGQSEGNSHTKTRSLGNKLKLFNAQNIDYHSLSKNIGGALGFGYNSNGGFLNSKDIYEALFVYDYTRIPIIVFAAFLVVLASIVGYDKVKSSK

SEQ ID NO: 4454 - protein, 2004 aa, Methanobrevibacter ruminantium
MRIMINKKLFFVFLLMVLVIGTISAVSANECANDLTMEISDDNIAIDSSSALEGDDLAIDSSSSDLSNENNINSMNDSVINSNSINSDSINSDSINSDSINPNPNIDDEINNHKDSFLKAVQASKTGTFTELQTKINKASKGSTIYLDKNYLYNDDFKGKYGIVINKSITIDGKGHVIDGLKKSNLIFINDASNVVFKNIIFRKGDGDENGAINLIGSDHIEFNNCSFNYNYGDRGAVFLSGSDYSSFVNCKFNENIGENGGALILADSDYSRLVNCIFFGNEASDGGAVFITYSDYSYFFNCTSEGNSVDYTGGAFYLDYSDNSSFIDCVFDTSSAKDGGAFYLGDCHNSSFINCSYWNNQVDYYGAVCYLDNCYDSSFISCNFTGNSGSNPELDETPSIGGGVFYISESHGLYFTHCNFSENEAKNDGGAIYASDSDVHIDSSVFEENCALCGGALYAMNSDIFIDSSLFESSVGDRGGSIFANKSNVYSKNSSFIQYYEIEDEYVYIPASGAYHLMEGNIGGAIYSLQSVLNISSNKFNNNFGLTSGGDIYSQYSMIYIDDCSFSNSFSNGFGGSLSFNNDYVQITDSSFENCSSRDNGGGGIYSINSILNCSDSDFTNCYSYFGGSICSLNTDLSINNNNFYKSSAEYYGGSIYFLYGTLDINGSLFSNSYGQYGGSIYIRSPQTIKNITNNQFLFSQGIRGPRIYIDQYYGEISNSGNVYTDEYEEKGLFSDYGMGISFESNEGLVPLIHYYPSNESLPSFYDPRGGGDSEDDYEDEDDDSDIAVKDQGIGGNCWAFSGIATLEACLEKVTGEEFGFSEGNAKNLMAISSIYGLNIDTNNGGYDTMFLAYLASWLGPIYEEYDTYNPLSSLSIDLPSVFHILDIDFLAPRKNSLDNDEYKRAIMNNGAVSVTFDWVENKVSNGFHSVSIIGWDDDYDDIDSLGNYAKGAWIFKNSWGYEWGDGGFGYLSYKQKLSEEIAPYMHAYTFSFKENDIGYTDIYQYDFSGLSDFLILNSTNAYYKNKFIAEDNEFLYAFSTYFDKETDFTYSVSINGNVITKTEDGKDILTSIHHSPAGYHTIPLGYNLTLKEGDEFEIIIKLLNDNQNRIPVCQADELYRTSLPSNASFMSLNGKDWIDLSNLASSNEFSSLGIKANTSQVACIKAFTSNWRMNSDSSIVNSKNHSIITSEGTELSQYEICQLKVGSFTRASANETIIIAMSIPEWRNYQDEYENYIEVHINDEFYYVRVNEGVAYLDISFDKIGHYDFKAQFKSNIYSSDIVEFDFEVVKDSIFDVDDLDASNPGTFKELQDIIRNAKNGSIISLDKDYAFSSGDESVVDDYIEINKSLIIDGKGHIIDGSSDSGIFRLSSGDNLTLRNIKFMNADNGAIVSNGNLTVSNCYFISNCASGSSSTSTSSSDSSSTACGGAIYCEGTCFIVNSLFESNSADAGGAVYCEGTCFIVNSYFDSNYADLGGAVCCDGSCYIVNSLFDSNFAVYGGAASIVGNESCEIIDSNFIENEAIYGGAIYLESYCYLLDSSFNYNYANNGGAIYSIADLDIHTTGFNYNEAYKDGGAIYLVNSTSYINEGNFTENSAKERGGAICALEFSNLTIRWAYFMDNSASKYGSAIFSVNALNITDSEVTVSSGKVELICFAYDYASNGQAYGDLYFDENSFYISGAPEIYYFREKIAHKLALDLEFNNIELIRGGGVEISRDLNDDGWEDKINNNMLEICRLVDDDDYMTVLRMKEIEVILINKNNRSDIQKFKIPFNVKLNGYFLNTSSLKYGSYILTGNLSKDLASNCIVKNGTLKVLRKTTLSSLSTFTKVYGNSKNLVVTLKDSSGKAIVGVNIAVKLNGKTIKAKTNSKGQISIAISLKPKTYTAYISFAGNDYYASASKKVKVVVKKANPKLTASKKTFKLRNAKKYTVTLKNNLGKALKNAKVTIKVAGKTYTAKTNAKGQVTFNLKLAKIGKFKAVVSFAGNKLYNGLKKAVVLTVKK

SEQ ID NO: 4455 - protein, 185 aa, Methanobrevibacter ruminantium
MEYENILDLKSSEEFREWMIKNHSSQRECWVNCKRGKADKDELSYVDAAYVALSFGWIDSTYGLIDGKRMQRFSPRRKNSNWSQLNKERCRWLIRNGLMTDSGYESLPDLEEDFIIDSDILDELKKDNETWNNFKNFPDLYKRIRIANIQKEKDREAFDKKLANFIKDTKDNKMKGNWNDDGRLI

SEQ ID NO: 4456 - protein, 84 aa, Methanobrevibacter ruminantium
MANEIILNIDGNEHQIKYDNMEVDHVSIIDLEKLGRSLILELEIDGKVDRNSLDDAINSFLDTIYDDIKYFAVEYADDNEIELI

SEQ ID NO: 4457 - protein, 155 aa, Methanobrevibacter ruminantium
MRNPKDYIMKTDYLIILMALLLISIVSPIAAADSFDFDIPEGYHIENASDDFVLLENEDYYSISISIMDNSTDRKTLMDMLERHRCYDFRNGVNYTKGDFYIEEKPYYQEFQMGILYFCENGRDLVVIDYKGPLGMDLNNSPIDGILDSFKWVSY

SEQ ID NO: 4458 - protein, 252 aa, Methanobrevibacter ruminantium
MGQDGFKNEDLMLEALNNKKFMDLNDNLKQMILDMYGEEISQDFIIKAYKKGGVNKTDLTIDINSQNFNVSIKKGTGNSVHQEKLEEFVSFLKEEYGISNVLSDDIRFFIWGDGTLDGTGEVSDRLSASEFRKQFPEKIRNIREFFYTVKRDLIERFVIKGPKSKSRPDFIYYGTPDKGIIVESQSVIDWLSDDKNEKSSSPIPIGRLTFQAWNRNINGGDKSENKRGVIQLKWSSVGKDLVKIYKEKKDDK

SEQ ID NO: 4459 - protein, 193 aa, Methanobrevibacter ruminantium
MTNRGTAEGTEEEISFVKLLNKKEDLSYWDVLNLDHNCHFAIHVLYQKFSKISNKKVYPKADVYIAKGNVPYSYLEDNDFYLSEDNTEDFDLEPIKYTGISVKLQNSSRYQITKMGPNTFKDIFGCYELGAGASIYCRDVDDLEKNPQVLTGWNTNFEDFIKYFKSFDVVSSSDLDISSYKKLKVFLIKRLRK

SEQ ID NO: 4460 - protein, 339 aa, Methanobrevibacter ruminantium
MVSKKRAMQYTLEDFKEKNLDETEENDKDFTFIDLFSGIGGFRLAFESVGGKCVFSSDIDKWANETYYMNFGEYPHGDISEIPANQIPDHDILCAGFPCQPFSIGGYRKGFCDTRGTLFFEIERILKAKKPQMFLLENVKGLTNHDKGKTFKVIKESLWNLGYSIFYQVLNSKDYGVPQNRERIFIVGFKDNVNTFKFPLPFENKANINDLLEKNVKDHELSGIASDHLKKHYEEFLKNKKVNKNYPIFATEIRPSRCSIRNDGNSPCLTAKMGTGGNNVPVLVNENRKLTVRECLRLQGFPENYKIKDNYSQSYKQIGNSVTVPVVTLIAKEMIKYLN

SEQ ID NO: 4461 - protein, 342 aa, Methanobrevibacter ruminantium
MEKPTVIDLFCGIGGFSKGFEMAGFDVLFGIDIWDIAIETFQHNHKNTEGILADLTELDDDFFKQYTNKVDVIIAGPPCQGFSMCGKREVGDKRNELFQEVVRAVKIINPKIVIIENVVGLLSMENVDGEDVKGLIVSEFEKLGYETNYKILDASEHGVPQKRKRVIFIGSRIGDVEFPKPKDKKVSVMEALGNIPDTNFEYYDEPTNSFQELMADGEKKIYNHDAMKHNEKVLKRIENVPQGGNWQDIPPEIYDVGGTHSNNYRRLDPNKPSITIKHAIKSMIIHPTFNRVITAREAARLQSIPDSFIIKGNKTAQHQQLANAVPPLLGYEIGKQIIKKLN

SEQ ID NO: 4462 - protein, 57 aa, Methanobrevibacter ruminantium
MKRIQVNFTKEQYELLQKLKGELGNSDSEVIKNITMAWLSEKSLISTTLKEKIFNNY

SEQ ID NO: 4463 - protein, 250 aa, Methanobrevibacter ruminantium
MNEIIKTTLILLLKQEIRKEQRRGIKNILLYFRDVDTLDTNSINWKIRYDRNNQNYQMIVGICYLTLKGLLQSDSKGEKKLMSFLDNQRMNRLYEKFILNYYKREHPDIKASSPKIEWQLDDDFGEMLPRMQTDITLEHKNKILIIDAKYYSSTTQTYYDKKTIHSHNLYQIFTYVKNKEVEVANEANGVELDNKVSGMLLYARTREKIYPDNDYLMSGNRISVKTLDLNQDFTLIKKQLDSIIEVYLKA

SEQ ID NO: 4464 - protein, 156 aa, Methanobrevibacter ruminantium
MNNKKIFVAGLAILAIVLMGSVAAVDMGILSGSPTKFSIDGIDFNIPQGYAVTDNYTRVNDTDTAGSSSYRVTQATFENNVHDAISVLVADYDHDMSEDIISQRGNKTTINGVDGYMQTQGDYTTFNYLVDGNLVTITLTNADLLEDIIVGNQTDD

SEQ ID NO: 4465 - protein, 1471 aa, Methanobrevibacter ruminantium
MSEDIGINDNNGALIADVNFADDNNNALKAESNSASQNDASIDESANPTQDLVDTDNGLNQSITKSPLKSNTGLTVTKTIDNSSNHMPVDGFYDIGDTIYYTINITNNLEESIGNISVVENFPDGLIWEYIWFADDNPNWKNESNVFNYTKALEPEHSILLKIRMTGNKTGTYINTINVSSNLTSSQEFLSEEVTVYAPNLTITKVANDPIVTIGEIANFTINVTNNGNRPLSNLRIYEDPEESLFLNEFTNISGNWDSFANRGGDYGFSLDQLDIGESAAIIVSFLTTEIGNFTNNVYSNYPNPQVEANATVTVVPRIEKTVNATEIDMGESVEYNVYIDMTGANKLGIDDFKIKVTDILNEYFDLDKDSISSNWKYNRDEKAFEYMLSDIPESFEFNFAVYITERGNYTNTVSLKIGDLPEVSAESDVTHVRISDANIAETALDSTVNLQEQAVFIVNITNTGDKTFNPYELVVNDDYDEDALTYLSHEDITGKWIENIETDSLSFTLNSTLEVGESASFKLYFNTSKVGSYSNYVYININDKEDDSIVIVLALMNKSVNSREIDAGDSVEYNIFINLSGYQGPVKVEDLFNDTFALDKDTISENWHYDETENAFIFDLSDNPDTLNLSFNVTINEKGNYTNLAKLILSSDYPEITAEAPEVCVYKPDMTVTKTVNDTEIYIGDTVKYTVTIDNTGDRTLTNIIVKDELDPAFILDESSITEGWTYNKDNSSFTYNNNISVGESAILEFIVEISKEGKYTNIVNVSSPGVANKEARSEETVAKTIPTNICLENVTADPDSFVRIIINITADKGLINGTVNITFPDGTNEAVEITNGIGETVWYVPDNYASGNYSVFAYYEGNGTYLESEGQGNIEVIPYYTEISLSNVTAYPDSDVEIEINITAGDAKLINGTVTVSFPDGTNKTAEIINGTGNVNWTVPDDYKGNYSISASYPGGGNYLDSNATANIEVIAKISTQITADIPNAYPGEEIDISVNVTADNDVPFNGNITVNLPDGSKETVEIKDGKGNIAWTVPDNLDVGDYNLTLTFDGDNNYLPSNATSTLTVEKIKLLIIIDNITAHPKEDVTISVNVAIDDGSESDNSTKGSLSDNNLNKGALSDNNLNKGVLSNNDNKALLKAYISSAKGILSSNHLNDGDNFNGYVNITLPDNSTVEVQVKDGKAALNWTVPEGYEGEYPIKVTFNGNGKYLSASETGYITIEKIPTSIDLENIGTKPNREIIIPITIKTDDDVPFNGKVSVELPDGTIQTAEITEGIGNTTWTVPDDYNGEYNYTVRFEGDETYLPSNNTAIIKVDSKIPVEIIVGNITAKPKDKVTIPIEVITAEESLFNGNVTVRLPDGTEVTAQITNGEGSVEWTVPEDYNGTYSVSVRFDGDDTFLEADGTGFITVTPETPDNPVPPISPVSPDNPVAPAKHSANKPMPMDKTAPGNPIMALLIVLSSLIFVRRSRK

SEQ ID NO: 4466 - protein, 325 aa, Methanobrevibacter ruminantium
MDFNNFKYLDELIHSGAKEINLDSDIILEDKEEQKYSDGIKLNIDNLVINGNGHIINAKEKTRIFYSTAQNITIKNIRLKNGKTNTIGGAIYNLKGKIKIIEATIKENQSKYGGSIYNDEGEMEIIKSTFTKNNAKSNGGAIHNYKGKMSIEESIINENTAKQGGAIHNYRAILSIENTTLRKNDAKDFGGAIFNDGNELKITESTIEENTSSQGGAIYNNIGEIIIKNSTITKNIAKIGGAIHSWNKLSIISSTLNKNKSYEYGGAIHNFDGEIFIKDSIITENISNKGGGIFSNNKKYKITTSTIENNESDNIHEIDSFLDMD

SEQ ID NO: 4467 - protein, 365 aa, Methanobrevibacter ruminantium
MSKSFRDLELLIENCDDEIVLDSDIVLGDGEGPIYLEGINLDSDVIIDGNGHSIDACGKVRIFYSSGELTIKNISLLNGYSDESGGAIVVDGGKMDIIDSIISGNYSADDGGAIHIEEGELALINSTVKENKAKEFGGAINNWDSLKIVNCEISSNEARFGGAILNNDGNLEISDSLFKDNKADKGGVIYNQDGDFSVEKTLFEKNKASADGGVFYNENCDISVIESKLNDNQADKGGVIYNNGVFIIKDCELINNRANDGGSIVNYEAELNVMGSSLSGNLSNYGGAIYTYDGEMSIDESRFDDNRAECGGAIYSEKCIWDVSNSEFNSNKAKNSGGAILLKKSKYEVDNVSFRDNEPDDVSNF

SEQ ID NO: 4468 - protein, 91 aa, Methanobrevibacter ruminantium
MDDLITTAGMYGEPVSSRKGNYIVEGLFGKPIYYIDGDIVRENNPFGKPVYRIEGNYIKEGMYGKPKYYIDGDLIRENNQFGKVVGRKRKF

SEQ ID NO: 4469 - protein, 90 aa, Methanobrevibacter ruminantium
MKYCFKCGAKLIEENQKFCIECGSNLEKRKEEHNKDLKESHKKYNPKKGESYNDYLNRIDSPIKDKIATEDEIIKESIAYKEYNPLKKRV

SEQ ID NO: 4470 - protein, 604 aa, Methanobrevibacter ruminantium
MDFREELNKILKSDDEENNNLKSTENKIKDKKEDNNLKPIDNKIKDKKEDNNLKPIDNKIPNENKEPKEKKTPQKTDEERMQNRPKETIDHLKRFKELNTTTDSIFNISPYQVLIILKDGTNITDWKEIEDKKDILYISEDLSGESYISNKYRDLEGMRLIIAQGITSKVQFIESMFADCKSLIDVIGLETWDTSNLLSLENMFGGCSSLTSCDGLRYLDVSNVNDMTALFNDCYRLNDIDSLKEWNTSNLTKMWSMFAGCKSLKDLRPISNWNTSNVTNMTSLFTECESLNDINGIRSWDSSNLKDMGSLLWGCKSLTDISALSNWNTSNVRKMGRMFWNCESLTDISPLKDWNVSNVEDMVYMFVNCKSLKDLTPLSNWKPSKVIIMRSMFDGCSSIESLNGLENWNLENVTTVERMFDRCKSLSDVSALKSWNLSNDVIAGGIFNECPNVKENPLKKEIKDKNKPLHHIDLNIKFLDIYGTGWCLVKLGDIYSRASYITDVPYDCLSSIVNAIKNDENFHVDFNGEGWTFDVEADNEQCYFNFHGGEKHAFDTMNKYDLAIVIYRNIRDNLSSWKGWTHRDLSPLLNELCSLINENEADEN

SEQ ID NO: 4471 - protein, 447 aa, Methanobrevibacter ruminantium
MELLDRLIPKYKDINWMKRIDIIRKTDDQALLEEIARKEEEGIVRKYAVKKINDQSVLIDIAYNDPHWESSSEAVKKIDNQDVLIDIAYSKLKASPRSKAAERIKDQNVLIDLAQNDKEYQVRRAAVKGIDDPFVLKELALNDPDSSVQMEAAKKINDGEALAEIALKDRSEFKRLEATRHIDDEKILSQIVLNDPDFYVRLEASKKITDEKTLAEMGKNDFYWQIRSNALNKITDEKVLAYMACNDPNPSTRYEAVKKINDKAILVDIALNAFDWKVRLCACRRIDDEEVMTKIVKKDTCWRIRRNAVGKITNETFLEEIAFNEPAWRVRLESIKNIEDESALIYIALNDSNWHVRRQALSKIKDKSILEDIAQNDPIFELRKLAVRMINDESVLRKIAKNDPEWKIRRLAIRNIENTDILKDIAMNDSNIDVRLAASDKITDKSD

SEQ ID NO: 4472 - protein, 638 aa, Methanobrevibacter ruminantium
MTAPDSNYETMAEMTIRNSIIENNSARNGGAILNDGNLFIEKTTFKNNLAFTAGAISNGGYVSLKDVSMENNIAVTGAAFINGGDAKIEDSFIIKNIAIGEKRGMNGEHDVGGAVGNSDNLLLKNTSFINNSSPFGSAIYNLGIDIPKLKYLCKIKIEDCRFENNSSHISGEIHNEIGEISIDDSKFKNETAKRGSVIYNDSYLTITSCDFKDLKKIVHNFNLMTIHSSNFESNQSDSAVIENDGEIGILSIEKGKIANNISDYTTVYNHGKDCNITGTIFENNHSKKENCHNICNRSNMVLKEIILKDKTVSIFNEGILTAEKKYKNFIFSVGKVFYLGMENEFNFSYLDELIHSNISDTISFDEDISLLSDEFDFYEGGIELDRDNMVIDGKGKTIDASGRSRIFLVTGNNITLKNIIFKNGHAFDNYFMSNNEGGAIKVYKGLDLKIENCKFIDNISESKGGAINNKGHLTISNGLFESNKSNEGGAIYNHQKLSIIDTCFKGNEGHIGGAIYNKEDLEIVSTKFLKNIVKESLFKARFIPILQLEDESFGGAIFNKKRMVIKQSSFKKNMGLDDTDGAWGGAIRTIGDEEVTIIQTEFIGNYLKDSNFGGAISSYKTPNLIDCTFSDNYPNDLN

SEQ ID NO: 4473 - protein, 449 aa, Methanobrevibacter ruminantium
MGMVLKINVKIGDSVKKGDVVCILEAMKMESEIFADKSGVVENILVNPGDIVNQNDLIMIIGDSIDRDENKSNKENKPKPNKEDPKDRKNEFSKSKNDKKINSPNEMLDKLKNNIKVDKILFVDGANISISPIAEAIFNKKVKGIKAYSAGLSAISGNKAVPNAIKVCENHDIDLSSHCTANIEDYDLDDSTLILSSTTYIRNILKYYYHVYKVVTINEFAGFSNLDIQDPFWSDLDAFETCFSKINDAIDEIFGLNSLEKDNMAFNCEIEENKNIQSNKEENKNTTITSNKEENKNTTITSNKEENKNTTITANKEEKNTQSNKEYLNEKSSKINSFKYLDDLIHSNKKNITLDSDIIHMEGDSPIILDVDDTLIDGRGHAIDAKGKCGIFNITGKNITIKNIVLKNGFVESDGVICNKGKVTLENISVQNNRGSKYEGNAIVNKKIS

SEQ ID NO: 4474 - protein, 411 aa, Methanobrevibacter ruminantium
MPSKIIKREAYIRDLKDYVNTDFVKVYIGIRRSGKTSLMHNIIDELKRDGVNDENIIFMSFESREYIHINNSEQLDELVYKKVENLEGKIYLFFDEIQQVKGWEKSINSYRVSIDSDIYITGSNSKLLSGELATLLTGRYLTIHVYPFSFKEFLQYKNEIEGVEITKYSIDELYEEYFNFGGMPGILSLGSDEFKRLALKDIYNSILFEDVVSRFNISNIDLLQRFSRYMISSTGEIFSSKSIKNYLKSNDIYTSEDTLLKYNEYLKQSFFISKCKCFHLKGKKEMKILGKYYLTDHGFHHALIEDNILKVTKILENIVYVELLRRGYKVNVGRNEDKTEVDFVCEKSGKYKYIQVSYRLTSEQTLNREINPLLRIPDKYESILITTENHDFSKDGVRHLNIVDFLCGDDV

SEQ ID NO: 4475 - protein, 1044 aa, Methanobrevibacter ruminantium
MSEKYTVAELKYILKENGLKVSGRKPDLVERVLPILNAEASEEAVEEVKEEVKEETVEAEIVEAEEKAPVDLTFPDTEEALSSILALYGLSYDDLSIKDIEFADGKICINGEAFIQNGLSMSDSTMSIINADPTLNLTMNIPEVAYSDFESTIFRFKDLDLNLIPTDDSLEFKAALKGLDIMTDLNNIILKGLDFAFKSFPDRGVEIGIDIDDFIYPNFYNTSFNFENLDFNMAIGVDGQSIAISVNLPALDLLNKDYRVKLSDLSLNLVLSDLQLSDLDLSIAISDFHYTNFDDVVIYMEDIGVSLEHIPDTNSFNVLIGLSAMDAVGLNSFDALFPMMEITGVNFNSKDSDSLINFTGLISPIDLTQIDLLELGALLGSGFDLDAYTRNMAYYPDIASEGASDLGIPGLDLGAIVANCDYSCLGAIELNLTGLLDSADIDLSDLGIDLSDYDISSIKLSDLIGAVGDSEFVMSAIPAVLNIFSLDLTDVDVSGLIADFDEENFDISSLLASLNLSSTDIAAILDILDKSDIDLGAIFAGCDISCLDAITLDLTGFIDSLGIDLSAFIDLSEFDLSAVSLTDIIAILNSFEFDMSTISALLKIFGLDIGDLDLEGLIASFDTENFDLSTLLASLNLSDLDIDAILAIFNNPDFDWAGIFENSDLSCLDAITLDLTGLLDSAEIDLSALGIDLSDYDLSSIKLSELIGVFGNLDFDMSDMISGIDFESIDFENIDLEGLIADFDAENFDISTLLESLNLSSTDLSAIFDMFINSDVDLGKVFEGCDYSCLDAIVLNLSGLLDSIGIDLADLGIDLSDYDLSAIKLSELIGILNGFDLDMNTLSALLKIFGIDLEELDLSGLIAIFDGDNFDMTALLSSLNLGGVDISAIVELFDNLGFDFDGMFENLDISCFDAITLDLTGLIDSTGIDLAAFGIDLSAYDLSAIKLSDLIGVVCSSEFIMSASGAVMKLFNINVDDLDFDGLIASFDAENFDISPLLESIELSGFDISEMLEMFDMNGFDLSQFLNQFISSFMENALLESGDE

SEQ ID NO: 4476 - protein, 97 aa, Methanobrevibacter ruminantium
MLKIDEFRMEMEEPKRIYTEELKKFAKKYDFLGDFTIVEERDIDTADYFFCFNNLNGTSDETLYSTRDEIYDHMIKFCEDNGIDEFSKNAYIFYKSD

SEQ ID NO: 4477 - protein, 166 aa, Methanobrevibacter ruminantium
MSQEENKMIDEVEMSSVEEIGRDSVEEIKIGSQDEIGMNSVEEMDLDSADEIDMDDVEEMEMKIENYENRIKLQDILIESLGERCEGEKERNKQLHDRIIQLNEELKKKQELEMVSDINYWRGIEKAHIELHDKYYKRIIQLEKQNFLLEVENDELKDELERIKNV

SEQ ID NO: 4478 - protein, 269 aa, Methanobrevibacter ruminantium
MGLLSLTISYFNKSANGESLWAPFLEMFRMLSVVLILTYIATKSKSFKVIIRGQQSRKTIIWQIIIFSILGILASYCTMDVNGIPANARGLIVMISALLGGPYVGIPVGIIAGVWRYGMGGITALACGVATIMAGIVGSLVYRWNDGEFLRPYKAALLMLLYSGFDMFLITILTPQPKGVLIANALYAPMTFGAVLGILLFTLFLTEKKEEAEKSDEQTVSDNRNTDTQNINEISQELNEYKDKVKKLEQKLEEYDKKFNQLEQKLKDK

SEQ ID NO: 4479 - protein, 101 aa, Methanobrevibacter ruminantium
MTKMEFDLTDEQIEKVKELEKSGISLGEAIDLLFEIKDEAFNQMDEVDENIEIVSQITKSMNGEKKIEIIEKAYRNYEKTPEMKIQEVKRNLSWGRDFFKY

SEQ ID NO: 4480 - protein, 514 aa, Methanobrevibacter ruminantium
MNETIKEHSWIPLILVCFATFIIALDTTFMNVSISSVVADLNTDVSTIQTISSFYTLITASFMLLSTKLQDIVGKKKLFLIGAGIYGVGTLTAALSANTLMLFIGWALLEGIGGALMTPTAVSIISGTYQGEKLTFALAIESALVAIAAAIGPLFGGVVTTYFTWRLGFAVEFIIVLIVFALQGKIPYFEATGSKSELDITGAIISFVGLVLFVMGILMLTDDTTFSIAIMAAGLIVLALFALFEIKRKRKGNVPLLDVELLKDRNLRVGTLLRLLVNLAMGGALFAVSVYLQSVLALSAFNTGLTLLPMTLGLLLFALTAPKLSAKLNHKILMSIGCIISIIGCLILSQQFTMATSMLELMPGLFVLGAGLGFVMALGVDIALSNIPQEGQNNASGIVTTGQTLGQSMGTAIIGVILILGIIGGISNAVDTYVPDQSGNATFEHDVYEGFQSISSINDVKAENSTIQNIVNVIVRDSMAFVMYVTMALMAIIFVLTLRLSDKEIKKPDKLKKQ

SEQ ID NO: 4481 - protein, 244 aa, Methanobrevibacter ruminantium
MTTTNDQDESISEHIKKAFSLKEDTASNEEIRSRLLDGGKITGTNMRVLVCAMVIASVGLNMSSTAVIIGAMLISPLMGSILASAYASVTNDRPLLGKHLTGFAMQIIISVTAAAIFFFLSPVKEPTVELLARTSPSFYDVLIAFFGGLAGIIGQTRSDKVSTVIPGVAIATALMPPLCTCGYSIANGRWDMLLGAGYLFLINCYFIFLSSSLILSALKIPKLKEYTEKEWKIHKWRMSYGILF

SEQ ID NO: 4482 - protein, 1001 aa, Methanobrevibacter ruminantium
MGFIDKLKKGIGRKNKEKSSKRDTQKDTGLKRKSPPIDKASFDGSDEEYKLFESIMSYRDEPVVHSILRKISDDRLLIEIGKSHPFLELRRDAILKIKHASREDLIELFDLNEDRWGIGLRNAIASKFTKEQLMEINDERKLREIIRYSNEENANCIYDKINDEELLIDIVCLTRYESIRDKFVERFKNDPEVMRRCLESSRSPELKSKVAQYINNDKELKKYILSQNDWNNTVEYALNEMKDEKIANEALYEFAHKGKNQLNKSIEFMSDDETLLNIALEYYNLDYDRYYFEIGMALDRINDDSLLVDLMHNETDETLRRLAAKYIKSEEALKEFVNDPNENVRKIAIRATCKNSLDKFMDLFNNDEIILDDHFILDGDGIYETITINRDNVTIDGKNHKLECINPKIELRIEANNFSIKNIETNMLIRLNEGSLNISNSIIDKSIEINEGNLTGENSTFDRRIKNINGSLNLTDCNIDQIFNESSLSLKGCIIGSIKNDDSCNIDNCTINEFLYNNGRCKIENSKVESASRNYSNPYDGGGAISNGQNASMELTKCILAKNSTDKNGGVIRNIGSINLYDCIFEDNKAGLSGGAIFNEGRLTASRCKFKNNLVEFPRYGSFSRATGRYHFIKHGNSILNLAFMDLFNCQFITDKINDAPEIIAQFGKDSYLNIENCQFSTNKKTSVDAIEGGLNFNNAKFKVSFDDVEEINLANEGPEETGSINKNLKETSSTNEGLKERRSTNKGLKETSSINKGEETTVSSKNEDIDAESILENFKGFEYLDDLINDGSSEITLDCNIQMHELEQAFYEGGIEIYEDNLTIDGQYHTIDANNLSRIFHITGNGIVIKNIKFKNGYYYQDYFDNSKDGGGVLCITHSASAKIINCEFSNNESRQSGGVVKNNSDSLEIIDSNFRDNKVIYQKGGCIINNASLTLRNCSFKNNFSNAGSCVFNSEDSSLKIFDCEFNNNTSRKDFEAGGVRFSLEVPSSGGAIANEGSL

SEQ ID NO: 4483 - protein, 657 aa, Methanobrevibacter ruminantium
MRDIEELKKTPGLSLKRYLILFIANLIGLYLISFGLDFTVTNLGRVIIFIFFISIFNAAIWPLVTRIYMPLMVWTFGIGALLLNGGVFAFFGPYFGLDISGWGIVLAPLTIALITIVLSTLMDAEDDGTYYQAVLREAQTKRKGEIKDYPGLIIVEIDGLAYDVLLEAVEKGVMPTVKSMIDNKTHILKKWETDLSSQTGASQAGILHGNNENITAFRWIEKENNNQMMQCSGVTKVKVLEERISDGNGLLVENGASRSNLFSGDTDNVIFTFSKITDLRKLYNGAWFSIFSNPSEFARIVILVIEDMVHEIYSQLKHSILNIRPRISRGIAYIPTRAGTNVFMREINTETLIGDMLIGDIDVAYSTYLGYDEIAHHSGVRDEDVWFALKGMDKQIRRLIYGNKYSPREYEFVIQSDHGQTNGATFKQRYGQSFEDFVKSLLPHETNIYAKMSSNEDHFAEVYIPFKDRIDKFKNRNKPDEDKLISESEVIVLASGNLAMIYLTRWSHRLTYEEINEMFPDMISEIVNNEYVGFVLVRSSENGDMAIGKNGIYYLDSDEIEGENPLIGFGDNVTQHLKRNSSFQYTPDILVNSFYDVENDEVCAFEELVGSHGGVGGSQSEPFILYPSDWDIPDEEIVGAENIYRILKDNLAKMKEK

SEQ ID NO: 4484 - protein, 94 aa, Methanobrevibacter ruminantium
MDVMDMIKEIETGNDYWQEGLDYHMDCKVTVNNVRTRCDQVSIVQCDMSKYGKGIELLLELRRGDFISWIYLDDVVSFDVQMMDNVLREEKKNH

SEQ ID NO: 4485 - protein, 85 aa, Methanobrevibacter ruminantium
MIDEMMKIEQFTSHCCFVDEEGMNSVDGDFLTAIALCVNFMYNFIDIQNIESGSEDEDDLNFQLIMNKIEYYQKMEEICKKYKEE

SEQ ID NO: 4486 - protein, 228 aa, Methanobrevibacter ruminantium
MNKINILSVSRLRTYTDGDGITSLVATMGCPLRCAYCLNPSSWDGTAYPKSLTVDELYEELKRDNIYFLSTGGGIAFGGGEPLLYHKFIRKFIEKYSSTKWKFYLESSLSYKTDSLKDIIDLIDYFYIDCKDMDKTRYELYTKGDYDLFFGNLIYLKEHVDNNKIKIRVPRIKGLHKSDEAESNLKVLQEMGFTNIEIFDYIDDVEIHKPISDKAIRNKKDFLERIKE

SEQ ID NO: 4487 - protein, 159 aa, Methanobrevibacter ruminantium
MNGRDKCELLNEVRQRIAKANNIEFDFEECTFEGNCSGTCPKCESEVAYLERELEKKQDNGEKIDIEGIFTLKEKEPTKLLCKDVFVPFGNFEPVRPKMEILEKSPYCETFGDIEYKDYAFTYLKIFYLGNDEEIVLPYNEKEYDGDITVFEIKEDEYE

SEQ ID NO: 4488 - protein, 183 aa, Methanobrevibacter ruminantium
MYQWCNLFGKIHRGQNYEDIKEDNCRMLLDLVRKYPEHSDIIYLKKVKDIGTSSKMDNSLDERINQMEEALKPVHDMVDDVYSCQINDDLINLDDFVPFEFLSEYAYKKRFWLTYNEKPDIFELETSYRDKIYSFDSVTESVIFVMDEMKNFIDKYPQYSRLIPDYSSFIKYKEKLIEEFEGE

SEQ ID NO: 4489 - protein, 58 aa, Methanobrevibacter ruminantium
MKSELVPGYDFEYTYDGVLLIEYDTYHYKNYEINRVYLEDHIEKLIKLPDVYVICLEQ

SEQ ID NO: 4490 - protein, 72 aa, Methanobrevibacter ruminantium
MNENNKKIKEKSAEDYSDLDSFLEEVFGPTDDIEWTEEKRKRFEEINNKCPFSPTRNEWPNIKIHREELKED

SEQ ID NO: 4491 - protein, 685 aa, Methanobrevibacter ruminantium
MTEEINEKINTQLEEEIKGFGTRVVEIFKNTKSTKKENEDPEDDNTKKSQEFITVAEFNEFKIETLEFVTEMNNKANNLIKASEKFGDPEDDYAEIVNKVDTLLQGLHNELLGKEITIEDRLDKRNTLVRMSLKVHQSKRILKLLDKQSQMRSAEENNLKKDLSKWFHKLERRIQNLIDIYYENELFFLHINKVTTIVEDMKPEYNTILLKHGLTVFYNARETATTLYTIQQKKVSSKTGLYEPKIMRETDVGLFRTNPEIEDSLRYSTFQASNSTLIRVSKNITNNLADSYHKGLGIEDVGHKITEEFTGLKGWQAKRIARTEINSASNVGTFSVYDELGVEYHMWWTGNDARVRDSHKPLHSHIVAVGNTFSNGLLHPGDKSGPINEWINCRCTSVPYIIPLGMMAPPGVKEFTEDQLIPIPDYDSSKDRGKIINSSSNSFNNVLKVPNNKLKKEGHNFRKKELEELLELKIREKSLKQPIIKSDNTPLVELEHPILKRELDNFDKFLEDKDIEYFQMYTFDGREASKLYIGKMHEVDVPNEEIIEAVRKGGKISVHNHPTNFDNMHSISDIYTQIETGIELNIVKSYTKKYIVVAEDLSSKERKYLLNQLEKIEKKYNEFIEKEKKPYLRGLDKIDLTVAEREYAEEIIHQYVVINNYDKYEKVMSYFFKANPSIDLYVYDI

SEQ ID NO: 4492 - protein, 165 aa, Methanobrevibacter ruminantium
MLPVFIPNLPDCEYQYGEKPLTADQIIQFARDYEEWLIVDLEHEFLYTGQVIGTVIKSHVNTEPVTVKFIDSTPREYPTGTWFVTLKITNQDVIQGIHNEHYTGGSATTIEREDTDKLRKILNVPITSTTKSKIKRIPISEIKNPVVITISIVHSPCVPLANFVV

SEQ ID NO: 4493 - protein, 340 aa, Methanobrevibacter ruminantium
MVEFDSFINVEKVIEAKDSNYVTKELSFDDKTILNTPYKIFNVSKVKLNKLELPLKGNIIETTKFINNKKSYDALYNLLENSPNNQKSKLNQFFKVDNTFKSYKSIISLTFSKNPFKSNKFTHGHSKPLSFSNFEYLLDYMYEYSTLFVLIPDIDFKSFDSMDNYMEYIEKAVNVVSSFNNKPIFVPLSMKLDNSNLEKLLHFYKENNYSNIWFNFYSNQINTKISIIRYSLRLINRLFKGNAVTYFSNMKKEINKHLDDVYTLPSDFLGPFFGCDFLGSNRESGFPGKNIKRTAKEKREFERKNLINKNRIFDSSSYYYFSILEYPSDLRIKFKVNSTN

SEQ ID NO: 4494 - protein, 189 aa, Methanobrevibacter ruminantium
MFFADFLRFLSYGFLEELKQSNCYNFLDYYNFAIGSKVFEEINQHLDNNLINKLHFCPNNNYNYSALIAPLLSNEEKNKNKGEYEVIGLSLHYLSLNQVKYIIIDDKRARKFAKRNFEELQEYITGTIGIIIFCSKDNFISKIDAANILKDIEFAIENHDETQGNFICSLGKQNYKKIIDDAIKMLDVE

SEQ ID NO: 4495 - protein, 190 aa, Methanobrevibacter ruminantium
MTLSNAEYKQKYIEYLILLLLGDFKNKLSVLHIQKEIYLLYNFDVELKKLFSFVKHYKGPYLDLINSCCETPFYLDGCWEYFEPKEKISGGFLKITDKGYKEYLKFLQKIKDENQEELLHINTAISMLNRLYGSLDCEELLLLIYTEFPEYTEKSEVYSNIISKKTNIAKNLFEKKVISEEKYNELSGIL

SEQ ID NO: 4496 - protein, 922 aa, Methanobrevibacter ruminantium
MEPTISSRLLIFIRNDLKNDINELLGEPKCGKGSAGIGNLAHMPWLDFTLHNIDENLGAINVAYLFKPDMSGFYLTFRALFYQEIEKKHGKYLLIYLKNKSRHIREFLEESNKLRDDFLFNMDFSEDTAVLKKHSAGTIVAKYYDASNVPSDEELINDLNYFLDLYAFVIDNYENKTDLSVDEWVKVLENKELIDDKMFSILEIMNEMDNYSATTSQISKKREELGFLDEKSYNSIIISNSRKIKEFLNKKPIYNDDGTENYWTRFFYGKNVDGAFEFKMKDELVEAFKKTNVEKRKKGGEEVTKNYNSFYDFLLDNGYLFDKGTIENYLLSLKVKPFAILTGNSGTGKTKLSQLFSQYISNNNPILVSEMNRLSKDTEDFVEVQVTTRRSSWNIFEKGKEMNPGWTISNEFFSNYLPIDQFSGEYQIEVDGIEGNGIISPVIQVYYDKNSLKLKKEFEKLYLSELESIEKDKENKVSHEIQLVGLELNVNSLENMVNTNFTKFKGDISFKKEITTTSIKPGEFIVPYEIFDYIPFNKNQMDCKIISCGRFSNANIHIKFKLRKLSKNIREYLEEKGVGAEIDVKIKNIDTSLERFNPDWSSAKRYSSEQIAQLNEKNIDLIDFNSQNYKIIPVGANWTENRNIVGYYNVITNKYQSTPAYDLITQAQKSDEPHFLILDEMNLSHVERYFADFLSAIESKEKIPLYGEEALEIPDNLFIIGTVNVDETTYMFSPKVLDRANVLEFKTYSAASYMNGDIKLSGPDGNLSYLENPLDGNNIRSKGIDELRELFDGVKVENKPFWNILSSEIEKFQSVLKVSGFDFGFRVINEIVRFMAVAWEYENKPDEFSNWERYFDAQIKQKMLPKLHGSEKIIGDTIDELHKICLDSSIDDVEMAKYPESYKKLTEMRKVLRKQRYVSFIN

SEQ ID NO: 4497 - protein, 547 aa, Methanobrevibacter ruminantium
MEQYIKINAIDNESNQLGTFKISKEYDGYIPSIENFNKEIILENLILYNVPIVEYFDNKTPIQYYKNDSFNANILLLEEYEYTIEFEGDLNLDVYESLKNSKNSPLKLLSNTNSGFLNFGSYVGKTFIDIYKDEGLLFKCPIEVRSRKINYAKDYATMIGDLSRFSSGLIYELNSPVYQSLEVSDINKTPYEDFMLLEYLFEDENLPSTVEYLSRNLYTLLEESREEVPSSLASNIGPNELVEVFSNSDNLERYDGLDNGHLDSVLSRTKGYLPLKINEIKYVDNIDTPENRFYKNFLLYIDDLIDDLIKRIDEGYSLDKLHEYKETLSYYLSSRYFLDISPMDYPPLNSQVLQKKEGYRDILEYYLLFEFGFKLNWNQVVDDFRGYEKKVYRLYEYWCYFELLDIVGELTDTEIRFDDLFIEENLNISLREGAIKRFDLNLSDLLDNDLPSSDDLDIRIDLMYNKTFNKDMAFHSYSVALRPDYTLSIEFGGNAYRIHFDAKYKLNINDESFKNDDIVKMHSYKDAIGDTIAAYVLYPGDRKEIFL

SEQ ID NO: 4498 - protein, 1178 aa, Methanobrevibacter ruminantium
MEKTMKSKLFILLIIISILISISSVSASELQADASNIDNDYQTNMEFDPICNDESNQNQDLNLKNNNEHILKEENTNPPEIEDETCFTTLYQEINQSDDELNLTHDYIFNKSYDNASLYQMYYGPLISVNKTNFTINGNGHIIDGNEMGAEFDFENNKGEIVINDLTFKNFNQTVLQIYGKLTLNNVNFTESFESLESIIFVSKGVLNVNNCSFYSNRAKNIISGSQSNITVNNSIFSGNGNYERAISANRWQLVIHNSRFENFTFKNGAIIDFKGYYLDLENSSFNNIHSNLSGGAILGKYFPAYIKVANKTQYLPSDPMIIKNCRFENISCLNDGGAIHFDFDSGSQRIAQSLNIIDSNFTNCSSKYGGAISILGGGLNLEKSNLLNNYASFEGGAIYSSWTNINITDSSIKNNKAEKNAGAIYFDKGNLSIKSSDIINNSALEESPTTANAIYAHDVAADFSDSTFDNGGIAVYADFASHSNFTNVNKNDDIFLMDNHNYIVSVETPGIKLNLTNNEIIVDSLPSKFNSQDWGWTTPGKVQGDNDDCWAFATIASIETGLGKSTGVLYNLSQNYVQKLQLKYYEVGDLRNSLTGFITSGLGYALSWYGVLPTDAAYDDRGMIADSDMNVPRIHVQDAMFIYTGENNTIDQLKKAIIKYGAVTVQYWAYREGEEILSEGEDISIMEHNTHFISLVGWDDNFTNDFGGAPGCWITKDSLFGYSNTEYINFADIDYFAIVPLRVAVAYIFENDIDYHVNYQTDLTCLAGFDQNYTIYSNEFTSKYDELIGAVGTYFNESGIKYSFDIFVNDKKVQTQNGTSEYAGFRTIVLNNYIPIKSGDQFKVVFKSNSVPYQAWSRVHYLNGTSLVSADGSTWTDFAPLNKTVCLKVYTLNDTTKLADANDMIIEYGEDSYFSVRAATENNISVGPGEEVTFTINNNTTTVKTNDEGVAKIKISEAPGTYKITSSYNNQSYENNITIISRERTSTRILYQNMSTVAVNSKVDGRIGKYFEVNLTDDEGQPLNNMPVQIGFNGAVYNRTTNATGGVKLQINLGYEGSYTFAIAFLGDNKYAGSFEVAIIKVSKQAPKITAPAKTYKASAKTKTITATFLSDKGHGVKGKKINFVINGKTYTGTTNDKGVASVKVSLNKKGTYTCTAKFAGDGMYKATSTNFKVKII

SEQ ID NO: 4499 - protein, 354 aa, Methanobrevibacter ruminantium
MKGLARIEQDVLGWVDAELDECGPYDAICKPLAMAPCTSDVHIVWGHAYMSDAPNRVVGHEATGEVIKVGDKVKDFKPGDRVIVPAITPDWLTVPAEQGFSQHCYGMGTGMSFVTFKHGVFAEQFHVNQADANLAHLPDNVSLEQAVMISDMMTTGFYAAELADIQFGDTVACFGIGPVGLMALAGAQVKGASHLIAVGSRPAAIKVAKEYGAHDIVDYHNGSTVEQIMELTDGKGVDKVVIGGGGKDTLSEALSVLKVGGVIGNVLHYDGIETIPVDGLSWGQGLADKTIRGGVCPGGRARMEKLANLIEYGRFDSSKLITHKFDKFEDIEEAMILMRDKPRDMIKPAVILDE

SEQ ID NO: 4500 - protein, 623 aa, Methanobrevibacter ruminantium
MISKLKKTIISFIIMGVVSFAVTLLPISGGMSMLAPDLGLIYVLGLLFGPYGALGVALAIVTLNLINGFTLMETLPFEIFTFGVSYLGYRLWYSGFKTDTITKPKLDNSYHISLFLVSIIICGFIYSTVQGISFNLIFWVDRFYIMILFYFMSFTTMAFLYGIIGIWICNRYDCFETPKKSKRHVDKRIYQAIFCMIIITSIILATSFITTDDTTVRIIELIVLGIFLFAYLTKPFEYDITPNDKDTISGRIMRNFIIITFILGVLGIAISMISYSAYSQSDNVYLVLMWGPIITDTVLLLFLIPCIFILRYIEDKVVQPISSFSKIEGFIKENEKIDEDGLVKTYSKYTDEKTEIGTLARSYTELIKHNNNYIENIREIEGEKERINAELDIATKIQESSLPENPIKTNDFTVEGYSIPAKEVGGDFFDYYMVDDENLAIVIGDASGKGIPAAILSMITQFMIKNFLKQTLNPSEVLYSLNNQLSENNPECMFITLWLGIYNTRTKKVRFANGGHNPPLVKEDKKFKYLDIDTGLVLGITGDFDYINEEIILKDELIVYTDGITDATDEDSNIYGEDRLLKFLNEFKGDEVPIKPLISDVNTFSKGVEQFDDMTLLCLKLNK

SEQ ID NO: 4501 - protein, 99 aa, Methanobrevibacter ruminantium
MNVIKNYNGKELTMAVDGRIDTISAKELEEEINAEMGNFDSLIMDLGDLEYTSSAGLRILIATQKKLKSEDIPFVIRNVNDAVKEIFKMSGFIKILNIE

SEQ ID NO: 4502 - protein, 2687 aa, Methanobrevibacter ruminantium
MDLFNLSSAQKMLLFSEINNPQNDSFYLKFRKDYDLGDYEYVKSAIELISRKYLNLQIKYDENADFKQYFVDADEVNVDSFDFSGSDLDGIDGDIGGSGVGSFDGDIGGSDVSSFDGDLDEFIKNYLDKPFDDIFDSPLYKWAVLKTSDSTVLIGVVQHILLDGTSLYSIVPSEIERCIDSLKSNEEFIPIDYSYETYVNDELEYLNSSQSQEDKQYWLDSLKGYSQDWYSFDDSELGFYEILLEKVPDFGYSPFVTALALSFLYFSKSKEGNESFKDMVFNTSVHGRYFSQGDALGMFVNTIPLRLSYDGDMTFDELLAYSKSVLKEGLGHAKLQFSEYTTDLRNEGIDPDCISMFSIVSNSTDMNSKFLTLQKDIKFPLHFRINKNYSDKKGLQSIFIEYDKACFHKREIASIAEGLKYLIRQLIDDSAKRCADYIVHEAEFFKGENYYNNLINSFDNPTAISPDLSGDKVRFVNISKHIDIDKLKNLSNRYHLSKEKLLLAIFLYDLSKFSFSKDILIAYNRVAAGYHFNTDLTVEEYLNDFKQSFEEYNNYPLLNNRKLNFESEILFFINDYDAKDYKLVFNFESGKINISYDESFYSKELMEAFLDSMDVLLGRFDSSDEPLKEISIRRELELDEGFEIELANEGTVKEMFENIASENPDKTILYCEDGQLTYDELNRKANRIANGLLKRGVKIEDKIMFMMRRNSDLIAAVLGIVKAGAAFIPIDPNYPKNRIQQILDDSDSKFVITSSEIDYDGDNRIDVDELLLDGDYSNEDNVDSNPDVDLTPDDSNPKLDADSNPKLDADSNPKLDADSNPKLDADSNPKVDLTPDNLCFLIYTSGSTGKPKGVMITHRGITNYIANVKENVPIYELNHKCSGFVSISTVSFIVFLREILGTVLNGLPVVFANDEQAVDPLEFAELFNNSDADAFGSTPTRLLEYLQLEEIQDLVGKCKVIIVGGEGFPPVLYDRLRKHTDADIYNSYGPTEVTIASHYKLIDSNEVTAGWEMLNVVDKIMDIDGNQLPPYVTGEIYVGGAGIARGYLNNPEQTEKVFLTLNDIPYYNTGDLGKKDANGELYVAGRNDTQIKLRGLRIELSEIEGAIANYENVSLSKVLVKKLNNVEHLCAYFTASSEIGLGDLKQHLIDSLPEYMVPSYFTQLESFPKTPNGKTDFKNLPDPEIDADEFISPRTDLEKELFDIVSDILGMDEFGVNTDLFSIGLTSLSVIKLTSAIYNKLNAQMNVTEILKYKTIERIASEIKIEDDESRDIMELYPLTSNQLGVYFDCIKDLENTAYNLPKKIEFTEGIDVDRLKSSIIKAIDNHPYLKTRIVMNNGEVYQQRRDELKVDDLIEISDDENLDDFVKPFKLDEGPLFRFKIVGDSILLADFHHIILDGTSLNILFDEIAKIYDGKDYELEELDGFEYSLDEVKVEQSSLYKEAELFFADKIKEFDNASLIPQDINGDESKGKAAICDVFLEKDSIDDFCSKKNISQNNLFLAATSFVINKFVFNRDTLIATITNGRFNPNQQKTLAMMVKTLPLALKLNSDSTLKDYIEYVNLEWLNVLSYSSYPLTEISNEFDITPEIFYAYHGKIIEEIEIGGMTVERQSIDYEGLKFKVNINVVEEDGQYRIFCQYNDQLYSETLIDTFLDCIRIVLDKFQRFDENTLMKDISIIENDDWSVDDLEYDEIPEDRLNKIFESQVELHPDRVILYATDGEFTYRQLNEKANRIAHSLIKKGVGPEDRVMFILNRNSNVVASIFGILKAGGAFIPVDSEYPSERIEHVLTDSQSKFIIVDDVIRKKGIDLSDYSENLLDVNELLSEEDTSNPDPDVHGNNMAYLIYTSGSTGLPKGVILEHGNIANFVYPDPRNVCTYELVHNLEKEDYKVLSTTTVAFDVFQQEIMGSLLNGVPMVFANDTEYKDPIEMMDLIHRTGANVYIATPSRLLQYLEIEAMQETMYGFKVYIHAGEPFSARLYDLLSQNSKGKFFNMYGPTETTVYCNGQLLESSDIHIGKELFNVHEMVMDFDSNPLPPNVIGELYIGGKGVSREYLNRPEKNAESYEVINGIRFYHSGDFVRVTEEGNYYVFGRMDNQIKLRGLRIEIGEIEVGLSKFPGIKSVAVVVRKIKGNDHLCAYFTVHDEYKDEKRGENGYSIDIDDLKASLAEKLVYYMVPTVYMELEEMPQTANGKTDLRNLPEPVLITEYVAPENDIEAFFANLFGEILGLDEVSATDNFFEIGGTSLLVTKITMEALNRNYNLSYGDVFSNPTPRALSELILSDETAEKKSELSYDYSEINALLKKNNLENIINGEIQESLGNTLLTGATGFLGIHVLRELIENDIGDIYCFIRANKVLSGEERLKSLLFYYFSDEYSDIFSERLHVIEGDITSFDDFEKLVHERIDTVINCAANVKHFSSGTDIEDINLGGVINGLKFAKMKNAKYVQVSTYSIAGESINNYPPVDVKFSENDLFIGQAVDNQYLNSKFLAERAVLEAAVNDDLDVKIMRVGNLMARSSDSEFQINFESNGFINRLKAFVTIGKMPYSMLMNNVEFSPIDMTAKSIVALSKTPKECTVFHPYDHHSVCFGDIIEIIKPLGLDIEPAEEEDYEKALDEALADKDKQDGVSGLITSIGSGKVKKIWVPVENVYTIQALYRLGIKWPFVSEEYIYNFVKYLNDLDFFSV

SEQ ID NO: 4503 - protein, 486 aa, Methanobrevibacter ruminantium
MYERNYKLLRAKFSEFFLPTLFTSMAGNICLFVDGLIVSFLIGASNLAPIQIVAPVITFVNLIYWMIGLGGSVLCSVAKAEFDDEKSNSYFSVSIISLISIGVLITVIGLLFSGSIAQFLCSSQPELVSQVSQYFIALVIGMPFLCYMMSLSYFIRADGIPQLPFRAILIANIVNICFDIIYIKFFNLGLTGAALATSTGYLVGSILISYYFFKKERTLEFIKLKANAFFKFIKKIVTSGFSSASTQLYLTLKLLVINFLVGLYVGKSGVVAFGICYNSLFILYIFLIGTAQTMSPIVSVYFKEEDYSGVDYIIKRSLKIVVASSLALSVLFIFYPQALLFLYSVKDPADVPVVLNALRIFAISYVGTAITFLYTFYAQAIQKNRLSTIISLLEGFLLPISAAVILSFAIGGNGIWISFAIAELLTILFIFAYSRNINKKTNGEYTGFFINKHNDDERVFEYTINGNIEEAVNLLQRKSQKLPYLG

SEQ ID NO: 4504 - protein, 78 aa, Methanobrevibacter ruminantium
MLVNIININDVVDTIDIIVRKNVDNILISVKDTGVDFNPVVENEELKFDNISVLNKIADKIDYSRVLGLNSTVITIKN

SEQ ID NO: 4505 - protein, 353 aa, Methanobrevibacter ruminantium
MFNNYKDKLTGDRKILILFVILAIFNIALYINIFKYMVDIKDINMAVIHDFVTINCAIIILGFTSTRLPNLKKRDSSIYEISYLIIIGLLSITISFFNKSINGESLWAPYLEMFRILSVVLILTFLATKTKSFKAVVRGDRSRKTIISQIILCSVLGILASYFTMDINGLPANARALVVMISGLLGGPYIGIPVGIISGVWRYSMGGPTALACAIATILAGITGSIIHRWNGNEFISPVKAGLLMFFYSGFEMFLLTILTPRPTGLIVASNLYGPMTFAAVLGILLFSLFLDEKKEKAETDTDDGDEDKKIELMSEELEEYKIKANQTEGELKEYKDKVEKLEQELNEIKGKI

SEQ ID NO: 4506 - protein, 972 aa, Methanobrevibacter ruminantium
MDKKIFIVSFILLAIFTIGAVGASDVSELTANDLDDNALSLNDGEDLLAGDESGESGKESYFNNDNNYNDENRVNANNLDYGAGDNDASKDKVLSDNVSDYIYATTLSVSVDDTPQSQYPTATVSLNDLSGNPVAEASVSVSVDGDDYMTVITTTDGTCPLSLDNYLSVGSHKVGAEYSGDGTYGPSSASTTFNVLEEYSSYLNTDLFIYTGTGREGGYTSVTGKLTHINQPISNATISLYVDDDFYSNLTTDKQGEIEGMLFNISVGRHELRGEYVGDRGFEPSNATKYFNVLPKDSVSSNIQMTLNASDAQVGTQANAYVLLERQYGGPMEDATISISVDDVFYMNVTTNALGYAFFDLSDDLSVGSHKLSGEYPGNEYTGSSSASITFNILPVDDSSYNFTVTEYANYLDTNTTVLDISSKYYVNGSFNVSVVSPNGTLSTFTQDCSPDGHNNWSMADFGIDGIGSYIISGSLIFKNETLTHFDNQTFHAICIRPIYMESTEANNPLDILVVYNSSDATKVSVNGSGLFEGRKITDGPIVWNLTDLNITELGDYNISVMSYDSKGNLIDRFDYNLTIGPNGDDYKLYAKIDPNSYSTDDVAVALYCPNASWGNDIEVHIYMGNPLEVLTFFPDSVSPTEAASFKKYTLADLRIENSNDYRVEIKDFALNQFPGISFNIKVCYSNMILVSGNGSFEIDFDGASVNATLTDSNGNPISNASVSALVNGVESNCTTDDNGNLIIPFEGNTTVKLTYIDNNGVEIKGTGKYVKESVIKNRTETKIIYQNMTTTTVNSNVDGRIGKYFEVSLQDADGNPIANKTVFIGFNGKVYNRTTNSTGGVSLQINLGYAGKYTFAIAFLGDDDYMGSFEVALITVNKQTPKITASSKAYRPNSKAKSLVATLKSAKGNAISGKKISFTINGKTYSTTTNAKGLATLNVSLSKKGTYSCTAKYAGDGMYKATSTKFSVKIA

SEQ ID NO: 4507 - protein, 487 aa, Methanobrevibacter ruminantium
MTVKVFISSNQNEFFEERKLIKKELESDSMFKNYVDVFVFEENEARSLSPQENFIEGLYNSDVYIGLIGSSYGDIKDNGLSSTEYEYEIFSRLKNKQNIYFFIKDSNEREDKALDFIERIKSDTSFKIFHNTVELIEEIKRSLKAHINQSLSNQEFDFQLLAESSCDDVSKEALDLLFDSIDYQPILDLLGNRDMESILEILSLGKKDLSGTFRLNNAGALFLAENIEKFNIEHEVKLVRFKGNTKLEMIDKCYTTSPFFILLKEFEHFYWKNIKVGSVINGLRRVNIPEYPFNAIREAMINALAHRDYSFKGSFIQFYIYDDRIEIISPGNLLYPLKVSNLKNIEVPVHRNKNICNLFSKTIFMEHVGSGIQRMCDEMRKSGLREPEFINGEGFFKVIFWGPNGKLIYPEEAVDNNVLDLTKVGLNDRQIRALSRIVNEKVKYSYERYSNEFDVSKSTSKRDLNDLAKKGLVIENKSNRRNYYFVE

SEQ ID NO: 4508 - protein, 175 aa, Methanobrevibacter ruminantium
MIDESILNLFKDEKIRSIWDDKTGDYYYSIVDLISIITESKNPDKYWSDLKRKMKKDEYNLLNKYIVQMEMPSSNGKMRLTDAGDIETVLRIIQAVPSPNAEPYKEWLAQVANECLEEYINPELAIEMAIGAYRKKGYSEEWISRKLFSMEIRNGLKKEGFKEKTNREHVLDSLA

SEQ ID NO: 4509 - protein, 409 aa, Methanobrevibacter ruminantium
MVKRELYMNKINSFIDKDLIKIITGVRRSGKSYFFKLIINELKERGVAEENILLIDFELPQYRHIKTSEELDEIVLDFIDSHPEKTYLFFDEIQNVSEWELSVNSYYKLSKSDIYITGSNFKLLSKELASFLTGRYVSINMYPFSFNEFIDYKKEIGSLPINSNELNTELENYFDEYFRYGGFPTAISSNDHKEIILNDLYSSIILNDIVTRYEIRNVGLFSRIIKFLIENVGNLISANSLYNYLRGQGMEITKPTIYNYLNYLESANILSKITREDLVGKREINGSEKYYLIDQGFYRSQLEIKQENTGRIIENIVYLELLRRGYTITIGCIGKLEVDFVCKRNNERIYIQVAYYLSSDETIEREFEPLRRISDNYPKYVLSMDKTDQSREGIKHLNIIQFLRSSEDI

SEQ ID NO: 4510 - protein, 2201 aa, Methanobrevibacter ruminantium
MMKMTKKNLFLISLILLIILTIGAVSAADDLSASSDLTVEDSGEAIATAPEESVLINENNGDSIADKGLSDPISNETANIAIDEKTTNDKAISEEDNSIYSKDKANVLRENETPVILTINAPNIYYGETANVTVSARYGAGPLANSSINLALDGAAGENILIFDDGIAQKNYTGLAAGNHAVVASFSGYGPYPSASASKSFEVLTPTVNIEIEANDIYYGERAYVTLHVTYGNQPFANNTIQVSLDGQSSTSFIVEDDGNIQVTYSNLALGSHTVSAYFSGYGPYPSASASKDFKVSKKETAVSLSVSNPQLDKGDELRFTPSVISNGFYVMANSYSIMVDGMSNYSYWTENGTYFLSTSSLSSGNHTLTVSYAGDASFLPSSANATFTVNSYKATLSLMMIETELYPGDDCYIFIDLYDSNTHQSIAANITVSVGNNSYLYPIRVNSSFNLPTDNLAPGVYNVTAFFDGNGLYDPETAVGTLTVLSKKETTLSLSISNPVLSIGDELRFIPSLTGDGSYIWGASYTIKVDGMGNQTCRLVNDTYFLSTSDFAIGNHALTVSYAGNGEYMPSSATGYFEVTPKKANLSLNMLSTELYPGDDCYLYIYLTDSNTHQSIAANITISVGNNSYPYPIRENSSFNLPTDNLAPGVYNVTAFYPGNDLYGPETAVETLTVMEENATIKTETYLSIIMASGDKYLGDNIPFSVSRTPSGVSLFGDNYIFSIDGVESQDIFYENFSYFIVTENLSLGNHNLTAYYPGDEMYLPSSASQNFTLISRPKSDVLLSIEANDTFIGEDATIIINMIDELGNPIDGANVYLYMDNKEFALPLVNGVAQFSYSNLSLGTYLVSALFNGTEYYNPANASASFEVLNANLTVTKDNFFQFFNNNGVLNTNATDLKFVGEFNDLGITSIKINKPVSIVGENANIINIPVIVSSDDVSLANIAFAYNGSEPIIYANNVANLEIINNAFSYKSPSDKSYAVNITKSENVTIIDNSFNVVGGNNTYGINIDAIGFEIDSNDIYVESTEYYASAININGPSSGNVLNNTINAYAPMMVYAINTDPSSGTLETSYRDNVIEGESYFAIGIYDDSETITGNEIKLTANYAIGIVALSESNIEDNKIKLDATNVGDEDVEDDEVDVQTAGIVIKNNVQVTGNNIDSSDASIAVVSGSSTINNNALNGHVTVGGDSSDNNIVNNIINTESEYAVELTTTTGNTVYNNEIHAADTVGNDAVNAENIGANTVEENNDWVNITNLILTVNDDSTEVTANLTDIWGNPISGIINVSLNGADPAECTVNETGLYVIPITQNSTVYASYINVDGSLSFDKIKVIVFNFPVEVLPNATIALTDLDGTVVANVTDLEGNAIANKLLAVTVNDIPVLGAQTDDEGIYSIDVVGNATVVVSYIDANGITVSSSIQIINNVETETGTIIIRPNATIALTNVDGTVVANVTDLDGNALANKLLTVTVNGASKLGAKTDENGIYSIDVDGNATVVVSYTDANGITVTSSINVVVNTVTETETLRPNATIGLERDGNVVIITLVDSDDNPISGADVVVYVNDIETLVDPTDSEGKTNVSFEGNATIEVIYLDDNLIAVSSSIEIINNTEVEIESETLRPNVTIGLERDGNVVIITLVDSDDNPISGADVVVYVNDIETLVDPTDSEGKTNVSFEGNATIEVIYLDDNLIAVSSSIEIINDTVEGETIIINPDATIKLHHVDNKVIVNLTDLEGHPLADKVIYVYVNYEEIEGAKTDENGLYSVDIEGNTSVIVTYVDPVGRRVTSSIDVVVNTETETETVVIRPNATIALTNVDGTVVANVTDLEGNAIANKLLTVTVNGAPKLGAQTDENGIYSVDVDGNATVVVSCTDDNGITVTSSIIVVNSTEIVEVEKIVNQTVEVEKIVYVNQTVEVPVEVEKIVYVNQTNNNTIEVEKIVYVNQTVEVPVEVEKIIYINNTVEVPVEVEKIVYVNETDNSTIGTEKIVYINQTVEKIVYVNQTVPIIPNRTATNIICDNMTTEAVATVDGRIGKYFEVTLVDADGNPLVNKPVAIGFSGKIYNRITNETGGVKLQINLGYKGSYTFAIAFLGDDDYNGSFAVANVKVTDQNAKLTASGKAYKASAKTKAVSATFKSANGNAISGKKISFTVNGKTYSATTNDKGVAKVNVSLNKKGTYTCTAKFTGNGMYKTTSTSFKVKIF

SEQ ID NO: 4511 - protein, 3053 aa, Methanobrevibacter ruminantium
MVIMNNKKLFIVSLIILTILTIGAVSAADDGLATSDEITVDDSSVAVSTASAESDIYETNGDIVADYQSDSISNVTVDDDNTKDEIIRSSPAKDNLLLDDDDDPGAVNDDDEGDDDEDYLDDISVSITNEYDVTDQDAVIVSIFVPDVEEGEDGIEGYFVVCLDDDDEIFLGPFNHTITPDDYGTDVTFTASDLEITEAANYWVRVFYVSDLAEPLIDNDEEDGYNMIFDGDCIARDYTQFYVIVPPDGRISIFDTSAIYTVYCPPGSEGTVTLTLRDEEDVETSFTQEIEDADDENQLYWDLDYMGLNTIDAAGNYEVTITLENGTLICEDDIRIMDPIEIPEVSYINSTDYDHATLVALIKIPSELDDDLEELIDGTVIIQIDDETVFEKTLSEFVEGESPDDPFWVYPKIHWSDELDTSVKLYYVLNNQLDIDLEPGTYDVTVKLDLDGWDEVSSTEEVRLVESNVVIDEDIGASIEIFDQEDILNDNEVRIIAITVTGDKSGRVNLAVEGCPEWECPLDELENEGDIYYINSGFDIESGEHEVVVSYVLNDDRSVSNSAILNFIVYPRIFICGNGGEDIVNYFADEDSAIHIYPKGDDVSTIRIVVTIGDEVVLDSTIDDLGLSPKINDWGETYYTVGPANFNKKLEFGHYEPVVAYYYSDAYELSTEDGELSFIDIIGMVHVADIEDDETPVLAVCSDRDGQIGVYIRQYTEDGDQELEPKYFEVEKHGFIMPTIDQLGLDEGQYHIDVAYADDEWIFGNDLIVVNSSEYFVLYGCDWLYTEESVVYVWCPDDAEGIISLTNNDGTINVDHEITDEDKGKYVEFTLEELGISGPGWYEISVRVNGNEIDHIGFDVPSPIYMPNYNVYLPEEGYEPDYSMIIAKLELNSELEGNITINLDGTIVFNKDIEDMEAIKDGSKWIYTIYTSDLDEAEEGMHDVTVTFNDLNEERSIEFLNRTTESDGNLSIIMLGGTYCINWNDVIAEVIAPTNYNGRLVLRLQGEIMQSWDELHWVNWDNYNDTHNIYYIYVDNLDKMCIENPGEYTVSLEYYSDREDENPSLQNSEEYRFVRDEEPSGDFEWEVYHWADYEDENSLLVTVRYNDNIVDGRIEINIEDPNGITLTDSRDVGEGYEDTWLVSDLGIQEYGVYTISAKHILGDDEEIIFENEPVYVTKIQIRGEEEVYVDDPLFVLAIYHAGDRTTVYLNGAGIEGRRLPNGGPLVWYLSDLYINEPGEYDCTIQLFDEDDNLFAQTEYYLNVIEGDDGYRLIKNLDWDYFTSSTPVAALYCPEGSVGDISIDIYAPDDNDDDYRSRDIVNTILDSIGSEDVGGFKIWTLGDLGINEGGWNYGFVLNDADGDTITDENGENCEFGFGAVLYHGIGIAIWDQNPVALDNEWLVDIYSPLDNDGDVILMIGDEVYFSDTLQNLAMYQYDEDIEQGCAHFHFGANSFNRTIETGHYEEVIVYYDGFDGYSTDSTAFDCPTVLDFGKPMNFDWSVKGAYYEYYDNNVINVWYNEEINGGQIKIIARAENGTEYESVKDYNDNRNNEWTITDFGISEIGKYNLTLIYINEGDEEIVRDDKVLQVLTFDPRFANWVTVDHPYDVLAIYQATEEIRVYVNGEGPYEGIKMPNDGPLSWDLEALGISAAGEYEILVESYDGEGNLLSSFEDVLYVSDEMNPNEYRVEYANDWDFYSLDSPVFGLYCPEGSEGPITIEVYGPDDNDALLNTINDNIESGDIGTIKSWTVGELITNLNGWDYRFVISDANGIIKNGNDEDIGEFNRGINFHDSIDYISINEWSYLDDEWFIDIFAYTGNDGDVAVEFDGATVYNGRLSDLLFFQSDEDMQRGIAHYHIPVSYLSNEGNPIEAGLYLNIIVKYYGDDGYNTTGYTLQSYIDENGFDWANVRLSVGDDPNTIILTLTNSHWEPLADKEVYISVNGGERQWGLTDEYGIAIFTIDGGNCTVRGEYENAENQWSAYEMTLCVFGEPIYPNATIRLEFVDGEVIVTLTDGDGAPLANKGLGLAIDGIVVIGPSTDDYGIYRMGIEGNATVEISYQDENGIVVSSSITIVNNTETETVYVGPNATIRLEIVDDNVIASLSDGDGAPIANEFIDVSVNGVPVNGAMTNASGLYSISVEGNATVEVSYTDDNGITVSSSIRIINNIETVPEPVNVLPNATIGLSKDGDSVVISLKDGSGAAIAGASVNVSVNGGDVTLVGPTDADGKASVEISGNATVVASYVDNNGITVSSSIVINSETVPEPVNVLPNATISLSKEGNSVVISLKDGSGAAIVGASVNVSLNGGDVTLVGPTDADGKTSVEISGNATVVASYVDNNGITVSSSIIITNNTEIVVIEKSHTADALFNVIIQEDKLGVWLYNNNEEELANKNITVVFDDDEEGQNYLTDGQGYTSIPIGDHSIIKLSYTDEDGASVFYTVHLFETGEVVDADYVVIYITPLDDSSLEVSVSVNGEDLEEGEITYYLGEDAEGITVDLEDGVYVINYDNTVNQTIAVEYIDDDDVSWYAYYEVVVYNNTVTETVYLSPNATISLSKSGNDVLVSLTDNDGKAIANADLDVLVNGAKSTAKTNAKGEATIAINGNATVVVSYKDANNITVTSSITVVNETETVVIEKNNTIIEYVNQTVPPNATVSLSLVDGKVVAEVTDGDGVPLANKLLAVTVNGAPKLGAETDANGIYSIPVEGNATVVVSCTDNNGVTVSSSITVLNNSETVVVEKNNTIVEYVNQTVYVPVVSNSSFDIVGDENGISAILLDEDGKPISGAVVELDVNGAKSNITSDKNGEIVIPTDKNGTITMTYTDENGAKLIYTTKVITQTEIIYQNQTIEVPVYINVTPNRASTKVIYNNMSTTSVNSNVDGRIGEYFKVQLVDSNGKALANKTVYIGFNGRVYVRQTNETGGAQLQINLGYQGDYTFAIAFLGDDDYNGSFEVAIIKVSKQSAKLTTAAKTYKTSAKTKALSSTFKSAKGNAISGKKISFTVNGKTYTGTTDSKGVATVKVSLSKKGTYSFTAKFAGDGMYKETSVSSKLTLK

SEQ ID NO: 4512 - protein, 282 aa, Methanobrevibacter ruminantium
MRNIFNEGELDKDSVCAKIAHTASDGKIYKTNFYNLDAMISVGYRVNSIKATRFRQWSTSVLKEYMVKGYVLDDVLLKNGTRFGKDYFDELLEKIREIRASERRAYQKVTDIFSQCSYDYNPKSEVAREFYAKIQNKLNFAITGHTAAEIISERADSEKEHMGLKTWKNSPDGKILKSDISIAKNYLSEDEIKSLNRLVNMYLDYAENQAYMHKLMGMDDWALKLDSFLEFNDFEVLDNKGHISMNEAQKIADAEFDKFRVKQDKFYQSDFDKLLEDVKRLK

SEQ ID NO: 4513 - protein, 1186 aa, Methanobrevibacter ruminantium
MKFNKNRGISAISIILILFLSISMASAIEISADDADMDSGDLSVCEVSTSDCYGETLISADASGADSSDEIIINETIADEKTDYRSSILADGEKKNLHVEVSNDVFTPDNDYEFMLYDEDFNQIGGYLDIYLNDELTYSDFTVDSSESSSISLSGLECGLNKITFIYDEDDVYNRLNQTKEFYIYGENPEFVMIPHYDTITLNGNYSSRVYLKEYDEWGYYDEDNEGDIEPIDDKFNVYIYKENPGDEYELVWEDEFEANGTINFDDAIKTTGNYLIRYVFNGSSDYSYAPYNSSNIIRCVNVITDFIINDTYFIPDKGFGFSVYLVDNATGDIIDKEFKLMVYYILDTSNPVRIVEEEMVKGNKTYTFDCSEIPENITYLFIGCIFDGDRDEYSSADKEYALELTDSRIETSINANIGDSVIGNSSSFRVYVQDEENWGQIDATLDIYLNEEYSQTVTAYAYLENEVLIENLKKGENTLRIVYNGTDIYQNSEKSYNFTVSDKRANIEVDVSNIIVGDVTKITVNLTDEDGNILNKEFNVSIYKGGSYYDEDSELIYSQVYTGSANISLPDLEIDDYYVRAEFVDESFVYSQAEDSEYFNVYSKGSYIDLGKTYWPDNDDVVLNISLRNYIEENINGEVLFQFNGTDYPLTCTEDGAILNLGKLPVGKYQIFAKFDGDGEYEASNLTDQLRIVKATIINVEACDVLKGQSETVNITFTDGDGNPLDVKMLDINIWDTDGNWLDYGQLRNSIEIKNIQTDYIIRAMLSDSYGEIGYSDYYPSSAYGFIRVLNGTDPTVITVTNTANIDLAIDGPKVIITLTDEDGKAISGAKLNAAVGNMESILTTDSKGQAVLAIGANDTAKVTYTDENGAGVSASIVNNVINTTVTEIVEKNITVPVTANATIDLAIDGSDVVVSLNDLDGNAIASASLDATVGTTNSTLTTDDKGQAKVAIGVNETAKVTYTDENGASVSASIVNNVINSTVVINNTVKRNATKIIYNNMSTVSVNSEVDGRIGEYFNVTLVDSDGNALANKTVYIGFNGRVYVRQTNETGGAQLQINLGYQGDYTFAIAFLGDDDYNGSFEVAIIKVSKQSGKLTSSPKTYKAKAKTKTVSATFTSSYGNPIPGKKISFIVNGKTYSANTNDKGVATVKVSLSKKGTYTCNIKFAGNGMYTESIAKSKITIK

SEQ ID NO: 4514 - protein, 486 aa, Methanobrevibacter ruminantium
MEYKKMLAEIDFSKDLIGFFEDKNLCIINESLLDGTFGLSRDILFDKRILFNNDSLIDSFLLNAKAYNLNNEFFILLSNIIRNDFQEAISNKSNNEILDFEETLEKESPFYSGIPVSKEMFVGRKDSIHKILRNFPHIFKGQTRHFFLTGDRRMGKTSLIDFIGEYMKSYGVVSVYISNKGNDSVEFLAYEIVEGLIDELTLPDESLKTKIVDFFQDHVESVEFKGTKIKLTVDKNLSVSFKEDFINHLKSIYDEFGMDKKGILIVVDDINGLSNSEEFVHWYKRMADTIQVSHINLPVYFLLAGYPEKFYNLTRLDESFGSIFAYDNLDRLSNMEVLEFFESSFGEKSMLIDKDALFYMILFSQGQPLMMQELGESVFWECPNGHIDKYIAIRGIINAANVLASRQIKYTLNILSEDDKAIFKSLISDGKFFFNSSDICDEGFLESMFDLSLIEVSKKEDYDFCFKNTLVFIYFWVEAIQGLIEK

SEQ ID NO: 4515 - protein, 202 aa, Methanobrevibacter ruminantium
METKNLIIICVTLIILVCLGLFLISHMNGQEETHITILTSQYLTEGDTLKLKLCDKDGKGIADQKISLKIQSKDGNFNDDIVIKTDENGESQIQNLQRGNYTLIAKYDGTSQYEGYGLTYEFIVSPKEVEQSSKTTSTTTTATSNNGDYASDYKADDVIDGWDPSEHEVSREYLGEGEYRVNYDDGYSRVIDSDGNVLSYGY

SEQ ID NO: 4516 - protein, 840 aa, Methanobrevibacter ruminantium
MAMVSASDISADDSVSLDAADSDIVSTDSISVDSVNTYSADSAISSNEDKDNYHPSNLKDDDNKISKINYELNDTVFYGDDVIINANLTDMDGNIIDEFFQVTVYDEGNPLQSNSLKGKGTMIVPTVSLTESSYYDVALSFAGNEEYASCNEFTSFNVTFKENSYLAISNYDSYSKINSTKINFIIYDVDDEYINDTADIYLNGEYYTSVLTNGNENEVTIENLQVGENTVLVKYNGSNIYKGSEDSATIMGYEKDTSIGIDAPDVLIGNDARIKINLTDEDGNIVNGRVDVEIYEYYTGDDESYVPFKDDYVVNGEAIIVIYQSKLRAGVTYFIRADYEGNLTYFRSVGSDYFDCFNRSTEIVIDGRIASDDKDITLEIGLFDQRQVMIAGLVNLTVFDNESNVVIDTISVETSADDYVNVTIGKLPYGHYMINASFEGNEEYEGCELEANLHVFKATNLTIEVRDQIKGESQIVNFSLVSSDGGLNESASLIIRNMENDLIYDGIINFTDGKASYNLDNLEEGLIILADYNNGMDLVGPFETVYDSASKFATVRIIKQLNGTIEFEPVNDSIIVNLKDIDGNPIAEAPLSVDVNGQVFELITDDNGQAMLDNIPNNVTIEVKYTDNQGLVASNKIVVLVKEQIKQRAASKIVCKNMSTVAVATPDGRVGEYFNVTLTDADGNPLVNKTVMIGFNGRVYTRTTNETGEVNLQINLGYKGSYTFAMCFLGDEDYNASYEVCVIKVSSHQPKLTGSAKTYKVSAKTKAISATFKTSNGNVISGKSLVFIIDGKLYNAKTNSKGVATVNVSISKKGTYSCTVRSSDDGMYAATSTKFNVKIV

SEQ ID NO: 4517 - protein, 279 aa, Methanobrevibacter ruminantium
MFILKFEIKRSLIFISILAILILSIGMASASEEISDSVSTDIASEDVTSEIQTDNVEITNLDEDSSLDDADLEKDTGDKVKKAKKRINTKIIYQNMSTTAVVNEYDGRTGEYFNVTLVDEDDKPVVGELIQIGFNGRIYNRTTDSNGGAQLQINLAYSGPYTFAICYLGEDTYESSFEVAVINVAAKKMTLTVPSKSYKASAKTKTLTATLKDNKGNLIKSKQISFTVNGKTYSAKTDSKGVATVKVSLSTKKTYSFTAKFAGDKSFGAVTKTGKVTIK

SEQ ID NO: 4518 - protein, 4825 aa, Methanobrevibacter ruminantium
MQAIIPVKDNFLILVTNMKKSDFKRIFICLVLLTCLIGAVSAAEDVSVDDVSTDAVAVDTITEDASDPTDISTVSEPVSNDVQANTSQELNKEPATKSTNVLKDGTSTNIYVATTGSDENDGLTQSTAVASLAKAVEIVNATAGTDFTINVANGDYNISKIESPAAKNVNLIGESKEGAILHASDTYGINVYEDNIAWTIENLTICDFNSTTSTSAAVRCFAIDSVFNINNCIFKNIGSKNGAIYITSTGTRTISNVLIEDCFGTYSSSSSIIHLYGEGPVTLDNIEIRGSYMDPSVGTATYLRSVIYADQAQTNVTLKNSRIVDNIGAMGSLIEAKGAFKVINTTFEGNYLNTSSNGVNGGTFMFYSGTSSNSASNIDISQSVIKDNVLAGGSIGLFNCVYGTHNIDHNVIMNNKYANGNDVPLGSFSGAAISTDDNYWGTNERPNTKTTEWVILTVDTPEMAFVGVSEAIPVNLNTYKTTNNETGAVEGMPDVDFGVTYALNQANPSTVTVANGQGTINYLATVDGNETLTFSTGDAFSFDVKADIASLIYVDGLNGNATGPGDSEHPYKTIAQAINVAADGKIIVIKSGTYTENSLIIANNITLKADKNAEVIIDANNEGRIFTVQKDAIIRDLTLINGKSTGNGGAISLDSGLLTLNNVKIYNSTAQSGGAIVSLSGSQLSVSNSEFIDNNASNGGAIYVAGVADITNNKFISNDPEDGGAIYVAGVADIESNEFTSNHATNGGAIYIDSENNQTIKDNTFTSNTADKGEAIYIKNANVSLSGNTMGENDSIYLDGASLKTTLTFLGGKTIAAEFGQTLNLTATLTDEDGNNIRGGIVTFTANGETIATIDLSTDAQLKTQYTVPNDAAGDITISGSYSLDNGGAVISGKIHPAVPHWFIEGGSGYETLADAIDGASAGDIIYYDLPEDYTEVISSKTINKALTIKNNGTGVVTLDGNLDRILSISSASVNLENLIFINGATATNGGLIYLSGSASNDLNISGCTFKDSKFTTTSTYTYAVAIYANGGNINIKDSEFRNLTAPKTGMIYQSSSSGAITIENSLFDNITGAYDGGLINSNGDVSLVKTNVTNIFGSTSTSDYGLIYIRSYGGFLFISECQFINISNAGAHPVYYRGSGGYNITQSLFMNINSNKIIDASAKGYVNYNIFANNSNNYVLYGSSSSKISADYNFFGSNSKPTSYVSNVNYTYWTIVELSSASDTAYVGNPTDIAIQFVGTDGSENLTLEGIMPEYTFTLNVTNGTIVPNTVTLEDNEANAEFTPTSVGKVNITATPGPAQLTLNVIDPSILLVVSTDGSDTNPGTLNSPYKTIAHALTQANATRNVIYLLSSDDAYAEHGLTVSDNITIRAEDNTVTIDGGQEGPIFTVTGTLSIEDIILSNAKVDEDNGIGGAIYLNGGNLTVNGVVFSDCIAAYGGAIATTAGSNLTVINSVFSDNKAKYGGAIYVAGEANISNSEFSDNNNEITYGGAIYVNGTGPVVISANEFDNNKANKGEAIYIENGAVNVSENTIPANETIYLAGGSINSVLIFLANGTISAEFEEEVNLTATLTDDQGNAIKGGIVTFTANGETIATVDLSTDAQLETQYTVPNDATGDILISGSYSLDNGGVVATGIVHPAVPHWFIEGGSGYETLAEAVDAASAGDVIYGDAGTYDVSDLIINKAVTIKANESGSIVLNGNGNQIFNTRANVILDNLTFINGSASSNGGFIYVYSDSLVINNSVFKDLKATGGLGSAIYVATGSSNITIENSAFDNIKAATGLINCRSKTTTFTLVKTNFTNIDVSTNGLFYLYEGGLRAYESQFINVSGGDGAVVYFYGQSDNIVTKCLFDNVTTTKTTGIIYSNSKSANITYNAFLNVNYGVYSSSSYGEVITADYNYWGSNDKPGTSLVNSNSKLNNWVVMTVSPDTLDSLDSGATQAFTVDFTHYTDGTANYTMADTIPELTVSASAVKGSLDQSEVETQNNVATFTYTGSQNGEETVTFTNANLSIPVKFVVGEGYFGIVYVAKNGSDENKGSEDAPVATIARAVEIAQRGSGQIIITEGVYNENNITINSEIPISIKGQGDVVIDGEGLSSLSIFTIKSGEVSIEKISFRNNKAKFGAGVNVQGTSGSSLLDANVLINECNFDNLSSDASGSQGGAIYAKYLKGNLVINNSNFTNSIVKSGGGALTVAYCAYEDALDLVISNCNFENNTANNGGAAYLMANTINIVNTSFINNNATYSPGALELYNCTGTMDNCSFINNSAKNTAAAFKLEFVKDQPITSLIVTNSIFKDNVGRDEVAPAIFVDRASLNISNSILLNPLNINTSTVTGYGAVPGQGVTVANSNWWGTNENPSNLTAGSGDNVNTTIDNWVIMNVSPTEAIGYTGEALEITVDFKYTMSADGTIETLAGTLPEEFTVNANAANGTLDKTTADTSNLQAKFAFTPEFAGENIVNIYTTESNTVPVTIMVTEKYAGPIYVTKDGDDENEGSENLPVATIAKAIELAQGKSGLIFIGEGTYVESNLTISKDLNITALGEVIWDANGQRAFSMSTGSVSISNITFINGNYTRNGHLIYCAGDSLKFDECKFLSNGGNVTGTNGVIYVELASANFNNCYFENNTAGTGTSYGLISAKDSVIIVDGCTFVNNFNKNGCIYVSGSNIGSMAVINNTKFIGNNATSASGGSGGAIYASGSMAYQYSNGTVRPGAQSAVYVIDCDFINNTAFGGKYYNAEGGAIFVNANATLYASNSRFIDNTALDYEETNKSGRGGAIAATTGNVQISNCIFQGNTANNGSVIAMKFANKDLTTVNVLSISNSVIMGPGEKLIVSDFTNGSLVANNNWWAANENPSDRVSEGITVDSWVILTADPSEITGTLDEIIPIVANFRHTNSTDGTIGDLEGEFPELEVFGMTLDEGEITESNLTVDNVATLYYTPEETGETTVYAISGNAMVPIKVTITDTPQPVADVIYVSPSGADTNAGTYEAPVATIAHAVELAGAEGASGLVVIEEGIYNENGIVINSAIPITITGNGTVIIRGNNHVVNGNGAGRFGDVSESTSIIIVNTTEAVVIANIAFEDNIAANGGAILIAGTSSSNLFDADVLVENCSFNNLQGRNGGAIYAYYAIGNLTVANCEFTNINATWAALCAYQAAYGEGLTVEIKDSSFTNNSANNAPALYLQATNVVIKDSNFTDNNATYHPGAIYLQNTTATIDNCIVANNSAKYDKAAIAIHGGNIQYNPVIVKPSEVTITNSIIENNIGRDKAAPAIYLENSILNMSYSSVVNEININNTVTATYGDEKPGLVLINNNWWGTNDPSTTIFGTNITMDNWVIMNVEANATEILAGEEVKLTVDFNHVNTTAGEIEELTGGVIPRESYSVALSVDNGTVAPETLTIANGATGEAIFTAANANALITVTSENAVETILINVGEQPVPFTGVVYVSKDGDDANEGSEDEPVASLARAIEIATAEEGSGQIIIKEGTYIVDGYNITKDLTITGEGDVILDAQNQGNRLFNMAYGTTVSNFELHNLVLANVTAMYGAVVYSYAANAVLDNITVAGINHEMARLISNYGNLTIKDSVFANNTVSGIITHSGNNNLNIVNTIFEGNNVTYDSSIMGVVYVSSGRGNITIEDSKFYDNLVRQSTVRGYTDTNITVKGTEFINNTADNSPYYCSGGAIFAQANLDVTESIFINNNARREGGAIYIGINGVANITKSEFINNTIYDNEYYGDAIYTKGTTAINYCIFLTNGTRYAVYNGGSKEVNAQYNWWGTNDDPQGFAYSADASNWIIMTVTAPSTQDIQAGDEYELTVDFNHYTDGSDILELPDSLAQELTVEFTSTTGTFDNPVVTTENQVATAKYTVVAGENSITVKSTDAVWNTSFTAGEKAKAKMNVSMENNTIIVTLTDEEGAPIAGKTISVLINEDTLSNETNSSGIAAISLGTLDAGTYPATISLADSEYQAPELTVFVLVEETLVDNPIGAVIELALAENGTSIEVTLKDINGQPIGDTIVRYYIGSTDGALLPIDANGKGSFDIDNTVNQTIKVSYTKEGTEWSSYYDFIVNNEVTPVPVANNAKFDVIVREDSIDVFLYNDNLDDFEGAKIMVTIGEEDPVEYIAGENGNITIPINGDTTVELSYTDENGATVYHTVKVSTSGVDPSAEIEIIVESHNDTSIEVSVTVDGDDVSDGEITYYIGDDDDGTVVPIEDGIAIIPFDNTVNQTIEITYSDGDATESVYYTIVAFTHEVPVEPPVANGSFDVETTDDAIVATLVDSDGKPIADATVSAIVNGEEQNFTTDADGKLSVPIDGNATVELSYTDPENGAVLKYVTDVVTKEVPIEVPVVANGTMSVETTDDAVEATLVDSDGNPIENATVTAVIDGEEQNFTTDADGKVSIPVGENATVELSYTDPENGAVVKYSTKVVTKEVEVPVDVPVVANGTLTVETTDDAIVATLVDSDGKPIANATIIAVVDGEEMEIPTDEDGKCSVLITGNNTVEFSYTDPANNATVSYSTKVVTEVEEVIVPVPVVANATISLSTEDGSSIVATLKDLDGNAIANATLDANVNGEETKLTTDANGIATIPVSANTTAVVSYTDSNKATVTSSMSLTVIETIVEINKTIEVPPVRNASQIVCEDMNTIAVAKDDGRIGEYFYVKLVDANGNALVNKSVQIGFNGRVYNRTTNETGDVKLQINLAYKGTYTFAIAYLGDDNYNGSFVVSKITVKQQSPKITTTSKTYKASAKTKALTATFKTANGNLIADKTIKFTVNGKTYSGKTNAKGVATVKVSLNTKGTYSFTAKYAGDDTFKATSASGKLTIK

SEQ ID NO: 4519 - protein, 2676 aa, Methanobrevibacter ruminantium
MNFKKLLMISLILLFVLSVGFSTASAIDSDNLLDENNNINVNYIDSDNSDSILISDNSNDAKSNNLILNNSINKKELNDNSNSNSNLECDSSINENLDLENNYKINEKSAGLKDNTNTIYVSVDGNDENDGLTLETAVANISKAVSLAGEGYTIHISSGTYEQNKSTQLSHAFNFIGEDGTIIKRIGTANAFTYTSDTKKTISFKNIIFSSTTPNPSNPILSMAGGADLQIDNCTFTDAIAGRNGLIRYLGSSTGKITNTNFIGLTGSTSASSSYITALAQSKVKVENCTFANINEPGFLNSLVYVNNNETNLTLVNCVFNNITGNLNAVVNNRGYMQIKNCSFTDISLSGNSPRGIVWSSETISKNSITYINSSVFINNSVNTEVVVNSSVIQAKSPTIVEYSAFLDNDVVFIINNDNDTDVTANYNWWGTNEGPKNCSVNRESSASSNPSSSSEEKISLVSDGVTVDNWAIMTVDLETSGLIAGEDYPIIININKYMNERGEIDSSVEYGISGAEILLSSQIGTFNSDFIIYNEDNGNIIQNQAKVYTNNGAVTVFYKATEEGSDTLNISSGYEEIVYNLEFGQSIEYNDIYVSKDGNDNNDGLSNETSVLTIARALEIGENLNSNIRIHIGSGSYHESGFELNGTYTVQDGVLQVKRTTYSFIGYGNVVIDGDGQNKSLFTVRNNSVSYKNIRFTNVDGATYGGAINGDNLYRRTAYIDLTINNCTFDDLHVKSSGGAIYLNYVSGRISINNTKFYNLTTNSSWGGAISAEEAFDLARVKVTNSDFRDNYANNAPAMYLRVSNVTVLNSNFINNSAKYYPGAIHFYNASAIIENCVIANNSAKKDSAAIKISEGTNDVGNKIIIKSCIIENNSARDEISPAIYVEKGALDISYSSVVNDLSIATRTYYSNLYGLQQGVAIANNNWWGLSNPFGENEIGGNYSSLLGGVFNGSNITVDSWVILNAVLNDTGVLKVGNIVNISIDFNHVNTTRGEIELLSGGKIPKEYTLRLNATGGIVYPNYMKTVKGEANSKFTVRDLDNLGDDFASCGFDIISDNEITHIVFEINNYKGVIFVSMSGNDDCNGSMDAPVRTINKSIELALDEEFGSHEIFVLPGTYEAYGIELDSTYLSITGSGRDSTILDGVGYTGGIFNIFESELTVKNLTVINGVNTVSSGGAFTNMGNLTLEGVNVSNCQVRNANGAAIYSVGNLNLINSSFVKNTALSGNYANGGVIYADGYSTSLPYPPSLNITDCEFISNAAQGSTFGGGVIYAQYLDGYKSIKNSKFINNTAEFGGAIFLQDSEGDFIIDNTSFIGNKATGQAGSTNPYYGGGALNLIGRTDGREGNFIITNSLFINNSAKNSRGGGAILDRNVDLNITNSVFLNNTDTNKSVQVFKDTTVYFPSGGRISLEDNWWGANELSSLSTVAANVTINRWVVMNLSVELIDDLDSWGLNLGNSLDDGLNTDLGNTLTENNLNNYLVKVLLNEYNDGTLIDNPNYYPLLRLYTLESSDGEINPSFGILQNNCATALLSSSNRENVIRATIDGETLEFNTIDLYTKTVLDIEFDSPIKAGENLTVYLNLTDIDDNPINGTVILNISSDLYETVETVNVNEGKGFKEFSGLKVGVYTVLANYYGQSIYLDSNDSKVLEISPISSYLDLESKEISIFLGFGNLTGTLSDDNGPISNRNVSLIIDDDTILNGLTDESGQFLIDLSSLKVGNYSDLELVFEGDGDRLSSSDLVNITVKKIVLNLNLIVEDDSIVVNLSIDDSVLDYLGVDDSLDDISLEGLTVLAFINETDRVSDLINKSAITDDNGIATIDISDLNPGNFTALVSLKENDNFEIDSNKDINFSIDRYKTNLTAIIDENNSYILINLTSDIGLDSKTVSVTIGNESFDVITNSSGLYGLDISDLAPGYYDCLFVFDGDDYYDSSSDSLNFTIENRMSELTAIIDDNYESILISLTCDGIGLAGKTISVTIGNESFELITNDSGLYSLDIGDLVPGYYDCLFVFAGDDYYDSSSDSLNFTIDKYSSDLTALISEDSILISLSSNNLGLDNKTISVTMGIESFDVITNSSGFYSLDISGLGPGDYIDCLFVFAGDDYYDSSSDSLNFTIDKYDTKLDAKNTIGSFALVNLDAKLTSGENALKDKSISLHIANKTFTKKTDDQGKVVFDLSSFDPGNYIALLSFAGDEYYKNSTVSVEVIINKLNADLSSEFKDKKLYISLSHKGAPVKYMNLAIEIIDSSNKSTVSNALTDNEGHFIMDLSDLSPDSYVSIIRAIGDKIYNPASDEIEFVIGGDTPSKSTRTAADLQKLIDDASSGDIIDLGEYDYLNVSNINITKDIVLIGNNTSISSSGDGNPIFNIATGLSSVKISGIDFNASNGDVIVKAIAQNGTDSLSIIVPAIEITNNTVMGDNIVPESITILELDSDRGVLAPNNEIYIANNTLEIGMKPFEFKVKSFENDSSANVPIGGGLNGKKTSIIHYENMDTVAVNMDIEGRVGKYFEVNLTDSDGNPLADKKVQIGFNGVVYNRTTNATGGVKLQINLGYKGTYTFAISYLGDDEYNGSFVVAKIKVSTQKTSLTSTSKTYKASAKTKTLTATLKDSKGNLIAGKTVKFTLNGKSYSAKTNAKGLASVNVSISSKKTYSFTAKYAGDDMYASSSASAKLVIK

SEQ ID NO: 4520 - protein, 3391 aa, Methanobrevibacter ruminantium
MKIKNIKYLLISLVLLMFLIGAASAADDAVTLEGDAAAVDSISEDASAPITTTVSEDASIGTTFSDSAIESDSIQSNDDLELKNVTDVKQKDSSDALKDGESTTIFVSTGGNDNNDGLSLETAVATVEKAINITKTGGTDFTLLISNGDYNIEQITIPVGKYISIIGESKEGTILHASGDYGFDISYGCNFENLTISDLNSTSSTSAAIRIIMDNYDININNCIFKNIGSAYGAVHVYSNGKTSISNVLIEDCFATKSDDSSIIHVSGKGPVSLDNVEIRGSYMLPPAFPWSTPYLGAIIFLSSADPDVTLMNSRIHDNNGSIYSIITSKGKIKIINTTISDNCLNASYASIFSSGVNSNTATDITVTQSVIADNILANNAVGLLDARFGVFKVDHNIIINNKNANGNDLSVGDLSGASSFSIDDNYWGTNVRPNDKTSEWVILTGDVAECAFVGVCENIKIFLNSYVTESGEIGVIDGMPTVELAVGYALNQENPSAVTIKDGVGTISYLASIAGEETLILSTGDVFEFNVSSEIGSLIFVDGSVETSGDGTQENPVKTIAEALNIAADGKIILIKNGTYKESNLLVDKDITIKPYDGADVIIDGDNQDRIFTVTSTATISDLSLTGGNATGDGGAIYLNGGNLTLSFLNISNCIASDNGGAIATAAGSDLYLSNSIFTDNFASKGQSIFIGGEAEILMNDFVAHMDVLSPDASFNAISINTDSPVSIVSNNFNDNGAIKGQAVYIKDAPVSLSGNIMDDEIIYLESGSVNSNLIFMDGKTLTVEPGADVNLTATLTDDKGNLIRGGELTFTANGVAVGDPIDISGDNELRIPYTLPSDSEGDIIISGSYSFDNGGTIVNGTIEPDIPYWFIEGGRGYKTLNETVENAVAGDVIYGSPGTYIANGIFITKDLTIKANETGDIILDGNGSRVFTIKNQATLSLVNLDLSNGGSEGGGFVYIYAEGGNLNVINSTLRDLNIVGYPESFEGGAIKTYASSTINIESSHFENINSSAFAPILSGLGGVKLSLTIKDSSFTDIKGTAMYGLMNAPGKVNIERSNFTGIIGNTTKQTGLIFADSTSNYLINECLFSNISTDSVIRFKNNGNITVTKSVFQNIQDTGGALYIYNPGSAKVNYNLFIDNTNLNADSNRDIYSYGSNVDLSYNFWGNNSKPTESQIYDVSKAPYWTIEELSMNSDYIFTDETADIAVQFVGTDGEENLTLDDVMPEYSFNLEATNGTLDANTVTLVDNEAIVTFTPPSLTGTVTVTATPGPAELTFDVIETSKLLVVSTAGSDENAGSFESPYRTIAYALTKANETRNIIYLIYTGEDYKEHDLTLAGNLTIMGENDEVTINATIGRIFLVTGNVSIKSLTLSNGFDQDYGGAIYVDGGNLTLDYVNFNSNRAYGLGGAIATSSESNLYISNSIFTDNFASFFGGAIGTASGSNLSIDNCIFSDNKASYGGAIYLAGESLILTSTFDGNHILLDDGRGGAIYVNTTDSVVISSNEFENNFAYTGEVIYIENGIVTLSENTIDGDTIYLAGGSVNSNLVFMDNSTLKVELGETVNLTASLSDDCGNPIRGGSIIFTVNGEAIGDPIDISGDNELKTTYTVPIDASEDMIISGSYSLDNGGIVKAGSLHPSVPHWFIEGGIGYEYLSEAIDGAEAGDVIYYDLPEDYTDVISSKTINKALTIKNNGTNIVTLDGDGNNVFTVSADLDLINLNFVNGGNTKGGFISQSSNNLNIINSSFKNSASSSSAAAILSSNGNLNIESCLFENISSSASSNGGIICYSGSSGNLNINNSAFNNLSGKYDGFIIYSSTFTNIANSNFTNLLGPTSSGYWGGIYNSKSLNLTNCQFINVTGPKGAAIYSTGSLNVTRSVFENIITTNSVIYSYSSDSFINYNIFADNNKAIDSTRANADYNFWGSNDRPSSDIVSSSIYHDWVIVELSSSNDTIFLGSTEDISIGFLATDGEENSTLEDAMPSYGFELTVTDGTIEPSLVILEDNEAKAVYTPSAVGTVTITASPGSAELELNVMDKSTMLIVSAEGSDEGDGSFESPYATIAHALSQVTETRNIIYILSSDKAYKESGLVLSGNVIIMGEDNSVTINGGNESRIFLVTGNASISDLILSEGMADDYGGAIYVDGGSLALNNVIISQSKASLGGAIYINTSSDVSISSNVFEDNEAEKGEAIYIENGALTLTENAMGNETVYLAGGSVNSNLVFLANSTLNAEFGKNMTITATLTDDCGNVIRGGAVVLTVDGETIGTVDLSGSDPLEIDFYVPQDASEDMLVSGSYSFDNGGTVSTGAIHPCIFYWIIEEGRYGFETLDEAIDASRDNDVIYYDLPDDYEEILNDKVISHNLVIKNNGTGIVTLDADRRRMFDLSGDLELNNLVFINGATNKDGGFIYQNSGSLNIISSIFKDSLSSYSGVVVFSNGGDISIDGSRFENLTSRKGPIDFESNSGRVDIRNSVFDHITGNYDGFVIYCKSDLNIEDCNFTNLNSTRATSTNYYGAICHESGSGDLNISGSYFSNIYGPTGTAVYYKGSGTYNISKNIFENISSGANTCIIYGGSSGNINYNVFLDINCGITTSGGNIDYNYWGTNDYAGLGINGTVPNNWIIMNVVANDSDVIAENEVPITVDFNHYIENGEIKELEDSLAKEFTVQFTSSTSELDVDEVNTTDQVAIAFCTAVVGENNITVKSDNAVVEITFNASEPLESHMSVDMDDDNNLIVTITDGEGNGIEGKTVCLFIGDEVLNATTDSEGNAVIALDEVDDGAYTAKISFKDPEYKDINENTFVVIRTNELIEPVAANISIELSIEDGKVIANVTDLDGVPLAEKLLTVSIDGVPVLGAKTDENGIYSIDVSPNATVTVSCSDVNGAVASASITYVENNNTEEVVVIEPVSANITIVLLVAEGNVVAYVTDLDDVPLVEKLLSVSINDIPILGAKTDEKGIWSLPIEANSTIVVSCSDVNGAVASASITYVENNNTEVVVEPVSANIVIGLSIVDGKVIANVTDLDGNTLADKLLSVSIDGVPVLGAKTDENGIWSIDAEANSTVAVSCSDANGAVASASIAYIENNKTEEIIVPVPVPVPVVANATISLSTEDGKSIIANLKDLDGKAIANATLNAKVNGIEQNLTTDANGIATIPVSANTTVEVSYTDSNMATVTSSMSLTVIETIVEINKTIVVPPIRNASQIVCSDMNTISVAQEDGRVGEYFNVKLVDANGKPLANKFIQIGFNGRVYDRTTDENGSTKLQINLAYKGTYTFAIAYLGDDNYNGSFVVSKIKVTQQTPSLKTSSKTYKTSAKTKALTATFKTVGGKPISGKTVKFTVNGKTYSGKTNAKGVATVNVSLNKKGTYSFTVKYAGDDIFKAVSASGKLTLK

SEQ ID NO: 4521 - protein, 440 aa, Methanobrevibacter ruminantium
MESQSILIKNASILNPIGDGKTEEFRKDLLIVDDKISQIDEDIDESNADKIIDASDKILMPGFVNTHTHISMSLLRGIADDLELDTWLNDHIWPMEAHLSEEYCYIGALLGACEMIKSGTTTFSDMYFYMDGVARAVDEIGMRGVLSYGMIDFGIEEKRENEFKENISLIKKHNNTADGRITARFGPHSIYTASVDLLERVRKEADKYNVGIHIHMNETLKEINDSKENHDGKRPFELLDSIGFLADDVVAAHCVWLDDAEIKLIKDNGVYASHNPCSNMKLASGAAPVAELLSQGICVGLGTDGASSNNNLDMFDEMKFAALLGKASTLNPKVLTAEEVVNMATINGAKALNIDAGTIEVGKKADIILVDANSPNMTPMSNTLSSNLVYSANGSNVDTTICNGRILMENRKMVTVDEELILSEAKRAIKEMKELREADE

SEQ ID NO: 4522 - protein, 551 aa, Methanobrevibacter ruminantium
MESKIIKSDVLIIGSGGAGCRAAIEVSNEGKEALIVSKGLSFRSGCTGMAEGGYNAALGLVDPEDTIEAHIKDTLKGGAYLNDPKLVDILVNESPKRLSDLEEYGALFDRQESGELNQRPFGGQTYRRTCFQGDRTGHEIMTALKEEILKRNIKTMDEVMITQLILDPAESFMPKVIGAVGLDLKTSETIFFQAKAVILASGGAGQLYPVSSNTTQKNGDGLAIAWNAGADLIDMEEVQFHPTGMVYPDSRKGVLVTEAVRAEGGKLINSEGERFMGRYDDRMELATRDVVARSIYNEIMEGRGTEHGGVYLDVTHLDGELIEEKLETMLEQFLDVGVDIRKEPMEVAPTAHHHMGGLRINPDASTNVENLFGAGEVCGGVHGANRLGGNALADTQVFGKIAGSSAASATDIAEFRYNNEAVEDEENRIKSLIKEGSINPLDMKKEIQNLMWEKVSIVRNEQNLKSALERLLEMKNELNDLNVDDRTQFNESLITALEVTNMVEICILIVKSAILRRESRGAHFREDFPETNDTWKKSIVMSKSKIRFAKR

SEQ ID NO: 4523 - protein, 213 aa, Methanobrevibacter ruminantium
MNQEERLKGSPIERVETALEAIKAGNGVIVTDNEDRENEGDMIFSSEHLTEEQMALLIREGSGIVCLCLTQDKADALELPLMVENNTSTYGTGFTITIEAAEGVTTGVSAADRVTTVKAASALDAKPSDLHHPGHVFPLRARPGGVLERDGHTEATIDLMRLAGLNPCGVLCEITLPNGTMARMPDVIEFSAEHDMPVVTIEDIIAYRKENDI

SEQ ID NO: 4524 - protein, 687 aa, Methanobrevibacter ruminantium
MKIKKSFVILCLIICLFTIASVAASDINDTTISDGDNLIKEADGDLLSLEDDNNLKELNEESDKNLLVQESDNDNNNPESDKDLLVQESDNDNNNLESDEGLLVQESDDDLNKKADGSLFSSKYGDNAAPIKINTSYLIKEINSYLEKDNYTALKEEINNYLKKSNNNAIKEEISKYILKNSYKALQKEINNYLEENNFSTLIKEINNYLEENNYPSIEDGIKSYLQSNNYSSLQDVLSDVISKIINSSKKESEPIDDGTFTALQYKINSAPNGATISLDKDYSYDEGFSTRGIEIKKSITINGNGHTINGLSASRIFLIHFGLTGNNKVTLNNIVFANGKTDLYGGAIFNYGNLTVNKCTFKNNYAKTCGGAINSVGEMILKNSNFKNNTAGGDAGAVFSFKIGNSTNIFKDIYKDKVIDGNMDFIIDYILNININYGWDSINNCSFSSNVAKGRGGGAIYAFTHIKINGCTFNSNKAGEHGGAVFANKNLNISKSKFTNNKAPKYGGAVYFRCHELSGSYVNKTWVSKMKYYTATIKDSIFTKNTASKGGAIYEFNHTVSDKKRLKVSKCNFTDNKASLGRDVFSGSCSNCIYFYVKISTKSVTVKKTAKSFTLTATITNGTKKLKNKKVTFKFNGKTYTTKTNSNGVAKVKIGKAVIKKLKKGKTYSVQITYLKKSAKTTVKVK

SEQ ID NO: 4525 - protein, 127 aa, Methanobrevibacter ruminantium
MSLKSKAKKIGKAVIFVKLFEDLMANKDKREEDIAKLRIHIEEWKAEAPDDLNAILAAILMKAPDSSPDEIKAEFEQAKAEYHAEDEDILPWFESQIENITKEGEEAEEEAEEEAVEVEVTEEEPEE

SEQ ID NO: 4526 - protein, 78 aa, Methanobrevibacter ruminantium
MDNKFIILLCLVTVSVFISASFAFGNVLSNADNGSVQTYNSHKDISSPNMDYKHPGELIYGGCGGNQNIQTDGHICEK

SEQ ID NO: 4527 - protein, 54 aa, Methanobrevibacter ruminantium
MNLISVIIYLIILIFGVWVLYRGYKKGMEFGKFQYAFIVCLSALFICLLYSLFN

SEQ ID NO: 4528 - protein, 248 aa, Methanobrevibacter ruminantium
MGPEDTIYESQSLEDTIYKRKSVRSYEDAPLDNETINEIRDFIENANPLNPNIEWSYEILPKEKISTMMRWKAPHYIAIFSEDKENYYQNIGFIFQQVDLFLQSKGIGSCWIGMGSPKDYKNPHGHKFIILISFGMSERIYREMNQFKRKDIDAISDNKDERLIPAQFAPSSMNTQPWYFTHNDDGSFDLYRVKRGVLRNRFMGRWNKIDTGIALAHLYVANRDNFSFYMKDNPKELKGHIYDGSFEI

SEQ ID NO: 4529 - protein, 223 aa, Methanobrevibacter ruminantium
MDNKLFLQAFSKFFIGLIIICALLFIPAGTLNYPNGWLFIALLFIPMFFAGIIMFIKSPELLRRRLNADEEEEEQKIVILISAIIFLLAFILAGLNFRFGWFKLNSLIIIIASVIFLLAYIMYAEVLRENEYLSRTVEVNEGQNVVDTGLYGIVRHPMYTSTIFLFLSMPLVLDSIFSFIVMLIYPIIIIFRIKNEEKLLEEELDGYVEYEKRVKYRLIPYLW

SEQ ID NO: 4530 - protein, 329 aa, Methanobrevibacter ruminantium
MKWKIGDVEIDNQVVLAPMAGVCDSAFRTIVKSMGCGLIETEMVSDKAVMYGNWKTKEMLYMTDYERPISQQIVGSDIESLTFASKYIQDNTNVDIIDINMGCPVTKVTNRGKAGSALLKSPDKIKSIVESIVDSVDIPVTAKIRSGWDKSCINAVEIAKIIEDAGASAITVHPRTKDQAYSGKADWSIIKKVKQSVNIPVIGNGDVRTCFDAKRMLDETDCDAVMIGRAALGNPWLIRDCVNYLDNGDLPMEVTIEERMDMLKRHVNLLLENKGEEFAIPKMRTHAAYYVKKLPRTIELKQMIFKMNTKEDLFNLLDDYVDSLDELKR

SEQ ID NO: 4531 - protein, 312 aa, Methanobrevibacter ruminantium
MEILKPEELKEKFNDPWIAPYEKVITMADGDKVELIEYHPCPSGSNWLLYQYQHSSELIIDAKRDGNKHTYLCKVGKKPLDLKASINAAGIEEVAIDEEKNEVKVTHGGLAGAGVGAGMCRGMGEGVKYIELLEVGGGSKEGKATVVTPKYEKLVIGIDDTDVKDAGATWTMAHNIGLQLKEEGYEYLDHIIVQLFPHNPHKTQNCVSIALTFAVLKEEKENLINRLIEILKHDTLSDKTAIAILEGIGIPPKLREYAMATKTGMMDVETAEKLAEELNIPLLAVTGEQGKVGALAALGLYDDVDEAVKVYY

SEQ ID NO: 4532 - protein, 143 aa, Methanobrevibacter ruminantium
MVKYNIGAVVAEFNYDITHMMLELAKAEAQVRDCEITKIVMVPGVFDMPLAIKKLTEADQEGRIDLDCIITLGTVIEGATDHDQIVAQHASRKIADLSLEWGKPISLGISGPGMTRLDAHRRVSYGKNAVEAAVKMCDRLQDI

SEQ ID NO: 4533 - protein, 399 aa, Methanobrevibacter ruminantium
MSINKSKSNLSLKNKLKSLFSGNSNKSRYQSKLIRGDFDSLHDLNIAYVLKGFPTLSQTFVSNELRYLVEDGFNVVVFCYMDPADLVELDFDLEVIRFDESDDPTGKLEQLLLDYEIDIVHTHFVYPPCTEYTFPVCDRLGIPFTVFAHAVDIFKYDVDKINRVDEISKSPFCKGILTLSNYHKNHLIERGVDKDKIHITRQATDYEIEELELKERNVRNIVSISRFVEKKGIDVLIDVADILRDEDYEFSIYGFGGLEKAYQRQIDELNLDNISIKGRLDGPQEVKEVFDKADILASPCRIAENGDRDGIPTVIFEAMAYGVCVLTTEVSAIPEVIDDGRNGFIVPPDSPEIFADKIREIANLSPEERFEIAKQAQVDVQDTSSVDETMKTLFLTWSL

SEQ ID NO: 4534 - protein, 395 aa, Methanobrevibacter ruminantium
MNYALMVYNYTTNLGNEIQTIAARRFLPKIDYYIDHEKINLFNEEDNVKMIMNGWYLDCEKAWPPSESIDPLLISMHFNTTSSNKERLKALLSDESIEYFMNHAPIGCRDYSTVEFLNEQGIDAYFSGCLTLTLDNGKTKEERELDKGQDYIVVNSEIADEIISFLKDKTDKKIYRIQQDMIPSFDTSFPESMPLWLYNLSSFYDYEEKLFMAENLLRIYENASCVITDRLHCALPSLALETPVMLLNNRGFRERFDGLSNLLLESDIDSYESNYNIFDVDNPPENPKDYLKIRKDLIEKSKKFTGHINNSYYSDISQREIFERNNLLLSRNAIGTRDYIRNVLKRMRQHEKDISKKEEIIKNQEAIIDKQKKMIDEMKGSNSWKITSPLRKIRK

SEQ ID NO: 4535 - protein, 331 aa, Methanobrevibacter ruminantium
MTKPKVSMILSAYNEERFIDKAICSLTNQSLKDIEIIIINDGSTDKTPEIIEKYAEEDPRITVINQSNIGLGASRNKGMAIAQGEYVGFLDGDDWYRLDALEIAYNEAKSKDTDITMYQMINYDDATGRIYENDWFNLNNLDESFDGIVFTPEKTKDFLFDLSVSSCQKIYRNDFLKSINASFPEGIYFEDMPFFFYVYLKAERISIIRHHFYYRRKHNASITHVVDANYLDTVEAGCELMRRFIDNGFYDDYKFDLIAYKINGPRMALMDITEDAKEPLFNLIKEDYEKIKNTEYYQDYLDNLGPKKKKFFLDVIKYDNYEEFKKNNPEY

SEQ ID NO: 4536 - protein, 516 aa, Methanobrevibacter ruminantium
MKDNNKKEQAEDLLIANKFPPMNDVSGIILAKRALLSGKRYDVCHTVIKEPLDNDFNEIAEEIIDNRIIIKNFEYEMSKKELNETFRNYITEGLKKLEETNPNYKTITTRSWGFQPNFLALEYKLKHPDTFWTAEFSDPLTVNIENKPRDRRFKLDNKEYIDRINNEIDKVNERTGQNLEHIKESDFIYLICEYIAYVFADKIRFTNPNQREIMLNQCPYDVKDMVMAKSEINPHPTLDEKYYHIKEVDYKIDDDCINIGYFGTYFGKRNFETIFYACESLNEDIRSKVKFHLFLNHGDNLKRLTGNLKISKNIIVNDKVSLLEFLNLSTKLDILLVNDTETKGNFEINPYRPSKIADYIGSGRDIWGICEKDSIMDGLDEIKYKSYINDFYSAKLTFNQIVKDSSKIDDGLKENPFEDNDYLAKRASAMSEDEIVELINENNYLKGRTNHLNHLFNGTRGRGLFADEAKKLNLKNEKLEMENKKLKKENKKYKKDLKYLKSSKGSLKYQIKKIVK

SEQ ID NO: 4537 - protein, 328 aa, Methanobrevibacter ruminantium
MYEIAVIPGDGIGKEVMEATINVLESLDVDFNFTYGEAGDECLEKNGVALPNETIQLAKNADACLFGAAGETAADVIVRLRQELNLFANLRPVKSYPNTNALFENLDFMIVRENTEGMYIAKEEEYTAEGAIARRIITRKASERIIEYAFQYAKDNNKSKVTGVHKANVLKISDGLFRDIFNEIADKYKDEIDSEDFYVDATAMYLITRPESFEVIVTTNLFGDILSDEGAGLVGGLGMIPSGNIGENGALFEPVHGSAPDIAGQGIANPLAMMLSAVMMLNYLGESEAEEKLNNAILELLNEGKCLTPDLGGSSTTMEVSEAIKSKL

SEQ ID NO: 4538 - protein, 160 aa, Methanobrevibacter ruminantium
MKGKVWKFGNDIDTDIILPGRYLIYTDEEKLSEHCMEGLDPDFKNKVSAGDFILGGTNFGCGSSREHAPIAIKGCGISAVIAESFARIFYRNATNVGVPLLEAPGISSAIENGEEIEVDMEKGIIISESGKEYEFKKLPPFMLEILEEGGLINYLKKQNE

SEQ ID NO: 4539 - protein, 425 aa, Methanobrevibacter ruminantium
MSTIAEKILSRASGQGQVEAGDIVMADIDIAMMHDLTGPLAVESFNKIGTERVWDNEKIVIPFDHQVPADSLDSANNHILMRKFVKEQDIKNFYDVYEGVCHQVLPEKGHVIPGTVIVGADSHTTTYGALGAFSTGIGSTDMAMVLSTGQLWFKVPETIQFNIEGILKENTSAKDVILNIIGQVGADGATYKSCEFKGETISTMNISDRMVLSNMAIEMGGKTGIIEPDNVTYQYLKDRVKDENKNRLKAFIEKSNLKTDEDSSSLETMDIDVSDLEPQIACPHNVDNVKPASELSDIEIDQVFVGSCTNGRIEDLRDAAKILKGKHIASGLRMLVIPASRETYMKALDEGLIKIFVEAGALVSAPCCGPCLGGHTGLIGPGEVSLSTSNRNFKGRQGSPEGEVYLSSAKVAAQSAIEGRISVPK

SEQ ID NO: 4540 - protein, 419 aa, Methanobrevibacter ruminantium
MKICIVGQGYIGLPTAALFAKSGCEVVGVDINKEIIEKLNQGIAHIEEPGISDSIKNAVDQGHYHASLTPEEADTFIITVPTPYLPEDLSCDLSYVISACNSILPVLKKGNVVIIESTIAPMSTDEVIKPIFENEGYVIGEDLYLAHCPERVLPGQIMEELVNNNRIVGGITEECTKKAADVYRTFVKGEIIETEAKTAELSKCMENTFRDVNIALANELAKICAEIGVNALDVIEMANKHPRVNIHSPGPGVGGHCLAIDPYFIYAKAPETAKIIKLARDTNNSMPGFVIENTGKILSKLDKDAEKISVFGVAYKGNTDDARESPAFEIIAGLKAAGYEVVIHDPHFDNPDYLDFDDAIKDSSMILILSDHNQFKDMDYDSIKRNMKTKLIFDTKNIIKSVPEDVTLVNYGNLYKFIH

SEQ ID NO: 4541 - protein, 286 aa, Methanobrevibacter ruminantium
MRILITGAYGMLGSDLREVLKNHDLIATGSKDLDITDEERCIDFIAKERPEIVINAAAYTAVDDCETHYDDAYAVNALGPRNLAIACNKIDIPLVHISTDYVFDGTKRTPLIENDKLGPQSAYGKTKLAGEEFIQENTQKYFILRTAWLYGIHGGNFVKTMLDLAKEHDEITVVNDQIGSPTFSLDLAMAICEVLDSDKYGIYHLTNDGECSWYDFAKEIFRISDIDVKVIPVSTEEFPRPAPRPHYSVLSNVKWKSAGFVPMRDYKEALNQYISLYNFFVKIGKI

SEQ ID NO: 4542 - protein, 290 aa, Methanobrevibacter ruminantium
MKGIVLAGGSGTRLYPITKAVSKQLLPLYDKPMIYYPISVLMLANIKDILIISTPRDLPMYKDLLGDGSNLGMSFSYAEQENPNGLAEAFIIGEDFIGDDNVALILGDNIFHGHRFTEILERARDLDDGAVIFGYFTNKPEAFGVVEFDNEWNVLSIEEKPEHPKSNYVVPGLYFYDNDVIEIAKSVKPSDRGELEITSVNEEYLNRGKLKVELLGRGMAWLDTGTHDGLLEAANFIETVQKRQSLYIACLEEIAYSKGYISKEELLKLAEPLKKTAYGDYLTKLAERKI

SEQ ID NO: 4543 - protein, 192 aa, Methanobrevibacter ruminantium
MGKFNIIKSEIEGVFTVEPTVFEDERGYFMETYNENDFKAEGIDLTFVQDNQSKSSKGVLRGLHFQYTQPQGKLVRVIKGEVFDVGVDLRKDSPTYGKWMGEILSEENKKQLFIPKGFAHGFLVLSDEAEFVYKCTDFYKGDDEGGIQWNDPDIGIEWPLGDLKEEDLILSEKDKLLKPMKDTPTDFYMEDE

SEQ ID NO: 4544 - protein, 335 aa, Methanobrevibacter ruminantium
MTKILVTGGAGFIGSNFIKYMLDKYPDYEIVNLDALTYCGNLENLEDIEDNPNYSFVKGNIMDEGLVDVVVSSVDYIVNFAAESHVDRSIEDPQIFIKSNIIGTQVLLDAAYKYQIKKFLQVSTDEVYGSLGPEGYFTETTPLQANSPYSASKAGADLMVRAYGETFDLPINITRCSNNYGPYQFPEKLIPLMISNALEDKELPIYGDGKNIRDWLHVYDHCSAIDLVLHKGKIGEVYNIGGHNEKQNIEIVKLILKELDKPESLIKFVKDRLGHDRRYAIDSTKITEELGWKPKYTFETGIVETIHWYLDNQDWMEKVKSGEYQEYYEKMYSKK

SEQ ID NO: 4545 - protein, 327 aa, Methanobrevibacter ruminantium
MKVSVVTPNYNGLKFLNAYFETLAFQSRFIEEIIIIDNASTDASCDLIEEYINSPSYKIDIKLIKNDKNLGFAPAVNQGIRLAKSELIYSVNNDVELEFNTIETLIQSMERSIEEGKNPFSIQSKMIQYHNRSLIDDAGDEYNLLAYTKKLGDGSPIDNYNEKREIFSSCAGAALYRKSILEKIGLFDDNFFAYVEDIDLSFRAQINGYRNYLEPKSIIYHYGSATSGSRYNEFKIRLAARNNVWMIYKNFPIPLKIVNFIFIFLGFFIKYLFFLRKGFGSIYLGGVKEGLRERKGIEKTHFEWKNWKNYFKIEWKMIKNTFGYFKK

SEQ ID NO: 4546 - protein, 298 aa, Methanobrevibacter ruminantium
MRNIDLSIIVVNYNTFKLTRDTIDSCLAEPTHYTYEIFLVDNKSTDDSLEKLQEYFKSETERGILKIIPNQSNDGFAKANNIAIEQAKGDFILLLNSDTLMKQSTIDKCMDYITDKGHDDIDALGCKVSLADGSLDKACKRSFPNPANSFYKLFHINVDSDKNDYNLDDLDDDGIYEIDCLVGAFMLVRRTTIDEVGLLDDAFFMYGEDIDWCYRIKQAGWKIVYFGQAEIIHYKGASSEDKNTKKRNPKIIYEFYRAMYVFYKKHYTKKYNFLVNIAVYIGIGVLLVFNLVRNAFRS

SEQ ID NO: 4547 - protein, 466 aa, Methanobrevibacter ruminantium
MIKENQRILNAILVIIDIIVILISLGLAYFVRFKTTIFSVGGSLPFSDYFIFTIVCIIPTYILLYYFFGLYKPFRNQSSIFSGAEDIVKSDIMAFIILVAILFIINQPNFSRIMLLLLSLFGMILTIAERVLVVLVLRMMRTNNLNLKHMLIIGDNDLAFEFAHKINSKTYLGYNIAGFLGRKENIGKRFEGTKFIGSFDDLPRVLKTHKFDRVVIAIPLKYYYHLNEIVDACEEEGIKAEIIPDYYKYLPAKPSVDMLDDMPIINIRYVPLDDAFNKFKKIVSDYFVSIVAIIITSPIMILTAIAIKIESPGPIIFKQERIGYNGKPFMMYKFRSMKVQDDEEEKSQWTTKDDPRKTRIGTFIRKWSIDELPQFFNVLKRDMSVVGPRPERPYFVEEFKKTIPKYMVKHQVRPGLTGLAQVNGYRGNTSIKKRIEYDIRYVENWSLALDVKIMFWTVFRRNKNAY

SEQ ID NO: 4548 - protein, 823 aa, Methanobrevibacter ruminantium
MEKEFFEGMNLEEDISDEDFQTIVEGWEKVQDQMSKEEFITKFNEHKAEFKDASFFSDIDFLNMIVNPLVGGGDDEPGPAIVEGEFQKISDVEPGNEGFNVVARIMSIGNSRIFTSRKGKQGKLCNLQIADDTGELRLVLWTENIKHLKHVTEGDIVEITNIECKEGFRGGKEFSLRPRSSLRPIEEGSENYPENIAAFPVYEEKITQIADIKPDETVSIIGRLIRVPKPHAYESNGKKGKVTSLEIQDASGKTSYTLWNNDVKLIDILELKEGDIVKILNEQSRERNGEISLSHWDGRIVKAEGDYDIPEYEENIIKIADAQEMQDVSIIGLVTKVQDVIQFTRNDGSEGFVKSIELSDDEGSIRVTLWGDDTKIPISKGDIVKVIGGNIEYDDFSNGYRVNTNWNTELKINPEEHSDLIETLKGQAENLGPIPISEVQSIEEDGEEVDIIGRIITLNDTHTFPRDDGTEGVVRSGEMADGSSPDGLVRVSFWDDKAKVPEIGKAYKVENARTRMGMYAVEVNVGKTTRFIEIPESEAGDLPSFEELEESIYISKKIEELDEDDMNIKVLARILEVHEPREFPRDDGTKGLVGNMEVADITGSIRVTLWDDKNNLPYGVGDAIKIQNPRVRYNSNMDYLELSVGNGTNILTPSDSEINDIPDILELQNTLYQTKEIANLSDDDTKIRVTGRFVDIYGQKMIIPKCPQCNNTLEPEDIDAEECSFCGNYIDEPKYLLMLPGKLEDDTGDIQVTFFNELVGELLGMKQDEIFELYEGEGGDLGPLEGKIDDLEGITLEILADVTFNEYDEENRLRPRKIFNMEW

SEQ ID NO: 4549 - protein, 311 aa, Methanobrevibacter ruminantium
MVELEDLPNVGEKTAEKLREAGFADMMRLATATAKELSVKAEIGEGVAEKVIEAARKAEKIDFETAFDVMERRRDVGRITTGSKNVDELIGGGIETQSITEVFGEFGSGKSQISHELAVTVQLPKERGGLEGECVFIDTENTFRPERIEQIADACGIDREEALQRIHIARAFNSSHQILMAEKINELIQSGVNVRLVIVDSLMAHFRAEYVGRESLATRQQKLNQHLHALQQIANTYNVAVFLTNQVQARPDAFFGSPTKAIGGHVLGHASTYRIWLKKGLAGKRIARLVDSPHLPEGEAVFKVTTDGIVD

SEQ ID NO: 4550 - protein, 305 aa, Methanobrevibacter ruminantium
MLIAMDFRIIILSIIIMILLGVLLKKIDLLKEEDVETLNNLVINICLPCLIFNALYTADVSLLPSLSILTLSTTITSLIVGVFTYILLKLFAWDNVKIWSILVTVVLGNTGFLGYPITQGIYGSEGLIRAVFCDCSTSITFVILSVILILIFDGELKVALRKIATFVPLWSIVLGILFNIFAIPITDVGTTVVGYLGDATIPLIMISLGLSLNISGLKNNLKEVSLASFIKLILYPFVALGVMALLGITGFNHTIGLIEAAMSSAMIGLVLAITYKLDPHLTSDCIFTSTLFGLVTIPLFLMFIV

SEQ ID NO: 4551 - protein, 660 aa, Methanobrevibacter ruminantium
MAEEINNEEIRVGVYVCHCGVNVGGVVNCPEVAAYAETLPNVVIAKDYKYMCSDPGQSLIQEDIKEHNLNRIVVAACSPRLHEPTFRRCVEEAGLNKFLFEFANLREQDSWVHMTQPEEATAKAKDLTRMAVAKARLLEPLEASKVAVDKKCLVIGGGVAGIQSALDLADMGFKTYMVERNPTIGGRMGQLDKTFPTLDCSMCILAPKMVDTSKHENIELITYAEVKEVDGYIGNFTVTVEKKPRYVKEDDCTGCGQCQEVCPIEIPNYYDEGVGMVKAAYIPFPQAVPLCATIDKNYCIDCGLCETVCGPDAIDRDMEPEEIELHVGTIIAATGYDPYDPTEKYEYGYGRYTNVITAMEIERMINASGPTGGHVQKPSDGKEPKRVAFIHCVGSRDEQIGKSYCSRVCCMYSMKNAQLCIDHEPDTEVTCYYMDIRSFGKGFEEFYKTSQEKYGIEFIRGRPAEILENDDLTLTVRAEDTLLGKVTEYTYDLVVLSVGLEPPKGSNELRQTLGLSRTTDGFYMEAHPKLRPVDTLTDGVYIAGVAQGPKDIPDAVAQGSAAASRASIPMAKGEVEIEPITADTDTTVCGACEVCVELCPFGAVSIEGEGADKHAAINVALCKGCGTCVGACPSGAMNQNHFKTEQIMAQIAAALEDVAK

SEQ ID NO: 4552 - protein, 221 aa, Methanobrevibacter ruminantium
MKKFESVDFDKTEKIVDGIAIEDNEAMDIVVILEPGSGQYAFLASRKAPSKGFNAFIETEAAKDHKTFVTAVLFDNEYEILHSRRDINEVPILTTNEYSCRGCTALYDAIGITIESIKDEIDNKVLFLIITDGMENASRRFNEDQIRSYIDELDYEFIFVGADIDSYREASKIGIRQSHTASFKKTGEGIDDLFKTISDVSDIHRDNMKLEDVDWKHRLED

SEQ ID NO: 4553 - protein, 498 aa, Methanobrevibacter ruminantium
MVKRIPDEEQIKLGIRTLDFNIPEDHISRFVVDFIDEYYPLLGIKENKKKKGRDSFPVKEMLKLLIYAKIEHIDSMRFLADMVKYHDVYKFVGNGICPSERSLQRYREKYGKYYNELLKATLKKASDVDYTDFNEVSIDGTIKKAYNSKNKVITEKETEILTRYFEGGRVSQEELDKLHKPAREILENKKISNQEKLYLLDDIKTQFTLSGQKSVPVTDIEARWMKSKKGNSQISYNIQSAVDYDTKMICAINVVQAPTDHYQLPKIVDKAINNTNVIPRFVLADTIYLNEESLSYLADNQINGVIPDRKQSKEKIGRLNKNPYHKDHFKYFPEIDAFECPEGQIMYFFNKYTEKNDDLDKPDKIKRLYSNYGACKACNCRENCLSSTQTHRTITEYGGSLKKAMWEKMETEEYKEEYAKRSSVEGPFGILKEQFHIESEVVIGKTKTEERILLDAVAYNLIRLFNLEQEIKNDKEDIVDFCEKISVQEKLEVRATIF

SEQ ID NO: 4554 - protein, 97 aa, Methanobrevibacter ruminantium
MSFEDLIEDYVKAKIDLNVKFGSVLDELNIEYESFCFYDEFKSVCLDLEMHNKELSDEEIENIIEKTGFDFLKVEIKGKKFPFGNGEEIDYTYVFEC

SEQ ID NO: 4555 - protein, 332 aa, Methanobrevibacter ruminantium
MKISLNNVSLDIDLKNSQKFKNMEVIPIEALSAGKKEFITLKAGIQEGYVKISECESSTVNTVMAQNKSSTPLVLIDGEEVIGAMQNRIMNRSLIVPGNTTMPISVSCTEHGRWHTRGNSPKAREFSHSDFFADYETRHRKSETLYNNSDCQSEVWASISDLEIKNSYRSPTSALNDSYVHHRPRLNEYLKHFSMLYNQIGAIFIINGQIKGLELFYNPFLCSQYYDKILKSYIMNAITNYYSNCSSNSSNIDVGAFLADLSDSKLNHSPNQGLGQHIKFSNNHGTGSALINDGEFVHLNYFKTKYDVSYKKQRKNVRTFGSFDDLLSKMDE

SEQ ID NO: 4556 - protein, 423 aa, Methanobrevibacter ruminantium
MYQYENEVTKLNELMETHNNWMRDSVNLIASENTTSNAVTGAVASDLAHRYAEGQAFERLYQGCTYIDEIEDIVKRLSREVYDCSYANVQPVSGVTANLAAFFGFAKAGDKMMAMNIPFGGHISHANVSAAGIRGLKTLEHPFNPEVMNIDIDAMNKMILEEKPKIILFGGSLFLFPHPVKEAVDAANEVGATIMYDGAHVLGLIAGKQFQDPLKEGAEVMMGSTHKTFPGPQGGIILSDESNKELIDNAVFPGVVSNHHLHHLAGLGIATAEMLEFGEDYAKQTIKNAKALAGALAEQGFNVFCEDLGYTESHQVAMNVSDVKRATILAKELEQNNIILNKNLIPGDNVNDSDDPSGIRIGTQEITRRGMKEKEMEEVAEFIWKVAEGDKVDIKDEVTEFMSQYRTIHYAFKEEEGYKYIQY

SEQ ID NO: 4557 - protein, 233 aa, Methanobrevibacter ruminantium
MRIGWAFTGAGHLLRESVEAMEEVAKYHDITVFLSQASEEVLRMYGLYDRVVAVTGGRYRELACDSNQKFSFPITGRLSLGKYDALIVSPVTANTVAKIVYGISDTLVTNAVAQAGKGRVKTLMVPVDIEPGDVDTVLPSKLELSKCQKCDVCDAAEVCPNGAIVAHQEIDLLKCIGCGACKDICQYGAVSAGKIITMHMRDIDIENTQKLSKMEGIEIFASPQELLLHFDYK

SEQ ID NO: 4558 - protein, 133 aa, Methanobrevibacter ruminantium
MKNNRKNNQNKENNHLKSLHLKKSNEKITDLRIADSFLSRFLGLMFKKDIDYPLLFKIPQNINNRHRSSIHSCFMRFELKLVFIDKNNIIYEISDLKPWRYYAPKKPAKYIIEFDKNGFSDYDLKIGDEVELK

SEQ ID NO: 4559 - protein, 402 aa, Methanobrevibacter ruminantium
MSRNIFVEKLNQTFIEDLDIEIVERKGIGHPDSISDGIAESVSEALCKMYMDELGGVLHHNTDEVQITAGESNPVFGGGQIIKPIDILLTGRGVSEYEGHKLPLDYVAIDAAKEFLDKTVINLDVNRDTIVECKIGHGSGDLVDVFKREGAPSSNDTSFGVGYAPFSEVETIVFETETLLNSKAFKKDHPGVGEDIKVMGLREGDKITLTIGCATVSKYLANREEYIACRDVLKDIVADLAVKYTDREIEVFVNTADNDNATDESGYYLTVTGTSAEMGDDGSVGRGNRANGLITPCRPMSMEATSGKNPINHVGKIYNILSNEIANDVAKDVEGVKQINLMILSQIGKPIDQPKAASAGIILEDGYEMGKVSPQVEKIIDNWLENITDITEKVVQGKARTF

SEQ ID NO: 4560 - protein, 1143 aa, Methanobrevibacter ruminantium
MPIEEAEKSYDFKKIESKVQSFWEDEDIYQKTNELNKNGPQYSFLDGPPYCSGKIHLGTTWNKVIKDTLLRYKSMNGFALRRQAGWDTHGLPIEHKVEQLLGIESKQEIEEKYGIDKFVGKCKEFAMENKVAMTEQFKSLGVWMDWDNPYMTLDPKYMESAWWTLKKTHEKNLLTKDKRVISWCPHCQTALAAAEIDYTEDTDPSIYVRFPLKEKFLNEENCSEFANDSDLANLKQSFLVWTTTPWTLPGNLAICLNEDFEYSFVKVDERLNESDDEILIIANELLETVLGPIEIIHKNKIPNPKYDPENKESKEKKYLIEEETEVMYEIIKTVKGSELLGLGYVYPLAEEVPKQMEIEAENSLVHTTFHGDHVELGEGTGFVHTAPGHGPEDFEIGQEVGLPIHCPVDEAGCFTEDGGAYANGYTKDLNDTIIADLIAKGLMFKNDTITHRFGVCWRCKTPIIYLATEQWFIKVPEIKEKMLSEIDRVEWVPKWAGEGRFHDWVANAKDWTISRQRYWGIPIPIWVCPDCGEIKVIGSVEELKELSINEITASDEELVHRPYVDDILINCDCGCDSPMKRIPDVLDVWIDSGVAGWAALYYPREEEMFDKWYPYDFICEGHDQTRGWFYSQLGTGVIALDQAPYNKVLMHGFVLDEEGKKMSKSLGNVVQPEEVIEKYGADVLRFYLLWACKPWDDLKFVWDELNNVKKMFNILWNVYVFSTTYMALDEFDPAKCVLDGPDANVTLRNEDRWILSRVNSLAKEAGDAINDVHFHLATRAINNFILEDLSRWYVRLIRGRTWVESDDPDKLGAYYTLYNTLNTLIHLMAPITPHLSEEVYENLVKNLDDNAVESIHMDNWMFDECLIDKELEAEMDHIREIIEAAARARDVARYKLRWPVSDITVVSQDESILNSVALLEDVIKDQSNTKEVLTANEFENLTFIAKPNLKTLGPRLKGDMGIVQKFFAQAKAEGIGNSIKEELDSSGKYIVTGEDREGNQKEIELSADDVLYETELPDDVVSAEFNGGNVFVNTKITPEILSEAMARETIRRIQDMRKDMDLDVEANVGVMINTDGEFKELIEKQSNLISDEVRAKSLVIFDGKACEVCTDKGMGREYEDISVEYSKEWEIEGHKVIISVVKL

SEQ ID NO: 4561 - protein, 736 aa, Methanobrevibacter ruminantium
MTLTDSEVKYIEGILGREMNELEEGMLDVMFSEHCSYKSSRPFLRMFPTEGENIVLGPGDDAGLVSITDEYALAVGMESHNHPSAIEPYGGAGTGIGGILRDIISMGAMPIALLDSLRFGPLEDQKSRYLFEHVVEGISDYGNRVGVPTVAGEIEFDESFRTNPLVNVLCAGLVKKDEIVLAVAPNIGDVFLLMGGTTGRDGIHGVTFASEELTSDSETEDRPAVQVADPFTKKRVLEASLEILEKIDCSGVKDLGGGGLTCCVSELVDKSKNGAVVDLRAIPLREEGMTPYEIMLSESQERMIFVINPKDVELAQKICDKHEIPSAVIGEVTEGSNMVVKDFDAEEELQTLCNVPTILLADPPSIDRPTVEPAKSEDLVEVIDGPIDESLIKILSSPNIASKAWVYKQYDHEVQTRTVVKPGDDAAVLQIDDETAVALTADSNTVHTKLSPYDGGAGSVAEAIRNVVSMGAKPYAIVDCLNFGNPETPEILWQFKECIRGMSDIAEKFEAPVISGNVSFYNETEGIKINPTPAVGVIGVEKLSSIRTLPFKNEGDKIIIIGKTYDELGGSEYHRAVHNLEQGEAPKIRIDDELAAANAVLDLIENDGDYVKFLEGEDKLNIKATHDVSAGGIAIALSEMVMKGKLGCEIDISNVPAEENISDNDLLFSESHGRYIIAVDADKAEEIVNSIDIDAAIIGEVKGDSLIIKNNDETIVDFAIDELDNAYNGVIEKYMA

SEQ ID NO: 4562 - protein, 408 aa, Methanobrevibacter ruminantium
MKFISNLIPLEEALSKINDNIKLMDTETIDLKDSQGRVLAHAVSSYHNSPPFDKSAMDGYAVIAEDTFGASNNVIKELKIIDRIGAGDFSNKSLQNGDAIVIATGAPIPDGANAVLMKEYTYEDGDNLEIHSQVTPGENISPKAEDIAKGDEILGENVLIRPQEMGLIASAGYSEVEVYKRPRVKLLITSNELVDPSPNIDDAKIINSNQYTIAALIRSAGATVDIDHGIDDFDEIRDAIDKASREYDCVITTGGTAISKGDVVIDAVEDLGEVLFHGVAMRPGKPVGAGIVNGTQIFMLSGQPVAAMGQFDIIARHFLFKVQGLDYSHKIVKRTSSTKIHSSLGRTDYIRAVADDETVHHVLNRGSGIIRSMVEANCYIIIDENHEGIEIGDMVDLIFFNDMAWPSL

SEQ ID NO: 4563 - protein, 219 aa, Methanobrevibacter ruminantium
MNKKIIFLACVIGIALLSVSYISAESDVDTSDWVNITVNDINFQIPPEYGGGRNASGDYLFNNVFTFGLVALENNKSFRNNYGYEATNEENYDVEEMEIDGHHAVAYYSNRSIVNHTVTYLYFESNGTFYALSYDGDDVNSSMKKIVSYSPKSKLSKEEFNEKLNKAQEEYIEDQIEQEEAYQYEQAYREGYNQGRSDSRGGELLGYYFFYKLGQRSRY

SEQ ID NO: 4564 - protein, 385 aa, Methanobrevibacter ruminantium
MNGIYYYVIAFLLIWTIAIVFKGRLENYGLEVNFPLLMWKTQRLRGFIDRIANRAPRFWKWYMNIGIVISTGFMILMAVALVYSLKTLMDAPTVSLVIPGVEVPGSPIFIPFLSGLIALATVLIVHEFSHGILARVEKIKINSIGLLLFAILPGAFVEPDEEELKGLNRPSRMRIYVAGSMANLTLAAIALVIMMLISSFVVPAVFEDDGIVISRLTEDGNAINYLSEGMVIKGINNYSVSDGASYQKAVSTLRPNQTVTVLTDQGEYSFQLKSNPQNKSLGYMGVQAQVNQIISPDFDNKFYTPLLWGIMSLTDLLFWIYFLNFAVGTFNLLPMKPLDGGHLFEDLLSYITSENIYKPVVTFMSFFMGIIIVVSLVVGFVGVPF

SEQ ID NO: 4565 - protein, 408 aa, Methanobrevibacter ruminantium
MKAKAEKIGDGVYWIGVLDWDLRTYHGYTLDGTTYNAYIVFGEKVAIIDNAYPGKTEEMMARIDDAFEQEGREIKVDYIVQNHVEKDHSGVLYDLWKRFDAPIYCSKIAQGGLLRHYPKLEGAEFNIVGTGDALDLGGKTLAFLDAFLLHWPDSMFTLLAEDGILFPNDAFGQHLCYSKRYDKDIPEYVLMDAAQKFYGNLITPLSKKVLNKFDEIIELGLLEQVKMIAPSHGQIWTDPMKIIGAYSDWATGKRAEDKVTIVYDTMHYSTQKMAHEVAEGIMAEGYDVEMFFLHEDERSEIVKSILTSKAVAFGIPTINDFPFPSIGDIIYYLKGLHFNRTGFKRPAVTFGSMGGRGGAVEFIANELTECGFEVLDQQEIYYVPADEDDEASFKLGQKLVEEAKKLEL

SEQ ID NO: 4566 - protein, 264 aa, Methanobrevibacter ruminantium
MENEENISQPKAIQIFAKAPGELGVNVVKSPVKLTILSMLKDTDMEFDEIVKNTGKSKSTISVHLKSLREDGIVSYRFDANDHRKKIFYISSKFLGEVESGDEKELEERQAEFLVKNILDVDNFKFSFLLFHTLRSNLIQEGININPVLNQTGKNIGAAMYEKLYDDDIKVFCDNITEFWADNGLGKLDIVLGDIINVTAYECFECSLLPKKGKPACYLDAGIFEALFANYLKKDIAVTEVKCFTMGDDCCHFLVEGINGESLT

SEQ ID NO: 4567 - protein, 660 aa, Methanobrevibacter ruminantium
MSNSIFCPDCGMLKENCVCGRYKANRDKVKYTKGTRSNPQYKKRKTFNYSNKKRAENMKNTSSNKSKGLFQYEEPKGLYQYEDLEPVKVEEEDDFGSSKVYDIAEHDLPKEIIDGLKEDYPEIPDSIIENFPFERPREGQLDIIADIEEAISKGFKYIILEAGTGTGKSAVATTLARMYESAYILTMTKQLQRQYADEFDFPLVKGRGNFDCIKDGFEVTCDMGACKTAPKNSKFFCPYGISKNPTLTGDLAFQDSYGGDIFFQTNDHCHYWQQKANAINSPITLMNYDYAILELNYVKHFGKRTLLILDEAHNIEDKLMKTMEINLYNRQLEKDIKKVISPQTLKTREMGEWIMEIDAIQGHYADIDIKDLPTNKADRIRSTSARLKDLKNKLETEPGNWVIDSNENGVSFKPLKVNHYANDYLFKHGDVVIFLSATILSAKMFSKWLGLNPHEVYHIKVDSPFSVEKRPIELNLAGKMSKNRVKQSAPKSIEILNKILKRHEGDKGLIHTHSYKCQQYIINNLYNSRLIAHGSNNRERVLKYFEEDDNPLVLVSPSMSEGVDLPYDKCRFQVIYKIPFPYLGDPQINMRRKKDQRWYAYKTVMTLMQAYGRGMRAEDDSCVTYILDSDIQMLLKSPLYRSLIPEFFKEAIIVNDDRII

SEQ ID NO: 4568 - protein, 232 aa, Methanobrevibacter ruminantium
MVIKEKIEIEGIPVEVHRKRMKNVYLRVLPDATLRVSAPERVSNDYIIEYVTSNLDWVKQTQERILKNPPKPKIMYKNGEVHKIWGEEYKIQLITNDTIKHAFYDADESIVYLPVRRRSTVNEREKALFELYRSEMKRNIDCFLNKCVPIVGEQPKEIKFRNMKNWGNCRRNKTITLNIKLASKPPICTEYVLIHELCHILEFNHSPRFKALMDGFCPNWREIKKLLNESDD

SEQ ID NO: 4569 - protein, 277 aa, Methanobrevibacter ruminantium
MLTKRIIPCLDCDLQVPEGRVVKGVEFKQIRYAGNPVELATKYYEDGADEIVILDITASHERRGTMVDVIERLTENVFIPICVGGGIRKVEDYTRMLKAGADKCSTNTAAIHNPQLLTDASKVVGSQAVVIGIDAKRRYVEEDPEQAKGKTIVDTDDGEVWFDCSIYGGREFTGMDAIAWAQECQDRGAGEVLLTSMDGDGTKDGYDLILTKAINDNVDIPVIASGGVGNPHHILEAFEIADASAALAASIFHFDEYPVPVVKKYLKENGVPIRETF

SEQ ID NO: 4570 - protein, 358 aa, Methanobrevibacter ruminantium
MSSQKINSLIDLNLTQYSGQTSQSPWRHNSMENIDKFDELIYLKVPSIIDGLDDKTINLNGLPVLLNLSQDKDNINGFEYTYSLPQKVEKQAFSIGQDNLSKKELQSIEREIDSNLNNIYDLEFDLEKFYEFLLEDEKLAPSVDFCKGLRLFIAKDPFECIISSICSANNSIARWTASIDKIKLNWGEKVEFDEGMFYGFPSPKDFLDFYETPIEQSEADGRRYEVDCYTKNLKSCGVGYRAPYMKKASQMLIDEIDMNDVSKMAYDEAFDLILRLPGVGPKVADCILLYGFGFQEAFPSDVWIKRIVSHLYFDGEDISADKTREFGIERFGDYAGYAQLYLFHYARKSGLMDEIKNK

SEQ ID NO: 4571 - protein, 147 aa, Methanobrevibacter ruminantium
MKLVIQRVTNASVEVEGEITGQIEEGLMVLVGFGQTDTEKEVDYLARKLTKLRIFPDEEGRMNRSVKDIGGKLLLVPQFTLYGRTKKNRPSFHKALAPNEATKLFDYFVEKCSEEVPCETGVFGAFMKVSLLNNGPVTILLEKEFED

SEQ ID NO: 4572 - protein, 149 aa, Methanobrevibacter ruminantium
MNGESFQGIWDNSPLIAWIHNLSKNHFKYLKAKINEFDLGHEIRYIMMIYDNPNISQDDLVIMSGQSKGNIAKSLKKLEDDGYIKREVNPENRRKYMLRTTSKGDELVPKVRQISKDWEKEVGITEDDKEVIERIKEIAINGMKLTEDL

SEQ ID NO: 4573 - protein, 463 aa, Methanobrevibacter ruminantium
MKFDSETSVLLVSFLTAFFAVFLAAGIVIGVPAIANEFGMNNVVQNWIITIALLVVAMFTLPAGQLSGKFGVKRSLLVGVLIFIVGSIGACLAFSAESFLFFRVIQGIGGAFSNVASMAMVVQAIKPQSRGKALGLTVTGVYLAGSLSPVICGFLVYNFGWRSMFYFTIPFFLICIALMLWKIPGDWKTYENDKIDSIGYMIYAVGILLFIYGFTNLINAWGLICVVVGFILLLAFAYYETRVDTPAFNMRLFKNTKFASSNVAALCSYLAVAALTTILNYHFQYVRGWNAQMSGLILIVTPIIMAFMAPNSGKLSDRIHPQKLAAIGMTIATAALVILIFLDANTPIWLIIVAMVLQGVGMGLFTTPNTNAIMSSVPPKETPNASAAQSAMRTIGQTMSLGLLTLVFAWIMGSLKLSSQYAGMVVQASQIVCIICTIICVVAIFASLVGIKSKDEFNIEKPS

SEQ ID NO: 4574 - protein, 463 aa, Methanobrevibacter ruminantium
MKLDLETVVVAVSFITSFFAVFLSNGIVIGVPAIAQEFAMNNVIQNWVPTIFFLVVAIFTVPAGQISGKFGVKKSLLGGVLVYLFASIGAVLSFSTESFLLFRILQGAGVAFLNVSAMAMVVHAVKPQNRGKALGFTVTGVYLATSLSPVICGFLVHNLGWRSMFYFVIPFLVICVLLMAFKIPGEWKTYEKDKIDMIGSILYGIGILAFIYGFTTLTTSTGLILTIAGLAMLVVFGAYELRQKSPVFNMNLFKNKKFTSSNIAALCSYIAVMVVTTILNYHFQYVRGWNAQTAGMILIITPIIMAIMAPNSGKLSDKIHPQKLAAIGMSIATVALLILTFLDGNTPIYFVILAMILQGIGMGLFSSPNMNAIMSSVPPKDAPTASASQATMRTIGQTMSLGLLTLVFAWVMGSLPLATKYAGMVVQASQIICGICTVACILAIFASLVGVKSKDKFNTDRPT

SEQ ID NO: 4575 - protein, 338 aa, Methanobrevibacter ruminantium
MNDLTDRLFHFFKEEIIFSISLILAIISCFFVPPSVDYLNYINWETIILLFIIMLFVEILKNLSVFEILVRKLLKKVKNTRGLVLFLVFTCFFSSIFITNDVSLIIFVPFTILALRKVDRLDLIIFAVSMETIAANVGCMVLPIGAPHNIVMYMVSHIPFQSFFLILLPYIVVSAVFLIILSFFVPSDAVNLPKFGKVEINKEGFFKRVLFGVDYFLLLTFIALFVLIGNLENITFFNLLFKKWIIGNEVIWGVVASQFISNVPAAILLSGFSTNYEAIIVGINIGGLGTLIASMANLISYKILVREHGEFKIRYLIIFTFLNVVLLFILLGVYVFIH

SEQ ID NO: 4576 - protein, 196 aa, Methanobrevibacter ruminantium
MLFEKENTEEKIIRATFDIVQREGLQKATTKKIAAEAGVNEVTIFRKFENKKNLIKKTKEYYTNQLIAKLEESFEFNETDSIEEYLKRSFNKILEFSEEDFNIIRVAMQEVKNDDDKKLLITTITDTIINKLDEFFKLQLEKGTIKDLNSKAVSLMCFSIIFQSLILWQIYNDGDLAADYYADEFLDIIFNGIKVQ

SEQ ID NO: 4577 - protein, 1094 aa, Methanobrevibacter ruminantium
MKVLKIAIIMLILIISLGAVSATENFNNDLSDNGLNDNTLSDNSLNENTLSDNTLSDKSLSESTIIQNDHDNLKDTNNNDNNKALKDPAKTFTDLQMEIINASDLLELTDDYKYNNETDNITLTISKSNFVINGNGHTIDGDNQCGIFQINGTNITLKNLNIINANSTKDSALLLNPGSELETNNVTFINDSSDKRVIFAFGAKYTSNNDKFIDCTSLNDGVINSYLGEITINNGYFESSKPLDWAFVNSLGNSSIYVLNTTFANTTSKYATAIKGDRETVIHDSKFINLYANLTAGAIGLKRIEEAEIDNCTFINVSSQKNGGAIFLDIYSDSEDVPIMISRSSFVNCYSEFGGAILSLGGKITLEEDNFTNNGAFFDGGAIYSSFSQLTISQTIFDNNSVELDDDRGSFGGAIFSDISALIILNCSFSNNNAQTGGALYTYDSGYYIANSTFKDNTNKESEFDDIFTDFDGEIATLENNSYSGEDSICLNNERYESVIAVSGMNFTLIENEINVTNPPRKFDLREWGWVTPVKNQGYMGSCWAFGTVGAIESSILRFLGLEMDISENNMQDSLLQYYRYGTLGAEEGGEYNLGPSYALSWFGVFPSEYDVYDELGKISAIIATDDSIHLQDAVFVPPLMNSTDKDKLKQSLLKYGALAVSYYAETDEPGLNENTSSQYSLKNDSNHRVLLVGWDDDYSKDNFYMTPPGDGAWIIKNSWGEELGDKGYYYISYYDASFATLVPSVGFPIMNTVIYNKNYQYDIGGTLEFTDMGNEYVNEFEALEDDFIAAVGTYFIDAGVDYNIEIYVNDELKYSQDGTSPFFGFHTIQLDSYVPIKEGDEFDVKITSDCIPILESGRQHYIENKSAANLNGEWVDLTSDGKVCAIKVYTTDEDKKKESSRINTRIDCKNMTTTAVASEDGRIGEYFQVTLKDENGTALANKPIKIGFNGRVYDRTTDENGSAKLQINLAYKGTYTFAIGFLGDEEYLGAFEVAKITVKVQTPKLTAPNKSYKVSAKTKSLTASFKTANGKAVSGKKISFTVNGKTYSAKTNSKGTATVNVSLNKKGTYSFTVKFAGDDTFATSSAKAKLTLK

SEQ ID NO: 4578 - protein, 45 aa, Methanobrevibacter ruminantium
MARCPRCGSEALEEINFNTYKCHECGYMIRNPDDLELVERENGDL

SEQ ID NO: 4579 - protein, 142 aa, Methanobrevibacter ruminantium
MKKAIIETEKGDIVLELFPNEAPGTVANFEKLANSGFYDGLTFHRVIPDFVIQGGCPRGDGTGGPGWTIKCETEGNPHKHGTGALSMAHAGKDTGGSQFFITHSPQPHLDGVHTVFGQVIEGMDVVNAIRPGDKMLKVTVQG

SEQ ID NO: 4580 - protein, 91 aa, Methanobrevibacter ruminantium
MLEQYMQFMWLIIFGNIENLILSSQGVVQGVDPKILGGLSILVVIMWFVIGTVITDVAIQYSNLINFIGGLAIFLLGFQAVYEAVRNIRGG

SEQ ID NO: 4581 - protein, 89 aa, Methanobrevibacter ruminantium
MDWKPYAPFTALLIFGNIENLILSSEGVIAGVNSFVLLILSLIAVVAWLLLGTYGTNYAIKYADYIEIIGGIAIILLGLESMLEAFGIL

SEQ ID NO: 4582 - protein, 346 aa, Methanobrevibacter ruminantium
MARIILGKTGLEIEKNGFGALPIQRVDFNESAEIVRKAYNNGINFFDTARAYTDSEEKLNYAFKGFDKEFPRESIIIASKTQGENRRDIEKDIKTSLDNLGTDYIDLYQIHNPSFCPTEGDGSGAYDALFDLYDEGTIRHIGFTSHKYELAEEAIHSGLYETIQFPFSYLTGPKELAIVEMARANNIGFIAMKAMSGGLIRSSKAAFAYINHFDNVVPIWGVQKLSELDEFLSYMADDTKLDKQLEEIIAKEREELQGDFCRGCGYCMPCPEDIQIFICARMSLWIRRFPAEPNLNEETQEKMRKIEDCTECRQCVMKCPYELDIPELLKKNYEDYKKILSGEIKV

SEQ ID NO: 4583 - protein, 391 aa, Methanobrevibacter ruminantium
MNTQEIIDIEDKYFINTFNRVPIVLDHGEGVKVWDIDGNEYLDFLAGIAVNCLGHNHPKLVSAIQEQAGKLIHVSSIYYNEPATVYAKRLVDATGFDRIFFANSGAEANEGAIKLAIKYSGKHEVLYCGDSFHGRTILTLSVTDHPEYSAPYVENLPKGFKKVEFGNLDSVKEAITDQTAAIIIEPVQGEGGVHVASEEFYKGLNDLCKEKGILIIADEVQSGFGRCGALFAHELFGLEPDIMTVAKGIGGGFPMAAFLAKEDVAGGFVPGDHGTTFAGSPLAGAAANAVFDAFEEENIVENSKKMGEYFKEKLAPLKDKYDFITDVRGSGLLVGLELNFEGADIVGKMLEEGFLINCTAGNVLRFAPPLVVKEEEIDALVEALDKVFSSL

SEQ ID NO: 4584 - protein, 214 aa, Methanobrevibacter ruminantium
MEIKRINRYVIYLFSLFLISLGASISIKANLGTSPIICLPYVSSLILNMSVGTVCLIFNVIFILVQIILLRGDFERRQYLQIIVGTIFSLSIDFSMTLVTFLNPTNYISQFAVLMLSCVVVAFGVLLEVQTEVVFLPPDGIIVAISKVLNKEFPKVKPFFDTSLVLTAAILSIVFLGYLAGVREGTIISAVIIGPIVKVLQKFFNPYIEAVIEK

SEQ ID NO: 4585 - protein, 145 aa, Methanobrevibacter ruminantium
MTNRKDWGLTVRGIVQQEDKILILRRHPKSRNNPNKYELPGGKVDPGEFFDEALIREFKEETNLDVNIVSLFETVQDEFISRRTNQPISTVQLMMNLEIMGGEVEISSEHDDFKWVSIEELKELYKNDMVTPTLRLTLEKRDFKI

SEQ ID NO: 4586 - protein, 427 aa, Methanobrevibacter ruminantium
MDLNIKTNDKGHLDIGGADACELVEEYGTPIYVIDEERVRDNYNRFYNAFTKFYPKFKVFYACKANTNIAVLKILEEEGCCIDAVSPGEVYICKKMGFSGDRILFTGNNIRNDEMDYVNSEDVILNIDSVSALKRLAESIDPQGKKISFRVNPMVGAGHHGHCITGGEMSKFGIMETEAVEIYKLAKELGFEPVGMHSHIGSGILDPEPFKLAIESTMNIAGKVHQEAGIDFEFIDFGGGVGIPYTPEEELLDLEHFAEENIKLFKEKLEEFDMGEPILYLEPGRYIVGDASVILVEVNSVKESYRKFIGVDAGFNTLLRPAMYDSYHHIVVANKMNEEPTQTVDVAGNVCESGDLFARDRPLPDIEEGDILGILNAGAYGYTMASNYNSRPLPAEILVKNGESFVIREAQTFDDIFEKQSIPEHLK

SEQ ID NO: 4587 - protein, 287 aa, Methanobrevibacter ruminantium
MVDLKGLKFSKMHGIGNDFPIIDESKGEQIKEADKPEACRQLCHRNFGVGGDGVLFVVPSDVADIGYRMFNPDGSEAEMCGNGIRCFGDFVYRNKIVEKETMTVETKSGIKTIEITVEDGEPVLFKVNMGKSTFKVPEIPMIADTDEFVDGDLDVIDTTFKATCVNVGNPHAILFVDNVDDIDIDKYGPAIECHEVFPEKINVHFVEVLSKNEGKMRTWERGAGVTLACGTGATSTALAGVKLGLFDKNVLLHLPGGDLEFEVYEEDGELGAFMKGPAALVFNAEIQ

SEQ ID NO: 4588 - protein, 56 aa, Methanobrevibacter ruminantium
MILSRNILNYLKEGKTLEEACAKAGVVQNELNIWKLWADKGLQPYKDFFREIENYR

SEQ ID NO: 4589 - protein, 242 aa, Methanobrevibacter ruminantium
MNLEERNSREIEEFFKSKGVKVVGFASLENIRNVPKEYPNSILIGIPIEKEALKTIYTNDQSLYVESMKEVAQKLNDIILEGEDYIKNTMNYNALAISRERVAGELKDLASKIPHKTTGTRSGLGWIGRCALLISPEYGAALRLSTLLTDMPIKVGTPIDDSLCEDCTDCQDACPVDAINEVKWNSRREREEYFDAEKCFEFIKKEMKRTNGKSLCAKCGLACPYTKEYLGIETDRNLIKEI

SEQ ID NO: 4590 - protein, 216 aa, Methanobrevibacter ruminantium
MKTKNTKTRPQLTKDLKSEDFMEYYFLKEELKEFCRREGLKIGGSKNQLEERIIYYLDTGKSLDESVKDGNKTKNHKSVKDDNKTKNCNHKISNSDSQEITLDSILGENFRCSEDKREFFEREIGKGFKFKVKFQRWLKANPDKTYQDAINAYYELQNSNEKTKIDRQFQYNQYIRDFFEDNEGRSLDDAIKCWKYKKSLKGHNRYEDSDLKILKS

SEQ ID NO: 4591 - protein, 194 aa, Methanobrevibacter ruminantium
MGKFEIETDDLVYIPSDDTFLLAENLEIKEGQSVLEIGTGSGLVSMYASLLTDDVTATDINYNALELAEKNFKLNDINTIRLEFGDLFEPVKNEKFDVILFNTPYLPTDTDDIIDDDLNYAFDGGIDGRKVIDRFINEVSHYLNDGGIVQIIQSSLSNNDKTLDMFDRNGFIAEIAKSESFFFEEIVLINAYKI

SEQ ID NO: 4592 - protein, 298 aa, Methanobrevibacter ruminantium
MKEEISLAKQTKRILQENDIKLNKNLGQNYLIDDFKRKKIINYANLTKEDTVLEIGPGIGTLTIELAKRAKKVIAIEQDETIFNILKKRLEKEKINNVELINGDAVKVDFPEFNKIVSNLPYQISSPISFKFLNHDFDLAILMYQKEFADRMNGKVGTKQYSRLSAMLYFKADVKFLTKVSPESFIPSPKVDSAVIQLKPKNIDSIRINDKEYEIDKETYKTYSKVVKALFQHRNKKARNALIDSRHIIGFKDKKELKSILNDLEDENPRIKEILLERTINLAPEEIMELTILLKDQL

SEQ ID NO: 4593 - protein, 249 aa, Methanobrevibacter ruminantium
MDNPNIDNPAPKKEENVIILDYLKFGYINPERPTARGKPIAQALGVDKFTLIEVTPKQGIDLEIHEKVYIGSGKRDKINRVKGLLDYEKLTATSRIELEYAIKEIIQSKEEIYIKFFNEIDSLNIKMHKLELIPGIGKKHTQMILEERKKEPFKDFEDLKKRVPLLGDPVDMLAKRVSLELDTTQVKRGKKKYYMFTQVPSKHPSNKKRYRRGRNNRNRNNRNRKPNKNRNKKPNNKANNKATNKPKTE

SEQ ID NO: 4594 - protein, 1058 aa, Methanobrevibacter ruminantium
MNFKTKGSLILISLLFILIIGIGMASASEDINTDIDTDYQSDSIDVSDVSLNDEQIASEDSLPNYEIANKSKDKLYDEGEEEEGGITNDDDDENYRIDGIYADYTITPSENGTIFVEGERIQIIFNFTDQDYEPVSGDWFINFYGESTDVDIYHPFEATGLTDYVVPIYLPPGDYVIFFYEGVVFDDFGGIEDEGTQLDVTFEDAEGNQLDNPEFSIRTNYNKKVYANLTIDYSVAELENLVEGDDITAKISLMDEFNNKMTEKVNLEIYRNGENYDSKKVNVVEGQNNNIIFENLQEGNYSLEVASIDSVPKYTNIITKAVNFTVKSNYDPDNYQIILNPEDEKKLVGDSYEMGVKLLNPSEEAEEGSIDLYLNGNFVKTLELNYDEDGYSHHIVEGLQLGPNNATFLYQIRDGVNVSESVNLIRYETESIIDLESSDIIIGDDAKIKASLSYLDGIVKKPINENFKLYIKNYVEDEDEVEFVYDEEFTIKGSETITLSDLEEGTYYISAVYNGKNYKYLATEEESTLEVFPKETRVDAVARTYSTEENVIVGIELADLSGKAIKGTVNVVLDNKTSYQVNTTDDIQHPVELDLGKLGYGLHNIELNYTGDDSEGWLPSYNNAEFLVIYPSFMSIEDGDVTSGSDLTVNISLTGPDDEGINGIITVRIYDNTGKYLINGDFNTTNGVKSIELKNITKDYIIYGRYYGLDTSKIEIGPSNHYLSSEAYGFIRIAEGKSEKTEYDLELTKVNDNTVIASLKDSDSKPVANAELTVKVNGVESKAKTDNNGMANISFSGNSSIKVSYTDANNTTAKASMEIIIINNVTEKIVNQTVEVPVEIEKIVYVNQTVEVPVEVEKIVYVIPNRTDTAFEYENMVTTAVASADGRTGEYFNVRLIDATGKPLAYKPIKIGFNGVVYDRTTDADGRAKLQINLGYKGDYTFAIGFLGDDNYTGAFEVAKITVKLQKPQLSTASKTYKASAKTKTLTATFKSEHGNTVSGKKISFTVNGKTYSGTTNSKGIASVNVSLSKKGTYSFTVKWAGNDQFASVTKSGKLTIK

SEQ ID NO: 4595 - protein, 114 aa, Methanobrevibacter ruminantium
MIGKKTLESEPIPAAKVKEILEEFSEKYELNYEQNLTLAHVTNLNKLSLEDAEKLIEELEAFMTHKQAIRVADLLPRDMADLRLIFAKERNAPSKEDMEQILEIIEKYEIYVEE

SEQ ID NO: 4596 - protein, 96 aa, Methanobrevibacter ruminantium
MQRSRGFKSRSRKKLTKKVRPGRANPITRRIQQFENGDMVHIIIDPSIQKGQPHSRFHGKTAKVVDKKGKAYILALKDGNKAKELIVTPEHLKLQE

SEQ ID NO: 4597 - protein, 422 aa, Methanobrevibacter ruminantium
MNQEILNKAEELINHTNGNICNHCLGRKFSDCVEGDGNEDRGAKIRQALNLEPYKANEDNPANDEKCLICNDLFEDLNTVLDLVNEKIDLLKVEFDTFVVGCKLPKEIVEKDQEISDEFDFNVEIIKKEVNREIGKLLESNLEQNVDFDGEDVLVMVDFRRILKEDIENPIKVRLQINPIFIEGRYRKLIRTIPQTKWPCRKCKGKGCEECNFTGKQYPESVEELLSEVVLKHTNGYEAKFHGAGREDIDVRMLGTGRPFVLEIKEPKIRKIDLKKIEEEVAISAKGKTEYLNLKFTERRRKAEIKESSPDTYKVYRALVKCEDYIKEEDLEKLQTLHIIQQRTPIRVSHRRADKIRQKEVKEIKAEFIDSKTFEMIIKTEGGLYIKELISSDEGRSNPSVSEVLGTQAICAELDVIEVGIK

SEQ ID NO: 4598 - protein, 444 aa, Methanobrevibacter ruminantium
MLGSLGENLTNTMKKLAGMSVIDKKVIKEVVKDIQRALIQSDVNIQLVLKLSKTIEKRALEEEPPKGITPREHVITIIYEEMVNLLGSEAQELKITEKPFKILFLGLQGSGKTTTIGKLCRYLQRKGFSPAVVCTDTWRPAAYEQLKQLTEEMQIQLYGDPDNKDALDLAEKGLKHFKNQKIIIFDTAGRHKNEEDLIEEMNKLDKIINPSESMLVIDATIGQQAGEQAKAFSQATDIGSIIISKLDGTAKGGGALSAVAETGAPIKFIGTGEGIDDFEAFDPERFISRLLGMGDIRSLIEKAEEVIDEDEATKTMNNMLSGKFTLVDMRSQFEMMNSMGPMQQVMNMIPGLGGKIPKEASQMTEDKINGFKIIMSSMTEEEMLNPKIIKQSRIQRIARGAGVEESDVKELLRYYNNTKKAMKGIGRRGMGGGAMNRIMGQFMK

SEQ ID NO: 4599 - protein, 188 aa, Methanobrevibacter ruminantium
MLENLVESLRNAPVVKKGDYDYFVHGISDGIPALNPCVLKEISEVLAERIDLDKVDKIVGVEAMGIHIATALSLETGLPLLVIRKREYGLEGEHEILKHTGYATSKLYINDLNEGDNIVLVDDVVSTGGTLSVVINELKAIGVNILDTFVVVEKGEGKKIVEDKTGENIVTLVKLDVVDGKVVADSLI

SEQ ID NO: 4600 - protein, 335 aa, Methanobrevibacter ruminantium
MSIYDMELKKVIRKINSLNVKNVGLQFPEGLKMQAVAIAREIEKNTEANVIISADPCFGACDVSDRKMNGIVDFIVHYGHTPLPLRYSIPTMFIEAKANVNIKQYLEDALEMLEDYSKVAIATTAQHLHLLDEIVDFLEDHGKEVVIGSSRSTRKGQVLGCNFSSIKNLGADVYLFIGSGNFHPLGIYMFTNSPVLAIDPYSGDIREMSGYADRILRIRFARIVKAREVKKWGIIVSSKEGQYRMALAKELKKLLEDEGMEAFILLMDHINPDVLLPYMELEGFVVTACPRIAIDDSQMYKKPVITPKELEIVLNKREWEKYQLDEILFEDRYYQ

SEQ ID NO: 4601 - protein, 153 aa, Methanobrevibacter ruminantium
MNFEFSILGLFLLLLLFVPNIIWTKFIPKDYENYSKRENKILLILERIGEVATVVFALFCGAKFSWSLLLIIIFILMALYEVYWIRYFMSSHTMKDMCDSLLMIPLPGATLPVIAFFLFGIYSNSIFLVISSIILAIGHIGIHYNHKKQCNLN

SEQ ID NO: 4602 - protein, 188 aa, Methanobrevibacter ruminantium
MKVESGDFVMPGDFLSVSEEFLPGPGAYEDDGSVKSGVPGNVFVDNGEKEISVISKSGGPNLLKVGDIVYGEVKDVRGQRALISVYAKKGTDRQLALPYMAAIHISQVTPGYIDKLTDAFRIGDLIEAKVVKIMGDNLDLNTEDITSGVVKAMCTRCRAFMEPRTESEVYCPVCNRKEKRKVSKNYDY

SEQ ID NO: 4603 - protein, 92 aa, Methanobrevibacter ruminantium
MEIEVIKESKLELEMIIHGENHSLCNVLRKYLMEDDDVEYAVYGIDHPLTGAGKPVMTIKTKRSKRPRNSLLKAATRLKEETAEFKELIEEL

SEQ ID NO: 4604 - protein, 138 aa, Methanobrevibacter ruminantium
MAYKIPSLTVDIFIFNDEKEFILIKRKNDPYKDFWALPGGFVDYGETTEHAAVREAKEETSIDVELIKLFNVYSDPDRDPRRHTVSVFYLAHGDMNDAKADDDAKDIGIFSFDDLDNLDLAFDHRMILNQVKEYFDKE

SEQ ID NO: 4605 - protein, 131 aa, Methanobrevibacter ruminantium
MEFCPKCNGMMMNTTVKVKKEDLEEKVDEENQSNQETEEEKVVFKCMTCGYEKDPSEVDQDQYKVKETVESSDSVIMRGDESGMRSTVREICPKCGHDRASYELLQTRSADEAPTRFFTCEKCHHKWRGYD

SEQ ID NO: 4606 - protein, 539 aa, Methanobrevibacter ruminantium
MSNSQNDGLEDVSKGNNESAGENTDSTSNKKTRFTKSKSISEVFKELDSQETNDSILDSEDAASELESEDKYSNIENYLSEAESEEEILDASSEAESLDASSDVEFEEDIIIDSTAEEEIDEIIPIHNEYKDLDESEAFNTESIDEEEISESSELDNYVESIVNEKDDLSSDELVDSKENLDAVGGDEGSMSVKDIENASFEAEDTSLDAEDYEDDSIDSEDIDQSYEEELLDENMKVIKVNNASSEDVLSKKNKGFLSSFGSIKMDSSFIITVLSFIVGLGILIMGIFYLNSSSDRVVDNVLSGETAGLAVFLIIIGLLIIGFSILRFLSSTKADQSSSMLDMFKSIRDIDYDDVKDDNISRDDFDSVFSSVFGKEKRSDFSNDDGDKSSVDKNLFDEDDEISDEDIDALYSDSNLNKTASSTKNSTGIQDTDNIIEEDLDDDFDMIDSDNSEDFDNDTDLEDDNVSDLKDKYSKYNFDDDDAPSKPQFKKSVDISKFDDDGLSEEELEAERRRKAEELEEKKRRIIQGTNFDNSLRK

SEQ ID NO: 4607 - protein, 244 aa, Methanobrevibacter ruminantium
MFKAELSDSSILKSSFDAISSIVDEVQIQTDSEGFRLDALDRSHITFVHLELKASLFDEFVCDEPEKINIDTDELMKVLKRSKSDDRVLMSLDEGNFILTFEGEATRTFKIRLIDIEYDSPAPPSLNYPTEFEIPFSLLKDSIQDMDIFSDKITLMVDPEYFKAFAQGEFGDANIEYLHGEKIDASAKSIFSLEKIREMLKADKFSDIVNISLGDDMPVTLTLRRVANDGELSFLLAPRIESEE

SEQ ID NO: 4608 - protein, 537 aa, Methanobrevibacter ruminantium
MDGDFFQLLRRVQKEERTKSTLARVDKDFYKQLYSYIRDLERSVAQNPFDTAQSNLLNNAQRIATEICQWRESKISTAANNNIYRSFHLFKKGNPQFDLIDTTPLHLTPEEETLYFALMDALKTHRYNISLDKFGDEKADWGADDYEDEEEDDFEEVASVVKSRVNKGVVSDEEFFNEGGSSNESVTDGFSGESISIEESGADPVVQEPAVETPVEESSGSGFKQEVQESAVETTNTNVGGSDEVLDRLNQIKNSTVVTDEKYEPIEKQINNQAKVVPNVSMSNNLNYESKNYNGQDNEFDSKLKPDYESDVESEPKIESKPKVESAPRIESKPKVESAPKIESEPRLESKPKVGSEPRVESKPKVEPKTIEDRPKRKSSSTLDFDSIFANPDSQFDSIHNFEPDYEADLANIQASSSFAEPSEADLMFSTKPRPKKEPKPKSQVGSKEEFESRPKVEEPSHAPTAKAERPRSQSIKAFAKKEELENTTVVIYKNIDSFMGIDEKIYGPFIANDVVILPNITAQILIDNNKAGLIDI

SEQ ID NO: 4609 - protein, 92 aa, Methanobrevibacter ruminantium
MKMPKEKRTYCPHCKRHTIHEVHTSKKRKASELKWGQRQFRRVTAGYRGYPRPLPGGNKPVKKLDLRYKCKECGKSHIRKSFRVGKPEWVSN

SEQ ID NO: 4610 - protein, 59 aa, Methanobrevibacter ruminantium
MASNGRGNFLRVKCLDCDNEQIIFDRAASDVKCIICGKTIVKSRGGKAKIMAHIDEVLD

SEQ ID NO: 4611 - protein, 260 aa, Methanobrevibacter ruminantium
MVRKSQEWPNEGELIVGTVYKVLNYGAFANLEEYAGKEAFIHISEVSSGWVKNIRDHVRENQKIVARVLRVNPKKGHVDASLKRIREDQRTKKIQQWKIEQKAEKFLELAAKSLDKDLDTAYDEVGYELMDIFGDIYGAFESAAEEGAETLTEEGISQEWADAITEVAVKNIQPPEVHITGYVDIESYAPHGVEIIREALLAAEDENIEVQCVGAPRYRITVTSTDYKLAEGQLKEAANKAIDIVIENGGKGEFLREIDN

SEQ ID NO: 4612 - protein, 56 aa, Methanobrevibacter ruminantium
MKMKMKKCPVCNIYTLKPQCPNCGGELRVIYPPKFSVEDKYGKYRRQLKKEMLNKE

SEQ ID NO: 4613 - protein, 262 aa, Methanobrevibacter ruminantium
MRTTQFKVLEEVKLNNPIFIEALPGVGHVGKLAIDHVIDELEATKFVEIYSPYFPPQVLVGEGGIVEDMKNELYYLKSAGGDERDFIFLVGNCQGLNPEGQYELCGSILDFVESLGAKEFYTLGGLATGQPLEGVEDRVLGAATDEERIEMLKEADIEIRSADGGIVGASGLFLGLGRLRGMKGACLMGKTPGYFIDAEAAEAILAKLAILVKLEVSTDELEERANEIREMINKAQEMEQEMINRAMGQQQAQTQDDLRYIG

SEQ ID NO: 4614 - protein, 395 aa, Methanobrevibacter ruminantium
MLQIAVTGKPNVGKSSFFNSATASQVEMANYPFTTIDANKAVGHVISECPCKELGVTCNPNNSQCIDGTRLIPIELIDVAGLVPGAHEGKGLGNKFLDDLMQAKVFIHVIDASGGTDAEGNPVELGSHDPLEDIEFLEHEIVMWMYGIVSKNWVRLIRKVEAEHLDFSKVIFEQLSGTGILIEDVIEALRTVSPDYGKWEDEDLIEFVRNLLNIAKPSIVIANKADLPGAKENIERMKEKYPRVIATSAESELALVNATRAGLISYISGDNSFEILEKDKLNPNQIKALEYIQTNILDVYGSTGIQEALNTAVFELLNMIVVYPVGDEHKFTDQKGNVLPDAFLVPKGSTPREFAYIIHTDIGDKFMHAVDARKNMRIASDYEIQDRDIIKIVTR

SEQ ID NO: 4615 - protein, 372 aa, Methanobrevibacter ruminantium
MMHPRPSPIAASLYTLRDLNADVIIMHGPHGCCFRTGRLLESDGVRVVTTAMAENDFILGAADKLEETLQEAYDTFNPKLIGIVGTCASMIIGEDLKEPIENLNLDAVVIPVESHGGFGEGDNTEGAIAVLNAAVECGVIPQEEADRQNEMLRLATVVEKTRGMAQGKYIKPNFGDNKEKVAKIVVKAVKEGKNVAFVLNAKKETSYLFADILNCDFSKLFQDTDSNIKSNKDIENLHFIANLDENIGLPRIRQHAVNITKELNETGIDIECITGGLDEYPITPRKAEEYLNELNPDLVIVAGVPHALYVEELDCETIAVTDGPRLVQPLNELGYSHVIAELDAHSKTLGVDEIVDSDFGMMIRSAIEWELE

SEQ ID NO: 4616 - protein, 197 aa, Methanobrevibacter ruminantium
MITIIDYKSGNLRSISNSFKKIGSKAVITSNPEDIANANHLVLPGVGAFGTAMENIEPYKDLIYEHIDDGKPFLGICLGLQVLLSSSDETPGVKGLDIFKGHVEKIPEGRKIPHMGWNQLKQVKPCPILDGVDGKDFYFVHSYYAVLDDESNLSGICDYGVDLTASVSRDNVFATQFHPEKSGVPGLKILKNFVNLE

SEQ ID NO: 4617 - protein, 206 aa, Methanobrevibacter ruminantium
MGKFKFIFILVLALFLICGIAAVVDAPDSFDGSLNLIPVSDSSVSQSDSSVNQSDCENGTCSVDLNKSEDNSSKETSDDEIDYDSKYYDDSLIDGLYFCNDLEHAFKDAKQHHKNVMIIFDGAACIYCEYLKDEGLTDSDIQKEINENDILLMTYTSDSPELSQKLEIYGTPTTVIFDENGTELGRIEGYESPEQFLSELKEYNGK

SEQ ID NO: 4618 - protein, 205 aa, Methanobrevibacter ruminantium
MEIMPIISFFIGVISILSPCILPTLPIIAGFSLKAESKAEIVAFILGLFSIFTIIIFLTGFFTTILFRYIVYVRVIAAFLLLIMGILMFFDYNLSFGSVKSRSGEGIVNSFILGFLTSVAWADCYSGYLISLITMLVSSSPLYAVFNIFIYVFGFALTLLVLCLAISKIDLEKLIYKSGYIPKIFAVLIIIGAFYMFYTSIQVFL

SEQ ID NO: 4619 - protein, 230 aa, Methanobrevibacter ruminantium
MIYSKEIENMCPVHKGADHGPAPIPEEGRWVKSKEISDISGLTHGIGWCAPQQGCCKLTLNVKDGIIEEALVETLGCSGMTHSAAMAGEILVGKTILEALNTDLVCDAINTAMRELFLQIVYGRTQSAFSEGGLPIGAGLEDLGKGHRSQVGTIYSTKVKGPRYLELTEGYITEIGLDEDDEIIGYKYINMGVMLDLIKDGTDPMEAIEKASGQYGRFEDAVKKIDPRKE

SEQ ID NO: 4620 - protein, 332 aa, Methanobrevibacter ruminantium
MSLFESYERRIDQIVPVLEKYGIKDLEEAKAICNEKGFNPYDIVKSVQPICFENACWAYTLGAAIAIKKDCKKASDAATAIGEALQAFCIPGSVADDRKVGLGHGNLASMLLSDETECFAFLAGHESFAAAEGAIGIANSANKVRKEPLRVILNGLGKDAALIISRINGFTYVQTEFDYFTGEVKVVREKAYSDGERAKVRCYGADDVREGVAIMHLEGVDVSITGNSTNPTRFQHPVAGTYKKECVLQGKKYFSVASGGGTGRTLHPDNMAAGPASYGMTDTLGRMHSDAQFAGSSSVPAHVEMMGLIGMGNNPMVGATVAVAVAVEEALK

SEQ ID NO: 4621 - protein, 468 aa, Methanobrevibacter ruminantium
MYTFLICLFALILSYFVYGKFLERIIGVDETAKTPAYELEDGVDYVPMNKYRALLVHFLNIAGLGPIFGAIQGALFGPSAFLWIVLGTIFAGGVHDFFEGAMSVRNDGLSMPGIISKYLGDRVRKFFAVLIIITCILVASVFASGSADLLSSLTNIDIHIWLVAIFIYFLIATLFPVDKIIGKIYPIFGALFFIMAVLLISALILNPNYSLPEFTTAGLYLTDKAIFPFLFVTIACGAISGFHASQAPIVARCVKNEKDMHMVFYGAMVIEGILALIWATIAMSFFHGQPQLASIYGSSPSIAVKEMSIALIGTVGLVLAIIGVVICPITSGDTSLRSARITIADELGLNQDKLKTRLKISIPLFLVSFGLTFIDFSLVWRYFAWSQLIVAIAVLLAATVYLIDNKKHFIVTFAPAIFCTVVAIAYILQASEGLRLDPFISNVISVIVALALSVYFILKYRKQPNTTT

SEQ ID NO: 4622 - protein, 81 aa, Methanobrevibacter ruminantium
MGIFSFFKKDKDKEKVESHEEVHSIQINAENCQGCGRCVSVCPNNAYELIEGKSSLKENFTCRDCKVCLAACSNDAITFVN

SEQ ID NO: 4623 - protein, 260 aa, Methanobrevibacter ruminantium
MKIFINADTYKEIAQITKEKLIETANELGIEISEDINEADIICSIGGDGTFLESSKLALQKPIIGINCGTLGYLTDVNPEGIKKAMKDIIDGNYYIEERMMLEAEIIKESGEIIKMPPALNEMSISKNIFGVVRFDAIVDGKLINSYTADGILICTPTGSTAYNLSCGGPIVDPTAEIITITPIAPHTIINRSIVLSDKSIVEIKITELREHTSSYALSDGKSSEIETGDILKIKKSDAKTKIIKLNWQSFIDTVRDKIN

SEQ ID NO: 4624 - protein, 456 aa, Methanobrevibacter ruminantium
MDIEGFVRGRLTKGEDEEELKSILAERIREFKDISEEHSLLMAESVIDEVKTTLELNNTEDEFLKDIITVPKANVGMGKMGVGSRGAGDFFVHRKIAQIVKSTNTQSVVDPNAQDDGGVVKVPAPGDDVYITTAVDGIHSRLSEYPFLGGFHVTRATLRDVCVMGADPVAILSDLHLADDGDIGKLFDYTAGICAVSELIDVPLVAGSTLRVGGDMVLGDRLVSCVGSVGVSQHPPTARKGATVGDIILMTEGAGGGTITTTALYNGYFDVVWDTMNISFVKASKALFDADLVKDVHAMTDVTNGGLRGDAHEICETTGVGLEFYHDKIKTTVAPNVLNMLEDLDIDPLGVSTDSLMLVVPPEIADDVVKTVSDVGVYITEIGKVDDEGSPRLIKEDGSVDTLVPLFREAAYTKIKKLVGDTTPEDFEIMKEKVQKAADDSIRKKERVIDYILNNN

SEQ ID NO: 4625 - protein, 137 aa, Methanobrevibacter ruminantium
MALEGAERIDEFISEAKVFFLATVDGDKPKNRPLGFHLLKDGKIYFGVGNFKDVYKQMEANPYVEIVALVETDFLRYYGKAVFEETYDMADAIVAGNEFLQGIYNDETGFKLAIFHLEEATAEIRDITGKINESYNF

SEQ ID NO: 4626 - protein, 131 aa, Methanobrevibacter ruminantium
MSLFKNFIGNFKKSDVLDLAKGFKLEYEANNLENMKSIVDKFVDFHPDSYFASCSMVIYIIQLYKKDPLKVSPNMLNNLSIMERNIKFYDNSSTDSLDNEELELRQWFKKEVYENVKYMESAGLRFSADDK

SEQ ID NO: 4627 - protein, 52 aa, Methanobrevibacter ruminantium
MQLNKICLAAIVLFVLFTILKFVMKWSFKLFAIGIVICIILAIFGFFKGDDL

SEQ ID NO: 4628 - protein, 212 aa, Methanobrevibacter ruminantium
MSSNSDKDILKELRDITKDKESWKSNINHVAVKLNDDFSLSVKAKVLWLLGEMGLKHPLEIEEYVDDIAVYLEDDHPKLRERSANAIGRIGRADKNLVINYMDKLMKLSDDESESVRHAFIWACENIAVNAPELFCEKLDIFYEMISDPGEKVRIEAPEIFRVVGKRNPSCVKPYLDKLEHIAENDENPVVRIHSAGAVRITRKALKESDNA

SEQ ID NO: 4629 - protein, 230 aa, Methanobrevibacter ruminantium
MGFFSNMRKPEGKLGNIQLKSMNKEHTPVSLWGLKHLDISPEDTILDIGCGGGMNINRMAQTAKKVYGVDYSIESVNLSKEVNADFIRSGKVEVYEGNVSNLPFEDNSFDIVTAFETVYFWPDIEKSFGEVKRVLKPDGMFLIGCESNGANNLAMKFFDRVIDMELYEDNELYGFLKNNDYGDITIYLRDGKNKQEIIKKDDKTFVIDDDYDNFSISDRWVQWMTITAIK

SEQ ID NO: 4630 - protein, 153 aa, Methanobrevibacter ruminantium
MLSLIKDNKGFLSLIDAILSIFLIFIVLISFNMIVDMEMPSLSEDNNQFKTSQDLMELMSSKIDGRDYSTLERISYVLSSNDNSIASRREVKNILDDFFSAHLGSDYKYVFIETNQLNGYVLSSDGDYSTADEVSLAIRNYGNYSYKLYIFKA

SEQ ID NO: 4631 - protein, 452 aa, Methanobrevibacter ruminantium
MLNANTYVTEEEGIGGTIRNRWEDFYVEEIPEVIPDGEGPNIYIWIEKLGRTTLDVLLDIARDLHIDRKRMGFAGMKDKKAITRQWICIANMDSEEQFAQVEALAGTIHNTEFLKVIRGRKKLRMGQLKGNKFRILVKDIDGMESDNEETRKLAIEDAAKRADAILKTLEKTGVPNYFGWQRFGKPRTNTHLVGEALIHNDLKEAVRRYIGNPSEEESEDSRKARQAFDDGNWEESLELMHPGMRYEKMMLKVLLKEKRRAIRKIAEEEGIEIEEVDESKVELSDKAYKNAIHALPKPLQRMFVHAYQSFLFNAAVSERVAMGMDKYIEGDIVIDKEERIVRDKTPEEFQEMVSSFEINQTCPLYGTKVPFAGGEVGKMEEEILNSYGLTRDDFEVPKMPRLGSHGLRRSMRFQVWDASATATEDGVMCEFSIDKGSYATAVLREVMKKDVY

SEQ ID NO: 4632 - protein, 401 aa, Methanobrevibacter ruminantium
MEERTGLFSNGVIWFGVAISVSEIEAGIQLASMNTLDSIWLPLVLGHIIGGILLFSTGLIGARLRLNAMETIKSTFGNYGSKFFSTLNVLQLIAWVAVLNAQGASALMGLNLPISFPLTCIILSAIIAVWVYVGLRRSSKITTIMMIVLTALLVILSVKLLGVHISNALPIQNINSTALSFWSIFEISIAMPISWLPVISDYTKDVENPVNGTLVSAIAYTIASLWMYFLGIEIVGIGTTSIAQSILLAGLGAQGVIILVLSTVTSNFVAANSAGESAKAIFNRINPKIAGVVVSAISAILAISGIMDHYIGFLYLIASVFAPMAAVLLVSFYLSKEETGNARIWYWNIFAWLAGFIVYQATVNLDSIFLGPTLLAVIVSAILAYIPILLKNKSKLPNISK

SEQ ID NO: 4633 - protein, 280 aa, Methanobrevibacter ruminantium
MNETIKTLTIQDISCYGQCSITVALPVISAFGIETAILPSAVLSTHTSGFTDFTVRDLTEDLPEIRKHWEKEGIFFDSIYTGFIASAEQLDYIKDIIDSRLKENGLVFVDPAMADHGEFYNGFDQEFADKMGELCKLGDFILPNTTEACFILHKPWKESFTKEEMLEMAKELKAFTKRYVILKGYEEEDKMGMIVLDKIEDTIDIVYNEKINYVSHGTGDVFASSFVGSTMLGKSPSAAAKIAGEFTKKAIEKTIGDETHTYGVKFEQAIPELYDLLKSI

SEQ ID NO: 4634 - protein, 224 aa, Methanobrevibacter ruminantium
MDWSPIFISMKTASLSIFITFFLGLIVAWLLVKIKNDTTKIVLDGIFTLPIVLPPTVVGFFLLYIFGIRGPIGSFFLDFFAVKIAFSWPATVIAAVVMSFPLMYRSARGAFKQVDSNLLDAGRTLGMSEWKIFWKILFANALPGIISGGILAYARGLGEFGATAMLAGNIAGQTRTLPMAVYSEVAAGNMGTAFDYVIFIVAISFIAIFIMDYFSIRKENQWKN

SEQ ID NO: 4635 - protein, 274 aa, Methanobrevibacter ruminantium
MDSKKILMIAVVALIAIVAVSSCSAGFLDFLGGDNATDDSLNGKEVNLAAAASLKNVYDDELIPMFEAKYPGVKVTPTYASSGDLQTQIENGLETDVFMSASNKQMNALADEGLIDNDTNLQFLENKVVLIVPKDSDLNITSFDDLKDVKGTIAIGDPESVPAGQYAKEALTNLGIWDAVESKFSLGTDVTAVLNQVAQGSAECGIVYATDAKSNDDVKVVCEAPENSLNTSVIYPVAMIKDAKDADAAKAFLEFLQTQEAKDKFVEYGFTIHE

SEQ ID NO: 4636 - protein, 129 aa, Methanobrevibacter ruminantium
MIECRNISKGKAEGELIVSDEAISFLGGVDPETGVVIDPNHELKGQSIKDKILFIPGGKGSTVGSYVIFQMMKNNTAPKAIICLKAEPIIATGAIMSDIPMVDSPSSVEELVNGQMVEVDSDNGKIEIL

SEQ ID NO: 4637 - protein, 412 aa, Methanobrevibacter ruminantium
MPSLYIKNVNIINPFSEEPLDERHVLIKDGRIESLHAEESALYANHIVLDGEDNYLLPGFIDSHAHVMANGFHKEDTMKNPLALHFYNAIENMKATIDAGVTTVRDTGLADIGVKMAQERKIFPAPRLNISIKPLAITGGHFDFYLNSGFDMELAYPGFPIGTCDGVEDVLKKTREVIRARADFIKIMASGGILSPNTSPEFAQFNKKELKTIVSEAENYNLKVAAHCHSLEGIQRCVKAGIKSIEHGTFIDRKTSELLAKKRIYLTPTLIVHQTLIKEGFPVWDNFADDKVKKLKEVVKIQKENIETAYQCGVKFLMGSDCGVIDHGRNLGELKQLVDIGLSPLEAIQAGTIEGAKFFNQENDLGSIETGKIGDVILVKENPIENIGSLVDNDNILAVIQDGKILKDKPIY

SEQ ID NO: 4638 - protein, 82 aa, Methanobrevibacter ruminantium
MNEADFIQEIMKQANLSEDQGGQVNDIFQSTFLAGNKNKDTIVNLIAEKLGVDAAQAEQIYDIAIGLLASGVLSKIKGLFKK

SEQ ID NO: 4639 - protein, 68 aa, Methanobrevibacter ruminantium
MAEKELNVVGMHCPSCVMAVELSMKDLNGVDDAKASLDTNSVTVEYDPDKITDADLVGAVKEAGFDVE

SEQ ID NO: 4640 - protein, 826 aa, Methanobrevibacter ruminantium
MAQKELDIPVDGMHCSSCSLLVEKSLGKLDEVESINVDLNTNKAHMVLKDNLSPETIDKTVESVGFTVPKEEVVIQIAGMHCASCVNNVEKFLPRVDGVVEANANLSNQKVTITYYRDMLNLKEIQKTIEMLGFEYIGLDGELDIMDEEERYQKDLRGKLYRIIVGLVFAGILMAIMHFHITIPPLTMGQLSLIIAIFPFCYVSMPILKAGWNSFKHKNLDMDVMYSMGILVAFVSSVLGTFNIILDSSFMFYESAVMLPSFLTIGRYLEARAKRKTSSSIKELIGLQPKTATLITSDEEGNSIEKEIDIEDINIGDILLVKPGEKIPADSIVVDGESYVDEAMITGEPVPKLKKEGIDVFSGTINQDGALKIEAQKIGSETVLSQIIQLVEKAQGSKPPVQRLANKIVSWFIPVILTIAIVVFCLWYFVAGAGLLFSLTCLISVLVVACPCSLGLATPTAVTVGVGRAAEYGILIKNGETLESSKDVDVCVFDKTGTITEGKPEVADIETFDMAGDKFLQVLSSVENNSNHPIAKSILNRFKSDNLKLTEEGKDDLALLEVSDFENITGKGLKANVVVDENNSSVLAGNLKLMESEGVEVTDEVLDKFNTFVSEAKTTIVMAIDGEIKGIITLMDKIKDNSKSAIDELHKMGIETYMLTGDNEKTASTVANEVGIDNVIANVLPNDKLDKVQELQKEGKRVLFVGDGINDAPALSQADVGVAMGNGTDIAMESGDIVIMEGDLENVVASIQFSKKVMTRIKENLFWAFAYNMLLVPAAAGLLFLLFGIVFKPEWAGLAMALSSVTVISLSLLLKRYVPPIKRNKV

SEQ ID NO: 4641 - protein, 492 aa, Methanobrevibacter ruminantium
MRIKYLSKQDIKIILHYLGYIMIGIGAILLFPLPIDLFYREFNYVYGVIPPLISIILGVIFSQGFREYDKLKFKHGMIISSISWLWAGLVGAIIMMLILDVSFVDAFFENISAWTGSGLTMFSDVESLPMSILFLRSVEQWIGGLGVVIIFISLLIKPGTSAFKLYKSEAREDRIKPNIKNTLKKTMQIYAIYTVIGVILYLIAGLPLFDSINLTFTTISAGGMSIKNANIGFYQNDIVYIITIFLMILGATSFTVHYKMAKTKGKAILKDIQFQLLIVSIILSAIAIAIITKLAPMDVVFHVVSAITTTGANIAPPSEMAAWAPPALIIIIVLMLMGGSSGSTVGAIKLVRVITLLKSTHLAVTNIVSPGRFVKIKISGKSINEGEMKEASSYMAVYIFFLAISWIIMTYYTNDPFNTLFDVVSTLGNVGLSTGIISGELGTIPKVVLIFLMWLGRLEIIPILLTIQIGFETFNQSLRFVKRRMMRKIKPN

SEQ ID NO: 4642 - protein, 551 aa, Methanobrevibacter ruminantium
MFYPKIEEVKEIAKDDSYKRIPISYEIFSDTKTSIEVLRRLRILSNHCYMLESVEDSKNWGRYSFLGFNPILELTCQDGELVIKGKSSFSDCGIEDEKDKCFSIKTDNPGEYIREIIEENKSPKLENIPPFSGGLVGYFSYDYIKYSEPSLILDAQNQDAFKDVDLMLFDKVIAFDNYKQKIVVIVNMKVNDEDMLKNESIEENYQKACNDIKDIVNIIKADNIVDLLNDDFKDQLTNKKTIKSLEEMKGLKTLEELDRCRKEITKHLPIELKSDFRYLFSKEEYCDMVERAKHYIREGDIFQVVLSNRIEADIEGSLFDVYRVLRTTNPSPYMFYFSSDDIEIAGASPETLVKLVNNQVYTFPLAGTRPRGKTDEEDRQLEEELLADEKERAEHNMLVDLGRNDIGKISQIGSVKVNRYMDIVRFSHVMHIGSTVEGILRENYDYLSTIDSILPAGTLSGAPKIRACEIINELEDNKRGIYGGAIGYIDLTGNLDTCIAIRIAFARDNKVFIRSGAGIVADSVPESEFVESINKAQAVMDALRLADGGIE

SEQ ID NO: 4643 - protein, 208 aa, Methanobrevibacter ruminantium
MILLVDNYDSFVYNLYQFIGEALANIKGYDLASKGDLYKIYEEIKVIRNDEMTVEELRELNPDYIILSPGPGKPKDAGICKDIVKEYINSDVPILGVCLGHQAICEALGTNIIHAKELMHGKTSIIELDEDKIFKDISDPIQIARYHSLAVENDSLSNDLIVLARTDDNEIMAVRHKNANIYGLQFHPESVLTPEGLKIIENFLNIKN

SEQ ID NO: 4644 - protein, 335 aa, Methanobrevibacter ruminantium
MIKEAILKVYKDEDLTYDEAYATMDEIMSGEASEVQMSAYLTAMSMKGETIEEITASAEAMRAHCVRLLNDEEVLEIVGTGGDGSNTFNISTTSSIVISAAGVPVAKHGNRSASSKCGAADVLEELGVNIHISPEKSLACLKEINLCFLFAQNYHLSMKYVAGVRKELSIRTIFNILGPLTSPAGASMEVLGVYERELIEPLTDVLKNLGVKSAMVVYGLDGMDEISASDKTAVCELKDGKTRTYEISPEDFSMDIASKEDLVGGDANENAEITLAVLNGEKGPRRNAVLLNSAAGLYVAGKVDSIEDGVKLAEEIIDSGKALNQLEKFIEVTNR

SEQ ID NO: 4645 - protein, 258 aa, Methanobrevibacter ruminantium
MLKKIVAKTEERLIEAKKIKSLDKLKEEVSKLEINNEFPFKEALKDPEIAIIAEVKKASPSKGLIAEDFDYIKIAKEYEQAGASAISVLTEPYFFQGSNDFLKEISQNVSIPLLRKDFTIDEYMIYEAKILGASAILLIVSILDNVQLKNYLDLAHDLGLSAIVETHDADEIRTAVDAGAGIIGVNNRNLADFTVDIENSIRLRSLVSDKILFISESGIKTAEDVGRLKKNNVDAVLIGETLMRSDDKKSMILELKNG

SEQ ID NO: 4646 - protein, 217 aa, Methanobrevibacter ruminantium
MLKLKICGLRRKEDIDIVNKYNIDYIGFVFAGSPRKVSYEQAKELSALLREDIIPVGVFVNEHMKLIVDLYKEGIIKIAQLHGDEDEDYIKNLKAKSLEQTGHEIPVINAIEINNANNYDNFNDKLLEWRDSVSDYFILDSGKGSGKTFDWSLLDKNSEFFKNSIFLAGGLNSENLDSAIKEFNPYAVDLSSSVETDGFKDEEKIKEIVEIVERYRN

SEQ ID NO: 4647 - protein, 394 aa, Methanobrevibacter ruminantium
MSRGRFGVHGGQYMSETLMNELLNLEKQYNHFKEDPEFIEELNTLLKEYAGRPSLLYYAKRMTEDLGGAKIYLKREDLNHTGAHKINNVLGQCLLAKKMGKTRVIAETGAGQHGVATATAAALLDMECEVFMGEEDTKRQALNVFRMELLGAKVHTVTTGSKVLKDAVNDAFREWISRVDDTHYVIGSTMGPHPFPTIVRDFQAVISQEMKEQILELEGKLPNMVIACVGGGSNAMGSFYNFLDDEEVELVGVEAAGKGIDTEYHAATIAKGELGIFHGMKSYFCQGNYGQIAPVYSISAGLDYPGIGPEHAYLHDIGRAKYVSATDDEAVEAFEYLSRTEGIIPAIESSHAIAHAMRVAGDMDKDDIIIINVSGRGDKDVAAIARYKGVELYE

SEQ ID NO: 4648 - protein, 260 aa, Methanobrevibacter ruminantium
MEKDIKISDAFKDGKAFIGFLTAGDPTIEKTVEYVLAMEEAGCDLVEIGIPFSDPVAEGPVIQEANIRALSNNTNTDDVFEAIRQIREKSDVPLVFLTYINPVFYYGYDKFFKRCQELNVCGIISPDLPYDEKDEILEVTKKYGVDIISLIAPTSKERIQMIASEASGFIYVVSSLGVTGMRSEIRTDLKSIISDIKEVTDVPTAVGFGINTPEQAKNISKVADGVIVGSAIVNIIAEHGENAREPLANYVKSMKDAISK

SEQ ID NO: 4649 - protein, 462 aa, Methanobrevibacter ruminantium
MQGKTLDTRTRNLILILFLIGVFMGSLDTGIIGPVLPSIEQSFHLTSRESSWIFTLFVITFMIGSPVMAKFSDFYGRKKIFILDVLLFGIGSCLIAASISIELIFLGRLIQGFGCGGIFPVAGAFVGDGFPLEERGKALGILGSVFGISAIGGPLVGAALIPYGWNWCFTINIPIAIFLIIFAWYILPDSDNDRKLKIDYLGILILSLLAIFLSYGLNQIDSSNFIASLLSLNVLPFLVIFIILIPIFLKVEKKAEESIVPIHMLKNKEISIACIETLCYGIIYSSAIFIPSLVILSMGLDDQLASLMLIPILGANAVAAPILGKILDKTGSKKLMAMGTMILAIGLIAIAIYPSNLIFFIIAGCLIGVGLVTIIGAPLRYIVLTEAKPYERGAGQAIVNMLSSAGQLIGGALIGGIIASFTGILGYQVSLIIAAIVALIAFAFTLRLKGRDEQIATMKANQ

SEQ ID NO: 4650 - protein, 454 aa, Methanobrevibacter ruminantium
MANENVELMRGAPEIAVKKLAIPIMISMLLTASYNIIDGIFVAGLGQAAIAGIGFVTPIFMILNGVSVGLGSGATSSISRFVGAKNHEGANKSATHALLIFLIASIILTIIFLFIQEPLLRTYGASGQSLAEGLKYGSPLFLGLFTFMFANGGSGILRGEGDMKRAMYAVIVSVILNTCLDPIFIYTLGMGSAGASLATIVSSAGSAIVIMYWILIKKDTWVHVELKNFKFDSNIAKDILKVGIPASMDMFMMSLAVSLYLIFISTIGGEFGIAAFTSGQRLYLFAIMPLTSIGSAVAAVAGSAYGARNGDYLSRTHIYGAKFGIAFGTAVTIILIAFAPQLATIFAYTPETAPLVPEITQFLRIASLCLPLTGAGMCSSFLYQGIGKGTISLMWTIIREVIFTVSATYILGIVLGWGLVGIWTGLAIGRITASILNFTFARFTIKKIRENFGT

SEQ ID NO: 4651 - protein, 137 aa, Methanobrevibacter ruminantium
MPFIALIHHISQNKLRYARKNPNHIDMVHEGRYLMEIHKRKNLSQDDLANIFGQSKGTIAKALRKLEDKGYVERIINQNNRRKYILKTTQEGEKLAILLEEDLSSWEEAVGIDKLDDETKNQLRKIARKTEEILKEE

SEQ ID NO: 4652 - protein, 227 aa, Methanobrevibacter ruminantium
MIGNDWDNALEDEFNKDYFIKIKEFVEAEYKTKTIYPPKEEVFNAFKLCPLDNVKVVILGQDPYHEKGQAHGLAFSTPEGHPIPRSLKNIFKEIKEEYNYPIPDSGCLESWAKQGVFLLNTVLTVEEGNANSHSKCGWQTFTDNVIKILNQQDSPIVFLLWGKQAELKKELITNPNHLVLISSHPSPFSARRGFFGCNHFKLANEFLKDKGLEEIDWQIKNVQTTLI

SEQ ID NO: 4653 - protein, 243 aa, Methanobrevibacter ruminantium
MKYLIINGSPRKKNTWAMVKQAKTNLEGEFEEIQLMKTKIPMCNGCFKCIMEGEDKCPHFETVHPIVEKIKEADGLIITSPVYAMNVTGLIKNFFDHTAYIYHRPEFFDKKALIIVSTAGAGHKNVAKYMDETLRHWGFNKNHKITYACGGKDTINTEEINKTAQKFQKDVSSKKLHSPKFMDIVFYNVWRAMAVSKDPIKADKEYWEATGLVNYDFAPNVKLGFFKGIFAKIVFAMMKKVIK

SEQ ID NO: 4654 - protein, 447 aa, Methanobrevibacter ruminantium
MAKKNTKEKIFDSSIDLFSQYGYTNTSIRQIAKEVGIKESSIYNHYQSKEAILESILNYYISEMLKEEAPIMQSNDNLDLGFEYFYKQGSDRFLSKLSEERMMKITRIFLVGSYHNEKMKAFVKEGIIDYAIKGWEELFNLMKEKEIIRKDANSKQLAESFYSYGIFLLYEHFIFNYPEDDEKFLKDFERRTTDHMKIIFNSVKINNEESKIDNNKNNPSSNHDKENKELETEIMRLEEEKDYKKVENLVRDAFWNIYRPGAYEHFIVYNLREDPSFIKDLAYIIEEDDEIIGHINYSKGNLNLYKKNNQGMEKINDWNEEAVVLGPIAINPKYQNQGYGFRLIKHTLRLAKNKNIPYVFVIGDENYYNRFGFESASKYNLFLEGTDTSEENPFFMIRIFKDLFKDKDYDRGIFYNPKVFNVSQDDVDKFDENFEYKQKRVQEGQLE

SEQ ID NO: 4655 - protein, 342 aa, Methanobrevibacter ruminantium
MFDAKFQYTNKIINNLMEISTIKEFILNSQILPSYDILLRNKAIITSSYNSTSIEGNPLDFKQVTKLFNLKQENKLDELKLNKSEIEVLNYFKTLENLDNYEKIDEETILDIHKNITEGTLKDPNMAGKFRDSPVVIGNIKTGQLNYVPPSPIKVPYLIRELLDWADVQEDLNPIILAGIFHYEFVRIHPFVDGNGRNARALATLILLLKDFDIKRYFSLDEYYNQDRQSYYNALQSADKSQDLTEWLEYFSTGFLVSLSNVKKDIESISRFDIKMNGKIKLNEKEIKILEFIEKNNSIKNKEVQDLLNLSAQRSHFYINELVKKGLIKSKGKGRSTVYIFK

SEQ ID NO: 4656 - protein, 1100 aa, Methanobrevibacter ruminantium
MKLKSKYFVFLLIICILFSISTVSANDNDMSINQNLQNDANQDINQDLQLNEAYQSDTNLNQNLQANNQENDLLKASEDKTYNDLYNDIKNCEDTFNIENDYKYTESDNHTFISINKTNLVINGNNHVIDGSNKAGGFEFLKESLNIIINDLTFINCNDYTIVNEDGGNISLNNVNFTNNHNKLGILYSEGMISVFNGALTINNCNFDSNNNTNLIYTNFAELRITNSNFSNGKGIGSPIYANRFELYIDNCSFENFTAPYGGAINFKGNTFVIKNSKFKNLNAEITAGAIFAKYFPKTNKDGPYIPGEDMLFENCEFSNVSSTHNGGAIYLNLDSSSEGFAKTIHINNCNITDASSDFGGAIASQGEILDFSNLNIINCHAKIGGAIYSSWADLSLKDCNIINNSADKDAGAIYFDYSKLIIDNSNFTDNKVNNISSGKESIIYANDVDAEIRNSIFDNGGVAVYANFASNSKFENNTSTDLFLWNNTNYIVSVENKGIKLNLTNNTINVDKLPSKFDGRDWGWASPLKFQGDNVACWAFATAGALECALLKQTGVLYNISENNIQNLQLKYFSEGDRRNSAIGYAYSGLGHSLSWYGAITSEDDPYDERGMYSDVAETDKRIHVQDAMIIFGGRNDTRNLMKEAIMKYGAVSIQYMYAPYDYTANYTEVDLQPGHFVTLIGWDDNCPPEKVNTKMAIDETNIPPGPGAWLMKDSEDSKLGEDGYVYLSYYDLSILSKDFYPVIPQAAGVAYIFENTNDYHVNYQTDITGLAGFDENYSYYSNEFVSKYDEWIGAVGTYFNESGIDYSFDIYVNGEKAHSQNGTSEFAGFRTIVLDKYVPIKANDTFKVIFKSNALPFQAYSRQHYIPNMSMISADGSNWIDYADKNRTVCLKVYTIESDKENISSRASTIIDCKNMTTTAVASADGRVGEYFVVTLKDQNGTALTNKPIKIGFNGRVYDRVTDENGSAKLQINLAYKGTYTFAIGFLGDEDYLGAFEVAKITVNLHSPKLSAPNKSYKASAKTKELTATFKTSNGNPISGKKISFTVNGKTYTASTNSKGLAKVNVSLSKKGTYSFTAKYAGDETYKATSVKSKLTLK

SEQ ID NO: 4657 - protein, 363 aa, Methanobrevibacter ruminantium
MNISSLFSDEKVNTGRQVELDIAKAFAIIFMIFLHTVMIVEAYNVGLSPTYTYIIGNVLGRPYAAVVFMFCMGVGVVYSRHSQWNLMIKRGIILYLLGLLVNVFEFFLPHYLAGYLGVNAEAFPLFGGLIIFCVDILAFAGLAFILMGILRKFEVSNKAMIIIAVIMSLIGSFTIGIDFGIPAVCSFFGHFIGAKNGHTAFPLFNWFIFPVAGYVWGQYFIRAKDKREFFKYWPILLIVAFAYFFISSRYWGGVFSEDVHLYYFLNTLDAVFCIINAHAFIGLCYWISDYLPDSITKFFSTLSRNINEIYIAQWFYIPVTIILITYFSKGLVFDDLVTTIVSICMLIISTVTALAYRKLRTKG

SEQ ID NO: 4658 - protein, 664 aa, Methanobrevibacter ruminantium
MYLISFFGLGVKLTNFNDVALFIIFVSLINAILWPILTRILMPFLVLSFGIGTLILNGLLLNFCGPLFGINVEGPAIILAPLAMSFVTTALSTILTIEDEGSYYRSVYRDAEKKRKGEVKDYPGLIIVEIDGLAYDVLKEAVDKGYMPTLKSMIDNTHTLRMWETDLSSQTGASQAGILHGNNEDITAFRWIEKKNNNQMMQCSGVTQVTTLEERISDGNGLLVDNGASRSNLFSGDTDNVIFTFSKILNIRKLYNKAWFSVFSNPSNFARIVCLFIYDMTLEIISQIKHSVKNIRPRIKRGIAYIPTRAATNVFMREINTSTLIGDMMVGDIDVAYSTYLGYDEIAHHSGVRDEDSWYALKGMNKQIERLINTNKYTPRKYEFVIQSDHGQTNGATFKQRYGQSFEDYVKSLLPKEMKMFAKMSSNEDHYAESFLPFSRKNDDLIDEKDLEELGDSEVIVLASGNLAMIYLTQWDYRLSIEEINKFFPELIPGIVENEYVGFIVIRSDEGDLAMGKKGIYNLDTGDIIGGNPLEGFGKNIARHLKRNSSFKYTPDILVNSFYDCENDEVCAFEELVGSHGGVGGSQSKPFILYPSGWNVSDEEIVGAESIYKILKENLKKLKEYSNDNTALEKEYSNDETALEKECSNDETALEKEYSTALEE

SEQ ID NO: 4659 - protein, 237 aa, Methanobrevibacter ruminantium
MDISEIIGDAIAYPIHNIKALVIYMIIGIITGILGGASFMGLLMSLTGKNALAAGGFGILGVLVLLIGALLITGYGLDIVKFGIERRDDGPGIDLVRQVLNAVKLLIVSIVYYIVPAIIAWVLFTLLGRGILTVLIVMIISIIFAFAEFMAICRLAKYDSLGEALAIGEAIGDISKVGVIKLLATIIIVVVIAMIVCFILLYVYKLNSLIGGILLGIFAVYLTFFANRAAGLLYSDA

SEQ ID NO: 4660 - protein, 249 aa, Methanobrevibacter ruminantium
MIIDTHCHIYNSEMENAKEIIKEAQKNDICLILNGTDPKSNKEILELSSKYDNVYGALGYFYTLADEISDEEIDLLDSQLNNDKIIAVGEIGLDYYHTKENKDSQKELFEKMLDLAEKHKLPVIVHSRKASQDTYDILKNHNAVGSLHSYQGSAEMAREFVKLGFYIGIGGTITYKNSKKIRKAVNQVGISHILIETDSPYLPPEDKRGENNTPLNLKYIIEELAEELDIKEEKIIEITTENAKKLFKV

SEQ ID NO: 4661 - protein, 238 aa, Methanobrevibacter ruminantium
MDEKFSRTEMLVGNEGMEKLRNAKVVIFGLGGVGSFVCEGLARSGVGNFVLVDYDKVDETNINRQVIATTKTIGQCKVDIMKERILDINPDANVEIYKEFYLEDCEIDIITSDLSYAVDCVDTIMAKIAIICKSKELGVPVISSMGTGNKLDPTMFEVADIYETSVCPLARIMKKDLRKRNIKDCKVVYSQELPKNTNDCDINKNKGKVKVKGSISFVPSVAGLIIAGEVIKDIVNAK

SEQ ID NO: 4662 - protein, 156 aa, Methanobrevibacter ruminantium
MFRKMRRAKQELSKEECIDILINEPRGVLAVLGDDEYPYAVPLSHVYVDGKIYFHGTIKDSHKRDAIKKHDKVSFCVMDKGTKSDSWWYTFKSVIVFGRMKTINDKQTKIEKLTYLGNKFFPSEEETKDEIDRLLDVTELYEISIEHMSGKVVKEK

SEQ ID NO: 4663 - protein, 449 aa, Methanobrevibacter ruminantium
MAIHPIEFRYGTPEMKRIWEQENKQQRMLDIESALAQAEGELGIIPKEYADEIKAKASIEYVTLERVSEIEAETKHDIASLSKGLSEVCEGEAGEYVHFGATSNDIVDSSNSLLLKDSIEVLEEKIERLTKIILKLADENKTKVCIGRTHGQHALPTTYGMKFAIWADELHRQYDRLQHAKDNVCLGMMDGAVGTTAALGTQGWEVHKKVSEILGLKPAPITNQVLQRDNHVEFIATLANIATTLSKIALEVRNLQRTEIQELGEYFDPEKQVGSSTMPHKMNPITAERICGVARIVKSYVNAAMENNPLWHERDLTNSSCERIMFPEACILTDYILNLTIKLMNNLIFYDENIERNLNFTNGLIMAERLMAELTRAGMGKQTAYGVARKNAIKANKEKLLLADLILEDPDASQFLSKEDVERIMDPHTYIGSAPIIVDEILEASKDWF

SEQ ID NO: 4664 - protein, 268 aa, Methanobrevibacter ruminantium
MDFSVKDFNVRLRTIRIWEVVIALVVAFFLTGFTCDYFGIYSGEAEYIIFFLYMMVFFAIASIGTHGFKDDIYGVFKASNLFKVIMIVIPNMLLAFFIQQHLAGFDAMFNNINLLALPVSDLAYEASNPLLFLFEFFSAIFIAPISEELFFRGILFNRLKIRKGVIFGVVVSSIIFGLCHFNYPDHLAHIIYTCLFGMCLCILYLRTDNLLINMFAHFLYNLLSYVIVYTPIGDLFLGGPFMDFTVIVLLFSIVFVPAYIFYFSIKLK

SEQ ID NO: 4665 - protein, 267 aa, Methanobrevibacter ruminantium
MDFNVTDFNVRLRTIKLRELLVGIVIAFILSIALLIIFPVMDSYDDLALMVFVFFLFIFFLYALKGTSGLKQDFNKLFERDNSREILYVLIINMLFAFLVLAIFSTFDAYLTLADSEWVSILDFTPTAIDPAVFLFESFTSIIIAPILEELVFRGVLFNRLKIRTGILPAMLISSFLFAIGHEFGGMTSAFVFGMCMCVLYLKTDNILMGMSVHFLNNLIFTVWDLFALDAIVFQMPVLPLTLLISIISGLLIILYLYKEIGKLLAE

SEQ ID NO: 4666 - protein, 80 aa, Methanobrevibacter ruminantium
MKTIIRYLRQEVKMSQQDLAKSAGVTRQTINALENGRYNPSLLLAYNITRILNKATYGDDVDSYLSIEDVFKFDDDEISV

SEQ ID NO: 4667 - protein, 209 aa, Methanobrevibacter ruminantium
MFLIYGYSYRVTKVSVEGMINGNDPLPEFDDVIGMFVDGIKVCLVYLGYALVPIIIFMVFALVSSAIGGYGESVLMAFGSIITLLAIIGAYVMSMFGVANMANYDGALAKAFDIKEIIEIIQSVGVVRSVGAYIGLAIICTAIFMIVGLLLFFVFGFFGIITGTLGSYTAAGGIFIAGIILGYFLMLFIVSPYILIMQSRVAGLLYNLH

SEQ ID NO: 4668 - protein, 282 aa, Methanobrevibacter ruminantium
MASITDIIKEGLKYPFNDTRKVLILGLIFLISGLISLFTQYVVYDSMTLMVNASPYTSVNGMFASIPPSNSALIFLSWIVTFILFLFTSGYIYDVIKYAIDGRYELPDFGNIFAILKNGLRTLIVGIVYSIVPALIFILGLMLMVNEASGEAVNMFGLILLFVSFIVAIFIYLIEVIAISHMVENDSLKSAFQFSEIFDIISNMGWGRFIGALIFAFIVIAIISMFFGMIFGAISTGIGILFDSALVSTLVSSILTGLLLSPYISIALGRMFGSVYKEAISE

SEQ ID NO: 4669 - protein, 265 aa, Methanobrevibacter ruminantium
MKFNSRVLGILSLLFVLTILVSSVGAAEYKLTEKDFNNTFKIGIPEGTDFQQDAYSNIAAGNVNFAMKVFDNIGNNTDGVVSVLYFKDSSSDSNLISDVIDDLNSSGEVVEENDNYIIVKNNYDAEWNAPDASTSSDEFWSFIGDLCSSGSDMNFGDGDSNIHLSDDGVNIEDSSANVSFSKNGIYVSDSDGQNVSISSEGVKVSGGSSNETVDVNADVDSVMNSYSEFADYSLCLKNPKKDQLIIICGNDLDLLKQMADSASFK

SEQ ID NO: 4670 - protein, 127 aa, Methanobrevibacter ruminantium
MSNNYLPKKLEIKYSHQIDGTKSIKLLNGTLLVNNPNPELIDINQIDEEKWIEFWDAVEKIGLWDLEEVYESCTLDGGFTWKIEIEYGNREINSYGANMEPKIIMGDKVYSVLEELYKSIEELISLD

SEQ ID NO: 4671 - protein, 258 aa, Methanobrevibacter ruminantium
MIFDFHLGSLFFKFILYLVMLLFFIYKFNSISKKNSSSNFNYNSSSNRDSNSVNNSSLSDAFRNDLNSIFKVSKIYHILFIVLANILFVSAIYFVLSYLGSISIIQFNAPLFGDFTGLGFDVTLLYLITVVILSPIIEEFLFRGIFLRRFNLELDNLTLAILISSVLFGICHNFGGILGAILFGICVSILYVKSRNVLVPILAHFINNLISFLLALIGIENFIHGNSIVIALIIILAIISNFVLFRAIVLEWPKSFKE

SEQ ID NO: 4672 - protein, 201 aa, Methanobrevibacter ruminantium
MLKFTGKEIRDLIISFIVIALAFSILYSNRDFNGILFIFPIVAIGVGAGFIFHELGHKFAAMHYGYWAEYQLWPTGLVIALVSSFFGFIFAAPGAVVIYSQGMEKSENGLVSLAGPAVNIVLGLIFLGILNSLGQVTDYNGYIIALICLLGTRINFFLATFNLLPIPPLDGSKVLSWNALVWIVAFAISVILLVVYGGYLG

SEQ ID NO: 4673 - protein, 53 aa, Methanobrevibacter ruminantium
MAKKDDKYSMPMSGAGLVRYFDDESVGPKIAPEYVIALTVILGIFCFILRYSI

SEQ ID NO: 4674 - protein, 1187 aa, Methanobrevibacter ruminantium
MDSGMDYFERLESETQRLYEIANEARSKGFDVELETEIPVAKDLAERVEGLVGPKGIARRIKELEATGISREEVAFEIAAEIASQESSETGAKLEAEKQAFADQGLRTALAIITEGVVAAPLEGISGVKIKSNSDGTKYVAVYFAGPIRSAGGTAAALSVLLGDKIRVATGLDRFKPTDDEIERYVEEVELYESEVTNLQYSPTPEEVRFAARSIPVEVSGEPTDQIEVSHRDLPRVETNNIRGGALLAMVEGVIQKSKKILKISKKLNLDSWEFLAEYAKGIGSSQEEEKSEEETEEIVEEIDDNIIDKDELFAHSKYAHDIIGGRPVLGYPSEKGGFRLRYGRSRNTGLATMGVHPATMELLEFLAVGTQLKIERPGKGNCVVPVDSIEGPTVKLKSGEVRRLDSIADAREVKGKVVEILFLGDMLVAFGEFLRNNQPMLGSCWCEEWWIECIRNSDKYKSFSNDSELYDYLIERGIDLSIEHFISHEDSSKYMDFDRESFNLNFLEKKRYTAEEAFRISYDFSVPLHPEYTYYYNDISREDLAYLNEWLDTKRDYLSTDYLNGEDLILDLAPQKRILEILGLVHKLIDKKVVIDRDHAYALMKTVGNGSALEDNDGDLSSEVKTIDYSKYLDDDHYKSKVVDILNENIDFEIMDKAPCYIGTRVGRPEKSKERMMRPAPHVLFPIGNNGGSRRLVAEAAKKRKINVEIARRQCTNPDCGLSSFMAICPHCGAPTEITKASQKDINLSTMLSKASNNIGVRKVDEVKGVIGLISEDKLPEPLEKGILRAKNGVFTFKEGTIRHDSTDLPLTHFIPREIGVTVPKLIEMGYTHDCYGQEIVSDDQIIELKVQDIVVSDNCGDYLVGVANFVDDLLEKYYGMDRFYNVEDKYDLIGHLIAGLAPHTSAGVLGRIVGFTKALGCYAHPYFHSAKRRNCDSDEDSVLLLLDALINFSKSYLPSTRGGSMDAPLVLSTRIDPEEIDDESHNLDIFERFPLGFYQKSQEPLKPADMLEFVDNVEMHLGTDRQYHDLMFSHHTSNIHAGPKVCLYKRLGSMKEKVEAQIHLAELIRAVDQRGVVEGVLSSHFLPDIMGNSRAFSKQKVRCPKCGAKYRRMPLTGKCKCGGDLILSVSKGSVVKYLEISQNLVNRYPVSHYLEQRLEIQEFGINSLFESDKSKQSSLDVFFGK

SEQ ID NO: 4675 - protein, 780 aa, Methanobrevibacter ruminantium
MGLKINEGVKVENVYNVENDIRKAKITVKKNNGVCEAFSYEKLLKSLVMVEAPYFESEKIVSTVVENLYDGITTKEIKKIVYECLEEVDSEAANKYLAKTTLKVRSSRDKIEPFDMAKIASTLVEETGASQETAFEIASEVWKELKKLNVEYLTAPMIREIVNTKLVEYGLEDLRSRYTRLGIPVYNITSLIENGNRDNANMMHNPESIHKYVADEALKQYALLHLLPSHLADAHMSGDIHIHDLEFFAGRPLNCLQHDIRAFIKYGLKVDGTGDHTSVAAPPSHMETLMNHTGEIMLAAQQNMSGGQAMSLWNVFVAPFARGRTYEEVKQSIQMLVYNLNMAYAARGSQVPFTSMQLEFGVPNFLKDVTAYGPKGQVVGTYADFEDETRMIQRAFTEILLEGDSEGKPHLFPNTIYTLREETLNGDYDDDMLLVHELSAKYGSSYFVNMLPDYRGQMANYMGCRTCLQDTWTGDWEQDCLRTGNLAYVTLNMPRIGYQSNDEDDVFEYLDNYMDLAVETLMIRRKQGLNCLNNFDILPFLDQEVDGETYYRIQNSTLSFGFCGLNEMLLALFDEGIENPDANKFGIKCLEYINARAKALQEETGLRWSVLQTPAESTAYRFATLDKEQFGDKAILQGDNGANYYTNSSHVPVNSDIAFADKIKIEGQYHKLTPGGHIFHAFMGESYSDPEALMSLTNKIARKSDIGFWAYSSAFSFCLNCKTLMKGLSNKCPSCGESADVEWYDRITGYVQQVGHAKSANGGWNAGKRQELIDRRRFEQ

SEQ ID NO: 4676 - protein, 528 aa, Methanobrevibacter ruminantium
MKHWIERIADELNEMDVEKHVIASGTSISGSIHIGNSCDVFIANAIGKALRELGNDAETIWIADDHDPLRKVPYPLPESYDQYLGMPYSMIPCPEGCCKNFVEHFEKPLFNVLDDYGIEIIPKSGFEMYKDGSYLESIRISLEKHNEIKAIFDQYRREPLADHWLPYNPICDECGRVNTTEAYDYDGDIIKYRCECGHEGEMDIKSGNGKLTWRVEWAARWKIFGTTCEPFGKDHAAAGGSYDVSSVISEEIFDYPAPYPVPYEWITLDGEAMSKSHGVFFTPEQWLEIGPAESLNYYLFRSKPMKSKDFSPKMPWLDFMDTFDRVEKVFYGEEEAPSEKEGRKFKSIYKMAQINPDSPLPFRPPFRFLVNAYQIVGEKDLEKIFAIVKKNSQLTKSFADKEFEDLSELEVSQFSERVDNVIAWLEKYAPKFVKFQVQYDSIPNLPLPDDQIAFLKDLADLMEEKEFSSAEELHDSMYEILESHGLKPQKAFQAIYKMILGQKQGPRAASFLLSLDKDFVVKRLRQEA

SEQ ID NO: 4677 - protein, 286 aa, Methanobrevibacter ruminantium
MVIFISEEEIETLKKQLADKDTKLKNQASELNHLTNEVIPELKKDNKKLKALKEELTDALETSTKKYFDQLEINADLSESVAKKGAGLQLAKVRLNEIEKLVVELETARLEEEEKKAAIPTEETDEDEVTKIYQEKEEAIEQLHSEIDKLENEIKEKDAEIDRKESLIKSKDSKIKEKNDEIKDLNDNVIPSLKAEVASKNAEVKATQEEAQKEIDGVGGKIAKLEAEIKNLNESLDKKKRDYDRLYTELNAKDKTINSLKNKNQQLTEQLEEESSKGFFSKLTGR

SEQ ID NO: 4678 - protein, 79 aa, Methanobrevibacter ruminantium
MSFGMVFFSCLGICLFCNEFWYGFFLVVWGFVCFVMSFGMVFFSCLGICLFCNEFWYGFFLVVWGFVCFVMSFGMVLVN

SEQ ID NO: 4679 - protein, 787 aa, Methanobrevibacter ruminantium
MSNIETDDSFISENSISSDINDNSLINEFTASNQINDNIAINDGLSKGDKSQLSESKSIYVSTNGSDDSGDGSEKSPYQSIKHAVSKADDDSIIYLSSGTYNGENNQNISIGKSLSIYGEDSTIIDGEDKAQLFIMNSSAKLSLNGLILTNAYKDGNLSDYGGAIINEGGQLTIINSTIKNSYGNYYGGAIYNNLGRLTIINSSILNNSAIQYGGAIYTLGVTNIQNSVFEKNTLTAEKGVGASIAAGGTITLNNTDFLNNHAIYSAAALLSLGNATINNCSFINQTTNYTAGAISNHGNMFINNSLFFNCRVRFYAGAILAPPSGHHVVTEVYNTIFDYNNAGNHGAVTNNFQDAEITMINCAITNNYIQKNVFYGDIALDDNATVQYCWWGQNNISSYYYSPHSNNEDPGQINASRWLMMTFTSSNGNISADEVNTLTVSIKQYFDNDTKEIYEYNEDINLPLTVKFFDDNKKTIATKTLKNGTASYNYIPVKGVNAVYAQITNEIIEIPVVQKKESNLSTSNLTKYYKNESQLEAKLTDGDNNPLSNKTISIELLGKTYNKTTNENGIVKQNIGLKPGQYTANIIFKDPEYKNKNITVQITVLKNSTSISAKNLVKYYKNSSQLTVKLLDNNKKAMKSKKVKFTIGKNTYTRTTNANGAATFNINLKVGTYNVKVSFGGDDYYKGSSKTVKVTVKTTKMQAKSTKIRKNSNFVATFKDANGKVIKNTKVKFTLNKKTYTKTTNSKGQATLKVSVKLGSYTIKSQYASTKTYGATVFNTKIKVVK

SEQ ID NO: 4680 - protein, 305 aa, Methanobrevibacter ruminantium
MTIKKDLLAIGHTALDYIITVDEFPKANNSAPMKTMLNLNGGAAANVAMIGASLGLKSGLVSAVGKEFIDSHYHKEMTRLGVDTEAMIISETENTPTAFVMTNKNQDQISYFYWGAGKDFHDSEVPREKIKEFKAVHLATGDPHFNCKSGIVAKEEERLVSFDPGQDLGMYSPKKLKEVISNSNILFGNHHEIKRIQESLAVDINGLMELGPEIVLTTCGKEGSIIYSLDEGKFEIDSIYRPAVDPTGAGDSYKAGFLSQFINGKTLEESAKFASSVSSFVVEKQGCQTNMPSYEDAYNRMMDFY

SEQ ID NO: 4681 - protein, 432 aa, Methanobrevibacter ruminantium
MTQISDAKKGILTEEMKHVAKIENVSEDFILRSVANGTIVIPSNVHRDIEASGIGAGLRTKVNATVGTSTDIVNFDEEVLKAQIAIDHGADCLMELSIGGDLDVIRRRVLDMSPLPVGSVPVYQAAIESIREHGSVIYMDEDDLFGAIEKQAKDGIDFMAVHSSINIETLTRLKRQGRVTGLVSRGGSFMSGWIVENEKENPLYANFDYVLEIAKEHDVVLSLANGMRAGSIADSTDRAQIQELIILGELIDRSREAGVQCMIEGPGHIPINEIPTNVMIQKKMCSNAPFYMLGPIVCDVAPGYDHIVSAIGAASSAKAGADFICYVTPAEHLALPSPEDVKEGVIATRIGAYAGDLASGQIDGSQDLAMAEARKKLDWEAQYECAMFPGAARAKRDQRPPEEEDTCTMCGNYCAVKIVNQWLDQSDSDLIK

SEQ ID NO: 4682 - protein, 353 aa, Methanobrevibacter ruminantium
MDALRALAIICVIAIHAYACSRNFVISELVGNLPSLNWIIIQFSGNTFRIGVDLFLMLSGALSLGRDWKMKDFFAHRFPRIVYPFLFWSILLGTIFLLLSYYDSFNVISSFDLVSIANYFYGVFMGIIDFAKPYWYFWMILGIYLIMPVFNKWILHSDLDDLLYFLFFWLITCLFDYTLGVEFPIRLSYFTSPIGLVVLGYYLRYTRRIILNNQYFALFLIIFSSLLMLVLSAIYSTDTHFYNFNIYSILVSMEVIGVFLLFKNFYKFNLNIGFFSRPDGFFNKSVYALARYSYGIFLIHNAFICVLVHYLGNTGIPPVLYMIILFVVSLLCSVIVMAVLSRIPYLNRVIGVK

SEQ ID NO: 4683 - protein, 309 aa, Methanobrevibacter ruminantium
MRDIMLENTDNEKGKAIIEPEIGITINGISFNHKLFETLESLSRTYSQRKTAKELKIAHSVLNRRIKNAEDKLGEKLVVTIGSGSELSPKGYELLNAYHKYKNRLEDREEIVIAGGHIITGLLQAISYDLPFKTLIYSSDDESAYELAKSNQIDILALDDPLLAFENDLNFTAIAYDHLVLISPKKEKPIEKIRDLSDLEFIGVKGSAQRLAWSTLKQENIPFNIVKEVKSQFDAFKIVKNSDEYYTFLNASYFNGNEILKNETRHVISLVQCNDEKEDIYNLMEYLLMDGQSQIGEQGFVPMKPWKTR

SEQ ID NO: 4684 - protein, 196 aa, Methanobrevibacter ruminantium
MEYMKDAIEAILDNIRDAEDYLVEEDVATFIDIITSCENIFVTGAGRSGLAAKAFAMRLMHLGLSSYVVGETISPAINADDCILAISGSGETNTIVTAAKISKNRGAKVLALTSYPESTLGQLADCVILVKGRTKVEADDENYLKRQIKGNYTSLTPLGTAFELTSLVFLDGMVSELMNAMGKTEADLKLRHTVLE

SEQ ID NO: 4685 - protein, 368 aa, Methanobrevibacter ruminantium
MEKKTTIILVILIALIACGVGITLFASPSSISTDGNTTITDMANRTVNISSSVDRVVATSPPMTTIVYMLAPEKLVGVNFQWTDEELKYVPDQYKDKFPVIGGWFGSQDGNYEEFIASEPNLVIEGIDEGMGVDLSTVEERQEKFGSLPVVAVTDNTNVTKIDNTIEFLGKLLGAEDKANELIAFNDKYLSQVQSTASSIPDSEKKSVYYASGEDGLSTYASGASHGQLISLVGGKNVADTEVKDSGSELTVSIEQVMSWNPDVIIATDEDFYNKVYNDSKWASVKAVKDHRVYLSPQSPFKWFDRPPGANIIIGVPWTAKVIYPDKYSNIDMVGATKEFYSNFYHYGLSDEQAKEILTSSGLKGSDL

SEQ ID NO: 4686 - protein, 341 aa, Methanobrevibacter ruminantium
MSENSSFSVDNLVIYLLLIALPIFLFFVSFMLGRYPVAPIDVIKTILSPIFPSLAVSPELNSIVFTIRLPRIIAALLVGAALSIAGASFQGIFKNPLVSPDLLGVSMGAGFGAAIAILANAGNALIQLSAFVFGLIAVFITFSISKTYKAGGILLLVLSGTAVSAFFNALISGAKFMADPYDKLPQITYWLMGSLSAVNFDKLAMIIIPLVLGIIVVMILRWHLNVLSMGDEEAQSLGLNPSRLRLIVIIACTLVTSAAVSISGIIGWIGLVVPHMTRIIVGPDHKILIPASLSIGASFLLLIDNISRTFISIEIPIGILTAIIGVPLFLYLLRKGYSEWN

SEQ ID NO: 4687 - protein, 276 aa, Methanobrevibacter ruminantium
MTKLVEVKDVSFSYDKDSPIVFENINFSIEKGDVLCILGPNGTGKTTLIKTLNGLHKVNSGEILLNGTNIKELSFNDIAKLVGYIPQGHIPSFPFKVFDVVLMGRSPYINLTASPREEDKEIALNALKTLGIEDLKDKSYTNLSGGERQLVFLARVLAQEPDLLILDEPTNHLDFGNQIKLLEMIEQLSELGLAVIMSSHYPDHAFLAASKVAIMKDKSFIDFGTPEDVLTEENLNKAYGIDVKLVELEDDRKICVPLRTNLELVMSNYSKKYSKD

SEQ ID NO: 4688 - protein, 190 aa, Methanobrevibacter ruminantium
MVSVEDYEEQLAKAGEFHGEICGGIAIGTKLAMYGMELMGFELNKRHKNLIVFLEIDRCMSDAVQSVTKCSMGKRSLKQMYYGKFAVTFYNMDTGEAIRVSDADANKQEKKRETRDEMIERFKRTPAEELFNVEKVHVELQPSQMPGKPHTSVFCSVCGEKVTDGRHVNRGGKPVCIPCAEGAYYELIDE

SEQ ID NO: 4689 - protein, 1395 aa, Methanobrevibacter ruminantium
MKNKSLILISLLLLITIISIGSVVATDNEEINMDNINNIDNNEDIANIDNVDNVDNSNINNPTDIRIDNSNLNRETELDSNLNKSNQIREDELEQSNAKSNLKSSKLSSTITVDGSDENQMSNPTIQSAIDSANAGDTIIITGKSYVHCHFIVNKPLTIISEIGTSMSPCPSNTKGSGAHGIFYISPEASGTVLKGFNLTNTYGDYDDYGILIRGAENVEIINCTINTVSDGDGIRIENATNTKIADCLIKDSNIGINITGSSKTTVTNNNITNNKVTGVNVGINNNDTTIHTNNITYNQHSGIDLYSGDYVYILNNFIGHNQNSKSSSGAGIYVNSNITKVEIKGNFLKQNGQYGVLNDYRVRNMDASRGAETLEINNNNYYLGHTERITYHIEYSKYAGGPFTYDSENDLYVYVGDGNGDWDIGKTVVYLGYAFYRDETVCGSTLFKAPSTTWGTEVYKLEISPISQVKKGVYSVSIVDVNGIVASDISSIYVTFYLNKNNTDAEPQSGDIYKTVLMENGTATVNLTDKEFKESGNKITACFPGLYNVYTINPYATFDVNDSDIPGSYRNTTINATDMSLVPNSGNKITARLTDENGNPVAGESLQFKISGISTTYTRTTDENGEANLKVSLSNPKTYTVNINFKGSENYNKSSKTIKLTVKKQTPKIESSNIDLLPKSGENFTVTLKDANNKAIANKEISFTLGKKTYTRTTDENGQASLKINLANTGKYTITTKSEKTSQYNEVSKSNTITIKTGANKVNIESSDKTYIPKSGENFTVTLKDANSNPIASKEISFTLGKKTYTRTTNENGQASLKINLANTKKYPITTKYAGDDTYSSASAENTITIAKAAAELTTYNRTYINKSGQMFSAKLTDKNNIPLENEKISFTIGKKTYNRTTDADGLAYLTINLAYDKNISTKFLGNDQYNAKTNTNSITITDEIETAYIDKGLKNDEIQRIIDEIKPNYDVKFLGDSYDDVNLNINKTLLIYTDVNTTLNGKSASPVFNLRGGNIGVSFFNINVNSTDGEGYGIILNNTKEAVIDGNTISNILDSSKMTDYNNGSTILPGHGIEILNSKATLIEQNNIDHFESGIYMEYSDDAVIRENTITENNYGIKYGFGNSNTQIYNNTIIDNIGWYTEEVPEGPRGYGAFLNNSATNITITDNNISNNYMGISVDANKSTGIVITRNLIADNSLEGIRFNEGYDLAENAIEPVVTDNAIYRNAEGPSLMILGEMSANPNGIYGAGQWDDSMKLKIDPNWYGVNNLRTWDYETGIVGVGTMCPRIKSTTIKFNTLEYENGTYKINFYKNGTFAINLAKFDIYATINRNTDKKAEVHFYVENGTGTFSFDKSNYLDSNNTIEISVGSLINVVDRIYSVVYAYDVPDSEIPN

SEQ ID NO: 4690 - protein, 446 aa, Methanobrevibacter ruminantium
MGGIYIIMKTFRQQLLEDPEFQNYLLQRPNLTESSLQSYLNAATNFVRFTGEPFYKTVHELRSQQNDRIENNIIIRFNPNQSRINIMQFEFIEYLKGRGCTEVSIDSYVRYMRTILSTLGIILPKSPKLDDTPQDWYLLTKDDIKYVLDTANLQYKAVINFAAVTGLRVRDMRSLTIKDFMTATEEYHGCTEVEDFLDSAPDGMIGFWELFPQKTRKFRLPCKVCNTPESSDLLLFSLNERVKYFEWKNEKDGTDLKITKNDPLFASRQRKYKNFIAPNSISWTLSQYSEKLSAERERVFKYKLEHGEISQETYDESVATIPKFHAHGLRKFFISTLAKNRVDARISALMEGHKAPLVTDSHYINNDYLKETIKEEYMRCIPDLSFENVEVRFLTSEERKSLQQKIDELQEENENMKKDMEKYIDDAVHEKMKDAFENWLNIQDSK

SEQ ID NO: 4691 - protein, 98 aa, Methanobrevibacter ruminantium
MNTLKIECSKDDYIIKTAKANSENELKVEVPENWNCDYVNAVLWEEDICEVLEKGDERMLLIPMCGELLLEGVQEDEYIKYICLPVKYQDQMVLIAKI

SEQ ID NO: 4692 - protein, 294 aa, Methanobrevibacter ruminantium
MGMKKVKIESKAKNNMTRNEKLFYKLYDDLYNEDRLILFSTYFNIYDKFIFKKDIIHYVLMNYSENEIIEAMKKIDEIQSEGIDIKTFIPKKYCPKCKKVMDSYGKICPDCGTILIEDEKKIQELQAKDKAYEEYLEKEYNIYLQNSYHNMIQGSYTIKIRTRKPKTETEIVRIPAQTVTSRGKFNSISQHYPSETYTRQKVTRAKYKECRVLFDKEKMILNIDGTATKLYYDEVCELEYPEQEVNELVTLTLHNGTVLTFKIKNGWFASDNEKKARFDAFVKTFIEQGKNLPL

SEQ ID NO: 4693 - protein, 275 aa, Methanobrevibacter ruminantium
MKTQDLINIINDEESPVFLNREVFEMDYVPDIYKYRDEQLAKMAMYCNSIPDNIAPKNLQLCGGNATGKTTTLKQFFKMLNEAFPNIVTVYINCQLFNTENTVYGKIYNKLYGVKGSINGKSNTMLFDKIVARLKKENKILIIGLDDFDSFKSRDGLNKMLYNFLRIHEAEEGIQICIFTVSNKENLKLAPSVETIFNRVPIFFDQYSLEQMYHILDDRCAFGFYPGVISDELVRVVAGKSYDLGNLRYGIKLLSAAGQKAEVFGDGKIIRNFLD

SEQ ID NO: 4694 - protein, 285 aa, Methanobrevibacter ruminantium
MFLEKCDGKDTISMSLQEKMNLILETMESKGSPFISCIHCNIPINEAEEWYKNGEIGDQDFINFYDDVNLIEESFGFEIYKKSEYPTLHTQSINQIASTYPMNRTQNEKTPLFLRRERKLYEITNIFKSHSTNEIFISMDSKSKLKHEIKYDFTLKELNEIFKNYLEEDCSIYILNDNRAFVMTLGHFQFEFDVFGSAKESYVFDVEIDDEKYDKIFIRSSYYFNIPVDELDGLAKILKQKRIIEEGFFEGQFLYHTPGNGMTYGDPVRIIENEIEKYAFRFITF

SEQ ID NO: 4695 - protein, 72 aa, Methanobrevibacter ruminantium
MQYWRIVNYSPLAVACKKRKHWTCNHSFYATFYILNFQIFKILLFMAKQQLLSRIDLNLLFLIYFQNFLLII

SEQ ID NO: 4696 - protein, 55 aa, Methanobrevibacter ruminantium
MEKLIEIDGVQYTEAQIRRALAIERDVRSPNFVDMLLGKIKPSELASRVSEKGDA

SEQ ID NO: 4697 - protein, 51 aa, Methanobrevibacter ruminantium
MCYVGNTRTLVYHTEDCFCNHWLLNENKTILEEKPVDMKPCSFCKPQFDTE

SEQ ID NO: 4698 - protein, 74 aa, Methanobrevibacter ruminantium
MVAEMVENIRKGEGDGYSIYPPFSCIVFLQGKKYSECCCKAEARDQKFALVNLVGFRREDVKVIDPRTNEELFV

SEQ ID NO: 4699 - protein, 53 aa, Methanobrevibacter ruminantium
MSMLADFEPARLHKRTWAERHDVEILAVICLAISIAMLLLFFALAEPTVAGVI

SEQ ID NO: 4700 - protein, 150 aa, Methanobrevibacter ruminantium
MTKEFEDFMRRNTGLLVFLRWDTVAYLKYLESHYDERKYECAYRLLEAIDNLFDFYQITFSKKTEREIPDQLFEKDKINKGFLSHIGKACKKQSDFYGQRWKSTRGIRDAYGHYSAGNFLFADIYGCLHRISDDCYRILNFSEYEIEEKA

SEQ ID NO: 4701 - protein, 251 aa, Methanobrevibacter ruminantium
MNEIVTTTNENNVPVDVDYAIEEWKAYQRLTRELLDETDYQTHRGRKYKTKSAWQKYARAFNINTQIIDKEIVKNDKGIVIEAEYTVRATLPNGRFVESDGSCDRRESGKREMSNHSIKATAKTRATNRAISELIGAGDVSADELDPAFDKVQHSKTNHVIEAEVAEIIESPYDKNAGFETADKIEPVDEDPVCKNWVKTICKTIKAEGKPCLKGVLIQKARTIGTMTDEERNRLIEYIKTLPKGEVNLDD

SEQ ID NO: 4702 - protein, 76 aa, Methanobrevibacter ruminantium
MIECIQEEGDFTDWEVPSSSSDIKYIVSVDDEGNLFCSCPDFYYRKSRMNPHISNPESYCKHIRQVLEEDNRLQML

SEQ ID NO: 4703 - protein, 334 aa, Methanobrevibacter ruminantium
MDNINKTKTSLAKFEEFFSTVYKDEVMEVLEKYPEERTLVVDYENLEMFDPDLADLLIEKPDEVIAASQKAIKNIDPLMKDPKLDIKFKNVSNCIDFVNADSKYIGKLISFEAKVMEAKEPKPILDIAVYECRGCMSLREIPQTINSSLEPSLCPECGGRSFRLLQDESEFLESQLLIVSSDDTSKSLKVLLLRDECSFDLYSMGQEVRITGILKSFSSNYGYEYFLECNLIEILNDSEDSEYDEYGNRNSPEYRTWQKVVIDSDRVCQCCGGSKHLEAHHIFSYQNNPSYRVNLENGIALCKWCHSKYHSYYGKDASPKSLIRFLKRFGRYDG

SEQ ID NO: 4704 - protein, 144 aa, Methanobrevibacter ruminantium
MMANKIRVNLTVDPNLWQLAKDKLPCSRSEFFENQLKMFLGIEDDESEIIKDIQTKENEINALRDKLCHVRKSKQLKLESNKSMEKAMASLNRMHKKYGKIGENQIRNLAHVHKVDFDDLKKECQDNCMNIFEFAEVPKHDSVM

SEQ ID NO: 4705 - protein, 139 aa, Methanobrevibacter ruminantium
MELFLMTIGSLDNFGKSDGENMNPEDFDCSVFFEMYKALFEILDVEVGSFAELLDVYKNVEMDYTLKRHALKQKEILYWFNTDWKEELGKEKPTEKDKEKWIRQKIGYDSFVVEQLEVKLKHIRRMYETALKHSFEAIK

SEQ ID NO: 4706 - protein, 91 aa, Methanobrevibacter ruminantium
MNVKTVMNDLIGLSKEFEGVEYEIESKNSIYFYSFPKYMKEGIVILKYSAIYDLHTILKGMDGIIVDILEVEDNPGDEKKDLLYVQIEVKE

SEQ ID NO: 4707 - protein, 77 aa, Methanobrevibacter ruminantium
MISDEWEEEYYVKVNEELEQVEVRFFSKVDRLVFAQSYSSSSSFSFEEAEILCDRICDILTNDLGNAKYYLGGKDEL

SEQ ID NO: 4708 - protein, 49 aa, Methanobrevibacter ruminantium
MNYREWVASQFELRMTEDGRVCFKTPCSYYTFSKEDFEIIREMFLNFES

SEQ ID NO: 4709 - protein, 57 aa, Methanobrevibacter ruminantium
MDRIKELNVCGTCKHSHLIPDINGEIAVNICRIGSEAVNKDGGLTYCVDWTPRRKLS

SEQ ID NO: 4710 - protein, 111 aa, Methanobrevibacter ruminantium
MLSKKEAIQMTLDNEKHYPVKCKYCGKPFTKSHNRQMYCSDSCRRNALREQKARYQAKRRLKIKQKVLIVDEYKKYGLGSYGTSANGHRKNNFSHEYMAIQKEMKRIGLKR

SEQ ID NO: 4711 - protein, 183 aa, Methanobrevibacter ruminantium
MYLAKFCPNCGNKVEENDKFCIYCGNKLRVIIPEKKVKRSSNSINDEKTSKYVEVIDGLMRYKVFPSSLPVKYIIYKVNYGTTSDEIKNILENGNYNYKINIHYFLQNKKLYFRSPKNPNMFFKFHNDRFNEEMRKDNKEIIHISSYARVHRPSLTKIFNFNQEKTFILANKHFEENIRKTRL

SEQ ID NO: 4712 - protein, 78 aa, Methanobrevibacter ruminantium
MMIYDKATVTSLIVAILLPLMSMLGIGELTQNYILAIVSGMIALVVWYYNEKHNSDLVSGTTKCDCELCYGGDDEALI

SEQ ID NO: 4713 - protein, 112 aa, Methanobrevibacter ruminantium
MKHLYEIIPYRRTVWITGFLKTTVSSAMITTGVVILFNSITEHPYFMEWDEIGIVLGIVSITIACIYIAMIDRWKERRKKEELDTIEDYINRKAEEIANMKVLRKLEELEEE

SEQ ID NO: 4714 - protein, 206 aa, Methanobrevibacter ruminantium
MTMIEISTIKITDIKPAEYNPRIMSQLEHTKLRNSMETFGVVDPIIINLKNNHIIGGHQRYEVLLDKSMEDNEFIKELHLIRLGDVGWAFPESDLEVEDDDHEKALNLALNNIEGEWDLPKLEPILTDLKDVGFDIELTGFSDIELTELNLENNLVFAEEFEPDESEEDVDLEDIYDEPVKEMLQCPACDHVDVVKRFKRVDSQGD

SEQ ID NO: 4715 - protein, 66 aa, Methanobrevibacter ruminantium
MKIYLAAADTMSEDIIRLLPVAKRLHWNLFSYYYLLTLKKMEDYDIIRKASKKRPYRQRSAQLPEG

SEQ ID NO: 4716 - protein, 152 aa, Methanobrevibacter ruminantium
MDVDNLLGYDKVLELRSLLEEVTDKVIPVWHKNRGIKDFKQMCQDYNFVSISGWRNEDVKDDQFIHFVRHAHRNGCRIHGLGLTRRKVLDRVPFDSVDSSSWLQTILYARLGQKQLDSKFATERRGDLAVLSYIKWMKTQEEYYKKWRHYHD

SEQ ID NO: 4717 - protein, 218 aa, Methanobrevibacter ruminantium
MINERIRPYLNFSFNDKKVIFVTLFVVSNLISNLLAIKVFNLGFWGLTTDCGNLLFPLGYLMADVITEVYGERTARRVILLGLFANILLIVATTLTVYMPYPSYWTGQGAYAYMFGFTPRIVLAGFIAYLVGQFVNARLMVLIKKWTNSKYLFMRTIGSTLGGELCDSCICSSIAYYGIVPNSGILLFILMQYVVKVTWEVVMQPLTYKSIAWARKDG

SEQ ID NO: 4718 - protein, 196 aa, Methanobrevibacter ruminantium
MAMPEPWERQRDENGKLEPIKAFEYFTEYLTMDKPRSMRVLCERLGKKDGYIRQLHAYSSTWNWVERAEAYDEHIILKKRLRKEKFYDELVESELPNLRKRLEYYNKNMNDIETDMTTKPTSKAHAYDKNSKAHSTTLNEILLMIGKPTEIKETSLEADIESDNKIDLENRVEVDITSDEFMESELEYMRKMIEEK

SEQ ID NO: 4719 - protein, 491 aa, Methanobrevibacter ruminantium
MTAASRVNAHGTMGLGRWSIYINNGFWKPRDFDVLIIELLQYAIQGRVSGILLGVPSRHGKSTLISKNFCSYFLSYFPNEQVILSSYSQGLASEFGGQVKDIVNHYGYLSPYKPTIRSDSKAKNKFKLNEPYRGQMLSAGAGGSIMGYGAGLLIVDDPIKNVAEAESKVRQAKLKDWWGGTIKSRVQRRSNGLPPIKIVIAQRLHLKDLHGIIKETEPTIPANDAFRILRNGGSIDPNTWVDFNLPAICDSEDDILGRKIGEVLWEEQRDYEWLMAEKRSMGSYLFNSIYQGQPVERDGEIFKREWFQDEVNHKLTCLIDPKDIPKDLPQLRYWDFGASGDAGDGTSAILTSYDGEYLYVLDLVAGKFSSLKVLKTFKRLCKKDGKQTRVMVEQEPGSGSKLLIKKFRREEDLRGYNIRADKVQVSKKVRAFDLEGLAEDRRIKMVPAHWNNKLIDQLVAFTGEDGGEDDIVDTITGSCRFWTRPRRRVKA

SEQ ID NO: 4720 - protein, 441 aa, Methanobrevibacter ruminantium
MSKKQEMMRIERLKHYAYQTGLIIPIFKNHDLIKKIENGKITNTDEIKIYIEENEKQIKRRREFISIIYDNCKYFKYDSICYKLISKVNNFEIKSLEELMNEIESEKKKNGFRKNIEEKELIKENENKGRLKEYVRIVRREYGLDFTSVKKLKLKIDNNKIRSKEELNEEIIEEKKKTELRRIVYDSDLNWDLKWELESKIRHNEITTKEELIKEIRRIEFINIIYDNNRDFKLDYVTIQKLVSKIGSNEITTKEELIKEMTEEKKKGIERRTEYKKIVNEAHALDNTSQWKLELKINNDEIRNKEELMNEIESEKKKTELRRIVNDSDLNDTSQRKLLSKIDEDIEVITKEKLKKEIQKEERIIEYKKIVNEAHALDNTSQWKLELKINNDEIRNKEELMNEIESEKKKTELRRKSEEIIRRKKERSDSYHPNANKPWKF

SEQ ID NO: 4721 - protein, 552 aa, Methanobrevibacter ruminantium
MSKNAKADAFVVTTEDGSYDIVDADVLERYAIKSESDETGSKQLKTDGWEYDDTLLEPLYDPLQLCELLEINTYHENCVDVVARDSAGIGYDIVPVTGEKEKELNKPKLTNFLENIEPNINELLYQMNYDRRATGYGALELIRKDKSKSEPVNLSHISSYTLRRTSDGKRVKQRVGTKTVWFVIYGKNYDKEGNLCDVHSETGEFHPYNSLSKEERANELLWTMEYTTKSKYYGLPKIVGAIPAIYSDISRSKYNTSFFKNYGMPSFAVLVSGDFVDYGQEEFLEDGTKNPEYDVTKTLKWKISQQLKQAIKNPHSAVTILVPSEGEEGNVEIELKPLSVETKEASFRLFRQDNRDEVIHAHRVPPYKVGINETGSLGGSNIEGATINYKNDVVLPIRFNDEFLINQVIKNDFKIKDWRFKITEHDTRDYTTDIAIIKELFLMASITPRQIIENIGERFGLTASDNPFLDEYYLNNVPLENVWNGGDVPMEAETVLDSLENDLMKDAGVMDEQLREKRQTRDDGAQGASFKEADSEYQERIQKAFDTRRAVQ

SEQ ID NO: 4722 - protein, 775 aa, Methanobrevibacter ruminantium
MMALKVRHSKRQIQNIKREYRRRLILEEQCSREIADFFRRLERKIHKVMDEHWESELGLFHLNKVSDIIQDSRQEYYDILFKYCKDSYMKGREATERRFNRKLENISMKADVNITRLEDLFKPDPTIRYNLNNKVFQASAHTMDRVDNRIMENITQSYDDGLGIDEAKDRLTVEYNGLKSWEAQRIARTEINSAQNDGAFDVYGELGVEYHQWWTAQDERVRETPQADHRELHGKIVKVGNSFSNGLQYPGDRTGRIVHWINCRCTTLPFLMPLGKMAPPGMIEFTEEDLIDIPNFEMPTIDDLMRRYEAVEPKSQWILDDFEDLINLNEDEERRLAEIQEIFKRNARDNVPPSYIVQRQYDEFMLRKNFAENLRMLKRGQNPFLNESEKQMFIKDYSRFLKQYENEIRMNKELQKMYPKEFSKVAKDVDLQFYRENYNNQFSIYHPDDIRSFEVTSKTLTSEERARLKEIEKLYPKESKRIAKEMDLKYYEKRHPERFGRFMEEEERKRLAKIERMYPKETSKMANEFAPRDVSRLRTKEDIDLYEKNFIMNKSYRKKADEIVNGNGMTITRNVKYDLKGRYEDYINITDDTFDVLRFKDYNCEIWISSKSEVSTVEIMQTLDKIPRKLMNQNHNRIIFSADRDVYNLKKNHFVGGVTKRKDNEIVIFKCKEGILSQTKTLAHELGHAWDNNLSKIANRGGAYYKVAEEEGGFVTSYARKGFEVFKTHYSEDFAEAMELYVTSPEKLRRKFPKRYEFIKNMMEDDLFVLGLIPY

SEQ ID NO: 4723 - protein, 87 aa, Methanobrevibacter ruminantium
MIIEIPGNDRTEEINLPNGQFVLITYLQENDMMSLPDGKYVCPFRMIQLFTEEGGELIGECIEENPHYNTRFYNTVFEHLDEGIEYR

SEQ ID NO: 4724 - protein, 179 aa, Methanobrevibacter ruminantium
MLRVVERTYYQQEEIKTLDCRIREAGVNTYSLARQGAVDYPTYESYNEVREERIKEAKEKYGESYYYHWRDVETYFYYLGRFFSDLEEIEKYLERTVTYKPHREELKEAMERLDKRFEEVINEFWYSLEEYEDITEDVLEQLKEGDCTVHCEFLIKEFKKFVNVICRIIKQNEINHKEF

SEQ ID NO: 4725 - protein, 96 aa, Methanobrevibacter ruminantium
MDAINVINQNKILVDVLYRGTVNLIDIVIGDALVYDNPTVVVKCYTTDLAFATTEIDEIVLENEEFELLITYEDGEFSILLKSHNLGELGYIEWVI

SEQ ID NO: 4726 - protein, 109 aa, Methanobrevibacter ruminantium
MGNLGGFRMVFVDLCENEIADMVESFYRNGDGSSRILTNRAVGEIVEHYCSFEVDGRITTNLRDFLLYSVVLYDTIGEAVDDGVNLEEVFIIEDRNCYTGKSQVILIGG

SEQ ID NO: 4727 - protein, 188 aa, Methanobrevibacter ruminantium
MRKVVNWLKAIGDNFSVDYLLLALFSSGDLILVAIVLNSYGVISPENVRELVIDYISYRKVDIFWRHLRRPRMSFEDYVLDNFEEMETGELTREQVVEFVSRQERKGLTFCNEIFIAVPLKKGSKDDIVEILWNEYFVEDYKENWLEQHENLGWNDWKKLLKKEIVENGGDDFQIFRNHLIDCVLMEY

SEQ ID NO: 4728 - protein, 63 aa, Methanobrevibacter ruminantium
MTMKVTFEDENGERTVEFGDDVDFVLIESDDDGNIEIREGDWELDGDSDDDWEEYDDWDEEEF

SEQ ID NO: 4729 - protein, 93 aa, Methanobrevibacter ruminantium
MDEFVETLFDTYWKVNENGEYMSLTDCGDFYIAKVAPCVRNWSIVIECNCFCFHCKEFVYHENGAILEIGMEISSLYLSQMEIKDLKIYMIDC

SEQ ID NO: 4730 - protein, 123 aa, Methanobrevibacter ruminantium
MGLDMFLEGIFEQDGENVREQVIYWRKSNQVHNWFVVNAQDGEDNCQPHSVSREQLEELRDLCRAVLADNDKAEELLPTRPGFFFGAIDYDEWYYYDLQYTVEKIDEVLKDDRYLYFEYCSWW

SEQ ID NO: 4731 - protein, 65 aa, Methanobrevibacter ruminantium
MECPCDNCEMLRENEPIKVIDWKSNSPFGMDLYHFEDGFRCCYNGEESLRKEDLSNHGCRLRGGI

SEQ ID NO: 4732 - protein, 116 aa, Methanobrevibacter ruminantium
MELMTREMEGKLKSFPFYSQDGKGDDAIVVMKFFNPYGLGTWYVLEAEKQENGDYLFFGYVESPITPEFNEYGYFSLSELENLKIPIKINGITVSYGRIERDLYFERVRIGDIIGN

SEQ ID NO: 4733 - protein, 74 aa, Methanobrevibacter ruminantium
MFGQKKEFVKKMYHVGDVVELVHMDDAQAPPSGTRGEILFVDDIGQIHVRWENGSGLALIYGEDRFKVVERKGE

SEQ ID NO: 4734 - protein, 50 aa, Methanobrevibacter ruminantium
MDLLYLYDDLTARREVYDSVGLSFVVKYKFSSRKEAQDFALKYGAELIEE

SEQ ID NO: 4735 - protein, 62 aa, Methanobrevibacter ruminantium
MIERRRLGMKYDIFTILDEISRKLDDGELSDEQVDFLLQMEILVEEGTITDEQAQDVMNGDY

SEQ ID NO: 4736 - protein, 55 aa, Methanobrevibacter ruminantium
MMKLSLKELGEEIEMILAEGGLTFDQVDYLLYLETCIADGSITEEQKREIICRDF

SEQ ID NO: 4737 - protein, 68 aa, Methanobrevibacter ruminantium
MYLEIDEVKCENIDRIEFDDVAMEIVLTDEKVYERIKRWLKSNEIDYDCREDRYFANLIEYVIRITWW

SEQ ID NO: 4738 - protein, 82 aa, Methanobrevibacter ruminantium
MSDSPLRNGSSLLLRNWSIPKWERNTRASLTEPSHCCTRSSEPETSSSPTKNGNSWRMLLSLSATNRAQVFLEGLYEVPLFL

SEQ ID NO: 4739 - protein, 450 aa, Methanobrevibacter ruminantium
MAKENVIDYKIERQNDNTWSYLYVTERGRGNIIASSFGELRQKVLKRGLPWNDISNLFTKKSSDSNVRRESVKNIDDESVLADVAKKSSDSNVRLEAVRKISDNYVLIDIVKNASDYDVRREAVRKINDSSVLEDIAKNNNDENVRLEAVRNINDESVLENISKNASDSKVRIEAIKKINDETIIIKLAKNNNDEDVRIEAVRKINDKTVIIDFAKNASDSKVRREAVRKINDSSVLAYVLKNDPSWIVRIEAVRKINDKSVLANIAKKDNNPSVRLEAVRKISDESVLISVAKNDSDYFVRLEAVKKINDKSVLEDIAKNDINSTIRRETIKKITDESVLISVAKNDSDYFVRLEAVKKISDAYILKDIVKNAFDSDVRIMSINEITDETVLVNLDKIDPNLRLVRDSLKKKNRRIHKFRTLEEWEEYYYDKKVPKHWITPRWHYGLDD

SEQ ID NO: 4740 - protein, 231 aa, Methanobrevibacter ruminantium
MVVKCPNCFSPRVSKCEDTNIKWQCDKCKCKFNHGAFDINAEMEKVEQLTIEKIERERERTEQFERAIKEAKEQFERERTEQFERERKERLEREKREKEREKIEKERERKERLERNRIKIEERERERIKRNERIRRENERNRIKSDKREREKSEEKRIKRNERIRKANERNSIKREKRERERERNVMTIDEYYRSIGYGSTGKSKVWSAIIIPILLVICIILILMFYGGGM

SEQ ID NO: 4741 - protein, 347 aa, Methanobrevibacter ruminantium
MINILEVVTKSRDSLLITAPVLIPGERDCEFDYGEEPLTEGQIRQIAHEYLANYSLVDKNHEFFETREVIGVPVESYITNEPISLKGLDGTVNEYPKGTWIATTRITDEEEMEKALNGEYTGYSITTVSKKFADKQIQLPRRVLMKDIKDPVGFTISLVRKPCVRGAKFCSMKEDIENGDVVSENIDDKLEEETKGFVQSIKGIFNKEDKDEDKNPEDEDIELDIKAIVDEVTKDFVNTDDFETFKNELEKALSDKFETLGAELFKSLKKSLEKDKAEEAKNQEDDESDEDDDEEEAKDNGEAQNVQSSKSIPNHDIKDNQKVAKTGAARVYEIMGRDNTGSAVRKL

SEQ ID NO: 4742 - protein, 345 aa, Methanobrevibacter ruminantium
MGNEATLNQLVNEQEKAVFKSMRTDMETGKAVLNVEQLGYFLREATLDNTILRDADFKLMKSFKKHLNRVGINGRVLTNGYDVNGETDPEIPAADVDFGANELDVKKLKAMCEIEDDEKEDNMTQAQFEQTLLQMMGERIGEDLEYWALFADSEVARSDDPLLNTNDGWLKKCANHISSRSIAPSNGMFDIEDGPEAMFDAMIKALPPRFRKNRRMLKFYVPFEVEDAYRNILINRGTGLGDSAQIGFNALSYKGIPIEHCSTLDDEDGRGMLGNRVCSMLTNPKNLAYGIWKNLSVEPERIAKNELTRYWFRIRGDVDYYFRNGAVVSVMNSSDAEALPELSRA

SEQ ID NO: 4743 - protein, 134 aa, Methanobrevibacter ruminantium
MISHIIVLLICFIGLVEAILMALVDWEDLAISVRKSPRKLYNVLKDELGLPEWNELSVIERRSMKKRYAVIRDSFPELPPWEELSVIDRRSHKRLYKLIKSVYDGDYDDSPSLEGPPAAVGPQKEIPLEEAEYP

SEQ ID NO: 4744 - protein, 137 aa, Methanobrevibacter ruminantium
MTWIGTEDVIEFTGVKPQTFRFEKGDTSSLETLLEKWILQAEGLIISYCNYDFNDLEEIPPAVVNVCLRLTANMVALAQARKDTPVIQVKEWNVQTVSSNIFSNDLKRDLTPFVHERKSYKGDEIDFFVITGDDDSW

SEQ ID NO: 4745 - protein, 147 aa, Methanobrevibacter ruminantium
MKLQIDVEELKPLEPRFKKVAKRTVVLTANELQRNLKKLSPVDHGRLQGSWVIFQTGELERTVKSSAKYAIFVNDGTGLYGPLGHKIRPKNGKFLAFTPNKGKFKGKLVVVPWTRGQKPQRFVERSMEMTERRVQEFMIRAMMEMDS

SEQ ID NO: 4746 - protein, 169 aa, Methanobrevibacter ruminantium
MRFVNTASLVPQTVKAYLEREICEGGLLEDVETLIPSVNSDVPVDPPAIWIVQHPTTRWSGSQPNLSNKIAMSVPFEFVCVEYSDDLEEAEILGISLASRVGSSLMKNFNKVKVDDSMPNRFFHKLEFETLYPVGEVTVVGKSERIPATSIIFNFVYVVDWLKCNRRYD

SEQ ID NO: 4747 - protein, 426 aa, Methanobrevibacter ruminantium
MGIRVVGMKEEARYGVAESAPDFHQEVSKAKASLNSTPNTKSSGSRMKKKARAGVYKPTANIEGEVDLKRIGHYLKAFLDNYHFTDGGSNPNVHEFWGGENNKLSSFTLWVTFDIFEKTIVGSLLDNFKMEVSDEYMKFTADFVYKTEESDEIENIELYKVKLLDGDWALMFYDVSVEIDENAPPGIVSSFSFDGKNNINVDKTIGLGSRGPQRKAAAQGRDISISFVSTLERETLELIQKAEYGEVGTEPSECKLCKIPLKLICNVCEDTTDRLEITFPECIFAVDYELSEADEIEVTFNLDAMGTGYATKLDGTRVLTDMYCRLVNDQPEIKSGEGVTSATVRLTVKDDNNQPVASNAVTIVNRVTDESYEATTGSAGGCSFNDVEPGRYDVIVEGYDVVAGSIISVNDDEESFDITVEEIEED

SEQ ID NO: 4748 - protein, 146 aa, Methanobrevibacter ruminantium
MVVVKKSDILKGVKKIEKVKIEALDGDEMYLRPLSQAEINEVDEIEAKAMGIFETNETAHRGRRQKPKSVVESKGKINLELQQKAQHQAKTKAIFLSLDNEKNVGEEAWSETEIEQMPHKLFEELFNHVKRLSGIELDEDDVDTFH

SEQ ID NO: 4749 - protein, 1099 aa, Methanobrevibacter ruminantium
MPSSNVMNIIVKAEDMASSVAQKVENSFRKLGNTIDSTFTTSLSNTKFNQELTSFGTDLDKVTQRLKQVGVNGQSSFNQLTNAERRTLEKLSEFDPVSAQVLQHLSRIGITGQQTFNQLSVSEQKSLMNMKSTAQQLEEVNSKLRVVGIGAAQAANMLNQMKLDPSVGSNLDRAKLKVSEMGYSLDSTKGKILVLGTAIQTSLGNKWDSIKTKVQTTATNIRTALGNALTSVKSKVQNLGNAFSGLGGIISSAIGAIGMASISQLTVGLAMNRERMTALTNATMGGAKAGDQLLNGFTGVNKVFKDLNGNSTNYFMGLDEMTNHSLVSLDDLGQAMSTIKMSTGMSNEELMMFSSTVNDVGQRAILMGKSGEEAISLMQAAGRGLNGEFDMLKTNFGITKDTLTDLGWSGAADDVKGYQEALDKALEKGGDMDGMLDTTTGHLETLKKNFRVAGRHVGEMFTPYIDMAVQKLNGLKETCPGLFENLVMIAGAVSGFATVAPSIAPMISVFGDVGSAIKRTAGFLGLMEVAEDAVTLKSTFLTIAQIAGADAAVLQTAANSGLTASFWAMAAAILANPLTWVAVALIAIAVAVYEVGKSFGWWSDIGSMIGAVWAGIQRLWSAFINNPNVQGFLKDLSNAWNDICEALAPVIDWARKAWAELFPPSATGSFDIVRAIIDVFGQLGDFLGKVVNAVKSAWNALGGFAGFLPMLLGPVGMVVMALRMIVCILLGCSPGIVPALQKTQSVFMSVFGAIAEFIGGAVSNVVAILTRIISALTGIFTRVSSIVSTYLAKMISSVISWASSIVSKAKSASSKFLTNVVNYFSKLPSKVWNHLKNIIQKVTSWATSIVSKGKNAASKFLTAVVNHFSKLPGKVGTYVSNTASRISSGANKWVSNARSKASSTVSAVTGPISKLPGKVYNEFMGIGSRMLSAGSALVSKARQIGSNIVSGLLNAMNIHSPGTIQQKVVAEFENTLSRVGSMDSTALDVGQSVGNSIVRGFTDFGLDTGSFNADYSTDYNLNRKNDDNLDVNIKQELEFVFDFKNLPNDVDEDKLLEMLKEMVTDKSVIQALVSNPDFQSMDTKVKNSIIAKVKRARGV

SEQ ID NO: 4750 - protein, 1012 aa, Methanobrevibacter ruminantium
MASVTKYPSNVSQTTGGKFVSFSNLANIKNNADGAHAVSSVLIKSKKQSPNRPSTVSCKGFGFSLPEGAEPTKITVTYRHRKNAGSDYSSKNKTHICNIGGPTISLLGVSGFSSKGSGCTTTMTTHTKAFSVHGKLSRAQVNSANFGVKLDYPTNSNTYNGYMRISYVRVTVEYITSQYSVSVKHVSGTYEDEDYVVSLGISNKNLTSYNPTCTLTVPAGFTYKGVTGAATGTVTKVNNRTFSWNPQLQGRAGSRQISLAFEPNVTFPEGTDSYSGTFRLSESLNGANSSLNAVISKRPAPSGSETAGESTQVLENEDTLSGNDSYLILNVGEEFLFSVEFTDAENAVYNRIGNGEDDWGRIALTLFKLVDGSWIGRSHYDVSTQLEYDESIPEEVALAEGDKWSLNKTLSIGQVGTYRFSLRYENEHNHELDYDMRQFLAYVRPSEEQLGNPCFTVLRLSDEECDRLGSLHTYIAQAYMKHITDDTHPRDWYRNLRLGVFNNAIADNITVTSEEVDGEIIETVEDSTDYESLTNEDIFNNAEYWSDALANVNEFDNLECEFTYNEDYPLCIIMTGDYNEADGYDYDVGTVEYTNPCIVEKDVYKQREPSGNYPIPLENVLSNDDSSELGIEQFNISTPIILYTLPFDEGYGTNEEMTIRGIEVSGTLEQSDELTVNAKLKSPTGISGTRSIIIEENDLTLDSTNEFRIGGFGDLWGFSTFDLTNLDDFELELTVNNNIHDTEANINFQDVKITFYLEFIQDQKINIKINEEDLSFYGVFTDDVIIPEGLETDTSFLTIDGTDTNDAYRQNIKEKEIELILYIAECDFQSSTDMLRQLSKVLVNERDDYNRPIPNRIEFSHYPDVYFEYVMESALSVESDISTYNIKAKLTIPSGTAFSKKTYSTGVDGYVQGIAPVNPVITFKPQSDTVEILERKSGQRFNMTYTAGWETMIAEIDCESHTVVLKTDEDDSEMTDISGACDFNVDWFSLHGEYQFEGTGCNIRTVSYNERW

SEQ ID NO: 4751 - protein, 1102 aa, Methanobrevibacter ruminantium
MGIAIVVMDNEENFLQFLDPDLCTINETIEELGLRTLEFNYKFQDYVEDRDLFRIGNKIWISNSQSLEDCLYVINTPVENSVYQENYFACEIEEVLAELYYAPLFSQTELTSANGFTLRTTNGEQTVDVDWNALNYWFGLYFNIGVVQECLGTYANRITVNGTMNRLNLLRSIEEQTGNRFVTRYEKDLLDNTIHRYLDFLNPVNVSKNWKLNIEYDFIYEDDGEYCEAYTSDGNPISEIYDDIEEEDDIVDFPPSTPRLNVDPEGIEFRIVNEDFEVINSDGNVYVDDRQQTPLVWSSASVGFTGENRHVLITLSKEKSFVELSVNGKSFVMLDNAVGDVVSTGFVNPSSEPVQRSSTVIPDDSYFEIFDVSRNRAVFRTCINREIGHVHEEVLDFGYNLEEVFFETNEEDTFTAISPVLSLDDDSEGLTRANMNTIISNYTNLSIPKGKIIPMILERVNVKATTLANAKSSLGTFDVSRNYYSRPVQPNDSIDTSDSSNNTWEFWRATAYWRAPFAKFGGDLHVATDAVLKTQYTDISGRSDNGDERRVTRPKMGMVETGDEDAYAIYNDVALKLKEKMYPEFNVSVDVANLRKGRFNDYSLYDKVYIKLPNSTELVTARVTKTVKDANDISRNTVELSNYTFSSTIKNIQNETFIDAYNVSFKYPNSKTLSARLVNLDYDNSNPDSVQYPANQMITFTVYNKDSQSIVASYNKLTNAQGYATINMKYDPGNYEIDIGFGGDEEYLDCSTSVEANVYGKKVVEKPVVVKTKSKTTKKTSSKKKASSKSTAKTKAKTRSTKRYYSKYGVSPDGKYLMAIGRPSASGELAKYGYKFYRTVFVRKCPMCGSTEIYWSIFWAGNEHGSWGKFPATGRRESGSAEGQIFCKKCDADWSIFGNNHNSSHKDLKIYKKPARSTKSEAYTLKKGKMYYDTVTVTVKEKKNTSSKERVVLANDIPKAIVQLALSIVGNSTGLAAAKKIAKWCGHKRNLKWVEYRNFKHGVSWVRRKRKCNCCDGARFMLTLMDAAGCTEKLRLQYVNVSGGKGGHVFTKITVKETGSWCYVDPTCKFENGKNPWNHYIKGYGSPPGHVYNYNGPINPPF

SEQ ID NO: 4752 - protein, 505 aa, Methanobrevibacter ruminantium
MVEKITVSPQEVRGYGNVVDEKELEDYGSYRCDVSESSEVIKGVEERIFSVSGVPAPALSIANVTEDTRRGRCAHISASFEDGEGDGLDDKAISLKSGDDVLATITTGSGENVFDVVLYDSAQLYAVFDGDDYYPPAVSEAITVNPAKSLWDVEFILDEEEYEVGDTAILSGTVGTIVDEIVDGEIVTRRQMEANVTLTLVTDLGIRRCSTNANGEFVLQVPNIQQNQWRVVIAATSTHLVFNGLIDVPVHDYSLVISGSENSTAASTILVVGLTDFNSMVEGATISIAGSDGSSYTAVTDSMGGATVNVGRLNGATTFTATYGNVSSTVTVVPPLDWYDASNYTAGSGRMPSSRASSIYLQAVGGRWLNKEFTDSESYVLEFDLILSKNNREGFYFGANPNSNTNSGISIFKDISNTMIETFDSTGTAIRLESSLSGSYFNTGTHHIRIERDYDVAYIYFDEDLIFEFDDEILSYGAEDQMYNTVGILSWGSGIIEFGNFELSD

SEQ ID NO: 4753 - protein, 52 aa, Methanobrevibacter ruminantium
MNDESCRNCVFRNEDYPPFYCDFGDDNPVICTVKMKKMREYKKEKLRSCLDG

SEQ ID NO: 4754 - protein, 228 aa, Methanobrevibacter ruminantium
MVRFSRDMLQDGAKRMFKWLRKGEGLPNYLIMYDMDRNKEYKLVPKEYAGLYESRNIFWIKNGREPNYVTLTSVARNPLVMDYQNTNYTCCPTSLSLASQMLYHYKSESECAKALGTSKGSGTSPAQLIANAPKLGFKIIPIKRDSKEVKKYLKKGFPVICHWQVNQSRNCKGDYTGNFGHYGLIWDMTSTHYVVADPAKGVNRKYKFSCLDNANKGYRQNYYVVCPA

SEQ ID NO: 4755 - protein, 749 aa, Methanobrevibacter ruminantium
MKKHCFYFLGDSFADICNEAMFCEKHLVEGNYLDSIIRAGKASEIITVNICELEGQDGLISSGQKKRLEMLGYKGIISYDIYKRLNHIRKIRNKAVHGHLSDIEDNANILHAYLYLICAYFYKEYRDTNFSAEDYTGPIMDIASKPKETASETSEDNENIGEFISSPLDDYLFEKYDDSYLLNELSKLKDSSKEAVEDDNLSEFKEYLHIDRSIQEDFLKALNRATSFNSSHLIMLCGSVGDGKSHLIANLKKKNPELFNQFAIHYDATESFDPEKNAIDTLASVLEPFNDNNLNNSTEKLILAINLGVLNNFLESSYANEDYTKLKLIIEEANIFESNEVSDNIYGDKVSFVTFSDYNMFELNDDENSNYTSSKYISSLFNKITQKEDTNPFYVAYLKDKDSHFINPIIYNYEMLMDEEVQKTIIDYLIKIFIKYRKIISTRDLLNFIYEIIVPPEFLKSEDLDNINDFMDYSLPNLLFGYPERSDLLKLCNELDPTLHRNESLDKFIIDLNINDDTEKILNRYFDFTRFNFLEEYGEYLVDFREFNNSEKEKVTNILIRFAVFYGKSIIKNNFKDKVYLNYLKYLYAYNTQSHKDYKYLFTEVKDAIFNWKGSYKKNTICIDTLDSFKVYKNLKLKPSVDKFEKSLLDGLFLGNRFKTDIKIYFSVESNKKKIPLNVDFSLYQYIMKLYNGFKPNQSDKDDLIILDEFINNLLDEDTDDDLYVISLETYEEFLFESNDFGTFEFKRG

SEQ ID NO: 4756 - protein, 456 aa, Methanobrevibacter ruminantium
MDFSENYNILLKQMTCDVNKRKLIHQINQNSPLLPFKTNTPKKANFENGFDIILGELSRILLNKTIEKNFKLDNIVSNLIDNNIEIEDGTKEYITKLLNEYLFDEKNDLKISHPNLYLYIPLSNNKSSNGEQEVALFLRDIFCKNNQNLINFFESYDSNHIILNLILKNTPNLHHKITETKYVIHFEEIANLFNEDINYAILYKKFFMENIGNIFAYYYFFYISQLILKISKGFNDNNEFEKLYYLLDWESASKNRKSLNSYSLLKHHSKPLYAKMAVIDQINTLLGTNNLLEKDISEYFNNLDINSKNNFLHFLKKWVSDYRYVRNFDDKELPDNLLELTEILFESLKNEKLGVDGAVQSRYALNLEDIAKKYLLKRRGSYGYVLNINRDMLLVLTALCVKDKKIKLNQLFIEFEKRGVYFDKYSKEEVVNFLTKLNLIDKKSDSGDAQYVKPVL

SEQ ID NO: 4757 - protein, 1740 aa, Methanobrevibacter ruminantium
MLNQFYDYLSNKLLNYFDDTKILSGEKFFISFDEDDQIMSFYNSLRSIAETNFSCSEFIYVHTISGKEYNTYSININGVKFVISESLTINVDFLVTLRNQVTSQEGVWKDTALLVICNEAIDSIGKGMRNLQKEGMPLNVKSISKNLEDEINDSQILNYSDKQIAKFSLNIQEEELFQTTLWDYETILSIINKGFVSDEDLRELNLFKDDQLNQNSPQKMLKRLKENYDTFNEVNKFSQYGDKKEQLKNMFTDSGVSILSKDDWYKAEWKMVKKSKDDFINQQNPLNYNENLEKITENGLNYWEIPNSFTKTGKRKRNIIVFNPNHSHEVSLKFSFDQILSNSFLNTNSKKFTIARGKSLIVNFTLDSSEPIFKTIKYKHKNENISEFTFNIVVLNFEPEIFNSIKSRFSVNVKSKQIIVTNDEDSFDIVFGTGSKEIEKLIKENGEKLYLYDDESLIISEQSPAWNDGKLSFKLYKDNNYAPFLIKEKSKKTLPVNSYVIWNLKRRNMENFIFNGVKAVQDVNSFYLVEEFKEFLKMEREIIKQDIFYAKRNIDGSLEKIEVSFSNELETAYMDIFNYYKTFDDSPEDNLPSLVYLNDDLKELYKKFITIFNKEISEIEENSILSDFKYKKNLLKLGRIETDNKIMYSPLSPLNIAYQLEVSKQCGNEDLSVNILERLVPNNLIPYICSDDGKELFRPIYQEEAHEWLIYEKSEEVSIGTTNVFISNVVTEKLNQFVKHFNYLFSFNNSSPIKINLINIKDDKEVVKGVFNFIRSRLPDKTKTKKVIPVEINIYNDAEKSSFDNLFDCQSEIQLLEEFGIKKLKSDIFDPIDIIHMIQNNISYYKHPFKKEEYEYAHLSFYKVKSHNNIANDNMDKIETGLSLNGLLSSVTSTTKHSEYRTGFGTNNILNMSNPLIKTVINLNELVENSKNFGKNTYSKNKSVITTVELEEDNIEELYDKSHWVTFIEPTFGIEYFDSSDSNLIIIHYSDQYSSSSKYDTITVTNKSTQYEEIIRDFLQSKYVKVTDEELYDVIKMFNSINGEWLLRVISNSGHYDREKLSIISAIKYCLSILDHKDIVWIPVSMEEILRIAGNVKLDKNKGIFDSKLIKGNHSDDLLFIGVKFNEDNRIEVIFYPIEVKIGLNNASTIKKGKSQLDNTYKLLKTQLQNINVENSEFRNKFFRNFFIQILLSNEQKLVTNHIWDEKGLDRIEEFKAELLNDEYDILYGLEEYIGKGSLVSFKKESHHISIYMDVDKQVIELPEDFAYYGLATPIREIHDEIQSDNTDILAETLLSHVDISEIRAKNNDICDSNEDMSIDDDFDNLSEFEDSFIEEESEISEEPDEELTDATSSSDNESIENIGESPSKISNVRALIGTQKGYNHKVYWEFGHPSLANRHMLIQGKSGQGKTYFIQRMLKELSIQGIPSIIIDYTDGFKPSQLEPNFKDSLGDKISQYFVVKENFPINPFKRNTIMIDKDIFIEEDNSTIASRFKSIINSVYGLGIQQSNTLYQTVLDCLDKYDDNFDLNILKEEILKDESNSAQTVLNKLNELLDKNPFASTDFDWSVLDNKDGKVYIIQLTALSKDIQTIITEFILWDLWNYKLTNGSEDNPFIVVLDEAHNLDFSNDSPCSKILKEGRKFGWSGWFATQSVKGSMKIDEIAKLENADEKIYFHPTDVSTIAKDLSKDNEDKKIYEKELSQLTKGYCIVQGSAIDSSGNLYQPNPVTVKIEEISFDEN

SEQ ID NO: 4758 - protein, 1054 aa, Methanobrevibacter ruminantium
MESKDRIENTIFNDKRMDAYIDKYFEEFTLSSEQEEALNIWIDKLNNDQLTSEKGNYHNFFEIILEDLLGYKRSDVKHEENIGDEGHPVEFVLEKDGKDYVIIELKGTTYKDLTKRRPGQQSPVEQATNYASAKKETEWATVSNYDEFRFFNPTARDNYISFKFRQLKDLEIFKKFLLVFSKFSLIDEDIPKKLLNETKVIERELENEFYQLYSDTRLMIIKELEYSSEDINRIEAIKLSQIILNRFIFLCFAEDLALMEEETTADVLLTPLKHRNLIGNTMWNRLNELFIFANQGNKHRRIPAFNGGLFEDDLSNLKIRDEIEDRSFFENWNLKEDFEDKYEDIAKLIGVYKDTLNPIFINLLIISTYDFDSELDVNILGHIFENSISDIEELKNDNQEQRKKDGVYYTPEYITDYICRNTIIPYLSISGKASTVHELLYEYESSNSLDVLDSKLTNIKVLDPACGSGSMLNKSVDILFEIHEALHASKYAGDSSLDRFFDSLEKRKEIISNNIYGVDLNEESVEITKLSLFLKLATTVGLKEGFQLPSLDKHIKCGDSLVDDESIAGNKAFNWYESFSEVFESGGFDIIVGNPPYVDIKEMDEKTAKYIFDNYETSFNRINLYSTFVEKSYYLLKNEGIFSFIMPNSILFNSTYSKIRELILNNTSILNIVRTSDDVFKDAKVEPIILIFKKGYDEGNKTKILIKKDDMDEIPINNYSEHFFTQERWFENNSIINIFSDDFTFDLLKKIDGNNERLIDYCDFSLGLTPYDKYKGMSEDIIKNRKFHSKIKLDDTFKELLDGSDITRYNVKWGEKEYIKYGDWLGAPREEKFFKNPRILIRQILSIAPKESRKRIFAAYTEEELYNAQIAFNLVLKEGFDDKNLLKYFLGIINSKMMTWYYEERFMDKNKKNFAKILIENAKNLPVIINSNFLDEIVSNVDSIIELNKEFYSVRNAFQTWLKIEFEIEKLSKKLENYYDLNFEEFLKEIKKKKVVIRPNQIQDLSELFNESLGKIEYLQREIKEADEKINLLVYELYGLNHEEIEIIENSFND

SEQ ID NO: 4759 - protein, 86 aa, Methanobrevibacter ruminantium
MDDETLILIEYIRNAPTREMVLKSFEGVDFIRPIQISRKTGIHPNNVSKKLKDLREHELVYVINPEYHVPKLYRLTEKGKNMLQFL

SEQ ID NO: 4760 - protein, 686 aa, Methanobrevibacter ruminantium
MNKKIILSLLLVLLVAISVSAVAAADADVTYINDAADVDDVADEKVAPLTASADAQDIQTKLDNAKPGDTIELENKTYDVDTTFNVTKQVTIKGQDTVIKASGASQGGSGALFIANEAGTAFEGITFINTDGHKNYGEQVSGYAIQLAIENGTVDNCKFIDWSSGVYGKGASFCSITNSYFNGSSEQVTNGGKKEYGTKAINLMGSHDITVTGCTFEGQVLDAISIASNSGNNIMTDNTFIDNCYAIYFGGASTQGCVIANNSFIRCGYCVDDKGNVIFKDLPIISTQKAANGYIIADNTIEANEGSIFMKAESGNTAHGYPSKIGDINITGNTITATAGANPEGITFMYILSNSGPLNPYAPIAIVNNNLDAGITPVTVWYADWDNENGTVIPAADKAVTSINIAEIAAADGTVTVELVDVNGAPQAGQTLSYKIDDGNATEIETDENGKAVINVPIDENATAQTVAVEFAGTNDLAASSAQVSFKNTATKRTATQINANNMSVVTLAPNTGDTNDNYFNATLLDAEGNPLVNKEVKIGFNGKEYTKTTNENGVAQLKINLGYKGGYTFAVAFLGDDEYEASFGVYLINVAAQTPKLTTKAATYKASAKTKSISATFKTEQGSVIANKKISFTVNGKTYTGTTNSKGVATVKVSINKKGTYSFTAKYAGDNTYKAVSASAKLTIK

SEQ ID NO: 4761 - protein, 696 aa, Methanobrevibacter ruminantium
MSLSIFVLVIGGGFINKRILLIFVFLIFFISIGSVVANDLDSNSVNQDNYISDVDSFDGSNSVLSSSNLDSSIDKDNYLNLDSNNNLNLDSDKNSVSGSDLNLNNADLINSVSGSDLNLNNADLINNSTTNDSSNSNNSNNLENLTNLDDSKGASNQKPQKYLIPNDSSIGSAYIQKIIDNAAPGSTIQFTGSFYKNIYLKIDKALNIISKSGTVINSSYRLPVFTISRGGSGTNISGFTANLANSFVEASDVSDISISKNKIFTKRKAIVLENVFNSKIVRNSFLRFETAIDISKSGGLTISNNNITPDNGYNVGISLKDIYRDKVSILNNNITGHDRRIESTGIYFGPNAKNVLIEGNIIDEWYTGVDFPNSVNNVSILNNTLNHNGDGVIINGWINNFTFNKNVVTNTGRVGVLFDYDFYGTKGDFTLEKNFFTQSGQLDLRNTGDQAVTIGENFASRRCVRVAMKNGFSIKTRQNGNGYYFSIVDKNSRGVSGLPNFSATISINGVSYNVNFINSVAYVEVDGASGENDEVLLDVGEDKRKLSDWGETQNLSSSEMEYYKKIYDDLIKSMVEETNNDNQDMKKVEDKNGTGSTPSGGNGGGDSGISDGRSSVSSNGDSSPASAGTSNVAASSASSSAGPSAAQADTPESSTVKSLSLDEETFRVAGVGGLVFLIICVIGLYYREDIMDMIKE

SEQ ID NO: 4762 - protein, 227 aa, Methanobrevibacter ruminantium
MMDLIFEYLIVFILLFATNIAFLLRYSSFNKNKFIPFVLGYAIIVFALTFVFSSLNLQKESIDFIPYILFAVSALMLIISIRYVGFGKNYGINDDKVVLYGTILSSFLSIGALALGLKSDNLFLSGLELAILSVVVIFLVYKISKIFNNAKRPYYAVIGEYMFLEFILLLILALTFSSVRELDYSMFGSFLILTPTYKVLYMIIAIVILLVLGVLYNDWVLKRLKRK

SEQ ID NO: 4763 - protein, 213 aa, Methanobrevibacter ruminantium
MILQGTEILTSFIHIVSESLLAPVVIVLVIFLIYAILSFGGFLNEWFTKKPLKSAGLEKLLQDISSSDSPEDLKAVIDASALYKEQKEILVKITDNYNLGPEARKAFASKLIEEEESNLLKLTTKTDILVRLGPIFGLLGTLIPLGPGLSALGTGDITTLAQSLTIAFDTTVTGLTIGALGYIVSKYRKQWYESDLTTTETIAEAILEKLNQF

SEQ ID NO: 4764 - protein, 105 aa, Methanobrevibacter ruminantium
MLRKRKRFSDDGDEDPMSGISNLSDAMLVLALGFLIFAIMALQVNPDMMAKTQESQAQQATSQVSTGQDFNSSANAGASLEQSGYSEVGKVYKDPDTGKLVMVQG

SEQ ID NO: 4765 - protein, 540 aa, Methanobrevibacter ruminantium
MNNKKIIMSFLLVLLIAISVSAVSAADIIADNQDSISSNDNSINEIATEDISKDINDKSLSDGVSTGGNNWIVKPSTDGKSDANSIQKAINLDNTKPGDSLLLTDKNFTLEKSVSLNKDLTINGGNIYNQNNLTDLFIIDPKSEGGPKNITITNVTFYVNGNENIVLANGENYGTTYIDLANIKISNCTILPINPDSNINDTVLLNIKSDRTVGQTGQSTGFVLVSGNKLNGINTLKNNDYVLKDDFVIQKADPILNTALICPNMTITTYDKNTNDTPSYYEVKLIDQNVNPVINRTIQIGFNGKIYDRTSDENGIAKVKLTLAYTSVYTFAVYFLGDESYASAFDVSTVTIIKKNATITPKTVSYNVNAKTKTLTATLKDKNNKALANKKVTFTVNGKTYTATTNSKGVASAKISLSKKGTYTFTAQVLQGTISIIQFPKKGKLTLNPLSTNLTVKKYTFKKAATKKIQVTLKSGKTVLKSKKLTIKVNGKTYSGKTNTKGIATITIKLTKKGTYTYTANFAGDNTYKAISKSQKVVIK

SEQ ID NO: 4766 - protein, 273 aa, Methanobrevibacter ruminantium
MSFKSPADTAKAVASAATAKGEMPIIKLAILGFLAGAYIAFGGLLAEVANTGAIAGGVPVGISKLLFGAVFPVGLIMVVICGSELFTGDVMFMTMGLLDGKTDIMGLLKNWVGSWVFNLIGGLFVAYVLAYLTGIMVPEAFAGGAITIANTKALGGATFMAAGKSTASLTWVQCFLRGIGCNWLVCLAVYLANAADDVVGKFFGIWFPIMAFVCIGFEHSVANMFFIPLGIFLGAEVTWAQFFINNLIPVTLGNIVGAAVFVACAYWFVYLRD

SEQ ID NO: 4767 - protein, 683 aa, Methanobrevibacter ruminantium
MVEIKYVPSICPYCGTGCGINFVVKDGKIIGVEPWKRHPVNEGKVCPKGNFGYQFINHPDRLTTPLIKENGEFREASWDEALDLVASTLKKYADTDPNKLGFYACARSPNENIYITQKLARAGCGTQNVDHCARICHGPTVAGLATTFGSGASTNGYDSIEEADFIFCIGSNNMEAHPLFGRKIIRAIKNGAKLVVADPRFTPTAKLAHEYMQFKTGTDVALMNGMIKIIIENGLQDDEFIKNRTKGYEEMKEVAMKYDLDKVAEITEADPEQIERVALEYAQAENAAIVYSLGITEHSHGADNVMSTANLAMLTGNVGKIGGGVNPLRGQNNVQGACDMGALPSDYVGYQKVANPEITKKFSDAYQIELPTTPGLTLVEMMNAAHSGDLKVLYIHGEDPVLSDADIKHTKEAIANLEMLIVQELFMTDTAAEADVVLPAAGWGEQEGTFTSGERRVQWLRKAQEPPEGTMLDWKIMEEIAVRMGRPRELFHYENAAEIWEEIRELAPSYYGITHERLLKPEGVHWPCLDPEDPCEPLMHKDKFAHPDGLGVFQALEHRGPVEVVDDEYPLLLTTTRILFHYHAAMTRRCETLDKEVPTGFIEINTEDAAERGILNNEIVKAYSRRGEIEIPARVTDDIKKGIVNIPMHFTECAANMLTNSDSFDPKCKMVELKACAIQVEKL

SEQ ID NO: 4768 - protein, 402 aa, Methanobrevibacter ruminantium
MAVNVNDMFYAYSGNEAIKEKGEYGGVVTTIMKYLLEEGIVDAVVAVEEAADLYDAKPILITDPEDVIKSAGSLHCGTLNLAKFVSKYLDGARDMKIAVTTKPCDAMTLKELMRKRKVIEENVIMIGVNCGGTMPPVPTMKMIRDVYELDPADVIKEEISKGKLIMETAEGEKAISIDELEEEGMGRRENCQRCTMNIPTNADLALGNWGVIGELAGKATFVEVCSEKGADILDKVIEAGLIETQEPIEKGVTIRANIDGIMVKQAMAQREKDFAGTSGDILEVFAEYKEEFSKCMKCYGCREACPLCFCDDCCLEAEGPEWVPGGYTPAAPFFHLTRMVHMVDACTNCGQCSEVCPCEIPVSKVWATVNQKVRDIFGYYSGVDNEEPLPFTEFGPKSYRQY

SEQ ID NO: 4769 - protein, 235 aa, Methanobrevibacter ruminantium
MRIISIVGLKNTGKTSLTSKIIKELTNREFKVASIKHSHHQMEMDHEGTDTYKQMESGSDFVVGIGGRTYFNINERLDLERILFLIKLIENPDFVVIEGFKSYPYAKIATCKEVEDEYTIKTVNSFEITDEELLDLVDLIEERSYDILDTLFVSDCGYNDASIIGQAFAQGKLDYNPDTQAEVNLAIDGINIGLNKFVSNYIKQTVLGILNPLKIKEYGVEDFENIDLTIKNKKD

SEQ ID NO: 4770 - protein, 61 aa, Methanobrevibacter ruminantium
MACNDDFENNVTLAINGNDIELNKFTDDIIKETILGLLKAIKTSEYGVDEVKDVEITIKNE

SEQ ID NO: 4771 - protein, 311 aa, Methanobrevibacter ruminantium
MKDKVRDDYERPIISLRISITNRCNVNCIYCHHDGMLDSSSEMTPDEIYEICRIAKKLGVEKIRLSGGEPLVRPDIVEIVEKVNSLDFRDISITSNGIFLDKLAGPLKDAGLDRINVSLDTLDEETYKMIVGKNVLERVKKGIIESCAVGMYPVKINMVVMNNINNDEIMDMFEFTKKHGVILQLIEIIESESCDDNDFNSKYHYPLAEFEKHLAEIADEIKVREFMQDRKKYFIDGGEIEVVHPVDNTNFCKNCTRLRITPEGKIKPCLLRNDNLVNLIEFIREGASDEELIDIFLKGIHNREPFYKEEN

SEQ ID NO: 4772 - protein, 2309 aa, Methanobrevibacter ruminantium
MKIQRGIYIILTLLVLFSLSAASAADDLTDDIISADENEELILDETVIDDVSNANDNYDEELIKANDEKFVYAGNDSDELREDPGTYSGLSSEIGAGGNIVLTHDYYTYDSGDTIIISISNSVIDGNGAIIDMAGSTIRAFKVTASGVTIKNLTIKNANVTTDDLGNTDDEGAAIDFEKSGTIEYCNFINNSANAAGAVYFYKDNSKAINCNFSYNQAVYSGGAVCFEESGTIENCTFVNNTAVYDILGGGGAVCFNGTGNAINCNFTNNTAQGYFSWAGAICFNTNGNAINCTFTNNKAHDSGGAIEIYGNGKLENCSFDKNSANDGGAVKIYGATKISNCNFTENKAAELSGDGGAIYWNASAGKLENCSFAKNSAFHGGAVSFEEDGEVTNCNFTDNLAGDSGAIWFTADGTVENSTFIKNEAWDEYGGGIVFYTSGDVRNCNFTDNEADKQGGAVYFNGAGTVENSNFTNNKAQDGGAIFFSEDSTVKNCIFVKNCATDIRSDRYFERCKYVFYKNGEVTNSSFTENNATEGGAILFKGNGKATDCNFTNNSAKFGGAIDFESHATVENSSFNGNKASSNGSAIWMNRAGGIVSSSVFVNNRANTGTIFFRNDNSTSHLTINDNIFLNNNGVAIYFDKNDSDSNTDYNWFGNNATNYDIAPVANNAEINTWLFLNTTVNPDMISILDSLDIAFKLYAYTPSEVSEYDNIRLKAVDLTLTPTNGIFNTTKTELGKTVQYIPESDGIGTLTASIENASYTTTLKITDGTTFFDLDYIINANNNNTIVLDRDYTYNSTFDYNFTDGIVIDRPVTIIGNGHTINAAEMVRIFHIQADNVKIKNITFTNAISNGYGGAIYWQGANANLSSCLFENNSAVMAGAVAFYGSTGSIVSDCSFMNNSANNGGAIMWQVSDDSVVSDCSFMNNSAIQGGAIYWSSNDGVVSDCSFVNNSAVRNGGAIYWEKNNGNVSGCIFVNNSADNGAIYFNNQNFGQNLTINHNIFLNNDAVAIYFVRNDSASNADYNWFGNNATNCDIAPTSNNMEMNTWLFLNATSEPEGISILDSCDIIFKLYAYAPSGVSEYDSSRLKEINLTVTPTNGRINTTQAKLGEKVHYTPESAECMLTASIENAFYTTRLKISDGTTFRDLNNLINRNDNDTIILDNDFIYNSLFDSKFKNGININRPLTIVGNNYTIDATGMARIFRIQADDVEINNITFANAKIDGNGGAIYWYSGARGIVSDCSFVNNSAKMYGAAIYWNGANGNVSDCSFVNSTVTDEHGGAIYWHGANGVVSDCSFVNNSAKKYGGAIFWNAANGVVSDCIFVNNSAKSYDGGAIVWNEGLNGAISDCSFVNNSANDGGAILWNEAAGGTVSNCSFVNNSANKSGAAIYWDSGARGVVSDCSFVNNSANRSGALYWFANDGVVSASIFVNNSGDNGVLYFNNTNKRNLSINDNIFLNNDVVAIYFVNSDSTSNADYNWFGNNASNFDTEPLTTNVEISTWLFLNATADPNPVEILNSSDISFKLYSYNATGISDYDNSQLQPVNLTLTATKGDVDSIAKLGETVIYNPTSLGTGSVTAKVENVAYSIEINNIKSNPNLSVESDELTYGNNIAIALNYESAATGKVNITLKGKKSDYTFADLDLNETISLGILAADEYEVIVEYSRDEIYTNASARGTLKVNKANSTLTVSDIEFDYKDMGSGEISFTNATGVEAKVINHDEAIVFVRGNTITVLNLSADSYILEVTTITDENHNEVSKNATITVRKVNSTINVNDIVLYYGESINLAVTTDGAIGISADIDGENVELNENIVTIPDDLESGNHTLTITTVPNDNHKEASKTVNIVDCRIGNITVVVDGVEYSIPAVNGTAITTNMPEEIEKLKENITDLTGQLEEAQTNATNLANNLTIANQIVDKLIAQLEEAQANATQTINDLTHQLNEAQTNATKIANDQTNANQIVDNLTGQLNDAQTNATKIANDLENANQIVDDLTRQLEEAQANNDQTINDLTHQLEEAKVNATKIANDLENANQTVDNLTTQLEEAKVNATKIANDLENANQIVDNLTDQLEEALANATKIETVVVDGKEYPIEYVNGTATVTTNSTGPQNITHERKATQIIYKDMETTAIDTKVDGRIGKYFNVILKDSEGNILANKPIQIGFNGKVYNRTTDENGSAKLQINLIKADIYTFAICYLGDDDYNGSFVVSKITVKAQKGTLTVPNKSYKATTKTKTLSATFKAASGKVLANKKVSFVVNGKTYSAKTNAKGVATVNVSLNKKGTYSFVAKFAGDNTYAAVSKKAKLTIK

SEQ ID NO: 4773 - protein, 149 aa, Methanobrevibacter ruminantium
MPKHIVSGLKYLESVELRKRGLSQKEISSEIGVDRSTISHYLNGRNISADSIELAKVILELNPKDFILIARVLFGDYNEIRQLISIFNMNHYDPQIDDGCIGCGLCVDLCEVKSISLDSLKAKINPRYCCGCLMCVEDCPTNSIKILEV

SEQ ID NO: 4774 - protein, 367 aa, Methanobrevibacter ruminantium
MVKNIKETEGKNFCIKRSLGEERVLSFKDHVCVGCGLCEATCPVEAISLDEVAPIERKYVDTYFSGHEKIAQNYALFTNDNEIKAKLDICEDKCVLCGLCSGVCPAGALELAIDGVSIKENEAYPHLVTSAEIDEDKCLFCKKCEAACPRESITIDRKLPNRADLVTGEIEVDEEECIYCGACAELCPAEAIVVDKATGEESIVIDKEKCVYCLVCKKACPVDAIKAVCRSCSYGEYDLDPAKAAITGNAIIDSETCIKCGWCEGVCPADAATVKQAFKGTLEIDEEKCGTCGACIDVCPCNVLSFPKSTGPGDRGTHLVKEEDYCIHCGACAKVCPNEALTVTRTDVDYTPTSSKSWIAAFEALKN

SEQ ID NO: 4775 - protein, 76 aa, Methanobrevibacter ruminantium
MELKVDQDKCLGCGVCVIACPVNASISPENAGGHGSKTTETIMMVENGFIKLFSVDKCDKCGTCQMFCPTEAIWLE

SEQ ID NO: 4776 - protein, 178 aa, Methanobrevibacter ruminantium
MHYANTYLERPVVGDLENVAQEGTTKVLKCMLNTGSDIYQGACKKRGSTLKEEYKNASGTCYMDPRDMVKLGVKNWDTVLVKTDYGEVVLNAAKSRDAPHEGTIFVCKGPWANTIVSHETYCCSDPTYKGIHATVEKTDRKVLLMADLMRWAYKKYVDEEDDDVIENMESLGERPVYN

SEQ ID NO: 4777 - protein, 463 aa, Methanobrevibacter ruminantium
MTYEPPVTDYDYIVENCTCAFCGCNCDDLDFLVKNGHVVAVRHACRLGASKVMEDMDQRLLVPMVRNEEGVLEEVDWDTALDTAAEYIANSIRPVFYGWSETSTECMKEGVELGEYIGAVLDNQATICHGPSLQAMQNAGYPIQTLGEVKNRADVIAYSGSNAMNSHPRHLARYAAFPRGYFRQRGRFDRTVITMDPKFSDTAKMSDKWIGFEQNGDYGFYNALRAVLKGKKLQSESVSGIPAEDIYELAAEMEAAEFGVLFFGLGLTHTLGKQRNIDIAIKLVQDLNTNSKWGLTPMRGHFNVNGFNIFMAYETGWAFGVDFCRGYGRYMMGETNTIDLLVRKEPDCFMVIAADPGAHFPNGANQHLADIPVIQIDIHWGPSTELADVVLPGSFISVECGGTSYRMDGVPIWMKKAIDKPETCRDDEWIVRELKERVMKLREEPNVADEYVPNEGLACLLDK

SEQ ID NO: 4778 - protein, 572 aa, Methanobrevibacter ruminantium
MEYILKNGIVYDPANEVNGEKMDICFKDGKIVEDVSADAEVLDVTDKIVMPAGVDPHAHVAGPKLVVGRLYRPEDERRGVAQKTKTTRAEAGFSIPSCPTTGYRYSRMGYGTVCEAAMPPLEAKHTHEEINTIPNIDINPLPLFGNNWFVMEYARENRIDDLAAFIAAMLRVSKGYGVKIVNPCGSEAWGWGMNVHGYDDKAPYFDVTSREVVRALAKANEKLGLPHSIHIHPNDLGHPGNVPTTIATLDSIKDIAKSTKPSASVRDQTIHCTHLQFHSYTGNSWKDAASGAEECADFINKNPYVTCDVGQVTFDETTTMTADAPMEYDLFKISGLKWANKDIECETAAGIIPCIYSPKTPVSTLQWAIGLELFLHIENPWQVCLTTDHPNAGPFIRYPKIISWLMSAPKRMEMIDNGEVHKWASKRTGLAGLEREYDFYEIATISRAAPARIHGFADRGALTPGYNADIAVYDINPNDFDPSRDPEGVEKAFSNAYYTIKDGQIVVKDGDIVSTKQSHTIWTNVIGYEEEEKQIIDSIMPFFTQYYSVKWENYQVHDHYVPNPTVVDVEAK

SEQ ID NO: 4779 - protein, 288 aa, Methanobrevibacter ruminantium
MKTITFDQKKTSSIALEFDELITDNIYAWTEEDFAEYKVPIGNSRFPITDYFDITVEGEAESPAEVKMILNGDCNRVKYIGCKMSAGEVVVNGDADLHVGAEMSGGIVTVFGNVAAHAGREMKGGKLEIMGNTKEFCGASYIGEWRGMSGGEIIIHGNAGKQCGECLVGGKIHVLGDCDILAGIHMTKGTIEIDGNVNRWPGGQMKNGNIVIHGKVGRLLEGFVEQGIVTDPELDGVTYPGRYIEYKGDIALNGKGTLLIDAEKNRDRLSTWIEEDDEYNAIREYRDQ

SEQ ID NO: 4780 - protein, 100 aa, Methanobrevibacter ruminantium
MVKEILMDPDDIIEYVRNEVKVDDIFELSYNRVFAPGTVLGITPEDEETGEGLILSLQLNGELLNQAVDIDLHAVKDEIIEARHLPGGDEDKLIVIEATL

SEQ ID NO: 4781 - protein, 100 aa, Methanobrevibacter ruminantium
MVDKELTMTSDEVLDYIKNNFKEFDKVDIAYNRVSAKGDILGVDLSDYKGKPSCRVMIALDGEIISDTIEVDFEEYKEDIIELHHWPKDESKESVYIEVI

SEQ ID NO: 4782 - protein, 345 aa, Methanobrevibacter ruminantium
MSEKFLKVNIQKELKEFELDIDFKLNKGCLGILGPSGCGKSMTLKSIAGIVNPDTGIISLKMDEENIYFDSEKKINLKPQKRNVGYLFQNYALFPNMTVEENIGIGVSKEKREKTVSEMIKRFHLEGLEKRYPRQLSGGQQQRVALARILAYGPDVILLDEPFSAMDTFLKEQLRIELVNSLKDFDGFSVLVTHDRDEAFQFCDELIILDKGKIIAKGETHEIFENPKKLDVARLTGCKNTSRIEIIDDYHLKSLDWGLTLEVSEKISPNITHIGIRAHDFAPAKKDEVNSFDTENSSLLEMPFEWEITLANGLWWKREKQIREHEFVVPDHIKVDPKNTILLEE

SEQ ID NO: 4783 - protein, 564 aa, Methanobrevibacter ruminantium
MSESEHRMIEILRILNTHEKPIGSKVIADELKTKGYNLGERAVRYHMQILDEKGYTEKQGYSGRVITELGKSKLEKGLIYDQVDFTLSKFKERIYLTDFDYKKKEGNVIVNTSNILENKAFDIIKEVFAAGVCVSPLINAKKTEINGKKGYVMKTICGTTIDGVFLKNGIPSIPQYGGLVDIEDYYPTKFSELISYRKTSITPLDAFIAKGMTSVLEVAEHGTGTIPANFRIIPESGLEKAKEIFEKLEKAGIGGILEIGEISENILGIPVPEGMVGISIIGGITPFCAAQEMNYKVDIKTGEEFINYNKLKELESSKHKIKHAKKVDYKKTPFILTKSLNRVNQVDYDIETGHGNIVSNISYLQKEDLDDAISIMKKTYKALPKYMNSHFSIVDHPDDKSKVGIATVCSLSIDGILIKNGIMSTPQYGGLLELGKPPLFVEMISYNGSSIDPHKIFIFKDLTQIAKRKNPKKILASIKEVPYIARPETEEILEKISKEGFSIFKVGKPRELVYNAKVDNYNFGIVTGSGLNLIAAIKEKGINIEAKAVETVLPIEDMSLIYEQ

SEQ ID NO: 4784 - protein, 448 aa, Methanobrevibacter ruminantium
MEKRIQNIMERMKADNIKFIRLQFVDLHGIPKNVSIPCELDNMEDLFTDGILFDGSSIPGFVGIEGSDLVLKPDISTYSPLSWRPEESASCRFICDIYNPNGEPFEGDPRGILKKALAKIKEEGYTYNIGPEPEFFIVDTDDDGYPIPHDTAGYFDVEPVDKGTDFRREITTNLQELGFEVEASHHEVGSLAKTKSHSSSDDALKTADAVITFKQAIKAIVANMADFDGFDYRVTFMPKPFFGESGSGMHCHQSLFKDGENIFYDENSETGLSQEAMWFIGGLLKHSAAITAVTNPIVNSYKRLVPGYEAPVYITYGIQNRSTLIRVPAARGKATRIEYRSPDPTCNPYLAFAVMLEAGMDGIKNKIDPGESVEINIYELTDEEREEKGIELLPSSLWEAYHTFEESEIMKEALGEHIFNAFLSAKYEEWDEYRVQVFNYEHKKYLNY

SEQ ID NO: 4785 - protein, 4187 aa, Methanobrevibacter ruminantium
MNDKTNDFFSEYLSGLCLDFDESTLIAPNKNGEKEKCIIEKSEYEIKKDNLVGFAKSNSISINELILASLTLTLNKFNFSNETLIFNQNNVPFAAKFENRQISIREFLEKIHENYIKTLEFDEYFDKDDLPLNPEFYFTFDEDLKSDAEYSNYLSIVENDETVSLFLSYNDELYTKEFINLFISSLEKILEEIATSDIDKTNICDIAIVGENEDLIFTEVEMPLIHRRFEKQAVEKGDEIALVASDATLTYKQLDEKANVIANALIAKGVKPKSNVLVMLSRDSNLIASILGILKAGCAFIPIDPEYPQERINYIYENSQADYIIANESGEKSLDIEELLKDGNSDDPELDVDPDDLAYMIYTSGSTGNPKGVMISHKNICNQASNPKSTYESLLCITTISFDVSVDDILTSLSNGLKLVLADDVQIKNIPALIKLIDENKPEILEITPSRMGSYLEVKEFCNVISCFKCIFIGGEKFSSKVYEDLRKYSDAVVYNSYGPTETTITSNNKAVTDVNDLTVGLPHINYVTDVRDIDGKLVPDGVMGELYIGGTGVGKGYYNMPEKTAEVFLTINNIPYYRSGDYAIKLPNGEIDIKGRIDNQIKLRGLRIEIGEIESNVGKYPNIKQAVVVIKEINDNEHLCAYYTADEEIDSDDLKEFLKDRLTRYMVPTVFMQLDEMPQTPNGKTDLKQLPVPQLKLSFTLPESETEIILHEIASSISKTKEFGTTDDLYAIGFTSLTLMKLNARIYEEMGVNLDIISLLNDPTIKNIAKEIENNDILDLNGVIESSKDMVYYPLTENQMGIYYECIQSGELAQYNLPSVIRFGSEIDADRLHDAIIKTIEAYPYLKTRIVLEKGKVMLKRDDSIDIDDIPIINVDSISDEQIEKENLKLFDLHNDQLFRFKIYKTPSETILFSDVHHIISDGESLDKLFTNISNAYQGIEIEKETINGYINSIIESENENSEKYELSRKFFQDKLTQEIDSTVLTPNLNGNFEEGILKSISKNIDSELVNRFCSENRITPNVLFMAVTMLNLNKYTFNDKTLITTIFNGRSNSSYINTQALLVKTLPIVSINDDRTLSFKEYLSSVNDIWMETINHSDYPYTKISEEFGLKPEFFYAYNNLDAEEIAIDGKTYKVKYLKSLEVNYKISLEVNETWDNIELFLEYNDQLYSADYIDTFLNCIIDVINQLIESDIEELSIGEIELGKGIETPLSFTPVDMPILHKRFEKQVTDKGDETALVASDATLTYRQLDEKANVIANALIKRGVKPKSNVLVMLSRDSNLIASILGILKAGCAFIPIDPEYPQERINYIYENSQADYIIANESGEKSLDIEELLKEGDFENPDVDVGPDDLVYMIYTSGSTGNPKGVMISHENICNQVSNPKSSYDSLLCITTISFDVSVDDILTSLSNGLKLILADDVQIKNIPALIRLIDENKPEILDSTPSRLASYLEVKEFCNVISCLKCIFIGGEKFSAKVYEDLRKYSDAVVYNSYGPTETTITSNNKAVTDVNDLTVGLPHINYVTDVRDIDGKLLPNGVMGELYIGGTGVGKGYYNLPEKTQEVFLTIDGIPYYRSGDYAIQLPNGEIDIKGRIDNQIKLRGLRIEIGEIETNIGQYPDIRQAVVVIKEINNNDHLCAYYTADEEIDTENLKEFLKDRLTRYMVPTVFMQLDEMPQTPNGKTDLKQLPEPQLKLALVMPESETEERLYDIVSSLVDADEFGITDDLYAIGFTSLTLMKLNSIVYEQMGANLDISILFNEPTVKNFAIEIDNSFEKDSGLEELIESAKGLEYYPLTENQLGIYYECMQNPDVIKYTMPTTVRFDSDLDANRLKQAVIDTIEAHPYIKTRIVNNDGELRQKRCDDVAIDDIEIVKVDSISDEDIVRNDVGPISIEDSQLFKFKIYETPDEIVLFSDFHHIITDGVSQNNLFRDIADIYENREISEEIIDGYIYSLLEKEAENSEIYQSAEAFFDDKLTQGIESTVLTPDLNGNPDEGKIKNLSYAFDSELINEFCNDNSISKNALFMAGTILNLNKFTFSDKTLITTIFNGRSSPSYFNTQGFLVKTVPFIINNENRQASLRDFIKSIDQSWKDTLTNSAYPYIKIAEKYQLKPEFFYAYHEFLESDEMMINGKEYIPQELAGVDMVTVESKINLAVYDNGDEFNLILEYNDQLYSEDYVKTFIESLKSILVQFLENDMDNYRICDVKLKDDEEVHEFVDVEIPFIHKRFEKQVDEAPEKIALIASDGSWTYGELNQKANRVANALINKGIKANSNVLVMLPRDSNLISAILGVLKAGCAFIPIDINYPRGRIDYIFENSQADYLIADRGIENSIDINELLQEENASNPQVEIDPDDLAYMIYTSGSTGNPKGVMTSHMNITNLFSKDEGSVIYNAYSKMKRTLALSTVSFDAFLLDFMPLTFGLEVVLANDSEIKNIKELAELVKREKPDSLTFSAPSRFKQYLEYEEFAKQVPDFRYIGLGGEMVPQDLISRLLEYPNLELYNIYGPTETTVTCNTHKLSDAENITVGRALHNCITEVRDIDGKLVPNGVMGELYIGGKGVSRGYYNMEEKTKEVFLSINDIPYYRSGDYAIELPNGDLVIKGRIDNQIKLRGLRIELGEIESNIARFPHMKQIVVVIKEINNAEHLCAYFTADEEIDIKLLKRYLGNKLTEYMVPTVFMQLDEMPISPNGKTDIKRLPKPKLNLDYVEAEGETEEKLVELVSSIANTTNFGTTDNLYELGFSSLTLMKLNSMIFNEMNVNIDITSLFTNPTIKSLADKIDNNIEFEIDIDEIIETAKDMDYFPLTSNQMGIYYECMQTEKIKYTMPYAIRFESSIDPYKLKDAVIRTVDAHPYLKTRIINTDDGKILQKRCDDVEIEEIEIVEIDSISNRQIMDRDIKPIPLDDNQLLRFKIYKTPTETILFADFHHIITDGVSQGIFFNDLAKAYNNEEIEAEKIDGYEYSLIEEKISLSEVSENFFKKQFSQGIESTVLTPNMNGNPDIGNIKLISDQVGSSFVRHFCKDYSISPNVLFMGATLLCLNKFTFSGKSLITTIFNGRSNSNYDNTQGMLVKTLPIIVNAENRDMMVEDYIKLVDKAWKDALTHSNYPYTKLAEDYQLKPEFFYAFHESLKSKVELDGRTYEAIDLDGTVSTDYKINLDIFDDGEFITLYLEYNDQIYTEEYVNQFIRSIKYILFQFFVHDMDKLRIRDIELVEGEIPEFEEIDTPIIHKRFEKQVVEKPGDVALVASDATLTYGDLNEKSNRIANALIRRGVKPRSNILIMLKRDSNLIASILGVLKAGCAYVPIDPEYPSERINYIYENSQADYIISYETSENSLNVYELLEEEIVVNPNVEVLPDDLAYMIYTSGSTGNPKGVMISHKNICNQAQNPKSTYDSLLCITTISFDVSVDDILTSLSNGLKLILADDVQIKTLPELIKLIDENKPEALEITPSRIGSYLELEEFCNVISCLKCIFLGGEQFSAKVYEDLRKYSDAVVYNSYGPTETTITSNNKAVTDVNDLTVGPPLKNYVTDVRDIDGKLVPNGVMGELYIGGMSVGKGYYNMPEKTEKVFLTINGIPYYRSGDYAIQLPNGEIDIKGRIDNQIKLRGLRIEIGEIESNIGKYQDIRQAVVVIKEINNVDHLCAYYTANCEIDSDDLKEFLKDRLTNYMIPTVFVQLDEMPQTPNGKTDIKRLPQPKVELNYVAPKTRLEHEICAIFSSILNIETVGVEDNFFEIGGTSLIASKLIIELLKQGYSVRYDDIFRNKTPRALAKLLSGEDIGEEDLDLTDDIIKNYNYGEINELLQENTWENFFDGENLELGNVLLTGATGFLGIHILYEFIKSEEGKIYCMLRKGKFDSCQERLIDVMNDYFDEDFTDLVGSRIIPIEGDITEIDDFKQLEDEPIDTVINSAALVKHYTADDYIFRVNVDGVINGLKFAQTRNNIKYVQISTISVLSSYSLNEEAYPNQEYDERTLYYEQDLENKYVCSKFLAERAVLQAATKGLPVKIIRVGNLMSRYSDGVFQKNYDTNAFLNNIKTIKKLGAMNPAMASEKVDMSQIDYVAKGILALSKTPEKSRVFHCMNNHYISHRDIVDALNTYGYGIEEVDFEEFKQIYEQNMNENIQGIITADFSIDDFDEEDDFEENVEIEQTVDILHSLGFDWPEADEEYLKRLFDYLNKFDYFE

SEQ ID NO: 4786 - protein, 539 aa, Methanobrevibacter ruminantium
MALNIASVVDASFVSTFIGHNAQAALQVLEPLVLLITIFEWLFGLGGQILALNKKAEFDEGGSNHYFTTAMLATIVLSVLILLVCFLFKDSLINLLHPTAGALPYVNAYSPYLFISFPIATILGVLCQFIRVDGQPNFASGVIIVANIINIILDYLFLGVFHMGIEGASLAMMIGYAVGLLCTLKYHFDSKRTFRFVFSELKFGTWIRSTIEIIKIGLPGASMGFFNVLLIYIMNLIVGGVLGELGLDIFNVCVVALLLISILIMGFAETLSSIVPIYYAQNDFYNLHHIVRNSIIITLVCSVIFTAFLLIYPDGLLMFFKLHQTANDGLVENAIRIYSLAFIPMAFSTMLLFYYEGIERTVESGIITVISEFLGPLFFTYLLYPFIGITSVWLSFPLGFILSIVAVSIYVKVVERKDSEYSGLFFIRRGLIEKTRNYTLESKNDAVKSEMFNHLKSLNVDDSSIETLDKIIGTIFDSNNEKVHVEILLIDYGDKIVINMKDEGNREVMKDIEKSFSQDKIKVSEVLGFNNVEYLIDGA

SEQ ID NO: 4787 - protein, 249 aa, Methanobrevibacter ruminantium
MPERYKGFGYWDIATRQMGIVSKSQQTRFKDAKVAVIGCGGIGGETILMLARMGIGELIIVDKDEFDLSNLNRQAMSSIDTLGLSKADVSKEKVRLTNPYTKVTAINEFINEDNVEYFKDCDVILDALDNLYTRVILTRFARENGIPYVHGAIHGTKGQVTVFTKDTKSYEEMFSLPSLGKELGEETKEEISKLTKGVPPVIGPTPNIVGCLEAFEAYKLITGIGEVTYAPKILNFDLLNLESFSVLEL

SEQ ID NO: 4788 - protein, 389 aa, Methanobrevibacter ruminantium
MKYRTLGKTGEKVSILGFGAMRLPHFETNDQIDVKTSDEILSYGIDNGINIIDTAYSYHANNLSGKGKCEEYIGNFLNEHSYRDEVLLTAKMPSWLIETKEDMEKIFESQMKDLQTDCIDLYMLHSLNEDYWKMYREIGAFEFMDSLLESGKVKHIGFSAHTEMDWIVDIVDDYDKFEFGLTQLNYLDERYQSGREGVEYIHKMGLGTMIMEPLRGGRLIQNIPQDIMDLWDTAEEKRTPLEWAFQYLWNMEEVDTVLSGMNSIQQVKENIEIANKSEINSISKNDLNLIKEVAWEYKQRKGNDCTGCQYCMPCPHGVDVAGCFREYNIAKMLNNPAGSAMHYFSLESDTRADKCIHCDDCLYHCPQMIHISEDLKKVDEFFGRKYDYF

SEQ ID NO: 4789 - protein, 498 aa, Methanobrevibacter ruminantium; identical to SEQ ID NO: 4553

SEQ ID NO: 4790 - protein, 81 aa, Methanobrevibacter ruminantium
MKRTINERWELWYNRILPYIIIFDFILITVSLILNVSEPTMAHIEHFDLLVCIILLGEFFYFLYKAPSKKKFLLDRDIFCF

SEQ ID NO: 4791 - protein, 89 aa, Methanobrevibacter ruminantium
MPVNFPGTILGYLRMLRLIRVISFARMGSFEDFFKKTEFHKIIIAIAIIIMTFTALFYVFGTSYNPFDYFYFVIVALTTVGFIDKPLKK

SEQ ID NO: 4792 - protein, 110 aa, Methanobrevibacter ruminantium
MNNIAYLLLAILFETSATSLLKVAEGFTKPLPTIASIILYILSFYSLSNCLKTAPIGVAYAIWSALGIVLVTIVGIIAFKQTPDWAAILGLLLIIIGVGVLNLFSKMSLH

SEQ ID NO: 4793 - protein, 128 aa, Methanobrevibacter ruminantium
MTIKRKFDKLPPYCQFEKNLNLIKNKWTVYILRDMILGKKYFSDFKEDKPELSNKILTQRLKELEENNIIEKNIKDNETSYHLTEKGHRLQNILYELAIFNLEEEYHGEELEKIKKEFEQLKYGGNQK

SEQ ID NO: 4794 - protein, 266 aa, Methanobrevibacter ruminantium
MKEKIFINGRGGCGKSTFISLIAKELSKNNKVLIIDMDEGNLGLNKMLNVDVADTSLMEYYGGRDKIMGEILKVGIKGMVLEKINLKDDAASDSIDILDNMKLSDLPSDYVTWNGNIGFIESGKINDPDEGCACPMGNLTRDFLNHIELQDNEVILVDTSAGIEHIGRGVIESADKLISIVDPSSDAILLANKIGSLSKEASKEYMVILNKIDENTKDLVLEQLDDDISVVGELEYNSHIAQSNLSQKEINLEEVEGEIKEICAKI

SEQ ID NO: 4795 - protein, 275 aa, Methanobrevibacter ruminantium
MDLLFYVVLLLIGGCFAGFMAGLLGIGGGIVITPIQYYLLTSIGCDPKTSLTVTFATGLAVICVTMINSTRKHKQNNLIVKQHLKPMMVFGFVGAILGAVISQYIDVEVLKILFGVICIVSTVFLVLIKSPTSLDNIKTDAGLFYSIAFACGLASGLIGPAGGAFIIPIFVAYLRYPITNTIGTTSALSIATTLAGVICYIVLGWGVQGLPDFSLGYVNLLQFVFLTITSIIVSGYAANLSKKINPTKLKALQVIVISYIGLQMMGVFDIILSII

SEQ ID NO: 4796 - protein, 72 aa, Methanobrevibacter ruminantium
MYKVWKNCIGCGECAKACDFNLIQTFDDYILMDIEKCRHCSKCVETCQNNVFTKSVIFKHFLYLLYYKIKKS

SEQ ID NO: 4797 - protein, 135 aa, Methanobrevibacter ruminantium
MKIAIRYYSKTGNTEKLAEAIGEAIGVAPKTIDEPLNEDVDILFLGNSVYNAGADSKVKEFLKNIDVNVGSIVNVSSAALIESTYKQIKKEAEKCGLNMDDREFHCRGQFKFVHRGHPNEEDINEAVNFAKSIVR

SEQ ID NO: 4798 - protein, 181 aa, Methanobrevibacter ruminantium
MAKYIVINGSTRKGNSYAIANFIKEKIDGDVEIFNIKDKEIGFCQADNACKAKDECIVQDDAYDLINDLEECDGAFIITPIFFGRLPGMVDALIDRFYSKFNPAKEMKAPDESKKIGIVFSYGGGEADYTPVAEHVAFEFGVLRFGAHKNVMCSENNDPKGFESKDDQQSQINELISWVCE

SEQ ID NO: 4799 - protein, 233 aa, Methanobrevibacter ruminantium
MSESDEIIKRLDRIENELITIKENNYNQNLQTAIESIRDTYSNSIKKNFADNLGEKCSEFYLPNCKNEECKQFIVQEFKELFLNTQETDLNKLNEQLDEKFYSVCGVECSPCYNNFKEYFFEELKMINSINVSYELNENEPIEKLDVDMLISDVFEPLSSKQRVIIIESLYVENKSYTQLSHLTKLRGGNLLFHLEKLQDAGLISQKQDRGEYLLTKKGYTTLSLINQFQKLM

SEQ ID NO: 4800 - protein, 631 aa, Methanobrevibacter ruminantium
MEIIDLFGAALTGVKEQNVDLLFKSGLYMLMYTVISMIAVYVISFLTTRVASKSAYTVREKIFHILMNLPREEIDKFKISGLVTRSTRGMSSEQGFIVMILEQLMLIPVTFVAIVYEIALIDGTYALFFLGFIGVLSAIIIFRMKQIVEIFFRAKKTYGKLNLLFLSKINDIAGRIPFNKQEYEVEFEKACENSYDKNVIYIKSQCYLGPILMWGLYVIVLVTLAMVNSGYTIGFETDSVIDSFIILVYVAYFITTLANIPALIDRWPRAYATSVRLEEVLNIEDKIIKSNTNDNLKEIEIVEEDIAQEAKGIWDERKGISEKFTALLKEDKAKVRISMILLTISTLCMVYAPKVAGKTVDLLASNWNSTNDPAIYISLALLLVLYSVGYLFKLPPKRIMGATGEKVAYDLRVKLFDKLDAVGSDFIQENSKGLVLSRLNNDVMNIREFVSSKFTEIYAQILFIVFVIVLIVMTDFRLSLIYLVILPVYAVCFYVCDVKSKNYYDGHQMQLGRLMSYFERGLSNRDSFHEKGFKKMNQTVIDYYVKSKNVTNFMVPVTTLLTNISKITVYIAGIYFLAGNEIQIGTLLAVIMYGQLLTDPIKKLSSSMATIETSFSSIKRIFAIIDYKNDK

SEQ ID NO: 4801 - protein, 347 aa, Methanobrevibacter ruminantium
MPEFKLIEKLLYKSEQNDIEAEFIIGNETLWSSQKVIAEIFGTTSANISMHFSNIIQEGELDEKEVSISSKDLFKDNPNFIKKSLKKSNNRGRPQKWYNLDAIISIGYRINSKEATQFRRWANKILKEYMIKGFVIDKELLKKGGRFTEDYFDELLETIREIRASERRFNQKITDIYATSFDYNKDADITKEFFATVQNKLIFAISNHTAAELIETRSDIENPHMGLTTWKKAPNGKILQSDVVISKNYLNQNELSRLNSLVEGFLNLAESRAEDRIPMGMKDWKELLDDYLKLRRLPILVGKGKISAEEAREHVLEKYEKFRVVQDENFISDFDQMILDIKRLEGK

SEQ ID NO: 4802 - protein, 44 aa, Methanobrevibacter ruminantium
MKLVKRNQKLHDPDSPLLIGDVKDGDVVNEVNEPSYIDLQTKLF

SEQ ID NO: 4803 - protein, 110 aa, Methanobrevibacter ruminantium; identical to SEQ ID NO: 4792

SEQ ID NO: 4804 - protein, 128 aa, Methanobrevibacter ruminantium; identical to SEQ ID NO: 4793

SEQ ID NO: 4805 - protein, 266 aa, Methanobrevibacter ruminantium
MKEKIFINGRGGCGKSTFISLIAKELSKNNKVLIIDMDEGNLGLNKMLNVDVADTSLMEYYGGRDKIMGEILKVGIKGMVLEKINLKDGAASDSIDILDNMKLSDLPSDYVTWNGNIGFIESGKINDPDEGCACPMGNLTRDFLNHIELQDNEVILVDTSAGIEHIGRGVIESADKLISIVDPSSDAILLANKIGSLSKEASKEYMVILNKIDENTKDLVLEQLDDDISVVGELEYNSHIAQSNLSQKEINLEEVEGEIKEICAKI

SEQ ID NO: 4806 - protein, 275 aa, Methanobrevibacter ruminantium; identical to SEQ ID NO: 4795

SEQ ID NO: 4807 - protein, 72 aa, Methanobrevibacter ruminantium; identical to SEQ ID NO: 4796

SEQ ID NO: 4808 - protein, 38 aa, Methanobrevibacter ruminantium
MKLVKKNQKLHNPNSPLLIGEVKESDDVKEVNEPSYIY

SEQ ID NO: 4809 - protein, 267 aa, Methanobrevibacter ruminantium
MEIFKVVCELIIPILIFGVLFAVGKFIHVRLLNSKSRILNPGEYFPDEELETLKQVYYLVMMLIFFAFILYIMIVQANEVFAIAVLQILVSVYVALTLDYSYLKNKILFFLLVPFEAIIFLVFNDFLMIWPIYLMHILVYAYFIKVYFDKFRKYTETNGLGITIILLFAIVFISFIITLFVEGVEPLNSAVMVSNAFTSNGYAILGNSGIGKLTSLVLVWSGYIISGVGTATLTAAIMMRHNQKREKELNKRLDELESLIKNSNNKE

SEQ ID NO: 4810 - protein, 654 aa, Methanobrevibacter ruminantium
MEIIKGKEIPKKSLKRSLIVFIGNMIGIYLISILGLGVEISQTGDIFLLVLFLGIVNAILWPILTRIAMPFLVLTFGIGSLILNGLLLQLLAPSFGIEIKGAAMILAPLGMAAVTTVLSSLITINDDSSYYRSVLNDAKKNAKNEVKDYPGVIIVEIDGLAYNVLCEAVEKGDMPTLKKMIESEDYNLRMWETDLSSQTGASQAGILHGNNEGIVAFRWIEKSNGNQMMQCSGISNVPELEKRISDGNGLLVENGASRSNLFSGDTDNVIFTFSKIMDFGKLYNKAWYSVFSNPSNFARIVSLFLADIVREIWSQITHSIKNIRPRINRGIAYIPTRAATNVFMREINTSTLIGDMMVGDVDVAYSTYLGYDEIAHHSGVRDSDAWIALRQMDQQIKHLTDANKYSPRDYQFVIQSDHGQTNGATFTQRYGQTFEDFVKSLLPEDMTMFAKMTSNDDHFVGDYTPFARKDKKIEKEKEEAKELSDSEVIVLASGNLAMIYLTQWTNRLSYEELNSYFPELIPGLINNEYVGFILVKSQEHGDLAIGKNGTYYLDRDEIDGENPLLGFGDNIVKHLKRTSSFEHTPDILVNSFYDEEADEVCAFEELVGSHGGAGGDQSKPFILYPSSWNVSDDEIIGAENIYKLLKENLAELKK

SEQ ID NO: 4811 - protein, 275 aa, Methanobrevibacter ruminantium
MEIMEIIKDSFLFPSKNLGTFSIYVVLSVLVATFTFGGIFSYLLGFIGSEYILIGGLTLVFAMLIGWVMSGYEISIIKSGIDLDDEVPEFKWWDNFITGFLNFIVAIVYFIIPAFIVGVVGYLININDKLMAVAQEISSLYPNIFLTSSPDIAFEALSQAIIELIVPLAILIIVALIVFVIFLFLQSMAEARLANTGSLSEALNIFEAAKDIKRIGVRKVIIVILLVFVIIGVIGMVTSVIFNYVPTLSILSIIISPYLVFFAQRATGLLYSDIA

SEQ ID NO: 4812 - protein, 153 aa, Methanobrevibacter ruminantium
MEPNKVSGILSIILGLIFIIFPLVSSGLVSIMIGVSLLFLGIASILTEFSALNIIIGILAIIFGLLFIFNIDALSFLLGFQFYIIGILMILIGVAGIFAGEGVSKIASILIIILGVIALGLGGFSLTQPIFAAVLIGVALITQGVRLYVAPKN

SEQ ID NO: 4813 - protein, 506 aa, Methanobrevibacter ruminantium
MNETIKENSWVPLIVVALASFIVALDATFMNVSISQVVVDLNTDVSTIQSIMSFYTLITAAFMLLSAKLQDIVDKKKLFLIGTALYGVGTFTASISSSAGMLFVGWAAIEGVAGALMMPATVSIISGTYSGEKRTVALAIVGVMGAVAAAVGPLFGGVMTTFLSWRYGFAVELIIVFVILIFRNSIPHFEPTESRSDLDISGAIISFIGLVLLVLGILSLSKDFTTSIGIIVVGLIALVAFAYFEIRRKRNGKVPLLDMELFKDRNLRVGTIILLLSYLAMGGGLFAVSLFLQSVLQLNAFNTGVTTLPLTLGLLIFAVLAPSLTEKLSHKKIMAIGCIMAIIGCLMLSYQFRLDTTLWTLLPGLLVLGAGLGFIMALCTDISLSNIPAESQNNASGVNSTGTSLGESMGTAVIGIILILGVMGGISTAVDTYAPDHSGDEQFQLEVANYFQKVATIDDLKQDSTLVDVANIIIQNTMAFVMQVTALIMGVVFLLTLRLKDNKIKQ

SEQ ID NO: 4814 - protein, 416 aa, Methanobrevibacter ruminantium
MSNVKDMSLADEGIRKIKWVQKHMPVLEHIKKQFEEEKPFEGITIGSCLHLEPKTVNLGLTLQAGGAEVAMTGCNPLSTHDDAAAGAAALGLHIYGWREQTDEEYYEAIDNVLSHKPDVIIDDGADMIMYLHEKRPELLENIKGACEETTTGVHRLEAMHADGALKFPVIAVNDAYTKYLFDNRYGTGQSSLDAIMGTTNMLIAGKNVVVCGYGWCGRGVASRAAGLGANVIVTEVDPIRALEARMDGYRVMKIREAVKIADLVVTVTGNIDIIHGDDFKYMKDGCMLSNSGHFNVEINRGDLEAQSVSCEEVRESIEMFTMKDGRKIYLLADGRLVNLAAARGQGHPAEIMDMSFAVQALSAKYIVENDLSLGVEKAPDSIDDEVARLKLKAMGIEIDDLSERQKDYLADWREGT

SEQ ID NO: 4815 - protein, 221 aa, Methanobrevibacter ruminantium
MSYFRYIDNGEGPTKLFIGGVHGDEGKHVLPLIKLLKREDFSSGQIYIYNFDRTPYISTIHREFYQSEQGKKILDLVDYYKPDFYTELHSYNIKHFDRLTSLDRLDSEGIPPLIDCGQYVLCSSVSPLIRRKHFTKEAICQTLEFPIFRGEDLKLSDDELLEKYDFDYDLSVKEYMAFLRLITLSKNRDDFEKRVLKDYKKQADLALKYVKIIYGLNFPRY

SEQ ID NO: 4816 - protein, 328 aa, Methanobrevibacter ruminantium
MGVKFKDIVTAEEINLKDLEGRTVAIDAYNTLYQFLSGIRQRDGSPLMDANGNVTSHLSGILYRTASIVDKGIKPVYVFDGDVSEYKTKTVEKRRALREEANQKYEEAKAAGNIEEARKYAIRSSRLSPYIIESSKKLLEYMGIPYVQAKGEGEAQGAYMVKNGDAWAVASQDYDCLLFGAPRIIRNLTLSGGLSNLEYLELDKVLTEIDLSREQLVDVALMVGTDFNEGIYGIGAKTGLKLIRQNSLEDILVQKGITDVEVEPDELREIFLSHDVNTDYKIKFKSADKEKLCEFMCEEHGFSETRVLNVADKLKKLSSTQKSLEDWF

SEQ ID NO: 4817 - protein, 187 aa, Methanobrevibacter ruminantium
MATTDNDINVRLIEKINQVEEKYNQNFSNTQKILMTTDGSITAILDVLYGKIALKTLEQHFEEATAESAKLVNVDVGDEVNFREIIMHKDEQPLIYAKSYIPLKRLSKEIKEDLVRADIPIGRILKKYHIESRREINIIDMEKANDKLIEIYNTDEDFLARDYTIIKDGEILMWIKEYFPISYFTEI

SEQ ID NO: 4818 - protein, 417 aa, Methanobrevibacter ruminantium
MNITEKILSQKAGHEVEPGEIIEIGVDLAMSHDGTSPPAIKTFEKITDKVWDNEKIVIVFDHNIPANTIGSAEFQKVARNFIKTQGIKSHYIHGEGICHQVLPEKGHVEPGMVIVGADSHTCTYGAFGAFSTGMGATDLAMVYATGKTWFMVPEALKIEVEGSLRPGITSKDLILNIIGEIGIAGATYNTAEFCGETIDNLDVESRMTMTNMAIEMGAKNGIMEPNKATIEYVCNRTGKSKDQLNIIKSDKDSNYLKEYLFNVDDMEAQIACPNDVDNVNPLSKVEGTHIDQGFIGSCTNGRLNDLAQAAAVLEGKQVHDDVRLIIIPASKEIYQKAMDLGYIKTFLDAGAIVSNPGCGPCLGGHMGVLSEGETSISSTNRNFKGRMGDPNSSVYLANAGVVAASAVSGFIQNPDSL

SEQ ID NO: 4819 - protein, 392 aa, Methanobrevibacter ruminantium
MQYYISPFNKEEEYKFPKNITIYDTTLRDGEQTPGVCFSKEDKLEIARKLDQFRIHQIEAGFPIVSSREADAVKAIANEGLDAQIICLARTKRADIDKALDCDVDGIITFMGTSDIHLEHKMHIKRQEALNICMKSIEYAKDHGLFVAFSAEDATRTDLDFLKRTYSKAESYGADRVHIADTVGAITPQGITFLIKELRKVTNVDIAMHCHNDFGLAVINSIYGLLAGGSAVSTTVNGIGERAGNASLEELVMSLKILYGKDLGFKTKYIQELSELVAEKTKLGIPYNKPVVGKNVFRHESGIHVDAVIEEPLTYEPYLPELVGQKRQLVLGKHSGCRAVKAKLDECGFKVTNDQLCQIVKKVKESREEGKYIDDNVFKDIVRSIDANYVDL

SEQ ID NO: 4820 - protein, 181 aa, Methanobrevibacter ruminantium
MIEVEVKAKINNFEDIKVKLNEINAIKTKTEKQIDRYFNSPVNDFAKTDEALRIRETKTEKSHNLFITYKGPKIDSKSKTREEVEMKIEDSDKCAKIFENLGFIEVRTVKKNREYFKLENFEISLDDVEGLDPYMEIEIALEDGSDYNEAQDKIFDLFEQLGITDGFERTSYLELLEEQDK

SEQ ID NO: 4821 - protein, 181 aa, Methanobrevibacter ruminantium
MTDVDIKIENIVASASIGKDIVLTEVAKALEGVDFNREQFPGLVFKLQDPKTAALIFSSGKLVCTGAKSIDDSKLAIKKTVDLMRTIDTEIPHEFDIKIQNIVASANLQSTLNLEAVALELENTEYEPEQFPGLVYRLSDPKVVLLLFGSGKVVCTGAKTKQDARLGVENAKARLSELDLI

SEQ ID NO: 4822 - protein, 687 aa, Methanobrevibacter ruminantium
MIKLVVFDLDNVIIDGEGIDEIGKLVNIEDQIAKITEQAMQGEIDFETSIKKRVGLLKGASTDDIKTLANEMPLMEGAEETVSSLKENGFDVAIISGSFDIIADIIKEKLNVDNVFTNSLVEEDGILTGEVTGPLVSGSKVDVLSKFIEDKGYSLEECVAVGDGANDISMIESAGYGIAFNAKPALKENADIIVETRNLTDVRDVIINLNSENTEEGADVDKEVEIETEVVESTDVVVENQEEQVADATEEVVEVEEAEEAVEEAVETEEEAVEEETVEAEEEAVEEEAEEAVEAEEEAEEIEEAAEEEAEEATEEEAIEEAEEEADEEVVEEAEEEVAEEEAEEIEEAVEEEAEEEVAEEAADEEVVEEAAEEEAEEATEEEAAEEEAKEEKPKKSKKSKNTLPEPDFELADTIEGVRAQKDEREAKIAQVADEREAFNREAKEQRKIRDELNTELKLNLAKAIEFRDQRNEINREVEENKRARNKVNEEIKNLEWSSGKKDRIRIENEIKKIDKIIETRVLDIKKENQLVKTANDLRKQLAEITEDNKVKEEAEKLKKQSEEYHAKVVELSEQAQEAHEQMLSYFRKTDEIRTAADEAHKLFIQARKNASAKHEEFKVILSEIHVINKRLGSNRARRRKSEKTSNAPGKRNREEKEKAEAIFDKFKNGKKLSTEELLLLQKYDIN

SEQ ID NO: 4823 - protein, 81 aa, Methanobrevibacter ruminantium
MDDIMDLENKKDDKNQNKEEIIESSEKEVKMEICYTCGKEFDMNSDEGAHYHYGEYPMCGYCTNFFGFYKEDMMGGKAKKE

SEQ ID NO: 4824 - protein, 741 aa, Methanobrevibacter ruminantium
MHEVIISEKPKSAEKIAKALSPNAQKKKYNRKINYWEFEENGKKTTVLSAVGHLYSLTSASSRDRLGFDLTWVPAYEVEKQKYTRDYINAIKKLSKGADKFVHACDYDVEGTLIGYNALKYACGNNAEAKASRMKFSTLTKKDIVEAYNTMRDIDIRQVDHGIARHMLDYYYGMNISSALMKAVRASSSRFISLSAGRVQTPTLSILVDREKEIQSFVPEPYWMIKAKSDYDIIADHVEGKIFDEERAKKIYADCQGADADVTSVKVTESIRKPPIPFNLGGLQSEAHTVFGFSPKRTQVAAQNLYVGGYTSYPRTSSQKLPESLDFKNIFAGLAKDPEFKKHIFDLPAKLKPNEGKKTDAAHPAIHPTGVLPSNLSADEAKIYSLIVYRFISVFSENSKLETMKVNLKVADEKFTFSRKRVSYEGWLKHYPFKKQENDAFPPINKGDQLKIHKILVEEKETKPPARYNEASLIKELEKRELGTKATRADIVAKLYDRKYIEGKKIEVKPLGINIIDTLNEYCKDLTSEELTREFERELEGIDTDKYTKEQILENGEKEVKTILAEINQNKKQIGEKLYGAYQETNVVGECSCGGKLIKRYSPRTKNTFVGCSNFPKCKVTYSLPKGANMLKKTCPTCGLPMISIKKASGKGRDHVCLDSNCGKDVSRRQAPEVVGKCPECGKDLLKRSGRYGEFVGCSGFPRCRFTCSVDELNNLGKDKNKEDVKENKGVSKKIVRSEAK

SEQ ID NO: 4825 - protein, 900 aa, Methanobrevibacter ruminantium
MEKQQVKTILKSVVIIAILLIIVFGLRAQSVDIGGVPNELKSHYVDENGLPYFSEMDSYFNYRMTENYMDHGYFGDTKVNGTGWDMHSYFPSGRAVGDYQPMIAYVTSFLYGIINMFQEMSLLEVAFWTGAIVSSLAVIPTYIFTRRITNDYGAIAASLIVVLGPNYISHTFAGFFDTDMFNITLPLFFILFFVEALKTDKLSYRIIFSLLAVASIALYSLSWTGYMFYVAVMVLVMIVFFVLCFYFNIEILEPFKNYGNKLEWLINQKELFATLIVLVVGLIGLLLAVGVGGIIEGITGLTGGFTLQAGAADVWPNVLISVAEMQIPNLVTGGLVGSFLANTGGVVNGVGGIVCLFGVLIVLYTFVQRLFRLNSVKVKGDTAKPHKSKRKATSVRTEQKRFSVSLKDIGSFGSTDEINKSKRHTVLYLSLFFVWIVSSAIAVTQGTRFIQVLVVPMGICAGIFVGYAVDYVKNNVDNDKVLLLIAVIASILIALPITQIAYGLDNAMTIGLVVLVILLAISAIVIYAKKSIKDSDVSIKKALVVVLITLALVSPTVCGAFQTTAATVPGSSDPMWFAMDYVKENSTNDTVIISWWDFGYLFQVASDHPTSFDGGSQTGDRAYWVGKSLTTSDYAQSKGILQMLATTGSNASMLLSEYTGSNVTAVHALDETLGKSRSEAQKILTSKYNLTNDQAKAVVKQSHPSNPNNVSFVLSSDMIGKAGWWSYFGSWNFDTLNSTNYQYYMANDYVPIKQNTQGNITILNESGIIYQAVVNRGKNGTNETTAQMETIWDNNRSKIDLNGTEYNPLKASNLICIENSYLTVNKTLNKDGNYTLYLLGSGDDYTAILMDNNLKDSVFTRLFLLGGIGQDTFELSNMQDGVSVWTLRDGSSNSDDAGSQ

SEQ ID NO: 4826 - protein, 364 aa, Methanobrevibacter ruminantium
MTIEEKIKAIEEEIQKTPYNKATSHHIGKLKAKISKLKEEQIKRSSGGTKGEGFHIKKSGDATAVLVGFPSVGKSTLLNEITNAESKVGAYQFTTLEIIPGVMEYNNAQIQIFDIPGIITGAAGGKGRGKEILSVARTADLIIVVLDVLNPQHINVILKELRNVGVRPNETKPDVRIKKTRKGGVNVSSTVPLTYLDEKTIRSIINEYGIHNADVLFRDDVTIDQFIDVIEANKSYVPMMVLLNKVDLVDEHYLNEIKKELPPFIPISADKQLNIEALKEEIFNNLNLIRVYLKPQGRKADMEDPLVVKKGSTVIDVCGKLHREFVKNFRHAKIWGTSVKFPGQKVGPDHVVEDEDILRIILKK

SEQ ID NO: 4827 - protein, 200 aa, Methanobrevibacter ruminantium
MSISDKIEENKVIFISGTPCTGKTTIATKLNDFLTNNGFNSYFIKINDFAIENDLVLGKDPDKLYTVIDIGRLDEVLNKEINNFLDENSSDDSKIVVVEGHLSHLCNGADKMIILRLNPEKLLKRLEERKYSENKIHENLEAEALAVCSAEAYDLYDDKASEIDTTNKSVDETLELVLKIITGELESPVGSVDFMDWFLL

SEQ ID NO: 4828 - protein, 123 aa, Methanobrevibacter ruminantium
MARGKRPKWMIDIAQERMDILFNRAEKEYKKNPERSHRYIELARNISKKYNTKIPQPWNRRYCKKCYKFLVPGHNCAVRLINNEINIYCGECGHVMKIPYIREKKLKRRAKIDSYTFKKRDYE

SEQ ID NO: 4829 - protein, 71 aa, Methanobrevibacter ruminantium
MTINIGKAGVNDNVIEEIKRQLKSNPIIKLRFAKNVARNKDDLINSIVEGTKSQLIDVRGNVAVIYKKQSH

SEQ ID NO: 4830 - protein, 146 aa, Methanobrevibacter ruminantium
MTTVFDVPAELLINTVADEFKDNNDKIVAPEWTKLVKTGVHKERKPENIDWWYVRCASILRRVYIDGPVGVRSLRTFYGGKKDRGVNPEKFRKGSGSIVRVALHQLEDAGYVEKVDAGRIITPQGRSFLDNTSAELIKDIPELSKY

SEQ ID NO: 4831 - protein, 123 aa, Methanobrevibacter ruminantium
MSELDELRKKRMAELQRQAAMNADPQMAQQQMAQQQMAQQQLAQQQEMEAQLKQAMRQILTPEARGRLDNLRLTKPELVQNIEIQLLQSAQAGSLRGKVTDEQLKVLLKNLMGQKREIHITRR

SEQ ID NO: 4832 - protein, 193 aa, Methanobrevibacter ruminantium
MKACVLYSGGKDSSLMGYILNQLGFDVELVTANFGVYDSYIPASKSAESIGLKHRVLNLDISILEKAVDMILEDGFPNEGIKYLHEAVVEEVANHYDLVADGTRRDDKTPKLNRNQIRSLEDRKDVQYMNLDSFGYKTIKYLVGNLFELKHEKSNKDTSSDYEVEIRLLIDQKGGNSSEIFPEHYQTNVVGLK

SEQ ID NO: 4833 - protein, 51 aa, Methanobrevibacter ruminantium
MSRNKPLAKKLRMAKANKQNRRIPIWAYGKTQRKLRYRPKPRHWRRNDLKV

SEQ ID NO: 4834 - protein, 86 aa, Methanobrevibacter ruminantium
MAEELERTYVIPLRKVKNVKRTIRAPRAIREVQNFLMKHMKAEEVKIDASINEFIWERGIQKIPSKVKVIAVKDEEGIVRATLAEN

SEQ ID NO: 4835 - protein, 225 aa, Methanobrevibacter ruminantium
MLKRINLTGNPNLGVYISVNDEIAIVPFNVPVEMESVIKETLEVDIIKTSIAGSNLNGVLATGNSNGFLVSPFTYDREIELLESAGINVAKLPGKYTAIGNIIAVNDYGALAGPNIGEETIKVIEDTLKVPVKIYPFADTKIVGSASIVTNKGALLHRDTISEEIDFIEDFFKVEANIGTVCKGMPLVGACGIANSQGVMVGESTTGPEMARIEESLGFLDFGNF

SEQ ID NO: 4836 - protein, 74 aa, Methanobrevibacter ruminantium
MITKNYRVKGSFVMGSETQVFTKELRAIKEEDIYEKLYSIFGSKHRIKRNQIKIDSIEEISDDEVEDPIVQAIL

SEQ ID NO: 4837 - protein, 145 aa, Methanobrevibacter ruminantium
MEDQQKLQQILSQLEVYKQQSELYKTQIDAVQASLAEIKILESTLDDISGKDTIETLVPLGAGSFINAEIKNEDKVIMSLGSGVAVSKTFAEAKETTAAQKKELEETLDKLFADLQQITDIVAQLSPQAEQLMAKAQAQMGQPLY

SEQ ID NO: 4838 - protein, 576 aa, Methanobrevibacter ruminantium
MAGINLFSSLKKKFADASSKLRNKVEEEAKDEDNIELIEESKDEFDDIDEDLIEYIDEEDEDDDWDFDDIDKEDKSKEEPKEESKEESKEESKEESVEETVDEAIEEVEDVSADEDSDEEVKDSDEEKKDSEEKDSKDKKEKSGFFSFLKRGKKEDKKEDEEEIEDSKEEEVPEEEVKEASDEEVPEEETSEEESEEEVPEEEIEESEAEPVEETVEEEAEESEAEPVEEAVEEEAEETEEAKEETSEEDEEEKPKKKRSLFRRGKKDKEKDSEEEFDAEEAKGKGGFLSFIREKTISEDDVEDILFELELGLLESDVAMDVSSVVVDSVKNDLVGQKIKRSSDIEEYTYEALKKAVYNIINIEGKSMTELLEEKVAQGEPLVVMLVGINGTGKTTTIGKLANFYIKKGYTPVIAASDTFRAGAIEQVAYHADKLGVKLIKHEKGSDPAAVAFDAVQHAKAKGKELVLIDTAGRMQTNTNLMDEMKKIRRVSKPDLVVFVGDALTGNDATEQARKFNEAIDIDGVILTKADADSKGGAALSVGYIIQKPILFLGMGQSYDDIKEYDPDWMLEQIFS

SEQ ID NO: 4839 - protein, 564 aa, Methanobrevibacter ruminantium
MNLDSNVKTGLIVAISIIFLFVLSLFITSAPTGVDNSARFGILTLLPPLIAIALAFITKETILSLFVGVFVGEFMVSVSDLNIISSAVNAFLAMGGQIISCMADPWNAGIVLQCLLIGGVIQLITKMGGAKALADALAKRADTPRKAQLITEFLGLCVFFDDYANSLIVGPIMRPVMDKLKVSREKLAFVVDATAAPVAGIAIISTWIGLEISLITQGFESIGMNVSGFGIFLQTIPFRFYNILILIFIVISAVTLYEFGPMKEAEKRARARKADEPVKSLEATSFDDVKPVEGIKLSVWNAIIPIAVLIIGALIAFYWSGYTTILGGEDQALIHLMKTSPLSFNGIFEALSASDASVALFQAALLASIVAIVMAVLQKILTIEEAISEWIGGMKTIVITGVILLLAWSLGGVIGDIGTADYLVGILKDTIPVFILPTLIFILGALISFATGTSYGTMSILMPLTIPLAWAVNPDMGFVIVCTSGVLTGAIFGDHCSPISDTTILSSMGTSCDHIDHVRTQIYYAIFVASISIIFGYIPAGFGIPWYISIPVAIVVDVSLGLRR

SEQ ID NO: 4840 - protein, 443 aa, Methanobrevibacter ruminantium
MANSNQSEWDSNIAFILAMIGSAVGLGNIWRFPNVLYSHGGGSFMIPYIVSLFLLGISFVLVEYAVGYRFKSSLIKVLYSVKSKLEPVAWFIALIVFLITTYYICVVGWDLIYVVLSFTKAWGSNPDLFFSSIVLQSTDSIEGLLHIVPMVFISVLALWAVAWYIIQKDLNDGIGKVSKLLLPLLLIIVVTIVLFSLTLPGASIGYTQIFTPDWSALTDLNVWLAAFGQIVFSLSLGMSIALTYASYLPEGSKLTDNALIVAFSNSGFEIFNSIGIFSILGFMTLNTGIPFDQLVTEGTGLAFVVFPKVFNIMGPWATIIGPLFFLCILFAGVTSVMALLEVVCYSISEKFNFSRRKSATIVCIIGFIVSVIFTTSAGSMILGIFDAFLNNIALLFAVLLECIIFGWIYNFDNLIETLNNNSNIKVGKVWKNVIKFILPICIC

SEQ ID NO: 4841 - protein, 882 aa, Methanobrevibacter ruminantium
MDDETNNNQWNSSTSFILVMVGSIIALAGIWRFSYLIYENGGGSFLIPYILAIVIMVIPLLVLEFGVGFKYKASLPRIFYNIKSEFEIVAWFILFLIFIVLICYTCIMSWDLIYIVLSLFKGWGNNPSVFFTTTLLHSTSNPYGLTYLVVPIGIGLILIWALIYFISRREINRGISLVTKFSLALTFVLVIILSVFALQLPGSRTGLMALFNPNWEYLLDYNIWLTAFGQLIFSYGLAYGIASTYSSYLPEDSKLIDSAWVIVLISLIFEILMSVLIFALLGHMALGKNMPITSLVSDSFSLIFVVFPNVFNVMGSWATIIGPLFFMVIFIGGLGALFALIEPLANAICEKFIWTKDRAIKTLVLAGLFASFIFATGMGEYFLRIVDGFITQFAIILVVLVEILVFGWLFDLDDIRNVLNNNSRIKLGKYWVYLIKFAIPILLIVIWILGVYNLIITGDRQSLLVQSILASIIVIVPLALTVAPFNGEYSLGSITGGYNYFRDSGDDEEAKSNSKPDLKSRFTSRFTSKDNDVDNGTEGYEEKTYVEKTIDDYEGYDGVVAITDDEEENSSLKSRFSWDKFKKSKNGKNVLNNVDLSAKEFDPPSDDDYDDYETYNSLDDGYSQGSDDFDNSMDDYRSKSKSKSKSKSKSKSKSKSKSESKSLFEKINLFNKDQGENDYLDDNYGYNSNDNYEDDDSSFEDVFDDFDYITPIREEEPKSKPKTKSKPKSKTNSKSKSKAKGGNKKPKFISAEDLDGIESLDDLSSQPNKKPASKKTSASKKKSSSKSKKESGSKSKKASEPKEEPKPKEEEIEYEEFSDDFFDDGVFGEEGYEALLDDYVEPKPKSKKKKASSKSDQSTPRDSKPYYDYEKKGSDSVFNLDD

SEQ ID NO: 4842 - protein, 243 aa, Methanobrevibacter ruminantium
MIKNHLILYFFISYLFLVHFFTYLTISIPIIFYHFHFLSLFVHDFSINLHIYPYFQNIKFIKDKNIPIIIKIGDYMDKKMTVLLVALFCLLCVGSYLIFEPARHISYHEVNLTDTCVAKVPVTDKVSSYTDNLNIHYYSDYENDLNITSFYDVAPESSSQGHLRMDNLKKEVLGTEKGSAGNLTYYKNNNAGTYTMYVEDRMSHNYILLSAKDLTIFTNVYSSLEARIVVNETDIDSLDSSYA

SEQ ID NO: 4843 - protein, 578 aa, Methanobrevibacter ruminantium
MNTAEILVNLLERDGNEFIFGHPGEQILPFYKALKDSSISHILTRHEQAAAHAADAYARVSGEYGICISTAGPGAMNLVMGASTAFKDSVPMLVITGDNDYDKKDSDIFQSFPINSVFENISIKSFHPYDGKSAVYNMIEALILLHKFPKGPVHINLSRDVLLEEIDFDSIDLRDIGLSNIPSLNLNDSDIIENFDLFDDSLDNLYDFSQKLSADVDITIQSAIKKLKDSSKPLVILGNGIVWSKATFKLSDFLSKTMLPVVTTYHSKGIVSDHDRLNLGIVGLRGNSLSNYAYENSDCILVLGAKLSERTIGASDFDIAKEKMIHVNIDENCLKGKINICMDVNEFLDCLLDELDQDNGTFDYDDGWIDEIYSNYEELIVGGIEEVEENFNPLRPPYAINRIIDAFKGAYFLSDAGTHTTWTTLLAKSDSFGKLLFSGGFGPMGYSLPGSIGVAFALKKRGIDERVLVICGDGDIQMVIQELATIREYDLNIDIFIINNSQLGIIRQWEETVYDFDKYQVDLINPDFAKLADAYGVDSMKVESKEDLQLAIEMSLDSNKAFLADVCVCEENIPMPKK

SEQ ID NO: 4844 - protein, 115 aa, Methanobrevibacter ruminantium
MDGLEIINSFNKETIYEFSEAFTIFEDEIYFIFKVDIISINANPSKTKDKNKNKNKENKDNKKAQRIISHLEIEPIAYLLKKAENEDYQIEAIDEKYTEFIGKNKDKLLKEFLNQ

SEQ ID NO: 4845 - protein, 282 aa, Methanobrevibacter ruminantium
MILNLILIILIALIIIFSIILYNGLRIILTVEKEKAEARYKLKITLLKIPIFTKDSSEDKATESEEEKEEDGEEEESKDKKGLMEKYNEIKPILKELIKSKKELKKYLKDILKSIDIKKLEGHLILGLSDSFTTVKIASWIWSIGAIVNSKKPVSLTVDPRFTEIITDFEGQLELKINLLKIIFYSLILVSKKDIRELIKVIYAYKKAKDKENEEKENSNEELYKKEKDTEIKENSKEELYKKEKDTEIKENSKEELDKKEKDTEIKENSKEELDKKEEKET

SEQ ID NO: 4846 - protein, 171 aa, Methanobrevibacter ruminantium
MIDEEPIKTTVEELRKLIHISNYIGDAIETEDKLLIPVSKAAVGFGIGEQKADNSLAGTGAGVSVEPITMVVVSKGNSGVDEIRTINLSKGNQTNKTLNEIGLILTDVLKEFLPSKGNDDYIDVDDVSEVDIQDADIKEKVEDAVEESDLKEKVEEEVEEAEESLGIEIDD

SEQ ID NO: 4847 - protein, 388 aa, Methanobrevibacter ruminantium
MNEILLMLPGPTTADPRVLQAMSKAVVNHRGDEFGEIYTETTKLMSKTFQTKNDSYILTGSGTSAMEAAVSNLVNRGDKILNVVGGKFGERFADISKMHGIESVQLDVEWGTAVTPDLVEEALEKDEDIKAITMVHNETSTGVAAPIKEVGEVMKNHDALFIVDTVSSLGGDYVDVDKYHIDACVTGSQKCLAAPPGLAAITFNDDAWAACEKVEDNNYYLNMPKYRANGNKDPAQTPYTPSVSLIYALKAALEVLHEEGLENRIERHHTAAAASRDAVKALGLELFPDEAVSSATVTAVKMPEGANDDQIRGTMLNKYKVQLAGGQDHLKGNIFRIGHMGVINYQELAITFTALGLTLKGLGLVEDAGAGVAALANHYIKFKLLEKV

SEQ ID NO: 4848 - protein, 366 aa, Methanobrevibacter ruminantium
MSFRTKRVIISTLLVMIYEFFLMKYLFLLFGGLDDIYLLLLTILFGILNMVPMFFEEKKSRPITRLLDTISGFWIWMSLFYLFVILIIYIGGVYIDWPFYIIVILVLLVPLLTVYSYFHAHKIIIHERTIQMDNINEDINIAHLSDVHFGSTRHDKIIRDLSDKLKELSDYCDLAIISGDIVDGSSAIEEDDFLPLKDVNMPIVFTPGNHDSYLDIEDVFGACRNAGIIVLDDEGMEFGNLNIFGMTFIFGMTRKFEEFEVVSTGVLGDFVKEDKVNIIIFHVPKNWEDFSKLGFDIQLSGHTHGGQFHPLTWICDLIWYNRGLFKANIGGKDRYLHVTTGVGSMDYPFRWGTDSEIVVLKLRKND

SEQ ID NO: 4849 - protein, 421 aa, Methanobrevibacter ruminantium
MLKRTVKKNGDELFPLGLGAMRLPTKNNSIDKDLAREFILYAIDNGINYIDTAYAYHGGESESFLGDILSLTDSDGVKYRDKVKLSTKSPSWMVRSREDFDAFLNEQLRRLKTDCIDYYYLHTIDLSILERLKGLGVYEFLEKARSEGKIKNIGFSYHGAPNEFNDLIDDYDWDMVLVQYNYLDVNAQAGIRGIRYAYENDVAVFIMEPLKGGILAGELPKEVDGLFKGVDSNKSSVDWALSWVLNQKEVTCVLSGMGSIEQIKENMNIAERVEVDSLSDDELAVLEKAQGIFNSMMKINCTGCGYCLPCPKGVNIPDCFNIYNEKYLFNKKAFGPIPGAMVNYYMVVGGITNKQSNAGLCNHCGRCKRLCPQSLDIPSHLDSVKSEFEKFGFNYQIKFIRNIAMPSINKISKVFDVFKHS

SEQ ID NO: 4850 - protein, 1435 aa, Methanobrevibacter ruminantium
MYISEIEINQNIILNTEGNKIYLNNSPKSNIHDNWFGNTLLNYDEVPYEGCTNWIFLNGESNQVSLENPISFEITFTLSSFNKNTKKISNYDDRKLPFNLTAHAEHGILNPNSNLLGKTTIYETEIINVERIIGNIANIDSEFEIMEFLVTDGTTFYDLNQLINNNSNNEINISGNYTYHDDIDFEFKEGINVNRSLIINGNGFTINGLNSSRIFNINGDNVTINNISLINGNGYEDTYDSDGGAIYWKGADGTLIQSNFTNNSGYNGGAILWEGDNGRIINNTFKNNSAFDGGGAITITVERGIIINNTFTNNSASYDGGAIYLIASSGEIINNTFTNNSGYKGGGMICYADNLSMINNTMESNIASDDNGGAILWEGEIGRIINNTFKNNYASEEGGAISIRGEIGEIINNTFTNNNASYRGGAISIIITSGEIINNTFTNNSGYSGGGILCYGNNVSIINNTMESNIASYDGGALYVSMDYAMIINNTIKNNNASDNGGAIYWDRYKGIISLNTIANNNANHGGAIYYEGYSSNLNYNIILNNKNSEIYFDNVRTFNGSNNWFGNNASNYNLNPNTSFEYDNSPNVTLSDWLFLNGTANPKIVNAFESSQILFKLYSYDGILISEYDNSLITDTKLNLSAERGRFDKTSASFNEPINYTAIEGGRDTIRGAIDKSGYSINLTNRRVSSKIAMDTKEINYSRNASIKLNYNDFAGGNVTIRLMGENNEYLFENMTLNKTIFLGVINRDSYNVRIEYSGDRSFLEENISESLIVNKAGTKIVPTNDTIDLGIGENSKVNYTFYVIDDEGQYITNPEDIGNISFKSDGSAVEVDSKTGEINTIKEGTANILIRFQGDENHLDSNASVYVISSNKIRTKITAENLTTDYKKDDYIIARLTDLTGKPIANAKLIVELNGTNNYTTNSKGEIKVPTKGLDSNEYIAKIIYEGDESYRFSNASVRLIVNKLNTEITANNITTIYNITKELVIRLKDVNGDPVSGVELTVDLNGMNNYTTDDNGQAIVEIKGLIPNNYTAKITFEGNGNYNKASTESDIEILKIPSILNGTDMTVNYKEDKYLTVSLKDKDNKPIHNASISVELEGIKNYTTNSDGQIKVPTSSLPAKNHTAMIRFEGNEIYEKSNATAKITVNKISGKLTASNVTARYGDNQNLVISLKDSKKNPLSGFKVSVDLNGKKNYTTDSSGQIKVSTKDLVPDTYKAIIVFAGNENYTGSNASASVRINRINTTFKYTNMNTIAFDSNIEGRIGEYFRFQLLDEDGKPLSGKQVFIGFNGVKYNRTTNETGEARLQINLKYVNHYTFAIAFLGDDYYKGSFNVALINVTEQIPVLSTSAKTYKSSAKTKTLTATLKSSRGHVLAGKKISFTLNGKVYTANTNSKGLASVKVSLSKKGTYSFTVQFGGDSTYKKVTKSSKLTIK

SEQ ID NO: 4851 - protein, 463 aa, Methanobrevibacter ruminantium
MKFKKYLFILLIALICIISVSAVAASDANDPISQDNNQGLVLEETNQDLSITKTKEIVESSTNKEISLEDNKVISKENKKTSLKDEETDSFTNLNNLINIDNPNNHTISLNCDYVLLEEDCTYIDTEILSSSNLTTSHILRDEGSLPIDLNPKTYKARLMVENSNDQSIEVIKTTNIEGSSFWLLNQTINNNSNSEITLDSNYTFNSSADSGFINGIYINRSLKLNGNGITINGLDEGRIFIITADNVTITNVNFANGKSDKGGAILWLGKNGNISNCNFTDNMATSGGAIFWGNTNLTDYYSNGQGDDGTIINCNFIGNEAQKGGAMFFHTGGATIKDGCTFHNNTGGQEGGALFWLNYGGRIENNCNFTFNTAKGSGGAIYCPQVEILNNCIFQNNTAQSKIEERIMKGGGAIYLQKGGTVRDCTFIGNIALNDESDGLRFYKGGEPFTLKGMPPFPTAPS

SEQ ID NO: 4852 - protein, 1391 aa, Methanobrevibacter ruminantium
MKLKRYSYIIMIFLVCMISISAISAADDSSIATDDSNKIINDNNNQDIVLEENGPSTNIALEDKNYKIEKPQLKENSPGNFTDLNYLINEDETTRHNTTITLDRDYIGGEKGIRIDRPLIIDGQGHTLNASQNNRVFHITSENVTLKNIIFTGGRSDYGGAIYWQGDNGKIINCNFTYNTATKYGGAVFWGDDEFEGTADQTIAKDGIIINSNFISNKANVGNGEAWENGGGGEGGAVYWYANNGTICNSYFHNNRAGGQGGAITWKGNDGIICNNTNFTANSAGDSGGAVFWRGDNGTISNNCEFNNNIAYGRTSDGISRGGGAIFCHGENGKISNCSFMENSAKPESESGKGGGAIYAEYNTFITDCIFIRNSADYYGGAILIFRTGDVYRNIFINNTALNGNTITLKGIGHSTITNNIILNKTNAIYWNESDYTIEANWFGNNATQYSEPYEYSQTWLFLNATANPNPAPFNIPTEVKFKLWLYNKKTKKITEYDNSLLPTIQLSLSQTKGSINKETAGLDDPINYTANEVGTGSITGKMEWITDSIFFEIVNDPKLEVSVNPSEIDYGDNITLHLGYEDEATGTVNISFKGSTHEKTIENIPLNKTITITESILPDEYTVTVFYSGDNQFSRASKTADEKLKINQKNPNMTVTSYEIYVNDTNGVMFSIKLDKDATGKIILTGDIGREINLTEGSIKDGKRIIEIKNNGFDLGKYNVTFSYPGDEIYWEYETTALSEIKVIETKIIPQKEEIVLIIGDKSKINYTINPSNAVGDVTFTSNDTNVVKVNGSGDIEAIDKGQATITIKFSGSKDYAPSNATVNITIGREMAKLTAENITVTYNAEGYLKVALKDSKNKSISGAILIVDLINKTNYTTDSNGEIKVPTKSLAAGNYTASIEFEGNDKYLPANTTAGVTIEKDNPRLTSNNITNKYHTEDYLIVSLKDSASGPISGAELTVYLNGSETYKTDGNGQIKIPTKDLLPNIYVANISFAGNENYTEANASASINITKLDTRLNATDTITKYNVNKDMIVTLKDIDGNAISGLNILVDLDGVKNYTTDSNGEVKVPTKSLAAGNYTANIAFEGDNIYIGSNATAKVTIEKESTEISATNVSAKYGSNQSMIVTLKDSQGNPISGAKVSVEIDGKKDYTTDSNGQVNVPSKNIVPDTYNATITFAGNENYTSSNTSASVVIKRVKTALNYTDMNTTAFDSNIEGRVGEYFSFQLLDEYGKPLSGKQVFIGFNGVKYNRTTNETGEARLQINLKYANNYTFAIAFLGDENYSGSFNFAIISVSEQTPSLSTSPKTYKASAKTKALTATLKSYKGTAIPDKKITFTVNGKTYSANTNSKGIATVNVSLNKKGTYNFTVQYAGDSTYKKISKSEKLTIK

SEQ ID NO: 4853 - protein, 262 aa, Methanobrevibacter ruminantium
MKNILISNDDGVMGPGILASKQALEGLANVVVVAPQENNSAVGRKVNIMKHMYLENYELADGSMAYGLSGTPADSVNVGINYVCDEVPDLVVTGINPGINISRLQITTSGTVCAAIEAVGLGIPAIACSLFLDDDCFKQDDEGNWYVDTDYSFAQKILAKLVKKVLDEGMPDGVDLFNLNIPSKPLSDKIKITRLADSMLKFNILERVDDDGNDTVMNVPELIEDYEEGTDGYCLLVERRPSLTPLNVHFGAEISNLEDWEF

SEQ ID NO: 4854 - protein, 244 aa, Methanobrevibacter ruminantium
MDINEWEEWYEEILNTFGFRREDDEKTADLLDEILADHGFLTIDEFYDEIMLKKGYTDKFIVFGAGPSLKEHIRFLKENYDLSKYMLVSADGATTALLEEDVVPDIVATDLDGKMSDLLTANSLGSYFVIHAHGNNEELIDLWTTSFNKILGTTQSVPVGNLYNFGGFTDGDRAMFFVVELGAKEMVLAGMDFGTVVTKYSRPNIEGETGPADEIKTKKLIFAERLLNWIRENEDVEVINLIDS

SEQ ID NO: 4855 - protein, 208 aa, Methanobrevibacter ruminantium
MKEIEFDLKNNPFYNFLSSRYSMSARLNVEKMWNYSKENDLSFFTLSLAALINSLNEIPEMRRRIVNGKVIEYDYLDAVCPIMDEDSGIYKEMRVKAPQRFDEILDWHDYVQEHERKILNGTEDAFEVKTTERDELNIANFSCIPWVDFDSITNCTASSNQIQPLITWGKVNEDYEMTVAITVSHIFVNGRELAYFYQFAQDNFNNLF

SEQ ID NO: 4856 - protein, 372 aa, Methanobrevibacter ruminantium
MAIEDILMFDETIFNDINAFNPDYMPPNYNFRDSQMEGMAMAIRPAIRGGRPTNSVILGSCATGKTTAIKKVFELVEKTTDKVVCVYINCQLHTTRFGIFSQIHKKIFGHQPPETGVPFSRVYEKVMDKLSSDGKSLIVAFDDVNYLFQTPHANKVFYDILRAYEEYEGVRTGIFAILSDLEFRFALDKNVNTVFIPQDIVFPPYNYSEIFSILKDRAKAGFFPGVVSDEIIEEIANQTYEVGDLRVGIDLLRVSGNIAESNASRTIELEHVEEAVAKQGSVNLMETINSLNDLEKTMIKVLIDRDEVVTAGALSKEFKEQAGVSYATFNRTLEKLEFLRLVDTRYTGKGVRGNSREIILRFSPEDIKRCNL

SEQ ID NO: 4857 - protein, 63 aa, Methanobrevibacter ruminantium
MMVSHNNRTCDLRKKQNLRDPLTFNNLRINIKDCMVIFVVFTVLLLSILAVSAAPSPDFMLWV

SEQ ID NO: 4858 - protein, 157 aa, Methanobrevibacter ruminantium
MILIHCGAIMSENNQREKKFEYFEVTADIGFYAYGNTLEEAYENAALAMFNVVTDIDKVKTSETREFEVESEDLVSLLYDYLDEFLFLQDTEFLFFSEFKVDIDKTEDGYKLNCIASGEEINWDVHVPRSEVKAITFHKMCVKKEDGVFKLRAILDL

SEQ ID NO: 4859 - protein, 482 aa, Methanobrevibacter ruminantium
MSIRESLVKVRENVWELPSDYKKEMRVPGRMYLDDEAVKTIEEGALEQVSNVACMPGIQGASIAMPDIHFGYGFSIGGVGAFNYNNGVVSPGGVGFDINCGVRMLRTNLTEDEIKPHLKELTEVLFKNIPSGVGSKGQIRLKDNEINEVLDYGAWWAVERGFGWEEDLKFLEENGRMEEAESEVVSKKAKKRGVPQLGSLGSGNHFLEVQKIEEVYDDNVAKAFGLEPGNVTIMIHSGSRGCGHQICSDYLRKMDKAYRNYKIKLPDRQLACAPIDSPEATGYLKAMAAGANYAWANRQMMSHWVRQSFEEVFKRDAEDMGMSTIYDVAHNIAKKEVHKVKNSHMEVLVHRKGATRAFCPGRREIPKEYRDVGQPVLIPGTMGTASYILHGTDVAMEETFGSTAHGAGRVLSRTAAKKQYTAKDIEKELNDKGIHVKANSAPVLAEEAPGAYKNVDSVVKTSHDAGIAKLVAKVVPLAVTKG

SEQ ID NO: 4860 - protein, 257 aa, Methanobrevibacter ruminantium
MIAIIGGSGVDEITDMAESIEKKIVDTEYGSVQVSLFEIEGKEVVFLPRHSEGHTCPPHKINFKANIMALKELGVSQILATNAVGSVDLEIGPGSIVIPDDFLDFTVNRDRTFYDDDVVHIDMSEPYCNRLRNALLENSDCVNGGLVDGGTHICTEGPRFETPSEIRMFKMIGGTVVGMTTLPEAVLAREKEMCYASIAIVSNYCTSIAKHKLGVEEIIEIMAVKKEELISLLFNTIKNLPVDYDCECHHALGDAEF

SEQ ID NO: 4861 - protein, 208 aa, Methanobrevibacter ruminantium
MNIKELFIESLKDNKKLIIGLYAFFIIVFIAAWIITGPKMQAIASNVTAMNGPGGAQSSAIELFIHNELGGIITYLASVFFGIAAIVLLGYNALNLGSIGQLFNHFMPNGGILYLIYLIPHGIFEITATVLQSAAGILLFLFIWRFIKAFRSKDTNGASDAFEMTKKTLIQSIVLMVIATILLLIAAPIEAYFSTAFSEFIMGFLGLR

SEQ ID NO: 4862 - protein, 130 aa, Methanobrevibacter ruminantium
MNEFGQLQLIWIRRLARETGRITALIEAGNLSVIDLVRYKKSISSMDGFCRFVIESQDWDDVRRIPEIVEDVEEKLFLHFYEMIDRFDGEGAHLDFSKEDEGKICLNFDDASLEDIVFTIIDDEDIDVFL

SEQ ID NO: 4863 - protein, 67 aa, Methanobrevibacter ruminantium
MRNNLKIYRAIENITQKELADELGVSRQTIVLIENNKNDPSLELAFKIAHKFDVKIEDIFINDSNKK

SEQ ID NO: 4864 - protein, 99 aa, Methanobrevibacter ruminantium
MENLLNLKYTCKDCDFTWITLNGEHSICPKCHSENIDLLGEVKDLDIEAILAHNKMRGGCCGSARGKGPLTCGKPMPDHANPNIPHHNHNKKTCCGYNE

SEQ ID NO: 4865 - protein, 355 aa, Methanobrevibacter ruminantium
MNVSDLKRDHYMLKGPLAKQGYDWWWHSLTAYNKETGEPRPFFIEYFVCNPALAEDEPTLGQDPKNIEAGKKPSYCMLKVGAWGKEPKQIHNFYSMKDFECPDDKLDVKIGEFSLTEKHMTGYCKVTEEEARDHPEYMCDAGEMKWDLDIDKQITFNVGYGANTLFRKLNSFEMFWHAEGIKTQYSGTIELDGVEYEVIPEKSFGYADKNWGADFTSPWLWISSCNLTSLITGEKLNNSAFEAGGGKPKAFGISLPRKLLIGFYYEGKMYEYNFARFWNMVKVDFGFKEGEELNEWFINASNKDSKMEMKLYCKRDEMLLFNYEAPTGKKLHTRLWNGGNGFGEIKLMKKGRHID

SEQ ID NO: 4866 - protein, 229 aa, Methanobrevibacter ruminantium
MLWTDFIVLAIVYIYVVAIFILSEKVLKSRPEVSRKFLHIMVGNMIFAMPFFSDPWIMLLFITLPVTVALFFLTEYSPIQIENSVTESGHALGLLFYALIWSILLFVYPIMLDPNYLWIVAMAIVPLVYGDGFAALVGGKWGTIKYHVFGGEKTVVGSLAMLSVTAVLSVFVWVFYSSIGYTLPELNLWYILLISAVATLCEALSYGGVDNLTVPAVTSVLYYIVATVL

SEQ ID NO: 4867 - protein, 352 aa, Methanobrevibacter ruminantium
MKHRLNLDNKDPNYILLKEIFKIMDSRKSKSILASYGFKNLNRTIFTFKIIFISMFFGIDIPFILNELKSKKELRKYFNISEVLTADQVYKIFSEINSEKLIKCLNRILNSRNMVKRRGKKTFIVDATPVDVDINFHRNKKTKEHLEKINLKWSYSSSKGYYIGFKATVVLDYDSMNPVCILVHSGAPNDAKLFEEILENLQKRRIIRKGDTLIFDKGYYSYKNYQIGISKYKIIPFIFPKEKFSRTRLDDILTYLLAVFNKTKRIMKEKRLYNSLKMELMKKIDSWEKFKPIRGKIEDFFKLLKQGLNMREIHKYTPKSVEKTVYLNVFLGALIISQGFYSKTAIQQLSEN

SEQ ID NO: 4868 - protein, 735 aa, Methanobrevibacter ruminantium
MTDVELKIKVAETLSQNDVGKNIAKLDMESMFKLGLKDGDIIEIVGSKNTAAIAVASQSDMETIIRIDGTTRKNSGASIGEEVTIRRADVKEAKKIVLAPIDARIRIGGDFNRAFANQVMVQGDLINTGIKTPQRRVSGSGFFDDIFDDLMNVPGIGAMSQIKLAVVSTSPGGVVKVGPNTKLEINEEPVDISKLEGVSNLVDISYDDIGGLKEEVKKVREMIEIPLKKPELFEKLGISPPKGVLMHGPPGTGKTLLAKAVANESDAHFIVINGPEIMSKYVGGSEENLREFFEEAEENAPSIIFIDELDAIAPKREETNGEVERRTVAQLLTLMDGLNSRGQVVVIGATNRPDSLDGALRRPGRFDREIEIGVPDKDERKEIMEIHTRGMPLAEDVDLDQIANTTHGFVGADLEALAKEAAMRVVRRIIPDLGSDDEIPPEVLEKLVVTKEDFKSAQREIQPSALREVLVQVPNVTWDDVGGLDDAKQELKEAVEWPLKYPNKFKEFGVRPPKGTLLYGIPGTGKTMLAKAVANESEANFIAIKGPELLSKWVGESEKGVREVFRKARQTAPTVIFFDEIDSIASSRGGESGDSGVTKRVVNQLLTEIDGLEELEDVAIIAATNRPDIIDPGLMRPGRFDRHIKVDAPNEDARLAIFKVHTKDMPLAKDVKLKKLAKRAEGYVGADIEAVCREAAMLALRDDIEAKEVSAKFFDEAMDKVKPKSSNEEELIQYF

SEQ ID NO: 4869 - protein, 279 aa, Methanobrevibacter ruminantium
MDRHVIEALGRARITVENGKVVDVGEPMIEYCPLFDKHRGIKELTKEEIEKNIQFRIDDFGMCTKNRQLRLKDFLSFGISEILSTLLDENLIDCAVMVCEGCGTVLVTESEMAQGVGGRVSGLVETSPISQSFIWKSFGQDRVVDSETARIDQVDGLRLAIDNGYKNIAVTICLAEDGIILRELEKEYEDINVYIFAVHSTGLGREEAEIIFDTADVVTGCASKHLRDIGKELKVFSVGTSIPIFAASDKGEEFIKLRLDKIGGPKKKTGNSKQPNPLV

SEQ ID NO: 4870 - protein, 211 aa, Methanobrevibacter ruminantium
MSKDVVLILSGGLDSTTLLYKLLNEGNNVTALSFNYGQKAAIEIERASEICKMNDVNHFVFDIRNIVDLLSSSLTDKDNDNVQEPKSTVVPSRNTILLELATAFAISNNLEEVYYGAIKADTGDYPDTTPEFLKQINELNKVNNYEYIPVCAPFIDTDKKDVVKLALELGVPIEKTWSCYVNNDGTPCGECFSCKSRIEAIKEAKEELGIE

SEQ ID NO: 4871 - protein, 119 aa, Methanobrevibacter ruminantium
MLTLVSEHRIYGCHKLKDQGGKCTQWHGHQYRVILTLQAPYKDLDYRNMIMDTYDIEAIFNEFIGVDHLNLNEFMDSENPTMEEMSKFFYDGLKDKIECLVSVGVYETPETGVTYTPME

SEQ ID NO: 4872 - protein, 202 aa, Methanobrevibacter ruminantium
MIKIKVSEIFTSFQGEGPYIGTPATFLRLYGCNLNCPWCDTDISTYEILSVDEVFEILMTQMEFNNIRILVITGGEPTLQMEELKRLIKEIPDEIKIQIETNGSIFEYVPEIDYVISPKEDKETVFKNYYKYDNVFFKFVICSQEDIDEVIYLKDKYNYDKTIWLQGEFSKDGEMADLIRENFPHLENVKLSVQTHKYLNQR

SEQ ID NO: 4873 - protein, 140 aa, Methanobrevibacter ruminantium
MYKKIILPTDGSEYSNREILRATKLLAEDGEVIILSVATELRKTAFQRSKDIDRANKESIQEAKEYVAAMKKGFDDSVNVRTKVVVGFPAEAINQVAEEEGADLIIIASSGKRGLHRFVIGSVAEKVLKDSEIDVLLVHD

SEQ ID NO: 4874 - protein, 193 aa, Methanobrevibacter ruminantium
MADKKPTAENWPVVSGDYIVGDPESPVAVTTLASHNEDIPAAAGAAIAGPCKTENLGIEKVVANIISNPNIRFLILCGAEVQGHITGQSFKALYENGCDPEKKKITGATGAIPFVENIPMEGVERFQQQLELVDMIDNEDGGAITAKVKECIEKDPGAFEEDSLVIKIDEERYSKKSSFVESSSESEKIESEA

SEQ ID NO: 4875 - protein, 149 aa, Methanobrevibacter ruminantium
MKKESIFNDEVSLFNSIYVMHKAFEKFLKTHVNDLNINKAESKFLGEIYYNEGISQREIARNLFVSEANIAKTYKILEKKGFIYKKVDEKNNTRRQLYLTEKGKESFEEIIKLYEEYHHFILSDYTEEEIRKHEEMMKGIADKSLKFLK

SEQ ID NO: 4876 - protein, 256 aa, Methanobrevibacter ruminantium
MKNYFDIKDKVAVVTGASSGLGWQIAQAYASQGAKLALFARREERLQENVKEIEDKFGTEVMYAVTDVGDYDSITASVQKVMDAYGRIDILVNAAGMGNNKMVVDQSNEEWARHIHIDLTGVYYMCKAVGEIMIEQEYGKIINIGSIHSRVIFPGGGISAYSSAKGAVMNLTKNLAVEWAKYNITVNAIGPAVFETELTVDSIEMDGFMDLIAAYCPAGRLGKPGELDGLAIYLASDASSFCTGQLICVDGGWTAI

SEQ ID NO: 4877 - protein, 424 aa, Methanobrevibacter ruminantium
MTQMTEAKKGNVTPEMQAVAEFERVDVGKILNGLASGRIVIPKNINRDTKACGIGQGLTTKINANIGSSSKIEDIDLEIKKAKLAVDFGADAIMDLSTGPKLLEFRERIMDSVDVAIGTVPIYEAGVVTLNKGNEIIDMDEDDIFNSIIHQAKDGVDFMTLHCGINQDLVYKLQEAKRMMGIVSRGGTFLASWILHNEKENPLYSNYDYLLEIALEYDITLSLGDGLRPGCQSDATDTSQIQELVTLGTLVKRAQEAGVQTMVEGPGHVPLNQIRANMEIQKTLCHGAPFYVLGPIVTDLAPGYDHITSAIGGAIAASSGADFLCYVTPAEHLSLPSLEDVKEGVIASKIAAQAADVALGLDTAWEKEVEMAQARKNFDWEKQFDLAFDSVKPRHYRNKCELDDDEMCAMCGEYCAVKIAKGDF

SEQ ID NO: 4878 - protein, 550 aa, Methanobrevibacter ruminantium
MKYEELVNVYEALGATTKRLEKTEILADFLKTVELEDLQKITLMALGRVFPPWSEEEQGIGDKLVMKAVGDAVGVSVAVVEDAIRDEGDIGAAAEKLYGKKTQMTFFSQPLTVNFVYNQLRKLAKITGNRSTAKKISNILELLSSASALEAKYICRTILEELRIGVGEGIIRDAISQAFGVDKALAERAHMLTNDLGLVAKVAKEEGEDGLKKLSLIPGRPVKPMLAQLSEGIEISINEMGCALCETKYDGIRMQVHKKDDEITIFTRRLENVTMALPEAVDLIREAFPDEDFIAEGEIIAIRDGKPTTFQNILQRVRRKHNIEEAMEKVPIKIYLYDLLYFKEPTIDEPIIKRREILESVVDCSNPNLALSSLVKVGPDNIDDAVDLFNKSIEGGHEGIMIKDCDEPYIPGIRGKKMLKLKAEPETLDAVVIGGVKGIGKRGDFIGSYVIALRDENDQLQPIAHVGTGLSDDDLANLTEKMEALKITEKGTRITVHPKIVFEIAYSEIVKSPEYSAGYSLRFPVVKRIRDDKGVDDIDTIERLESMFKG

SEQ ID NO: 4879 - protein, 132 aa, Methanobrevibacter ruminantium
MELNDEIIFKVALITALVGMIGMLAFASYIEPKEITINEITRNNIGETVSVSGVVESVKLSSSGSSCFLELNDGTGKINVIVFESVLVELKDAGNDLNDFKGHNIKVVGSITEYKSSMELILANSNSIKLES

SEQ ID NO: 4880 - protein, 70 aa, Methanobrevibacter ruminantium
MYEKDKLVLPNIIKEEFDCIELNEDTIFDWAIEDDKIILKPRNIVTTDDIIGIIDDDGGEWDIDNEIYSL

SEQ ID NO: 4881 - protein, 77 aa, Methanobrevibacter ruminantium
MGFLASSKIYGDYQIDIPKEVIEEFNVERDSIMEWIINEDGRISINFRKKYSIKDLVGAFHLDDEVSSVDLKRSLYE

SEQ ID NO: 4882 - protein, 454 aa, Methanobrevibacter ruminantium
MVEKRLFGTFGVRRNCEMMVLTPEFASRLAASYGSIVQGTVAIGGDTRTSTPMLKHAITAGLLSSGCDVVDLGILPTPAIQYAVRNYYDGGIIVTASHNPPKYNGLKFVDEFGIGTPDDMEIEVEKLYFDEEPIRASWDKIGEVFTNESIIKEYIAETLKRVDVEAIRARKLKVVVDCGSGAGSYTAPYILKELGCEVTTLNCQADGFFPGRDPEPIEPNLQDLIATVKNLGADIGLAHDGDADRTICIDEKGNFILGDKTFALVEKHMLKENGGGIVVTTVATSQAIYDIAEEFGGEVIATAVGDLLVARKLKDTDGLFGGEENGGLIFPDFIYGRDAAMTVAKILEILVKEDKPLSELVAELPVYYQEKLKIECPDDQKQDVMANIANEIKDTTDFELDTTDGVKILKEDGWVIIRPSGTEPIFRCFAESDSMDKAQEMANWGISLVEKYKN

SEQ ID NO: 4883 - protein, 267 aa, Methanobrevibacter ruminantium
MISDRQKTLLILILVLVLAFAIIFLGYSISLGNNQTAGVKLNDSNKIYINQSYPAEPIPDAKIDTSGVNSVLLGQNELGSVELLGPFGNSDSEIKIAYSIGMHPWESKVHKALFDTVLAKNSSLKYCYYIYKINVTNYNTDDEGRMDGQLLAQEFVAPHIINGDYDLFLDIHSNKGTVGGTYEQTNFAFAVGQDEKSEAFVKKILDKMPELVYYFPADQSSPPYITLPVEQAGTPTVNYETFSYEDINTTYDLIDKLVDVVDNLEFK

SEQ ID NO: 4884 - protein, 237 aa, Methanobrevibacter ruminantium
MCDLILNLIIKIDDIMIIKNYSNEPTDEAKVDSSLYDAQLIGENDLGTVHLHGPFGNEESDIKIAYLIGMHPLESKAHRALFDTVLDKDGDLNYSYYIYNINVIGELDEATEGRMDGQLLAQEFVAHHIIDRGYDFFLDIHSNRGSRSPGTYEISNFLFAPGFDEESSKYMNVLLSKIDELVYYAPEYRTSPEFITVPVQKSGIPTLVYETYSYEPIELTYELSEKLVDAVDSLDFD

SEQ ID NO: 4885 - protein, 378 aa, Methanobrevibacter ruminantium
MPIMSFGSQNINIITNKKAMTIRKLWKTPLKKGDRLHCYWNLASKEKKKIFEAEVTEVETITFKELKDNDELAREEGYEDSKEMVKEFKKMYPDRIADDDLFQIIYFEKLDINKWKGEKIDQKEMITQRADILFDTGKYDKSVLCYNAALKIDPNDVYLLNKKGDNLGRLDRFEESIECYDKALEIEGDNEYIWNNKAIAMLNSGNIEEALVASDGALNANPDNPVVLYWRGFILEILSEFDKALEVYDKLITIDDTNPEVWNARGNVLTDMDRLEEALQSYDKALELCLEDSEIDASAQNRKGNALLDLGRFEEAIQCYDRAIELEPLNTSFLLNKGVVLMEIDKFDEAEILFTKVLALDPSNDDARVLKLECLENM

SEQ ID NO: 4886 - protein, 240 aa, Methanobrevibacter ruminantium
MEYGATITSSIEYPKKMSFVIFLAKCPLSCPYCSNSELLYGGEEISLEEIIEKIDDSAFLSDAVVVSGGEPLVQLEDTIEILKYTRKIGLNTKLDTSGVYPNRLRKVLDLGLVDYLAMDVKAPFNKYKEVIHSDIGDKVKESLDIANEYDDVFLECRTTYCPALLEEEDLFKIVDEVECDLYTIQQFRNRCTLDESLDGAEEPNPHNMREIAQKIKELHPNQDINIKTAEFGQQKIELEN

SEQ ID NO: 4887 - protein, 374 aa, Methanobrevibacter ruminantium
MKARKAVEEIDPYVPGRSKEEIAQEFGVKKEDIIKLGSNENPWGPSPKALEAIKEELNNINRYPESDVELLKKEFARYSNVKPENIIIGGDGADEILDTLAKTFIEKGDEFIVPLPSYMYYEFLFKPYGAIPNYAKWNLETNTLDLDSVLDAINEKTKMLFLCSPNNPTGALITQDEFRPILEKTNKSRGGVCDAIVVIDEAYVEYAEGTNVNLLEEYDNIFIIRTMSKVMGLAGMRIGYGISSPEIIEYMHRIKPVFSLTKLSYVAALATIRDTEYIEESIKKGIESREYLYNEINKMKSVKVFKSYSNFMLIDIHNTGYTAAELTREFMKRGMIVRDCTSFKGIDEYYFRISICTLEEDKKFIEAMKDILNE

SEQ ID NO: 4888 - protein, 158 aa, Methanobrevibacter ruminantium
MKLKEPVKIFPGAQVIGDVEIDENCSIWHGAIIRGDVGPIRIGKNSNVQDNCVLHTSANLTLKIGDNVTVGHGAVVHGCEIGDNVLIGMNATILNGAKIGKNSIVGAGAVVSENKEFPENSLILGVPGKLIKETTQEQRDNIAWNAKHYVELANEYDE

SEQ ID NO: 4889 - protein, 439 aa, Methanobrevibacter ruminantium
MKALILSAGEGTRMRPLTLTKPKTMLPVAGKPIIQYNIEALRECGVKDILLIVGYKEEMVKNYFDDGSKFGVNISYATQTKLEGTANAISYGKDFIEDSLITLNGDIILDEEILREIIEDYEESGADTLMVLTEVEDPSAFGVVELDGEKITNIVEKPKKEEAPSNLVNTGIYIFNKDIFDKIDKTKVSPRGEYEITDSLSLQIEDGKFVKGHKTEKEWMDIGKPWELIEINESLLNNIKGEIKGTVEEGATLHGEVFLDEGSLIRSGVYIKGPVYIGKDCDIGPNSYIRGNSYFGDDVHIGNAVEIKNSIIMENTNVSHLSYVGDSILGSNCNIAAGTNIANLRFDNKTVKFNIKNKKVDTGRRKLGAIVGDGVKTGINSSLSPGVTIGTRATIGSGVLLYDDLPSDMRVLLKQEHIIQNKKENGQIRLEEVEEDMNK

SEQ ID NO: 4890 - protein, 53 aa, Methanobrevibacter ruminantium
MVKYVCMHCEYTWDSETGDETYKVPAGPIEDFPDDWVCPQCAAGIEGIITEED

SEQ ID NO: 4891 - protein, 448 aa, Methanobrevibacter ruminantium
MANKKLFGTSGIRGKIGSEVTSELALKIGKSLAKYLNNTGKVVIGYDTRTTNRMLEQAITAGLIEHGVDVIKIAMVPTPLVGYATIKLGADAGIMLTASHNPSEYNGIKLWNANGMAYTPEQEEKIEEIYYNEDFGKVEWDKIGIISHNDEIKKQYIDDLLDIVDIKPGLKVVIDCACGAGSELSPVLFRKAGCEVITLNSQVDGFFPGRNPEPNIANLSSLMKAVVATESDLGIAHDGDADRMITVDENGKVSDFDKLLALVSKKFGGTVVTTVDAGLCMDEAMEEVGGKVLRTKVGDVNVAEVMIEENASFGGEPSGTWLHQDFCMCPDGILSGLRMAEIVSKEGKLSELLAQFTDYPHMREKVICSKEQKIAVMENMEELLKNAFDDIKEINTIDGIRLSFEDGSWVLVRPSGTEDYVRVTLEAKTQEKAEFIRDTCVKIIKENI

SEQ ID NO: 4892 - protein, 412 aa, Methanobrevibacter ruminantium
MKGMILVMDGLGGRPLKELNNQTTLQAAKTPNMDKMAERGITGIMDSIAPGIIPGSDTAHLSLLGYDPYEVYTGRGPFEASGVGVDVIPGDIAFRCNFSTSDEDGIITDRRAGRIREGTKDIVDVLNTMVIEGYEDIEIIFKESTGHRAVLVLRGEGLSGEVSDADPKVEGNKPKEVKGLDGSPEADKTADILNKLVVKSYEMVKDHPVNLKRIEEGLPPANIIIPRGAGEVPEVEPINEKYEVNSACIAETGLIMGIGRFAGMDIIEMEDVTGGVDTNLYNIRDTIVDQVNNSEHDFFLVNIDGADEAGHDGNAKDKLEFIEKVDEIVMSELLKLEDIYIFLTADHSTPISVKNHSGDPVPIIINGPEVRVDDVKEYNEYAVAKGGMCRIRGADVMNILTDLMGYAHKFGA

SEQ ID NO: 4893 - protein, 232 aa, Methanobrevibacter ruminantium
MKEALMINWGYVVLLFILGAISYKRKSLDMLGALIMIFMGITIIFSAGVSWFILIVLFFILSIMATRFSKPYKKEIGQYEKTRTAKNVISNGLVAFLMAAFGSYYLPLAGGFIGAVATATADTLASEIGVLQEPRLITSFKKVPAGTDGAISILGTSAAIVGAGIIGIASFLLGIMPDPLIAIKISVISGTVGCFIDSILGAVLERRNFINNEHVNLLATISGAIIGIISVM

SEQ ID NO: 4894 - protein, 192 aa, Methanobrevibacter ruminantium
MAKKQRRRVRDTWKEKSWYTIKTPIAFGEKEIGTTPARDPELVYGRTVEVTMRELTGDFSKQYIKLQFEVDNVAGDIASTKFTGHKTTTDYVRSMIRRGTSRIDAPVIVTTQDERKLKLHVLAVTTRRAKSSQQKYMRETITELVSNVASEKTFDELVEISVNGRLASEVYHKAKKIYPLKRVEIIKSKVLD

SEQ ID NO: 4895 - protein, 267 aa, Methanobrevibacter ruminantium
MCEIFGFSSSREEELNDYLKTFFSHCEEHPHGWGLAILDSDKYQIRKEPVKARSSVMLGNILLNPIVCKNMLAHIRLATIGNLDFYNCHPFVKKDNSDRRWTLIHNGTIFDCQDLCRYSTEEEGETDSERILLYIVDTINNYESVKGEPLSLKERFDIVSSLIKGMSCTNKLNLMVSDGEQIYVHTNLKDSLHYLKKDHSIFVSTQPLDDDDWKEVPLNKTFSIINGDVLFESDSHSNEYFETEEQLRFIEKFLESLKTDSDEEYAW

SEQ ID NO: 4896 - protein, 241 aa, Methanobrevibacter ruminantium
MCKDGISDEALREKLYQAFLEPTKKDKKEYIGIEIEMPIINLNKEAVDFKVVHKVTRDFSEEFDNFELEGIDYDGNIYALRDKASDDIICYGCSYNNIEFAMGKEENLFSVNERFLKYYSYFKDKFEEHGHTLTGMGINPYRKYNNEVPIPNERYLMLFHHLKSSSDYVGMEFHQYPAYGMFSSASQVQLDVPYDELVDNINVFSKLEPIKALLFSNSVFWKRMKTIFALEISYGNSVPMA

SEQ ID NO: 4897 - protein, 217 aa, Methanobrevibacter ruminantium
MYNQEFEDIDELLSYLESLNIYCVMRDGLYINFPSMGLKEFFSKDKITGEYYCKGEYKKREFEPSLDDIQYLRAFKFINLTFRGTIEYRSVCTQPIKDSMSVAAFHVGLKHKTDELNELFLKSGIYKNDCDANELRKLLIRREIPDFVDMEKIYGLALKVLDLAKEGLLERDLGEEVFLDSLYDNLNNRTNPGKRLLDSLDGGKSLEEIIKEYGEVE

SEQ ID NO: 4898 - protein, 474 aa, Methanobrevibacter ruminantium
MDKIFNLSQIKNNLSSEQLKEGSFGIEWECLRVKENGELSLSPHPEIFGDKLTNPYITTDFSESQIEIITPAFDTIDEAFSFFSFMSDLVNSSLSDDEYLWFQSLPCILPESDKIPIAKYKGRGLGEESMEYRKGLAKKYGLKKQLISGIHFNFSFKEELIESFYDGVIGDKEKISYKEFKDSLYLKISRNYIRYVWLIIYLTGCSVAVHNSFTLDCQKLMNHKDNQGSVYSDRGPSFRNSSCGYKNLEHLYPSYASVEEFTRDIQSFIDNGHLSEAKELYTQIRLKPRNPSDLLGSLNNNGIQYLEIRTLDINPFYKCGLIKNDMNFLHMFMIYLLIKEESDYESWQEDALYNEEKTAECGYEDGVKLIKDGKEVVLKDWALSILDEMEMMVESLNLENKSVIELMKLKIINSDLTYGRRLARLVEKDGYIESQLKLSRNNKLRSKYLVEETNLLNDERFKEYVPIALQGLSK

SEQ ID NO: 4899 - protein, 112 aa, Methanobrevibacter ruminantium
MRIAVATSNGEDVNLHFGKASSLYIYEYDEENDETSFIEHRTVEIEKDSKHQNPKIIKALADCEVAICEEFGFKASIFAEDAGLKLVKDEGTVEEVLKKYTDHVKFLKNVKI

SEQ ID NO: 4900 - protein, 523 aa, Methanobrevibacter ruminantium
MKMIKQTLGLNVEDKKYYLKLIIEAVLIGLFSGFIVSLYRLGLDHSESILSYILKYIQGDLTLIVLWFVILAIMGLITALLMKWDPDSLGSGIPQVMGEVKGYFDVTWWKTLIAKFIGGTLTALGGLSLGREGPSVQLGAMAAKGVSKYLPNSKTDEKRLLVCGSGAGLAATFSAPLAGFIFTLEEINKGFDRSIVLVGLVSAVVAVLVSNVFFGQSPIFPFTSLNLPLEYFWLLIVLGIAIGILGYIYNVGMIKAAEMWDKLSFLPLEIKFIIVFLVTGIVGLFLPEVLGGGYSMMHLIELSLPPLSVLIVLLIGKYLLLIFCFGSSAPGGIFYPVLVIGAYIGAIFSAIVIPIFGLNPLIAYKFIMISMAAMFASSVRTPITAVVLIAEMTGVTNSIVAMIVVVILAYIIPTILDNDPIYETLLMRLLKKNKGIDFDKTKSVLEEYVVPMDCALIGTKIWELPIPKSAMVVSVVRSGNTLIPDENLELKYADELFIIMNQNTYPEDNNKIESLIYNNWKEE

SEQ ID NO: 4901 - protein, 435 aa, Methanobrevibacter ruminantium
MKIGIIGGTRGLGRTLAWYLKDFDFDVTVTGRDSIVGAQVSEEIGVKYSNNNKKIVQDSDIVIISVPISSTESVIEELAPFMKDGSVMLDVTSVKEGPSKKMKECLSEGVEFIPTHPVFGPRTTDLKGQIIVLTPIKKGKWYPRIYKFLEDKGMRIIETTAEHHDDMMGIVQVLTHFSYISTASAIERLQVDLKDTQNYESPIYNLMIDTIARIVSQNPYLTYSIQHENKKGEKIRQALFDSMSELKDALSKEDEEEFVEIALKATKHMGDIQGALGRSDKAINALTQEYNILLQSIGEEVGLKHIYSDTIHVGKIKKIDLDFLYLEDENGKVKKLKMSNVAILSEKELFEWKINNQKTYSRDISAMFTKNSNPHIIKDTLKLMEDIIDVEIIDIYDGEPVKEDQISYTFKIEALSMEAIKNCRDILIGFGGISR

SEQ ID NO: 4902 - protein, 353 aa, Methanobrevibacter ruminantium
MKVTSEDESKGTVELFPETLDDLWHLSHIVAEGDIVYSKTTRRIQDTSGDLIRGDRGVKKTFTLGISVKNVSFHLFTGKLRIIGSIVSGPEEFVPLGSHHTIEAKLHTPITIKKERWSSYALKRIERAIEASKKLSAIIVVIEDDVADFGLMRQFGIEYYGPIMGNVSGKRIIDKNRKKNIEKFYEKIVDYINKFDNIQTIVLAGPGFFKNDFFKYLELKHKDLAKNTIIESTGSGGRVGINEVLKKGTVEKLATENRVAYEISAVDAILKEIAMNSPLVVYGKKQVHEAINMGAIEKLLVLDNLVRSENMEDSMDMVENMSGEVLVISSQHEGGKQLEALGGMAANLRYAIS

SEQ ID NO: 4903 - protein, 318 aa, Methanobrevibacter ruminantium
MFFELLIVFLLCFFGTGIVSIVFRFLGKRGYMGNLYETVRGGTPRAVGIVPFILISLFMPSGFNNLVLVMGLCALIDDIIGRKTIANLPIEIGQLARGIGMLCVIGLGYPIMGVSSILVVLLIQPMNIADMQPGTAAATTIIMSFFTLLAVVIMQVGPVLEIHPYYYPLLVLVTCLAYCPLDFAGKIMMGEVGNHTFAISLGICFYALGGFIGTLILFIVTTGLIAYLRRYNLSRFLINKLHIPNPTFGDLFMDVLTGGGLGDLFRKILLKSNQYDVDNEILIALGFRRLLYNPYSPNLEKVVQKDSRTKRADLRRFY

SEQ ID NO: 4904 - protein, 181 aa, Methanobrevibacter ruminantium
MADVFDVIKNRRGVRAYKDEQIDDEDIEKILQAAIMAPTARGEAPWHFTVVQNKELLDEINDSVHSILTNSGDELLEAIAASGRNVMHNAPTVVFVSAKSDATNMQADCSAAIENMLLAAEGLDIGSCWLGLVALFFSVEENLKKLHIPEGYTPLYGVSLGYKVEENEPNPRSDVLVNWLK

SEQ ID NO: 4905 - protein, 457 aa, Methanobrevibacter ruminantium
MKETKKIKNIVIGAGPAGRLASFELGKLGEETLLIEKKYIAGTCLNEGCMVVCALTDISRFWKNCQRFSEMGLVNGLLELNYNSICENIKKTQKFLRKLNQEENESVSNKVLYGEASVEVDEDEKIIVTVKLDNDNELQKEEYKGKETLSFEAENLLIATGARPFIPNIPGAEYALTSSDVINLDEVPPKLNIVGGGIIATELSNIFSSFGSEVKIIARSEILKDLEPEIKSYVVKKIINDVEIHENTNVLKINEDSIETDNGEFEGKTLIATGRVPNSEILKGLVDLNEDGSIKVNEFFQTSKPHIYAAGDVTGGITLTPYARKEGISAARNMAGYLNKFEEMIVPQSLTLDLDVSFTQKTDKEADPDKIEDVIIPGLGGPHAFWRILRGETGLTKISLNTETDEIVRASQISPSSIDDTAYLAFLMNLGIKKEAFDDFLEVHPSTDAYYKILKIM

SEQ ID NO: 4906 - protein, 88 aa, Methanobrevibacter ruminantium
MCIAAPAKIVEIDTESNICAADFGGVRQNAKLDLLPDAEIGDYVLIHAGYAIEKLSEEAAKESLESWNELMEMLDEEDRERELQMNGL

SEQ ID NO: 4907 - protein, 164 aa, Methanobrevibacter ruminantium
MCEEIKLLKDLGCPEWVIEHSKGVSRKAVQIASNFDDVDIELVRVGGLLHDIGRSKTNSIEHAVIGAKIVSDLGYSQEIVNIVERHIGTGLTEEDAKELGLPIKDYTPQTLEEKIVSHADNLFNGADEVDVDFTINKWKRKLGENHPSIEKIKEIHEELVGRFE

SEQ ID NO: 4908 - protein, 302 aa, Methanobrevibacter ruminantium
MKVICTVDESLYRPEVVRWRERMAMMEPLGEVVVALPCSMKKPYSNSQSHQKFKRATKGYQEVIVTSPFGICPREMENTFPIQSYDVTVSGDWSFDEVRISGELLRDYVGDKPVIANVHGGYEEVCREYLDNCVYVCQDGRPTSPDSIYHLREELKKYSKVKHRDKVLNELRSIAKYQFGPEAYKIISDDVVAKGRYHRTIYSEGKQLALLNRDIGLYTLNLEGGRRLAELDIHVVEIDFDLKTNSVFAPGISNADLSIVPKDEVVVVRDGEVVGVGKAVLTGKEMIESTSGIGVKIRHRKK

SEQ ID NO: 4909 - protein, 95 aa, Methanobrevibacter ruminantium
MSEELALAVKDAVSVVNDPHMGVSIVDMGIVQSIAIEGSTAELVIKPTNPGCMSVTRIAAQAKAEALKVEGIDKVKIIIEGHVMADSLNEMLNRD

SEQ ID NO: 4910 - protein, 167 aa, Methanobrevibacter ruminantium
MWESLNSKFSKYPARMTVAQKMFELGLRIGEDNKIYCGNLKISDSALAAAANVDRRVIKSTVNVIVQDEDLFEVFSNIVPAGTLLKNIAKNLGLGVVEIEAGEESEGILAAVATTMSEHDIDIRQAYAGDTKFEGNPVLTIITENPIPGELLNEFIKINGVLKVSVL

SEQ ID NO: 4911 - protein, 357 aa, Methanobrevibacter ruminantium
MLSDPIIQKNFPGTFEFEEAMVIIDCLKEWPKSRLCDDKAIARKAAKTIDIDIKTVRDVLALLEVNNCAYNIKINELCIKLIKHYRSGKLTHKKIAKKLKIDDNIVDQFIEENESLLEETKKTYSQETLMALNDSFNDFIKGRKPLKINKDEEEDNPDEDSKDEKATDEEFKSGEVEIKEEVEETKEEEEVEEEKPAKKRTVNQKFWYLTFDEVIDCLKNGYATDEEISEKIGCKLNIVRKILYSLYDMHLASYKRDKDKETQWYTYDWKFNESEYKKLELNIASAELKKLNEDLEYEANNMFFICPVGHYRLDFEDASTVEFICPECGAELEFDDNSEVVEALKDQIAYIEEMISE

SEQ ID NO: 4912 - protein, 300 aa, Methanobrevibacter ruminantium
MTDNPNYKEAETEQGQVYKYVEIRGYQVIPIETHYIKPNESIDFMIDDISKLCKSGDYLVIAETPISVSQGRLVDEADYTPSLKAKFLATYWSKYFWGYVLGPILGIKERTIKNLRKLPEESKRHKEVVLQLYGWKHALKPASEAGIDLSNAPGTCVSLLPENPEKVAKEISESLMEKTNQDVTTLIIDTDATYRRKNKYFTGLPIAIDGIEADKGVFGYALGQLSENMGSTPLGCSREISVEEGIKIANIAEDYQKSLSTAMETIYSAKDVLNSDTPEVTVESLDSIIHTPAVLVRKIE

SEQ ID NO: 4913 - protein, 189 aa, Methanobrevibacter ruminantium
MEKSITYFENPGAENTDAVIELVRERLEGSNIKYVAVASSTGASALKLNEALKDLDVTIVNCSHHVGFREPNKAQISAETKTELEEKGIVTFIGSHALSGVGKSISKKFGGVTPVEIIAAVYRTFSQGIKVCAEISIMLADAGLVPVGEEIIAIGGTGSGLDTAAVLTPANMTNVFDMKFHEIIAMPRP

SEQ ID NO: 4914 - protein, 389 aa, Methanobrevibacter ruminantium
MKFIDDAIKESEESIEKTASPKKSDDELDKELLDIISRSRAKIIVVGAGGAGNNTISRLTEIGIEGAETITVNTDAQDLFYSQADKKLLLGRQTCGGLGAGGEPAIGEESAEESEEDIRAELEGADMVFVTCGLGGGTGTGSAPVIAKVAKKAGALTVAVATMPFSAEGVKRRENAEIGLEKLQENADTVIVIPNDKLLEVAPNLPLNKAFMASDEILGRAVKGITELITKPGLISLDFADISSIMKGSGMAMIGMGESESGDRAIESVHEALSSPLLDIDISNAKGALINISGSSDLTLQEAEKIVQIVADRLDPEANIIWGAQIDEELQNMIRTTIVVSGVKSQYNSSSSGSDDGEFTDIDDFTDADILGEDTAPNDPLDEFLDGIF

SEQ ID NO: 4915 - protein, 59 aa, Methanobrevibacter ruminantium
MNYQEELSDFWKQCKRVLKVAKKPDREEFFDFSKVTAIGIAIIGVIGFVIVLFGQLLGL

SEQ ID NO: 4916 - protein, 163 aa, Methanobrevibacter ruminantium
MEDDKNSIFALKTSAGQERTVARLLGMKADKPGVDIKAIVVPESLKGYIIVESATNLDMKNPDMKVRHLRGIVGAKRDGTIDPSSQITLEEVKKFLKPQPIISSIQKGSIVELVSGPFKGEKSKVVRLDESREEVVLELIEAAVPIPVTVKADQIRIIKKEAD

SEQ ID NO: 4917 - protein, 160 aa, Methanobrevibacter ruminantium
MAKDTVEVLLEGGTATPGPPLGPAIGPFGVNMMQVVEEINEKSADFAGMKVPVIITIDSNTKEFEIEIGTPPTTALIMDELGIEKGAHEPGAEVAADLSVEQALKIARMKFDSLLSNDYKSATKEIMGTCVSMGITVDGKDPRDAQKAVDAGEYDDILVE

SEQ ID NO: 4918 - protein, 212 aa, Methanobrevibacter ruminantium
MTQEIIDAVKEAKEQAKPRNFTQSIDVIINIKDLDVRKPENRFSEEVALPHGRGKPVKIGVIADGELALGAKNAGVDVVISKEDLQEFGKDIKAAKKVVNSVDSFIAQADMMPLVGRFLGRILGPRNKMPKPVPASAKIEPLLERQQATIKVGVKQQPSIQILVGTQDMDDEKLAENIEAVLAVLDRNLEKGRNQIKSMYIKATMGSVVRVI

SEQ ID NO: 4919 - protein, 335 aa, Methanobrevibacter ruminantium
MAHVAEWKKEEVNELKGIIDSAEVVGIVNLLNIPARQLQEMRKTLSGKATIRLSKINLMKLALEDCVNEKANITELSDYMEGQPALVCTDMNPFRLYKILEDSKTSAPAKAGAIAPEDIVVPAGDTGFPPGPFLGDLQQIGVPAKIDKGKIVVQKDTTVVEAGEPVPKAVAAALTRMDIKPMEVGMDLKAVYEDGSIFKADVLAIDEEETFADIQNAFTRAFNLSVFSAFPTSETISTIISTAHTKAYNVAIEAAIPTGKTSDMLIALANAKMLALAGELASDAIDDEIANKLANVAVAAAPVVEEAEEEVEEEEEEEEDKSEETAALGLGALFG

SEQ ID NO: 4920 - protein, 103 aa, Methanobrevibacter ruminantium
MEYIYAAMILHTTEQDINEENVTKILEAAGANVDDSRVKALIAALEDVDIEEAMETTAMAAAPAAAAPVAEAAVEEEEEEEEEEEDEEQAAAAATAGLGALFG

SEQ ID NO: 4921 - protein, 241 aa, Methanobrevibacter ruminantium
MICPECGAENQDSAKFCKQCGTSLNPVATMKKTNSDESRPIKSGIFNENNSSPSSFEAKGSGGDNKNLIIICLTVIICAVLIAGGLIFLSNGSNNGNDSSDVGNSISLPDNSVNQTDDSQNQTDTEPAPKKSSVSDMKILSGSFTTGSSLSDKTWCSVYVGEKYAGEDVKISVLYSRDGSDLNQGKIVPKNVGSDGTVSVPSADAFKYYPDHALVTIYDSNGNVLDTQEVIMSAKSGTQTF

SEQ ID NO: 4922 - protein, 201 aa, Methanobrevibacter ruminantium
METKNLIIICATVILAVVIVLSAFIYVNMGNETHISSNIADTLQNGDEIVVKLVDKDNKPLVNKTISLNFKDENGKGNAVSYDLLTNDKGEVYYNVNLTEGKYVFSADYAGETFIGSSSLNKSVEVKKDVKTANLSSTDTTKTAKTKTYTDWQEDYETGRYDEDGNPIYRSIMSTSGGQYEPGIYECYWSANGPISERRIG

SEQ ID NO: 4923 - protein, 115 aa, Methanobrevibacter ruminantium
MKCPVCGCENPDGYKFCHDCGNPLIMPDYDEMNNDYPSFDSKKLIIIGYIIAILFGWGTFILSAIFGSYGFIGFIGLFFPGFMLNSKDSNIRKHAYIQLAIMIVGILATFLVLFR

SEQ ID NO: 4924 - protein, 241 aa, Methanobrevibacter ruminantium
MNKKLKIILYILLALIIIIAGISLWYLMDYSPASADANSLINGTSEVSVSKINNGLFLDGPGNDSAVIFYPGAKIEYTAYLPLLINLSADGVDCFLVEMPFNLAFFGTNSADEIINNASYNYSNWYIGGHSLGGVMASRYAHNHFDKIKGVILLAAYPADSLENGSVLSIYGSNDKSLNKESYDDAKKYMPSNFTEYVIKGGNHAQFASYGNQTGDGVATISAYQQENETIKDILLYINGS

SEQ ID NO: 4925 - protein, 910 aa, Methanobrevibacter ruminantium
MLKIFEDLGYKKQICKTCGQEFYSQVDRDTCGDAPCDEYGFIGNPATDKPYDLYGIQETFRTFLEKEGHEPISRYPILAKRWRDDVFLVGASIFCFQPWVTSGLVEPPANPLEVEQPSIRLNDVDNVGRTGRHMTCFTMGSHTVINKPDNFIYWEDETIRLCHEFFKSIGINTEELTFIKSWWKGGGNEGPCYEVCCRGVELATLVFMQYKTLENGDKEEIPIKVVDTGYGLERIAWISQGTPTAYDACFAPVVDKLKEITNVSVNEEILARNAEIAGMMDIEDIGDIRDLRQQVADSLNISLEEYLENAEPMEAIYIIADHTRCLAFMLADGIIPSNVKEGYLARLVLRRTIRFMKELEMEESLSDIMAIQLDFLREFYPEIAESQEHIMNIINLEEERYAKTIEKGKKTVKRTIKRLKKEGKTSMPLETLIDLYDAQGMPPETVEELASGDKDFEVFVPDNFFTIVADMHEEDKVAKKETFELDVPETELDFYKDIYQKESDGTIIEVVEKDGNLNIILDRTIFYPEGGGQPSDIGIISIEGTIYEVVYAEKLDGVVLHRIATKEDEDVASLVEDLRKYIGTEVHMAINWNRRITLARHHTGTHLVIAAARKILGQHIWQAGAQKGLARSRIDLAHYKRITIGELDEIEKLANEYVMMNIDLDINWLSRDDAEKKYGLILYQGGVVPGSQIRVVKIPGIDVQACAGTHLSRTGEVGPIKINKTERVQDGVERIDFSAGLAAIDSIQNDKAIIKESSDVFSVTNDQLPKTCERFFNEWKAQKNEIARLQKEIANLKVSTLAENAFEVNGLKVLKEILDANIKELQKIATDFTDNDKVDLVFIGNNEGKIVGSASKNAIDSGVQVNNIIKEAASLLGGGGGGRPTLAQGAGPNADKMADALDLAVELLNK

SEQ ID NO: 4926 - protein, 815 aa, Methanobrevibacter ruminantium
MIKKITILSVILILFLAVSTVAAIDVDTNDNLDDGSSSNSDLISSSSLDSSSSDDVSSGSSEVSSSDESLDGNNLSDGNVSSSDESVGADNLSDGNVSSSDESVGADNLSDDESSSDALSEELPKTETVIKADPINYNYASVKGLTINLTDSAGLALSNKTLTVKVSALNKTSNLTTNSKGQAIFKLSASVGSYDVFISFTGDESYAPSNASSKITIKKSSTKIKLSNIHGYLTISNYVSVTLLDSAGKPIKSKSVTIQVNKAKYNVKTDSKGIAKVKVANKIGTYSVNAKFSGDKNYYASSNSSKLTITKMKVYIKAPSVKYYMTNSSAPYLTINLTNVKGSPLAKKKVSVKIGKKTYTLKTNSQGIAKFKFTKKVSSYNCKINFKATSNFYGASVNSKMTIQKMPTSLKAPSVSINSTNYGKVLISLKDGKGKALKNTTVTVNVTELKKVFTLKTNASGVATFSFNGEKTFNLKIKYAGNKNYAASSVSSKINVKQIKVKLSDVIGASRVLIDYVNRTKDLPSNVQYNNYNFTVTQLTYLASKAVKNINNKNYGDIVLISVPKSYKSSGEIYDTVYKKDFVKIANSVVGSSYNYKNKEYVSYSIYKVPFKVYSISFAKVLNFYGNNKKLPNYSLFTLADFAKVKDNGGYNFYLTTDNIAGKKSDLNMLKSLAKTLKSMGYNAVIVGIGPDIHNVAYRYGCTGNNSVLLACFGGVDVGCIEEWAGDLGDLNGHSFVNSYQGAHVLGLWFTKPYGASVSLNKKVGIAWDADYGFPLNTPAKYMKSHNISYIETGTVANACKLLSEGKMGGPQLIS

SEQ ID NO: 4927 - protein, 386 aa, Methanobrevibacter ruminantium
MRYFMNYDLIIARYGEVALKSNRVRRRFESRLVNNIKASIDAEVKVNQARIYIFPKEFDDAIEKLERIFGIVSYSPAISTKSTFEDIEKTVGEYAEHLYEEGLLDENTKFAISCRRVGQHEFSSQEMAAFAGAVVVRKYSCPVDLSNPELTIYLEVRDGDAYVYHEKIEGPGGLPLGTQGKVVSLVSSGIDSPVATYLMMKRGCQVIALYCDNEPYTSPEALQNFNDLIDQLNLYASGAPIKRRVVKYGEYLSTCKAEAPDKMTCVLCKSGMYKLAGKLAKKLNAEAVIDGSSLGQVASQTLPNILATREDLDVPVLSPLIGLDKLEITRIAEKIGTFEISKRDDGGCKAVPRYPETNADLEFVKQVKEEMNQDEELEKAFKTIVY

SEQ ID NO: 4928 - protein, 208 aa, Methanobrevibacter ruminantium
MRDCSNCNRESCLLQKVAGIIMVFGSLYYILAELISAGFFNDSLINTYLFHTISELGVPVANSPLSFLMNSAFILIGITLLLGYFAKFRDFIIKYKLIISILAVITALGVIIVGFIHAGNPLTDGYHSLGAVMAILGGNVMLILVSRAMAEFESYQKITFILGIIGFIVFWIMFFNLESLYMPVFERLSVYTLIIWNFMTGFYLYKNS

SEQ ID NO: 4929 - protein, 188 aa, Methanobrevibacter ruminantium
MNTNRFETFFDAIIAIIITVLVLKLSQPAAPTVPAFLALNARFITYAICYLALFIIWYDNHNLFQVVEEINNTVLIIYAIQMFAISLLPYFATWVALNVNSIAAETMFGIDFLAILILYVLSIYAVYRADPYNCGISKNNFRKIYCYIPIIIVLIGIFNKLYSLYSRNICLHSDCTDLLAFLFKTSKT

SEQ ID NO: 4930 - protein, 173 aa, Methanobrevibacter ruminantium
MITVIVLEIPMAVDGSWGALLDIKLEFIVYAVSFIVCFNFWNYNNNVFSMVNKIDHKVIWSIGIAMFFLSLIPYLTTFVALNPDAFLPSFLYGLDFIIVAILTIFTINALKNSDKANIALQIALADNQPYVTTIVFVLFGMIVGYFIYPLAIVIACLFSIITLWLISYYKKHG

SEQ ID NO: 4931 - protein, 366 aa, Methanobrevibacter ruminantium
MKTTVSVIKADIGSVSGHCVSHPALMEKCDEVLANALETGILEDYYITRCGDDIDLIMTHRNGELNEEVHKTAYDAFIQATEIARDLKLYGAGQDLLSDTFSGNVKGMGPGCAEMEFKERRSDPVIVYCMDKTEPGAFNLPIFKIFADPFNTAGLVIDPSLHDGFSFEVFDVMEHKKVVLDCPEEMYDLLALIGSTGRYVIKRVFKKNGEIAAAVSTDKLNMLAGEYVGKDDPVAIVRAQSGFPANGECVEPFAFPHMVSGWMRGSHNGPMMPTSQEEANPIRFDGPPRVVGLGFQVTDAKLVGPVDLFDDPAFDETRRQSANIATYIRRHGPFEPHRLPSEEMEYTSLPGVMEKLEPRFEDMDDD

SEQ ID NO: 4932 - protein, 125 aa, Methanobrevibacter ruminantium
MSFCPNCGVERKEGSHFCHHCGYDYREANSSGMGSSSSSDSQVNQNPSFNSQVNQSSTYNVPTKQNPHNFAKITGYILSFLIPVFAIVIGIYLILSKNEEVHKHGIIIIGISIVVQILSMIFMMG

SEQ ID NO: 4933 - protein, 170 aa, Methanobrevibacter ruminantium
MILKTARLILRPWKEEDAECLYHFAKNPKIGPIAGWPPHKSVEESLEIIKTIFAKKETYAITINDKAIGCVGLLFYPDTNHKWENEGVELGYWIGEEYWGQGLVVEACNELIRHAFEDIDINKIYASFKYENHQSKRVLEKLGFKYYCDLKNKDYTGEEFYEIAMFLEKK

SEQ ID NO: 4934 - protein, 63 aa, Methanobrevibacter ruminantium
MADVDVTEIRIILEDLSKDQLTEILEKNGYTSKGSEKFLIKEIMTKISHDIIIDELDQLGVLD

SEQ ID NO: 4935 - protein, 80 aa, Methanobrevibacter ruminantium
MKDLESEEKIAIDIAKLERNLNQVEDIKFEGKEKEVYDRAIDYWNDSKYYLEKKDTRTAFGCIEYSHGLLDALRMIHGLI

SEQ ID NO: 4936 - protein, 198 aa, Methanobrevibacter ruminantium
MLESLRPFLTKILEPIASRLNINPNIVTIISPFLAIISAYFFATGNLIGGALFILLSGFLDVVDGAVARYHNRSSPFGAFLDSTMDRFADAIIFIGIIFGGYCNWFVGVLAIHSAITVSYVKARAESQGVECNTGIAERAVRLIILMVGAVIAFIFNSDIIFTYFIYILVVLSYFTVGQRVYHVWKELNKKKIPQRRL

SEQ ID NO: 4937 - protein, 221 aa, Methanobrevibacter ruminantium
MKIFKMNPENPDMDLIDEAIDIMAQGGVILYPTDTVYGLGANIFNNQAVQRIYKIKHRERSKPLSVLVSDIESLELIAHLDDHSREVVNKWLPGPFTFILNKQKTVSPYVSSSTKVGVRIPDNKIARELASIFPITTTSANIANEETLSNPHDILKQIGDCIDLAIDVGDLTGGKPSTVIDLTSAKPSLVRKGLISNDLESIKEDIGDMDSNKNDIDDMNL

SEQ ID NO: 4938 - protein, 231 aa, Methanobrevibacter ruminantium
MKILSTMQDYEKISTNSPLDELLDGGIDKRTITQIYGPPGVGKTNVSLNIAVNVARSGKKVIYIDTEGGISVERIKQISGEDFDNVAKNIVVFEPTSFKEQEEDLELIEDWLASNNSEVELIVLDSAVALFRVEDDKSRSHLLGKQMQQLAKFAVDYDLAVLVTNQIYASFEEDSDEMAPVGGTIIQYRSKIIIELKREEGSSERIAILKRHKTRREGLAIHFSITNNGIE

SEQ ID NO: 4939 - protein, 386 aa, Methanobrevibacter ruminantium
MIQKKKYAKAAKIIPEGYKSANQFFESVFQDKEMIWMGQNTNELHIGHNEEVHKAMIDCIESDEYCKYPPPEGFTELQSLILKDLDLEDLSIYINAGATESLYLAMNAVLSDTDNVITPDPGYLIIDNFASRFAGEVRAVKIYSEENNYKLTPKLVRENMDENTRVILLIDPLNPLGSSYTEEEIKEFAEIAKENDLFLLHDITYRDFAQKHTLAAKYAPDNTITCYSFSKIFGMAGLRLGAIVSTQEVIDVVKSIIINDVGTSMVAQAGAIAALKTKPQWIDRVKDTTFENQKIIKEAVDQCEGVFLPVYPSSGNMMGIDLSGAGIDSEDMSQYLIDRKVFTRQGSYTSNTFGHKYLRVSYSIDPEKVKVFAREFVLAVEALRTK

SEQ ID NO: 4940 - protein, 591 aa, Methanobrevibacter ruminantium
MSRISILDKDKCQPKKCNTVCMHYCPGVRMDEDTIVIDEKTKKPLISEELCSGCGICTNRCPFGAISVINLPEALDDPIHRYGQNSFELFGLPSLKEGTVLGLLGQNGIGKSTIMRILSGELIPNLGNYEEEATWDKVIEYYKGSSLQNYFKALQAGEIKTIHKPQMVDQLSKVVQGNVKTLLSNVDERGKLDEIIDDLDLKNVLERDMQNLSGGELQRVAIAATVLREGDFYYFDEPTSWLDVRQRLNAVKVIRSLAEAGKSVLVIEHDLATLDALSDNVHLLYGEPGGYGVVSGNKGVRVGINAYINGFLQEENVRIRKQAIEFSIRPPTPEDDGEVLSEYSDLKKEYDGFTLEAEAGKIYHDEIVTAFGSNGIGKTTFAKILAGVEKPSEGNILEKVEIAYKPQYIESDFDGTAQDFLFANAPTYGSNIFNSEIGKPLALENLLDKKVKKLSGGELQRLALAVTLSQDADTYLFDEPTAFLDVEQRLIAARVIRKIVESRNAASLIIDHDIVFIDYISDRAMVFSGEPGLNGKASKPADLRTSMNQFLGDLDITFRRDKETKRPRVNKYDSYLDREQKEQGEYYYLKE

SEQ ID NO: 4941 - protein, 112 aa, Methanobrevibacter ruminantium
MKQVMVVRTDIKMGKGKIAAQCCHAAIGAYKQADKEKIRKWENEAYAKVVLKAPTLQDLYNLREIARANGVAYYLVTDAGRTQLPKSTVTVLGLGPDEDDVLDKITGDLKLL

SEQ ID NO: 4942 - protein, 271 aa, Methanobrevibacter ruminantium
MNKIKKHESKFTNNRLLNPAEYMPKEEVETLKQVSYLIVLFLLFIFFIYSFWPMANMKFFSFLEIVLMVYIALNIDYSNWKNKVLFFFLVPYGSIAWFLFEELTNSLFDIFHMIILLYFMKVYYEKFREYTETNGLGITILLLFTIIFISFILTMIVEGVSPIDSIAMVSNAFTSNGYAVLGSSFGGKLNSILLVWSGYILSGVGTATMTVALLSKHFNKRIKENEKTNEAQYAELKEMIERNNEEIKEILKENNLEKKTEEELEKKIIEP

SEQ ID NO: 4943 - protein, 236 aa, Methanobrevibacter ruminantium
MNYLNQNYATVFMGNDFLLIIASLIIMIFIFGYGSVITKDVIRGGKKLPKIYIKECTIYGIKCVIVALIYSAVQTLVMVDLSHRFLFPEFELEHALTDITGTLQMFTANNPILIGEYVVISIILTYIFVFFMEISLARLADGGKLLESFNLLAIKRCIDTIGWKKYTIDYTKLLLAITILTYLQYGFQFLGFFDYITDLIFGLLVFIIQFIGIGQIYKIYKIKKYSNLDRPTKKSV

SEQ ID NO: 4944 - protein, 304 aa, Methanobrevibacter ruminantium
MSNKKSFLAKIEEIILMQTKPDYMDSYEKVNDLIKERLNAQEKPPKSALFKSTYLNGTQIFHYGNSQSKNLIVYIHGGAFINEIGFQHHFFCSYISKKLDAYVISPVYPLAPKHSCNETFNQITDLYKSLIEENKSNGDNKNNNYNNSNNNKSIYLMGDSAGGGFVLSFCQYLKTVNLPQPDKIVVYSPWVDISMDDSPYDNESDPILGEIGLREIGKSWAGELDTKDYRVSPLFGDNSGLAPILIFAGDNEIFYKDILKYYEKLKEDNVDARLVVGSGMFHIYPLFPSPEASEAFKELKKEFE

SEQ ID NO: 4945 - protein, 347 aa, Methanobrevibacter ruminantium
MSKNRIEWIDLVRALAILTVLYIHATDGIYIISSDLIPYWTPFSRVFQFISLFIGRIGVPFFLMITGYLLLDRTYDDERVKKFWNKSCKGLVIVTIIWSLIYAVSIQLVAYSSIQVNTIEAGNLFFSHMWYMPMIIGMYLSMPFVANALKNFDPRTINQATIVFSCLAFLLPFISIVCEMQGLQNVNIQYCLGFSGGVYGIYIILGWLVKKGLFKKYSSNSLRLLAIVSFIICVLFQWYAFSIDFSFSLWYEFPFILTGSFALFELCSRREKVRGFRGVEFLAKYSFAVFLIHNLFRIILLPMVVYLPYTEPVKAIILWILLIITSYAAAVIIYRIPKFGKFILYMR

SEQ ID NO: 4946 - protein, 99 aa, Methanobrevibacter ruminantium
MELIKNYNEKELTIETGNKIDTTTAPDFENEIMDEMGNFDSLTLDLKNLEYISSAGLRVLILVQKKLKADDIPFVIINTNDNIKNILTMSGFDKILNIQ

SEQ ID NO: 4947 - protein, 210 aa, Methanobrevibacter ruminantium
MIKLAYCNVEELDLKRAYSLVSKSRQEKIDFYRFDKDKKLSAGAYLLLKRLLSEVNIKDFEIIIEKYEKPRIVDHENIYFNISHSSKMVLCAISDKELGVDIENIDGEIDLNIAKNFFYNDEYKSIMNCDNPSDEFFKYWVLKESYMKYTGLGMNLKLDSFEIVIGDEIKLKDDDSDLKFNLFEIEDYKIGIASHYNVYDLIEYDLKELY

SEQ ID NO: 4948 - protein, 624 aa, Methanobrevibacter ruminantium
MKTKLKQILISFIVTTIFYFALSQTFITQLGLGSPQIGLLYVFGLLFGPFGALGASLSNVAIDVYHGYTFVQILPSAIISFGVSLLAYKLWYSGFKSDEYTKPRLDTIYHLCLFLASIIICGMIYSVGHGNLAYILISPDIEESIIIPSFLNFTNVAFIMGIAGIWLFKRTNLIETPKKSERRLNKNLYRLIFSLLMVMTIVSFIFIIRNSDNLTIITGLIIVVALMYAYMTKPFIHEIQEVNENSIIAKIVRNFIIITLILGFFGGLVSIASFDYVETSITLNIYLHLMPILVISDIIIILFFIPGIIILKYIGDNVVKPITSFSEIEGFIKEDEKIEAEGLIKVYSEYVNEQNEIGTLARSYTELINHNNNYIENIQKIEGEKERTNAELDIATNIQAAALPTEAIKTDAFIVNGYSKPAKEVGGDFFDYYELDDGNLAIVIGDASGKGVPAALVAMITQVVIKQTLINNHDPSEVLFSLNNQLCVNNPESMFITLWLGIYNKTNKKLTFSNAGHNPPLIKENGKFKYLDIESGIVLGIMEDFQYEDEEITIDGELVTYTDGITDANNNDGEMYGEDRLLEFFNKFKSDKDPILPLLKDINDFTKDTEQFDDMTLLYLKVND

SEQ ID NO: 4949 - protein, 125 aa, Methanobrevibacter ruminantium
MNSMNFKVEIDELHRLNEFILNELPHEDFMVNLIVEEIFVNIVNYSQTEYIIVNLDYKEPNLTIEFVDNGIEFNPLSKEDYEAPDSIEDAKIGGLGIHLTKEIADELDYHYEDGENHLMIVKKVE

SEQ ID NO: 4950 - protein, 105 aa, Methanobrevibacter ruminantium
MSSSKEYLEYILEQLSELDEITYRAMMGEYIIYYRGKIIGGVYDDRFLVKPVKSAREMMPNANMELPYEGAKEMILVDDVEDKEFLRELVEAMYEELPAPRKRRK

SEQ ID NO: 4951 - protein, 156 aa, Methanobrevibacter ruminantium
MDILAKLLNDKLAFAEISYTIEEAKSISDSNKIPIMICSEILKENEPFAHSWDVTSDSIAAYIASLLDAKLLIATDVNGIYTKDPSLSGAELIKEIDVNELLTFEESSIDLMLPSLLIEYGLDCYVVNGEYPKRVLSIINNEDCSFEYTFIRNGND

SEQ ID NO: 4952 - protein, 53 aa, Methanobrevibacter ruminantium
MEKVNCQSCKQEIPLIEPYVQFNCPECGRPIARCESCRTFGHSYKCECGFEGP

SEQ ID NO: 4953 - protein, 89 aa, Methanobrevibacter ruminantium
MGEVVNTLKVMPESPEVDLEALKVAITDAMPEDAELHEITEEPIAFGLVALNVVFIVEDGEGGTGPTEDAINAIEDVASAEITDSRRLM

SEQ ID NO: 4954 - protein, 416 aa, Methanobrevibacter ruminantium
MFDLLAACFIGIAIGTGTGMVPGIHVNTAGAIMFASSGFLLSFLSPEFLCIVMVSMSIAHALIEFVPSMLLGVPEEGTASSILPGHRMVLEGRSKEAIRIVSVGGFGAIVVVILMLPIFAVALPFLQDLSKPYTWMILTVVSILMIYKLSNGRLAFMWSILLFVLSGILGWIMLQTPISSGISLMCTFSGLFGISTILFSLNDSSSIPHQNKYYDFVIDKDTIKSIFAGGTAGAILGFLPGFGPAQGSIIAQGVCGTSADGDDTKNFLLANSGLNTSDTLFSLIAIYLIGNPRSGIAVYMSYLISEFTLSHLMIFTFASLIAVSISLIICLKLGDGFSNLMQGVDYRKLSISVILLMIVILYIFAIIYEGPILYLTLALITSTAMGLLPHYLGVSKSHLMGVLILPAIIIYMQMFM

SEQ ID NO: 4955 - protein, 504 aa, Methanobrevibacter ruminantium
MAKTIIPKYKVSKFEFTEEERRTLEELRENLIDLAISERMSNFNEDLILNDIIRFLDNRLFSNADYVRNIDFEKLDSFNPSKYKHIGNPKRYSQFYAIFKDEIEKYKNNLARNMFQELIGYGEIGFLIDDDDLEEIMVIGLNKPVFVYHREYGMMETDLIFKEEEKILSIIDSIARETNRRIDQQSPILDTRLPNGSRVNATIPPLSADGPTITIRKFKKDPLTIVDLIRYNTLNTEIASFLWLCVDGLGVKPANIIVSGGTSSGKTTLLNALSIFINPKERIVTIEDTLELQIPHKHILRMEARTVNIENQGEITIEDLVKNSLRQRPDRIIVGEVRGKEAITLFTALNTGHSGFGTLHANSSRETITRLTNAPMSVPKIMISSIDFIIMEKRIYKSDGLSYRRITEIAEVVGIEEGTIQLSKLFEWDSKKDEFKNLTILSKTLENIASLKGVHISILNEEWKNRKKVLDYLVRNDISSQDDISKVLEDYYINPDYVLNMISN

SEQ ID NO: 4956 - protein, 183 aa, Methanobrevibacter ruminantium
MVIFIFDKFFIQLSDSIINFLVSISNLFLSFFDKNNDSKEKWGNETNQFDSSKYEELNYFNNFKSVNLNYSDNSNSGDDLKNENYSFISNLNLSKIFNNENIFEYLENKYLNKQAMFITPNGTNENESNKNFLYNLKIKLVVLILDNRFFQIRSSQDLLKLLFYVLFNYNKSFFHSYCCICFF

SEQ ID NO: 4957 - protein, 201 aa, Methanobrevibacter ruminantium
MFFILFALFILYLPKIRHENDYSSISKELPYALRQLSTELRAGKSLFDALDSIVDSDYGVLSREFSRVLEEIKYGETSENAFLNLEKRVNSKALSRVIYEILASLRIGSNLSHSLNIIAEDVNFDMRMKLKEYSEKLNAFIMIYTFLAILAPVIILTMLLAASVVIGDIVPSSLLFILYGLFFPMIIVFLAFAIKKLEPKL

SEQ ID NO: 4958 - protein, 502 aa, Methanobrevibacter ruminantium
MYELIKESINSDESALELAKSKKDVISVVDAISDLSFEDTMKLGTRFKKFPIGCDLTEVVVGTCASDLEKMDLFGNCMLANMIGAPIHICAYAFSDIAEKYGQRGVEIMEEVYNITDVPLDLDHFGKYGAMRFPKHIVGCGGDCYNQGPSFTECPRGRIHERLLDKEKAELDDKETWVQLSSSVAINLSSEQCNDGHAAPLEEAQDLADLAKKYGKGLEAIMFVGDGYDELITGFTKAIEMGVDVFVIEGGPFNRCENTNESFAKTIAMSRVLCPGKVVATNGAYESECRAGLRSGLNVIITGFPKNHHGYMCGFEPGTARRGKFGLPRVIKIMNEEISAGPTRVPVQREELLALTHAVKLAGPENIYPKTIGSFAIGDAHWATIQNSKMYKEMYLPKTLEEIADSVNGNSVSLHGGRFVSWLVAKELDKKGIDEIIITDSNPWVEKVSVDNLQEELNATIIRGHADDKGAGMIAKESIVTTTIPKIHNAIKSKIPHAVNII

SEQ ID NO: 4959 - protein, 338 aa, Methanobrevibacter ruminantium
MKVAILGAGCYRTHAASGITNFSRACEVADATGKENISMTHSTIEMGAELLELAGVDEVVVADPVFDGEFTVVEDFDYAEVIAAHKAGNPEDVMPAIRAKVGELAETVPKPANGAIHFTHPEDLGMKCTTDDREAVADADWIMTWLPEGGMQPAIIEKFADVIKDGAIVTSACTIPTPGLNQIFEDLGKNVNVASYHPGAVPEMKGQVYIAEGFADQAAIDTLKDLGAKARGSAFTLPANMVGPVCDMCSAVTAITYAGLLSYRDTVTQILGAPAGFAQMMANEALTNVTKLMADEGIDKMDDALNPGALLGTADSMNFGPLSEIVPTILESLEKRSK

SEQ ID NO: 4960 - protein, 333 aa, Methanobrevibacter ruminantium
MIESILEKAKNREKLSRNELIQLFEIDDEETLKELCKIACDIRNECSDVIKLTSTIHLTNKCQVQPRCKYCGFAAKTSSIGYYDAFYKSDEEIRQAAMCVERSGIPRISCSGGHGYKGKQAVNAAKIVKGETSLEILVNVGADLTQEAVDELKKYDADTVCCNLETTNEDVFNFVKPGEKLSDRINICRMVSDAGIGLSSGLLIGIGESYEDRVDHLLFLGSFESLEEIPIMGFNPYVDTPMENHPPCSIEEQLKTIAITRIMYPRIRITVPTPTIGPENVELPLMAGANNLATVIPEDYPLVVKGVGNPEYGNLHEVISVVENLGLEVQLHA

SEQ ID NO: 4961 - protein, 157 aa, Methanobrevibacter ruminantium
MAFEESIRKASIQSYEGTRKGDTIEEIEAIQNYIRNAKIVVPNKNGIKVEVINEVLAKFNIPPAEYLQVNTNYADFSRMPAIAKAMIAVDQSDADLVIARGRLGIPGSGSFLVFMDSKSRILTAATSPSHIIHNQPLEKTVYKETLEALKKVGFKEE

SEQ ID NO: 4962 - protein, 135 aa, Methanobrevibacter ruminantium
MNNQDYDTGISSEVFTVKSNIKLIDIFNLILEKKARAVMDLFDSLTNKETIHNESSIIIIGTYFTGIAIAKYLSYNGFKNITIVDIYPHLEGFIDSNLGDPIDVNKSSKGKFKENIEFSSDLGLIRSADVVIDTT

SEQ ID NO: 4963 - protein, 146 aa, Methanobrevibacter ruminantium
MGGIDESQSESIYTKVFLIEDPIAEDNDDLLKNKNNIYSRISLVNSYNKFILKTEGLNTKTSGTMTLTIDILRQSMNEILSREGVLYCSSEMTFFEEIVFKENDLDKFFELIGSPVIKVSTIAPFDCEEIIKCFIDKIYSEILIRW

SEQ ID NO: 4964 - protein, 242 aa, Methanobrevibacter ruminantium
MYANDIFNIIDELVPRKLALKNDKFGYFGKTFDNFDIKNIKVILDLLPEDDLKFDKGDLVISHHPPLFMPKTPTYVVHSNWDIVQGGANDALAYYLGLKPISIFHKQTGIGRICSSTKTLDQFLALVCYKFGPENVRLVHDGDFDKMLRKIAIVSGFGLSNKEFIKLAKDRSVDAFLSGDLNHSNAIYAKKLGITLIDVSHHIIEIPGLFALKELLRRNEDITVPVEMIDNGVPWKYISADF

SEQ ID NO: 4965 - protein, 214 aa, Methanobrevibacter ruminantium
MIQEMENSLIPKGSIDLVGFGRLGLRTGINLIQVHRGGPAKITVIDGQKISESDIIFLLKGAKVGTYKSDFLKEISTHSKDFREVVSITEDITEDNIDLITGDVVVIEIAGGNTVPTAAKIIKKAHENGSKTIGTAGIFGIGDEEIVVADISEFDDSNPAIEELRKEGILDNHLVISTNRFIRDGIPITPYVLDDIANIITREALKLLIEKNNE

SEQ ID NO: 4966 - protein, 202 aa, Methanobrevibacter ruminantium
MITIATAECFTHGILAREIHALAQDYDDIFASSYWGLVNKVQKDCIKDAILEDKCSIFDLRDLSVSCGLFIPTLDAVKSVLKIENPLEPLTLIDGIKVYDDDGDREMAILMAEAAKKVSGSDIGIGTTAGIGYGGIAIVDDDIVISTSSDVYADLVNVDSDDLYMRQRSGIEKTLKILIYYLNDNLDIINQMNNVKIYNKSE

SEQ ID NO: 4967 - protein, 722 aa, Methanobrevibacter ruminantium
MIFTIEYDKGTRLRVRCGKEAFTKEESYGLAETLIDYDFIDEVKVSHRNGSILVLYNDPKKRIEILRIISKISQDNLYETKASDKAALEELNDKFAIKIAKHILKRYLFKIILPIPLRKLRMLYHASSYIWRGLDSLTSFRADVALLDGTAITASLLTKNYKSVGSMMFLLSISEMLEDYTMQKTKSTLKSSLALNIDSVWKVEIDDEGNEIESQFPLSKLEKGDKIRIRTGAIIPVDGVIADGDAMINEASMTGESLAVHKDNGKAVHAGTVVEEGSIVIEVRSVNDETRLNKIIDMIEDSEELKAGIQSKAEKLADSIVPYSLAATALTYLITRNVTKALSVLMVDFSCAIKLTTPISVISAMKEASDNRIMVKGGKHLEAYANADTIVFDKTGTLTNAHPVLEKVIPCGKYDRDEVLRIAACIEEHFAHSVATAIVKQAEKEGLHHEEDHSEVEYIVAHGISTTYDGKKAIIGSRHFLEEDEGIRFTKKQEKLIEENAEEYSVIYLAIGKKLQGILCIADPVRDEAHEVISQLKALGIENVVMLTGDSENAAKRIAKDLGITRYKSQVLPEDKASIIQEIKAEGHQVIMVGDGINDSPALSAADVSVAMRNSSDIAREVADISLLSDDLYDLATLRLLATGMLDKINTNYRHIVMFNGSLIGLGLLGVIPPTTSSLLHNLSTMLFGYRSTKSVLGEKEEVVIDTNVINNDGALIGQSGK

SEQ ID NO: 4968 - protein, 92 aa, Methanobrevibacter ruminantium
MVDRHEIVDKMYENKHTLLFVGGIATAIVGAKILKSQTTKDYAAKGMAKVLTCKSDLEESIQDIKDNAEDIQTDAKAAQKEAICVDVTEEEE

SEQ ID NO: 4969 - protein, 77 aa, Methanobrevibacter ruminantium
MIKKLSELKSGEQGTLSSYGTGGDLELKRHLLGMGFIKGADIEVEKVAPLGDPMQIKVKGYSVCLRKEEARNIDVEV

SEQ ID NO: 4970 - protein, 671 aa, Methanobrevibacter ruminantium
MANLKIGLAGNPNVGKTTLFNNLTGLNQHVGNWPGKTVAQAKGSYKHSGNEVEVIDLPGNYALSAHSIEEIVSRDFIVDEDSDVIVNIIDAANIERNLYLTVQMMELGANLVVALNMNKYAQDKGYTINADKLSELLGVPVVEIEANSDIGKEQLLKTIEQAAANPVDSSKKLVYNNELKEHLAELQAVIEEDKNLLDVPSSWIAIKLLENDEIVEEKIEGSSKRNNIVNETQKVKDHLKGIFGEGSEEVIANARYAFIDGLLKESLTKPDHLKTTISEKIDRIVTNRILGFPIFLVIMYAMFEIVFTFGAPFQDLIDEFFGILGDAIIGSLGETMLSSFLVNGLIGGVGGVLVFLPQIILLFLIISFLEDCGYLARAAFVMDKLMHKFVGLHGKAFIPMLLGIGCGVPGIMATRTMENEKDRLITMLIVPFMSCSARMPVYLLLVGAFFAANESLVIFSLYLLGILVAVIVAFILRKTTFKEMDAPFVMELPDYKLPTIRGIIMHTLEKSWGFIKKAGTIILVASIVIWMLSYFPAGVEYGSADSAIGTIGQVIAPVFAPLGFGEWQPAVALLFGLVAKEVVVGTFSSLFGVAEEGAEIAAAMHGIFTPLTAYVFMVFVLLYIPCFAALGAIKQETGGWKYPLLMAGLTLVVAYVVAFIVYMIGLGLGLG

SEQ ID NO: 4971 - protein, 65 aa, Methanobrevibacter ruminantium
MQCSMCGYEFDPLEGGPCGACGQCKGCNKAFCPRCGYGNSLSTVKEFDYISKLQAKLRAFKSKAK

SEQ ID NO: 4972 - protein, 208 aa, Methanobrevibacter ruminantium
MHIPDGFIPLWQCAIYYVILIIALYFAGKWAKANLDEKRIPLLAVLAAGIFAIMSMNMPIPFGTSGHMVGGALVAIVFMAPEAAVLVFTAVLLIQALFFGDGGITALGANVFNMAIVGGCVGLYTYKGLNGIIGKYPSIFLGAWLATLVAAVVCALEMAIAGTFPLSVGVASMALYHAFIGLIEGVLTVIVIFALEKYRPDLLAWNRE

SEQ ID NO: 4973 - protein, 97 aa, Methanobrevibacter ruminantium
MELSKSDKYLIVVGIIFCLALAVLSPYIASGDPDGLEKSAEDANVGEDVEAPVMEAPFPDYTYEPLEKIGEIGVLILGALITLIVAWGIGYALKRSE

SEQ ID NO: 4974 - protein, 276 aa, Methanobrevibacter ruminantium
MAIEEVRNLEVIASKDTIIHNLEGRVKLIAILLIIVFCVFSDRLIVPLVLEIFLLIVMYLAELSFKDSFKRIALLLPFGGFVIAFQPFIHPGNIIWQGPYPWLFITDTGLNWTVLLFARLIVCLTAIVILSSTSPMQEVVQSFRKLGMPRDLAMILTIMVRFLFIFVDELRDIRQSMKSRNFDPFNKKIPYKWRVKQVGYSIAMMFLKAYEKGETIYLSMASRCFSDNSRLYHAKTIIGKHEYIFLACVIGIVIVLELVVLFYSGNLDYLGVSLSL

SEQ ID NO: 4975 - protein, 449 aa, Methanobrevibacter ruminantium
MSLIYSITSTITRNIEKILRESLLFTIIFNILEFIENQWVNSYFKGLYPSERFLSIVNKSKILKEEIFSPLIVLVTFTLFILLATDPVPRDLQTTIIIAFLSFFIGAIIFPRFILNNQLNQLNDETNTDNKESKTDKSKQIPLFNSYDVYSIGFCLSLIGIVFLFLSIASVGGLPILKSSLRYSLKPAFTMPVFLIIPGIGLMASHYLNQYKNNEISRSQTRFRFLVLTAIGIGTVLTLQYRTPIIAILLMMIIIGYYGKILSVWEVILGALLGVCAIIGIGYLRSLNELAISSNTNIFSTLNSRANFTMHVLNLLNYISGNFGLMHGKMIASAMPGSDLGPRMMVGKLIAWRTEVTVTPTLLGQMLVDFGKLGVAVEMCLLGFLLGTGYKIVKITENSFYIALYGLILTYSIVGVETGILDIQILAYFFISAFIYFAVILKDKGIRIY

SEQ ID NO: 4976 - protein, 263 aa, Methanobrevibacter ruminantium
MKKPGILNKITIIDILIIICIIGAVGFAVYHMVDDDSTKASATSFDYSTNNKMLETYMNYYKDGKIVTSSLIGTKSNTGEKIEMNGTVLWLGDNQNDKVNIEINNDGKPILAGFYKDTPNADVFIEQISLETNGDSYANITDFVVSPKEIKNLKEIISKIPNDTEYEISTSIAIDDLDSVTAQKLANALNKNKKPCIVLKNSGTVILEVNRANQTDFEIADNVLGDFKGQTSEIQIRIYNSTAQDSIDIQNAFNVLSIANTSH

SEQ ID NO: 4977 - protein, 53 aa, Methanobrevibacter ruminantium
MIDLDECGVCEKCIPVCPKELIEKKGYTMIIKDGCDDCGICLDMCPLGAIYEE

SEQ ID NO: 4978 - protein, 327 aa, Methanobrevibacter ruminantium
MAGLISGIVALFTSWLGVSGTVIGSVFSSFLYQFLSSYSAEKYEERVGEGTSRKPRNIGSEIVYIFPIVVIVIIEVIFILSDMHYVFDKIFDILEYGIFQNNLFRLMGLGLIALGVYPLLSSTNIEKINGEIVLVAGIYLFIRGMVDINDLTMQVHNMFFADFDFFIAIIVVLALVFVIFNVLRNSTQEYFNKEDGDYDAVNDEFTQKRFSKPRRKSKARKIDTSSFHKGQEYKEHYLNSDFNDKGHNQSPNPDSNMDDYHNDDLNNYQTPQEDLPIYEEEIIYLHNPEDPNNPIKKRILKRVNPDSHYDDDYDETYIIDDAKNDNF

SEQ ID NO: 4979 - protein, 105 aa, Methanobrevibacter ruminantium
MRFCPKCGKMLMPKNDILKCACGYEEKISAEVAEREYKFKGERKKENKVIVTDNNNIALPTTKITCYKCGGTKGVWWTVQTRSADEAPTYFIRCVKCGNTWRRSN

SEQ ID NO: 4980 - protein, 297 aa, Methanobrevibacter ruminantium
MTTNDKVSDYISFPKTFESYRWYKPILVFIISFIITLILGALIVAVFYLIMGPDFIISIFKGGAESLNTSMNIFFTDLIIIAFIPSLYIASKIVKDRPFSSYSSSRGGWNFRLYFKALAIPVILYIIYLGAESLILGSEGTSHFSIAFLAVLLISVPLQCIAEEYIFRGIIMQTLGSWIGIPLIAIVIQAIIFTLGHGYDALGLLETLVLGIAYGFFAWKTNGIEISSALHTANNFSLGLFIMLGLEASNSSFQLYDKIGGIVYLIILCIIMYYVGKKTDWFGEIPEDSQNIGLLNF

SEQ ID NO: 4981 - protein, 173 aa, Methanobrevibacter ruminantium
MIEIRFHGRGGQGAVTAAEILAKAAFKDGKYSQAFPFFGVERRGAPVMAFTRIDTEPINLRYQVYNPDHVIVLDDGLLNVVDVYSGLKENGEVIINTHEKVESESHKVFDVDATGIALEILGVNIVNTIILGYFAKKTGEVSINSLIEVIKETFPGPIGEKNAVAAQKAYDMA

SEQ ID NO: 4982 - protein, 80 aa, Methanobrevibacter ruminantium
MVSIGCAIYEPGSTRKNKTGSWRTFKPILDKDACVDCNNCLMFCPEGCVNKEHDIDYDYCKGCGICKVECPVQAIKMEIE

SEQ ID NO: 4983 - protein, 382 aa, Methanobrevibacter ruminantium
MAKEIMTTNRAVAEAVKLAKPQVVPVYPITPQTTISEYLAQFVADGDLDAEYIRVESEHSAISATLGASEAGVRVFTATSSQGLMLMHEILFAAAGMRAPIVMADANRAISAPLNIWNDQQDSIAQRDAGWIQLYVENAQEAFDTVLQAYRIAEHEEVMLPVMVCLDGFILTHTVEPVDLLEQADVDTFLEPYVPKFAFLDPEKPMSLGNFADPEYYTEARHDMQVAMDKSMDVIKEVGAEFGEKFGRTYGLTEPYLCDDAEIILVCMGSMASTVRYVVDNLREKGEKVGLLKIRAYRPFPFEEIDEIVKNADKLAVLDKNFSFGIGGALFADLKAKCHKETYGFILGLGGRDVIPEYIEEAVELTKNPVKEVTWLGLKEDE

SEQ ID NO: 4984 - protein, 288 aa, Methanobrevibacter ruminantium
MEFPEEELLAPGHRGCAGCGAAIAVRLALKALGKNTVVACATGCLDVMTSPYPETAWEVPWIHVAFENAGAVASGVERALKAQGKEDVNVVAFGGDGGTADIGIQSLSGAMERGHDLTYICYDNEAYMNTGIQRSGATPYGASTTTSPAGKQSFGEDKPKKNMAFIMAAHGIPYVATASISYPEDFMKKVKKAAETKGPAYIHLQQPCTTGWGFKPEQTIQLGRLAVETGAWGLFEIENGEFRVTYRPQERKPVKEYLSAQKRFKHLDDEQIAIIQEFVDNQCEELGI

SEQ ID NO: 4985 - protein, 166 aa, Methanobrevibacter ruminantium
MEKLIVDNELCDGCQDCEKACAGVHGVPRITIHELDGSYFPIRCQQCEDAPCEIICPTGAMSNLGVDVTKCIACGFCAMACPFGAISIQYSNAHKCNHCADREEGPACVRACSKRAIAVHDIANVIKRKQREHIEKMYGLDKPAKKKGLLSVITTDTRARKPLDGE

SEQ ID NO: 4986 - protein, 142 aa, Methanobrevibacter ruminantium
MDELKVNPELCVDCGLCERNCPNNAIRVHDGVPLFCMHCSPEKAPCLAVCPKGAIVALGGAITIKQDKCIGCGLCHSVCPIGAVTINEIGQATKCDLCADYDTQQCVEACPTHALTNDTEKIIHDKQEKISEGFKKVQTLLK

SEQ ID NO: 4987 - protein, 144 aa, Methanobrevibacter ruminantium
MTFMNNGANIKQFQLLKFINENCNDDHVISKISIVLRRDKIEAPYYMNTKIRLSTCMDGEEKGVIHAMDILNHSRKHNLCEYKYDEIKSLIFDLFDSDHKSDQVEFSQNDNRLKISFMSKNDEEFRNLFENYHELFEKIDGLVD

SEQ ID NO: 4988 - protein, 84 aa, Methanobrevibacter ruminantium
MSDPLIIKKELLFNEYTGHEDGNCLEWVDGRLSNSDDHHRIPCNLEDAFEIAKKQKAVLVIQPEFQEQCIFADFTGEEIDENWD

SEQ ID NO: 4989 - protein, 279 aa, Methanobrevibacter ruminantium
MITEKQIEDTIYQLYKQAAIVLGDDVKSALEDALKREDSELGQLNIKAILKNIELAEEKSIPMCQDTGLPIIFVKLGNVQVENLYEGIRKGVARATEEVPLRPNVVDPITRVNSGNVGDKVPIVDIELIDEDYIEFTIMPKGFGSENNNALKMALPAEGIEGVKDFVVETALKAGGKPCPPIVVGVGIGGSSDMALKLGKKALLGKVGERNGDPTLAEVELECLNRINKDGKGPMGLGGRTTALDVKILKMDTHTAGLPIGVVIQCWADRHATARLRDD

SEQ ID NO: 4990 - protein, 529 aa, Methanobrevibacter ruminantium
MILIITGHLAYPLVKEMADKSKKETVVHIAETQVAAFLTPNQIIKEIHEYFEDRLDDIDLILVPGLIRKDTFLIAEEFGIPCYKASTDAADLAMVLDLVDELELSQSTPADKLIIEEKKKQALKFIEDFEKDMEKREELLKKENNILVRNLPVGEDFPMRVLSEIASAPILSKEDLIKKAEFFVASGSDMIDIGMIAGEDRSDEIPDLIDTLRPIVGDRPLSIDTLNPKEIEAAVNHGIDMILSLDNGNYHEILPLLKEKNVPAVILPTNFSEGYVPHSPADRVASMQKLVEACDGLEVVCDLILDPVNSASLVDSIIAFHDFHEVDKKPMFFGIGNVIELMDTDSVGANAVLAGIAMELGASILFTPEESGKTHGSVRELAIASKMMFLAKNRQSIPKDLGVDLLVFKDKKKRFDLKQDDNVPIVKQDRPIKFVRDKAGSFKIRVEHGISVKDSYIVATHFKKTKPTISFEGKTASEIYEEIIEKGLVTRLDHAAYLGKELEKAEIAMLTGKEYVQDFDLFKDPEEFI

SEQ ID NO: 4991 - protein, 118 aa, Methanobrevibacter ruminantium
MNINGDLMNKKITVDILMFIAIIVEFLSLPILIHEIVGVGLLFLIALHLKYNKRYFKTIGKGKYNLKRTLNLIINIGLLASLLITIISGIFSSQKSLKGMKIGNHKISHIHKSSSYLV

SEQ ID NO: 4992 - protein, 386 aa, Methanobrevibacter ruminantium
MNANPKILLYILMISALGINTPLSIVGIISQIAEYFNTSIAISGLYVSSFTFTIAICGLFIPVLFSKYNRKRTFVSILTVFAISNIAIIFTKSIYIASFFRILSAIFYPAFISIALTVCEEIAPKGEEQDYITKILLGISIGSIVGLPITTGLGTIFNYQVAMSWIFAINLLSLILIIIFFPKIKGKAKSYEMPFSSLKSKEFLLATIGIMMMPIGASIVYNYQPYFLQVVSHVYTYKLSIFLFIYGLFSIFGTWLGGKLIAKRDKATILIFQLICGGVFVLLYLFANYLIPVLILILIFGILDGMGYNLIQYIESSVIPDSPELANGVFLSILNGGIALGIAIGGFLVDGFGIMSIFIFGALFLLLAFIILYYIIGIMKMPLKYS

SEQ ID NO: 4993 - protein, 290 aa, Methanobrevibacter ruminantium
MTDEELTIEEIEKKLESTGYISNKEISTSVFLSLSLNKPILIEGPPGVGKTELAKALAQSLERDFFRIQCYEGITFEQIVGEWNYQKQLLHLEAFKGSKKGEDSIFEEDFFIRRPLLTSFMNEKPSLLLIDEIDKADEEVESFLLQALGEKQITVNDLGTFDLQNDLVVMLTSNAQRNLLEETKDRCLFLYISYPSVEREMAIVKARLPNAEDGLVKKVVNMVHRIRTFNLNKKPSVRASIDWVNSVMHLDKDYKNVDAALEDSVGVAIKTEPDKAKVVKEIFRNEYMND

SEQ ID NO: 4994 - protein, 386 aa, Methanobrevibacter ruminantium
MTERIVRLSNDLRKKGMPVSIRSTQTAIDAYALLGEDDLPTLKDAFRSIYVKSKYDIPKFNESFDGFFTKKQVKNLTDELNKSSRPNSMKGKLSQHEWKITKQKGKGGKQIQMGAEQAMEYFAGRPVLEDRDKDLARDNDILNSDLSKLNKYDERVFELCVELGRKIANKQSRRKRLARSNKIDMRRTMRQNMKYGGVPIDLVHVKKKPHRKQHLFLNDVSGSCEWISSWFFMLMFACQKTFKDSRMFEFDNRTIETTEFLKEKYMVNAFAEIRLLRMRNMMVRGTSNMYTAFQSFMKQADISNKSYIILLSDCRDWAGPKVDGVPASVELVSQMSSMAKKLVILNPEDKKKWDVVDSCVSLYRGAGAQVYEVSTLNQLAEFVADM

SEQ ID NO: 4995 - protein, 305 aa, Methanobrevibacter ruminantium
MQSCTKCGNPKIIIKKPASGQALCKDCFIESIEKKVRQTIKRENFIDRGDKVLVALSGGKDSVVTLDILNSYRERHIIDLCAVTIDEGIAGYREDGVEIAKAHAERLGIPHKVVSFKESFGIDLDEIMAKENHRGSCTYCGVFRRWIINRAARDFGATKIATGHNLDDETQAILMNYLEGNTENLAKIGPKTESNDELFTVKIKPLREIPEKEIGLYAIAKGLDIHLAGCPYAEESFRMEISNILKDLTKDHPTIMYSTLRGFDKMRPAIKEEFKSNFVYKRCERCGEPSSNRLCRACTFLEELD

SEQ ID NO: 4996 - protein, 66 aa, Methanobrevibacter ruminantium
MSFKLKIKDNVEEREIDGELTIKKLLDDLDLSSETMVTKKNGEIVIEEETIEDGDEIEFIQIIYGG

SEQ ID NO: 4997 - protein, 239 aa, Methanobrevibacter ruminantium
MSSNATGTRIHQYIKKETGCYDPYFYQKKEGNEIALSLMPMVREILKEDNDLETYVKIAIVGNILDFGTFDLDTDFESLIFEGLKKELVINKIDEFEEALKKYDNVLYLVDNTGEIVFDKLLIEKIKEYDVDITVAVKERPILNDACMEEALEAGLDEIADLITTGSDSVGVVESMISDEFKEILLDSPFVISKGMGNYEGLTEMDLDGQDVFVLFCTKCNAISKDLGLPEGSHILSKL

SEQ ID NO: 4998 - protein, 274 aa, Methanobrevibacter ruminantium
MKFGFIGFGEVSYTLSKLLLALDFEILSSIEGRSQKTIDLINSLDLTLLDSFKDVAKESDVLISANSPDIALDIAKNYGNLTNGFFLDFNNISPKTVFEIEDILSDDKFIDSAIIGRVNSDELNIYLSGSKAQFLLDKIKKEIGSKGIDINKMDFKINVKLISDKIGDVSKLKMLRSSYTKGVSALLVESFELAEKLDLEEELWEILSLTENRDFERSSKSRIDSSKKASKRRYEELVEVLYFLDNVDNVDESKIMARATKDKFEYLKNRENKE

SEQ ID NO: 4999 - protein, 432 aa, Methanobrevibacter ruminantium
MIAISADFDPVHKGHEQLIKKGKEIAEEKNSKLVIYLNKGYSANHAPFFTPFDARCRMAKALGADEVVGVEGLHHRLILSYSVPIRLAQMHEDGVTDYITAADISLEEIKNYAERFINEGSFLGIPQDFPSRNVIRWYAINEFLSKKFNRKIDFHLIPEVSSPKKISGRFIRKEILNNNLTISKEIRELLPKTSIEILEEEIEKGNVPGKRNMKVLKHKMNTYSRSNLTNIAYLNGKVINRIVEGRFYKEDDESIWASFRRADYGPVMTRLAASCIEEEVTKDEVLKLMRHYESKGVIPPEQNVDKIIERAWYVALEVDKGVPAKEANEKFRKKENLKLNPMLSLEAGLNLTKFEAKKIHEGIEAKIFVDKDNKISCEIKDKKIKVKTALKLPSMEVTYLRYILDSRYIPVSGELIKNKRNDFRVKITIHDY

SEQ ID NO: 5000 - protein, 157 aa, Methanobrevibacter ruminantium
MSIIAIFLGIIVIAFPLLGIIAASDILGLSVLLLSIFLLLNGISEVEYNTTKGLLNTIIGLIMLVVSLGLIFNPSIFSFLTAITIYLAGIFLIIIGLVVIVGNRENKYKFWMGIIGIILGVIYIILGTYIHNSFVLGSLIGIWLVATGILNLLSDGY

SEQ ID NO: 5001 - protein, 362 aa, Methanobrevibacter ruminantium
MEIRELTKEIRDRSIEYAKPKDLDNLSASWYQEDLLYSGKGKTIFLILPTPGCSWALGPSGGCTMCSYISDCYLKPIETSKIIELFEMELGKWDFAEDYKNGEKIAIKLFASGSFLNPEELPKEARNYILQRLADLDEISEIVVESRPEYVKKEIIDEIFEIIGDKLFEISIGLETSNEETRLNKINKGFNNKSFERAIDTIKQSKESYDIKSKAYIFVKPILLSESEAIEEAIETASYCESIGVDRVSCCPATIHRGTLIERLWRRGSYNPPWIWSTVEVINRIRENVNIPALMDTSGFGSRRGPYNCKKCNKELKHKIIDSNFDQSQIEHDCNCKSEWIAEVKFSNLNRSKTQTKHLPLY

SEQ ID NO: 5002 - protein, 318 aa, Methanobrevibacter ruminantium
MKFGIEFVPQIPLDELVRLVKIAEDVGFEYAWITDHYNNKNVYETLALIAANTETIKMGPGVTNPYVRSPAISASAIATIDEISNGRATFGIGPGDKATFDALGIAWEKPVSTIKAAIADITTLLDGGKTEAGAALGGAKKVQDAIPIYMGAQGPKMLETAGEIADGVLINASNPKDYEAAMPMIKKGIGDQDKDFDVAAYTATSIGTDSEAAKNAAKIVVAFIAAGSPPPVIARHGLPEGFNEQMGEFLAQGNFGGAIGAVTPEALDAFSVCGTPDEFIPKIEALADMGVTQYVAGSPVGKNVEESIKLLGDVIASF

SEQ ID NO: 5003 - protein, 69 aa, Methanobrevibacter ruminantium
METNRLEAFYDAIIAIIVTVLVLELPQPETATIAGILALKVSYFTYLVSFLVCQSLAISPLDICSCEKN

SEQ ID NO: 5004 - protein, 104 aa, Methanobrevibacter ruminantium
MFVISLIPYLTIFVANNPNSLLSESLYGLDFILVDIILFIMSRYLIKINENSEYLSEVLDLKNAIIIPFIFLIIGFIIGFLGYPIAISIVCLITIVRSILYSIK

SEQ ID NO: 5005 - protein, 160 aa, Methanobrevibacter ruminantium
MFIEKRCTGCREGSACYLTCTIAPCSIEHGNIDYCFECEEYPCDKYDGIELYDSLITHRNQKKDLQKAKTIGIENYHKEQLEKKEIINHILNRYNIANRHIFFCLAVNLLEVDDLKQILKDCDESTKDMDLKERSDYIKHELYEFAKKRNIILKLNTGRY

SEQ ID NO: 5006 - protein, 83 aa, Methanobrevibacter ruminantium
MNYVEEAVQLFEDGYMCSQAVLEVFCEEFGLSREQAFKISISFGGGMRKGEVCGACTGAIMALGLKYGDFERMAQIRRNKRSL

SEQ ID NO: 5007 - protein, 151 aa, Methanobrevibacter ruminantium
MDDLPEMISIWNEIVEEGNAFPQEEVLTLKTGLDFFNSQSHVGVAFDGEILGLYILHPNNVGRCSHIANASYVVSSKARGKYIGQKLVLDSIEKAKELDFLILQFNAVVEDNLSARQLYEKLGFKQLGVIPKGFRLDNDEFANICPYYIEL

SEQ ID NO: 5008 - protein, 219 aa, Methanobrevibacter ruminantium
MNYQEISNIIKESLNLKTSPVSVKLFEKEKDAEEIFEKTNKTIHCQAIITASKGKSFYGTIDEIGCPIGAGILGLKELPEKILNGSQFDKMNVTSSQESGKALIDSVAKNNRIEAIAYMPLEDSKIEPDVVVVIAKPRQIFDLIRANTYQEGKRMDNSVGGTQSLCGDIVVNSIQTNEPHISFGCIGSHMATELSEDQVIIGIPISKLEEIANSLNIIN

SEQ ID NO: 5009 - protein, 249 aa, Methanobrevibacter ruminantium
MKFKFNTPLTEGKIIKRNSQFTLDVEINDNIEKVHCPTTGRIGNIDLKNVAGLLSKSDNPKRKTKYTLEAISISNLNRKDKKWIGINQIASNKYIELFLKNHLLDGMLPEYSEIKREVSLGKSKLDFLVGSTYLEVKTPLQTLQIEYDTDIKTKKVSSFSSTDRFIKHINELADSLESNEKAILLNTFQYDNPGYEILNPSTNYIEVSENVDRCIEKGLEIWQVNMKIDHEGVELLKYWNTTSNFRKIK

SEQ ID NO: 5010 - protein, 169 aa, Methanobrevibacter ruminantium
MKSKDKIVKSLIELMETHEFEEITVKDISELAEVNRSTYYRNFKSKEDIIKYKLESIMDEYLKEFESKTDKTKETYIRTILETFLKHEEFLKIIHKQNQSYILQKVLANYFGDVLKDTSKKERYQVYYHIGGIYNFTICWIENDMKDRPEYLAKIGAEITSNIEPYLLK

SEQ ID NO: 5011 - protein, 352 aa, Methanobrevibacter ruminantium
MKHRLNLDNKDPNYILLKEIFKIMDSRKSKSILASYGFKNLNRTIFTFKIIFISMFFGIDIPFILNELKSKKELRKYFNISEVLTADQVYKIFSEINSEKLIKCLNRILNSRNMVKRRGKKTFIVDATPVDVDINFHRNKKTKEHLEKINLKWSYSSSKGYYIGFKATVVLDYDSMNPVCILVHSGAPNDAKLFEEILENLQKRRIIRKGDTLIFDKGYYSYKNYQIGISKYKIIPFIFPKEKFSRTRLDDILTYPLAVFNKTKRIMKEKRLYNSLKMELMKKIDSWEKFKPIRGKIEDFFKLLKQGLNMREIHKYTPKSVEKTVYLNVFLGALIISQGFYSKTAIQQLSEN

SEQ ID NO: 5012 - protein, 329 aa, Methanobrevibacter ruminantium
MGCMGFGDPENGMHTWTLPEKESIEIITNGLHNGINFFDTAIGYQNGTSEQYVGKAIRENASREEVVVATKFLPRSQEDIGNNVSGRQHIHNMVEKSLINLGLDYIDLYIYHMWDYNTPLYDLLEGLNEVIEEGKVKYIGISNCFAWQLAKANALAEMEGFAKFVSIQGHYNLIFREEEREMIPLCHTDNIALTPYSALASGRLSRLPGEESKRLNEDYYAKLKYQNSEQQDLKIIERVNELAQNYGVSMTEVSLAWLLTKVTAPIVGATKMHHVEGAVSSVDLTLTEEDISYLEEPYIAHDLVGVMADNKVSASDNEKVWIKHTKNKI

SEQ ID NO: 5013 - protein, 177 aa, Methanobrevibacter ruminantium
MKIIVLKGSPNINGSSNLLADNFIKGAEEAGHVVGEIDAAHADIAPCSGCVSCGYEGPCIISDDMDIFREKILEADMLVFVTPLYYYGMSAQLKILIDRFCSANSSIQSSHFKSALITVAYNSSNWTFDALEAHYDTLVKYLNLDDQGRILGYGCGTPSMTKYSDYPKKAYEFGKSL

SEQ ID NO: 5014 - protein, 466 aa, Methanobrevibacter ruminantium
MPNFFSGGDLISNNKPQETFRGKTDRAIKKRPPWKEYNLHIVCFVLVAISMAIGVKEIRITDTISVLLLPLIYALIMGLALFLAKPIKFIGKKQSKVAEGAMVLFIGVLIAKLAISSGQSIDIIFNVGPSLILQLLGDLGTLIALPVALILGFRREVIGMASSICREPNLGVIIDKYGFKSPETRGVLAIFVIGSIIGTPFISFLSSICISLIPYHPYAFAMASGIGSASMNAAALVPLVHMYPAMATQLEAFAGCSNILSFCLGIYMCIFISLPLAEKLYKWLSPIIGKGEGRTIDDEYAIEGVKDDKYATSEDLSSGKIERWVTFLVLFSIIGTVGNFIGYHTPLLDVFIGMLIISIITLIGMCLERIIPWDIPSIIYISLLGIFLAIPGVPTSDIIITYVSQIELTTICTAFLAYVGIAIGNDWEEFKKIGWKGIIIAIIVISGTYLGSASIANLVLFVTGMI

SEQ ID NO: 5015 - protein, 297 aa, Methanobrevibacter ruminantium
MARSDKTLEDILNIIFYDKPSTQDEIAEKLKISRRYVTQLLKPLIEEDIVKRAYVIDLNKYDEIYGSSDPIFNLKQHSAFFLIENMLSSMSEHVKEQVQMSFDAILTNDKDLAEQALKLDFTTNNMYEKVRASVETVVDVDPHSKLSKILLFSEAAYNYERIGDYSGHIAKFVINEKTAVDDELLDILKKMHKYAQKSISYATDAFINGNIDSRGNLMDTEEKIHETQQKAMNLIANQMVETSFEDIEMSNYYIYISRVVKSFERMGDISVEIMDLAAEFHKDIPRPTTPRSFREKI

SEQ ID NO: 5016 - protein, 644 aa, Methanobrevibacter ruminantium
MEGSELQNIKGIGDKLSQKILLNLGGEEELNRVINELDLERLIQIEGISQRKAIEIMNQLLGNPAQKFLKSERAIQLYEEIIEKILKYSNTNYSKNRILLLAPIKDEFIIAERLSFVMSAKERVSKLPLDELNKLMRNLHEPKNAKANYDASKAILVESAEDSDYLMDLGLNKYYTILTASDSPFFKEEISGYELVYYIYSEGILDFGDMPNLIMISKEAEDYQLVPEIILDYFKENRELFENVCKIRKILGESTVLEDVGPVLEELDNYKTQEIDLDGIVQEEKTYIDEELKTRIHNVDLEGDEVLDLLNNALPPKIEKIFDEILSKSKENIKAKSGIDFDPFIKKYPIEIDDMEMERIKMEILSSSENNYFDMKITAAEHLALIKEQAEREVKETIEFDFEYALGSFAYHYKLNAPEFSNEYALEGALHLELCLKETEEDNENGEIQRIDYKLNEQENVALLTGANSGGKTTLLETISQIAILAQMGLPVPANMAKIKLLDEIYHFSKKRSLDAGAFESFLNVFMPIVTSDCEKLVLLDELEGITELEAAVKIISSFIEMIKDSNSFAIIVTHMANELMKYTDIRVDGIEATGLDENYNLIVDRTPKMNYLAKSTPELIIKRMYENSSPELKKVYGKILEKF

SEQ ID NO: 5017 - protein, 1017 aa, Methanobrevibacter ruminantium
MKLPELLAPVGSAEHLKTAILSGANSIYLSGENYGARKYAENFSLPEIREAIKYAHLHNVKAYVTVNTLIKEGELKKVSEYLLQLYKMGVDAVLVQDIGLINIINKHIPKLNIHASTQMNLHNIEGIKWAYDHNIKRIVLPREIEMRELKEIVEYAHSLGIEIEIFAHGALCYSYSGHCLLSSLQGGRSGNRGRCAQPCREQYELSINKSKRISPKNEGNYLLSPRDLSLYENLDEIVNLGIDSLKIEGRMRSTDYVATVVKNYRKRLNRLRYDKTSKSLNRNINESIKKTKKGKKGRKSDLKKIEDKEKIESLKKIQKEENRNSEEELGLVFNREFTAGHLIPKNNPMIMNRKKPGHQGLYIGNIHRYNPQTEEIHILLNDNLIHIPEKGDGILIESRINRENSDERNNKSNKNNKNKQNESKSNKKDKNKKKIKRMENDENYHSIIQTYGFDISSKPVLKDSKDKHWRKREKDKDIEGKLLVIKRVRENKRIPFPLEKGSKVYLTKRNSLINEVKNLKSDKSKHMIKKSNLELYFRIDSDNYPHLKGNLKLDNGKVITLKIRGEMPWEEAIKKPITNETIKKQLMKIGDLPYYIEKITVNNNKSLFTPISGINELRREFFDKLEEEVINSYIPTDEDIKIAEENIKELSKELDRKIDLKAKVKSEQENNDLKSNAKLENKNKNSKNLSIYINSLESLKEINKINDLSNTLFNRIYLEIPPNRRLDEITKDRIENYNPNDSKELNISYCVNFLKSAINLAQDQDYELIWKLPDIAHKQSKESIVKILGILNKMNLHINIMTSLIGLDDSLKDKFKLELYGNYPLNVYNAYSVMELKNYKTLCISPELYKKNIEKLMEDYYTNKNNEGLSEMEILVHGKIEAMTTRKELISKKQLKLIDKYNKKMRRDKMDISSNEFYLKNRKDQYYPIRTSINEDNLIILNSEEFCLIDEIDYLKSIGIKNYSIDCRWKGIDYIRDIGMVYRDSLDNDDYDLGEFKEIINKHSEQLTKANFDIGLK

SEQ ID NO: 5018 - protein, 861 aa, Methanobrevibacter ruminantium
MTLPELLAPAGDYDILVTAVNAGADAVYISGERFGARAFAKNFTLEEIEKSVEYAHLNGVKIHVTVNTLINNFEVVDVVQYLFKLYKLGVDAVIVQDVGIIELIKTLIPGLEVHASTQMTLSDYDCILWAVENGISRIVFPREISVDKIREISEKLKSSNLNMELEVFGHGALCYCFSGNCYISSYNSGRSGNRGACAQPCRKQYKLKYKNYNVGNGFLLSTHDLAVYKGLDKIEEAGVFSLKLEGRMKSADYVGTIVNAYRHIIDGDEGDYEKDLHLVFNREFTDGYILNQSPGQVLGRESSGHEGVYIGKIIEKKGEQIKISKENKDFSINLDIGDGIGFKYKDKIKGIYIDNIKEQTDDYIILNTTRNVREGDKVLLSYSKSTHDKLKKFHNETIKQHIPLSLDIYWNEDLSLNVTGRFQIEEKGINNKNIIERFNFNYISETKFEKALNRPISKEDIEKQMLKTGDSSFYIKEMNIHGMPENTFIPIGKLNKIRRRLLEKATNLLLDYYKPSKKEVRATNKKVNQFIKEYKTYSDIDLRKEKLNLSIFVDSLELLEMTRKLPIHKYYFDPSFSFNSPEEYFEKIKDLLKEAYSIVGNSNNPNNKSKSNEDERLVLVLSSFISDEEIEKLSKIIDELKEEGISIPIMYDTPGIGKSFNTDIYGNHNLNIWNSYNVKNLSESGFKSLILSSELSHKEIKELVSKYQYIKGDKETDLNIIIQGNLEVMSSKDDFSNLNDGKDFIINSADDYAILEDKKRKKFKYKVVFDYNKHSHFINKDCLCLIEEVELIKDTGVDSVIIDTRFSSAKYSSTIISLYLQALKEDNTYDLSLLKDQIRNITLSRLNQGNFINGRLHEKDC

SEQ ID NO: 5019 - protein, 196 aa, Methanobrevibacter ruminantium
MYIVLEGIDGAGKSTQINYLKGWLEDNGFKVETIVEPTDLEVGNLIRQLLTRSDATSDTMQKTLGLLFAADRLVLMDKIEKLESERTVVISDRSFYSSLVYQKPQDWIREINKFAKIPDLVLLLDLDVKKSVERCDGTDEFENEEFLTGVKENYLALSRENDNFKIIDANNGPNKVASDIKKAVAPLFDICVDCIR

SEQ ID NO: 5020 - protein, 68 aa, Methanobrevibacter ruminantium
MEEEPIYEMKLTNGIGEQMLAHVFEKFDVELKQTEFGPKLQGTKEELEKAQEYIVEMMKKRLEELDRQ

SEQ ID NO: 5021 - protein, 321 aa, Methanobrevibacter ruminantium
MNIEEKIELIQEGTLEIIELEELKQKLEKETPIAYTGYEPSGKIHLGHAVTIMKLKQLQKLGFKIKILLADYHAFLNGKGTVEEIAETAEYNKRCFQGLGLADDTEYILGSSFQTGSEYTNDVYQLATITTLKRAKRSMDQVSRHDDNPKVASVVYPLMQTADMSALNVDIALGGMEQRKIQMLARENLPRIGKEAPVCIHTPLIHGLDGDDKMSSSKGNYIAVDDDEKTIKEKIRKSYCPQGEIEGNPMIEIADFFVFSQQDTFVIERPEKFGGNLELTKDELHTMYSEGKLHPMDLKNGITKFLIDFLKPVREFMESGE

SEQ ID NO: 5022 - protein, 346 aa, Methanobrevibacter ruminantium
MFCPECGATDVEMVDGICKNCYLKKFQLMEIPENITVTICKHCNAKLEEGKWKDEYIPEDEIIYRTLENNIKLNDLAENEEIELEIDQMRGTIAECYIEAVATVLGEEIVETHTPNVKIKYSVCPDCSKRNAGYYEAVIQLRADNRELKEDEIIKAEEIIGRTLDKQFKKDKLAYIPQVAKLKEGNDYYIGSLKSAKKVVEHLKEELGGKVKESPRLISEDKSTGKGLYRIWISLRLPKFEKENIIKYNDKIYRVEAIDGNRILLANLENQDSLALKWREYDSIEKMENLNGIQKAIITAKSPKSIQILDPDDFSPLDLDMNEKLEGFNIGDEIDILKIEGRIFII

SEQ ID NO: 5023 - protein, 135 aa, Methanobrevibacter ruminantium
MDDYENLLNRAIDQLPPEVFETKRFEPVKAYSVIQGNRTFIQNFKDVADSLNRDPQHILKYLLRELGTAGNLEGVRAILQGKFNHFLINERIDEYIEKYVICHECNRPDTKIIREDRIFILKCAACGAKAPLKPL

SEQ ID NO: 5024 - protein, 665 aa, Methanobrevibacter ruminantium
MSPTNKTKASLARFEEFFSTIYKDDVFEVLEKYPDERSLTVDYNDLEMFDPDLADLLIDKPDEVITTSQKAIKNIDPLMKDANLNIRFENLTNNVPLSDLLSKYIGKFVSADGIVRKTDEIRPRIEKGVFECRGCMRQQEVEQTSSSRIMEPSMCTECGGRSFRLLQEESKYIDTQSARMQEPLENLSGGTEPKQMLMVLEDDLVDELSPGDKVRITGTLKTFREEKSGKFKNYIYVNHIEPLEQEFEELHLSEEDEAKILELSQDPNIHDKIINSTAPSIRGYREVKEAIALQLFGGSVKHLEDKTRLRGDIHILIVGDPGIGKSQILKYVSKLAPRSVYTSGKGTSGAGLTAAAVRDELGGWSLEAGALVLGDQGNVCVDELDKMRSEDRSALHEALEQQTVSIAKAGIMATLNTRCSVLAAANPKFGRFDRYKTLADQIDLPSPILSRFDLTFVIEDKPNIENDRKLAQHILKIHQSESVNYEIEPDLLRKYIAYARKNINPVLTDEANKVLEDFYVSVRSAGVEEDTPVPITARQLEAIIRLAEASAKLQLKDKVEAVDAQRAITLQRKTLEQIGLDPETGQLDISRVEGGTTTSDRERMQKIEEEIKLLEQEFERAPIDTLKENMKEKYDMSPEKVETLVKKLKGKGIIFEPRNGFFNTA

SEQ ID NO: 5025 - protein, 130 aa, Methanobrevibacter ruminantium
MLISVLGVIVIIIMVVAAAYVGFSVVSSSLTGGISSGTQYDELATLKSNCSSLEAQFNITGTKIYAMQNITLEREFVNAQVELIKVQNDLDSVESALASGQPASEVDKRIQQSKEDLKIAQQAYNSLSVK

SEQ ID NO: 5026 - protein, 213 aa, Methanobrevibacter ruminantium
MGSRWQVEKKKDPYYRRAKSEEYRSRASYKLKQLDKKYKIIKEGNTVVDLGAAPGGWSQVALEKVGEEGIVVGVDLNRIKPFPEKNFYGIRGDFTKEIVQDKIMELTNGKAKVLISDAAPSLTGIKTIDHLNSVDLVETVIKIADNILETEGNMVIKAFQGPEYKRLLDEIKQDFRKVKSTKPPSSRHRSKEMYIVGLGYRKGPGSRKSRNKE

SEQ ID NO: 5027 - protein, 179 aa, Methanobrevibacter ruminantium
MLIGLISDTHIPDRRMKLPQKVLDAFEDVEMILHAGDITSQSVIDDLEAIAPVHAVEGNMDRVVGEMNLPPSKIVEAEGHKIGIVHGEVYPRGDTQQLYYTALELGVDILVSGHSHVAQLEKIKNVILVNPGSPTNPRLSDPSVAIMEINGNDINFEFVKVGNPVCSALNFFKDKANKE

SEQ ID NO: 5028 - protein, 363 aa, Methanobrevibacter ruminantium
MGKVSKEKILEILDGYDKENITIATLGSHTSLHILNGAKEEGFRTAIVCEKGREVPYERFEVADEFIMVDEFKDIVNEDVQQKLRDMNAIVIPHGSFVAYAGLDNVEDKFNVPMFGNRDILRWEAERDLERKLLVNGKIRIPMKYDDPSKIDRAVMVKFPGARGGRGYFVASSPEEFDAKIDAMKERGWIEDEDVAQAHIEEYVSGCNYCIHYFYSALNDEVELMGMDSRYESSIDGFVRMPAKGQLSIDISPSYVVTGNHPVVMRESLLPQAFEIGDKLVKSAAELVKPGLNGPFCIQTLVNDNLEVVVFETSARTDGGTNTFMEGSSYSYLKYGEGMSMGRRVAREIKNALENGGFEKIIT

SEQ ID NO: 5029 - protein, 170 aa, Methanobrevibacter ruminantium
MVDAEKAKQPKERKNKNSNLPDIDFKALIFGAAAYAFFPLVAYQYNLDILMVFAAIGPLYIGYTAKTELKSIILGIVGATPLLYLAFSGMLGSYGSGEMADIIMTVGILGLGALMGYFGGYLYRDRQRNKAKAGGIVVEDTPKKEKQFEDTGSVKKNVANLFLPKSRRKK

SEQ ID NO: 5030 - protein, 124 aa, Methanobrevibacter ruminantium
MAKMNAVILGFILTLVVYLFFGRYEFWGLLIVGFIVGYIAHEGILGGMWNAALAGAFGTIISAILFIILVTIGGTAMMGFLGGLAGFTVSGITSLIDIVFTIIKYMIVMGITGAVGGALSGEKE

SEQ ID NO: 5031 - protein, 322 aa, Methanobrevibacter ruminantium
MMDLIYILIIIIIAIIAYKSIKIIRPYEKGVVERLGKYNRTVERGLNIVIPFIETIRKVDLREQVVDVPPQEVITKDNTVVVVDCVIFCEVIDAFNAVYNVVNFYQAITKLAQTNLRNIIGDLELDQTLTSREMINTELRETLDVATDKWGTKVVRVEIQRIEPPKDIVEAMSKQMKAERMKRATILESEGYKESEIKKAEGDKQSKILAAQAEAEAIKQVADANKYQEIAIAEGKARATEITYNAIHAGNPTNDLIAIKYLEALENIADGRATKIFLPTEVSGILGSVGGIAELFKDDPEALEKFESIKVLENAKETADNE

SEQ ID NO: 5032 - protein, 139 aa, Methanobrevibacter ruminantium
MYLEFWIILAIILIIGELLTGGFYLLSIGLGSLAAAIFNYFQFSITIQIVAFILVTVIFIILSRPLFNRLNRNTIDKKSNTERLIGLNGEAMEDIGQKNIGAISIKGEVWKAISDEEISKGEEVKIIGIDGVKLKVEKL

SEQ ID NO: 5033 - protein, 865 aa, Methanobrevibacter ruminantium
MIKKQTKTYSKKQIYKNLHPFVREWFENSFEDFTPAQKQSIPEIQKGKNILVSSPTGSGKTLTAFLSVINELTTLADKGELEDKVYCIYISPLKALDNDIERNLDTPLKEIEKIAGKPLNIRKSVRTGDTTQYQRNKMLKYPPHILITTPETLSILLVAPKFREKLSHVKYVIIDEIHSLAENKRGVHLSLSLERLQALIGGFVRIGLSATVSPLEEVARFLVGYEYGTERDCLLVDINYLKELDIEVISPVDDIVIADSEDTRLATYALLDDLIMEHKTSLIFTNTRSATERYVYNLKKLYGEHFNSNNIMAHHSSLSKELRLETEEKLKKGELKAVVSSTSLELGIDIGYIDLVILINSPKSVSRALQRIGRSGHRLHEKSKGRIIVTDRDELVECSVLLKNAKEGKIDNIKIPKNCLDVLSQHIYGMGIENPWDIDYAFDIIRKSYCYKDLSRDDYEDVLSYLAGEYVELEERYVYAKIWINYEENTFGKRGKLARMLYSTNIGTIPDHSAVIVKCDGEVIGKVEEDFMEKLKKGDSFVLGGRTYKFKYGKGMTINVSPASGPPSIPSWYSEQLPLAFDLAVDIQRFRYILDSKFQYGRSKEEIMEFLHDYLYVDDFAANSIYEYFNEQYLYAQIPHKQKLLVEYYTGFGGRKFVIFHSLFGRKTNDAIARAVAFLASDFNKRNITISITDNGFYLSSDGKMGALEALNRLNPQNFENILIKSLDKTETLASRFRHCAGRSLMTLRRYKGHEKSVGRQQVRGKILLKHIQEMDNNFPILKESRREATEDYMDIKNAKRVISWIDSGEMEIKTINTIIPTPFAFNLVSQGYLEVLHQDDKAEFTKRMHRAVLDKIKEEMDNQF

SEQ ID NO: 5034 - protein, 283 aa, Methanobrevibacter ruminantium
MVEKLSIDEAIEALKDEDVANRKLAIKSLEHKSDDKIIEPLIEATKDENAQVRFGAAEILGDIGDSAVDKLLDEFNKESGSNKRFLAVALQKTGSEKAVDAFADALNDEDFGVRKVAVRALGELRAEDKIDAIAECINDEDGGVRTAAIFALGDIGTDKSIQIIKDARRKEKDKDFKKYCNKAIKQAEKVQKSGGKVKSSKGQPMSTIKEMEKQDPEAAIKAYEVHVKSGSTKDTPYKRLAILYRKINDYDNETRVLKLAIEVLSKENPSKVGWFEKRLEKMT

SEQ ID NO: 5035 - protein, 268 aa, Methanobrevibacter ruminantium
MDIFNYIFQIIVSVLIFAAIFAVGILLRDKIVHKLNFFVNPQNYLPEEEIQTLKQVYYLILILILVVCILNFFFDNNIILPNSPEFYVFNSFLDIIVSVYIAIIIYDGSKKSKILLIFLIPIPSIAFLLFGESLIEYWDFVRIPALLYIMKIFYDKFHIYTDKYNLEKSILLLFSIVFISFIITLVAENEDPLNALVMVSNAFTSKGYTILGESTIGKIDSIFLVWGGYIISGAATATLTAAILIKHFNAKIEKFDEKFEELEKLISE

SEQ ID NO: 5036 - protein, 281 aa, Methanobrevibacter ruminantium
MNKIKIALCQMNVVDNKDENIKKAIEMIKESKKQGADLAILPEMFNCPYENEKFIKYGETLEDSRTLKSISETANEENIYVLAGSVPELVLNDSSNENNLYNTSVFFDNEGKILGKHRKVHLFDIDIKDKIYFKESDTLSAGDDFTIIKTPFARIGIGICYDIRFVELSRILALNGAEILIFPGAFNLTTGPAHWELLFRSRALDNQVYAIGVAPALDKEASYNSYGHSIIVSPWGEVIEELDYDEELKIVELDLDLIKQVREEIPVLKNRRTDLYDINEK

SEQ ID NO: 5037 - protein, 392 aa, Methanobrevibacter ruminantium
MKYCQECGNASYDSAPVCGNCGAKLGPKSEANSTPPSRDKKAKSTSTSSESSIFSSKSDGFSSKIGKKIGSFQVSSTNTAVENKQEREEAFLKQTSKPSFSKTATEGFKQKDKGIKNPATKYNMPKKEETVDAKAKEAPKREAPKKEIKRESPKKEVKKEAPKKEIKPNIVKKSDEGSSGGINLKKIGIIAIIILIILLIAGIGLNQMQNQTTDEVMNYTDGIINFTYSGNWSVYNNTNADSNMTDLAFKTKDKTLIGFTTIQSDEITYEKILSDVNDTAHSLNGEILEYQEVNVGGVPAQEIIISTQDQGYSRYLCILHDGVYYCFVANNAKSDNQNLTSLNTTEIQNMINSISFKDVVAGDTANLDTSYQESSYQEESYDNYNYEDTSNY

SEQ ID NO: 5038 - protein, 166 aa, Methanobrevibacter ruminantium
MVKKEKIKCDNINYAVYRIDDWENDYEINIIGTAREIPVTQPTLEHMLKQMDHIRQSVFEIGGKKVNGMIGLSMQFNPSFASRDIDELIEQEQKEFDSIMAELNALELKDAKDVIFLDTDEYVIYKLEYDGHSLSPKPYNDYAKQHHLDEIKRLKELSGERFVLEL

SEQ ID NO: 5039 - protein, 241 aa, Methanobrevibacter ruminantium
MSKIQQLQEIINSSDNIVFFGGAGVSTESGIPDFRSESGIFKSLEKYGDVPENLVSHTYYSDHTEEFFEYYKDTLVFDGAKPNPAHLKLAELEEKGKLRAVITQNIDGLHQKAGSKNVLELHGSIHRNYCQICNKEYSLDFILKSEGIPRCDCGGVVKPDVVLYEEPLDNRILAYAIDYIQNADTLIIGGTSLVVYPAAGLINYFHGGNLVLINKSETGFDYMANLVINEPIGETLSQIRV

SEQ ID NO: 5040 - protein, 190 aa, Methanobrevibacter ruminantium
MDFISTLLIAIALAMDAFSVSLTKGFTLKNLTKSQALWFGIFFGGFQALMPVLGWLGGIQLEWLITTFAPWVAFILLLLIGSNMIRESLSGDEEDEKDSDKFSFKELTLLAIATSIDAFAVGITYAVLKVDILIPIIMIGVVAFIFTIIGLYLGKKIGNYFGDKFEIVGGVILILLGVKILLEGLGILVL

SEQ ID NO: 5041 - protein, 260 aa, Methanobrevibacter ruminantium
MKYKILENPNYKEAYELIEEGLVKKATMLLFACCKVSYEGRALSELDYGERIIMIKPDGCFLIHQDNKVDPVNWQPPKSKTKALIKDETLYLESHRRKPPELLEVEVKKIHYARYNLIEDYEELERAGYEKDMGDMIWDNPHIIEEGFRPTVREYATEHGFIDILGKDADGNLMVLELKARKAGITAVKQIRRYLTDFENRENKEIRHEEEKQKVRGLLVAPSIGDDALELLEEEGIEFVSVEPPRELKKDKKVTLDAFK

SEQ ID NO: 5042 - protein, 458 aa, Methanobrevibacter ruminantium
MEMNENVEMITGDPKKAINKLAWPLIASMLLIFLNNIIDSIWVAGLGPDPLAAIGYVTPLFMVLVGFGNGIGAGATSLISRYIGAEKRDDANNAAIHSAILSVVVSLVLTVIALLILESLLKLMGAGSVLKYAMDYGVIIFLFTAPILIPPIFGGAFRAEGDIKRATVPIALVAVINMILDPIFMYVFGWGISGAAFATGLAPCFGLCMMLYWIFIKKDTYLSYNRKDFHNNLNMYKDILVVGIPASLEQLIMAALAVTVNYMLTLVSGSVAVAVYTAGWRIISLGLLPAIGVGTAAITVTGVAYGAKKYENIRTACRYSVKLGLISSIIVCILLFIFADQIAYIFSYSEASAHLLPLIAGFIQLMCLFILYVPFGATAGNVFQGLGKGTTSFVLTTFREFVLVLVFAYLLGFVFHMGETGIYYGMLIGGFIGSVIAYGYIEYYVDRLIKGKVKGSDI

SEQ ID NO: 5043 - protein, 255 aa, Methanobrevibacter ruminantium
MQKVINSHCHIYPDKIAAKAVKGIRDFYDLHMSLNGTVDDLIEDGKKVGVVHYLIHSVATTPKQVESINEFISFEVNTHPGLFTGFGTPHPDSEDIERDLDHIIELGLKGVKVHPDFQQFALNEERAFRMGEAINERGLPIMIHCGDFRYNYSNPEQLRPFLEEFPDLTVIGAHFAGWSMWEKATEELAGTPNLIVDCSSSLYSLTPETAKDLIHAYGADKVLWATDFPMWESVSEMEMFNKIDLSEEERNTYSL

SEQ ID NO: 5044 - protein, 332 aa, Methanobrevibacter ruminantium
MFDVESIEVEYFTLKEFKFKNGEVLKDAKVEYITFGTPKYDDNGIINNAVIYFHGTSGNCHSAKRLCESMGSGDILDTDKFFFISLSTLGSPNSASPSSTGLMNKFPEYDIEDMVNFQKQFVEERFGITHIKGLIGNSMGGFEVLTWGCVYPDSVDFIISLVSSFKVGGHNYILSKVIDNIFTSDPDYNDGAYDLPISDSLKRSLKLSSDAMYSFGLSREEYRNNLTNEELTEFMAEFAEESLEEDPNDVVYMNKASIDFDISEDLKNIKAKVLIIAINQDQYFPPNLDAIPMSKMIENNKLVIFDSCMGHVGSGELFKIEDDLREFLTEFY

SEQ ID NO: 5045 - protein, 134 aa, Methanobrevibacter ruminantium
MEITYKDTHDFKEEDLKDLFLSVEWSSGHFPDKLVIAMKNFETVYSAWDGDKLVGLVSAMDDGIMTAYVHYVLIRPEYQGKGIGKELLKRTTDHYKDYLRIVVVSYNEEIEFYEACGFEKADDASPMFITELWT

SEQ ID NO: 5046 - protein, 94 aa, Methanobrevibacter ruminantium
MFSVKVDDYGETEDDMHFVTYMISGLSEAELDYLIANLEGELALEDGNLFLNIFYSKQFFPFGSDDAHFKLDDFIKREEIEMTYFIASFLEDMK

SEQ ID NO: 5047 - protein, 313 aa, Methanobrevibacter ruminantium
MISKETFDKDKANFKGTYRPLLKEIDNPTLLQIDELHGIAGALSGKNQNIHNNILLLLASIGTIITIIFFIYFEWDISAFIIPCVLLMFILIGIHLVSNKLNYHDKYLEYRVLAESLRLQFFLSYAGAQEKVIDILPWFIEHGVPLVKEVLGTLDFTELPQKREIRDNWIIHQKKYHEGALQKSKKKMRTQKIVTYASITVTIATYIIALIFEYLIPASTFNLNGDIIHLGIKLAMAGMSAFTLFLGSYYGKMSLSEKIDDHERMVELYGIIEDRIRTEGETDEILSYAAREFLIENSTWYAYQSKNKPDLVV

SEQ ID NO: 5048 - protein, 305 aa, Methanobrevibacter ruminantium
MTTELQNEIIQLKEEKNAIILAHNYQPKEIQEIADFLGDSLELCMKAKEIDDKDIIVFCGVDFMAETAYMLNPDKKVLIPDIEAECPMAHMLTGEQVIEAKKKYPDAAVCLYVNSLGEAKAESDILCTSGNVKKVVESIEEDTILFGPDTNLGEFVQPFTDKKIIPIPGDGHCYVHKLFHKEDIDDARKKYPNAEIIIHPESNKEVQDMADYVLSTGGMLSHIRDSEKQEFVIGTEVDLITRLEAEFPDKTYYPLLEGAICKTMKLHTLEKLKDCLVNEEPLITVPEDIAERSISAVERMLDASK

SEQ ID NO: 5049 - protein, 268 aa, Methanobrevibacter ruminantium
MTTTEWLYQILLNLLDLSTIISIIVIIIAAAIIIKLGEKSLLRIEKKYEINLTAHYLLKDILKYGIIIIALALILNLIGIDLQNIILSLGIVSIVIGFASKDIVSNFISGIFVIGDKNVQVGETIEIDGRKGAITKVGFRNTTMIGMDNFKVTIPNSVLSTKTYKNFPMGEDYRLRLDVILPHGFDIFEYKQKMTEAMEKYEYINKDKEPVILAREINEEGSKVEISFWINDYKDRDPGKAVILEESNKLIYDYLMDEKNAGILRIVK

SEQ ID NO: 5050 - protein, 303 aa, Methanobrevibacter ruminantium
MEIIFLGTSSAVPSRERNHAAIVIREFGEVFLFDCGEGTQRQFIEANVSPMKVDKIFITHFHGDHILGLGGLIQSMGLRQREEDLDIYGPRGLKKVMNAITHTGYFKIDFNLNIHEIDEGIVVETEKYRIETTKTKHSVPNNAYSIIEKKKPRFIREKAIELGVPVGPAFGKLHRGEEVEIDGKIIKPEQVLGPPRKGLKVTYSGDTRPSFKLIELARDSDILIHEATFEEEDRLHAYEHDHSTARDAADIAREANVGKLILTHISPRYQEFSVLEREAKEAFDNVEVAEDFKVFNINSKDKE

SEQ ID NO: 5051 - protein, 276 aa, Methanobrevibacter ruminantium
MDDIIKFMLEEDEGFGDITSNALIPQDKVFYAKLISKDEGILAGIEIIKEIFLEYGIDILSSKNDGDEIKKGDILLEIEGNARKILLLERTALNLLMRMSGVATKTHRVVSSVKEVNDKVRVAGTRKTAPALQKYDKIAISIGGGDPHRYGLDDMVLIKDNHIAVVGSVKDALRLAKENVSFSKKIEIEVESADDAVIAAENGADIIMFDNMSPKEAQDSLDALIDNDLRNGVLIEISGGITEDNILDYAPLDVDIISLGSLTHQASSLNFSLDMD

SEQ ID NO: 5052 - protein, 85 aa, Methanobrevibacter ruminantium
MAELDNNIKEKLTEVFKEELGKDDFELNYLITDNEITFFFGISEGKELSLDGIEKISSIIDGGYEGNSIVNQEYRYKFNLDPCSD

SEQ ID NO: 5053 - protein, 698 aa, Methanobrevibacter ruminantium
MENRYQEHQSDFKYLLIINDDLECEIKIRREGNASEKNLKDNIFTIKEASDKELEDIGRIYDLFDQFAIENTRYEKIQMDKKAFIKFALNIKPILRDNNAELISSKEIIESDLKLIMDTDLKENEFSLKKLNRIKWIVRLNKGRIALRDFDKQTENNKEILITRNYFFILNRNEFLDIKFYASSLLKTTENSEILKLALSEEIDGFKFEVGENLKRLINPSRVYEVPRTLKGELRTYQKIGYSWLVQNIRSGFGSILADDMGLGKTLQVLTAILYFKEKGLLEERPSLIVVPPTLISNWEHEIRKFTPELSYYIYHGTNRRFPLEDYDIVLSSYGVIRNDLDLFLDKEWFLYIIDEAQNIKSPHTQQTKAIKEVNAYNKIALTGTPIENRLTDYWSIFDFTNKGYLSSLSDFKDSYVFRIERLEDERSLENFLAITKPFVMRRLKTDEQIKGELPDRIVNDIYASLSKKQIKLYNAVLDGIFEEIDELKGIERRGTILKTITSLKQTCNHPAQFLGSGKPKIKESGKMELLITILENIMDMDEKVLIFTQYVKMGEIIQDLVSKKLKREVLFLHGSQSRNEKAEIIDRFQEDDNYKILIATLKTGGVGLNLTAASNVIHYDLWWNPAVENQATDRVHRIGQEKDVMVYRFITKGTLEEEIDSIIKTKLDLAEKAISVDETFITEMTTEELKRALSLRL

SEQ ID NO: 5054 - protein, 144 aa, Methanobrevibacter ruminantium
MAEDEKIEEIEEIEDKEEENLPFAKAEVVRLMKENLDDDKMIRERVKVEMNKFLGDILKQVCEQLNDYPYTTIEYEMLKESIYPYTNIKRINQEKERILLHLNAIKADCDALAMDVEKTLKLKDVADEDAFTPLSEAQDEEMDE

SEQ ID NO: 5055 - protein, 171 aa, Methanobrevibacter ruminantium
MNEALTKLLDLMQDYNVILPNEFVSMARGISMIESVATTLDPKIDVMASIEPIVKEVMEERMNIKESLSNKKGSLVYYKNMLKTLPPLLTNSVHKINNGDMKLRFEIDRIDHIVSKFSLVVIIAALLMSSSITMTINRGPMLFDMPLIAVLGYIVTFILGAIAVANYIYSR

SEQ ID NO: 5056 - protein, 221 aa, Methanobrevibacter ruminantium
MKHRLNLDNKDPNYILLKEIFKIMDSRKSKSILASYGFKNLNRTIFTFKIIFISMFFGIDIPFILNELKSKKELRKYFNISEVLTADQVYKIFSEINSEKLIKCLNRILNSRNMVKRRGKKTFIVDATPVDVDINFHRNKKTKEHLEKINLKWSYSSSKGYYIGFKATVVLDYDSMNPVCILVHSGAPNDAKLFEEILENLQKRRIIRKGDTLIFDKGYYS

SEQ ID NO: 5057 - protein, 36 aa, Methanobrevibacter ruminantium
MDDILTYPLAVFNKTKRIMKEKRLYNSLKMELMKKK

SEQ ID NO: 5058 - protein, 43 aa, Methanobrevibacter ruminantium
MREIHKYTPKSVEKTVYLNVFLGALIISQGFYSKTTIQQLSEN

SEQ ID NO: 5059 - protein, 115 aa, Methanobrevibacter ruminantium
MIELNKKYVFHVPLYKYKDEELIPIDMDDILDELIDEFYQNGYDSLYMTNIETYYKYRFLTEILISIFVSTERLAKENQEFPDRIFKKWFKKNNKILEQEAFAYEYNNKMFIEKL

SEQ ID NO: 5060 - protein, 199 aa, Methanobrevibacter ruminantium
MTKDDIITGKQAIIKMDCPVCGGNKTANYITQTHELAYFGEIVESTIQCEKCGFRHSDIITTEQKDPAKHSLIITKKSLNSRVVRSQSATVSLPEIGIKVEPGPKSEGYISNVEGVLIRFKQATESALRMFDDEESQKNANAVLDKINQVLAGELETLLLIEDPFGQSKIMDVRAKSEPLSDEELKNLKTGFTVIDDEQ

SEQ ID NO: 5061 - protein, 315 aa, Methanobrevibacter ruminantium
MKPYVILIGSASGIGKSTVAAELAKTLNIKHLVETDFIREVVRGIIGKEYAPALHSSSYNAYSSLRNQENYKNQAELINAGFEEHASFVLPAVERVIDRAIKDHDDIILEGVHLIPGFIDIEQFTDKASVFFFILSSDEEDHKNRFVKRAMEIRRGGKQLDYFKENRIIHDHLIEQAQKHNVPIIKSYEIESTVKKMLSYINETCETIYLKNTVDELDKVGEIILDRYSGSIKNISYPIKGFKEPLIRKIDVSEIREYDKFIKNLNKFPEKKEELKELYSLTDYRAYRICAINNETIEKIKNDLDKEGLLFKEDM

SEQ ID NO: 5062 - protein, 350 aa, Methanobrevibacter ruminantium
MYSITSVEDLQELNPYVIIGCGGGGEKFSNLEGIETVGFLDDNPEKQGKLFCGLEVASNLSDLFESTDANTVAVMLPIGAEGAALKYAVEALANGKNAVVSFRSLSLCENESLLKLASQNDVVIKEISPRLDVVREICGTAPEKCCEVLPKISYEPKAKVVFVGGTSQECGKRTTTKSLGIEAEKRGMKAAVISTDEMGLEKPTVFNFRAGSLSAMDIPSAILSSMKYVEERDSPDIIFIEGQSSLTEDGNPHPRGLSACILIGANPDAVIVGHRPNHPYREPRGIDYEVKAIEAVVPTTKVVGLSINLRNKDEGMTVEDFEKEYGLPAADMYDGGASKLLDAILDYLDE

SEQ ID NO: 5063 - protein, 94 aa, Methanobrevibacter ruminantium
MTKMEIELNDEQLEKVKILESHDISVGDAIDMLFEARDRVISIIDDIDEKDLEDDTPNTEEAKAEQTQLTVKTYDIAIEDYKSHISWANDFFKL

SEQ ID NO: 5064 - protein, 114 aa, Methanobrevibacter ruminantium
MVVQEHICINEEKIQEHSLQLKSLESDADFKDKRMDELYRKIDKIEEKLDVLNNNINNFLLRNSQENKKMEIRLTKIETDIQNQKLESQRRIARMGIALTAITILINIYFKIMH

SEQ ID NO: 5065 - protein, 322 aa, Methanobrevibacter ruminantium
MKIAPMNKDKGGEKILDYSILNHKGFNSFEEKIKRIKVHKPYDKILKTSFKKNPNGFLEILEKGAIFEEFVDSEIINAFFRELHSDIIIRVYKKRIYIIEFQSSRLKLEDILRFGLYRASIAHQEKKDIHLYVVSKEPIKRDKIENKYGDYWFTIHVKSLTDMDYNKALNRTNNKIENEEEEFTEEDFVYLEISPLMTRKKKKQRQLLKRVAEMTNKLDGRISREKLIEIKSIQFVLATELLNDNEKAKIAKVISMQSEGKEEVFQGYLTKEERKQTYEEGREEEREEIVKSLAELDVSPDIIAKATKMSKAEIATLTTTII

SEQ ID NO: 5066 - protein, 169 aa, Methanobrevibacter ruminantium
MEYRLPRMEDEDDIRDFIRECCYVEECYVMLKQELLLSDYSKWVSLIHRYASLGNGKWGRSLLLLAYDGSRLVGILPIRYEISEDYAFLYGNIGYHVRPSLRNMGYATKMLKHGLEICKEKGMARVIVGCDRDNLASSAVIKKCGGVRLRTFNDSYGVNDYYGIYLSSE

SEQ ID NO: 5067 - protein, 217 aa, Methanobrevibacter ruminantium
MKTTSVIVLLVILGYGLKVTQDVINGGTSLPKISLKELLNFGVKGTIVYTFYLTIQASLLGLISLAMNFPEFELEEMILNLHETIELFFEHDPISFILFIILGLLIVYGTIFFMEIALAILADGETLKAAFDFKRIKRTVETIGWKEYAEDYTKIVAAVVILVFINGYFHSYGWISIIIGVLTDILAFTVEYRGIGNIYRGYKQKINQETALEDTSN

SEQ ID NO: 5068 - protein, 468 aa, Methanobrevibacter ruminantium
MKKTKIIASVGPASDSVEVMSDMVEMGMDCARINLSHANQEDILKIIDVVNEVRKICNVPLAIMYDTKGPEFRTSEFKHGGVLLNEGDTIKMSKTCIQGNKEEFGVNHKEAIDFINVGDKVLIDNALLEFEVIDKKEDYVLLKALGDGKILNHKTINVPGVDLKLDFISDVDKEDISFAAGHSCDYLALSFVNSGEDVIAARKIVEDAGGDALIISKIESRMGLMNLDEIIDESDGIMVARGDLGVEVPMEHLPIIQKDIIRKCREKGKFAIVATEMLASMYESPRPTRAEVSDVANAVLDGTDCVMLSGETTIGKHPVHAVEMMDRICNYVESTIDYSKHTFYKGKVAISDTIAKLVIGASEYSDIKLIVTPTLTGFTARKISNLRSSSAILACCPSNDIARKLVLNFGVKAVITDIYENTDEMIDNVVDIAKMEFDLNKGDLIVVTGGFPLGKTRNTNSLRILEID

SEQ ID NO: 5069 - protein, 496 aa, Methanobrevibacter ruminantium
MANENEWGSNLAFVLAMIGSAVGLGNIWRYPYVLYSNGGGAFYIPYLIAILVLAIPLIILEYGVVYNYKSSFTKAIVKIKPKLEFYGWILPVVTFIMTIYYSTILGWDGIYFILSFFKGWGSDPNTFLTVSLLQSADSISGILNFIPVIAISMIFIWLIIWFISHRNLDEGLGRVARYFVPMLFVIMIVIVAFSLTLPGASIGLAELFDPDWSLLYNYSIWMAAFGQIFFSLSLGMGAGFTFASYTKRDIDLISSGLCVVLANSLFENFAALGVFSILGYMSLESGVAVSKLVSQGTTLIFVAYPKVFNILGGVALILGPLFFFTVYVAGVTSILSSFEVLSISIQDKFAFSRKKATTALCIVGGLASMVFATSAGGYLLSIADIFVNNIMVLFSVIVQTILFAWVFKAERLVDFFNAKSRFLKLGRWWLILVKYICPILLTVIWIGELYNLIKMGSTEFVVILGVLLAILLIFAFIFTIRPAKTDEWFKTEERIK

SEQ ID NO: 5070 - protein, 205 aa, Methanobrevibacter ruminantium
MGEEELIDQYMKPHGEEGIKIIESMNEEHQNISEFAFECVNLGAYDDIIDIGCGGGVNIEKFLNVTNGHVDGLDYSDVSVSESIKRNQTSVDGGRCNVILGDVTDMPIGDESYDLATAFSTIFFWPNLVETFKEVKRIIKPNGQFMIAQGTDGTNPEDQEWIDTIAGINVYTANELEEYLLDAGFKRVDVFTKENTYLLVVIGKK

SEQ ID NO: 5071 - protein, 165 aa, Methanobrevibacter ruminantium
MDFNKEKFKMVLQYIIYKCGIKNTVGRTVLHKLLYFSDFNYFELYNKSLTNECYRKLARGPVPVHFESVVEELIDEKKISLKNRRLPCGKLMNRYFSLEKPEIDLKEDELAVIDEVIKDLSHMNGKMIGEYSLKDMPVKQAHDNGSIDYNLVFSRSLQYSKRTDD

SEQ ID NO: 5072 - protein, 118 aa, Methanobrevibacter ruminantium
MLDIPKEDPQVRRFIKLVKEEGYSYEKALEEVGADYIDERDWEYFGFNQREGDYRDFYNLRHPPKEHHYLSGSNSSSGSSSNKRQSSKWDDLKCYMSVLGPLIIIFAIAILWGVFKGG

SEQ ID NO: 5073 - protein, 161 aa, Methanobrevibacter ruminantium
MDSKKILVILGLTVLAIFLASSVSAGDLISTGGYNPDSLIILEGADFNIPDGFERIEDKSIANQTRNSGVFSSILNREVYGNPKGEEIVISVVDFDNFDANLPILSMICKGCQKKELLGYPGFIGSDGNSTKFSYVFDNKVVSISAPNEDLINQVLVVEDA

SEQ ID NO: 5074 - protein, 40 aa, Methanobrevibacter ruminantium
MAKINYSYSKKYCIIVFIMMFFMKRNYSKKNYKIGKTDIL

SEQ ID NO: 5075 - protein, 112 aa, Methanobrevibacter ruminantium
MKDLIGFCGLDCELCQAYIATINDDDELREEVAKHWSELNNVEISPEMINCMGCRVEGVKTPFCDFMCPIRQCALENNYDTCADCDKMEGCEKLVMIFENNDNAYKNLKHHY

SEQ ID NO: 5076 - protein, 182 aa, Methanobrevibacter ruminantium
MSRRFAVIDTETNWNDEVMSIGVLIARCKNFKRTDSRHYILPKAEAVGGMYSKSMRVTSHEILTKHRNDAIDDLRYLLDSNGVDDLFAYNASFDNRHLPELSDFCWRDIMKVAAYKQHNPSIPNHMPCFKTGRLRRGYGVEPMLQILGIEDYCESHNAIIDARDELKIMELLGYDIDFYPEI

SEQ ID NO: 5077 - protein, 202 aa, Methanobrevibacter ruminantium
MTVIMSTNTMGYADLDLRPAEMQRSTMYISINECPNCGYAEFDFSREPKIKREYLESEEYQSCEGIEFKSERSKPFYKAYLINRKEENTQNELNFLMHSIWSCDDSEDCENARKLRRIACQLLETILSNIEKHKEWADKDTLMLMKSDLMRRGEMFDELIEEYETVSFEDTLLNNINQFQIKKSKEKDSARYTIGTVISLYG

SEQ ID NO: 5078 - protein, 208 aa, Methanobrevibacter ruminantium
MNTKEKIFDVSLDLFSKRGYDSVSLREIAEEVGIKKSSIYSHYSSKEAILMDIFEYFTDLFEYDDLINSKELVLSEDNDVLIENPELFYHMGSEAIRGMFKEERNLKIWKLIFIQMHYNEKIRNFFQKEMLLKPLIFWENFFAILKEKGIIRADSNPQLLAKEYYSFPIFLLLEICAKYDDIPESCLDDFFKQAEEHARFLLDCVKVK

SEQ ID NO: 5079 - protein, 363 aa, Methanobrevibacter ruminantium
MDSKFNIQEYLANGVEVILKDAFKATLKNPKEGLYLAKFAKHARKASEIRREYSKKGQNIPVFLIASITSSCNLHCVGCYSRANNSCSDEAPLNQLSADDWEDIFKQARDIGISFIVLAGGEPMIREDVIKKASKFPEILFPIFTNGTMLNEDYLKLLDKNRNLVPILSIEGDEKLTDSRRGSGVYKQLMDSMETMKKKNIVFGASLTFTKGNISSLLSRDYIEKLHDLGCKVVFFIEYVPVNEETVDLAPSDSERELLLSELDELRSDYSDMLFLSFPGDEKESGGCLAAGRGFFHINSHGGAEPCPASPYSDINVCETSLLEALESNLFRSLRDGGLLLDDHEGGCVLFEHKEEVESLFDN

SEQ ID NO: 5080 - protein, 137 aa, Methanobrevibacter ruminantium
MSFTDNLKKSLGFEEGEYGSGYTFDEGYNGEPDPFFEGILIPYKFPETKAFMEIILIKPKSVDDMDYIFDQVVEENNPVIMDLSFMEKKGAAEFKQAGEKLKVLRQQYNAEAILLSKSDDKNLIIVTPARVKLIRKE

SEQ ID NO: 5081 - protein, 251 aa, Methanobrevibacter ruminantium
MIDTHMHADARSSEDFEKMFIGGIDTAISCSYYPYKVNNAEILLNHLNRILNFEPKRAMEYGLELKIALGIHPANSIKDNEIIFDSLKEWIDNKDIIAIGEIGLDENTELEKEVFKKQLELAEETKSKVIVHTPRKNKLEVLKDIKEIALENINPKLVVIDHINLNTIEEIIDDDFTIGLTVQPQKMEVEEAIEILDKYDFDKFLLNSDISNKPSDPLSVPKTVRTLKRLGYKQDKIDKVAFKNAESFFNL

SEQ ID NO: 5082 - protein, 270 aa, Methanobrevibacter ruminantium
MYYHDYVKEQLRFLNNSEIRLRILAYLSKKPFSLADFKNSSFVSYSSISSNVYKLTDEGFVEKIDKNNFRLTNIGKIYLISLMEFHDTINTVNNFSDFWLDHDVRALSSKYLKRISQLEGSKLIQSRPTDIYKTHEEFRNLFKDSDILKVIFPYLHPEYPRLIRTLLSNGSKIEILVPRVICRRFIKSVGESLVRSSIKQNALSIKFIDDEVKLALAISNKWVSIGLFKRDGSYDQSRLLVSDKKDAIKWAYNIFKSYDKKAELVDLRSL

SEQ ID NO: 5083 - protein, 272 aa, Methanobrevibacter ruminantium
MIGDINFELDSENFRIMRFLLSSFMRTDLLLTLVNSSSRLCSLRSNLGKSSATILHGVSELEAFNLISKDSKYYCLSSKGFIYGLALDKLCKNLYIFQSNPEFWQNHFIDGLPSEFVENAYLIKDSVYICSDKLDMEKPIRDYFKNIKNSKSIKIILPIFSELYLEMILKTVGSDHDLELIVDEEVFTSIKKSRYYRRIIRLSKGGKIILRKYIGDLNLFLTFSDEFMSLNLFDKDGFFDDSETIFNNTPDGVKWAEIMFDYFLDNSNVVVL

SEQ ID NO: 5084 - protein, 570 aa, Methanobrevibacter ruminantium
MNHEKMSNIARKRGFLWPSFEIYSGVSGFTDYGPLGASLKNNIMQKWRKQYIAGEGFHEIEGPTVMPKEVLKASGHVDNFTDPMTKCKDCGEVFRADHIIEEAIGEDVESLENEEMDEIVRKNDIKCPSCGGELANIWNYNLMFKTEIGAKGDKVGYMRPETAQGIFILFKRLSRFFKNKLPFGAVQLGKAYRNEISPRQGVIRLREFTQAEAEIFLDPRDKTHPKFSQIADEILYLSSQDVQINNKETLEITAQEALDQGVVSSETLIYQLYLARKFLKELGIPDEVLRFRQHLPGEMAHYALDCWDVECLTDQYGWVEIIGIADRGDYDLKAHTEFSNEELSIYIEYDEPKLVKKTIVKPNLKLFGPAFKGDSPKIKTYIENLSDEEVIELKEKIESKGKFTLELDQSFEILKEHLLFEDIEEEVKGERIIPHVIEPSFGIDRILYCTLLHSFKTEEDGFDKEYFKFANEIAPIQVSVFPLMNRDGLGEIATEITHNLREAGFTVDNDTSGTIGKRYARADEVGVPIAITVDYDTKEDDTVTVRNRDTEEQERVKIEDLKEVIETKYL

SEQ ID NO: 5085 - protein, 195 aa, Methanobrevibacter ruminantium
MAILSDRDIKKYLNEGKITIDPLEDEKQIQPSSVDMRLGDEFKVFKVIRKPFIDPKDPEDLASYMESTIVPEGDAFIIHPNEFALATTYEYVKIPDDLVARVEGRSSMGRLGVTMHVTAGFIDPGFEGRITLEISNIGAMPVALYPGQRVCQLVFETMTSPSELPYGHPERNSKYMRQRRPESSRIKFDYELNEK

SEQ ID NO: 5086 - protein, 291 aa, Methanobrevibacter ruminantium
MRKGFYEDISTFLVKHTFHTRFFLSRLTKKSKIAKKIIDRLLFQGDEVYVLPNKNTVQKTKSATISANIEVNQSFQKDDSEFVPSEILKIAIREASDIVIMNKCLCRSSNDCQDYPQDLGCIFLGPASRKIASKYGRRATVEEALAHVDKADAEGLSHVIGRNKIDTIWMHVSPKEELLTICHCCPCCCLWKVLPDLDNDISDKIMRLEDVEVHPISDNCKMCKKCLGDDICFGGAISLENDKITIDQNKCVGCGHCVQTCKFNAIELNYTQKSVDSVLNRIGELVDYKKH

SEQ ID NO: 5087 - protein, 263 aa, Methanobrevibacter ruminantium
MKYKDKKSERGKVKEIVEDEETIRLKENIYVVFVECESPGNVGFLARTMGNFGLNKLVLINPCTLKEEAYYQATHARDTVENAMIYDTVGEFVKDKKIDFIIGSTGAPGGSYNISRIPLKPEELAKSMNYNDKIAILFGREGNGLTNAEVDMCDLIVSIPTDPSYPIMNISHAAAIILYEIFKNRNEFPVQGLEESTAIEKEYLIKDMEELIDNLNIPEHKKKNGLKVFKNIVNRAFITGREAHTLIGILRRLNLKIKHGDEY

SEQ ID NO: 5088 - protein, 508 aa, Methanobrevibacter ruminantium
MITVYVKRFDSEKDEEPHIEAYEIEESPGMKVLDALEEINRKYNADISFRSSCKAGQCGSCGVKINGNGALACKAQIKDNRLIEPLDFPVIKDLVVDRSSADEKVKQLQLSLNCDDETAHEKLNPKDIKDTKKVRSCIECYTCLSTCPVVKHFKEDFLGPYYLRYLSKFDFDPRDESDRLIEALDSGMYNCTSCGKCGSICPKSINSFGDAIEKLRAMAYARDLGPLDAHKMFRENVVASGRSVSKPEEPFIETIHKKWDEEGKYYTDDESNDENKNKEKVALFTGCMVDYRAQEVGYALIDVLKANNIEIDIPEGQVCCGSPLLRTGQVDAVQELVDKNKEVFKDYDKVITICAGCGATLKNDHPKYGSNLNVEDISEFLVDKLDTSKMKPLNTKVTWHDPCHLSRGQNIKDQPRDIIEMIPGVEFEELELPCQCCGAGGGIKSGRPDIALELAKDKAEMVRVTGADYVTTICPFCQINLQDGLNAIGLDNVKTLNLIQLLKMAYDE

SEQ ID NO: 5089 - protein, 663 aa, Methanobrevibacter ruminantium
MAYDQLVTSEKGDKLFLLGNEAAVRGAIEAGVSVAATYPGTPSSEIGNILSVVAKSADMYFEFSANEKVAMEVAATAAASGLRSFTFMKHVGLNVAADSFMTTAYSGVKGGMIILVADDPSLFSSQNEQDTRNYSRLSSIPILEPSNPQEIKDMMVYGFDLSEQFGIPVILRTSTRVSHMRGIVEMGEINSPKSTTKEVKSDKHWLKGYFVKNPREFVPVPANALAMHERLVEKIGKIEDEANESPVNEVVSFESGVLQGKYGVISSGGAFNYAYDIVAGENLGMDILKIALSYPTPKDLIYDFCKNLEGVFIVEEVDPILEKDVLAVLGEKNLDCPVYGKIDGTFPMVHEFNPDIVKESFNKVISDLADDEELKAEYKDEFGKDLTGDLIETVEKMEFSQSLNDLVDNIPTRAPTLCAGCSHRSAYFASVKAYEELGYDKEDMIFASDIGCYTLGISPPYETADYLLAMGSSVGDGCGFSIATNQHVMSFIGDSTFFHSGLSPLVNAVHNKNKFVLTILDNRITAMTGGQPNPGIPIDGMGDEAPAISIEDIVEAIGVKFLKIVNPHNIKKTVDIYKEALEYDGVAVVIARYPCTLIKGQKRKPVMEIKDSCVKCLHCVEKLACPAISYLDDKVTVDEALCKGCTVCIQICPNKAIGVKKGD

SEQ ID NO: 5090 - protein, 212 aa, Methanobrevibacter ruminantium
MDNINSSSSNSDNSDVNYSIYISGVGGQGIIKTSVIIGEAAMLEGYDVVMSEIHGMSQRGGSVSTELKIGNFKSSIVEENKADLILAFEPIEVLRGLDKANKDTALIFNTFPIVPSTLTQTGETYPDIGDIIKNLKDNFDSVYPVEGNGLAKDAGSILSLNMVLLGACVANDSFPLSKETVETAMKHNLAPKFHEMNLKAIENGYNAIKDSL

SEQ ID NO: 5091 - protein, 196 aa, Methanobrevibacter ruminantium
MNGGVKIESTDIRYFYRNIVKSGKKYRIKHNNKDYGEFSKLSDALYERDCLFYCKFDYDLLVECDLPNKYENMELPPFPEHRPRGQIKGLKFNKKEREGEIVFDHKERKFCVIRGEEHFGKYNTMVEAYYVKKILMENDWDKACLIQNKRIREDIFLNQKIKASTPKLNKYCPNCGNKVKEEDIICKICGIRLVKD

SEQ ID NO: 5092 - protein, 612 aa, Methanobrevibacter ruminantium
MKGNILKNIDEIIKSDFKSAFSNPIVVIVLIGIIILPSLYAVLNIYACWDPYGNTDEVVFAIANLDNGSTFKGDYINIGNELVTEFKNNNDFKWTFVSEENLRTGVFNGTYYAGIVIPKNLSENVVSIATDNPKQAKLEYVVNVKTNPVASKLTDSAANRIYMALNAKIVKIIDLAAYEKLGELQKGLASGSQQLSSGGYQLQSGSAQISSGSHQVSSGAKQVKDGKQQVSTGAETVKSKASDLDEGAQTVQEGSNYINQKSEELQQGSDEVQAAADPSLMPDGPVKDYVDASVELANGSGELAKGSSQLANGSVQLANGSVQLANGSVQLADGSVQLADGSVQLADGSVSLAAGAQLLSSYAVQALFTASSSLGATANELGSVTGINKTLLGNYLYAPIALEREEMFSVPDYGSDIAPFYIVLSMWVGAILTCVMLKTGLSTGTKYSALEMYGGKLVIFVILSILQACVTIIGCNILGIHIVNLPLFIFSCILVSVVFMILVYSIISALGQVGKAIAVVLLVLQISATGGIYPIQIMHGFFQTLYSYMPMTYGITLVREAQLGTVWSNYWPALAILFAIGIITVIVALLIKVKADKASHYFEKRLEESGLF

SEQ ID NO: 5093 - protein, 91 aa, Methanobrevibacter ruminantium
MYEDKLYDKAERRVDEKIKFYRHLYSYIAVNVILAVINLIFFKGDWWFLWVSLFWGIGLVSHFIKTFVIFNYFDDHHRDSMIENEMAKMRK

SEQ ID NO: 5094 - protein, 148 aa, Methanobrevibacter ruminantium
MDKKMIVSVAFLLLILAVALVSVFDESNSSESKVNLIVYSEGPKSLSELVNEIKTQDYYEGYDNETVAWMESLGNKKFYYGDGIIVIMSATDASKLPSLYVTDVELFEHFECNVLEKRSLGNVEYPKDVLYVKNVKYIGEEYGNFSGA

SEQ ID NO: 5095 - protein, 153 aa, Methanobrevibacter ruminantium
MKVQLFVSKDLEEPYAEIYTDNLTDNIQKAMVLLENDESDDDVDEGNSILAVKKGSDIVLLDFEDIFMIKVEDKQTKVFSQNAEYSIKKPLYQIEESLDSDFVRISKSTIVNLRKIKRVAPSLRGMMFIELKNGLKDNISRKYLTDFKKALDL

SEQ ID NO: 5096 - protein, 143 aa, Methanobrevibacter ruminantium
MEIIKRIGIGAFVGCFVVMLVMVLGTYSLGPQNVSFSGTEIINAFFGSIVVGWAFAFSGLIYEKEDIPLPIQVIFQMVIGLGTLFAVAVYLGWMPISLGIGPIITWIVIAIAFAAVFWLGFYLYYTFLARDINKKIELSNDFD

SEQ ID NO: 5097 - protein, 379 aa, Methanobrevibacter ruminantium
MKTIVNGLILKGLELEAKKENILIDDDGTILEISKEVKEGEIIDADNKIVCPRFLNAHTHIGDSIIKDEGEGLSLDEVVKPPHGIKHVALESADDDVLIEAMRESMWDMYNMGVSHFIDYREGGLDGVKLLKEAAKDIPITPIILARDSSFYGEDANYHMVKMALKKLLKESDGIGLSGFGEISTTVAEIICERCEREDKISSIHVAENELNQIASLEKTGKSEPQRAFEAGFNQIVHMTNPKNDDVELLARSDSSLTVCPRSNGALAVGVVPLYEILNKGVRPLIGTDNIMINSPNMFRELEFTLKIMKGVSRNHIDAREILKMATTNADSSISNLPIDKSYIGEGQKAELMIVNKKSNNPYLSLINRTEANDIVKII

SEQ ID NO: 5098 - protein, 291 aa, Methanobrevibacter ruminantium
MIVKDVASTDVIHVTVPGSRDEALRIMKKEDVSVVPVIKKETGKLVGILTRSDMITNPDEEQIAMLMTRNLITAKMDDELSTVAEKMVTNDIRRVPVINDDDELVGIVTSFDIVSLAIADMGIKDPVENYMIKTIPSTWDETPLNVAFEVMKFFGLKSVIGLNSNNKMTGILTETDFIAESEIISERTEHSSSVGTEGDKWSWDSTSVLYIEKNHLKFTDKVFKDVASGDVVTANTKTKVSVCTEKMKSLDVEQLPVLGIEGELVGLVRASDLIKSFIIGFNFSFSFIFTF

SEQ ID NO: 5099 - protein, 359 aa, Methanobrevibacter ruminantium
MKANPKIEKVKQILKDYKKIALAFSAGADSTLLAYLAKESDCDVLAITYDNQIFPEGFLEFAKRRADELGIKHEIIENSFLMIYDVAHNTPQRCLTCRRLMYGSIKQVANERGYDIIIDGNNITDLIHDRPGILMKYANGIESPLIDANLESYEIHDFLEENDIEYSKSTTCLATRVKANETVTEDKVNRIDYCEGFIKSTIGADVVKLREEKNIATIELGNNDSKKILDKEKLEIIFNELKEAQYDKILLNIDFTEDEEELILDSELQKGKENLILRKKLPFDIEISKTGKVINEADNEFISDIQTIEEIGYIKLKIDKKESKIFRDGKISIENNKNKEDAKESLVKILPLIRRAKPF

SEQ ID NO: 5100 - protein, 213 aa, Methanobrevibacter ruminantium
MTKIIVYLGLSIQEEEAKTILDADYRTPVKRGDILKAISEKPDIIGIIDGVFHHTPAVAHKEIMKALKMGITVVGASSMGALRASELDDLGMIGIGYVYKAYRSGKITSDDDVALSFDPERNVPISEALVNIDYKLDLAVKEEIISEEDKEYIHNIAKDIYYPKRSYQYIFSKVEMEDEKKTKLIDFILKEKDIKYLDAIEALEYIKSISEEE

SEQ ID NO: 5101 - protein, 419 aa, Methanobrevibacter ruminantium
MFEDVEIQFFKGTHRVRDPKETIEINENKLRTAGITRLTEITDLDRIKIPVFSAIRPTAQEGGVSVYAGKGATKEQAKASAMMEGFERYSAERQDIDNERTFVDTYNNIKSSQELKALDPRDLLLPKNFTTQNVENSRLEWIESKDIISEETIYVPSNAVFHPYIPTREVIPSPLAIFKGNTNGLASGNIIEESVLHGIFEVVERDAWSLFELTKRNKKEINQDTIENDIINELLAKFNNEGINIKLMDITADLKITTVAASADDTVLKDPALLTLGVGTHLDPNIAVIRALTEVAQSRATQIHGTREDTIRADFMRKSSYEGMKRMNKHYFQKEEDTIDLSDIEDKSSHSIKKDIETSIEEVQKVGFDKVLYTDLTREEIGINVARVIIPKAELYSLDEERLGTRALEYDRKARRGLV

SEQ ID NO: 5102 - protein, 347 aa, Methanobrevibacter ruminantium
MVSSENKVHDFHIKNILKRLEEKDLDAMMVANFNNIYYLSGYLSTSFAFMIVKENPIIFVSGMDLENANNNSSIDIIKYESADQMVEYLNEEEIKDLAIESDLTANAYQKFKDFNLTISPAISIERMIKTDDEIDKIFKAGEIAHKSLLELDVRSKQEKGAEEWECAYELGYLMRKNGASTESFDTIFASGPVSSLPHSTPRHHKLDTPVLVDYGCKFEGYCSDTTRTFVYNEKQEEISKIVLEAHDKAIKAVKEGVKSCEVDKVARDIITEYGYGDKFIHSTGHSFGLDIHESPSLSLKDETILEKNMFVTIEPGIYLEGEFGVRIEDMVLVDKKAKIVGNLPPIL

SEQ ID NO: 5103 - protein, 309 aa, Methanobrevibacter ruminantium
MFVEDLINNLSNFIESRLSDKILIFLQEYFLKAGIFTLASQIIAILFISIVFTLILALMIALLFSFDILMAILLAIFIPLLSFILFVFIKSERRREELENSIPDFLRQLASMLRVGMSLENALVDLSEHGNGPLYDELRRVVVEIRMGKSFDESFRNMAKRLDSKDLERSFKIILNAHKSGGGLADVISDVSDDLRAMLILKRERKSSVMMSIMFLVLASVVAAPFALGMVGVYSSFMIELNRSSAICQLAPTVALIYLIIHSILAGFLIALIMYGDIKKGVKFSIPITALAFFLFYLINVFGLSFFGF

SEQ ID NO: 5104 - protein, 74 aa, Methanobrevibacter ruminantium
MFSIYLKNDFNRLFKEDKAQGSVELILLIGGIIVIVLVCMFVYKSYMGGLGDELESNELESLNNSFEELSSKFE

SEQ ID NO: 5105 - protein, 471 aa, Methanobrevibacter ruminantium
MKVLIDGEDFDSGDHYEVKNPYDGELVDTVPICFRQDVDRAIDAANRAKKELQDMSAKEVSNNLYSAYEELESRSEELAKLIVLEAGKPIKQAIGELNRSCETLKFAAEEAKRIYGESVPIDATGSVDERFLAFTKKVPLGVVGAITPFNYPVNLALHKIAPAIAAKNAVVVKPSTEAPLAALKLVEIIDNHFPNGVINSVTGYGSEVGDALVVSEGIDKISFTGSIATGLFISSRAGMKKLTLELGGNDPLVVLEDADIEKAVSAAVSGAFLFSGQVCIGVKRIILDNKIADEFIDLFVKEASKLKMGNPMDESTDIGPLINENASINVETAVNNAIKDGAELILGGNRKDCFYEPTILDGVNMSMDLVANETFGPVAPIIRVDRIDEAIKVANDTRYGLQAGVFTENVHSALRCANEIDAGSVLINKESTFRTDAMPFGGFKSSGMGKEGIKYAVEDMCKFKLIAFNCR

SEQ ID NO: 5106 - protein, 241 aa, Methanobrevibacter ruminantium
MWDTAKDYRILVAMHARELFLRTVQTGSFRGNWNKKATIEETKKMEADLKSLLYCYLEGDALANCEDVQKLEDKAGRIIEFLGGEDWNHKFMQGAPKDEREKTEENIAKVRFFLDTILGLRNRFKFGPIDDPIMGIDVKVGEIMSVSKHPKADSLMICNVNIGKRALKVVTNDLTVKEGNRVGVSLLPPATFMDVVSEGMFLGMNGSILKEVQGDLGNMPNGIPMESLNETKNMITAFLDS

SEQ ID NO: 5107 - protein, 138 aa, Methanobrevibacter ruminantium
MVEVTQLYDLDIYTLAGQYVGQVHDVVLNIRYGTISRLQVKALEPEKKSAGFRDIFRGGFQFVPEEEVGRTYQEGLLNIEFDRVTAIGDIMLIDPQDLKRPKPPVAGEEMSIRPRPEAPKQVPQEVPQEVAPKPKEVI

SEQ ID NO: 5108 - protein, 253 aa, Methanobrevibacter ruminantium
MIVGILGCGAIANTIVNEFLSDDGIDIKYFYDTDIERAENLAQISNGIAVLEMDEMLDNVDLVLESASPIALKVHALNIIENGKDLMVMSVGALMDKEFRQKIHKAAQANNAKVYAPSGAIVGLDGIKAASIGKIKKASLTTRKSPKSLGREVEEEEILFEGKASEAVERFPVNINVAASLSIACNMDIDVKIIVDPKVDRNVHEVLVQGDFGEFRSSSENVPFAANPKTSMLAAFSAIKLLKSFSECFSVGT

SEQ ID NO: 5109 - protein, 252 aa, Methanobrevibacter ruminantium
MKDYEIYSNLKVPKNSNIILRLDGRKFHSLAKYLALKKPYDNNFAKLMSEVSLDIFNQFSPKFIYTFSDEISILLDEIPFLGRVEKLNSVFSSIASSSFTYHLLNDFKDDFNMDKLDEDDRNVIFPVSFDSRVIPIVNEDIYDYFKWRQDEAWRNCVNAYGIWALKKEFSPQIANEKIKGLKSSEIHELLFKKGINLNDVDTWKKRGIGIYKIENQIEGFNPVKEEKTVSYRSEVFVDYELELFNKEYFYRF

SEQ ID NO: 5110 - protein, 306 aa, Methanobrevibacter ruminantium
MGFKDLISKLNEKNHFEKVCIDQTVIDSIIYYSKKSYPDEFLAMFDGFVKNEVLYISGLIFLGGERSHTSASFNDWLLPPDQKKWGTVHSHPGLNARPSGADLTTFSKYGSFHIILCEPYSLETMMAYDSYGNMRGFEVGNFVDGKDDEIYKDLEELRKEIEEEDGELTPSIFDLDQDLSFFDSEEVKTNKYSHELEDEFGNLALDNDGSNDFDSNNFSEDINSNNPNSNDFTSNRFYPSRNVSDEDLGSIDLNPQVIRIGGEKVNGQSPKLGIIIEFRDGKPILKSYTVDSQENEDSQEKEDSDK

SEQ ID NO: 5111 - protein, 524 aa, Methanobrevibacter ruminantium
MKALVADAINEKGIENLKEVCDVVVDTSITPEELLETIGEYDAILIRSRTKLPAEVIEKADNLKIIARAGVGVDNVDVNAATKKGIMVVNAPESTSITVAEHTMGLILSTIRKIAIADKSTKAGKWEKKAFMGMELRNKTLGVIGMGRIGSQVVNRCKAFEMDAIAYDPYLPPEVAKNMGVELYEDIEDVLTRADIITIHVPLTPETEHSISTEQFKMMKDTALIFNCARGGVIDEDALYEALVNGEILGAGLDVYEKEPATNNKLFELDNIVCTPHIAASTKEAQRDAAIIVANEVITLFKGGMPKNIINMPRMNNSEFEETNDYLELCEKLGSFITQATSSPINKLEITYKGEINKLPSKDLFTRTILQGILNPVTETAVNAVNATTVAKARGISITEAVSDDSEGYDTLIKVAAKTKEGQMSAEGTYLHEAKIIKVNGYWVDVKPEGNMFIAKYKDIPGSIGAIGTKFGEENINIGIMQVGRDSTGGEAIMILTLDERPSKEAVKKIKDLDNVSDATCLKL

SEQ ID NO: 5112 - protein, 112 aa, Methanobrevibacter ruminantium
MVKFEEFPISSANYIPGYKVVEEKGFVYGLTVRARGLGGDIGAGLKGILGGEIKQYVKMMEESREESIGRCIEHAKELGANAIISVRLDSDSISQNMQEVLAYGTAVVIEKE

SEQ ID NO: 5113 - protein, 257 aa, Methanobrevibacter ruminantium
MVLGNAPFLADAYFGHRTRLYNLDLLRNPNNVSKIIEKSYDCGVRSINLANKENLLKAFGMACDNGVEMQAVSTIGKTEMDYVIPDYDEARREATWKEDIENLAQFDNSIMLVDEFLIDSYDWDFITDILDAINDTGIPSGIITSFPFKTSLELIDSPLLEDKNLFDFYMIPVNKLGYMMDVPHFKSDKQEELKLMLDKIDKKIIINKILAVGIQRPEEAFNFLNTLDFADMVSVGIASEREAEETFGIFKQNLDFF

SEQ ID NO: 5114 - protein, 269 aa, Methanobrevibacter ruminantium
MDYLKKIPAIRWKDGKYEEVEEKTVSDENIYFYIDLLPPRKFSTYPADLEDFGVGYCLGDGLVNSYDDILSIDIDGKHITIKTKFNHGADEDNKEADEEKPDVDADVLGYQSVMSDSAGGWRSELKKIEPIESDLVVNASEIIENMKRLTAKAEIWQATGSVHVAQLVYGDKFITREDVSRHVAVDKVIGAAAKAGFDLSKCYVTYSGRMPADMVIKMVRVGVPILVSNAAPAGSGYEVAVKGNITLVGFVRSNRFNVYASTSRIDLDK

SEQ ID NO: 5115 - protein, 143 aa, Methanobrevibacter ruminantium
MSDENKDNRVYNLLITKGTDPEGQYEFYKERIDSQKDFLYAEYNTQDNELNDDLFEEVDVIVLLYGLYHDNTEICDELIKKSKELSIPFLLVRSFGVEWILQDLESKADAVVGWNGHCIVDAIKTLVDGGGEWIKPCDIEEEY

SEQ ID NO: 5116 - protein, 55 aa, Methanobrevibacter ruminantium
MELNSKHYTIILIIAIIIAVIMTYMTGIKNPIIIGLCILAIIVILANLYLTKLKK

SEQ ID NO: 5117 - protein, 326 aa, Methanobrevibacter ruminantium
MAVTNRNQLIREVYQLLNKEGFETSNIYDQSCFDIVARKKLLILLLKILVNIDSINESHVEEIRQISNVFLASPIIVGLKSKNHILEEDVVYERHGLPAIGLQTLKNMIIYDEYPEILADRGGYYVQINGNVLKEYREEYNLSLKDLADLAHVSRATMYKYENGMVRANTETAMLLEEILNTKITLDIDLFEPYQEDIKLKADTSNLNQTQGTNAQNLAKLGFGVVSTNKSPFDALAKAEIATKKKDNPLIANLNVQDEQNTKTLKKMAISLKDLSLVTSSDPFFVLADDKIKDSIDGIPVIKSWEMKEFENSKEFLKLIKERRNN

SEQ ID NO: 5118 - protein, 430 aa, Methanobrevibacter ruminantium
MEILYFYSSSVIIMDYFYIGIDDTDSPDGMCTTFLASSILNEFERSNIKIIDYPRLIRLNPFARFKTRGNGGVSFKLDIDEDTDLAKEIVLGYVRELSMFDCDNTNPGVVFYEGEITEEMVDYAFKAIYSIITIEEAEEFANHIGAEIYKFKKGRGIIGSIAAISCPLEDYTYELLAYREPSRYGTLRNIDYDSVVRMDKETYPETFENIDGKYLAIEPKTPCPVLYGIRSNSPEVLEKAREMVIPNETIADSCIFKTNQHTDMHIQNADRISDMKQYSCYRIRGTVKERPHIIEGGHMFFTLYDDSGEIECGAYEPTKDFRKIVAKLREGDVIELYGGIGEQNTFNIEKFQVIKLNEFVYRNPVCGCGKRMSSAGRGKGFKCKSCGKRIESDEKVPEKIDRTLINGKFYETPVSARRHLSKPLIRMDLD

SEQ ID NO: 5119 - protein, 416 aa, Methanobrevibacter ruminantium
MAIGVKEIKITDTISILLLPLIYALVLGLALYLAKPIKFIGRKQSKVAEGAMVLFIGVLITKLAISSGQAIASIFQVGPALLLQQIGNLGTLIALPIALFFGFRREVIGMTSSICREPNLGVIIDKYGFKSPETRGVLAVFVIGSILGTPFISFLSSISASLIPMHPYAYAMASGVGSASMNAAALAPLMHMFPSMATDLEAFAGCSNLLSFCFGIYMCIFVSLPLAERMYKWLSPHIGHDKEETIDDEYAIEGVKHDKYASKEELSSGKIKRWATFLLIFSFTVAVGNYIGYHTSLLDSFIGMIIISLITILGMSLERIIPWNIQSIIYISLIGIIVAIPGMPTADFIVRYVSQIDLTTICTAFLAYVGIAIGNDWEEFKKIGWRGIIITLIVISGTYLCSAGIAHLTLVATGMV

SEQ ID NO: 5120 - protein, 987 aa, Methanobrevibacter ruminantium
MGGEIINNEKLKLILILTLIFSILIMNTVNASDNGIIAEYADISTIPNDEKVSINENDYDTNYYELPDKKLDHLESNDNQNHLEMNDKKLNDGNSNNDFNYIQELINSHKDGDSIFLEDKTYIGNGSPIIINKNLNIYGYGYKNLSDLDIKTILDGNSKSNIFIINKGIQLNLYGLSLINGNTSYEDGGAIYNNGLLSIDSCSISNNNAGGGAVYSSEGSEIEIYNSLFENNSGLLGGALDLENANAIISKSTFKGNRCNGDGGAIYNNIGKLTISNSTFSFNKGARGGVIYNNHGTLSIYDCEMFLNSASQLGGTVKNWGSCEIYNSTIKNNTADMYGGGLYTFEFKMTVNDCLIENNYADEGGGLFADADSRLIVINSTIINNNAKIGGGIDAKQAYLTVNNSSIINNNAKSNGGGIYADKHPAEIHNTNIKDNNGNSGGGVFIGDISAKISDSTLNGNSGETGGAIFNKGKLIIEKSTLNSNEANYGGAIYNQKNLTVNKSSFDSNKAYEAAGIYNLGDFLIESSNFTKQSVSHKAGVILSVNGNIKIKDSIFKQTSGADEGGVIFTREGNIFIDSSLFLLNNALSYGAAIDNSAIMTIQNSLFSRNKAFGAGAIDNGGDLTVTNSTFTNNKVTNNGGAIDNNGKLYMSGSVLVNNTAQNYGGAIISRKDTNIEYCQILDNSAPEGDGLYDSGDYLLISNNWWGENNPNFDELLNFNIDEDFKWIEMNFTNSTPLMQKKVSNLTISLNGKDKNNNSFKLENPDKLPILKSSIQVVSEDSKIKYNLNIVNGSASTSTDMKLAKTVNAILDNEIVSLDVLENNESDDDSEDSDDSNDSNDESDNPNNSNDNSDNVTDDSDDSNKSNNPNNHQSNGNKNNDNNKNYYNKNGLRYSKMKNSLLNSIDSNLDNDYLNLKENNENNDDSNSNNKDMNYSDKKTDLNNESSNKEIDENETKLFDINYSLLIIPIALILLVLFAFRRKNKDD

SEQ ID NO: 5121 - protein, 477 aa, Methanobrevibacter ruminantium
MIIHELSRFLIDLKYDDIPKESIEKAKLCFLDYLSVYFRGLESENSKIAIKTIYKLFGDNFNSLNKAFINGIASHSLDLDDGHRLAQLHPGSIVFSSLLALISDKSLDLDISTEKFIESIVAGYEVAIALGILVNPNHRNQGFHSTGTIGTIAAGAVASKILNLNLEQTEHCLGLCTTQSAGLLEADHAGTMGKSFHVGNACYGGIISAFLAKNGFTGGESIIDGKEGFLKAMSLKTYEDYLDADNNDLDYLRISKFLEDNLGKFHINEVYLKKFPFCRHIHSSIDSTLYLKESIVNSDDFDSLDSIGLDSIDSIEVKTYKIASEHDNFNPKNPQDLKQSLPYAVAISLVLNDLSLDSIDELKDDGLFDEKSNKEYVLKIKEIISKINIIYDKDLDDLAPQMRPSQVTIKFKDNSRDSIKHTVYYPLGEVENPLSEEDILEKFKLLNPKFNIDKLQIIKHMEEYSIDELFRELDLID

SEQ ID NO: 5122 - protein, 291 aa, Methanobrevibacter ruminantium
MDETKNSLKELGINELHDDYVSQKRFEDGGQYRFEVPGIQGPSALESLLNACDDFDLTIHRATQTKGIMFLLDEEIEDMVDLADDANIQLFLAVGPRAPYDTSATVQTEEGKRIGYRLRGYKNLVYAIEDVKRAVGLGVRGILLYDEGLLFALSKMRENGELPSDLKFKLSAHAGCSNPASAKLFESIGLNSLNPVRDLQIPMLASLRDAIDIPIDVHTENPKSTGGFIRHYEVPEMIKVASPIYLKTGGSVAKHHSWDTTDQEARQRAKQVALIRDLIERFYPEAQMSKL

SEQ ID NO: 5123 - protein, 294 aa, Methanobrevibacter ruminantium
MDLIKKVEDAVVKAGSGYSEDRLTAYENALRLEEEKGNENAVWALEQMIENFKVAKENKLPLCDDTGIPHIIIEIGYNREIPKNFFNDINAGIANGLDKLPGRPMAVKGNDIERIEQSKGLYAESNMMKPASFLIEEKDDSTYGRKIGIDDDKIRINVLLEGGGPEIRAKTYRVFHKRDSNIVFNEALSWLKESLSMLGCTPSIPAIGIGRSHFEANSLMLRAMVHGNLNDQSDIEKYIADELNKTNIGPLGLGGVTTVLGSFVNIGYQRASGVRIVAVRPACFVEPRVSSFEF

SEQ ID NO: 5124 - protein, 282 aa, Methanobrevibacter ruminantium
MSDDQKPYKNGFKFPEQSIRTKITEVSPNRLSTRGFNQEDLIENLSYSENVFLILRGRLPDEKEAKIFNHILVSFCDHGVTPPSTQSARLIASSGASINNAVAGGLLSFGKNHAGAIEKAMALFQESISGLNLEETDPDDENKRIALLAIEIVNRYEGESKRVPGFGHRYHDKDPRAAKLIDLAIQESAIGPHTKLALAIESILNEKKGICLNVDGANAGLLSDLGFDSDLGLGIFMIGRLPGLIAHAFEEMQEEEKFRRFCDLENIVYEGFKNKRIDDGEE

SEQ ID NO: 5125 - protein, 169 aa, Methanobrevibacter ruminantium
MEFFDVIEKRYSMRGFEDKEVEQEKLDKILKAAQIAPTGVNFQPFKVIVIDTKKYKEELNAIYPPEWFTQAPIALCVVASKERAWTRKFDGKNIADIDATIVMTHMILAAEDLGLNTCFIAAFKPDEAKKFLALDDEWEPVLFTPLGYGNAEPRDTPRKAIEELVIYKD

SEQ ID NO: 5126 - protein, 123 aa, Methanobrevibacter ruminantium
MKPKIVRARDKEVMNQLAKLFEESKYTVKSQDKNYVLLKKNNYGNPLIHLPFILIGLFFNAFAILVNVAYFAYSVFKKSNVILITTEKNDEDGNPLEFDDVGEIEVFYDQETWDKAIELSRLE

SEQ ID NO: 5127 - protein, 112 aa, Methanobrevibacter ruminantium
MRKIILLAFSALLIILGLWNYMSVPKPGLDIIASSLVLVAVGWTLAMSVFEPNWIKAAIFIDGLVFVLVSITFLVSPINYVFLLFGIILVAIAVLAYLRKLPDNILRYFYRS

SEQ ID NO: 5128 - protein, 104 aa, Methanobrevibacter ruminantium
MAGISEAITQIKKAESDADSLVEQSTVDAKAMIDEAHVKANEMVEAAKNEANEEAQSTVFDAEENAKKEATSISSQADSDVEAIKNKARNNIDEAASIIVKNIL

SEQ ID NO: 5129 - protein, 668 aa, Methanobrevibacter ruminantium
MFRTARMRKLNVITLDKYAGPTVSALHDEGIVQINDISERIQQDPKLAELLKPSKVTPYTGKLSSLLMKTSALSDLLGDALSEGQSLKDTLMSFISPDLPVPKEVEDVDTESFIAYAESTLSQVEAETKGIEDKLAALDSEESKLESNKSLASKLKNLDMDLALLSDSKYTSTIVGRITAESAQKFKSEYSKITEDLFYELVPDDEKEYNILVVVVANEFKDDIYTLLRKNEFEKFETEDLQGRPDSLISSCESRLQAIESERSQAKADLKVVAEKWDDEVLALKEQLENEKEKNEVFATFAETDKTVVLEAWVPEKNLEQAQSIIETATDGHVIMETEEVPDNAEDVPVLQENCTYAKPYELLVEMYSPLKYNEIDPTLFVAITYPFFFGFCLTDAGYGILVALIGFILYRGMGKVNRTMHDGGLIIIASGIWSIILGLFTNGFLGDMWTRILGLGPALPTVIDSINAFKFPATILVIAIVIGIIYTNIGFILGAIDNLRYGEKKEAIGSQIVWFVFELGIILLILGFLFPTFGMIGMALGAVLIIAALGMLIWANGAYGLMDVFGFMGDVLSYARLLALCLATGGIAMTVNILTNMVNDMIPFVGIVLAIIIFIGGHIANFLFQVLGAGVNALRLNYVEFFSQFYMGGKNSYQAFKAKRQFTKVKK

SEQ ID NO: 5130 - protein, 161 aa, Methanobrevibacter ruminantium
MVEIALGTALAAIGAGVAIGFAGLGSGLGQGMAAAGSVGAVAEDNDMFARGIIFSALPETQAIYGFLIAILLLVFSGLLGGGEGLSTTAGIVAIGVGASIGFAGLGSGMGQGMAAASSVGAIVEDNDMFARGIIFSALPETQAIYGFLIAILLMVFGGILG

SEQ ID NO: 5131 - protein, 226 aa, Methanobrevibacter ruminantium
MSSGADKIVSNIMSEAQGKADANIGEAQAQVDAILADGEKRAEATKLKISEDAAKQAEMRYQQIISEAKMNARRAELGAKEEVIEEAFNKATEDLTNMANTNDTEYVDALIEMIKEAAVEIGGGDLIVLLKKEDIPKIEGKLEHIVGLIKSLIKREKPSDLNVIAKEVSRETDVETTLEIGEPIDTIGGAILRTRNGEIQVNNTIESRMLRFKKSLRSEVAKTLFD

SEQ ID NO: 5132 - protein, 384 aa, Methanobrevibacter ruminantium
MADEIATIISSLGLSNEAFLAIVLLAFVVIGAIIVIVATRPILDVYPYLHPNARVRARKGRLFDEKQISELVEANNVDEITNYLRGSPDYADYLDNYTLEKALDIQLGETYDMVSRMAPKEIQSSFKVMAKKSDINNIKSLLTAKQAGLNEEATADLLIPTGSLYEDIERLTDADGVTGVVAGLDGTEYAPVLEEALPEYEKTGMVLPLESALDKYYLSKLLASSETPSDENKQILYSYVGNQVDVANIKLILRAKADGLDYEAISPYMIDSGYQLREWKLKDLMEAEDVTGVISGLEGTKYSDVLVEVLPEYNETGSVALFEKALDKFLVDSAKSYSMKKPLGIGPIIGFLSQKEVEVKNLKVIARAKREADFPISKIREMLV

SEQ ID NO: 5133 - protein, 105 aa, Methanobrevibacter ruminantium
MSDVAIIGDIDTVTGFKLGGVKRGIIVNNDEEAKDALDELLNDEISIIIITQKIADNIREHINRRLGSDVLPMVIEIPDKSGSSEGGADQMAALIKRVIGVEMVK

SEQ ID NO: 5134 - protein, 584 aa, Methanobrevibacter ruminantium
MINEGNIIKIAGPVIVADGMRGTQMYEVVRVGEAKLIGEIIELEGDTATIQVYEETAGVKPGEKVESTGGPLSVELGPGVMGSIFDGIQRPLEVIKGISGDYIARGIDVDSIDKEKKWTFEPIAKVGDKVVGGDILGQVQETSAVVQKIMVPPMIEGTIKSIASQAEYTVLETIAEIETEDGIEEIQMLQKWPVRKGRPYKEKLDPDIPLITGQRAQDTFFCLAKGGAAAIPGPFGSGKTVTQQQLAKWADADIVVYIGCGERGNEMTEVLTEFPFLTDPKTGNPIMDRTVLIANTSNMPVAAREACVYTGITIAEYFRDQGYDVALMADSTSRWAEAMREISGRLEEMPGEEGYPAYLASRLAQFYERAGRVITLGQDPKESSVTVVGAVSPPGGDLSEPVTQNTLRICKVFWALDASLADKRHFPSINWLQSYSLYVESITNWWQENASEEWRANRDQAMVLLQKESELEEIVQLVGPDALPDSEQVVLETTRMLREDFLQQNAYDDVDTYCSPIKQAGMLETILKFHEAASAAVTRGADVKEIAALTVKEDIARMKYIPEDEFEARVKEIQEKVVTQCAEV

SEQ ID NO: 5135 - protein, 461 aa, Methanobrevibacter ruminantium
MNADIKTREYTTVSEVSGPLMVVEGVEGVAYNEIVEIEAPTGEHRRGQVLEVKDDVAVVQVFEGTTDLNTLNTKVRFTGETAKIGVSKDMMGRIFDGTGKPIDGGPEIIPEQELDINGNPMNPASREFPAEFIQTGISTIDGMNTLVRGQKLPIFSGSGLPHNDLAAQIARQAKVVGSDDDFAVIFAAMGITHEEANFFMRDFERTGALEKVTVFMNLADDPAIERILTPKMALTTAEYMAFELGMHVLVILTDLSNYCEALREISAARDEVPGRRGYPGYMYTDLAGIYERAGRIAGKEGSITQMPILVMPQDDITHPIPDLTGYITEGQIVLSRDIHRKGIYPPVDVLPSLSRLMSGGIGGDKTRDDHSGVSDQLYSAYAEGRNLRDLVAVVGEDALTERDQSFLAFAQAFEDEFITQAKDEDRSIVETLDLGWKLLTILPKTELKRVKDEFIEKYYPE

SEQ ID NO: 5136 - protein, 230 aa, Methanobrevibacter ruminantium
MAEEILEGINPTRMELLALKDREKLAVKGHSLLKQKRDALIKEFFDILDRVKGARENAETNLSEAYEALTEAQIIMGDLAVQKAALSVKESVKVDISSRSIMGVSVPIADMEMESRTLVERGYGFSDTSIQLDEAAKKFETALKYIIELGEIEKTIYLLADEIESTKRRVNSLEHIMIPRFQATIKSINMKLEEMERENFVRMKMIRSTIEKNEAEALAKAQLKAAKAEE

SEQ ID NO: 5137 - protein, 952 aa, Methanobrevibacter ruminantium
MISLSFVSASYALDSNHLGENDRSCLNSCSSLKYSLGDNKNNDLDNSADLNSLNPNSNNCLNSNKNNCNCYCKNQTDLNDDLNDSDNCPDSFAKKTNINHDKQLNDGEIDFSERNNQIFLISPENFSVFFDENNRLKEDYGGCTLVFEGDFAELGIIDISYPYTRITAKENSFKNTAFKLSASDIELSNLNISLDKEFKDNEYAGILVLSDYISIYNITLNYTVPANTNGFCIYSKGEGFRRITDLSLINNTITFTGNNLNEAWDYGIFLDKTDNALVYGNSLGSYLPLCEDNWYNNEYGAVSKMSSAGFVAQSCNDLKLSSNEINTYVTDSTQSSFAMDSCILYDCSDLTVERNTLYLEDIDSQDGKNNTLHGFDLYLCDDAIIAFNNIDLFTMGGNDGRKITSPLQVNGPSDNIRIAYNNITSSNFGSNCGIYSHNFYGDTHLEIISNFIDVAGFANSGEWSLLSGIEVQDSDDVIWNNTIIVTNLGDFKYNNKVYGISYSQNRNNYNSTFNVQYNNITTNGYYAVYLGKDDYPVVNSTVKNNVLNTYITGGNPAVSIANDNKNNPIVNNTDNEFKNIFKNSSFPKWLKNFLRQDTKVDKDFSWITDAINPQSNGTGFSNDTGNGTGIIDNDGSDTVGNNSEGSDSIVNGSTSANGTGNGTSGNATEPQNPIDDNQGDNSGGSSSSDNSTGSQTDNEDSNQNNTDPTDSKPTNNTDVPVNPTNTSDKPVNSTEPVPANDTEPVPANDTEPVPANDTGPVPDNKTDNPVNNTEPVQEDANKTDSDNTEPINTTKDNSTEIINKTESDDDTNQTVLKDDDLDPKESHENSQDDNKNPSDDEEKSTPGDSGNELTDPESNSESPQNQEENSENSNDDSSEPSSSTVGDSHSDSASSPGLSDASSSKNAYELDKPVEDLVTKSVDYISLAGICIVTLLLILFGYKRQKDIEGED

SEQ ID NO: 5138 - protein, 212 aa, Methanobrevibacter ruminantium
MVDVGGGILTYILDTLSQSLQIPVIIFLLIFAVGAIILLGGLIREYSHRKTISDAEMRNIIDAINKANDKSEILSIVDSSDIPNSQKTVLREITDSDWDNESRVGLAKKLISSREKRLEKRLSYTDIITRIGPTLGLMGTLIPMGPGLAALGTGDVVTLSNAIIVAFDTTVVGIGSGALAYVISKIRRRWYSEYINNIDVLTDVVLNKLNKL

SEQ ID NO: 5139 - protein, 113 aa, Methanobrevibacter ruminantium
MVKISRKNSFDESSEEDPMSGVANLVDAMLVIAVGLLVFLVISWNMQSIIFNEDLSPQQKQEAIDAMNQVIEVDQGQQLNETPDISNSSGEGYTEMGKVYQDPKTGKLIMIEN

SEQ ID NO: 5140 - protein, 440 aa, Methanobrevibacter ruminantium
MGKLSFSVAQRFGKKGTALPGKVALKFNPNLLEELSKKCDKIVFITGTNGKTTSNNLSTHVLKGGFNDVLSNLNGSNMIQGVLTPFITDYKDSYDVGIFEVDEGSVPVVSQFMKPDYFIITNFFRDQLDRYGEVETTIKMVHDSITPETVLIINSDEPSLLRFDDLPNKKVYYGINKTKFAQDDIDVAESIFCPKCGNRLSYEYIYYGNVGKYHCDKCGIENHPADYFIESADLINGSYNFTVLNDNKREEYTLNLMGLYNLYNSLGVISLAKEIGLDYNLIKERINNFEYRLGRMETFHFKNKDLVLVLSKNPVGLSEVFNTITYDESQKSVMFILNDYAPDGKDVSWIWDANFDPVNHIPNMDAFYCVGTRAEDLALRLKYAGVDESLLKIYPAKDQFDINEAVDTISKESTKAYVIGTFTAMPEARKILVKKEQEGF

SEQ ID NO: 5141 - protein, 258 aa, Methanobrevibacter ruminantium
MDNLELTVMNMYSDILNTYGDIGNFRCINQRIRWRDISLNIQECTIDKDDDFEWEDIDIILIGGGSDNNQSIVSNHLLEQRKDLVEFIENGGVLLAICGSYQMFGNKYLDVDGKDIPCLEVFDIETTSRPDRLIGDIVISNAIPDSNNVLNKDFDFKLKDMVGFENHGGRTYHNHDPLGHVKVGFGNNGEDKGEGMVYKNFLASYLHGPFLPKNPHIADYMIFNALNRKYSITEIKDLNDTIEIRAHERMLKRLLNDK

SEQ ID NO: 5142 - protein, 428 aa, Methanobrevibacter ruminantium
MENLLIMGINTRPMVNSALKLDYRTYSVSYFKTYDFVSPYNERHVLDQESVDSCGFFERNYSPQKLLDLSREYLFDLSKEHNSKKQDNENNEDIDEIDKIVLITGIHADDFKGEFSRFKTKIRGNINTKDLDDKFRFYQKTKNKFDVPLTFKLSDVDELRDILKQYNNNQFILKPLKGNGGLGIFLIDYDSLNELNNSNNPLENISFDDYILQEYIEGTSISSSVLGTNDDCVNLFNSRLVTENDLGNDNFAYSGNIVPLDVNSFNCFNESFKGLGIDSKQLNKEMKEISEDLIRQFRLIGSNGVDFILDRENNLKVIEINPRLQGTYELCEEIMDLNLLDAHIKACEGELVEVPKLNGRYGIKKIIYSSKQVKIGNLSLSNVYDVPYEGVKIEANQPIVTLIDSNKDLKTAIGNINTAEELVYKNIY

SEQ ID NO: 5143 - protein, 326 aa, Methanobrevibacter ruminantium
MNIFSTEETYYGTRKDSPVLLPSYNEYGDKLHIKDVFDFEEMLENYIIEMEIRNYSENTVKTYSSIIRSMIDYMSSEEGVYDGRKFLACFKKYIRDLKKDQDVSQNYIYLNTVVCKKFLEFNDIYFLEDVQNPKRTKSLPKSLTEKEVKSLIDAVQITDEDSELKKKAKMRDKVILEFLYSTGLRISELVKLQKKDIDFDERTIRVRGKGEKDRIVLFDENTRDLIDNYIETQNQKSEYLFINKNGRKLTPRYVQMMIKEYAEKAGIKKKVTPHVLRHSFATHLLKNGVDIRVIQQLLGHSSLSTTQIYTNVDMDTIKSVYDHARE

SEQ ID NO: 5144 - protein, 445 aa, Methanobrevibacter ruminantium
MGKGVELTTTKYLIHAQINANGIVEKPDVVGAVFGQTEGLLSNDLDLRELQRTGRIGRIQVIIHSNGGRAKGEIVIPSSLDRIETAILAASLETINRVGPCEASIEVLRVEDVRAVKRQQVINRAKEIYMGMMETVSPESMKMIEEIRESMRVHEISEFGEERLPAGPNVHTSDAIIVVEGRNDVLNLLKYGIKNTVAVEGVNIPTSVAELTKKRTVTAFVDGDRGGELILKELLQVGEVDYITRAPRGKEVEDLEKEEVLVALRDKAPTEQVINNLDFNLDTQAKTPKNKVNRTDRRAKNFNKSDKFHGNKRNDRKDKFNDRKDKNGKNDRRGKDRNSRGRRDRGDRIPESRMKLLKNMLRDLEGTGNSEILDDSLNLLKETKVETLYEDLKEDIPDADTIIFDGVISQRLVDIAHSKGVKTLVAFKSSRVIKRPDKLKLITLN

SEQ ID NO: 5145 - protein, 251 aa, Methanobrevibacter ruminantium
MEGVILAKIKPNDLLKKPSKIEKMELDQIDISKYQFSIDDLEGKDSSNYILLKKILDSSSSCQVSDAYASVSGRSGVLDGLKPMNRNKVYGRVFTAKTNTNDWGTSLMAMDNASQGEVLFIYSYGDKASVWGELASTCAGEKGIAGTILYGYARDMDALIDLDYPVYALDYCPNAGKALGLGKVDIVLEIGEDIIKPGDFVFADENGVVLIPQELFGETMVATFNVKVKESFIIKELKKGRLLSEIIGLER

SEQ ID NO: 5146 - protein, 120 aa, Methanobrevibacter ruminantium
MKFLGNISHLANSGKLIAKSSQTPPAGAFVFTNDKQKIGKVYNIFGPVKNPYISINLYRSVNKRDLESRQGEKLFVSTKREMEKDKKKKRSNKSKKGKYSKGKNKSKPSKKKRSNKKSRR

SEQ ID NO: 5147 - protein, 264 aa, Methanobrevibacter ruminantium
MGPEWRAFDHEQRDKRTRVGAPITYTIHDKGLSTMIDWRNKDIYGRDIPARNRAQWYRLRKWQRKIRISGATERNLAFALSELDRDSSRLGLPRSVREAASVIYRSAVENKLIRGRSIEGVVAASLYAACRQCKVPRTLDEIAEVSRVSKKEVGRTYRFLTRELHIKLPPTSPVDYVPRFASELGLSGEVQSRSIEIIEKAMEKGLTSGRGPTGVAAAALYIASVLLGERKTQRDVADVAGVTEVTIRNRYKELTEQLETGVTL

SEQ ID NO: 5148 - protein, 701 aa, Methanobrevibacter ruminantium
MKLSIIIPTYNEEEYLPKLIESIRSQEFTDYEVIVADADSNDNTREIAEAYGCIVVDGGLPAIGRNRGAAVAKGEILLFLDSDLELTEHYLENVIEEFEEEDLGIAITQMTPLSQKKRDIYLHNLANWFMIAVENIKPHGAGCYGIISRKELHDECGGFDENLTFGEDTDYIERVAEISQFKVLRNAKIGVSTRRLEEEGLYTLLKQYGKSTVNDFRGKRTSAEDLGYEFGHESSSKLESGVQESVPKLENGVQESVPKLESSADISSQIEDNSPSLEDEIDIESDHYPITALDSTDMERIAEKSKNRKQSSFKRRLNEFKDKEFETNELIEYEDESGHIKHEAVGLDSRKKIFYSICGEGMGHAIRSSVILEHLTKHHDVYIFSSERAYKFLSEKFDNVYEIGGFNTVYENNVVRTKKTFFKAMKANPTNLKEGYNVLYKECKKVKPNIIISDFENYSSMLSKLMNIPLISLDNIHMITQCDYDYPPHHKADMLTAKAVTKSYILRPKRHIITSFFFPPLKHPKMTALYPPVLRKEIMDLESESGDHVLVYQTAESSINLMDELKKLDEEFIVYGFNKDGTDENLTYRAFNEDKIYEDMRTAKAIIVNGGFTMISEAIYLKKPIYSTPAHKNFEQILNGFYVEKLGYGESHEDLDVKKIEKFLDNLDTYQNNLNKVEKWDNTAILEDLDLSIEMYAKKNY

SEQ ID NO: 5149 - protein, 352 aa, Methanobrevibacter ruminantium
MNLKINKYIPFGIILIILGGSLYFLSGIDQFIRPFTQPILMGSSKGKDILFFVLFGITIILSSIGDNERIHNYLMNLSIPEKLKDKDFYLKLSLILFLITAISGLAVELYLRASLGLNWNTILVIMNPSLTSTSFLHSHLYKSIFGIILGIFLSHIPAGIHTGSSLSSYAPSVISLLFILIPITYISMVLSNQRRKAASRILLAFTSTLGIIGLIDGGLFATPAIGGIYGILILMYNEEILDGISDFITEKDKRDGIKEKLNEELRAIKSIFNNKNIKKYLKIALPHIALILIIILRFSVAFYGACPDSYELIISNGHDLDLDEYDTLNISENGDRTVVHLSNQYNEMELFK

SEQ ID NO: 5150 - protein, 245 aa, Methanobrevibacter ruminantium
MVPLQFFLFTSVGVDPSLAMMVSLGTSLAIIIPTASSGAYQHQKKNKSIVRPGIRLAVFGIIGGFCGGLLANMVPTRILQMIFACLLIFVALDMLFGSRSDGEKALIDFNLLNGGIVGFSIGIISGLLGVGGGVFLIPSLCILFGFSLIEAIGTSSVFIAFTAIGGLISYIYTGFGVNPMPYCLGYVSLINFVVIVLFSVPMATIGAKLVYKLPEKRLKQIFAIILIYMAIKMLGFDPISILLGL

SEQ ID NO: 5151 - protein, 304 aa, Methanobrevibacter ruminantium
MPSEKVKEFNESLKTKEGRDKFFKQIFCIAIGTVVGVATYAFCLYFNLAIFGWNIGLALSPLTAGYAESILAKKILNESTGAISAFILFIITVVYGFFISNSTLGFNIITAGSAVVIIQAAMPTATNYLLLAVGVGILTYVTGFLKKLHSALYKGYKKIFKREPKRAERYYQKQASQVHAFYDENLDINSLGVLIMTLEYPPKELNIIEQKGIYETRHIFGSKQKEDIKSGLEDSLEEEVINRVKLARDKTLVKLIKEVKADGCNGLMHLHTTYETLGTEKGDHIAQVVMRGTGIVIEKEEEEY

SEQ ID NO: 5152 - protein, 108 aa, Methanobrevibacter ruminantium
MLLSSTSTLESKTILKYHGLVSGESLIGANIYKDLFSGVRDVVEGRTSTYAEELDNARNEAIATMEEKAKEYGANGIIGLKISYNNLGGTMGNTILVTVYGTAVTYED

SEQ ID NO: 5153 - protein, 62 aa, Methanobrevibacter ruminantium
MVEPHKHCPVCGSPIPMKERVCSPDCEKVLEMNQKNIRKSRIMLFAVIVVFILVWAYFMFFK

SEQ ID NO: 5154 - protein, 264 aa, Methanobrevibacter ruminantium
MTGLIDIGLNLMHRSFDKNREEIINNAISNGVSQFVITGTSVKSSKIALNYAKDEKWNGILFSTAGVHPHDAKTCNEKTLDALKEFAKNDCVVAIGECGLDYNRNYSPQDVQREWFENQVKLAQELDMPLFLHEREAHEDMVKILSKYPEMCEKACVHCFTGTKEEAEKYLELGCYIGVTGWICDERRGQSLQEAVTVIPPEKMMIETDAPFLIPRNFPKKPKSNKNKPEYLPHILNTIAEYKECDSAELGEAVSKTTREFFKI

SEQ ID NO: 5155 - protein, 225 aa, Methanobrevibacter ruminantium
MRIVVAIGGSILLKTYDAQRFQEYSDILKDLSNEHEIFIVVGGGKPAREYIGVARDLGAGEAKCDDLGIEVTRVNAKLLLLALGDYAYQKVPHNFNEAQEYSASGKIVVMGGTEPAHSTDAVSAILAEFVQADMLINLTSVDGMYTKDPNKFDDAELISEITATDMMDFIRNQDVKAGTYEFFDFTAIQMIKRSNLETVIANGFEPQNLIKAINGEKIGTRVISD

SEQ ID NO: 5156 - protein, 2575 aa, Methanobrevibacter ruminantium
MSLNKLKIGRVFICLFILVFISCSINCVFAVDDLAFNDTYYSDLDSVNGDYSGFLSEGDFNGGSSVVVDGEIDSSPIANNKKNSSFALTSKKDSSSPSISTSSKNNKNNKNTSSLKENKTAAPSSQRVFYDRDIVSDEDVIGPGHENLDWINLTHVDDSLFSDNSKEDGAKGSKIATTIVASNLVKYYLNASQLNVGLKDSNGNYLSGKTINFTVGSASYIRTTNSSGRCSLTINLMPGVYTFTIRFLGDSSYSPSSKNVNVTVLKMPTSITASNLVKYYHNSSSLIATLKDTHGNPLSNMTVTFKMGSNNYNRTTNTNGKATLALNMIPGNFSVKISFTHPRYITSSKNVTVTVLSMPTSISASNLNMTYGDGSYLNATLKDAHNNPLSNKTIHYKLNNTIYNRTTNNNGQTSLIININPGTYQFNIYFNENYYQNSNKTATVTVNGIPNSIIASNLVAYVNESPTIVATLKDANNNPLSNKNLTFNRTGTLTNILTNANGQATYNLNGCTGNFNIKITFNTTGYAFSSKTVNVNIKFWPSTITANGATTYFTDTVQLSACLKGENNTPLANKNVKITYANKNITRTTNSAGNVYYDFNENVGTYNVNFSFKENYYQNASKTVTVTVNKMPTSITASNLNITYQDGSSLIATLKDSHGNPIANKTVNFKMETNNYNRTTDANGRATLALNMIPATFNVNITFSHPSYQTSSKSVTVTVNPISNSIIASNLVAYVNESPTIVATLKDANNNPLSNKNLTFNRTGTLTNILTNANGQATYNLNGCTGNFNVKITFNTTGYAITSKTVSVNIKFWPSTITANGATTYFTDTVQLSACLKGENNTPLANKNIKITYGNKNITRTTNSAGNVYYDFNENVGTYNVNFSFNQNYYQNASKTVTVTVNKMPTSITASNLNMTYQDGSSLIATLKDAHGNPIANKTVNFKMETNSYNRTTDANGRATLTLNMIPATFNVNITFSHPSYQTSSKSVTVTVNEIATNLAVSNLNMIYMDGSHLAATLTDGNNNPLANKTIIYTLGNVNYNYTTNNSGQTSLMIHLNPGTYQFTVQFSESHYQSAIKTVTVTVNPISNSIIANNLLAYVNESPHILASLKDSNNNPIINKTLVFNRSGNITNIITNANGQASYNLNGCTGNFNVTITFNATGYAFSSKTVNVNIKFYPSIISANGATDYYGNTIHLSASLKGENNTPLANRTVHISYANKNITRTTDSAGNIYYDFREIPGIYNVCFNFNQNYYQNASKTVSVVVLNPPSPNVNVSSGFYNVSYLLINVSSNISGGILYSSLDNGTTWYTGEDNICFNLTEGNWSVCSYYSLNGFNSSIVYNNFIIDGSAPLVWASNGSGFYKRSLDVNLTSLDIVDKNPVIYYTLDGSLPNNLSAIYTGPIHITSNYGLTKLQFYGVDRFGHNSSIVCVNYFHGNYVANLNSGKYFDSVQDAIDDMDTINGDVIEVNKDLSGACDLNKSVYLRSSCLNNFTWSQPNIVIHSNNSVIEGFDFDGSSMHSVILAGVSNCVIMNNRFSVVEYGIWSSLSGYNNVIMNNNFSSYGLSISFIYLSPIYGGENTYLIKDNIFNHSRCGICLESSLNSIISGNVFIGSNYGLKINGNNNSVVYNNLSFNSYAVCCFGDDNTLMYNNIVNNVYGIYGDYSNLTVNFNRFYNNSAFGLYASGGPINACNNWWGHNNLSVSEDYGFDICLQTDNIDYSSYIILKNYKSYFELRNNFIDNVSCVVDLNWNNLKEYVGEFIDGVNVKFVDMKTGPYPHWIAIESGQALYKTSCVNQVNNVIISLDDEIQTLNYSSFSSSVRFYINTTGFISNNSGNLDNFVANENGSYFTFDVILDHDVDWVSYVWRNIGDFKSELDLIVDGDIVSTSVVESSFYRNNLNNISSNVFDAILLYNDWYYSRLNWAKAVVYVYLSLEYNTTDLNDVQYIYSNVNWGCLSPERKNQLLNDHNITFNDALWNLIQNSYNLSDEDVIFIKNHHKSFNDSVCVSAHYYGNDNEIINLNNINNNTLAYSGGMVIGSWKAPIMYVDGSYQHFIGNNSDNSTDIFTYYHNYGNGSIDWAYSTNYGNLTNGTYDGLMTFTFANDKVNGSVLNHYLSEKNRTDVNGSLVYSNGFMKAAYGSFLEGLLVIYMDDLVADLVSSRYNASWERVSPMVMSVRDDHGRLVMSGESDFYFGRKLLCDDENIIKSFYFACSSVFSSIEHYVHQTLFPDRIGYGVTVDLGRLLADGECLSIVDEGRFIYICPNESDEIYYLCFDKLTGILMDASILGNDAYCYSNQQTEWAFTLGEELIDNCDLIWDYLNGLDVDICALNVSTQDMLKVCYGFNILSDLFTCALLSEVNILIESIGLEESFNAIVPLVGVLVSSLENIGSYVLDEYLSNPKFLSGVVGGLLFEAGMIATCTGVGAPVGLALMGAGTICTAYSSGLIDYNDNDGIYFNTTLENQANFGFSMSCNLISGGIGGLASSSAFKATGSEVIQIASKNAVIDSKGFYTTTISTKYVAYEGSSNTVSRYVINRMVNSQNPSKKIFILKGCRNILDSLMQDCIWEERNNLLIK

SEQ ID NO: 5157 - protein, 188 aa, Methanobrevibacter ruminantium
MGVLASVAGGIFFEAGMIATCTGVGLPVGLALMGVGTICTAYGSGLFGMTDTGNFYSNLTDENLADFGFSMSLNLIGGGYSAAAAKSTLRTVGGKSVQISISKAAFASDQRGAYTTFHTISSKTYIQKVENGAFSNCGEYLIEQEFGTTVIENIRKSLRVLSIDYALNFCYDFLKENYIKSLDGGLYV

SEQ ID NO: 5158 - protein, 55 aa, Methanobrevibacter ruminantium
MNAAYGSFLEGLLVIYMDDLVADAAGERYNVNWTRVSPMVMSVHDNIKGHILPGK

SEQ ID NO: 5159 - protein, 452 aa, Methanobrevibacter ruminantium
MTKLIKREVKREYNEESPLKLKIANAISTFTNPPIICIPLFLLISFVLASNGNPFSSSFSFDWMLFAKCEIISLVFASVLPMAIIIYWAKKLNTDKDISNREDRFIPLIVGVLSYLIGFVISFFFELPNFLTILLLCYAVNTFIVMLITSLWKISIHTTGLSGPVAALIMLLGPIGALFGLLYPVLIWSRVTLKKHTMAQAIAGGIFGFVFTVGESYLYMRLFKMSVPGLVPLAECFWIIFALVACPIVLGICGLLEKRGIESVIRAKLFHLLAFIGFAAFYFYGPSSAVLILILSAIVSVLVTIFAGDTFSWYKGISRGLERENLSIVLSLACGLIWIYVAMNYFNIESAIIATIIVAFVGAIAEPVAIKYARYKFPMKSLLGNDGNKSIESSVVALIVTMIILLLFTQNVFVSIAVGLLVCLIETFVPKELENLVIPVACAIILGFLLHY

SEQ ID NO: 5160 - protein, 1262 aa, Methanobrevibacter ruminantium
MLNKKIIIILTFILILSISSASASADSTDETILSDDSAGLINLDNSNNNLYLDDNQFNLANSNSDNSNNFNLDDSNSDNSNFYLDEDLDNKINENIKNTKTILKENNSSIASFSNLSHILSKASAGDTIILENDYKYDSAYDSQYQGGIEVNSITIDGNNHYIDGNGEARIFYLASDNIVLKNIKFINGFNSQGGAIYAKGTNVNITDCIFENNLAPDNGGAIYVEGNASIKSVKFINNSAGYGGAAYINDSSILEDLIFTGNVANIEGGAVYIGGSSNITNCIFDGNLADKGAAIFIPAKESPMTPSEDVPFDESDLNSTDMDLDSTDMDDNSTDYNFTDMDDNSTDYNFTDMDDNSTDMDDYPDESDEDFPDGGDYVFPDWWEGDEFEYDGIECINVFITNSTFINSNDFYRGAIFSEHDNNISIDGCLFENMSSQYAPAIYCNVMVNILINNTGFKNLHANGTGGAMAFLDNVYAIVDNCSFKNISSSKNGGAIFYDSNSWGHSSPVSLIVLNSSFLNCSSDYGGAIVVLGGGFKSKDSSFINNSARYGAGAVHVYTDYDILVYDTVFYNNRLNEDNTSFGGALFIDSAEKAIINNTRFVNNSNDAIYAYESRIKINNSYFENNDEYLRSIYTEGLILGDNKYNDDTLVDLDYDPTYIIIGTGEGLKLDLINNTIDVTTIPSSFLAADWGWMSPFKNQDFSGGCWCFSTCAAIESALLKSTQKTYSLSMQNMQKLSTEYSKYGNNHIVEAGSTIVALHYALSWMGVFPEEYDTFDMIGKLSRQISTNETIHIQDAAFTYPRSISYDIDQIKQTIMKYGTVTSDFYAVNEAPNFNENTSAFYCNETDGRDATHAVAVVGWDDNYPASNFLVTPPGDGAWIIKNSYGEENYDHGYVYVSYYDTVFNIDGGVAYLFENTENYTKNYQTDIGGDIFLVNDSDSYSYKNSYQSIGDDYISAVGTCFNDADEDYTVEIYVNNVLKTSQSGKSPFRGFHTIKLENQIQVKIGDNFTVVMKTHSVPIVNTSRMHFKANVSFIDNGTGWKDASDDNATVLLKVYTMETLRENLTDRIPTRIDCKNMTTTAVAAEDGRIGKYFVVFLKDENGTALSNKPIKIGFNGRVYDRTTDENGSAKLQINLAYKGTYTFAIGFLGDNDYLGAFEVAKITVKVQTPKLATSNKSYKASAKTKSLTATFKTANGKVVANKKISFTVNGKTYSAKTNSKGIATVKVSLNKKGTYSFTVKFAGDNTFAAVSKKGKLTLS

SEQ ID NO: 5161 - protein, 414 aa, Methanobrevibacter ruminantium
MSEVSSKELYEFKKTLKELAEKKGKGTELVSMYVPPEKQLSDIIKQMRDELGQSANIKSKSTRKNVQSAIEVIMQRIRMITNENKDLPNGFVLFVGMIPKGGPGTEKMETVVIEPPEPVQTYWYICDSTFFLEPLEDMIASKEVYGIAVIDRNEATIATLKGKRIKITAHLTSGVPGKHKAGGQSQRRFDRVIEQLAHEFLKRIGQHMDDDFLPIKDELKGIVLGGPGYTKEDFYNGDYMHYELKDKVITTVDTSYTGEFGIRETIDKASGALEELGVIKEKKLVQRFFKELRDDNGLYSYGEKEVRTNLQIGAVDILLLSEDLKSKRLTLDCQACGFHAEVTQKEGQKVEDLTCPQCNDKMKITKEEDLIEDLSNIAEDLGTEVEIISTETDEGMQLYRAFGGIAAITRYKVN

SEQ ID NO: 5162 - protein, 217 aa, Methanobrevibacter ruminantium
MSDKEVYGIVLSQKLTKDNVNMGVVMGTEKFTLKRIELNEDVRLKPQDKILITKDSEELKKTDQKLSYDDLSNEEQIEAEKAIHSIVIANENKYVGFFNKQSKDGTQLHLLEGISRKNSMKIIEEKELNGDFESFEDIDNRISFIDDSEDLIAKRVLYELSELNKVKKGRPTYLFASVKRSSKKEVLELDEFEDDDSFFIEKLKREGLVEQEGKRIR

SEQ ID NO: 5163 - protein, 141 aa, Methanobrevibacter ruminantium
MTDLNTCSNEKLSFKYNDKWELEAIPLENNPDCIATLSYEDGSLLNVIAFPSELESLDIFKEVVEASLRDDGAEIVSSEIANVNKRPSIQIHSKVTTPEISFQMFSVIFLEEGFLYIFELRAVSEIVHEFMEIVKSFEILE

SEQ ID NO: 5164 - protein, 267 aa, Methanobrevibacter ruminantium
MIIKAGKINKARGNIVLTIGKEDVNKHNLEDGDFIILTSDEYEDLKASSEIEVSTMEVIPDDEAVIKLEYDLKEAKSKEKILFSKVEELEKLNLELTTELSKIEKENYINKTVLTDSESGSLLEEIKNVNDKNEELNSEIKKLNKDLKESDEERIELLQDMNVLKTKMSFDAGEISRLRERESKYREVLEIILKSNKNILDEAVNKTVTATIHEINKELSQTGLIRRIRGLTIVREPEISKESISSNAYKQLEGVIPDEYFLDSPDE

SEQ ID NO: 5165 - protein, 167 aa, Methanobrevibacter ruminantium
MGYFRGEIMEEITFNEEGIKFKYLSNWREQAKESVGPNCIKALVKVVEGKPSTITVYKNDAGDAKAVAQLEEPFNESFKSQGWNIVKSAILNLNGNPVFNIVSDAQEGDTILENNTSAIINNGKMYVFELMHFKDFPYAYNDYLSIMDSLEFVNEEEIEETEEESEE

SEQ ID NO: 5166 - protein, 140 aa, Methanobrevibacter ruminantium
MSNLFQNDQLSFKYPKNWKLVSDDEIEGCLAILDSDSKHSRVMIFKYPEEGLSLEYLKNAIEDIPREESLKVISSNLTILANKETHELIAEDTSHEPPLRTHSLTTIHNRDAYGFNFMGFGLDNPDEEGFLFMYRTLKFE

SEQ ID NO: 5167 - protein, 203 aa, Methanobrevibacter ruminantium
MTLKEEKDKVRKSIYDNLFNNGFSNRPNGDYGKIPDFKGSDIAAELLSKTEEWKSSITIFSSPDAAQTPVRYLALKDNKNLIMASPNLTHGYLFLEGQNIKEIEEASTKEGAFKHCSKKDISNINVDLVVEGSVGVDRMGHRIGKGKGFADMEIEDLKKRNIINNTTPIATTIHPLQLVNHIPTESHDQRINMIVTTREIIRV

SEQ ID NO: 5168 - protein, 181 aa, Methanobrevibacter ruminantium
MADLKGTKTEANLAAAFAGESQAHTKYQYFASKAKKEGYVQIHDIFMETSKNEKEHAKIWFKLLHDGEVPDTIANLNAAADGENEEWTAMYKEFAETATEEGFPEIAGLFTMVGNIEKEHEERYRALLANVEGEAVFKKEAEIEWKCINCGHIVKAPEAPFICPVCKHPQAYFEERATNFK

SEQ ID NO: 5169 - protein, 52 aa, Methanobrevibacter ruminantium
MSKKEDNCQIDDCSSGTCAPVSPFSKEGILFLIFIIVLFIVLFFLLWTNGLI

SEQ ID NO: 5170 - protein, 142 aa, Methanobrevibacter ruminantium
MSDMWGLTVRGICEYNDKILLLKLRSISAHDPCKWEIPGGKVKKCEYFDSALKREYKEETGMDISIDSLYHVIQKNYTACKTGEKIKSIQLIMKVSTNSDEVLISDEHDMYGWFTKEEINDMIKNNELTPPAKAAFCKTLLV

SEQ ID NO: 5171 - protein, 168 aa, Methanobrevibacter ruminantium
MSMLSNYRLKELLKKESEMTDEEYELFLNEFRKSELFIPIQVDLDSLDLKDVQLNEINHINQEINFRLKSYESKDKKRTIPLFTDEHEIERLKMNTTVGSLFMRDLCESIMPIRDSFDQIIINPKSEKSFKISVDEFLDLFDEDREFEDLMKEIENDEEFIEMMKKEL

SEQ ID NO: 5172 - protein, 134 aa, Methanobrevibacter ruminantium
MTLSDNKKLKKLLKSKSRVKIENNPNLFYKEFLKSTLFVPVIAINEDENLNDGDTLDLQIGFFDEENGDRNIYIFTDSNEMERADYKITSIAVNMKELSVILSQFDMDFDYIVINPYGPDSYKIDYDEFKSRTE

SEQ ID NO: 5173 - protein, 159 aa, Methanobrevibacter ruminantium
MDFKREKYIEVLIYIIAKTANKKNVGKTVLANMLYFIDFDYYELYGESLTGETYFKTINGLKPKHFDDTLIDLIQRDIIYLKREADYDNKLKKYYIARIPDNKLSKKEYFVITDALDRFSNLSASKFNYILSKDIPFKSAKMDGQINYECVFHRLEKTN

SEQ ID NO: 5174 - protein, 240 aa, Methanobrevibacter ruminantium
MICPSCGSENKEGSKFCKNCGERLTDSSRPTSTNASASSQSKSNKNLLIICATIIICVAVVAGAILFMSGQSTDYEVASGEATNDHSSSALNSYDSSNSNDESQDDSASASEDSSDSADEYNKNHKWGKSFQEASEYFPEASETVVTHVFYEADIDGNGFLTDNEFKDFKSLVSFTRKYAADVTNNDYVDTPDLWEGDGSVRTRYCADHGRIAVGSDDRCPYCAKKGQDSRTRSGSTRYV

SEQ ID NO: 5175 - protein, 282 aa, Methanobrevibacter ruminantium
MNEIIDNYNVNEKIEIDNFELEDIISLGVNNLTIADEEEFFKLLKEAQLFILVQLNKEEVFDVDNQKVVEVIKPIPPLGFNFMTLTVNENERSIVAFTRKEIIKEIGLKADHIVMNMRDLAKILMGLGDTFSSIIINPQTEHSIMISINTFLSLFMEKPKNPFIGSLEQTLDKLKNDYVELDNHYMFFIRSDYEFMENESKDGVFVAKMPLRASTDPNFQANLPILHKLMMMEGQKVLYTGNPNEEQTDFDVLIAPGTEFEKYYDEDGDTSVWRCVKQPFYE

SEQ ID NO: 5176 - protein, 142 aa, Methanobrevibacter ruminantium
MQDEPNKKINRAKDDENLLFARGEVIRLMKDHLDKDKMITERVKVEMNRFLSNVLVAVCEELNKYPYTTIDYEMLKESTYPYTRIKQINQERERILVHLNAIKADCDALGMDIEKTLKLNESDGEDSDFVPHTSRVKEDDGE

SEQ ID NO: 5177 - protein, 481 aa, Methanobrevibacter ruminantium
MDNEFKINYLLNILKTTPKVVSDRIIKDQTRLNFRKDYYDLKESIDNFLEHDTDDRFYILPGLRGVGKTTIVFQLYDYLTNERNINSNHILYLDLDRLKDQGPFNLLEYLDIFIKDINEEAYLNNWPLFIFIDESQYSSNWDHVGKIIFDDYKNVFIIFTGSDALNLQSSMDSARRSLKKEIYPLNFAEYLYLKYGCEIPRGISDSIFNAILFNDFENLIKDERYIQLNVYNKFKRDINKIWDEYIQYGGFPLSFARKNHASIIQLGLDMKNRIVEKDLDIVLSVNSQTRLNTYSLINILALQKPGTLSYNKLAKNLEISKKTVGNLLNALECTQMIFHIEPHGAITKRNRRPWKYYFLSSQMKAAIYQNSGQATKTKGEYMGILTENLVGSLLFMMKNKRKQDFGIFYEEEKERADFLINTIDGRIIPIEAGYGKKGKRQVINSMEDHGSEYGIVVSNKTQSIKIEENVIFLPLKTFSML

SEQ ID NO: 5178 - protein, 230 aa, Methanobrevibacter ruminantium
MTEIDWFKFEDRDYDFPFYKKNPHISKMGWLVLFFVFIIGSILSMSDKLSYSILCCIVFIVPVLYFLDWDYKAIFRKPSLKDIALAVALFIGYLIYAIIMGAILESVGIVSSGIIDPGSIDWTVLIKSVFSLMGEEFIKFLPFIFFLRVLYKYTDNRKLSVVISVALVMAMFASLHAYNWVMFIYALFIQGFGSIFEFFAYIKTKNIIVSYITHYCTDAFIFAMLLLGLG

SEQ ID NO: 5179 - protein, 530 aa, Methanobrevibacter ruminantium
MDKETKERLGEIRAAMKKYGFDKILGESAKNRIRGKDEEEESLLLDSEVPVKFRLMLQELGTTFIKLGQLLSTRPDMVGEDIANELANLQDDNPAISYEQVKAIVERELEGDIDELFAEFSHEHLATASIGQVHEATLNTGEHVAVKIQKEGITDKIDLDIRIMKYIANRADRLSGELKKVNLPGVMEEFDRSIHKEIDYYNEFMNMQRIEMNFVDNPNVHIPATYPKYCTTKVLTMEFIAGAKLNDVYASEGDEFDKKLLAKTVIDSYLQQLLIDGFFHGDPHPGNIMILEDNVLCYLDLGMMGTFDEDFKRNLAEAILLIMDQDIDGVINQLMYMDILDYDIDTKPLKRDLNDLFGRYFGVDLNRFDGILGDLLKLMQEYGVVLPNELVTMARGVSMVEAIAHNLDPEIDIFESLKPIAKRIARERLDPKRYLKSKKSNIILYEHMFRALPQLLTRTVHKIENEELQFRFEVDITDKVSIVALVSALIVGSSVVSFGPRAFDMPVISIIGYIIAIILSIVGIRKFVLK

SEQ ID NO: 5180 - protein, 165 aa, Methanobrevibacter ruminantium
MDIRKVIGIILIILGLIFAIYPVYSAQAVSWIAGVALIAFGIGLILDGFSIWSMMAGVSAAKILLGIIAAIIGFMFLYKVDALSFIIAYQFYIIGFILIFVGLLGIFIAIDGISRATAILTLILGIICIICAFFSLSQPLYTAVIVGICMIMEGITFLASGIIDE

SEQ ID NO: 5181 - protein, 264 aa, Methanobrevibacter ruminantium
MGLAKEARDLERENKYDDAFELAEEARKLEKNGKYDEAIELILNYLDQNPQYKTIDYYHFANPIEEILFNVYIEDIDSVKTLNLEECLELIYFTLARAYGKKGDKEKEEKYLKIANKINPVSAIILLRLCKYCQSINENEKIKELAPDIMKYSYNSKILIESYLTLAFSYLDDKQEKELYNHLMQFYLTVETGTDFWDSIKEDIKYLEEHEIQVGFNPEMFSILKYLIALHTKQGREDTAKYFKDILYLMEEFTKSLNELRYDS

SEQ ID NO: 5182 - protein, 337 aa, Methanobrevibacter ruminantium
MDCIKNGIMGQIVGDALGLPVQFQPREERDIDPVTDMIGDGAFELPAGSWSDDSSLILATMDGLIKSLNGDNVDSTSLNDIIDWEIIMRNFSDWLNLGEYTPYGFSFDIGGATRDGIYNYDDGWEPLECGGIGERDNGNGSLMRILPIAFFIYYLSKKYSFIEEDKMTAVHNLSSLTHRHKRSQMCCGIYVNIALEFIDNFENGKCLDLEELISSGINKSKEYYFNDDSFEEELHHFDRVFSLNIQNLPRDEIKSGGYCISSLEASIWCLLNNENYKDTLLTAVNLGYDTDTTACVVGGLAGIFYGYEDIPADWITQLAKLDYIENMIGKFSQSLID

SEQ ID NO: 5183 - protein, 135 aa, Methanobrevibacter ruminantium
MYDLTKIQKTFNERVFSRLDDEILERNGIDKDEELIREELFRQREIITVPFGHIEYFLAIEDEKVLLYVEKASRMGSHNICIIDDDSYECIDVYDGYPPELKERYLDHLKRIKKTRNRFEENLKKLSEEKSIKEK

SEQ ID NO: 5184 - protein, 321 aa, Methanobrevibacter ruminantium
MQFGNYAVEISSENENHLINYLKFNNFKYEKDLENCSEKEEYVIVINIIERIYYKIKNYLAGPILSEKDFLDKINYNKYSIHKKAYSNDGNLIYEGYTIYEQGYGEIAYGLGTSYFPNGNKCHEGVFERKGLLEGKEFYSNGQLKFEGTYGRCRGYGPHYPSFGNYYSKDGQLLFSGKFKVTFGGVGYPMIKEPKYKLLEKGRPRYILKKDEDITKLIEKNTNIENKKYPMTFEEFEEKVLELFFEYHSDEFIEILKKRLEDYKKIEPNFMKALYKHSCWVYDSPHIYGDTCKLQFEKERLRHYPVYRLRVIVGLEDGFRG

SEQ ID NO: 5185 - protein, 188 aa, Methanobrevibacter ruminantium
MISINIKEMRKEKIYEGRVKMGHGGRGTIRLHNSNIGDQLYVIFPSYGKKEDKDGNLEIDEILRKTVELGKDGKNNIDFNREYRGRKCIIIKRESLIKLEFAKWKIIYDGIVKKSFNGQGLIRVKDMFLGERAFVVFGESLNDSNENIMVSVNEIRNKGIHPDNDHTSRVLLSKDYVNCKCLVVLQEA

SEQ ID NO: 5186 - protein, 496 aa, Methanobrevibacter ruminantium
MSKIHLSKSKYCKCVQCEKILWLGRYKPEVAAVEDKETIFENGRKVGELAKGLFGEYEDIEFDITLTQMIEKTKKLLEEKPNVITEASFSYENNFCSVDILKNDEDGVELYEVKSSTSIKEIYLDDVAFQYYVLSSLGLNVKKAALVYVNNEYIRGEDLDISQYFIIEDITEIAMAKQDEVRANIEHINNFMEAHDRDNEPNMEIGMHCCNPYSCDFWAYCTKELPKPNVFDISGMYKSQKFESYAEGKVSFEDLRSANINPRYLEQIDFELNDRGPKVEKQAIKDFLNSLKYPLYFIDYESCNYPIPELEGTKPYQQIPFQYSLHIIKEEGAPLEHKEFLGDINDKNIIRTFAEHMINDLQEDGSVIVYNKSFESARNREIGEMYPDLKGQMNRINDNMVDLMVPFRQRNYYTKEMEGSYSIKYVLPALYPDDPELDYGNLPSVHNGGEASDAFLNLKGKSPEEQEQTREDLLKYCWLDTYAMVKIWEKFKEVAK

SEQ ID NO: 5187 - protein, 115 aa, Methanobrevibacter ruminantium
MKLRNLHLDYKDENGDLRYELRNGAHSMKDAEGFSPEEFYSSLDNVIRVLSPNNSFRPIEAYPSNNGPKALFGFLFYFLKGMGCKKGLQKEFDYLEQFIDYEIDLFMIVNFLREL

SEQ ID NO: 5188 - protein, 251 aa, Methanobrevibacter ruminantium
MPLDIIEDIWKYTTNNKTFLLIILVLFYLFCMFMQIFDEMRISYALYLSMIPYIFIAGYGMAITKDVIDNGKRLPKILIKDVIVLGIKSTVVFIVYLSVQGIFFSLVSYLCNFPIIDVEDLLLDFFETAPLLFHHNLVNTLIFIVVDFAVFYFTMFFMEMGLAKLADTGRFLDAFNLIKIKKIIDIIGWRLYAKHYTVIIFLLWVFSLLIDVETPFFVLDYIFKVFLGLLLFITQYWGIGAVYRIYKIKTN

SEQ ID NO: 5189 - protein, 97 aa, Methanobrevibacter ruminantium
MISSEEKEKIKSDIVEKVNSVLEKYNESFRMDKVTVLNRAETVKFMGSYRVYERRNYCSVSREINSFLNKYGDVEIKSKKIRDSGMKFTTVSFNFEL

SEQ ID NO: 5190 - protein, 273 aa, Methanobrevibacter ruminantium
MAENEIKLFNDKQIRTKWDEEIGDYYFSVIDVIAVLTESSNPSRYWSELKKKICEEQGQPFENIERLKLPAKDGKMRLTDVANTKQLLRIIQSVPSPKAEPFKQWLAQVGSERLDEIVDPELGMERLKSTYRKKGYSEKWISQRMRSIEIRDDLTAEWDRVGVEEGLEYAILTNEISKASFGLTTRQHKNYKGLKKESLRDNMTNAELVINMLGELATTEISKTENPGGFEESKHVAKRGGNIAGNARKELEANTGRKVLSKANAKDKNLLEN

SEQ ID NO: 5191 - protein, 97 aa, Methanobrevibacter ruminantium
MISIEEKEKIKSEIVEKVNSVLEKYNESFRMDKVTVLNRAETVKFMGSYRVYERRNYGSVSREINSFLNKYGDVEIKSKKIRDSGMKFTTVSFNFEL

SEQ ID NO: 5192 - protein, 261 aa, Methanobrevibacter ruminantium
MDNRNILIIIGIIVLIAAAGIILVMLTSENYERMEIVPNGTSIDVPLNKTTYDGEFQSARVWHWDKGILVTYNSHEDKNILRVSELGIYTLNKIIETGEKENIDGFTSYVINADEILEIELFDAIKLHYTGKFYCIPLANGTTGDVIIICSNDRDEAVHMAKSIQYKNVFPVNSDFNNTIETVENLSEYLESTVNDYANSTDFDNAVSTVENLTGNLESSAKDYVNDANLSDVKTTVEEKTGINIDDAKSDLEQYIGKLTS

SEQ ID NO: 5193 - protein, 76 aa, Methanobrevibacter ruminantium
MAELMDKIFVVIGYILAILFPIVGIIVGALLYFLKKEDAFYQTHGKYIIIVGIAMIAINILLIAFGIITIPPVGQV

SEQ ID NO: 5194 - protein, 286 aa, Methanobrevibacter ruminantium
MNESQDIEETTKVDNSRLEELLQLFKDDPSPQNVQELGEEIKSSQLYLPVVYSQSMIEDILSGDVGEVREFKEPAGFDINFLTNNRGEKAIPLFTSDRIMEEAGLRSSVIVMHVEDLVDSLQGTENTYQLVTINPMTETGIDMPILTFLNMFKKREMSEEEKRFLESMNRMLEVLENHSIALEEKTAFFNRGPQDFMKEVAVDGVFVPNIPFSVSTIKEFEEDVSPYLNIILMDEGKRIVYFGEPTEENPFNVLLAPGCEIEMVEEVDEFTTVWKCGNQPFYDGMK

SEQ ID NO: 5195 - protein, 47 aa, Methanobrevibacter ruminantium
MAKATNKYRGDYITRLNETKYVEFNIGNAPKAMIFSRCDISKGGRET

SEQ ID NO: 5196 - protein, 106 aa, Methanobrevibacter ruminantium
MSFPTQIRNEQEFRLALLHFLGDINVGLVYTKKFFKEFMGLDNSVRQILVNQIKNALKNPGCGKFMSHNYKGEKAVRVDKRYRLHFKYDKKENLFELVSFYKKDYQ

SEQ ID NO: 5197 - protein, 443 aa, Methanobrevibacter ruminantium
MSNECLRCGYANEDNEKFCINCGAKLMEADSSIPDDIISCYFCGYKNHEDNKFCIKCGTRIHHELPYENELTEIYTRYGDVVDFNKVSYNIYYKYNLPQDCFLLNSELNNYEKYHEEYDMECPFCHQNSFSVIDSDISIGSVKITEFHEDEYHCSSCGLEIKLCKKDDKKIPGRRYLIANMDNKEHWIWKKYGKTPLYKYELDEIFNGGLSDDDKARLLSIHADYNRKAIKIVNRFSIYVSVRFAAEILSEEENSLKPIDTTFFLDDDEEAYFMFTDIDYSKPMVRYSTFGQSQGTYDAVTYGQSFDNAFSYLNGRSFYADTMGYFSTSTYSSTVSYEKVKVVDRGILLLTNKRLIFSGSIHSLDIDIDKILNLVHDRQSLMIHVKGRSNIVKFSNLDSNTFYLNLDGRQLSLNFTGYLLRTLIVKFMSPKKKRNLLKSKGSL

SEQ ID NO: 5198 - protein, 105 aa, Methanobrevibacter ruminantium
MNISEKIKEMQGDLGKYHALEKKEGECGLENLIMLILNDGGQFGPGKIIGESSEFLDFMFYKRQGPIFSLSIKKEHLSGFSIFHKAIDDEKQAAANIGIPKALYQ

SEQ ID NO: 5199 - protein, 107 aa, Methanobrevibacter ruminantium
MNFSEKIEEIQGKVKSYNSEIKGMKNIPSEKMIRVMMAEGEILEPCMIIGESDEYIDLMVVDLDKGPVFTVSIKKERIVGFGTFHKPLDELAYPEEELNAVPAALYL

SEQ ID NO: 5200 - protein, 102 aa, Methanobrevibacter ruminantium
MQIIEKVEKELEKLGLTVDTVANDHIIEACVTKVSLEDNLSKVGIDFDQIEKKLYPYSTFVIQMIQHLDEGGSTEDMIRAFLIEALNYSLELGDAFGISLEE

SEQ ID NO: 5201 - protein, 82 aa, Methanobrevibacter ruminantium
MNKQNVFALILLTIILLSVVAVSGCIGKSSDNSASDSSGDSDDSSNSIFHSGSDSDDDDNDDNNDKDDKNDNDKDDKDDDDD

SEQ ID NO: 5202 - protein, 212 aa, Methanobrevibacter ruminantium
MIGDDDFFMQNADYHYGASDSEKMYGRGYDGSSDYVPRYSSGGSYGSSSGAESSEDGSLGKYCLIGILIVLGIVVFANIGIPAITNSLSSSVTVDDLNITRYIYSNQYNSKITTDYGYQITYKERSYGQHATNVIFYSKNGKVLYNDSQYMGTCYLGEVPYIIYFDGKADYAIFEVYKTQFDSGECIYRERVDVDNKNVIKEFINYDTLYDD

SEQ ID NO: 5203 - protein, 261 aa, Methanobrevibacter ruminantium
MKYCKICRKEFPRDLMFCPECNSFLEPVSHSKTLDEGIVEHGINRIIFFDTETSGLNPNYCKIIELGMLVIEDGKIIEEYDKLINIGERIDSTITRITGITNDMLIDEGVSEGDVAQDLKEKLISGTLMIAYNCQFDLSFAYGLLKRHYPHEAEAIIEDVKWLDPMTVFKDRKAYPHKFSDAVEHYDIRNVNFHRAIGDAKGLYEVCLSLKDERDDLGEYINVFGYNPRYGINGLKFPFIEYKKHYYNDSMVSPNNILPKI

SEQ ID NO: 5204 - protein, 315 aa, Methanobrevibacter ruminantium
MKLENFKYETNDNNLINYYEIDNDNPILLIIHAQSTNSSSYSDVVKDLSKRFHLILVDCYGHGKSSHNRDKYNIVSQGDDLIDFIKSKTDEKISVLGHSSGGLIACYISSRSDLCDNLILEDPPLFSSSGEKRFDYYNYHDLSTVCHNFINQDEEKDFVYYYFMNQYMWNFFPESSREKIRNKSGASALKYREKHPDKPLKVRFWPKNVLEAFNGMEEYDPYFGENFYNDSFNCDIDYAELLSNIKCKTLFLKANTKIGEDGIIQGALTDDDLNQVMNLIENIEVEYFDCGHGIHNEKKKEFVKAVIGTTKIFTI

SEQ ID NO: 5205 - protein, 1093 aa, Methanobrevibacter ruminantium
MMRKTIFGVIFIVFILFSISTVSANDAQVDMLNDASDVELNQDLNAQPISSNCYDNNQNLKAQPISDCSDELQKSDDDLKLSEGGSTSFKQLCEDLNKSDGEFNLTHSYKHDESDEENTAVFYMENLVINGNNNIIDSSKSNFNFKFSNEANITINDLTFTNFNKSLFVISDSQLTFNNVNFTNCSSNLSLIAIMFPSNLTINNCNFYSNSFANYLDGPFNKLEIYNSNFDGTNCLDSAIKENRGQLVIENSSFENFTGVHGSIINYKGDYFSIKNSKFINSNSNFTGGAIIVKYFPIAYEEGDSFVYRHSNDMLIENCTFYNLSSSSNGGAIHLDLDSGSEGIVETLIVKSSNFTDCHSKFGGAISILGGYLNISYSNFQNNSASFEGGAIYSSWTNAKIEGSNFTANEGSQNAGALYFDKGKLTINDCKFIDNKALKERERTANAIYAHDVAAYFSNSTFDNGGVSVYADFASDSKIENVDKNDDIFLMDNHDYIVSVESKGIKLNLTGNEINVDSLPSHFDARDWGWTTSAKIQGDNTDCWAFASISSLETSFAKASGVLYNLSQNYLQKLQLKYFYSGDKRNSLTGFSYSGPGYALSWYGVLPVDNGYDDRGMIADTDLEDERIHVQDVLFIDTGRDDAVELIKWAILKYGAVTVQRGINGPYGELPTEGDDIAIMSHGTHFISLIGWDDNYFELEEGDDDPLHKFAWITKDSLSGFSTADYTKFDAIDNYAIVPQRAAVAYIFENDIDYHVNYQTDLTGLVGFDANYNYYSNEFVSKYDEFIGAVGTYFNESGIDYSFDVYLNSEKMLSQSGVSEFAGFRTIKLDEYIHIKAGDVFKVVFKSNSIPFQAYSRQHYIEGMSLASADGESWSDLAPLNKTVCLKAYTVKEDKEVSPSRASTKIDCSNMTTTAVASADGRIGEYFVVTLKDQNGTVIANKPIKIGFNGRVYDRVTDENGSAKLQINLAYKGTYTFAIGFLGDENYLGAFEVAKITVNKQSPKLASPNKSYKLTAKTKTLNASLKSGNGNPVSGKKITFTVNGKTYTATSNSKGVATVKVSLNKKGTYSFTVKYAGDDTFAAVTTKAKLTIK

SEQ ID NO: 5206 - protein, 381 aa, Methanobrevibacter ruminantium
MTKLGMGMMRLPLLDENDFKSIDYDEVNKMVDLYMESGFNHFDTAFVYHEGIGEESLRKSVVERYPRDSFTVSTKLPLFVITEESQLEGLFKQQLDNCGLDYFDYYLLHNVSGFTENAWKNVDLYSFIQKKKEDGFIKHIGLSTHGNSEFLDGILSKHPELEFVLLQISYLDWEDEAIESRKCLEVAKKHNVKVMIMEPFKGGFLADVPQEAEKIMKDYNPDKSVISWAMRFVANLDGVCLVFTGASNSKQLEENIEEFKNADPLNDDEIEILKEVSQIINKNITVDCTKCRYCVDNCSSNIDIAKLFDIYNKHKLLDTDEWTPHGNAYLNYSKLPDVGIASDCTECEICIEECPQKINIPEVLKDVAKTFETGIYGFGNE

SEQ ID NO: 5207 - protein, 66 aa, Methanobrevibacter ruminantium
MSEIPVAPVVRILKEAGAERITDDAKKAFADAVEASAEELAKKVIKAAAHAGRKTVTVDDIKFVCE

SEQ ID NO: 5208 - protein, 735 aa, Methanobrevibacter ruminantium
MGFLDNVKKIFDSGENKEVKPRNGTGKIDKVESVESKSNYVNFNEKDEQQQNSEDLINDEILDESTSNETRNFTYLNNLIHSGVKEIILDSDIVYGNEDEESRHGIKLNLDNLVIDGNGYTIDALRASEIFICDARNIVIKNITLKNGFSHQAGAINNQGELTIIKSSINNNEGKLAGGILNLGELTLDESVIAKNKAEHTGGILNFFGKLSITKSTLKENIGIGNKAISNNGGELTINKSRIINNQIDTKTNFVNKARTVFVNKAIKARRDAVISNGGYLRISDSEILSNESKYIILNIEFSRIYNTIFKANESQYIIYNDNYEDNGLSSLGIFNCKFIENNAKASIVYNDGNLCSIDNALFENNASHKNSNIITNKSNLTLNNLKIKDNGKNILNDDYIFIRNLSPQIESKIIGEGLAENIKDIKPQEEKFDFGYLDKKIHDNKTGEIILEEDIRFENYEMDYYEGGIELDMDNLVIDGKGHTIEGAKKSRIFLITGKNIKLKNIIFKNGFLYKDYDNLMNNQGGALKTNSNCSLTVENCKFLNNFSQDGGGAIHSKGNVDIIKSIFTSNTVKMFGGGGAINNDGNLSIRESTFTNNSAERYGGAICNKGEISLFDSTLTNNIAKVHIFKTSYGKGGAIYNKGKLTISNSSLSKNTAQISGGAIYNWKHNERYEPIITKQRGSEAMCYEGELIITESTLYNNTAEESDGAIYNEGKMNITDCDINNDSNNKNT

SEQ ID NO: 5209 - protein, 468 aa, Methanobrevibacter ruminantium
MTTLKLTRLNEPNIEKLYEMKSALRNILEEGDFKNLNTILDFQDKDGSFKLFSTYRIPSDARVDFCHEPTYICSSILMKAYLTGDSELRQKIETPLIHGLERCCCRNLTGHGYDSLQGQIDALNIFMKGGLREFIDLHPDLNSKFTEMILNIMVEFDAREEQGIFKGTWGEDYKEDILKINEYFSTRKVFVYGTLMNGESNHHFLENSICLGKAAIEGYDMYNVGGWYPAIIPGNSRIIGELYEVPENDMASIDMLEGEGSLYIRKCEITTGNELAYIYEYAQDTEGLEKIDSWKDYVWYVSYGSNMLEERFLYYIEGGCFEGSASYRYPCEDPTRPLEKRAIDIPYDMYFGNYSGSWHGGGVSFLDTEKEGHALGTAYLITREQFEHVAAEENGGRPPNGNGYWYENIINLGEMDGFEMLTVTNKDLREYNRPSDEYLETLERGIRENWPDMSEEDIDDYLNSCIRE

SEQ ID NO: 5210 - protein, 352 aa, Methanobrevibacter ruminantium
MKHRLNLDNKDPNYILLKEIFKIMDSRESKRILVSYGFKNLNRTIFAFKIIFISMFFEIDIPFILNELKSNRRLCKFLNISEVLTADQVYKIFSEINSEKLIKSLNRILNSRNMVKRRGKKTFIVDATPVDLDINFHRNKKTKEHLEKINLKWSYSSSKGYYIGFKATVVMDYDSMNPVCILIHSGAPNDAGLFEEILENLQKRRIIRKGDTLIFDKGYYRYKNYQIGISKYKIIPFIFPKEKFSRTRLDDILTYPLAVFNKTKRIMKEKRLYNSLKMELMKKIDSWEKFKPIRGKIEDFFKLLKQGLNMREIHKYTLKSVEKTVYLNVFLGALIISQGFYSKTTIQQLSEN

SEQ ID NO: 5211 - protein, 808 aa, Methanobrevibacter ruminantium
MNNETNAFTGNNPELYNRLKSSINNAESIDIIVSFLMESGVKLIINDLKEAISKGVEIRILTGNYLNITQPQALYLLRKELGYNLDLRFYNVANKSFHPKAYIFHNESDSEIYIGSSNLSKGALTDSIEWNYHFKRSKNLEDFDSFYQNFEDLFYNQSTIVDDEALRDYSKKWTKPRFPVKEAESIEEYTQTPSETLFEPRGPQIEALYALERSREEGFDKALVVAATGIGKTYLAAFDSIKYKKVLFIAHREEIIKQAAKSFKNVFPTKTIGFFYNQHKQTDKDMIFSLVQTLGKSSYLNDSYFKRDEFDYIVVDEFHHAVANNYKKILDYFKPKFLLGLTATPERLDNRDVFALCDYNNVYEIRLKEAINKGWLVPFRYYGIYDDTIDYSTVNMRNGRYDEKDLEEKLMINRRANLVYHHFLKYTSKSAIGFCASRNHAEYMASYFNEHGIAAASVYSGEQGEHSQNRQKAIDDLRDGKLRIIFTVDIFNEGLDLPSIDEVLFLRPTQSPTIFLQQLGRGLRKDKGKKYLTVLDFIGNYKKANMAPFLLSGKDYDSRTLLREAVLDFEYPEDCFIDFDFQLVDLFKYQAKSELKAKDRVVIEFNSVKTELDHRPSRVELFLHMDDAIIGAMKRTPKINLFKDYMSFLNDNKELMDEEEEFLNSPAHEFLKAIENTNMTKSYKMPILRAFYNNGSIKMAISDDDVYLAMKEFYDYGSNGVDMLKDKSSRDYKSWSKKDYVNLAKRNPIKFLKKTHGDFFIDKEGFALALADNLEQFINLDSFKRHFEDIIEYRTLSYYKDRFEKKQV

SEQ ID NO: 5212 - protein, 192 aa, Methanobrevibacter ruminantium
MSENYYDSNADDFFNGTVNVDMSPQYEDFLNEIPKNGHILDAGCGSGRDTLAFKSLGYKVTSFDGSIEMCRLASNHTGQEVLHLQFQEIDFKETFDGIWASASLLHIPTSEIDDVLKRLKKSLKKGGAFYASFKYGSFEGERNGRYFYDLTDITAKELFTKNGFNIKKIWFTQDARKEREDEKWVNILAIKD

SEQ ID NO: 5213 - protein, 209 aa, Methanobrevibacter ruminantium
MICPNCNKFYNDNFAFCPHCGAEKPEPLTCPKCGFKSNEFKFCPKCGAELKKSAIKKPTKTCSNCGHENAINRKYCERCGTDFPREENRRFETKIEQPKRILLDYVNKFQIEENIKKEIINDINNEKITTKTEITIRVRQAQKEKKEQDKIRKEKEEKERMLENEYYRNSETNTQYHTYDDKPDVFYGGNEYREIEENTLGEYNYYREY

SEQ ID NO: 5214 - protein, 179 aa, Methanobrevibacter ruminantium
MTEYTICPACKRKNSIKEKYCLDCGQKLIEEKENEIIRDDKLEIPKDKIILLDLNYTLISNSWKIRHEELPQKILKRQYEDELVEKIKDNYVILITASPYKTSFDSLKHIEENTDLKISESYWNFGKRPPELKEYWLKKAVLPSHGDDSSKYLALESNKDTREMYARFGIEARPKSDFI

SEQ ID NO: 5215 - protein, 278 aa, Methanobrevibacter ruminantium
MEYYLQQLTNNHLEYLFELKFVTSEFELPGLADDIDCKKLEECGKKSESLRIDGLGFDNKTNSFVIIEYKNQYDKCVIDQAKCYYKNLLDKKEAYIEKYYEKFGKDKEVEFDFDKTRAIIIGPEFSEQQKNRKDPDFDFELYTVSLCKYNNKIYRALYKKVDSNFKRELYFSSEDLKITRCSLLENKSDKVKKLYKDFENILFERFDDDFILDIRYIVDGVSITAEKSSICLLRVNKKSIKIHFYTDELEDETLNHENICDVIDNINTIYNQKRRNKK

SEQ ID NO: 5216 - protein, 186 aa, Methanobrevibacter ruminantium
MENPVDITAIDGIKRISKSYDIDTSEYYDDGLYISWISLIKSKNDTVCPDCGSKLMPLTLCPSEEMMELDEMGFDLENHNYYCRNCDYELYIDVLNIDCENHPIECAYLYYKLDEITKYIRHNEYSDELKSKMDYFDDEEFNAFISKLKEVDYIYEDEEGYVKLVDDVENHWFRHYIKYKRLCREL

SEQ ID NO: 5217 - protein, 39 aa, Methanobrevibacter ruminantium
MSIDKLLLEIYELIESEDYEKSLELCNQILEFDENNKDA

SEQ ID NO: 5218 - protein, 499 aa, Methanobrevibacter ruminantium
MRMTPSSHSSLKKAFFKKNTYGGITMNKIKLTRQDEPDFDELYRMIGELKDFLKEDMGSRNWMKNLETILDFQDTDGSFKLFTSYEIPSDARVDFCHMPTYICTAILMKSYLIGDSKLSKKIDRPLRRGLKACCMRNLMGHGYEALEGQIEALNIFMKAGLREFIDLYPDMSRKFSKMISNICGSNFEMLESLRNALLGPWGEDYKEDILKINKYFNTRRVFVYGTLMNGESNHHFLENSNCLGASTVEGYQMYNVGWYPAIVPGDGMIIGELYEVPQEDMARIDMLEGEGSLYIRKCEMTSSKSLAYIYEFLEDTEGLDRISSWKDYIWYVSYGSNMLYDRFICYIEGGSYEGSSSYRMPCEDTSAPVEVRAVEIPHDMYFGNYSGSWHGGGVSFLDTEKDGHALGTAYLITREQFEHVAAEENGGRYPDGTGNWYEDIISLGDMDGFEMLTVTNKKPREQNEPSEEYLETLKRGIRENWPDMSEEDIGRYLNSCIRE

SEQ ID NO: 5219 - protein, 280 aa, Methanobrevibacter ruminantium
MVNYGDDSLENPDDITLPFFAYGIFKPGEIAYSNIKKYIGKKNEKTINYAMKQRDGVPILLPEENNGKTHGYIFKFNDNERAYDTINHNLSNKLYEWGTIEQGKINVLFGKDPDIGSDDIGPDFDRENYKGKDDPFFKEALAIKQYVESNDFTSKDDFYDLQRYYILLWSAIERCCKLKYNKESDGKNREEFSKEKEFIDALDKCDETNYREIYKTDDLTPRKFDTDEPKWCINYYYTLRCNIVHRGKSNVNRDMGLLLQATKDLLNIFEHILDETFKEE

SEQ ID NO: 5220 - protein, 137 aa, Methanobrevibacter ruminantium
MKKIILGTCILFLLISVAYAGTVDIFTAPSPLQPLGNSGFGDGQGHNIQIFEFTENLYKTWFENDTDYVVEKYEGNNGLYLYADDENDCGILEIVEKDGKKYIVNSWTPKGPSEAQTVVENLHDFNELNHLTPITTL

SEQ ID NO: 5221 - protein, 317 aa, Methanobrevibacter ruminantium
MNIDYDGHNSTNPNNNSIVENNNNNQLSLQVPQKYEDYDIIEELQCFNCNQHTFIQLNKKSLLSNKVVYYCTNCGMSFEKQGNGFKLVDISDKSNRMWELYNLKTLTWPEWERIANGGLSDKDQAEKDKQLAIEKQKELELQRKKDLEIVVQELAKGEVNLKPVSSPVILKKNETAYLSLPNITLSEPRAVRVSKSGGYGTSYRFAKGFSVHSGVGESRSVSHDEIMAIDTGTFVITNKRVIFVGNKKSVNIDLKKILSMTVYKDGISIQRENKQKIEYFTKTNRHSMDFTIDGRTHSLPLEGYFIKAIILGQIANL

SEQ ID NO: 5222 - protein, 282 aa, Methanobrevibacter ruminantium
MRKERIKSYLGIIFDLLVILDLILIFISLPIQGLHLIDYAGFVRAFDLTICFLLLIEFFYGLYKSDAKAKYFKEHFLDLIASIPFDLIVFALFGSSSIILNLARFLRLVRVVRVFRAVNIVKKYGLEKVIRRTHADKIFIVIAVIVVIFTILLTLSGHENISDSFYFVVITLTTVGYGNEGFNEPLAKFVTLFLIIVGVLVFSTITGVTSSFFIDKMLEEGISVDENLHFINQKLNFHEREMEKTRKELAEIKKELEKSNENSEELKQEISELKELIKENNK

SEQ ID NO: 5223 - protein, 347 aa, Methanobrevibacter ruminantium
MFCHNCGSEISDDANFCVNCGAKLIRLDEEKAQPSKSSSRGLSNKKTDEQKETSSGRGLFNKKTDEQKETSSGRGLFNKKTKEQKEAIKEIKSYTKGNYKRFRQIIPRYGILAMEVSHTKVFNGIIKTIRKEIENENLTADQIEGRVFQLLTEEYGEPMSQEEADELFNQQNLQTKLENERKLEQKFGVPFQNRVWFKCTVEEMRHSTFTNTNDRDIVDGYVFVEDTFLEIVKESVFLKSKMGTRKIFYDNIASIDHDAKGRLNLSSSLEIYLKSSDRVQLKHVNKGMVDLVTGKYNEYMENKINDNAENVTNGTNSNVDELMKYADLYERGLLTQEEFEQKKKELL

SEQ ID NO: 5224 - protein, 225 aa, Methanobrevibacter ruminantium
MKINLKRVILGIILILICISSASIISAYSIDSMEIQGGCISTGSGLEDKTYATIYVGEEYTGADVLIQIYYSRDGSQLNPGNKVPKTVDSLGCIEVPSANAFKYYPDLAEINLYDSDGYLIDSRDVSLSIHSGEQTFGDFYGSSSSSSSYSSSSSSGSSSSSGDGSTTTYHSGTSNSYVGNSNTGKFHAPGCDSVDKMKPSNKVYFSSRDEAISRGYSPCGRCSP

SEQ ID NO: 5225 - protein, 243 aa, Methanobrevibacter ruminantium
MRLKIILKSKKNRLKIPFNYNHIVSAIIYNKIADIKYAEELHSSNSYKFFTFSQLNIHKFKRIHSGFLSQNGKIDFLISSPDDYLIKSLVEGFLNDLTINFIGEDLLIEKVELLPVPDFEEEINVKTLSPIISRTKKEVDGELKIWDLAPGDHFFKNLENTLIYKYLEFNGLESNDKNIKIFSEMRNVKRKRIIIEKGDKQTYHRAYMMDLILKGDKELLRFAYDAGLGEKSGLGFGMVKVIN

SEQ ID NO: 5226 - protein, 719 aa, Methanobrevibacter ruminantium
MISDLVDFGKWLVENNEDGIGYMVKEDDYLLKITYNNEIDDFVIDGIFENDNEIVLGFYEKSIFNDILPTPRGSSDQNITIANNTNLMGFSPFLLNLDSDFLGRKIKPENYDNESDYYKVGSERFLKKKAGGKFKLEKTLDKFTRSLDDNKNNKQFNNDIITKLFDNPNELFLKNIPSQYEDIFIQEFFNNLSKEEYIKIINKFYKFLDMNKNDILDRVIKFKLEENVSSRFFIVGVFGDYRDLINDLCFLYCKLIKTRNKHIENYDGGICSIPNCNNHSITYPSIQFYAADKKFYFNYSNNIENSSLRLCDLCNRYMLFAFEKLKANFKGNILVIPKTYDGDYSEFLEIIQEDNDFEVINELLEENSKKFTYDFLIYTPSNALLKIEKYIDNYQAFLTKFDDINLYNYGNLNYLYNEVLVNDESSLDEDRIIIKISNLFDFQIIFKELFYEVDDGRLKYPKMNYFYQIYNKELTGENGIFNGFSSKTVNIFSKYKDNIFSFIYEANFDALNKNMINTIVLNSLTIFQKNSIKKSIRFEIVKRLNYWFMFKKEFLGDTMLLNENVLKLRQIFGHPNITTGENNNEKIEVVFDDVEKKQVLDLIKEDNAIKYYLIGQLIAYIDDFKYSSGKKREVFTNFITNAHRNNIKKLFATEILQKNVFYINQMNKKGKFLFTMLESDYGSLFNEEDLSYEDYILLLFTGYYTTKFLKKNYVYNGDE

SEQ ID NO: 5227 - protein, 319 aa, Methanobrevibacter ruminantium
MTEGTPVRNYYQGIYLTETIMGNPNGDFIDNSPRNVDGAVFTTDKCIKYNVRKYIHDTLENFGEKENIVFFFPRLIDSTNEEDMKFKTRDQVFEHFKNFEEILKVSPDVRMFGGTFSVDNNAKQIYGPIQLSYGLDINGAQIIRHQIGAPFATSEGSQKTVGSESVVDDAIIAYDITINPNNYKDLLLEDDLELFKKALWEGTNLRKTTSKKTDSKLLILIKFKNDSENDKVDAINMGELKQLISIKGGKSKKMDENTICLDCENLVKKIKKYEKYIECIDIYCDSDDVELNSLEIDGENLKDTNIKVNIYEPLSLLSD

SEQ ID NO: 5228 - protein, 287 aa, Methanobrevibacter ruminantium
MKIIEVDIWSSFGCFSKHFSNTGGVLTHLIPPKTSIIGIIGAILGYDVNDYEDNDDGTKTYKIESLNNIKVSIYPLFEFKTKRVIFNLVSGTNLDLDIKNINQDVLISPRYKLFISFPSELDEVEELFLNRVKNNKTIYNLYMGRNEFPLNLEFVREINAEKHIFSNDNSDELKSIKVYGSLNRSSIKSLNLSYEDNDSKVDSDALSLISSLLISNSADGVRHLKSFHEFTIKDYPIKRENFTDFSYSPVSFYSSKKFGECFFSNLQLKDGEIELVNIGDDKWLSLI

SEQ ID NO: 5229 - protein, 941 aa, Methanobrevibacter ruminantium
MVISHLNFNENESVIEINSDYFKVYAHKNELFNEHISKTLNIFKTIKSENILINFYDWFKDQGYIHLTFEEFNFLIEECVRFHDVGKLSFNFQLKRLNKNNPAKKKEQINVLKKFGLDSILNQFEGNHSLSGALSFLSKYYDVLPKNELFFLILAYVIIGHHTNLKDIVSQDDFFYKEFEENQALSTTLKFFALFFGLNQSTINQKFFQEINDIGFDFLENTINHYDSSFSFFYSYIYSLLISADSLATSEYKNSTDQIDYSKFNHRISDKLFAHMYKSFYNVKHNRNLLNETFNLNDICPEDINVLRKAMLLESSETLNNALMDDDKKIFFLNMPTGGGKTNTSMKLALDMVKNTDANRIIYAMPFINIIEQNFDVICKSFGLNEEEGNIRQIYSASETIFNKSDEETLEIILSDDFFNYPVICTTFVSLFNPIIKNNKKYKYRLNALSNSVIILDEIQSLPLRNWVSLYFIINELSEKYNIYFLIMSATLPSFDKLKLENIRDDDNFLNYNNVSLINNPEKYFNHDLFSRTNINGGIKKLGINDDCSIDYFLEIIRENFSQDYNKGLIVLNTIKSSRLIYDKLKDFSQEYNFDIDLLNSSILPNRRKNIIHKINQEDLSNYILISTQSIEAGVDVSFDFVIRDFSILDSIEQVRGRCNRSRELNDKFHDSNIKGNVYLINLEDDNSNLYKYIYKDVELKTRIKETINLFNEGFELNDDLNYQYSNILTYYDNVSLDINDVHDSMDQSFLRNDRRNIVFWNKMKYSKIQKKKGIHIILNDLKQYSIFIPLDIKIYDDSLNLDKTIEDMDLNELREIYDEFGKHFIFSLNEILFMKENSDFLIEGDYVIGEEVLNHFQTMVARVKDDYNQKLLVEKVFSSILSNFIMNISFNNSDLEEQIKELDKESYFYILEKNMIGDSEEHFYSEEYGFNFKPTITNIL

SEQ ID NO: 5230 - protein, 168 aa, Methanobrevibacter ruminantium
MSDYMKSINGTQINYYFICKTKLWLFSHNIQMEQESDNVSLGKQLHETSYKKEKEFLIDNLINVDFIKNKDPIEIHEVKKTQSMEISHEYQLLYYMYYLKKEKDISNTVGYLNYQNIRKQIEIELTEEKEEELETVLNDIKSIVDSDVPSPKKSRICRKCAYFEFCFA

SEQ ID NO: 5231 - protein, 322 aa, Methanobrevibacter ruminantium
MSKKNYYLLSEGILKRKENTIYFVNEKGSKPLPINKIYSMYAYGQITISSQVISLFAKEGIPIHFFNYYGYYNGSFYPRESLLSGDLLIKQAEHNIDFSKRLKLAKLFVEGAAKNILKVLAYYKIENNIKNTLTELNESSKITEVMNVEGRIRAEYYQYFDDILPDEFKMEGRSRQPPTNMINSLISFGNSMMYASVITELYNTQLNPTISYLHEPAERRFSLALDLSEIFKPIIVDRVIFYLVNKKMITEKDFNQDLNCCLLNDKGRATFVKEYNKRLETTIKHKDLGRKVSYQRLIRLEAYKLKKHVFGMKEYDPFVIWW

SEQ ID NO: 5232 - protein, 88 aa, Methanobrevibacter ruminantium
MYVIIVYDIKVERVNKVKSFLRQHLFWIQNSVFEGELTNSEYKAVTDGLLNIIEEDEDSVIIYQLMMEESLTRNVLGVEKASVDDVIL

SEQ ID NO: 5233 - protein, 233 aa, Methanobrevibacter ruminantium
MDEWKVGDPSDWGDHVGVPDIPYMGYINDDGYEEDYSTFPEENGGSKPKSLGSPEEDHGKILLVKAKVYLKWGNLDGAMSCINQAIDIFKNSRRIGYYENSLHVKGMIYEKMEQYARALFFYHKAFKVGECVSNAFDDRNKLIDGDKIDILKEQFKDYRTAYPFGSSLKRDDFIIYWDLAWRINEDSSDTEKLELALEVIGFVKRMAPSIEFVGREKELYENLEKEILEKINK

SEQ ID NO: 5234 - protein, 59 aa, Methanobrevibacter ruminantium
MGECPYCGKDVDFTEVCPHCGADLSEFDDRCPFCGVLISRAALICPRCGSDVYEFWYGD

SEQ ID NO: 5235 - protein, 159 aa, Methanobrevibacter ruminantium
MDRKDIIIIILVLIIISLLALGLHNHQVTDQGTDLYRTVKVSPSFSLDVPLSSNLTRENVSENMYIVNDYQNDIQIISFNMKNASKMDLIEDGYQYLKREESYKFGAEEIIKISNHTVWHNKDDGSYIAFFSPNNTEDNIMLVTHDNITMARILSSARY

SEQ ID NO: 5236 - protein, 401 aa, Methanobrevibacter ruminantium
MTSEIMILTPTAVVLAADSAVTISDIKTYDGANKLFYLSNKPPMGALIYNLADFVDIPIETIIKEFRRKIDGKEDLSLIEIKDEFEKYLHQIISKSRSTLSFQEQLDYFIEFIQEELSYVDFDEFKIGLKDELSDFDIGLLGDFKDEVQSQIDLYEDKFSLALPDDCNGLDEEDFISDLKKLFICNMFLMPFIGIAISGFEKDEMFPSFIHFKINYLYDEEFLLRDVEFGSIGDEEVILKALAQDDVINTFLNSIDSKTERALEDFFIEFKNFLFNYIEYCIKSNEDISEENENFLLENISDMEFSDEKVRNIFIGFIECLKAKQKKPILDSISVLPKGELSNLADSLIGITSLRRKIEDEVETVGGPIDVAIITKGDGFVWIKCHDSFDKDLNPQFFDSN

SEQ ID NO: 5237 - protein, 58 aa, Methanobrevibacter ruminantium
MHYLEKYKLKSFRRKPKVFRRKYNPFPEGFVENFVRKSFGEILDSKMDNSNQLSKEDK

SEQ ID NO: 5238 - protein, 110 aa, Methanobrevibacter ruminantium
MNLYKDIFYLAGFICHQKPERSFHISHCQLPFCARCCGIIISVIASFILAQFVAFPMNALAFLLFVPMIVDGLVQKYTDYESTNFRRFITGFLFGFAYVYVFYMFGLNAL

SEQ ID NO: 5239 - protein, 226 aa, Methanobrevibacter ruminantium
MEYEIQGGTFPIVVCTLQEGETMKNETGAMAFMTSGMKMDTNTGGGLLKGLGRALSGDTIFLNYFTAQRDGEQVGFSACSPGRIMPIRLDGTNTIIGQKNAFLAAEDSVDIDIHFRKSLGAGLFGGEGFVLQKFSGTGVAFLEIDGEIIKKELAPGEKLLIDPGHLAAMEESVGFDIERVKGAKNILFGEGLFFSRLTGPGTVWLQTMPISSLARALVPYLPTTTE

SEQ ID NO: 5240 - protein, 83 aa, Methanobrevibacter ruminantium
MRRIDELTIEIDQTSLELEQTKKELSILFKELRSFKKKIENGIEIDRKEYEDCVFNNKLLQMKRRRLITHLKFLNKEFYEILY

SEQ ID NO: 5241 - protein, 286 aa, Methanobrevibacter ruminantium
MKILKTWIEKLDIILSILIVLDISFLTASFLLDLNTTYINFMLLFDTTLCWILIVSFIFKLLNSDDRKAYMRENYLDFLASIPMDLVLLPFSSLHISLINIVILVRFLRLLLLFKESYKYVKKFFKATSFDKVVALFIVIVVGSTFALEYFDPAIPNLYYSLWFVFQTITTVGFGDVIPESPVGQLIALGLLMVGVLMFSIFTASFAYLFNEKVFREENEDFHEKINTVRENLAENKERVEEIRQSTLSTSEEIAEVKEKLNKSEENIKNLEERIDYLIDMIEKKE

SEQ ID NO: 5242 - protein, 192 aa, Methanobrevibacter ruminantium
MDFNFHRIANEIAKIPDEKIKDLSWEDRVKELLSFRQYYNQYHESYGKDYLDFLEKANKEGDLEKKEDLIYFFKKETLTKDINLDGLNYLFVNIFLKYGFEYLDYNDTINNLKDKYDLNFKHDWISLLSKEDLSLFESINLLNYIQRSDYWDYEHMPLSYAIFDGTIDNILKGMENNLDEDNLELLDVLLKK

SEQ ID NO: 5243 - protein, 470 aa, Methanobrevibacter ruminantium
MAVYKCSVCGYEYDEEKEGKPFSELERCPVCKQPASVFEKISDNSTESDSNSNEISSNNETASELSYPTETSRTDSSIAHMSDIHKMAVEGTSIIDAMSTRLPMPSWDDILIMANQLNPFPLEEHADVSTTTVIGKNALKPMVLESPIYISHMSFGALSYETKVALAKGSAMAKTAMCSGEGGILPDEMANSYKYIFEYVPNHYSLTKENLMNSDAIEIKIGQGTKPGMGGHLPAEKITLEIAELRGKPMGEDVISPSLYGEIKSKEDLKDLVSHLRKESEGRPIGVKIAAGRIEEDLEFISYAEPDFITIDGRGGATGASPRLIRDATSVPTIYALARARKYLDENNLDIDLVITGGLRVSSDFAKALSLGADAIAIATGALIAAGCQQYRICGSGNCPVGIATQDEALRKRLDMDKASKRVFNYLNVSNEELKTFARITGHDDVHDLSVDNLATFNSEISDYTDIRHV

SEQ ID NO: 5244 - protein, 1297 aa, Methanobrevibacter ruminantium
MGFKRLKRLFSSDNDNEMEKNEEKNKSGEETFYEESDEKAFYTEYDDSGFILDNNSDDSFNNGSDDDLSLNDGLKEDLNGSDDNLSLNNGFEEDSFGSDDDLTLNNQPSSNRNFNYLNNLIHSHQNEINLDSDIVFDSQMDNTYLEGINLDMDNLTIDGNGRTIDAQKKSRIFNVLGENIRFTNITFKNAYSNEDGGAISIGNYSSVYFENCHFISNDAGENDGGAISIGENSICTIKDSVFKQNKADSGGAIVNEGTLKIMSSNFEYNSSQVFGGAIYTHHSKVEIAYSVFKNNISSSGGGIYVLFDCDMIIEESLFIDNASMSEGGAMANEYGGKIRIHESLFRNNHSLIGGALCNKGSPVDDGKNLVSVSDSKFEYNSSIENNDTIYSTGVLKLEGNTFNENDRILASNNPEIINSKYVEATEDIIDLAKSIDYSIAGESNLFELLDSDIRNFNYLENLIRSSGGEIILDSDIILGDDEDYTDGIRLSNENLRIDGNGYSIDAKSRSRIFSISQCNITFENLRFKNAYSEGNGGAIYSVNSFLTFKSCSFENNSSDNGGGISTENSTNEFKTLSTENNRNEFKTLLFEDCSFENNSSRSGGAISTENNDLILKTCLFDRNESNLGAAIICQNGKVRLDNCGFKENIASDGAAIYYSSLPIGTYINDDSVNFLEINDSVFEANRLTGTNLTVSIIDCDCSISFNSLSFKDNKFDYGDLINQKYLENKNSIIKSSKFIGNGGGITASNLKVISCEFIDNRSNAFSSQEYFYDGSSEIEDCTFKNNHCAISSHESSLKIKDARFYGNDSAIMNRGKAYINDSRFRDNSMAIENSANSYMFASNLNLLDNASGESHDMINQGHLSVIDSDFINCNKTLNLICQEDNEDAVLDIEGCSFKTDSKRPISINGGSSSILYSRFELDQSKIAIFNDSKLNIDALSFKDYEGNDLEGKLIYNNDYLKSKTRDILDKIDSSESAITKYAYETLPADWKGFDYLINLIKESNGEVKLDCDILINDIEEDYYGGGIELFEDGLTIDGQGHTIDADNLSRIFYVVGNDIVLKNIKFINGFEPLDQLFNRGAGAIYIVHGASLKIVNCEFYQNSSKSFAGVIANKGDLTVIDSIFRNNFSNRAGAFLESRGESHFIGCRFEGNNAKSAGGAIAVSQKGKTIVEKSSFKENELSLKGSSSGGAISNSGELDVIDSEFIKNKSAASGGAINSSSHAILSVRKSVFIENASFLGGAINADRYGDLIVMDSCFKANAAAYSSGAIYDSTDESGVHGCEFLTESDKVKYALED

SEQ ID NO: 5245 - protein, 508 aa, Methanobrevibacter ruminantium
MEEEYLTVTKLNYHIKRLVNSDSSLKNVYVRGELSNFKRYPSGHLYFTLKDQNSEIGGIMFKGPASRLKFEPKNGMKVLINGYVDVYPKQGNYKIYAQKLTEDGIGDLYIAYEQLKRKLSALGWFDDEHKQEIPKFPKRVGVVTASTGAAIRDIVITIKRRWPLCEIILFPSLVQGNMAPKNIIKQIILADNEFDLDTLIIGRGGGSIEDLWAFNDETLAKVIFFSKTPIISAVGHEIDWTISDYVADLRAATPTAAAELAVPDINEIESNIKNLDDRLNKVIDKQFNENKDSFEKLVNRNLFKNPDLLYNKKIMYLDSAKSRLAVCSKNMIYDNKIRVSNVKSSLIFKNPKMLFESKSNKYNQLKYNLNSSGKILIGKKESKLDKYRNSFVFKSPNRLFESKANRYFKVRTNLEYSSINLLRDKKDNLNEIKKSNPIKNPQSILEPNEIRLDKYIDKLDVLNPLNTLKRGYTVSRVDGKVVSKAKDVKKDDILEVEFDDGNVSTKVL

SEQ ID NO: 5246 - protein, 83 aa, Methanobrevibacter ruminantium
MENIEYVESNIENLSFEESLAELERIVNRLETGEVPLDDAIDEFNKAMKLVKICDEKLNSAEEAIAKIVNENKEVVDFEVEEE

SEQ ID NO: 5247 - protein, 244 aa, Methanobrevibacter ruminantium
MVKFEIKSHDGPGRYGKLDGMESPVILKESDLNMAPDESSAYDIEREIAEWSVNETLKLAREYEDKDIAVIHGSKYIDLRVKCLKELEEMGYSGFIIANADDLLLHPRDLVDLIVELRRNMKSSSILIFPHAEAQFIPLLAYMGIDAFFDDIGEYYSYLNVLMSPTKNYDLKVYELYDLTREELEEYNKNTIDFVLREVREHMKNGSLRNLVEERSATSPQYASALRILDKEYADYLLEYSQLY

SEQ ID NO: 5248 - protein, 148 aa, Methanobrevibacter ruminantium
MVDKDLVVPRYLNQLMDIVKSYEMYIRSNIKDLDITMGEVPILLAIYDDEGLNQIDLVKKFHVTEANISKTTKHLLQKGFIIKEIDSDNNTKKLLYVTEFGEEICKELIEFYEVWKNEIISDVPNENLSIFSQVLDTFTNNSQKYFEK

SEQ ID NO: 5249 - protein, 358 aa, Methanobrevibacter ruminantium
MSVLDRLKSLIDGAKEDIDSSLTKEAESIKEAADSMQTSSEEEIENISDSETNSDEETSKVEDAEEEVIIPIHAEEAEDAPEEEAEEVPEEAEEAPEEVEEAPVEEAEEETDEEVSVEEITEEAPEEEAIEEVPEEEVSLETEEIIEEPSEEDSTEDEEPSEEEASEENEESDNMTLLKENDIYSMDDIDKEFTQKFIDAGIETVDHCFQCGTCGGGCPSGRRTPYRVRQIVRKCLLGLREEVVSDPALWMCTTCYTCQERCPRSVKIVDIIKMARNEAAKAGYMADAHKATGSFVIKFGHGVPINDKTKELRKAIGLDELPPTVHSYPDALEEVQKICAACEFDKLIGFNMETGELE

SEQ ID NO: 5250 - protein, 294 aa, Methanobrevibacter ruminantium
MEIAYFLGCIMNNRYPGIEKATRILFDKLDIELKDMEGASCCPAPGVFGSFDQTTWATIAARNLAIAEEMGADIMTECNGCFGSLRECDHLLKENPAKKDEINAILAETTDKQYKGETKVRHFAEILYNDVGLDKLSEMFTKDLGINVAVHYGCHFLKPTAEVGIEESAENPTILDELVEITGAKSVDYKNKMMCCGAGGGLRARDIDVTLSYTKEKLDAMAEAGVDAIVEVCPFCHLQFDVGQTEVNAKYGTDFAFPVMHLAQLYGLAMGLSAEELTFDAQLIDAAPVLEKLA

SEQ ID NO: 5251 - protein, 89 aa, Methanobrevibacter ruminantium
MFIAILGGIFRFKDLPEEYGSYVQFKAAIEGRDEIKDNDEIAILDITGTGSHHVLFLDRYNNINEIKKELREADAKVNVTTLKILEGHL

SEQ ID NO: 5252 - protein, 175 aa, Methanobrevibacter ruminantium
MSDLPIDQSWLVIANLSNDLHKRGIQIPKQINSDLGLVKSQIGFYKKDPTHPDMINEMARAEMSLNQIQGILLSFAENIGEDYYNEWLDKLNRANLGEKIYETPSTQSKFLINAPPGFSYAKMTLKKPLAEDRVQEIAEYYGLILEFDSDVTIALYGDKPDIQAALKEMAPFFSE

SEQ ID NO: 5253 - protein, 238 aa, Methanobrevibacter ruminantium
MKILAISDIHGKRSENLINYLKKEDISLVLIAGDITDFKLEGYDDPLDFVKPFIDELVEEADVDVFAIPGNCDPAGICNAIKESGPDEKPAFCLHNQLIAYENVVIMGYGGSNPTPFNTPGEIDDDKIYLHVYELLAEYDYIGNDSIPRVTILLTHAPPYDTKADTIESGAHVGSQGVKKPIHEFQPNINICGHVHEACSIDKVGNTTIANPGILEENHAVLIEVNEDASYNVEIVEL

SEQ ID NO: 5254 - protein, 383 aa, Methanobrevibacter ruminantium
MSYQENNASDKSLQDKDMKAKQRQDRIVKTSIIGIVVNLILVAFKATIGILVNSIAITLDAVNNLTDALSSIITIIGAKLAGRAPDKEHPYGYGRIEYFASVIIAAIVLWAGITALMESWPKIFNPDVTSYTTVSLVIVAVAVAVKFILGRYVKNVGEEINSQALVASGSDAFFDAILSFSTLIAALVSIFFHISLEGILGVIISIVIIKASIDMLKETVDSMIGERVDSKLSRDIKEAICEFPQVYGAYGLSLHNYGPDSMEGSVHIEVDDSLTALEIHNLTRLISMKIFNEFSIILTVGIYARNDDFKDIRNDLYEITSKYDEVIEIHGFLAYPEEKLITFDIIVDFDADREEVKDKILDEIKSLHPDFTYCMIDDYDLSD

SEQ ID NO: 5255 - protein, 304 aa, Methanobrevibacter ruminantium
MIIVRGSVNRKEYTSRFSKGILSRSLIRSELSPDKAYEFASRIEEDLKNKGVTEITTDEIADIVVKLLDEEEEKSVSERYLNWRKVREAKDPLIILIGGASGVGTSSMAFEISNRLGIKTMISTDMIREVMRKIVSEDLSPVIHESSFLAYRSMKVAPPPEFDFVLAGFKDQVATVSVGVEAVIERALKEGISIIIEGVHIVPGFIRKELMEKDNIVMFTLTLSDEEMHKNRFYSRCGDIWNNRPLEKYMGNFEAIRKTNAYLEDQARKEGTPIIDNIDVITTVDFIIETLTETYGGMKHVRKD

SEQ ID NO: 5256 - protein, 122 aa, Methanobrevibacter ruminantium
MSKDVLTVELDEATVFAFEKLMKHKISAMPVVDEDGKMVGIVTATDLGHNLILDKYQYGTKVKDVMVTDVAYVSSDCTIKEAISVMFEKAPGDSIINQLPVLDNGELVGIISDGDIIKILKE

SEQ ID NO: 5257 - protein, 675 aa, Methanobrevibacter ruminantium
MLLMRKKILFLTLMILICFTLNSVCAQSLDNINYANDGFDSDEMINCDLHKDSSQKSLKSNALSNKKTTNTVKLTDMKKAESNDVKQTGAAKASNTKSTSKSTTKTNATKSNTTKSTATKTTANSSSTKKATQNTTTINTQTLAKSSSSYMAYVEKNAKLQEPITISKKKYKSPEYLYLVSKAVSNISKTKVEIKDKLITNYSNTDCKSVNGTINKTEYVQVAKKTVSFIEKNHRAPNWIASSKGNIPRNQLILVFSKCLDQYNKSGKLPSSIKLNDLDLNKMKQKIDSSKKVNSTSTKKTNTSSTKTNSTSAKKTNTTSTKKTNPTATSTNNNKSLVESTLDSIKSILNNIENKLNPTNKVLSTTGTKKNTVTVNSSKVNVQISSSSTVNVKISAKDNTNSGKNTNSGSAKKTNTTSTKKTNTTSTKKIDTNSTKKTNTTSTKNNTSSAKKTNTTSTKNNTSSAKKTNTTSTKNNTSSAKKVNTSSSKTNTSAKNNTSTTAKSSSNSKYLSTSVLNDKYLGESLKKYLAVGKNCQVTNKAIKTLANTLTSKLKSDYKKGEKIFNWVRDNIGYEKYRNTKKGALKTLQTRGGNCVDHAHLIVALSRAAGLPARYVNANNCKFSSGYVSGHVWAQVLVGNTWVVADATSNRNKFGVVKNWNVNSYKLVGKYSSISF

SEQ ID NO: 5258 - protein, 557 aa, Methanobrevibacter ruminantium
MFYEKNLIKKNPLRVDIRFGLVYPNVYKTAMSSLGYQILYNYVNLRENTYCERIIYPSYRSLETNSPLGDFNIVSFSLQYEQDYFNILEILRDANIPLRRADRTLEDPLIIAGGPCATANPLPLSDFIDIFVVGEAEAVLNDLIDNYNENKDKFTNKNEFLSTFLDIKGLYISEFNNKTDIALLDEMSDAYHITCPIITETDDKDLIPVFSNSILLNVSRACTRGCRFCMSSYLYRPLRETDLQQLFDIAEEARQNTGLNKISLIGAAVSDYSKVNELTEGLKDMGFQVSTPSMRIESITRETLVSLRESGLKTLTIAPESIYHLRKRINKDISDDDVFRVIKDAVDLGFNLKLYFLIGLPYEDEDDIKELACLMKQIDSMKYLIDSNLNESIKKEEVLTKHKSKSSGKKSKSKQRKKARVSIKFSVNPVIPKPHTPLQWEGYDMKRIKSKIKYLKKNLKGLDIKFDSGKMGLIQYVLSCGDRDIGDLLEESLNRKISIKEWKENAPSYEIGDNLPWDCINVSVSKEFLESEYEKMKSGEQTPWCEDGYCYGCGACN

SEQ ID NO: 5259 - protein, 371 aa, Methanobrevibacter ruminantium
MLNPAKRVEAIELSQIRKMFEVTNENAINLGIGEPDFNVPENIREAMKKSIDDGFTKYTSNKGIIELRESIVEKLSKDNNIKTDSENIIVTTGASEALYCCAQALFEKGDNVLVPNPGFLSYYSVVNLAEANIVEVTTPMENEFKMKVEDVQEKLDKNTKALIINSPSNPTGAVMDKEDVKGIADLATDHDFYIISDEIYEKIIFGRKNYSPAEYCDNVITLNGFSKSYAMTGLRIGYMAANEEITENLLKVHQYCVANATSIAQMGALEALTGPQDSVEMMANEFSRRRDLIVSSLNDMGYPTVNCEGAFYVFPKVERPMDFVKKAAEAGVISVPGAPFGSLGENHVRMSYANSYENIEKAMDILRDLEY

SEQ ID NO: 5260 - protein, 304 aa, Methanobrevibacter ruminantium
MNREERDRIGTRASAVAIIGNILLTVLNISVGLMSGSYALISEGAHTISDIATSVIAYVGFKIGSRPADKEHPLGHGRAEAISGLIIVVFLSIVAIEVIQGAFHKLFFGGALEVPDPIAVVMAFVGILVNLFMSSYIIRLGKKARSPAIVADGKHQRVDIFASLAIFIGIMVSQYGYPMLDPIIGIFIGALIARTAVIVAIDNLNNIMGKLPSDELIKEIRDVANSVTDVCSAHDIKVNYFGSYATVALHVELPPDMSLREAHKITHRVQDKILENVDMVQAVHVHPCPEGVQYDHSQLLDEDS

SEQ ID NO: 5261 - protein, 782 aa, Methanobrevibacter ruminantium
MLFVMIAGVSASDIMDASDNPNNDDSINLVSQESGNDQISNEAISVSNSLSANDDSYSPESEKISSKIKTSNNLSASNSTKTTTKAAAAKTTKTGTSLQPSSTSIYSGQYLVITLKDKNSKALSGQKVLINISKFKNTYTKTTDSKGQVKLAVNPVGSFKLVVSYAGNGNYSSSKYSGTLKVSKSDTSLTVASTSVTMTTPLVVTLKNKKTNEALSGKKIKFVMDRVSYSRTTDAKGQAKLKVNMKYVFNVTVKFDGTGNLKSSKVTKTIKPTKIPVSFVYSANSVKYGHSITVSLKNNLNNKTLSGKKIVVKTSDSKKSTTKTTSSKGTISVPINSVGDVTVSLSYAGDSSYKAASSSKKIKGLKDSSKITSSTGTIPVGDSYTVTLKDSSGKALSNKKIVFTFDGKSYTKTTNSKGQASLAISKGPGTYSVNVSYGGDSYHSGSKLSKNVKTSNSMISIANVIKAATTLRAHVDYTNRFNKSYVVTINGLKYSPDEFAYMMSQAIVKINNGQKSGYVTFKNLTGDYDSKGSSINGNLMKKNYISLANTLISSVNKNNKIPANISTNLGKIEANLYIFGLAKALQFYGEEKYLPKYLILKNSFIKGSSSTTVTQKAKILNCKEAFNATEFEKYLKTGGKSALNSAIVAKAKSLTKGLTSDKAKANAIFKYVRDKVSYSYYSDSKKGAAKTYKTKSGNCCDKANLIVAMCRSVGVYARYSHAQGCTFSSGLVAGHVWAQTYDRATQTWYTADATSSRNSLGKINNWNTKKYSQAKNYVLIPF

SEQ ID NO: 5262 - protein, 150 aa, Methanobrevibacter ruminantium
MAKYKRVAVGGTFDKFHYGHRKLISTAFEIGESVEIGVTSNLFASNKGDVDSCNTRMANLNAFLSKSHDNFHISRLDDAYGPTIYDENFDAIVVSEETEPNAIKINEIRESKGMKPLDIVVVSFVLADDGIPISSTRIRQGKINQKGELI

SEQ ID NO: 5263 - protein, 324 aa, Methanobrevibacter ruminantium
MIFIQRDGAESRKLSYDNKVCLACGICADTCPTDSLAIADVLAIARGQAEGNNIVLDQDTCVLCGLCSFACPFGALEFDIGGQDASELPNYPKWTHESSISQDDCEFCGRCYTACPQDAILFKRELPDRNALLKGEISINEDDCIYCQVCAEICPAGAISLTASDGKILDTIEVDEDKCVYCGVCKRACPQEAIKTVCSTCMYSDEIEKIAITGDIFITEDCINCGWCKEICPVDAAEVTKPFDGEISVTEEDCVACGSCIDICSCNAVSLQDNVAVFNQDYCVLCGACARLCPQERIAINRTDMKLTNISSASWKANLEKLLN

SEQ ID NO: 5264 - protein, 67 aa, Methanobrevibacter ruminantium
MKETLIKEFKDLKEETGQASVELILLIGSILVITIICGTYVFNVNSKINGQFNQTMTKARLFLLNKV

SEQ ID NO: 5265 - protein, 78 aa, Methanobrevibacter ruminantium
MNRLPRETVFEQIKRNFVQLKDETSGQGAAEYILLFGGVIVIALAGLLIYRSYFSNNTSGLNATQDINSIRDNMSNVL

SEQ ID NO: 5266 - protein, 697 aa, Methanobrevibacter ruminantium
MSDSLDLFTGVLLTAIGLVLIYGSIIYRLIDLVLILGVLVTLFGLYKLLPAFFMRLLSSRKSSSRNKLSKANVSQDSLLKAGIEEINNFLDGEDNKENSKSVLRAPRESSLDAPNQMTFEEYMSKSKTDYATNYSPKEVKPIFKDRDVDESKQVLRTKPVKEEKSKFKLPSFKRNSSKKPKSRNFAFRKDKDTERSPDKLYFTPNYENPMMVSPKPKKKSENKLRLSDSPKRSKEISEALASVGTTETVYDNNASDDSYSYMPKEMDDELIVPIDEIDLDGPQEAPIYTLSQSENTLYNNVIYDDVDSDFYITPIHAESNEDNSPDEEGDYGEGGDLYLEVEPEDTSYGNDLYIETEPEDNYYGNDLYIETEPEDNYYDDEDIYIESYEEEQSYEDDDGYITVEASDDDLPIPRPKEISTPQSLPRPTSIASTNPISKKEVGSNLSRPHKKVSTLPRPSVSSNLQRPHKKAESTDAVSVKDESKAAEASIAKPKPIAKPKPVAKPKPKEAPKSDELISKEELDQIIQDPKDNTIQIDPNNPESLPIPKLLNSYVVCEKGILTSQEAFEEVASHSSQEILLEAPTIKDMGERFLSSIADIKTRIIVQEFDLADISYVLLLSSLIKKGVEIKTLPMVNSFNLIGDDSHALIISNSMDEDDFEYGAVYTDKPSIDNIKELFESSWSIANDLDIGNLNESE

SEQ ID NO: 5267 - protein, 237 aa, Methanobrevibacter ruminantium
MEIRWLGHSAFEIISDEGVKILIDPFISNNPTCPIPVEDFEANIICITHGHSDHFGDAMEIANNTNATLVANHEISLFLGEQGFDCVGMNTGGTVSILGINITMLDARHSSSIDFTEEVRPGGDPGSFLITLEDGTKIFHAGDTGLFGDLETVVGNIFKPDIAMVPIGDRFTMNPFQAALASMWISPKAVIPMHYNTFPAIEQDPAVFSNFVYQLNPNIDVVIMNPLETYAPDFDKE

SEQ ID NO: 5268 - protein, 228 aa, Methanobrevibacter ruminantium
MRELNMDEIKNAEKIESFDQVSAKLNKTEKEEIVIDEMDIVFLLDKSGSMFGIIDDTLGGFNSFIKREKEKEVKTRVTLVLFDHKYKVLYTRKPIEEVEELTEEDYYADGCTALLDAIGTTINRIEKEVCDEVLFVITTDGLENYSKEYSREDVKKLIRSHNWNFIFIGADIDSYEEAASLGIPSTRSANYEKSRRGVGSLYRSVSYAKRLRSSGESLDKVNWKRGLD

SEQ ID NO: 5269 - protein, 220 aa, Methanobrevibacter ruminantium
MTTVAETVYKCPLCGFAHTTDCMTSTSAFGAPDLDGRPSPMARLTIYLFIKECPNCGFTSYGFPEHTSVSREFIQSDNYLNCDNIDFKTERAKLFYRVYLISKEEGMMNRALTDLVHCAWVCDDDDDEENSIKLRLLINDLFNELYDFKSDEEDYAHLIKLDFMRRGHLFDELIEEVRHKTFSKSFYNKVKDFQMEKAKNRDAGKYTFDDIEGYEEYKYG

SEQ ID NO: 5270 - protein, 669 aa, Methanobrevibacter ruminantium
MKSMTNVDINIICQELNELLAGARVDKSFQPTKDTVVMRFHKAGTGRMDLVIQAGKRIHISQYPLANPQSPPSFPMLLRKRVKGANVVSIQQHNFDRVVEIKMKKDITYTLIVELFAKGNIILLNEENEILLPLKRKQWSDRDISSKKEYVFPIEHGINPMTITEDEFKEIIKSSDDEIVRILAKNGLGSLYAEEIMLNCEINKKTLSSELTKEDILEIYGALKKVFEGLEKKEFTPMIVNNRKEIEELKKQNPDKQYKVKEDVVAIRLHQYENFEEESFDSFNEACDEFYSSKVKHEITDIQEAVWNKKVGKFSKRLEKQEETLRGFEKTIEDSQKKGELLFTNYVQVENILNVIKDAREKDYGWKEIGKTLKDAKKSGMAEAQIFESMDPLGNITLNIDGISIALDSKKSIPDNAEVYYEKAKKAKRKIKGAKIAIENTKAQLKDMEEKKEKAMANIMVPQKRVKKNLKWYEKLRWFVSSDGTLVVCGRDAGSNEAVVKKYLEQNDVYLHADIHGAPSVVAKISSDKLNNNLLKELGIFAASFSSAWSRNYGTQDVYWVEPEQVSKTPVSGEFVPKGAFIIRGKRNYIRGAKLEIAIGIVDYDGEKRIMAGPVDALKAYTEKYVTIKPGYTKKEKIAKEILSRINEDNIIELDDVVRVLPSGKCDFV

SEQ ID NO: 5271 - protein, 90 aa, Methanobrevibacter ruminantium
MDTTVKTVSIHLVAAVVAAIISTAFTLGWFGFKNNVFAFVIGVVILYFIGQYCKKAFGEEISGFSTWLWDGILPFGFFWFILWTILTNYL

SEQ ID NO: 5272 - protein, 2879 aa, Methanobrevibacter ruminantium
MNRNSKIILISLFTLLLLAIPAGFAADIESNSHNNLDDSNTVNFEINANSKDTNLESNLNTGNLEMNSNNTNLDMNSNKARLAMNSNASDLETLGLTRGEFENGSNNPSLEYSSNSLSDNSNNKYISPSSDKNTYGSNKVGDGNVNIYYFDASASDDTGNGSLERPYKTLKNNRIVENSINYLANGVYNLDATINKNNISFIGADSSRTIISYASTAFITNNILNFENITLKGLNIQNRGNLTARNTIFIGGKGYWDRSYNNIFGGAIYTPQNENYTTIIINCSFINNTADYGGAIYACGGNVTVENSSFINNTAERFGGAIASENTLTNNIRNVEFIHDVSLNDAGGGLFISFTQLNGTDLHFYNCSADFGGGITALYSNVSLNRFIGKDNKARYDGGAIYQFYCSLLIENSLFANNSANNGGGLYVDNSNSLKVTKSNFTQNNATEKGGAIYSLWNTLAEGNSISNTRFNNSFSNNNAKNYSNFYEGKDVNMRIGSGNVTLYHRNETEIDEIPSYYSLIDLNQVTSIKNQQSGGNCWAYASIAALESAIIKAGGEALDLSEESMKNLIVLFSDYGYPWLTNNGGNGDFANAYLTSWLGPVFEDDNPGDDRSYLSPVLNSRIHVQNIQYLGRNNYTDNDRIKEAIMKYGAVATSYYMDNSYYNYRTSAYYCPSATSSNHAVAIVGWNDSYSKSNFKTTPQGDGAWIVKNSWDTNWGDNGYFYVSYYDILIFPLGSMDWGHAYVLNDTIKLDKNYQYDISGLTDYFYNASSTAWYKTKHTADEDEYLAAVSTYFLTTTDYTIFIKVNGEELYNQSGNSEYGYRTIYLNDFIPLKAGDVFETIFKINVSGETGIPVSEGSAFNKVLYDRNQSFVSYDGINWLDIYDIYWTYNSDVYGSHYYVSAALCLKSFSFINEIGTNLTLEFNYSLDNEGDRISPVNIIAHVINEYGFNLDNGQVKFIINGTETIADLINGYANISWNFTDIENEVYALFEKTGYLSSSANETATLSEKYVTLDLNTLLSEDKLTITVDSSRKINETLILEINGEKHPFNLSEGHVVYDLYDIEDIDYLIRAYLNDTGFYNCEEKSTIFRLNTEITEIIASNFTTDDYSNAIYEISLVDSQGIGIANKEILFNISGNLTNNNNNNNNFNNIIFNLTTDNDGKARIPINLPGGNFTINVQSKGNYLYSSAEVALKLKVKDKVRLDIDLNLNFNDLEVIIELNRSLNETVNFSFAGESSIIRLENGRASVNFTGLSNNNYTAIAYLENDIDYLSNIAQKTIEINIRNLIIQADTINTTNRYYGNYTILLTDEEVNEVANKTLNVKIGEESFNKTSDNDGKVIIPLDLGIGEYEVIISFNGDKDFFKANATRTITVLEKLFANITVSTLVDEATIDIIIDKKINETLNISIDQSEYPVLFENGTGQLILDGLEEGNHIVTIDLLKYLLFESKEFEIDKSINLSSDDFNCYEHTNSTYTVLLTNNGKALANKTIRFVLNDTTTIRNTDMEGKASIDIDLSPGVYELNITYYDDERSVINTVYVLSNITNSTDPKFNVTLDMDTVLSPDKLTINVNCSKKINETLILEINGDQHFINLTDGFVSFDLYELEKIEYVITAKLNNTDLYRFEDKSVNFELNQEATDIIASNFTTGDYSNERYEITLVDSEGIGISNKEISFNISNSLMSNENYIIFNQTTDNSGKASIPINLARGNYTIKVQFKEDYLYLASESTVDLKVKENVKIDIEFKQMINDLEVIIELNKTLNETVNFSFAGESSIIRLDNGKFSINYTGLANNNYTVIAYIENDTNYHSNIAQKTIEINIRELIIQADTINTINRYYDNYRILLTDEEGNGIAGKTLDIRIAEGNYIETSDNDGKIVIPLDLGIGEYEVNILFNGDNEFFKANVTKTITVLEKLFADISISTLVDEATIDIIIDKKINETLNVNIDQTSYHVIFENGTGQLTVDGLDEGNHIVTIDVLRYLLFENKEFTIDRSINLTSDDFNCYEHTNSTYTVSLSNNGKVLANKTIKFILNNQIILRNTDSEGKTSIDIDLSPGVYDLNIIYYDDERSRTNTIYVLSNITHSTDPKFNVTLDMDTVLSPDKLTINVNCSKKINETLILDINGKEQILNLNDGFVSFDLYELEKIQYVITAKLNNTDLYRFEEKTILFELNQESTDIIASNFTTDDYSNAIYEIRLVDSYGLAIANKEILFNISNSLMSNENYIIFNQITDNSGKASIPIYLPGGDYTIKVQFNEDDLYLSSESNAHLKVKDKVRIGIEFNQNMNDLEVMIELNKPLNETVNLIFAGESSNVKLENGKASLKFTGLANNNYTAVAHLENDRDYISNIGEKTIEINLRNLIIIADSIKTKNHYWDDYTILLTDEEGKNVANKALNIKIDANSFIKTSNNDGKVIIPLDLGLGMHEINIAFDGDNEFFKSNITKTINVIEEISVNVNISTLVDNALIDLKFSKDLNEKIDVLIDQNLYPVSLEKGAGQIRVNGLEEGKHILTVDLPEYLLLESEEFEIDKTITLISDDFRCYEHSNSTYTVVLENNGKALANKTIKFDLNKIVTIRTTDNNGKAYLNINLSPGTYKLNIAYYDNGRNKIHNIYVLANTSGDNKTNETNSSSNTNPINNQTNNTNPTNNTKPINNETNNTNPTNNTNTTNNTNTTNNQTNNTDPVIVRKGTNILCQNMITTAFDSKVDGRIGKYFVVTLVDADYKPMADKTIYIGFNGKKYIRTTDSSGQAKLQINLAYEGSYTFAIAFLGDDDYKGSFVVANIKVNKQIPQLKSSDRTYRSIAKTKTLTASIKTAQGNAITGKKVIFTINGKKYTAIINSIGIASVKVSLSKKGTYRFTVQSEASSTYASTKVTHKLVIK

SEQ ID NO: 5273 - protein, 605 aa, Methanobrevibacter ruminantium
MSSMSSVAGLSKYIRTLPKAKSTFLMIIVLSFIIGAVLFLVKPMSLGSGLENFFYGGAFGFVVYGLPAIITGATDQKWVSTLKGINLKMKHSMFLALVSMTMAGVISIIGTIIGNILHFDLFINSILFGIVIAFAFNILVIWSVTRIRLIKSVLVAIIQPLLMIGVLIITSFLNNLESVFELGIFTTFFKVIIASAVFLLAIYSFISIVESPMKKNLGFGALEILSFFISHMNEGSKSIEELFDNAGEAIDTLVGVCSFRKPDGDIKALFISPCVHPGPLGDIGGSNMPTILANRFDSFAMVAHGPSTHDFNPVSSDEIVKIESSVRTALENMEYSSKASRFVRYSHKKANIGTQFFNNGCVMLSTFAPSGSDDIEFAVGLATMIESQKELEIDNPILVDCHNSFNAEKGGVLPGNPELFQLLDTIKLIEKKDLEHEIKVGCYSTDLGGFGKHEGIGDSGLKTMVIEVDGQRTAYVLFDSNNMELGYRETIFNAVEDLEIDEIEVMTTDTHSVNTLSAGYNPVGTVEKEKIIEYVRESIIEAIDDLETVEAGTRTERIENLKTFGPNNSTELISTISSIVSVSKIAAPLIFIMAIIFVFIWIYLF

SEQ ID NO: 5274 - protein, 176 aa, Methanobrevibacter ruminantium
MIELKTPITDDDIDKLKAGDVITISGQILTARDQAHKRILEQGAPLDIKGAVLFHAGPIIKEESDDAQTKYEMVAVGPTTSMRMNPYEADVLDMGAKIIIGKGGMDDTVREALKRNNAVYVVATGGCAALYVDKVKEIKGVDWLDLGMPEAIWDLDVESFGPLIVAMDSDGNSLYD

SEQ ID NO: 5275 - protein, 1325 aa, Methanobrevibacter ruminantium
MRLRYFAIISLILLIFLVPVSFASETNLDSIELNDLADSSTEIDDSTDLNQDYSSNQDLSLNQNSDSNLSNEQELYSNKLSENSLDSNSQSSNDLSNSLYLSSNGVRLADLNSSFAQFNTSLNDSNTIYVNSSYIGSDEFGTQSNPYKTVLAGINAATTDLNNVYIANGVYNINTTITVLKSINIIGESLNVILNASNENNILSVKGSSVEVSIFNLTFRNGYANKGGAIYVDKSSLNIIGSLFDSNIAYVTSDNGYGGAIYNNAGFLKLYNTTFKNNKVVAAYNIVSEGFGGAIYNELGEMTVLNSKFYNNSIDIRNISKSSYGAGGAIFNRAGFVTIFNSSISNNSIYTNYSLGGAISIWASRNVYIINSTINDNIISGSYGFASVISNKGTLLQIENSTISNNNINASSVENSTIYNINGNFNLINSKMENNKIKTIKTNLLMCLEDQLIVNSSFNLANELKGLNMTSLPSHYDLREEGLVTAVKNQGSSGACWAFAFYSAMESYLLKVENISYDFSENNMKNCMGDGSENSTDWDDGGAYVVALAYLLRWSGAINETDDPFNARSKVSPTNLTRVKYLTDALYIPLRLGALDNDQIKTAILKYGAIFVPVYSNIIKANSKSGYSDIQYICNHAVAIVGWDDNYSASNFKDTPPGDGAFIIKNSWGTSGGEQGYYYISYYDASFAASIETSAAVAVTNVVNTTGEYRNNYYYDTFGNTFETIGYNSDTIWFANQFTAISDNPLNAFGLYTYGDSTYTVNITVNNKSVYTSSGKIVGAGFHTIKLSRYVPLTKGDTFRIIVKLTTPSTLFPLAVETNYSGFTPRAKSDYNQSFISPDGKTWYDLRNSSNNRAVKFYEDMYFYTLKNASVCLKAYTAFADELELNLSSNSPIYYTGDTIKLNLTVTNRGDLASNSSIAVPLDKSYSIVSYKISENNGNKSYDIHYNGSSFNMASGIWSIPYLENEESVSLILSLKMNSNNDVNIKVSANSSSCSVKDNVYANISLKYKIPSKFANIPSINTTARSYGLLNFTLLDINNKPLANKNVNLLLLKLDDEEDEDLSLNDTNLYYSDSSISNASVISNLTLKTNGNGIVQYKLNLTLGEYLFKLAFDEDKNYQASDYNYSLNITKRKSTKILCKDMVTYSVVAEVDGRSGEYFNVTLTDCDGYAMADKFIQIGFNGRIYNRTTDSEGKARLQINLKNPNAYTFAICFLSDDDYYASFEVAKITVNKKKMSLNVPNKAYKASEKSKILTATLIENNKKTVANKLLTFTVDGKTYSAKTNSAGVASVKVSLSSKKIYSFTVKFAGDDCYGSATKSAKVIIK

SEQ ID NO: 5276 - protein, 2065 aa, Methanobrevibacter ruminantium
MKLKYLMFIGLLLIGLLIIPISFAGDADSYSAYSGDSISLEDDNSYLESNTVLKDSKNSLQSIDDDCLIGNRTLDDTSYSDSTNSEDLTNPDSTNPDSTNSEDLTNLESSANTDSSSEIKTITKSLNDQNTNIKSLNYDEYADYINLNNQLINYDFAISDSNTIFVNASYTGSTENGSQASPYKSIYSAYNYAFGLSSDTRTNVYIAKGVYTVTRRMTINKNLNLIGEDSLNTIIDCNGNGAFFISPRRSYTTVYSPLLNIFNLTFTNGRYSSGGAIYINESTVNFVNVIFKNNRAEASYYGSVEGGALYNNKGFVRIYNCLFENNTANDTSDACGGAIYNDMGEMTIMGSQFINNTAKGENAAGGAIYDFSGILVIFNSTISKSSLLSNYSMGGGLASWSSHNIFIINSTFDSNEGHGKYVFGSAIANKAIMMYIENSTFSNNLANGTSDKNGTFFHLNGVLDFDNVNFTNNRAINPKEDILICLEDQFIISEAFSQEDIAEILSEMELSQLPSSYDLRDYNLVTSVKDQKNSGSCWAFSTLAALESYLLKYENTSYDLSENNMKNLIGAYGLNGTDWYDGGNHYMSLAYLLRWSGPVNESQDPFNDTSHNSRTFTNIVKQVEDVLYVPLRLNYLDIDQIKAAILKYGALYTTLCSDDSFDNNPDYYCDVISISNHAITIVGWNDSYSADNFAVRPPGDGAFIIKNSWGPSEGYDGYWYVSYYDKTLAGYGYDAIAAMAFTSVANASTYKNNYQYDTLGNTFESIGYGCSTAWIANQFTALNNNPLAAFGLYTYGSSSYLVNITVNGISRLVQEGNVKGAGYHTIKLDDVVELLSGDIFKIIVKLSTPDSNYPVAIESKRSDYSSRANSNPGESFISFDGQNWQDLYEVGDILKFYMYMNNKTFTEPNICLKAYTIGPSDVHLHARANATTYTQGDTVEIKITVSNEGATVNDLNISMKWNSSFFLKSFTKLNGEFDSTKKIWHFDTFSEGQSSTLTLVFTMRGNNDVASLSYDYNYSGFNPGDANTTQVLNLYYGSLTKFVEVPNVSTSVKSGDVVDIQLTDLQSIGISDKQIVISLLESDNEYLFENVTLITNGSGQAGFVLDLLEGNYVFLASFAGDDSYMSSNVTFNVSVSKSNTSISLDNLDPSNITVFSKSGDVINFTLSDGINNLSDKNIVISLIESDNDYLFENLTLITNGSGQAGFVLDLLEGNYVFLASFAEDGYYKASNLTFYLNVLRRASSMEFDSSSLIYNGSNWISLSQSNDLIEFILSNQTGPLADKTIILTVEDLNSVDLAENPLIYNLTTGPNGIASFNLNLTKSNYEIIASYLGDECYSPCEFGFNLSVLKRNAPHIVADDIAINSSNPYQAHLLDDDFNPIANQSLLFAFAKKDSQDLFNYSAITNERGIAIIDLSDIESGDYNLLIAFESNDLYDDSILEIDVSVVNDSLNGDNGTNDTGNGTNGTDNSSKINTLFKIDMSDLTVSANVDKTIEFALLDESLNPLADKTLNLTIVDLDEDTELITDSDGIASCVLNLDEGVYEFVLSFSGDENYSPSRLIFNLSVSKADNGTSPGGDNGTSPGGDNATNGTDPSGGNGTAPINDNGTNGTDPSGGNGTSPGDNGTESSKINTLFKIDLSNLNIFANLEKVIEFELLDESLNPLSNKTVGLTISNLDGVSLITDSNGIASCPINLDEGVYEFALKFLGDDDYSESAMIFNLSVSKRIAQLLSGETLINLSSEKREYDVYLVDDKLSPLANETILFALSSMDGQVLFNYVVKTNDEGKASLSGLAKLNESNYIVKTEFASNDFFEGAELIKTITLIKDAPNGDDANDTNGTGNQTDNGTDTGNKTDNGTDTNGTNGSDVPVSRKATKIIYEDMVTQSVVPDVDGRIGDYFYVTLVDGNNNPLANKEVKIGFNGRIYNRTTNATGGVKLQINLKMPFTYTFAICFLGDDDYNASFEVAKITVNKKKMSLTAPSKTYKSTAKTKALTATLKDNNNKAVANKKITFTVNGKTYSATTNSKGVASVNVSLSSKKTYSFTAKFAGDACYGAVTKSGKITIK

SEQ ID NO: 5277 - protein, 105 aa, Methanobrevibacter ruminantium
MADIGEAAEKKLKSRIRKLKKCNKDEEEKVKFFNQLGLSFTISLPTKNPEKQEDFIMLYTTPEGHIVHAEYSYSEGEEFASMDIPEKDLKVIIESFSDYELKLLD

SEQ ID NO: 5278 - protein, 380 aa, Methanobrevibacter ruminantium
MIVNNSLDELKKRESALKIIRSIVENEGRSSLYDVTGLSGGFISSEEELDLLETYVGPAIFEDELQVVAKEHLGGEKALAVNRTSSGILASILSLVKEGEHVSHFLAQYPAHPSIPRSCNIVGADYDEYIDLNEFKIEDNTSLVVVTGSTMDHQVIDEDTFKEVIDMAHDKDIPVLVDDASGARLRTAVFNQKRACDLGADLVVTSTDKLMPGPRGGLMAGKEELIDKVKVKANQFGLEAQPPLILAMVNGIKNYSEDNLINAISRKDKFYDMVSKDYEMFEKTPTGVMVTEDALKKQVDALDIETELSEKDLSFLWAMILLKDEGIITIPAVGMPGASATVRFDLSTQDVIDMNLGILHDKVDDSFNKFFRQLSRCGKV

SEQ ID NO: 5279 - protein, 303 aa, Methanobrevibacter ruminantium
MKREMIKLLVSYDIISKEEAEKIDSINDEAIEESIKELGFGKTEHITKERISEFLETEELGEEILCFRKVFSTNSISKFLANHGAKEGTVLISEIQTNARGRSGKKWEAPDGGVWMSMILRPDVPPAKIGLITLATGVAIARAIRSFDVDAKIKWPNDILIHGNKISGVLTEVIATFNQIEYVIVGVGIDSNLKLEDFSEDIREGTTTLEEEIPVKVDENELIGIFLNEFEKIYDIYLNGDVEEILSEWRALSDTIGKYVSITQTGGKTTQGYVVGINKEGSLIIEKQDGNLEKIISGELRTL

SEQ ID NO: 5280 - protein, 497 aa, Methanobrevibacter ruminantium
MFEKVLIANRGEIAIRIMRACRELDMKSVAVYSDADKTSLYTNYADESVPLGNPSPSQSYLNIEKIINAALDTGADAIHPGYGFLAENPELGRQCEKNGIKLIGPKGEHIEKMGDKITSKQLMKEAGVPVIEGTPEGIDDVEEAKEIAEAIGYPVIIKASAGGGGIGMRAVYSEEELVRALEATQSVALKNFGDATVFIEKYLEKPRHIEFQILADEYGNTIHVGDRECSIQRRHQKLLEEAPSPIMTEELRERMGESAVKAAEYIGYNSAGTVEFLYDNGDYYFLEMNTRIQVEHPITEIVTNTDLIKQQIKIACGEELEYSQSDITVTGHAIECRINAENPLADFAPNPGKITGYRSPGGPGVRLDSGVYMNYTIPTFYDSMISKLVTSGRTRNDAINRMKRALSEYIILGVKTTIPFHKAIMRNESFLAGDLNTHFVDEHKKGIEEEMEKVILEDLERVNRMKSTFMPGKKIAAISATVGTYFNAAQAQQMKKK

SEQ ID NO: 5281 - protein, 39 aa, Methanobrevibacter ruminantium
MISIKIVINPSFDMVKSTLKEMIKFSLELMKIFIMVLFA

SEQ ID NO: 5282 - protein, 276 aa, Methanobrevibacter ruminantium
MIFNYSSVIMKIRKKKQLEMILQNVPSHPNPKVELEQYSTPSSIASDLIWNAYTLGDISDLSVLDLGCGTGIFAIGSWLMGAGYSLGLDIDPESIALGEKTIIDLIGLNQPSDVDVFNINFIVGDINQYNSISELLNDKSIQSDEKYDKLIEYYNSNSLGDDSNLNNSNDGLMNGSFDEKDFKFATLFQNPPFGSQERGTRHADRKFMEFAMASAEVIYSFHMKSTEEFVIDYYNDLGGDISHKFVYNFPLPKIYDFHKTESRDVKVVVLRVENFK

SEQ ID NO: 5283 - protein, 271 aa, Methanobrevibacter ruminantium
MQNSKVSVFIPNSFLAETKDLKLKTSKVGLIGRALAVFEVDEVVIYKDLSIPDSEQTDDGDFIAEVLNYMDTPQYLRKKAIPIKAELRHVGILPPLRVPHHPTGKPELGDYRQGFTVKRNKKGTFVDIGMDKLAFCKEQLTVNKIFSFKITKFAKEVIVTPDEPDDIYWGFKTLSTNKSLKNSLKLVNPDLVVETTRYAETIDSIFNELKTKVESSNHIAIVFGGPYSSISENVESSKWETVKINTIPNQGTETVRTEEAVISTLAIFNIL

SEQ ID NO: 5284 - protein, 336 aa, Methanobrevibacter ruminantium
MVRHHQPRKGSVAFSPRKRVAKETPRIKAWPSNEEPKLLGLAGYKAGMTHAMVVDNDKNSPSHGMEVFTPVTVLEVPPLVILGIRSYEKTAHGLKAITEVIADNLDEELSRKITLPKDYDQSEAIAKIQDALEKTEEVRVLVHTNPKMASVPKKKPEIFECALGGSSAEEKLNYALGILGQEIRASDIFSEGQYVDAIATTKGKGVQGVVKRWNIRIQYGKAMRSGKGRHVGSIGPWSPERTMWTVAQAGQMGYHKRTEFNKKVIKIGDVSEVDAVNPAGGFIRYGLVKNDYVLVKGSVPGPTKRLVILRQAIRPKKADDAAPQVNYISTASKQGV

SEQ ID NO: 5285 - protein, 254 aa, Methanobrevibacter ruminantium
MKVNVYSIQGEVKEEIELPAIFNEEYRPDLIKRAVLSAQSARIQPWGNDPMAGKRTSAESWGSGRGAAMVPRIKTGARAAFVPQAIGGRKAHPVRAAKNHHEKINNKERRFAIRSAVAATVNEELVAGRGHRIENLEQVPVIVEDDLETVKKTSETREIFKALGVYDDVIKAKDSKKIRAGRGKTRGRKYKSGKGPLVVVSEDKGIGLGARNHAGVDVVAVDNLNAELLAPGTHAGRLTIYTKSAVEKLGGLFQ

SEQ ID NO: 5286 - protein, 86 aa, Methanobrevibacter ruminantium
MDPYTIIVKPHVTEKTMNLIDQNNELTFVVRRTATKSQIKRAFEFLYDEKVVRVNTHITSKGLKLAYVKLAEEGEAEDVAVKMGVF

SEQ ID NO: 5287 - protein, 241 aa, Methanobrevibacter ruminantium
MGKRLIHQRRGRGTPAHRVASHRFKDKIQYRAYDDLEKEGSLKGKVVKIIHDPARTAPIALVKFENGEKRHILAPESIQIDDEIECGISAPISFGNTLPLAEIPEGTPIYNIENRPGDGGRFVRSSGTYASLITHDASQAVVELPSGELKSFNPRCRASIGVVAGGGRKEKPFLKAGVRWHAYKAKGKKFMTVRGVAMNAVDHPHGGGNRQHPGRPTTISRHAPPGRKVGSIAAKRTGKRR

SEQ ID NO: 5288 - protein, 136 aa, Methanobrevibacter ruminantium
MARKIFKYRGYTIEELKEMSLDEFIELLPARQRRSLKRGFLPRQQSVLDKMRKMQKMDKKGGKPLVVRTHCRDMIVIPEMVGTTFGIYNGRDFVEVTFTPEMLGCFFGEFAPTRARVQHGDPGMGATRSSMFVPLK

SEQ ID NO: 5289 - protein, 155 aa, Methanobrevibacter ruminantium
MAKNKYAYNNPDADESKTARAMAKSIKVSPKHCVEICSAIRGMDVAKAKAYLNDVIDMKKAVPFKRHNRDVGHRKGMKGWAAGRYPVKASKAILTVIENAEANAEYKGMDVENLKIEHISSHRGMVIRGARPRAFGRVTPFNTPTTHIQVVLVEA

SEQ ID NO: 5290 - protein, 251 aa, Methanobrevibacter ruminantium
MIEKDFVTEGLRRTRIDEYLEKELERAGYGGMEIQVTPLGTMVIVYAERPGMVIGRGGKTVRAITQSLKTKFDLDNPQVEVKEVAVPELNARIMASKIANMLQRGMHFRRVAYSTIRKIMGAGAQGVEVTISGKIRGSRSAVAKFTEGYIKKCGEPATRFVTEGFATAPLKPGVLGIVVRIMPPEATLPDKVDIIAPVEVEEPVVEAAEEDVEEIEEEVTEEIEEVEEDLEELEEELEDLEELEAAEEDVE

SEQ ID NO: 5291 - protein, 68 aa, Methanobrevibacter ruminantium
MAILRSKEIWEMEIEDIEEKLVELKAELAKNVSKSAAAGVNENPGKIRELKRTIARVLTIMNQKQKEN

SEQ ID NO: 5292 - protein, 114 aa, Methanobrevibacter ruminantium
MSKICDVCGLPEELCVCEEIAREVQSVKVFTVRRRFGKLMTIVEGIDEHDIDIKELTKTLKAKCACGGTAKKGQIELQGDHKARVKEVLSEMGFSSDTIEIRDSDKKYNKRRRH

SEQ ID NO: 5293 - protein, 111 aa, Methanobrevibacter ruminantium
MISSNNIFYHELIGLELKVVDSSNPSLIGLCGTVIDETKKTLLIEVEEKVLSDDLGSNQQNHFNLIYKEKLIQKDVSVFQFKVPDGTIVEIDGKILLNRPEDRIKKRYKKI

SEQ ID NO: 5294 - protein, 106 aa, Methanobrevibacter ruminantium
MVGLNVKEPETKCDDPNCPFHGNLSVRGQVLEGVVTTNKAERTITVERSFYKFIRKYERYEKRKSRINVHKPDCIDVEVGDAVKIAECRPLSKTKHFVLVEVKGDD

SEQ ID NO: 5295 - protein, 132 aa, Methanobrevibacter ruminantium
MKPTTSSVTKALPIGARLQCVDNTGAREIEIISVKGFKGVRRRLDVAGVGDMVVASVKKGTADMRREVVNAVVVRQKKEYRRADGLRVKFEDNAAVIITPEGVLKGSEIRGPVAKEAADKWPSVGSAASILI

SEQ ID NO: 5296 - protein, 113 aa, Methanobrevibacter ruminantium
MSIQPRKQRKALYTAPLHIRRKIMSANLSKELRADIGKRSLPIKVGDKVQVVRGDFKGHEGKVESIDAKRYKVTVEGVTLNKPDGNAVFLPIHPSNLMIIEADLKDERRIKEE

SEQ ID NO: 5297 - protein, 244 aa, Methanobrevibacter ruminantium
MAKMGSRKHLKRYNAPKTWPIHPKEDTWTVKPAPGTHAINDSLPLLVIIRDILGIADNSREAKRLINTGNVLIDGRAKKDYKFPVGFMDILSIPKTGENYRILLDTKGRLTLHPISAEDAEFKLAKIVNKSTIKGGKTQLNLHDGRNVIVEEDNYSAYDVVCLNIPEQEIKENFEFGEDVVVLVTGGKHTGELGKIQEVIVDQSSKANTVIIEKANKDTFLTLKDYAFVIGKDEPAIDLLEVNQ

SEQ ID NO: 5298 - protein, 173 aa, Methanobrevibacter ruminantium
MNPMNEVVIAKATINIGVGEAGEKLSRAMTLIENMTGQTPVKTYSKVTNPEWGIRKRQPIACKVTLRGEKAEDAIKMVLDGINNRLRPSQFDAQGNVSFGIREHIDIPGMRYDPDIGIFGMNLSITFEKPGYRIKRRKIQKKSIPKRHRITPEETMKFMEENFNVTIAEEEEY

SEQ ID NO: 5299 - protein, 50 aa, Methanobrevibacter ruminantium
MIVLPRKYGKASKKCSRCGDHSAIVSRYGLNLCRQCFREIAPKIGFKKYN

SEQ ID NO: 5300 - protein, 130 aa, Methanobrevibacter ruminantium
MTLMDPLADALTNIRNNERQVNDHCTISPASKLIGRVLSTMQKENYIGEFEFIDDNKAGKFEVELEGNINQCGVIKPRHAVKKDEFEKFEKRYLPAKNFGILIVTTPEGIMTHREAKERGIGGRLLAYMY

SEQ ID NO: 5301 - protein, 177 aa, Methanobrevibacter ruminantium
MVLAAAIREEIEIPEGVEVIIDDEISMKGPNGEISRKFTYPNVTIKKEDDILVLETAFPKKKDKSMIGTTRAHLNNMIKGVTEGFTYHMKIVYAHFPMTVKVEGDKVTIDNFIGERHPRSSKIVGGANVQVKGDEVIITGVNKEDVGQTMANLEQATKIRGKDPRVFQDGIYLTSRE

SEQ ID NO: 5302 - protein, 114 aa, Methanobrevibacter ruminantium
MVILMSKDFKRQEYARYKKLGTKWRRPRGKTSKMRRYEAGKPAMPSIGYRTPRATRGLHPSGYKDVLVYNMKDLEALDAETEAARISASIGKRKKALMLEKASELGIKVLNRQL

SEQ ID NO: 5303 - protein, 148 aa, Methanobrevibacter ruminantium
MNLTTQRRLAASILKVGVNRVWIDPEEVEEVSRAITRDGVKQLIDQGIIKARPKTGISSYRSKKLKEQKKKGKRKGRGSVKGAKNARTPKKQVWMKTIRALRSDLKEMRDTGEIDPTTYRKLYKMAKGGAFRSKSYMKTYARDHDLIK

SEQ ID NO: 5304 - protein, 193 aa, Methanobrevibacter ruminantium
MASGSNYKVAFRRRREGKTDFAARAKLVDVDKARLVVRISNANCIVQVINVGLTGDETVVSAHSKELNKLGWKGGNKNTSAVYLTAYLCGKKALAAGVEYAIADIGLKSPIKGAKVFAAVKGAADAGLDVPYGESIIPSEDRINGEHIAAYAESLDEDELNKKFSQYLARGLQPTDLPQHFEEIKNKIDEAEV

SEQ ID NO: 5305 - protein, 213 aa, Methanobrevibacter ruminantium
MSFNMDDWEPKTNLGKEVKAGNITDIDEIFEKGLPIMELEIIDALLPDLEEEVMDVNLVQRMHKSGRKVNFRVIVAVGNRNGYVGLGQGKAREVGPAIRKAVDNAKYNVIKVRRGCGDWGCVCGRQHTVPFKVTGKASSVKVTLRPAPAGVGLAIGDVGKTILSLAGYKDVWSQASGQTQTTVNFANAVFNALKESCKMKASEQDLKNMGVIQ

SEQ ID NO: 5306 - protein, 152 aa, Methanobrevibacter ruminantium
MYLVIRVRGTTGVIQGIASTLEMLRLNRINHAVLVEENPSYKGMLQKAKDYITWGEIDAETLTEIIEKRGRLVGGARISEEYLAENTDYSSFEELANALLNGELKAQDINMKPVFRLHPPRKGYEGIRHSIKEGGSLGYRGEDINSLAKRMA

SEQ ID NO: 5307 - protein, 147 aa, Methanobrevibacter ruminantium
MIRKGKKINKMRGSRSNGGGSVKRRRGAGNKGGKGKAGAGKHHWSTTVIENRYYFGKHGFKRPQKTIHRSYPVNLNFLNDKAEEFLEKGIATKDEDDVIVIDVTDLGYNKVLATGSLDIPLVVKSPAFSEAAIEKIEEAGGEAVELF

SEQ ID NO: 5308 - protein, 456 aa, Methanobrevibacter ruminantium
MFLENFKPIFQLLPEVKTPIHRQDFREKLKWTAIVLVLYYFLTLIPLYGLSPAAVDQFAQLRAVMAGSFGSILTLGIGPIVTASIVLQLLVGAKILDLDLTLHEHKAMFQSTQKLLAIIFTIFEAGVLVFTGSLVAIDPSFYPIMLLQLVIGAIMILYLDEVVSKWGFGSGVGLFIAAGVAETIIVGTFNFLPASAASTTASGILPAFIQSIIGGAPNFQILIPLIATIVVFLIAVYGESMRIEIPISHGRVKGHGRIRGAVGKYPLKFIYASNMPVILTSALLVNVSLIASLFQKLGFPIFGEVSGGRAISGLALWLTTPNSISVLFTNPLRVLFYAIVFLGCCVLFSWLWVEISGSLSAKEVAKQLYNSGIQIPGFRSSKRQLYTIMKKYIPALTILGGLFVGILAFIADLTGALGGGTGVLLTVGIVYKLYEEIAQEQLMEMHPMLRKFLGND

SEQ ID NO: 5309 - protein, 185 aa, Methanobrevibacter ruminantium
MKLVVLTGIPGSGSTTVLKKALEEVDYLHLNYGDIMTEIAVEKGLVETRDELRKLPADTQKEIQKAAGIRIKEKSESENVIVDTHCTISTPSGFLPGLPKWVLEGLNPDHFVLIEAYPDEIRVRRTNDDTRQRDAESAEAIQLHQEMNRAASMAYATLTGATVKIVYNHDNELDDTVAGLVEFLK

SEQ ID NO: 5310 - protein, 202 aa, Methanobrevibacter ruminantium
MAYQGSFLLGISWLQPVFDAMNAVLNPLVQLDPTPNNPVLTVFVISALISLLTVTAQKLLVDQDKMNEMQANSKALQKELREAQKSGDAKQIAKVQAKQTDMMQDQSEVMKMSFRPMIVTMVPILLIFDWMWQSAIRSLIVVFPPAVYYCTLTPIFHSLGQMLYGGNITTIPFGVGWLWWYFICTFGMSQIIRKFMGFKNGF

SEQ ID NO: 5311 - protein, 88 aa, Methanobrevibacter ruminantium
MPANRFRSRSYKRTNTKTPGGVNVLRYKKKKPSKHVCAECGAVLHGVPRGRPFEVNKLAKSKKRPNRPFGGNLCPECTRKHFKQEARK

SEQ ID NO: 5312 - protein, 172 aa, Methanobrevibacter ruminantium
MIITIGGVAGSGTTTAAKVLSEKLGVPYISAGAIFREMAEEHGMTPVEFGKFAENNTDIDKEIDNRQAKLAEEADDLIIEGRLSAYFIDADLKVCFTAPLDVRAKRVCERENKSVETARLEIIAREESEAIRYRDIHNIDIKNMDIYDLIINTNSFDPESISEIIITTLKVI

SEQ ID NO: 5313 - protein, 55 aa, Methanobrevibacter ruminantium
MAAIEVGRKCIKTAGREAGKECEIVAIIDENFVEVKGDEVKNRRCNINHLEPIME

SEQ ID NO: 5314 - protein, 837 aa, Methanobrevibacter ruminantium
MILVFKMGIFDKVKSAFESSKNFKYLDDLIHSGLNEIVLDDDISLSKNEKNKYSNGIEIEIDNLVIDGNGHAIDAQGNGSIFLCTGKNIVVKNIHFKNGIHSNGGAIENRGELTIMDSTFDGNNASLGGAVFNDGPKLMIAKSTITGNIAKEGGGAIYNNDGEVYISESMINENVSSFHQYSGGAIYNKGELTIEKSTLIRNHASFGGAIGNIGQLNIIDSTISNNESSGDGGAIFNDNASLSISNSMIEANVSDGLEGGGAIYNKEGELNITGSVLKQNELVGQIGKGGAIYNNGGNLNIAGSSLCNHSINFFGGAIYNDGGKINIAESKFNENSSNRNGGAIYNEGEVNIRKSSIKKNKSDGGVIENINGDFKIFNCEFFSNESQGNIIFNQDSLEINYTDFKDNRSKSMLLNDGVKSKMSLVKGEINGNDVKDTLILNEGNSLTISETVFENNLIPNGDAIVNSSNLILTNPKINDDNQEIRNQGNLLLKRSSLDIKGKINGEGKIETDDHSNEDKFDFGYLDSLIHGSPDKEIVLDKDIKLENYEVDFYEGGIELDFDDLIINGNGKTIDARGKSRIFTISGKNITLKHITFKNGHSYKNYDNPLNNNGGAIRINANANLTITDCKFLDNLSEDYGGVIYYNGSGDLVLTASTMKGNTAENDGGAIFSSGEVKINKSKFINNSGNNGGAIAIVNSNDKASVTESIFNENAADSKGGAIWFHNSNIALADCTFNDNYATCGAAIYQEISKGSISNSTFKRNLSSYAYWHDGKLVTNKNHAIFIDTGSGLNDFNQDRDNIINCDFIDNNNNLYAQKHDLIKSRLDEHLALWKRNL

SEQ ID NO: 5315 - protein, 277 aa, Methanobrevibacter ruminantium
MLEVRNIKYSYNKDYQALKGVSLKVEEGQMVALLGKNGAGKSTLFLHLNGIYEPDEGQVFIKGEELKYDKKSLLKFRQKVGIVFQNPDDQIFAPTVEEDVAFGPLNLKLPMEEVQKRVTEALARVGMSGYEKTAPHHLSGGQKKRVAIAGILAMKPEIMVLDEPTAGLDPQGVTALSNLLKELNDEGITVIISTHEVNLVPTYAEKVFVLVDGELVAEGTPKEIFAQPEILEQANLEVPIVTELFQELEKEGYDMNDDYPLTIDEAKEKFLELLNKN

SEQ ID NO: 5316 - protein, 230 aa, Methanobrevibacter ruminantium
MKFDMDYIAHHNELSEANPYYKLFITIILLIVTLALDNLYFDIFMFILFSIIILGVAKINIRSYIKFLTIPMAFLIITCLFLIFFFGSGKVIYQTGFFGIVVTDDSWHYGLYTFFRVLGCFPILGFLALTTPIAKIFHCLETLKVPKIVIEIGLLMYNTIFIFLNEIDVMQKAQKTRLGYNSYWNSLQCLGSLVSNIFLRSLEKSETLQNSLDSRGYDGELPVYIPPKEE

SEQ ID NO: 5317 - protein, 95 aa, Methanobrevibacter ruminantium
MERTTLIILAVICAIIFIAPLVMYSGLGEDDGYFGGADDAAGEAIEESGFKPWFSSIWEPPSGEIESLLFALQAAIGAIIIGYFFGYWRGQGKEE

SEQ ID NO: 5318 - protein, 221 aa, Methanobrevibacter ruminantium
MHIMEGYLPLTWCIIWFVVSFIVVAYGIYQIKQIVDETPDSKALLAVSGAFMFILSSLKLPSVTGSCSHPCGNGLGAALFGPAVTAVLATIVLLFQAILLAHGGLTTLGANIFSMGIIGPFVAWLVYKACIKANISSTIAIFFAAFLGDLLTYVATSFQLAFAFPAPSFGSALTKFLVIFAVTQVPLAIGEGILTVIIWDRLKAYKPKLLDKLGVLAPNEA

SEQ ID NO: 5319 - protein, 228 aa, Methanobrevibacter ruminantium
MEKGKLYGVSIGPGDPELITVKAMNIISKSKYIATPHTGTGESLALSIVSQAIDLSNKEIMLLEFPMTKDKDILTKSHNEAAEAIIKVLDSGEDVAMLNLGDVTIYSTFDYTKDKLVERGYDVQVIPGVTSFCASASELKIGLTTMNEPLHIIPASGIDIKEALKMPGSKVFMKIGRSMPKLIEAIEELGLQDNVYAVENCGLENEKVYKGLKEFDEKMGYFTIVVVK

SEQ ID NO: 5320 - protein, 379 aa, Methanobrevibacter ruminantium
MQDKRLVNQQLLRCGYTTGTCAAAASKAATTMLFEKERVDSVSITTPNQTSLNIDVLNPQLTDKKACCCIQKDSGDDPDITNGILVSAEVSLTESKGINIDGGKGVGRVTKPGLDQPVGNAAINSVPRKMIEDSLNELARHYDYDGGFNVIISVPEGEEIGKKTFNPELGIVGGISILGTTGIVEPMSAKALADSIKVEISVIAAESNESILIFLGNFGKKFTEEELKLSTSPGIMCSNFIDVALDSSVEYGFKNILLIGHIGKFVKLGIGLFNTHSHNGDGRIEALLSCALEAGADLETLKAINACVTTNAVLDILYEKELLDKTMEILNDRIQHRIDKRVPPEANIGFICFANSGEYEGILFESDNAKELMTIWKTD

SEQ ID NO: 5321 - protein, 251 aa, Methanobrevibacter ruminantium
MIHFVGAGSGAVDLITVRGANLLKEADVIIYAGSLVNPDLLNYAKDSCEIYDSAKMTLDEVLDVMFEAEKENKMTVRLHTGDSSIYGAIREQMDRLDEVEIDYDVCPGVSSFCGAAASLKAEYTLPDVSQSVIITRMAGRTPVPEKESIASFAEHGATMVIFLSTGLLKDLSKELVKGRYTEDTPAAIVYKATWPDEKIMHCTVGTLYETAKENNVTKTALIIVGDVLDSEYSLSRLYADDFSTEFRQAKK

SEQ ID NO: 5322 - protein, 340 aa, Methanobrevibacter ruminantium
MKISIIGFTDNGMEIAYKLSNSLSEDNNISFTRCGKGELSIWTEEHFSDSDALIFIGAIGIALRAIAPYIKTKTKDPAVVVVDELGQFSIPILSGHIGGANELALQIADILNAIPVITTATDINNLFAIDTWAKSQGLKILNPECIKLVSSKLLKGETIHIKSDYPIQGNLPKKVQINDLEDSNSDYDVIISHNDYSYMENKDILLLIPSIITIGIGCRKDISFDNIERSVLNILDKENYHILSLNAIASIDKKANEKGILEFARKYNLPFNTYSAEELNSLEGDFTKSEFVKSVVEVDNVCERSAVIESNGNLIRRKDTCDGAGVTVALAMINPILSWD

SEQ ID NO: 5323 - protein, 243 aa, Methanobrevibacter ruminantium
MKCVSVVGIGPGNELYLSIAAKETLEDSDLIVGYKKYVELVEEYLPEKEYLYTGMTKEVDRCKMALEKASEGNCVSVVCSGDAGVYGMAGLVYELSVDYPDVEIDIVPGISAVLSGSAVLGAPIGHDFAVISLSDLLTPWELIEKRLALAGEGDFCICLYNPSSHKRKDYLKKACEILLKHKKEDTVCGYVRNIGREGEEYHILSLKELKDTEVDMFTTVFIGNANTKVIDNKMVTPRGYKGV

SEQ ID NO: 5324 - protein, 252 aa, Methanobrevibacter ruminantium
MHKIVLFGGTTEGRLLTEFLSQNKVPSIVCVATEYGEKVLDYEPPVIVQPKRLKPGPMRKLFQEEQTEFVFDATHPYATEISKHIKEACDEMGIEYIRVLRESIEIEGTTKVSSMDDLIDYLNQTEGLIFSSMGAKEAEALTALENFPERVYLRMLPSPEGIGHCLDLGYPMKNLCGMQGPFSKEFNMAQFKEIGADILVTKESGNVGGFLEKTDAAKECGMEVVVLSRLLNEEGISVEEAKDAIMSKCLRR

SEQ ID NO: 5325 - protein, 395 aa, Methanobrevibacter ruminantium
MKEINIIGMGMSEKTLTHEALELIHHADILIGAKRLINEFSKLNKPSFNAYLSDDILKIIEETDAEKIAILVSGDVGFYSAAEKLTDVLKDYNPNLITGISSVSYFFAKCSLPWKDANLISCHGIDTNIVSSVRRNRYTFALTGKNIPELQNELVKYGFGDLKVWVGENLGSEDEFINDCRIDDLCSREYGSLTVLIIDNPDFDSKSRTGIPDEEFIRGKVPMTKSEVRAVCASKLSIGPDDIAYDIGCGTGSVTIEMALSAYNGKVYAFDKKEEAISLLNENCIKFHIDNVEAICGLAPDCLKGLPTPDVAFIGGSSGNMDEIVNYLYQLNPNMRFVITAISIENAMAALDSLKDIGIEAEIVQVAVSKGKKIADLHMLIAQNPIFIISGDANE

SEQ ID NO: 5326 - protein, 453 aa, Methanobrevibacter ruminantium
MNRFLISGTSSNCGKTTITMALLAAFKNRGLDIASFKSGPDYIDPMFHRKVFNVKTHNLDPYFCTEEMLCEQFIRNKGNDLSIIEGAMGFYDGIGVEGRASAWEVAKSIKAPAVLILDAKGMSNSAAAIIKGFKEFKEDSMVEGVIFNNISPMLYPLLRDIVESIGIKAYGFLPRREEYSIGSRNLGLITADEIQDIKDKINGLSQLAEEYIDLDGLYELAKSAPELKTNDFIGEVLTDSQNEESADSSNKPRIAVSRDKAFCFMYEENIEILEDLGCEVVYFSPLEDKKLPDNISGLYLCGGYPELYKEELSNNKDLCSSLKEIISNGIPTIAECGGFMYLHDSIENVPMVGFIKGNCIKTDKLQRFGYIEIKALKDNLLCSENDSIRVHEFHYYDSENCGEDFMAKKASNGLEYLCCHGSDSLYAGFPHIYLPANPDFARSFVRNARNWKH

SEQ ID NO: 5327 - protein, 212 aa, Methanobrevibacter ruminantium
MKIELEQVEPAEIENRSMEIIESELPHEIDPKLAPIIKRAVHTAADFDYVDNLCFSEDVVDKALEAIKNGACIVTDTQMAKAGINKAELKKHGGDVFCFMSDDDVRDMAKKNHSTRARASMDKASQLDRPLIFAIGNAPTALIRLYELIQEGKLKPELIIGVPVGFVNVVQSKELIMQCDVPYIVARGRKGGSNVAAAISNALLYILRDQMK

SEQ ID NO: 5328 - protein, 262 aa, Methanobrevibacter ruminantium
MVDKIILVVSFGTSYNNNRALTIGAIEKDIDEAFPDYEMRRAFTSQMVINKLKRRDDLDIDNVQDALERAVNDGVKTVIVQPTHVMDGTEYHFKIKDTVDKYIDKFDNITIADPLLITDEDFEDLISSITKDDESSDETAIVYMGHGSPAESNMVYTKLQSMLGEKGFDHYYIGTVEAKPDYDDVLAMVKEGDYKKIILKPLMVVAGDHAQNDMAGDEDDSWKSMFQDEGYDVDCLIEGLAQSKDIRDVYIKHVQKAIDDLS

SEQ ID NO: 5329 - protein, 130 aa, Methanobrevibacter ruminantium
MERESYYFLLLLIGLVICAGVFYFQFNYATPTYLIFNATEVNEGGSFTGVLNDAYGFPVVNKTITYHKPGYEMGTLVDVQTDDTGEFVIENAQYLPDAGEDNYYGAFTFAGDGKYQGCSFDGNITVIPKK

SEQ ID NO: 5330 - protein, 222 aa, Methanobrevibacter ruminantium
MSNQDEENYMDDELLLNARKPKGELGEKLIENMNINHESLAQWSLNHLEIDKDDFILDIGCGGGVNVERFLKMTDNKVFGLDYSELSVEKSIELNRESIDDGRCEIIQGSVSDMPFEEGIFNIATAFETVYFWPDFVNDLKEVHRILKKDGIFFIANEALPNEYDKRQQRIIELLEMHIYSKEELEDSLEKAGFSDVKCFIKEAKDSFTGDDAYWICVIAKK

SEQ ID NO: 5331 - protein, 320 aa, Methanobrevibacter ruminantium
MDDYLIKSKSETNPEYGCNPYERPIEEHIAKGIINLDKPSGPTSHEVDSWVKRILGCNKTGHGGTLDPKVTGVLPIGIDNATRVSQLLLPAGKEYVCLMHLHREIPEDQVKGIFNEFTGKIYQTPPVKSAVKRELRVRNIYYSTIYEIEGQDVLFRIGCEAGTYVRTYCHDIGEALGCGAHMAELRRTRVGPFDERNNDLVNLHDLTDAYHFYLEDGDEEHIRKAIQPMEVASSHLPQIFIKDSAVEAICHGAKLGAGGICKLSKDIQKGNLVAIKSLKGELVAAGTSLLSSQEIMNADSGLVVDTNKVFMDTGIYPKGW

SEQ ID NO: 5332 - protein, 60 aa, Methanobrevibacter ruminantium
MDDKEKVIEAFKNSEEPLNAKKVSELSGVEKKEVDKIMKELKKDETIVSPKRCYWTLAEK

SEQ ID NO: 5333 - protein, 183 aa, Methanobrevibacter ruminantium
MVKNNNERFELDLSKNETPEFSNEEILSKMRRGFNNQYVCFEYPFLWQNMPIDEEDEFTDIMLFNKANNAIVKISTQPCLIDNIDDLKEEIEKDLKSNGCTIQQSAMEKMETQDIWDVFYTTKEGLEVEQFSILKDNNLYNLELYTKNNRDQATVKSFVDVIQTFTILKPTYKVDGDSYEKIE

SEQ ID NO: 5334 - protein, 112 aa, Methanobrevibacter ruminantium
MSVFDYICHRRPERSFFYKGRQFPVCARCTGFYISGIASIILFKYFPLPNTLTTLAIGILLLIPCAIDGTSQLFEMRESNNVLRLITGLLGGVGLIMIYEVVLNFVFLNFIY

SEQ ID NO: 5335 - protein, 47 aa, Methanobrevibacter ruminantium
MDGMDPEDYLIYNYYFEEEENNGLSKNESCCGVLMVLMILTILLTVA

SEQ ID NO: 5336 - protein, 167 aa, Methanobrevibacter ruminantium
MARREENTFDFLGLFTEEIGGKKNKSNGAIKFQKDKLFIEKRSRLNGKLKDSYEISYDELDSESIDRPAINRVEIKLKDKTISLKTLDHEMLDNFEDKLLDIVEGPKLAVEDSPVANAPYNAAEIKSDSKIGEIDIPDQIRKYHELYKEGIISEEEFENKKKELLDL

SEQ ID NO: 5337 - protein, 288 aa, Methanobrevibacter ruminantium
MEIKSIPQVIKEIQELVDKEDYESAYNIAKDNVDLNKEYTEGEYVFKNLLEELLFQVLIQKEIKKKIPMILDYSSLYSNYGEVLIQLDKIDDAKKSFELSRNYNPINIKANFGLGDLYKMENKLNEFYKLAIESFKIAYYPKDLAKSFRNLSYYFLKIAKEENADENLKIAIHLKKISKDYDDESELAKTELDEINGIISNFDKETVEALESTDLKECRNELKSKGLPYEAGIEIITICKNLGFQLDEAKKVVPALYYFNIAYDLTKDPDIKLVIDDLNEKVERRLDE

SEQ ID NO: 5338 - protein, 149 aa, Methanobrevibacter ruminantium
MEDDFKHLVRISRKDVDGNKTIEQALTQIKGVGLSLSRSICLTLGLNTTDKIGYISEDDVTKIEDLLENPQNYSIPDWMLNRRKDYATGDDLHLIESDLDMTLRDDLNRMKKTRSYKGRRHEVGLPVRGQRTKSTFRHSSTVGVSRSRR

SEQ ID NO: 5339 - protein, 178 aa, Methanobrevibacter ruminantium
MGHPRKARKKYDTPPHPWNAERIKTENKLMSKYGLKNKKEIWKADTLVRKYSREARYLLGFSQDQVQVETEELLGHLKRTGILDEAAHLENILDLTVEDILRRRLQTIVFQKGLARTAKEARMFVVHGHIALNGKKINSPSYVVKRGEEEAVGFYHSSPVAKQIEEYNKAASQAGENQ

SEQ ID NO: 5340 - protein, 130 aa, Methanobrevibacter ruminantium
MAKDEKWGIANIYSSFNNTILTVTDITGAETICQWSGGRVVRADRQQSSPFAAMEAANRAAEDAKEKGFVGLHIRVRAPGGNGPRSPGPGAQATIRALARAGIKIGKIEDITPIPHDGTGRPGGKRGRRV

SEQ ID NO: 5341 - protein, 282 aa, Methanobrevibacter ruminantium
MEIDVKKQDENSMVFIVRDAEVPFINAIRRIAMMRVPKLAIEDVFIVKNDSAMFDEVLAHRLGLTPLVSDLESIEGLVMREDCDCNHDENGNYVDKGEYCPRCSVSFSLNETGPKVVYSRDLKSCGDSRIKPVYDTIPLLKLKEDQDVELEAVAKLGIGKEHAKWVPTTVCAYKQYPEITFNEGEDVVYQVADACPRNVLDANRDDGVIEVIDIENCSLCKTCVRTAKAAGSKFINVGYRENDFIFKIETDGSMPPKEVLLKACDVLDAKTDEFITFSEGGS

SEQ ID NO: 5342 - protein, 121 aa, Methanobrevibacter ruminantium
MAREIKKTNPNLIALIYNLRKQSYEEGVAIWKDVAIKLEKPARNQAEVSLSHINKNTVEGETVVVPGKVLSDGKLDHKVTIAALGFTKNAEAKIEKFGCEALSIAELAEANPKGSNVKIML

SEQ ID NO: 5343 - protein, 142 aa, Methanobrevibacter ruminantium
MMIINGEGHILGRLASVVSKQLLEGEEIVVLNAEKIMLTGNKDWAYAKYKQRVDRASISNPRDLGPKYPRRPEDIFRRTVRGMLPMKKAKGRNAFKGFKAFVGVPEEYADAELLTMPEAEYNDIKKGMELGEISKLLGAKFD

SEQ ID NO: 5344 - protein, 132 aa, Methanobrevibacter ruminantium
MKVVHASGKRKTAIARGTIREGTGKVRINKVPLELYSPELARLKLTEPLELAGEVADNVDISIRVNGGGVMGQAEAARMVIAKGLVQWTQDMDLKEVYTQYDRTMLVGDPRRSEPKKYGGPGARARKQKSYR

SEQ ID NO: 5345 - protein, 56 aa, Methanobrevibacter ruminantium
MIPIRCISCGKPVSAYFDEYNSRLADGEKSKDILDDMGITRYCCRRMLISHVETWE

SEQ ID NO: 5346 - protein, 72 aa, Methanobrevibacter ruminantium
MAAKKSTAKKLTRFEKARVLGARAIQLSMGAKPMEHKEIEKFIKNSKSLDPIDIATLELELGILPLDVRPKE

SEQ ID NO: 5347 - protein, 415 aa, Methanobrevibacter ruminantium
MDSVIEDVRVRKILDSRGNPTVEVDIITWNGFGRAAAPSGASTGSREVVSFPEGGVDQVISEVEDLISSELIGMAAEDIEDIDEVLREIDGTDNMSAIGGNTSVAVSMAAAKAAAMSFGMPLYSFLGGNFVSEMPYPLGNMMNGGAHAGPNAPDIQEFLVVPIGAKDVEEAVFANVAVHKKLKELLSKKDPDFTGGKGDEGGWIPNITNTQALEIQAQACEETRDELGILIRPGLDMASSEFWDSEKEKYVYSQDNIERDVGEQVEYVKDLIETYNLFYVEDPFDENDFEGFRELTSKVGNKCRICGDDLFVTNSRLLKKGIDEKAANAIIIKPNQIGSLTETYATVKLAKENNVMPVVSHRSGETCDETIAHLAVAFGAPMIKTGAIGGERIAKLNELIRIEAELSNPKMARLF

SEQ ID NO: 5348 - protein, 63 aa, Methanobrevibacter ruminantium
MSTVIIDASKCENADCGECVDMCPMEIFSLDGDKIVTDHEDECTLCEVCVDMCPNDCITIKDE

SEQ ID NO: 5349 - protein, 198 aa, Methanobrevibacter ruminantium
MSDLLIPLDNYLAAGLHIGTQQKTHDMEKYIFRVRSDGLYVLDVRKTDERLRAVAKFLAKYDPDDILVVATRQYGQAPVKKFGEITGCKTIPGRFIPGTLTNPGYAKFIEPKVIVVTDPRSDSQAILESKQNGIPVVGLCDTENLLANVDICVPSNNKGRKAIALIYWLLARQILRERGILGEDEDLDLEPSDFELKF

SEQ ID NO: 5350 - protein, 298 aa, Methanobrevibacter ruminantium
MDNIKDKKINDKIQKQLANESVNELLSITGIKSNVIQPLTVEYVDVADTRIADYVGLEENDSIRLLEFHTGAPNENLDFKMFDYSSMIYKKYRKPVNAVAICTERINEPEGKLEWGDRNKYYYDIVTYKDIDGELELNIIRNKNKFNQKLSSLEIFTLKMILYTSFDKKPHEIMLDACKLTNEANLNQYLLDEIKKFQELTCRKIIDEQYHRGIADVIAMKNTLFYEDLKKSEERGIRIGEKRGISIGEDKKEFHMRIHIIKNLLGKISNSDLAKSLDISEEELEEFIKENNLTPSKD

SEQ ID NO: 5351 - protein, 81 aa, Methanobrevibacter ruminantium
MINWAAEMKTMKNTLFYEDFKKSEERSILIGEDKKEFHLRIHIIKNLLGKISNSDLAKSLNFSEEELEEFIKENNLTHSSI

SEQ ID NO: 5352 - protein, 282 aa, Methanobrevibacter ruminantium
MIREAVVAGTFYENNVKYLRESIEDCFTHRLGPGEIPKLSRVNKEKEVNAIMVPHAGYVYSGPTAAHAYSKLVQDGYPETFVIIAPNHTGFGEHVSIFNEGSWIVPNGVADVDDELANAIINQSNYAKADFLAHRNEHSIEVQIPLLKYFDSNFKIVPICMMDQSPQASIDLANSIFEAANDLNRKITLIDSTDLSHFKSQEKTIEHDNLVFNEVINGNTEGLYQVVKKEQITMCGYGPTMVSMEYCKKLNQKNFELLQHSTSGDITLDYASVVGYGSGVWF

SEQ ID NO: 5353 - protein, 327 aa, Methanobrevibacter ruminantium
MRKMSVASAPGKTILFGEHSVVYDEPAIAGAVNKRASVKIQESLNNYSTLKSYDLGFEVILNTRRGTYKLVKGKPGIIRYILNAMGKFHDHSNIDMTLGLNLPIGSGLGSSAAVTVATIAALHDYHGVPITKEKLAEEAHGVEQDVQGIASPLDTLVSTNGGLVYLSREKRIVRFDKPLDAPFVIGFTNKYGNTGKMVKHVRHLKDNYPELINPVISTMGKIANEARIAILKNDIDRIADLMNLNQGLLDGLGVNTYELSRMIYTARENGALASKITGSGGGGSIISLCKNSTVDNVANAINKEDSTIKVKFSGEGVLVNRRSPPFN

SEQ ID NO: 5354 - protein, 271 aa, Methanobrevibacter ruminantium
MIILKIGGSILTEKDSAEPKVDYANLNRIAEEIRQSLYSDEMSNDLIDGLVIVHGAGSFGHPPAKKYRIGEPFDMEDYLSKKIGFSEVQNEVKKLNSIICQSLIEHGIPAVAIPPSAFITSHNKRIYDCNLELIKTYIGEGFVPVLFGDVVLDDEVKIAVISGDQILQYIAKFLKSDRIVLGTDVDGVYTKNPKTHDDAVHIDKVSSIEDIKFLESTTNVDVTGGMVGKVKELLDLAEYGISSEIIDANEKGAISKALQGMEVRGTKISKE

SEQ ID NO: 5355 - protein, 350 aa, Methanobrevibacter ruminantium
MISDRKLEHLLICKNYDVSYNDKTTGFEDIELIHRALPEINNDDIDLSTEVFGKKLDSPLFITAITGGHKAAKDINKELAIIAESRNIGLGLGSQRAAIVNPELRDTYDVVRENAPDALILGNIGAPQSDLAIDAVEILDSDILAIHLNPLQESIQPEGDVDARGYVDSIKEICKTVDVPVMAKETGTGIRAEDAIELEKAGVSFIDVEGAGGTSWAAVETYRAEDRYLGELFWDWGIPTAVSTVEVVNSVEIPVVSSGGISFRTRCKLRAIALGADAVGMALPALKGAYEGQEALNQMVNRFNESLRIAMFLLGASNLEELKRSDLIIKGETKQWLEARGFDTKHYARR

SEQ ID NO: 5356 - protein, 449 aa, Methanobrevibacter ruminantium
MTVEVIAIGGYEEVGKNMTAVKVGEDVIIFDMGIHLDRISIHEDTDIDRMHSLDLIERGVIPDDTLMKDVDGKVKGIVFSHGHLDHIGAVAKLAHRYDAPIIGTPYTTALIEKQIKGERKFKVNNPIRPLNPGSKIKLSKDITLEFVQSTHSIPQAVFPVLHTSEGIIVYALDFKFDNHQKVSPPPDYNRLRELGRKGVLALIVETTNAINYTETRTYSEKVARIILEDLMKRAFKGQKEGMIVTTFSSHIERIQTIADIAKDSNREILFLGRSMERFCGIAQNLGILKLPQNAYVYGSPKAVNKALMKAEDDRDQYLLVTTGHQGEPDALLPRIASARTPFNVKKGDNVIFSAPIIPNPTNAANRHILESKLKANGARIYANAHVSGHAGREDHRDFLRMLRPKHIIPAHGELEMLVAYGELAEEEGYRIGNNVHILRNAQAQVFNGD

SEQ ID NO: 5357 - protein, 331 aa, Methanobrevibacter ruminantium
MSDVTDVLKEYSADVIKTIEENLAPVQPQNLQDACIYLTKAGGKMLRPALTLISCEAVGGNKEDALKTAAAIELIHTFSLIHDDIMDDDDMRRGMPSVHKVWDEPLAILAGDTLFSKAFEMIISSKEENAHPEHVANALATVADACVKICEGQASDMSFEGDFDVKEAEYSEMIYKKTGALIAAATKAGAIMGGADEKEVTALYEYGRMIGIAFQIQDDYLDVISDEKDLGKPVGSDIAKGKMTLMVVKALAESDGEDHERLLEILKDNDCSQDMVNEAIDLFNKYGSIDYAYNLALENVNGAKEAIAFLPDSDAKSMLIALADFVIARSS

SEQ ID NO: 5358 - protein, 290 aa, Methanobrevibacter ruminantium
MGFKDKVLSSSNQFNYYKDNYEKLLNENKQLKQKQNQLIEENEQLIKEFELNKQIIINKENLSTESNYCPYCGRISNFEPYGVVKREKAMCPYCKSLERHRLIYLFFERNYSSIFKNKDIKLLHFAPERIFYNYFTQFDHVDYYPVDIDPETYAKRGLKLKMKVNMEEVPYGDEEFDFIYNSHVLEHVPNDFKAMGELYRVLKQDGVCITVVPLSGNEETLEKEEYNTPELREKHYGNKDHLRFYGLDVKQRLESVGFKVKVSKLEDLNLTEKEIELFNVKESLIFVCTK

SEQ ID NO: 5359 - protein, 219 aa, Methanobrevibacter ruminantium
MDLPSGDNYENTTVNEAIRQINDTNRDLTVLFYNSEDNSTVARVEFEFTINDFKATATEQTVANRTVWYNEENGTYMAFLGNSVTHDNIIIITNDVEILEHLISSVKFIFLNEDGTVNSTSDMVNNQSINVTGGTASNGTDASASTATSNVSSSNSQSTGNDGYYWSGQDQDYIKEYTDSNGIQHIDRRNGPNEAYDPNTQRHYTDGVEDTAAYNQDFN

SEQ ID NO: 5360 - protein, 190 aa, Methanobrevibacter ruminantium
MIEKVRFDQIADIFTGVRVKRYQKGKGTTVERPILKKTYSENSSKLDLEYEEVSEEIHERFYSQENDIVILLAGSKVSKIEEAGIIIPMYYAVVRVKEGYDVDFIYHLLKSDIFPRELHKIEEGTTLKIIKTTHLKSIYLPVPDLETQINYGKLFNLMDKRIKLNMELAELEKQIEKSIINEMLLEEKTF

SEQ ID NO: 5361 - protein, 634 aa, Methanobrevibacter ruminantium
MSSRLGRQLWDKYEELRTNSMVGFLTDEDFQKYFLGFITYKYLSENLELYLDKELEKDDLKFEEAYNFENYGKVLAKKAIYNLGYFITPNHLFRNVIASYNQGADISRELKWAFAEINSSCKKTESQEDFENLFESVNLQATPLGKKQEDRNRVIYNILNALDSVDFGLDEFNSSLSLINHYSEPARELGVNLDALEKELLSDPNKNIFLDDSPLNESSSIPLNEAPFEEYASMELFLDDIAPVEEFDSMELSNKENIVTGLENPNHPNSLVNEGWNDRSYDSYRIQKQYSIGDAFEYLLDKFSLNASKSADFYTPNDVSVLVSKLVATNKRAIDSVYDPCCGSSSMLLELNKHVSLNLICGQEVNAYYYNISRQNMILHNIHFKDFDIKQGDSLDSPHHIGYDKFDVVVSQIPFNVSWTAKKSFLNDQRFKEYNALAPRVKAEYAFIQHMLYHLDDDGIMVVIAPHGVLFRSASEESIRKIIVSKMNYLDAVIGLPSNMFYSTNSPACVLIFKKNRRYDDDVLFIDASKNFNKIKLRNNLRKEDINKIVGTYVSRAEVDKYSRRVSLREIDENNCNLNIPRYVDTYEEEEINIQEIYKRREEASRELKEVTYEIDELCKELGIENPLINNIFE

SEQ ID NO: 5362 - protein, 306 aa, Methanobrevibacter ruminantium
MSKTYIFGHKSPDTDSITSSLVMCDLENKLGNADVVSCRLGNLNKETEFVLDYFDIEAPQLIESIEDDAEVILVDHNSPSESVDNIENAKILKLVDHHKIAFETSYPLFIRTEPVGCTETILFKLYKENGLTPDKTIASLMLSAIISDTLLLKSPTTTEDDKQAVKELAEIAQIDYEEYGLEMLKAGTDLSSFSIEEILSLDAKQIDFKDVRSIVNQVNTADIDDVMTMKDDLEAGMNKIIEDENLDLFMLLITDIVNSNSQVIALGKDVCLVEKAYGVKLEDNTVLLEGVVSRKKQVVPIMTENA

SEQ ID NO: 5363 - protein, 117 aa, Methanobrevibacter ruminantium
MSKFCPKCGCENLDEASFCLECGASLPSIEEVKERSSHGAGTSHQSTFSSNLNEENGFNQETSSFSQSNSNSNEASNSSKFKNVINEANPANNDNQDYAICCLVIFVLLLIAFLCNF

SEQ ID NO: 5364 - protein, 131 aa, Methanobrevibacter ruminantium
MEINDFGHDLDESAQFLVQKLLILHPWDEEWDLSVTANLVPFYKEKIDIQISKQGKCDEEFFDKLIRFSSILDTNQVRLLFMEQLVGMPLILDGKYLNNDERIDLLIESLNGRLKRVDNGLYLFFNHEEEF

SEQ ID NO: 5365 - protein, 389 aa, Methanobrevibacter ruminantium
MIYRKLGKTDLEVSNIGFGCMRLPHKEHFYQIDEAEASKMFDYAIDHGINYFDLAYSFHSKNKNLGGNAEPFVGKYLAERGNREDMVIQTKLPGWLVNKREDMDKFLDLQLERLQTDYIDVYMLHSLKIDFWNKLYGMDVLEFLDSILEDGRVKYVGFSFHDDLDVFFSIMDSYDKWDVILTQVNYLDEDYKSGLGGLEFVGMAGLGNVIMEPLRGGSLITNIPDEVQALWDTADKKRTPVEWALEYLWDKPLVTSVFSGMSNMEQVKENIAIAENCQPDCMSEHDRQILKDVAQVYKSREEIPCTGCRYCMPCHNRVDIPHCFKQYNIAKSLNYIDKTAAPYFWLVNKDERADSCTFCGECNIQCPQGIDIPAEMEKVFDFFHEESQY

SEQ ID NO: 5366 - protein, 275 aa, Methanobrevibacter ruminantium
MNHDELINLDAIDWEEVWQKSLKKSFKKEKNWDDIAKDFGQWLENDDYPDVLLEEMRIDEEDTILDIGCAEGTISRKLAKKAKSLTGIDKSKLMLEELNKKAEKERIDNITTIQMDINELNYEEIGDYDIILASRCLNGIYNIKNTLTTLNEIANKYVYITVFGSKSHKYKKEKCEIAGKPFKAGTDYMVLVLLLKSLGIEANVVQLECKNLKEYRDFDEAINRSVWRFGELEEDREIALRQYFKETLVKNERGNWVNPKDKTDLVLIWWKKEEE

SEQ ID NO: 5367 - protein, 274 aa, Methanobrevibacter ruminantium
MTKKIIIEDENEIDWDQLWTAKMDKKGDRGKDWSKAAEKYSERASKDNYTEQLISKMIISKEDTVLDVGCGEGSVTIPLSKEVKSITAIDATDKMLEILDEKIKSEGIENIKTIKEDINDVNLEKYGKFDIVLASRVVNGIKSPKKVFSNFNEMANKYVFITLFGPNNWKLEKDFHEYLSKEYNGAPSYTILLNLLAEMGIYANIINLDVGPVRTYKTIEEAIDNGKWNLAKFSEEEQEKLPKFLNEVLIRDNETGLLSNSEDKPDWVLLWWKK

SEQ ID NO: 5368 - protein, 271 aa, Methanobrevibacter ruminantium
MSFQIDDPEDIDWAYFWAKKLESKKDRAKDWNKAAPNFGKSAKKDDYHTKIIERINVSKEDTILDLGCGDGSITIPLAKKAKSVTGVDSAYKMLEILNENAKKEGIENIRTLEEDLSNIRVNDVGNHDIVVASRSLNGIINIRETISNINEIADKYVYITLFGPNNWKIEKEFFESIDKEYVEFPSHRYFFNILVDMGIYPNVENLNIGHKREYENIEEALESGKWRLELLDDEEKAQLYKYLEDILEEDDNGKLSNPNDKADWVLYWWKK

SEQ ID NO: 5369 - protein, 164 aa, Methanobrevibacter ruminantium
MDGRLDIDSFEKAINGLNKNLYDVGALFQANMPLLASEASQAAKENCVNKMADRVDERLDSFRENYGYYNDFYEKLKENVKNDTIENPEEYDVFLEHASNTFPKYIDELGQTIDSLSGIPIRTEKFDSTMRELGSIIENFRFDFKRTLTVADVYKVQKEMKSQE

SEQ ID NO: 5370 - protein, 87 aa, Methanobrevibacter ruminantium
MKAVSYIKRSNNRYVLVMNMNGKFKMPSEIASEMDLRINQISAVLSDLKKEDIVTCINEEEKVGRLYKLTDKGLEAYKVIKTNEEIQ

SEQ ID NO: 5371 - protein, 556 aa, Methanobrevibacter ruminantium
MDELEEIVFKHALLNAAKHKGSANPGAVMGSIMSNEPELRPRAKEIGPISGKIVAQVNAMSPEEQKTKMEELGVEVEEKKKKKEEGLPKLPGSNKNVVMRFAPNPSGPLHIGHARAAVPNGEYVKKCGGKFILRIEDTDPKRIYEPAYQLIQDDLKWLGIEPDEVYYQSDRFEIYYQYAEELIKRGAAYMCTCDGGEFKKLKDNCQPCPCRDNSVEENMELWKRFPEMEAGEAVLRIKTDINHKNPAIRDWVAMRIVEEEHPRLGTKYRVYPMMNFSVSVDDHLLGMTHVLRGKDHLANSEKQKYLYNHMGWEIPEFIHYGRLKMEDIALSTSKAMAGIEEGTYSGWDDPRLGTLRAIARRGIQPETITQLMVEIGIKMSDSAISWKKIYGLNRNLIEEKVNRYFFVPGPVKIDIADVPEDILGWEVIRPLHPDFEERGNRTLIFDKELYIPKADCKDGIIRLMDAVNVEISGEDVKFHSESFEDAREVKARIIQWVPLDAIKAKIVMDDASIVEGLCEKDCGDLKVGDIVQLERFGFARLDEIKDDELIFYFAHK

SEQ ID NO: 5372 - protein, 148 aa, Methanobrevibacter ruminantium
MDKKLAVIFIGIQGSGKTSFYKRYFPDFAHVNLDTFKKRSKERKFFNMCIEEGKSFVVDNTNPTKFDRQRYIPTARENGYEIWGYFFNSPLEESMERNNQREGLARIPRVGVLSTYKKLEVPEYDEGFDKLFYVKIKDGQFVVGELEE

SEQ ID NO: 5373 - protein, 762 aa, Methanobrevibacter ruminantium
MKEVTAILLVIIALIGIISIIIVKLYYREKEKDHDKERLEEFLNSSDYNSSIESHEKISSRQKAEGSKKPQKVQRRRRVRKVPKESQNRNENLSEAQIYANTLQNASNNDLFVDYDGDNRGAQRTRKVRRVAKAETAETTQANGTAALLRQRAEAAKAREQAPRTKVRKVRKVKSQEDTVQKVQRTPDRVKEQMNKEEKVKPIQEPITKEHKETINSVRQGESEVKPRQVPMTKEQKEFISSETAKKLIVEDDDGAVKVVKSIKPAEDIEEIKESALIEKAETTEEAKVKVTEETPKVEEKAETAEEEAPKVEEEVQTEEAPKVEAEPVQETTEEVKTEEAPKVEAEPVQETTEEVKAEETKVAEKPAEEVAEKVEAPKAGKPAEEVAEKVEAPKAEEIKEEVTKPAEEPKAEEVKAETTGEIKSDAPKVEAEPTEEPTEEIEVAEPTEEPTEEPTEEIEVAEPTEEPTEEIEVEAVDDYIEALETEGVYQDDLHILLGEEKIEDEGPENEFVTINSDRQSSSGGNDIFRDAINSIRKFRGANTQQHKVEEIKEEVVPDDYIHNFGNGIEEIGDTITITPIREDEIDDLAYNQPNEDVDEIYKEVNEEEYNKTIDSELDEAYEDVTDETSEEEANTYTVEDYKQIEKEEEEKKAREENTQKILDLKGIESKKPRSSKKESVSTEQPEDPAQKQLVFTEQRSNVEEVYINGKLIELKLGQTVMFNHNNETYSSQILKLKPGFVGVKYRGKKVWIKATDVKRVL

SEQ ID NO: 5374 - protein, 410 aa, Methanobrevibacter ruminantium
MVKINENYLLLQNSYLFVEVNRRAEKYMEENPDKDVIKMGIGDVTKPLTPTVIKAFKDAVDEMADGETFMGYGPEQGYDFLAEAIIKNDFNRWGVDLDLDEVFISDGAKCDTGNIQEIFDLDNVIAVTDPVYPVYVDTNVMAGRSGLIKDDGMYANIVYLPCTEENDFVPALPEEDVDLIYLCFPNNPTGTTLTKDQLAKFVEYAKENDALILFDAAYEVFITEDDVPHTIYEIEGAKEVAIEFRSFSKTAGFTGTRCAYTVVPKEIKIKTSTGDEQSVNALWNRRQTTKFNGVSYPVQKAAEAVYSEEGQKEIMENIEYYLENARIIRESLSDIGLNVYGGVNSPYIWVKTPNDMESWDFFDLLLEDANIVGTPGSGFGPSGEGYLRLTAFNTLENTKEAMNRISKLSF

SEQ ID NO: 5375 - protein, 226 aa, Methanobrevibacter ruminantium
MEADFSLVNENDDLQDLFSKYGALALEKQENLSKLVGDSEPELDIENGIVKFGDKEFPIQLLGFLDPDEDTWSWAWDNEEIGFPEELIEEAKEVKEFGEDQNIVQFKQSMFAASFEEAHILSMTVSSIFGDDAYCGVNYGNFVFFVTIKSDEIPSSEGPEEFSNIFNEFHRRFEVNHLKALESYAMLKGYEYKYRDDFALVKIGDNRVVVGLTERKNVQSIKFILA

SEQ ID NO: 5376 - protein, 208 aa, Methanobrevibacter ruminantium
MDSELIEEISFEIQLLLKMGFYNDEEILEIIDDEFIEEDIPKEKLLEIFSNVKENFDCPKSDSEDFLNLKEAFLNLSKNHNILTIHNAGYDIEEGIQDSFELFTHLRNNKYEVEGFCFYSFEDIEIAIEENSLLIAFGDFEFDEDKGLKIAKTVKDELVSKGFNINWDESIDERIEIVDFNWQKAYEDRDYSMDGALSDYIELNNLED

SEQ ID NO: 5377 - protein, 222 aa, Methanobrevibacter ruminantium
MNARSFEIIEEAISNGVWTWLELDCYSNSLYLEFERLQLLSKSIVNPFKPVQESTYNDYRGELAIRFGTNIYLAILYDDEDSFDFLDLEEDILNSFLNSDAKLSDNDSYFYRQFKKEIRGFKFQDEDYSSNLTKKYKKEIVLAQLPNKKDSYDFLLSFELDNFAIIVKGDIISCFNDFESLSDGDIKRASNDWILYYLDYWIKKGTEEEYDEDFLCENISFD

SEQ ID NO: 5378 - protein, 180 aa, Methanobrevibacter ruminantium
MNQLRPGYNFLATHELFFDEIPHQRAIHLANYEFFWNILDELGPFGTEESYLAFCELCDWLIDNPNTPIIECFRWILSSWDIELEDFDDKVIENENILKIIYDLDFYEDLMMLDFTIISTGFGQLILQGKIDADVKNIIQLSLLRQMNSHVLDEYLGSNMQYKYERYLYLQKLLDILEEA

SEQ ID NO: 5379 - protein, 339 aa, Methanobrevibacter ruminantium
MTCSILVGGAWGDEGKGKCITYLCDTDKPDIVARAGVGPNAGHSVEFNGEKYGLRLVPSGFVQTEAQLLIGAGVLVDPEVLFHEFDYLSKYNVRERTLVDPRCSIIEPEHKERDQASEHLAKKIGSTGSGCGPANSDRVLRTAKMAKEIPELADYLTDVSLAVNDALNDGQDVFIEGSQGFALSLYYGTYPFVTSKDTTASSFAADVGVGPTKVDEVINVFKSYISRVGEGPFPTEMSQEEAESKGLEEYGVVTGRRRRIGYFDMELAKESCRINGATQIALTCVDKLYDCARVRDYAELSQETKDFISEIEQETGVPVTIISTGPDLQDTIDLRKELL

SEQ ID NO: 5380 - protein, 394 aa, Methanobrevibacter ruminantium
MRCVGTVVRGIRTPIIKENDDLATIVVDSLMAAKESEGFEFRDKDIVAITEAVVAISEGNYVTVDDVAEDVAKKFPSKEIGVTNPILSRNRFSIILKGIARGMDKITLLSSFPADEVGNGILDERALDESEFNLGSVITEEDYEKNFSSWIHPFTGINMVDFYRELIESEDCEVEFVFSNDVKTILDYTNDVLTCDIHTRKKTTKMLKEKGANVYGLHEILVEPIGDSGCNPEYGLLGSNKATEERLKLFPKTGDKLVNEVQKRLIELTGKQIEVMVYGDGAFKDPVGKIWELADPVVSPAHTAGLVGYPNEIKLKYVSDNQFADLHGDELKEAIKEEIRQKAENLTGQMITEGTTPRVLTDLIGSLCDLTSGSGDKGTPVIFIQGYFDNLAND

SEQ ID NO: 5381 - protein, 127 aa, Methanobrevibacter ruminantium
MKDIINPNVEIPDEQVAMAFFRSVRWVNGVYCPKCKSYNVNNRGNQGRTRRYVCKDCGSNFNDFSGTIFHKSKIPLNVMLYILFNLDEKTTTQLSEELGYSRQCISRISKLFRDKLLSNPEFFDIEE

SEQ ID NO: 5382 - protein, 315 aa, Methanobrevibacter ruminantium
MDKKTLAIIAIIVIALVAVGAYFATSGGSSDNVVRIGHLPSDHDTALFVAKEKKLFEDQGLTVELTQFNNGGDLMTAMASGDIDIGYAGITPVMSSISQGVPVKVVSGAQIEGSAIVANKNSGITTVADLKGKTVATPGEATIQNMLLTSALTQAGVSTDSVEFTTMKAAQMTDALKAGQVDAMIIWEPYSSIAVKNGDGVLIENSSEIIPGHPCCCVVAREDFIKDHRDSLDKVLKAHEEATKFTNENPAEAAKMLPEDIVPDQELQAKVIADTVFISGLDAEYKQKVMDFMALEVQLGLLKQPLTEEQIFADL

SEQ ID NO: 5383 - protein, 247 aa, Methanobrevibacter ruminantium
MEIKKKFLPFILPAILLIIWYLITDGLHLIPYYILPSPLNVFNAAWTLITNGKLFMHTSSTLIKVFSGIILASVVAIPLGIILGWYETLDRLSSLIISILRPIPPISWIPFSILWFGIGLSSAVFVIFIGCVFSVLVYTIDGVKRTDNVLIEAAQTLGANNWDILLKIVLPSTLPYIVSGLKVGVSIALMCTVSAEMIASSRGLGYMILTASQLFQPGTVVVGMIVIGIIGILFDYGFRKAQERIFW

SEQ ID NO: 5384 - protein, 253 aa, Methanobrevibacter ruminantium
MFILAIDIKNVSKSFVTKDKDFMALKNINLHVDDGELICLLGPSGCGKTTLLRMVGGLEKPDEGEIYDRGELVTGPSKDRGFIFQQYSLFPWLNVLDNVMFGLNLNKDTSKEENLAAAERYLERVGLAEFKYSYPHELSGGMKQRVAIIRSLLNHTPVLLMDEPFSAVDMLNRHSLQEQLIGVWKRFNTTILFVTHDVDEAVYLADKIVIMDKNPGRIQDVVEVPLERPRQRESREFLDFQDEIEKLLGVWEP

SEQ ID NO: 5385 - protein, 266 aa, Methanobrevibacter ruminantium
MIGLSIAGFDPSGGAGISTDMKTMAAHGVHPCSVITALTAQNPKKVFSVQAIETSYIRQQIDSIFDEYPIKYSKTGLLYSKEIIQLVSKKVEELNLRIVVDPVMVASSGGQLAKKEMANSLKKYLLKNALLVTPNVKEAEELSGISIKSIEDAKEAAYKIGECCNVMITGGHLDGNNVIYNKQKDELSILKQNLIKTDNLHGTGCSLSAAICANLIILNEKDKDSKDENNLEIAIERSTKFIYEAVKKGRYGTLNPNFNSNLDFLK

SEQ ID NO: 5386 - protein, 234 aa, Methanobrevibacter ruminantium
MDKIYAIIPVNQFANAKTRLSPFLTPEERRDLLKAMLKDITDTLKPIVDKVVIISRDEEVLAYAEELELTTIVEEEYKKSKAVNSSDDNPLNKALKQAMKWSRKKTRKVIILPSDIPLIGKTNVKLLIDQAKNFDFIIVPSKGGGTNTLIIKPLAIDMKFEGFSFNKHIEEAKRKKLVPIVHDSFYMALDVNTTEDLGEIMLHGNGTETKKYLESLGIKVESSHDHERLKVTRD

SEQ ID NO: 5387 - protein, 468 aa, Methanobrevibacter ruminantium
MENFSEWFHEILEKAEITDSRYPIKGMSVWLPYGFQIRRACLNIYRDLLDSEHDEVLFPLLIPEEELAKEGIHVKGFEDEVYWVTHGGQKELNEKLAIRPTSETAMYPMFSLWVRSHIDLPIKQYQVVNTFRYETKHTRPLIRVREITTFAEAHTVHSSPEEAAEQVETGIEIYKELFDEMGIAYLISKRPVWDKFPGAEYTMAFDTIMPDGKTLQIGTVHNLGQTFAKTFEITFENKEGNHEYAYQTCYGISDRVIAAAIAAHGDEKGLILPPRIAPKQITIIPIIFKDGGEEVMAKCLEIKKSLESKGIRVQMDTRDIRPGKKFFDWELKGTPLRFELGPRDLKNNVAILGRRDTGEKIEISLEDDLPSKVEDLLMEIEENLKAKSWKAQEDKLITLESLDNVGEIVDEEKVVKFYWCGEEECGKEIEEETEVDILGINEENIKTDKICPHCGKPAKHVALMAKTY

SEQ ID NO: 5388 - protein, 347 aa, Methanobrevibacter ruminantium
MDSKKIQMPREVHIGPNVLDEVGEICKDLRLFDEALVVSGFHTFDVAGQQTVDALESSDFGVDVVKVKDASVESVEKVREKIANASVVLGVGGGKIIDVAKLASTYEHSYFISVPTTASHDGIASPMASIKNDKGSISKNANSPMAVVADTGIINTSPFRLIASGCADIVSNYTAIKDWRLAYRLRNEKFSESAAALSEMTAKLIINSSDSIKEGLEESARIVVKSLFSSGMAISIAGSSRPASGSEHLFSHALDRIAKKPALHGEQCGVGTIMMMHLHGGDWRAIQSILKTIGAPTNASELGLDDDEIIDALTIAHTLRPERYTILGDNGLTRDAAIKLARKTEVI

SEQ ID NO: 5389 - protein, 146 aa, Methanobrevibacter ruminantium
MITLIGKKLAKEGESFIFYEPAEECSTCRFKASCIDSLEEGHKYTITEVRDVEQKCPIHEDEKVQVVVVEKGETTILTDSKGVFEGSSFEFNRQGCSNKDCDFRDMCFPEEIGKGEKCVYIKDLGKFNDCPRGNSLIKCVVKIYDK

SEQ ID NO: 5390 - protein, 222 aa, Methanobrevibacter ruminantium
MSQMKKDCGYAAAELVKDGQVLGLGTGSTTLYFIEKVGMRVRDEGIEVMGIPTSFQSSLLARKWNIPITSLDEHEIDLAVDGADEIDPDFNLIKGGGAAHTIEKIVDYSAKELVIIADDSKLVNVLGAFPLPIEIIPVSLNPVTKALEDMGGEVNIRMGQAKDGPVITDNGNFILDVSFGEIDNPISMEKELNTLPGVVENGLFTEMVDKVIIGSKDGVKYL

SEQ ID NO: 5391 - protein, 444 aa, Methanobrevibacter ruminantium
MKVVIVGGGAGGISTASNLRKLDEEVEIVVLTRDNQVSYSPCAIPYVLSDRIHSFDDIVMRTVDDYKAKNIDVMLETEVTGVDSAKKQITYSKNGVVQTMNYDKLVLATGGSPFVPPMKGVDLDGVFKIRTLDDGKQVKEWAENCKSALVTGAGLIGIEIAYAFKKMGLKVTLCEMLPQIVPRSLDPDMAKILTDYLIEEGIDVVLGQPITELKGEDGKVKKAVFEDGTEADADMVILATGVRAELNLAKMAGCDCGRWAILVNDRMATTVPDVYAVGDCVESYSAILRSNTVSQLGTTAVRQAKTLAQTLAGKRSRFNPVLNSMVSKVGKLEFGAVGLTRSFAQQNSIKAVVGKVEALTRARYYPNAKPMNVKVICDADGTIIGCQIIAEERVAERIDTMTLAITQELTCFELSNMEFAYAPPVSMVTDPLVIAVEEVSKKFN

SEQ ID NO: 5392 - protein, 691 aa, Methanobrevibacter ruminantium
MTKIFISCALPYANGPCHLGHLRSTYIPADIYARYNRMAGNDVLMVCATDEHGTPIAVKADAEGKKPIEVAKRYHDMIARDIESCDISLDNFARTSDELHYKISQDFFLYLYEKGLIYEEAIQQLYCENCEKFLPDRYVEGICPVCGAEARGDHCESCGRALEPTELLEPHCLTCGNTPVIRDSTQYFFKLSHFQNQLEEYITTNEYLPPNVRNYAQNWLKEGLEDWIMTRDMKWGIPVPLEGAKGKVIYVWGEAFIGYISSAAAWSRRTGIPWEDYWDGHVVHFIGKDIIYHHSLFWPAMLMGHDCKLPDDIFAGEFLSLEGRKMSTSKNWVVWVSDFVKDFESDLLRFYLTISAPLNKDTDFSWDDFGRRVNDELADIIGNFLHRTFTFTHKFFDGKVPEYANPSEEDLEFEAEIKELPAKVGELISSMKFREGLVEILKTAKSANKYFNDQEPWKAVKENPQKASNCLYLSNQFCKSLAILLKPYIPNKADAICDIINISKENVWDDASIFLENGHEINKAKPLFKKIEDKVIEAQKEKLYANLEDSEETKDDKDNKKDKKDKSNKNKSNKDKKDKSKSNDGEKMDLISIDEFAKVEIRIGKIVEIEKIEKSNKLLKTQIDIGDKTIQVIAGLGKRYAPEDLLGKKVPVVTNLKPAKLMGELSEGMIMATESAAILTPDDCEIGELLM

SEQ ID NO: 5393 - protein, 525 aa, Methanobrevibacter ruminantium
MDESLMITESEKFLNQIEREKLDLTNLKSDFSDLESYLEVYELLKSNFDKLQDMKESMDERGYTAPFRSLNRYGSRVSEDVDYEELGELNRHNTIFRNNASAKKNSFDRVKYAIAAHRIALGNLEEYAKIRCKDCQKSYKVSTFLENSKTCKCGSTDFELKVNHSGIHRLEIIPYLPLSGNYMVLLSSLSGWGRDSFRRILNILQQKRKGVVKTVTPIIRIKENGRTITKRVNLDSEFADCYEEELRRIYGKGVRIERLEFHSTKPTIVNDKYTRTNLALAYVKHAEDIVSRHEEEIFEENIKDLNNLKTYDELIYSVNLEKPEYMDEDDLDSWREQKIQDNLLELGLMDKYGHLDKQLKKDLKERERIKSKIFADIAPTLILWDISKYYLCTSYDRRKRYGSPFPFIRNDLDRQQRKVFANPHANVVGLLREKEKKHMIAIDEMDLLLYKKFKLEKRIKNTNFKLNYAALGPAIVFANSDYNIKEVSRAYKVGEKSVKREIMNIKSFRKPNSKKSREFLGKIKG

SEQ ID NO: 5394 - protein, 235 aa, Methanobrevibacter ruminantium
MSYDFDDFDEDFDDDEFDESEDYDDFDEDFEDDFEDDFEDDFDDFDFDDDFDNLDSKSKEDIDIFDEKPLETDSGYERTAVEVHVSSPLSSRKLVELMDTYPSLKRITCPKSIYDRMSSKYIKILKEDLNITVEIKYNWGKKKYTKKEVDSVIELFNEGKRSGEIASQLDMPISNVNYIKSKYSDRINVKHYKKKYDDECRLRIKSMKEDGLKPKEISQNLGIPVRSVYYILNKK

SEQ ID NO: 5395 - protein, 4929 aa, Methanobrevibacter ruminantium
MNNKTLFIIGLFICLLFTIPMVSAADADSNLIDNSVIGTNINSQAITTSDASIDHSSNANAINTNINSDDIVSNNNNNNSIIDINDSDIESQKDGSSKNIIKSTNKNTNDSNNETEDNILVTDINLGKNNKNSNDKNILSANALTADGTGTTFGDLQYIIDQDTTGTITLDKNYKFESGTDDAYLDGITINKAITINGGNHTIDGDHLARIFNINTGSASDIVVLNSIHFINGMADGSGDNANGGAIYIGSPTTLNYITAINCTATGNGGAIYAHADGTNIAANYLYLYNNTAVNGGALYVYGNDYTVTVVDARYNSASGNGGAMYAYGNSFHLNKVNFINNTAYGEDSEGGAIFFAHNSDDSIVNNSYFANNSANRDGGAIVWDQGAHFGELYNSKFYNNTANHSSGAVRWSGENGTIDNCSFIDNKAYGTNLEPGDFDQGGDQILGGNGGAITWLGSVGIIRNSNFTDNYAEANGGGMFLIAFDINDPNSICNDTHIINCNFISNDAGLNGGALDWDGKAYNGSVSGSKFYNNTAARSGGAIFWKGNGGIITQSDFKYNSANGTHLVQPEGFLTPGGNGGAVIITGSDVNITYSNFTNNSARARGGAVYLQLNNNTMVLNSSFENNSAGTNGGALDFYTGAENGKVINSTFLNNTANRSGGGIYWNGEKGVINGSIFYDNKALNQGTYVNGSQITDGGDGGAIIWTGSHGTLENSTFKNNNATNRGGAIFLEKHNLEDPNDYCKNITVLNCTFEKNSAGTNGGAIDWFEGAENGRIINSTFTENYARRSGGAVFWNGVNGTISNSTFTLNEVGLEGADTGTGETIPTGDDDGGAIKWTGANGLIENSIFRENKALEGRGGAIYLENNENGTVNNCTFELNSAFTNGGAIDWHEGAKNGQLINSTLTNNTAGRSGGAVYWNGHNGTINGTNFTDNKALGTHHTEGQTEGGDGGAIIWTGSYGTIELSNFHNNSARWRGGAIFLQKNVHEGEEHCYNTTVKNSYFEENFAGSNGGAIDWSAGAMYGKLINSTFINNTAERSAGAVYWNGLYGEILNSTFENNTAIGNFTHDVRPEVDETYTVIGGNGGAVVITGSHAKIDGSNFTFNTATRLGGAIFFHDNTNGTINNSIFTNNTAGLNGGALDFYEGARDGQVLNSTFINNTAKDGKGGAINWIGTNGTVDGCDFINNTANGSDDESGAGGAINVDGINTYIANSTFTNNSCWDDGGAICWNGDLGKIYNITCFNNSAIGKDHKSSGGTISIYGSNLTMDKVNITLGTVSSVNDDKVSKGGGIFVTGNYVNITNAEFTNCSALAPIDDSSAGALYIIGNNTNVVNATFKNNTAYEDGGAVYILGENCTLNNTLFLNNVAHNDGGAIQWDGNNGRIYNLTADGNYADSASGSSKGGTLTIEGNNTVIQKINISNSYVDSDHDLGAGKSTQGGAIFLTGNDCNITDAVFDNCSVKYVADESSGGAMYIIGNNTNVVNANFTNNSAVEDGGAIYIDGDYCTLNNTVFINNTAHNDGGAVDWEGNYGHVYNLTAIDNHADSAHGSSKGGTILLEGGHCTFDQLNISNSYVSGETYTGTKPVQGGGIAISGNDCNISNSVFDNCSVRYEGTNSSGGALYIWGNDTHIANCNFTNNSVPSDGGAIYVGGSDVTVVDSNFIDNNASQSGGAIFLTDNKNSQINGSTFKNNSAKVNGGAIDFYAGAEDGLVSACEFVNNTAGASGGSIYWEGTRGVIEYSSFDGSRALGNQTSDANNGRGGSIIWLGDHGTIRGCDFNDSQSAKEGATLYVVGDLIKVQQSNFTNSQTNTSGGIYIQGSEGTISNCHMENTTAKESGGALYVKGNYIYLLDSDINNATSVNNGSAIYITGNTTHIENSNVTNCSSSSGNGTIMIAGYKTVMDGVNVDNNKAVSAGAVLISGSQTKISNSNFTHNNASKDAGGIMINGTDNTITTSNISDNYAKENGGGIYYTGDRNTVSYSNIDHNSANNGANVYMAIKAKDCKLIGSNITNAKARNFGGGVEWCENSENGLIQDCYFYNCTSTAHGGAIHWYPGKYGVIDNCTFVECHVAGTKNGGAIYAGANTNVKPVGTVLSNSTFINCTTGTRGAVNWNSQGGLIYNNTFINCGVANTSVTTSWGGAQALQIEKGNNTQIIACEFYNCSGIGGGGALRVQGDGHSGYNITIANCTFDNCNNTGLAGGVYLSDMARNITFENNTFTNNSAPNVGAFFMDPKTVIVSFVNNTFINNSATGSSGYAGAAQLTGNLEVINSTFIENSAVSKAGAINAVEDYDGNNNLAIIGSTFQYNKAKEGSAINAINLDMTDTVLLENQAAFDKWTNQRNSRANGHVSINGTFVGKDNYLNGIKANGATFDNVTYCGVNGGGLYEDTVTNTDDVTSAKSTNEVHQLIVLEIYDYNNNLVDTKTTFTDENGKFNFEFDMENPQDYSYKVIHPEDNYYTGAEYSIGKAISNITIKSQNITHPEDENITFKVTGGSGTPTGNITVFINDTEGNVIFNDTIILNSTGEAKLFFPRLNASEYYIEAKYNGDNNYLPDNDTSIFHVNMAESFIKIGIENYTYNETRNITITVPYIESGRISVIVTNENFTQLYTVYVNEGTEEVQIQLPILDAGVYDIEAIFHGNNNYYPSQNTTNFTVFKAASIINITADNVSGGVRETVDIHIDPEVATQNINLTVYDAQGNIVDQYYDLGLHDSRITQILTLLPKGKYNVTVTYPGDKNHNASSNSTIFYVTNDLFPIEINATNMTYGDDQIINITVPANADPDKLYININCSDWPGNKTVTELGLTIDENGLIQIDTTNTNLFANKIDAGNYTINVYYPGDDDFLSNSSSVDFEVAKAIPEMNVTPTNITYGNLEDILVEIAQNGNVTLYVTSENDPTLNITKIEVEIIEGKVYWNVNDTYLPAGEYMVEAIFNGNRNYESVNKTEKFNVTKAIPNIVIDVDDIHVGDSEYINVTVEGVEHGTTPQGNIKIIVRTIDQIVELNATGQYNLTLDDEVQGNGISVTVIYYGDDNYNYTEKSVYYDVTKKETSINVTGATPISYGTIENLLAEVNETGVTGTITIYVNSTVDGFINQTHVATITVDDAGKATWDIDQIILPVGSYDVTAVYSGDDKFEGSVSTVKVIVVEKATDYDISVEANNTVYGTDQVIIVTVPDNANGTVTITIEGTEISLTSQVENGKAVFTIPNDLVDFLEVHDNYNVTATYNGDDKYAAGVKASDLFNVTKAESHIKVVAEDIDYTQIENITVILPDFNATGKIVITIVNKSDTTQIVRTLEVDPFTNTTGVIYPFEGLLVGNYTVKVEYSGDHNYNNSENTTDFEVRKVDPTLTENSPDIIYGADENITVTITGATGGVDPTGTIQVIVDGVTIDTITIGDKDLEFIVTKPGVDPQHNITVIYSGDSNYNPVTITGEFAVTQNNTIEMEEVSPNIVYGNNEIITITLPNDATGTVYLVVNGTYYTPIGIDENHQAVFTIVAPIVGEYNFTAYYSGDENYTANNISGAFNVTKADVSLSESHTATITYGANDTITVTITGVEGPEGVLAPTGTIKVLVDGEEIGNVTIGDDLVFNSIRPFVDPQHNITIIYSGDNNYNSKVIDNTVLDTLVFEVIKNNTLEISEDSPDIFYTENETITVTIAGDATGTITVTVGGEQVGEVVTITEITEDDKVFTFNITKPEGGVYDDLTVVYSGDSNYDSATINGEFTVSPIDPNITEDSPDIVYTNNEVITITVPEGATGNLTVTVKNSKGDTVETKKLVIGTDDLVVTIEKPAVDNYTFTVDYTGCTNYTEKTITGEFKVTKASNEITVVSTNITYGQTETITVTVPEGATGNVTITVGTYTDMLEIPEGSTEVVFTIPKTAADELLSVSDNYIVFANYSGDSNYESVVANAPFHVDPANTTLTIEVADITYGEDEIINVTVNGVTGGDIPTGFVTIKLNGTDIELTKPVDSEGKVQFNVSGLVVGEYTVNATFVSSSINYNDSNNTAKFNVTKADVKEANMNITAINITYGDDETITVILNETNITGNVTITINGTEIETKELVDGKVVFTVPDLEVNGYNVVANYSGDHNYNAIPIGANFNTDFKVDKANVTVVVTPVDIIYKETEEINVTVTGVFINDNVNDNLTGKVTIYIDGVENQTKDISAVDEYGILHFSVEGLAVGTHNVTAVYHDDRNYNDNNATEDFEVINALPEDMKVIPQNITYHIQTETITVDLGEVLNGTVQLYINDTLVATFEVIDQRTVSYTNNSLAVGNYTAKAVFTANGDFVNASANFTVSKAPVTVDVVAEDSVYGETQTITVNVDNTVPDKYNLTGNVSITINGVDYGNKTVDANGQAVFEITGLEANDNYQVIATYYNDPNYLDNTGQDTFKVSKADVKDVNKNITAINITYGEDETITVTLNEDNITGKITITINGTEIETKELEDGKVVFTVKDLEVNGYNVVANYSGDTNYNAFTIADNLNTDFTVGKANSTVEVEAIPSIVYGNNETITVSVPIRNHTGTITLTINGSDYVFVKHLTAEDGDTIVLTNVSGLAVGNYNVTVKYSDDRNYNDSEASALFEVTKATPSQITVEAQNITYTEDEIILVTVADENATGSVTITIDLGDSTYTNTTNLDENGQAKFNVTGLVVNHYTVVANYSGDANYTGQTASAPFRVDKAASNVTIDVANITYGEIEYANITIPNYNASGRVIIKVDDKAYDILPINNNTPVKLELDGLAVGTHTIDVEYFDDDNYNKSVAHVEFNVTKAIIPVDPANASSLIVLPTNITYLNNETIVVSVGANNATGKVTITIKDKDGNPVDIDPSVVTSKNITEEGSQSVTFTVPGLAVGNYTVEVDYTDDANYENAQTSAKFIVDPANSTVTVEAVNITYLDNETITVTVPITNASGTVVIKINGTQKDERTVS

SEQ ID NO: 5396 - protein, 2719 aa, Methanobrevibacter ruminantium
MEGLAVGEYNVTVEYSNDPNYNNSNASTLFHVDKANIPDVPNTEGLVVIPTNITYLEDESITVTLDVPNATGKVTININGTDIETKEIGGGTVTFTVSGLAVGEYNVTAKYTDDPNYNDVNASALFNVSPAASNVTVVPTNITYLENETITISVNVTNATGTLVVKINGTEVNTTTFTGEDKPTIVVTVPDLAVGEYNVTVEYIDDPNYNNSDASALFHVDKANIPDVNPDTGIVVVPTNITYNDDETITVTVNVSNATGKVTIKINDTDIVLSKNITEDGSQTVTFNVPGLVVGDYNVTAEYTDDANYNDVNASALFKVEPAASNVTVVPVNITYGENETITVSVDINNATGNVTIKINGTAVELTKNITEEGSQTVTFNVPGLAVGEYNVTAVYHDDVNYNESNASALFNVKKSAPVNLTVTATNVTYGENVTVTVTVPDDATGNVTITIGDYTDKKEITPGSNTVEFTVPNLEVNNYVVYANYSGDSNYESGIVNAPFHVDKANSTVIVEATNITYGEDETITVTVPNNNATGWVTVSVNGSEIGSKKIGTDGKATFTVKDLEAGEYEVTVTYDGDRNYNGNNNLTRFTVDKANITEDNITVVPTNITYLDNETIAVTIGVNNATGIVTIKINGTNIELSKNITEDGSQTVTFNVPGLVVGDYNVTAEYTADHNYNDVNASALFKVEPASSNVTVEAVNITYLDNETITVTVPITNASGTVVIKINGTQKDERTVSGDNPTYNITVGGLAVGEYNVTVEYSNDPNYNSSNASTLFHVDKANIPDVNPDTGIVVVPTNITYNDDETITVTVDVPNATGNVTIRINGTDVELTKNITEDGSQSVTFNVPGLVVGDYNVTVEYTDDANYNDVNASALFKVEPAASNVTVVPTNITYLDNETITISVNVTNATGTVVVKINGTEVNTTTFTGEDKPTIVVTVPDLAVGEYNVTVEYTDDPNYNNSDASALFHVDKANIPDVNPDTGIVVVPTNITYNEDETITVTVDVPNATGNVTIKINGTDVELTKNITEDGSQSVTFNVPGLVVGDYNVTVEYTDDANYNDVNASALFKVEPAASNVAVVPTNITYLDNETITVTVDVPNATGMVTIKINGTGVELTKNITEDGSQTVTFNVPGLTAGEYNVTAVYHDDVNYNESNASALFNVKKSAPVNLTVTATNVTYGDNVTVTATVPNDATGNVTITIGDYTEKKEITPGSNTVEFTVPDLEVNNYVVYANYSSDSNYESGIVNAPFHVDKAPSHVEVDGIDINYTDLETITVTVSDNNATGFVTITINGTDIELTKEVSAGQAVFDVKDLVVGEYNVTAVYHSDRNYLNSTASDTFKVDKSDVKNMTISPVNITYGENETITVRITDNNITGNITISVNGTEYGPVELDNGVAVFNVPGLIVGDYEVTASYSGDSNYNPASSTETFTVDKEKPNVHVVSENIDYGKNETITVIVDGFNVTGNVTIKINGTEIATKEINDKGRAVFVVPGLQAGEYEVVAIYNGDDNHESSEGSDTFTVATVTPNMDVETEDIDYGDNETITVTLPKDAKGSVNITITDENGTVVYEGEAQLEDGKATVDVPGITPGPYNVTVKYPGDRNYNPTNKTVRFNVDKVVPDVDVDTVNIDYGDNETVTVTVNPVDGGVTPTGSVNVTVRDSDGKVVYEGNVDLVAGKATLDVPDLGAGDYTVDVRYGGDSNYDDSTGGSSFNVAKVSPDMDVQTEDIDYGDNETVTVTLPKDATGTVNVTIKDNDGNVFYEGEAELKEGKVTVDVPGLPAGDYTVDVAYGGDDNYNPVNSSDSFSIDKVSPEVDVGTENIDYGDNETVTVTVNPVEGGSAPTGTVNLTVKDSDGKVVYECQADLVEGKATVDVPGLPAGDYTVEVAYGGDENYTATNSNGNFAVGKVNPDMEVDGEDIDYGDNETVTVTLPKDATGTVNVTVKDSDGNVVYEGEAKLDDGKATVDVPGLPAGDYTVEVAYGGDDNYNPVNSSDSFSIDKVAPEVDADTEDIDYGEDEPITVTIDPVEGGSTPTGTVNVTVKDKDGNVVYEDQVDLVDGKVTLDIPDLDAGDYTVDVAYSGDENYTARNSSGSFTVNKAKPELNVDSEDIDYGDDETITVSLPEDATGTVNITITDKDGKTKVFNDVPIENGKATISVPDLDAGDYNVTVDYPGDDNYLGSKATSSFKVVRSNSNITLETENITYGDEEPITVDVNPVEGGVTPTGTVNITITDKDGNTKVFNDVPLENGKATVDVPDLAAGNYIVDVKYSGDGNYDPDSTEGAFEVAKAVPHIEIHVYDIYYGDVEVLTVTCDAPGTVDITVNGVTVTVPLDDGYDKRVFSSIVRAYSGKATLDLVNLAVGTYPAKAVYNGNENYTSVSDNDTFHVYKENTTTKISVDDIKLGEDAVIDIEVTHEDGSEKINTNITVTVDGKDYTVELIDGKGTLTIPDLDLGKHTVKAVYPGSHNYTNSSNATSFKVTKVTPSFDISTENIQVGDDETVTVTLPDDATGTVTLTIDGKEYTATVENGKATFVIPGIKAGEHKVNVAYSGDDKYAPAKRSDSFTVSKVKPDMGMDAPEIKVGQDGVITVTVPEDATGTISITVDGKTYTASIKDGKAVFHISGLGPGTHIVKAYYSGDGKYLAGSVDGTIVVEPKNGTSPQDKGKAHGGIDLESKKTGNPILVLFMVLFSLILIPIKRRRDDDEEEENEDQINRID

SEQ ID NO: 5397 - protein, 341 aa, Methanobrevibacter ruminantium
MSSLISIPTLPLIVIALICGILSFISTRLVMPWLIGKLEQAEIIGKDIHKSSRPIVAEMGGIGIIFGFIIGIFAGIILFPVLTFQLVVVLLVVLLVGIIGMVDDLIVLSSKEKLFLLFLAGIPLWWVAPPNVGLLYMIMIPIAVSITSNLTNMLAGLNGIESGLGVISMTSLTISCIILGKYDVAIISMTMLGTLLAFLYYNKYPAKVFPGDTGTLIIGATIAAIAFIGRVKLIAFIVLLPNIIDAALKFYSAGVMERQQHNPTQLNEDGKLVRPEQGFKSLIRLVLRKPVDEKTAVMMIWGIGIIFGILGIIVALLMPGVTHDQTFAQFIHLKDYFYYLG

SEQ ID NO: 5398 - protein, 46 aa, Methanobrevibacter ruminantium
MARPISPTPTLYGEDARRFLKKMNEPPTEKEKKFWKEVESQRFVPF

SEQ ID NO: 5399 - protein, 74 aa, Methanobrevibacter ruminantium
MDSQYIKDNYYFETLNESHNLNNFYCEDEELNEFLKEDALKQQKQKLNLTKLIICDDEIIGFVSLLRWNKNKRY

SEQ ID NO: 5400 - protein, 168 aa, Methanobrevibacter ruminantium
MIKTDNKGQITVELLLLLSFTFISIIALTNIISDANEVNIAMAAARNGAFEGASSNGLAIYPKDTFDNYSKDKRKEGLFNMKNIKIIKIAQTFKGKDNFNKTRIQLKVYASSKIIKTKEEKESAGDRINYNMRRAITNSFKTENISNRLFNPAFSDSYSFTTANVEWV

SEQ ID NO: 5401 - protein, 154 aa, Methanobrevibacter ruminantium
MDSKGLINIELLFCTIIIVMILIVNFPILEHSIDSANDMDENSQGRFLLNSISTSIDQVNSNNEGFSKKIKLPQSVDGNYYTILVSSNEIILEFNNKKGKAKIQPINLVDSKNRTLSKAQLYNGGSYIIKKTLTNNNESHIYNQSSIIIMQVEG

SEQ ID NO: 5402 - protein, 447 aa, Methanobrevibacter ruminantium
MVIVSYLNPLSSEGQNIVRGLSSLDDIFAPNDDLIDIVIHSPRQTISNQEYVPETLADLAINRIKWYIDKKNNKDFNPSNYAYFFNEEIAEYDTIAFHILAQAVASQFRAGSREIKLFVESYGLLVEDRLIRLLETEKRELVEEILGDFLVQDGIEWAFLKDLVASKRISLTDLVLDNGKIVLDREEFVYTFGDEFTDRSPERIYDILIGDGLKEMIVSKLLIQKSEEYVAHIQDMLRTIEPHPAIVRLGEMLGETITELMTKYSSFYAAGGAYGNMEIGKLVREAFPPCIANTVEGVSSGGRNDAIVLLLTSFVSYARLYPGIFGADASVKVSDIDSNLNITMNEILPLIYEAADNCTPPLFEDQPQEKINITSKLGFGMHETPELEHEGETKWYTPMSCEKIKMHLPQLCKENKDCAKINNPLSYYSRMRWILSKKGGESKSEEE

SEQ ID NO: 5403 - protein, 827 aa, Methanobrevibacter ruminantium
MLNRKALIFSLIVLFMLSISAVSASDNTFNEGTGLNEDIADLNDFSDLNSNFNNGLSSNAVHGLDDDSNNNLSSENMISSSDDEKQDDLEGSDSDSIKDNLNSNSIKDQNNSNSSTADKSNTKIQTKISAKDINTYYKEKSSLVLYLKDNKNQALSNKTIKLSLNGKTYAQLTDKLGKASFSLYGLKPNSYDAKIEFYGDDDYKKSVRTVKVNVKKVDISINTKDFSTYLNSNIFFSVKVLNKLTKSPVEGIRIQFNVYSSQKNYKNYYALSDKDGIATLKKNLKLGSYDVYTYVKDDGQKDYINYRNTKNKVSIKISAPGEMGCSSIYIHVNENESAVAFRRDSTYAADLYIVAQKWHGRNAVKQYKLTGTYFFHAIVTSDGWLVGTGGADNPTINKKIESLAGQMVSSNNIQNSKLNTIRKYERSLGIGHFAIVDPKGNYAIVWKSGYVKGKLKNGQYIDVPNSRGMFRKGSYKSFSKDTATAALRIAATDRFGVNRRDITVFHYKRSTKNYQTSAQVKAYAANDKGNLAGRRTGGKSDNIHYKKTYISRSKLPGTPNKKLLGTHSFGKIDTLIKTQTKVSAPALTANQNQTKYFKVTVRNKKTNKTLRGVKISLKVYTGSKFKSYAVTTNKSGVANFNTKALSAGTHNVTISQANHKYIVSGSSKIVIKTVKKNNTVNSTNSSVVNGSGVNGSSSSNASVNNASEPINNSTTDNSSENNGSAGNSSSSDSSVGNGTASDGYVGNGSSSDSSVGNGTASDGSMGNSSTSDGSAGNGSNFASVLDVSAAINSDSNVGNDSQSNSKTETKLSSMKTDILTSFIKLIN

SEQ ID NO: 5404 - protein, 97 aa, Methanobrevibacter ruminantium
MNMSFEEYAVMAINHHIEERNKYLKKEIKAKEEEIQAIDEKIQAKEEEIQAIDEKIQTKEEEIQAKEEKINKIRKLFKDFCENEDEEAMNTIKSILL

SEQ ID NO: 5405 - protein, 368 aa, Methanobrevibacter ruminantium
MVNLKKLNQISTENNNTVSYYETEEGKVYKVLVDENGELKKIACEEFPFEPAKQFKKEKINKVHDRIFKFIAENNIQAFLNVFGLKHIIFKQFLNVEILDQTLNQSYCDLVIEAEDGKIYIIEFQSSGPAKKDKIRFGDYQTTLHRKKKGQKVIVIMITINDDPDNDEPYGYDKEYRYRINKRSTTCFNTEKVIKELEFKAENDCFDDEAYVKLQLLYYMESNGDERKKLLKKGVEIKNKIKNLSTDRKVGLTLIYMALAVHNFEEEELERFKEELKMNMSIEEYAVMGINHHIEERNKHLKKELEEKDKEHKKELEEKDEEIQAKDKEHKKEIQAKDEEINKIRKLFKDFSESGDKKAMNTLKTILL

SEQ ID NO: 5406 - protein, 163 aa, Methanobrevibacter ruminantium
MLSEEELRRLIESLTIREIIEPALDNWTRYESTGKTVIDLKSGRVYGISLKSNELLELDHDNNHIELYKIESHEDLFDEEDLLSEDEYNRFQEFKDRKELEDEDFDDYDPELLSEFCMMESIDEKERIISILIEDYQEYHFNNYQDFEHSIILNYYDEDDYTY

SEQ ID NO: 5407 - protein, 330 aa, Methanobrevibacter ruminantium
MYGPSSLAERRIYYREEWSDKDLPDFIAQGITKREFGFDHLGNGPNDRYKVFKGTDTLRRFLRYKTPFAAYISVAFYQNPRKRGGWEKAEYIFDIDAKDLPIRSCNCDGVCEICLGEALERVNIMLDTLKGDLGLKNIHLIYSGRGFHIRILDPDMMEADSDLRAEVLKYVAGAEVPRAQYPNIVPGAKPLNFEHFSIPIAYPAVFTNKVKYNIFHLRGDETIDGINNRLLKDIIKNREFLIDDKWGLFKERIGPRRYKDMVNAMARVNLATIDAKVTIDLKRILRLPSSLHSKVSMKCVEVKNPETFDPFKHAVPKFVYERKDEEIAQN

SEQ ID NO: 5408 - protein, 132 aa, Methanobrevibacter ruminantium
MDNKAIIGIVIALIVIVLACFAYVTFNGNAPISLNVTENITNNTDTSVDTTDNATLVSQDPNNDSEVKDIAKNVSESISEQNKAVADSGDTLHKQTFTVSENETGQNEGMEPGTYVMYYTENDGPIKVQKID

SEQ ID NO: 5409 - protein, 100 aa, Methanobrevibacter ruminantium
MSKRVLVSFALIFICLFSISAAWALDMDSSDLNKNIGTNLENNFNTDSNNNLDSNLNSNFNSNLNSNIDNSTQELDLSTKNFKALSSNSSIGGGQIALLI

SEQ ID NO: 5410 - protein, 1490 aa, Methanobrevibacter ruminantium
MDGSYSNLTNLNFYTNATSENSNYLTPIYINEASDLVIENNPIYIDYSDGCNYNLAGIYAFGASNNNIIGNNRISIYSRSLSNTSKHYIYGIDFSSYSSNAYSKDNAKGNDISSNTIDIISDYYANAITLSCAVDTTLESNSLHLKSDSFVYGMVAEYFDFGNGLNPSNNFNFTKNTIEASSNMVYAIQFFNVFDVNIKENTIKTNSNGSYGISAYESYNHDIGYNNLFVNGNDVSMIGTNFDAIGTGHSGIYYMRDSHDLSIHDNNVLSNYSLGGDYAIRFDASSSENINVFKNNLSSNNGKYLGNDAVNGNVTVSENNHYYGDNDLGTNDLRIFDIYVDLNGNDNKGDGSIGKPFKSISKALSYLKNLTNIYGSSASSSSTTKVKGIIHLGEGKYNGYGTNLRIYITGLDVEIFGSGYNKTIIDGVSSHWFFDISEDSSVSIKNLSLANGVYRYNDGGLIHNKGNLYLENCIFDNAKMSPSSAIIYNDGILNLKNNLMNMTANGYHIYNNGFIDGLYLNFIGDSLSEDERLLNTDSLSFILTAYVHDDNGNPITGGYIRFFIEGKEILVNSSLIEGLAKLYTFSSLNGIIKISGYYSNAYTNLFVNIGKVNSSIISDTIKVYVNYSANESKSDGSFEKPFKSINDALDALNTCIEPVTITVLDDETTEQIDDSRLNRNNVITIESINKTNISTNWTFKSDANIRLKGLIFDGYGLVKDNTYLTIDNCLFNNTPASAIVSTNGSLTLLNSNFTNNNVKDNHTFYTGFSTPVITTSLWDIQYDYDKGGAVDNSFSNLTILNCNFAFNEAYNGGAIFNNQSDLHISNSSFTSNLAFSGFYENPRAIDFSNAMDKDQDRNVASKGGAIFQYLGEEVVVTDTGFLNNTAGGYGGAFYSSGIYPYRNDSSSIIEGIPFIVYETEDGLMDNFGNYADNLLSPQDIYFINCNFDSNVAPIRGGAVYCINNSQTQYISCNFGNNLVYTYNMSQLFGGLNKNSHRKWIFEDELDQVYSIFFTAVNNGGAIHDENLKIIDSTFTANTLQSGGSILLPSVIRYSADVYTLPKNTAGAIITNSGKGGESVYVADSSLLTSEDSKYIGINGWTGTSTGGSIRRIIHENGQETGTGGNGSGTGGSGNGSGTGKGAYGNSLSWSDILSALGGDARGIAINGEGSSFSDFISGLINGKSSSNSSSDSQDNGSGSSNSSSQNPVNGTIPSNSSSDSQDNGSGSSNSSSQNPVNGTIPSNSSSDSQDNVSSSSNSSSTKPMDDSNKTNSTSDVPANDTVNATDGSSDSSISENPVNGTASNDNNSSDVNGGASDMDDDNISNLTNSSSEIPVDTNINDTNNSSSENSNSTTDLDDSEDKSDVDKDDKSESDDVGLSDNPLNGDVSESSDSPDSPDSPDSSESSDSPSSPDSSSSDYQSSSSAASPGDSSNSPSSSSSSSAYKIYEEEIDDNILEKNVDLENLLIIIVLFLGLIILGYYKKSKEDEDN

SEQ ID NO: 5411 - protein, 2201 aa, Methanobrevibacter ruminantium
MSYFNKGHIWNILLICLLIGTLAMMGSASASSANLDDFSNLACDSNSYNDLSVGFESDANSYNDLSVGFESDANSYNDLSVGFESDANSYNDFSTYFESDSNSYDISDSLVNSNSDRLVNSNGLIEFNISAPNDIQLNDKAPIKNSLKEYDERVFYVSLDGNDFNNGLSQENSFKSLNKALENLHDANKTTIYVFEGTFLSENSYDLFFEGVGNSQMISIIGSGVNKTILDGEGLHRLFNVDNSINLTLRDLTFVNGFDFSSGGAIYNKGNLTLVNTCFYNNNVYSEDAYQHVSLLSGGAIENEGFLTIENSSFIKNSVGSVFNQYAYGGAICNHGNLTINNSIFNNNSLETYIDLNENSYFRKWNALQTGGAIASFSDGALISNTEFSNHSISILNKYPFVQKTFMTFSAGGAVYIEGNNHNFINCSFLSNDADNGGAVYFKGNNTCFDYCDFDNNSAFMGGAIMTIDYNLNEAWMPTLKNLTSNKYSNLNISNSNFSNNHFICTDFGIGYRISPGGAAGYFKIDNITIDNSSFTNNGVLENCTIFVSSRCGGAVFLYGQDSKVNNSSFVHNNVEVGGAIMNYGFDTNVSNSKFINNSACYSDGGAIFHSIGDLLIDNCDFDYNRAVKNGGSIQASYDYTNNYLFEQKSLYNNSRFKNSAAEYGGAIFDMGNAVLYNDLEFINNSASYGGAIYNQGFSNTFRNSTFVNNSAFSEDYSNGGAIYNYGSNALYESSIFINNSADMEGGAISNFGESCVVQNNTFNLNKAFKGGSVYLSGQGGRFQDNNVFSSFAIYGGGLYNSNINLICLSNSFNNCSANVSGGAIYNLVSTLELYSNSMNDCKAKLSGLGSGNYVFTCANISYLVISFANNGSFNIVDNKGVLLVANISDNMGNPITGGNFTFILFNQTNQDIDLIGSSGSSSSNSSNPSNLESSIIGVCDVVEGQAFLRYDTYLELGSRYTISGTYSYAAEPVLTQVANLNSVLSTRMYFSSNITDDMVNFGEGFNYEIILLDSNDNYIPNAEILLYVDAVYSKSVFTNEFGYLKGSVNNLTSSGKHFYSFIYSGDIFHNRASYDLNFTVFYNNSYYYDDVSISFRDLIYSFVYTSPNSEIPFEFLISHNDGVPLGNVSTPRYFVAYENGIPLASFSCTDYLGVCKGQEVLYSIIELNGKLAKIFRTSPEGIFQMLIKHSERGLYEYRIAFLGDLVKHYDSSTHNGISNEDTFYNPCNISFLMLVDDEQSTIPTSLNYNGPNKITEVDFAYYNFSLSENSKNPLANKEIRVYDDGNYLGSSYTNSKGFAEFNFPQMLDKGKHIISFVYVADGDYKSAYSIFELNVLENPSKDNVSFFNKSSLNITGANNNFTAQIKDSHNNNLSEMVIRLSILFNGSDNKPYIKNYTAVSDKNGVFSIPLELGAGSYLIKCSFAGNKHYWKSSKTFNLTLNKVPTLLFGQSSVEVLKNDTYLTVILSTNDLKSLSDSKIKYLVFDSNITGLNLSYNDSSELIRDISNYAYTFYAFTNESGISKLKINLPVGSYYLVSLFEGDKWYDESSLITNLTIYGSSSRLIANENVIVKKSGYYTVKLVDGNGNPIQGQTIEITVCNKTYTRFSDSNGEARLAINLNYGNYSIQSKFNGTLNYSSSIVASRLYVVDEDYKYPSILTVNSSDIYRAFGYYDVVLSDVNGNPLPEKSIIVEVNGTGFNIKTDNNGLAHLDYNFTVGRYNIVSHFVGDGDYQYSNVGSILNVVNENAANTLLNSSIYWVLKGKGNNYTVTLTDKIQNPIEGQIIVFSINGREYSRTTDKYGNANLAINLNPGSYDIYAFYRGTDVYYSSETYSKLVVLALENENEGSNSSSAIGSSNSSSNNDSDVDSTNTSNSGNSETNLTNGSSSGDSGIDNINGSSSGDSGIDNINGSNASTNISNSTGAGNDSSSSGLDNINGSSSNISNSTGSDNNSSSSGIGGNLTNATVNDGTSISGNSSVTNGSSNLSNNDTINKSDKPVIIPKRTVTKIICHNMTTTAVSKADGRVGKYFEVSLIDANGKPLANKRILIGFNGRKYNRTTNATGGARLQINLAYEGKYTFAIAFLGDDYYSGSFEVALITVNKHSPKLDASSRAYKYSDKTKSLTAKLLSANGNPISGKNIIFTVNGKNYAAKTDSKGLARVNVSLNKKGTYTVKIKFMGDSSYKSASKKISLRIISPSER

SEQ ID NO: 5412 - protein, 2917 aa, Methanobrevibacter ruminantium
MKNKAMFLISALLIAVILSLSAVSAADDAIAADIDDIDDSIEVSSVDLSADTEDISYTDVSFNTSKDKNTLSSNIVEEGDGSWYVDSKVETTGDGSQSSPYKTIKEAFDASGGNGTIYLASGVYNTTNDRSFSLALDSGNNLSIIGAGSDETLIDLLSLSNNFINVRNGNNFYLSNVKLIRSGTTAISGANITIEDSVFANSYYYGGAPILSLGGGDNTIRNCVFVNNSAGSWYGSGVAILNGNANVLFDNCLFKNNTNTNGGSVFYTTSSNIKLTLNNCNVTECPVAFYASYFGNVVFNNSYFYNNDVTRLNNRYCAVFYSTDPGNLTIDYCKFENNTGVDSASIISAYSSNRPLNLTVTNSEFIDNKMGKNSYGYYTVFNNIYMGSWGGNLYLKNNTGSFGNLSFVSISSANINSEINLIVLDNTTYDINAIEINVIGTLTDDMGNPINMSGFDLYFNDTLVGSQLTFDSGVNNYTFKEALSGSYLVKYVYNSTANFTNFNQKTSVMNISPLENIDVYVATDGSDETGDGTEANPYATVEKALDVASTALNANVYIKAGTYKYYRYRAIDTANGILNIIGYDGDVTIDMNNETAFCNVSNRSNVFISNVDFVNGYSQYLVDNYGIINSFGNLILSECKFSDNNGYYYIISGQSTIDSCTFENNKFQQQNSARILFNPAYVNNVTFYNITAIGFSANSLNQKYDLTIENCKFYDNARILISNGNVTIRSSEFANLSNQRALETQGVVVLSIDDCTFKDSDQSVIYLYDYASTTIANISNSKFINITHENPVYVGNGQEIYLENNEVSDLAAPYVYIRSGYVASPITILVLNNETIEQESYGATLKAKVLDDSENAISLNSFVFDFNDEQINGKLVYDEMVAKSMGIYDGTYLVSASSTNLLNPILKTGVLIITPLMNKELYVSTGGSDETGDGTEVNPYATLKKAMDEAVAFNNTIHVAEGVYAIDTALEIDTNTAIVNIVGSGENTVFDMNNEINFINTISANSIIELKDLTLANAKSPANAKGGFITNLGNLTVNNVNFINSTANNGAAIRSSGNLSVTDSYFENTVASSNGGAIWSNGGNNYVLNSIFNKTSASNYGGALYSRNYLYIKDNTFIDTSASAAKNIYVQSKVEGGVVLTVMDNSTWTISTSSVTFNATLTDENNDPIYASNIPVSFYLDGIKVASSSINGEKVTANANLKMNGEHIASASLGTAEDITVKTATVSFVNDAVAHDVYVSANGDDETGNGTQENPYAHISKALTVVESLNGVIHIMTNLTNVPVNSIDGFYNLTIMGENNEIFIKNSTSGFVMLNSGSLNLLNLRFTEANYPTYFIFTRAGSSLSLENCSYENVYYPKDGYYPVFIDSSSDFLSLKNCKVINNVFNLSDLSSGVIRSKSNTTFEDCVFANNSYTNRNGALGGNFLLFSNNQKVFLKNCIFDNNTARLLNFQSTSVVDNCSFTENNGTLITASYPINITNNNFTSNDLVSSLIGVSGNAEITNNIVKENTASAFVFASGSAIVNIHDNTLNLGDMPYVNLTGNTKITGSTFTLTVNDNDTYEIEGLNLAFNASLVDADGNIIYGPLVYFTLNGSDIISANLVPIAIANTKFGGEGEFIASARTDAMYDSSEWTIKTSVFNIKQIAEKIIYVDILGSDETGDGSEENPYASLERAVQDAGGLNNIIYIQPGEYDNMTLGSQYVLIDDQTLSIIGLSNEVDKVIIKNLDNTFADIAYEYGKYSNDQFTLANIEFVDSSLSTDLIRTNYVNAVLVENVVFDNITVSNLIRGDSTNLVLINSTINAISSSCVLNTENITVLDSVISNAYGYRIFTIGARHAADLTIYNSALINNSYIGALIYEQWTSTKTLENNWWGYNTTEDDLMAFTNVEITNWIVAEVTPSSDSINIGDNVQFDILLKLNDGSELTDVLPTRIVTAIAENTEFDEDEVEIIDNQATITGTVTGTGDITITIDEQDFVFPVNGYVAYLTVDNLAVNVGDPINVCVLLQDEFGPLAGELVTIWVNEVEYNDTTNDDGMAIFEIDGLEKGNYIVTASFAGDELYDGTSAVGLIMVSDAILSIDIPAVDYGSPITIYATVEDSEGNPLSGLVIATLDGVDCNIYVDAGEGSITIPNELFAGEYLVTAKLLGENNAMDTALLVVNPIEAELIVSIDNITYNNPVEVELSSEYALDGIVILTIDGVDYAIEIEDGEAIALLPILLDSKDYEVTAKFIGENFDVEDATTSFTVEAIETALTLELENSTITYGDFAIVKVSLVDELGNPMDGIVTLTVGDQTGSLAVVNGEGTVSVPYLAAGNYTVTAKFEGSANFIYDEDSASLEVTADDNVQFDMDVIGNSLVISLVDGNDNPMDATVTVTIDGESQDVTVENGIGFVYDLEAGDHTVSLDYDGDADHASASMEDEVTILPDPVVPVSANATIELAVVGDYVEVTLKDLDGNPIAGADLEADLNNFLLSTVTTDDDGKALVDLYGEPNFNFTVTVVYTDDLGSSVSASLNNIYVENETTVIIYENVTVPVTANGSMSVEASEDAITATLTDSDGKPLANATVTAVIDGVETNFTTDESGKLTVPIDENSTVELSYTDDNGASVTYTTKVVTNEVPVPVPVPVPVTVNGTIALATEDGKSIVATLTDSDGKAIADAELTISVNGQESTVKTDANGKATVDVEGNTTVVATYKDANNLTATGYMNLVVIVNETIINETIIVIPNRTETVIDYQNMTTTVVASADGRIGEYFTVVLRDDKGNALADKPIKIGFNGRVYDRVTDENGSAKLQINLGYKGTYTFAIGFLGDDNYTGAFEVAKITVNLQTPKLSTSSKTYKASAKTKALTATLKTVNGNGISNKKISFTVNGKTYSGTTNDKGVATVKVSLSTKGTYSFTAKFAGDDQFAKVTANGKLTIK

SEQ ID NO: 5413 - protein, 280 aa, Methanobrevibacter ruminantium
MSKGYPNFYDRMMKNIASYDLKSFFLFFGLDCIPYFSIANEVVDGGLNLSLLDLPVCTSKGIVNFEFQFDRDEADDRRFIRYGVQLYEKYGFPVMSVVIDFKAQEDEPFPIEISKGCVFTIYVKSLNERNPDIVLNNINDKLAINEKPLGKDLTGLKLLPFLDLDRKIELLDKATEVLFSLDKNLVGLREIKHLMRVIMFYSHQWNYEENLDRLGRWSIMVDDLSQDAVVHFGKVNRKKGREERSYEVARYMIDDGFSAEDVSKYSRLDLSIVNQLMLMK

SEQ ID NO: 5414 - protein, 1124 aa, Methanobrevibacter ruminantium
MSRKSKEKYEWDYSTYSKVDPKVRSYFPFAKARPQQLETISEIHEAIEKGYKYIVLEAGTGTGKSAIAATLAMCYGDAYILTMTKQLQRQYTKDFEDYDFALVKGRSNFDCLKYMEEAIEESCDMGRCVLEGHKCSYKVNQFNLYKKDPGECCPYFHQRAIALNSDIVITNYSYLFAELNFNNDFKAKRLLICDEAHNLESKIMDLISLEFTRRQLKDEVGINLSKETLKDLDEKGYTSWLQFIKRVCERYGDKSKETKKALGKRKSLTLHRRSENLKRRLEDFKRFSNYIAIDPDNWIMDYDPHSQKLSFKPIRIDKYASEVLLKHADVCIFMSGTILNHHQFAKWLGIEEDEIYPIRRKSPFDIRRNPIRTYSGFDMTYRNLGSSAKRSVPVIREILERHNGEKGIIHTVSYQCKEFLKKELNNPRLLDHETKDREKVLEKFKKSDEPLVLISPSMNEGVDLPGDLCRFQIIYKIPYPNISDKQTNIRRKKEKIWYDYQTAINLVQTYGRGMRSEDDYCTTYFIDSRIKSYLKRDSIRNNLIPDFFKEAVDVEAAEIEKNPIRKASDASAIAKYEGSEFSDGSDNDKNLKIDDSTSKSQKDSKNTFKKSDVRTKYALMKKGKDLARTNKKEAIAFYKSLLMHKCFKNDYYPYRKLVVLYDKTKDYKNELGLIKFFFNRGIHCPRLYYFWFLNKLLKLSERGLITKEEIKELEKEYMSKGFKNKSVQSSSMIIADRIEHYYGDTYVLSEHKFNNKLKSKEIIEEGKYFERTGNYQKAIDLYSEAIFDRHFNNYSFYQRICFSLEELEDYERELEYINSYFDNDSIKKSETSEKWFNKRLDKVNGLLELKNNEKNISSEVKSSDEDSILNPSNIDLMEYDDSLSLEDNIQRKMELKEHAMELRRNKNYSELISFLNALTKNSYFENDYYPFRHLCSIYEQIKHYSSMKDSIKDMLYADVYLTDYQLVWLKSKREIVDAQIGLDDVLFNQWIDHYKSHGARNKSKANSPVPLADRLIKKDENYNVSTSEEFDFTQKKYELTEKGRSLERKGRYEEAAEFYMDIIKEKKYHHYDFYKRLCFSLDEIPDYERELKAIKLYYTCPPIFTDDTSDRWFEKRLEKVNSKI

SEQ ID NO: 5415 - protein, 165 aa, Methanobrevibacter ruminantium
MGKITNRKEALSKRDQIEKLQGESFEGDDNIDWFGRIEEIVIDDDYCIYQIGKYSKLSNYYYDDFEEYSKEYGQENPLNLCFEEIISYLSKIVLGDFGDNVKAECIGKGGIVEVNGLNFHPVSRIDIADLNGESFVYLYDDNDLIARIPFFDITSYKITAPEESV

SEQ ID NO: 5416 - protein, 54 aa, Methanobrevibacter ruminantium
MGVNCIRVVIDNAEESITKVAKAHGNGALVLVPKRWIGRKVQITLLEEEDKLMF

SEQ ID NO: 5417 - protein, 200 aa, Methanobrevibacter ruminantium
MNSCAVDVKENSIESAMGINTSESDSFQLNTISSVDIGDKFKSSGATNYLESIKAWKNIEKIIDCLVPSDLEEVFSISSNNNFKINWDEKALYDVLYTNESSIFVPLGCMEQVGNGYYIMNHKDMVYSNPDDFIHENGVYGLIIRFDNNMIQSEYAYCEYNSGLSLDGENCDFVKMDFISGEDTVENYIFDSLNGFNLFN

SEQ ID NO: 5418 - protein, 138 aa, Methanobrevibacter ruminantium
MYYYKLESFDYDEHWTAFYVSNKKYSDDEFKKIVKDAYIETCKHISENQKPVSKFNYMIDSVIFDILQESDKDKSQPCHYFNRILKDRHDLINLDDCLDSKLEFVEQNGGNDNLREFYDKRSEYILVGISDDDNKGYI

SEQ ID NO: 5419 - protein, 418 aa, Methanobrevibacter ruminantium
MNKYIKKWTESSLILKIIGGLIIGSVLGILVPQYKLIGLPGELFVTALKAIAPILVFILVASALSRASEGIGSRFKTVIVLYLFSTFLSAMVAVTGSYLFPVGMHLTDASDVAAPGGLGEVISSMLLKIFANPLQSLSQGDYLGILFWAIVIGLCLKKIASDSTLDVFSDLADATSLAVRGIIQFAPIGIMGLVFSAVSESGLSIFIQYGQLVLLLVGCIATVAFVTDPIIAAFALRRNPYPLVLTCLKESGITAFFTRSSAANIPVNMRLCERLGLDKDFYSISIPLGSTINMEGAAVTITVMTLAVCHTLGISVDLPTTIVLCIISTLAACGSSGVAGGSLLLIPMACSLFGIPSDISMQAIAVGFIIGVVQDSCETALNSSGDALFSATAEYHDRVKRGEDMNFLGEFAKDKAKQ

SEQ ID NO: 5420 - protein, 490 aa, Methanobrevibacter ruminantium
MNYEFILNDLRPSQEEIDAVNKTTEKVISFLNKTCKEENIPAQAFAVGSVAKNTWLSGKSDIDIFIRFPLKTDEAVLKEKGLYLGYKTNDALKGKASEHYASHPYLTCLIDGIEVDIVPCYWIEDGSQLKSAVDRTILHTRYIQKHLKKSQEDEVLLLKKFMDAVGTYGSEFKTGGFAGYLCELLILKYSTFEETLRQAQDWKFHTKIDLENYGTSDNKLFKNDPLVFIDPTDKNRNVAAALRIERMLDFIIASRNYINLIDSLEDADENIIKEKVLKYFSPLLKERFQDKSVKEISDDILDEFKDRETQTLVISFPIPEMNADALHPQLLKTVESISHKLESEDFSVYSYDYWTDEKNLVIFIIELNVFKQSKYYVHEGPKVWNKLAFNNFSAKWSQESLYHKGEFIVFDRERQFVTAKELVKHLLEKDNIHEIKVGKNLRKAISSTHTLCEIDEFLENIDQFICDEADQREFLNTLDDLLRPGQYLKR

SEQ ID NO: 5421 - protein, 154 aa, Methanobrevibacter ruminantium
MNTEKEFNTTVYNYDRLGDLLFIFQKNHKTYLNNLLAEYDLNLIQVLCILKIDSEENLNQKDLSDSLYLTKGAITKAIKKLESNGIVIREKSPIDKRHNVLALSKKGEDLIPIINDINQDWEKRMGLDELSPEFLKTFKALAFKSAELNNEKLV

SEQ ID NO: 5422 - protein, 137 aa, Methanobrevibacter ruminantium
MKFNKSLIAIFVILIVAFSSISVIAAEDAEDDNPYHNGAVMNEQEPGSGEDDDNPYHNGAVMNPQEPESEDDDNPYHHGALMNPQEPGSTDDSQAAGSSQADSSNKVALSKYPTGNPLVVLLMSLSIIGLGTLRVRK

SEQ ID NO: 5423 - protein, 312 aa, Methanobrevibacter ruminantium
MSIKKVVVAGGGVLGSQIAYQSAFCGFDVTVWLRSEGSIERAKPKFERLLNIYLSTLEAMKTDKSAYCRGLSKTADLSDEEIDSLKEQAQKAFDSLTLTTSYEEAADDADLVIEAIAEDPNQKIAFYEELRKYLPEKTILVTNSSTLLPSMFAEHTGRPEKYLAFHFANNIWAQNTAEVMPHPGTKQEYFDAIVEFAEDINMVPIKVLKEQPGYVLNSLLVPFLSAGQALWANEVADPETIDLTWRLATGAPNGPFQILDVVGLVTAYNIVIMDPRSNDPETTQGKIAAKLKEKIDAGETGINAGKGFYEYG

SEQ ID NO: 5424 - protein, 227 aa, Methanobrevibacter ruminantium
MIVSVIGGTGPQGLGIALRLAIEGVEVIVGSRKEEKALDVVAEAKEKYADYDLNIKGLANEDAAKEGDILILTVPLAAQKPTVEGIKEFCTDKIVLDATVPLETAIGGKPFRFIDLMEGSAAERTASILDGTGAKVICAFCNISNSHLSNIPEDIDCDCLIAGDDKEAKEIAAELINKIPGVRTIDTGILEKSRIIEKITPLLIGLNIKYKSHYGGLRITGIPKLDE

SEQ ID NO: 5425 - protein, 498 aa, Methanobrevibacter ruminantium; identical to SEQ ID NO: 4553

SEQ ID NO: 5426 - protein, 300 aa, Methanobrevibacter ruminantium
MNIIKNLPLAITGLILAILSLGKIFADFSAIFFIIGSILIFMVLLKLVFHFNDFFNELNNLIPLSTFGTFSMALMLWSTYLKPLFLPLSQDIAFVIWILGIIIHLSIILFFTNNYVLNNFNIEDVYATWWIVYIGITMAAITAPAHGLSKYGFIFFGIGFILMIPTLVLVSYRYINFKQIDDQNKPFICIYAAILSILIVGYVNAMTINGTFLSIIYIGAVIFYIFAIIQAFKFIIIERLKFMPSFSAFTFPFVISAIATGEAYKFFGLDILNYLFYIQAFIALILVIFVLYNYLKFLMN

SEQ ID NO: 5427 - protein, 169 aa, Methanobrevibacter ruminantium
MNAIFKRKSIRKFLDKPIEDEKIERLLRAGMQAPSAINSQPWEFIVVRDKDSIKTIENMSLYSKPAKTSTCCIITLFNKKYTDKFDDYCWVEQDMGACTENILLQAVEEGLGAVWLGTYPNEERVNYLKEHFDIPDNVYPYSVIVLGYPTEDYHGESRFDESRIHYETY

SEQ ID NO: 5428 - protein, 173 aa, Methanobrevibacter ruminantium
MDLLDVMLKRRSVRRYTDEEIPEEKLNKILQAGMLAPTSRNRKPCSFLLINDKDSLVELANSKEHGAELLKGAKQAIAVIANPNVSDTWIEDSSIALAFMHLMAAEQDVGSCWVQMHLRKSKDGQWSEELAREILGLDDYFRIVGILALGMADGQPKPHSLDEIDLNDVHILH

SEQ ID NO: 5429 - protein, 191 aa, Methanobrevibacter ruminantium
MKANEKETIRSFLAIELDESLVPPILDVQGDFKKTDTKIKYVPAENMHFTLKFFGNIDEDIVEDISGAVEKIIKNYSSFELKIENCGCFPNQKVIKVLWLGIDKDSKITDLQKELDKEFKKLGFKKERNYISHLTIGRVKSPKNKNEIRDVIEKNKNIKIGSMTVNRVCLKKSTLTPQGPIYENIRVFDLE

SEQ ID NO: 5430 - protein, 266 aa, Methanobrevibacter ruminantium
MTTNIGKRIRLERIFNRKTGRTVIAPMDHGVSSGPIKGIINMDKTIEEISQGGANAVLMHKGIVEQGHRGYGKDIGLIVHLSASTSLSPDPNNKVTVTTVEKAIQLGADAVSVHVNIGSENEPEMLMELGEISETCSYWGIPLLAMMYPRGQKVENEHDVEMVKHAARVGSELGVDIVKTNYTGDPDSFREVVEGALVPVVIAGGPKIDTDRELLEMVRDSLEVGGAGVAFGRNLFQAQEPGKITKAISEVVHNDMDVEEALKILK

SEQ ID NO: 5431 - protein, 368 aa, Methanobrevibacter ruminantium
MSPKTSWDDKKELITTALESGIDHVLDLEDSENIRKVGNFNIISTEEDADVYLVGIDGEGDGTLELKDNLNESSDLAKAKEAKNSGKTVCAYIIITDKLHEQLAVVLGKVVDYIILVGTDWTVIPLENIIADLQKEDVKLLAAVSNADDAQVAMETLEVGTDGVIFEARDFAQIKDIAGLIDELSTESYELKDLTITNVEPVGSGDRVCIDTTTMMRPGEGMLIGSYSKAMFFIHSESLESEYVASRPFRVNAGPVQAYVMVPGNKTRYLSELVTGDEVLIVDKDGKTKTSIVGRSKIEKRPLLLLEAEYDGMKIKSLVQNAETIRLVDENGEPISVSNLEKGMKVKGFIDDSARHFGMAIDEQIIEQ

SEQ ID NO: 5432 - protein, 421 aa, Methanobrevibacter ruminantium
MNPKELFAESKTIIPGGVNSPVRAFEPYPFFVKEAKGSHIIDTEGNDYVDHCLAYGPILLGHSDDDVMADVYNQMKMGTAYGAPTENEVKLAKEVIDRVPCAEMVRFVNSGTEATMAAIRLARGFTGRNKIVKFEGSYHGAHDYVLVKSGSGAACLPDSAGIPEDTTKNTLSVPFNDVEALTKLIDEEGENIACIIVEPVMGNIGCVEPNVKYLKFLREITEENDILLIFDEVITGFRVSRGGAQEYYGVKPDLVTFAKVLGGGFPIGAYAGKKEIMSLIAPAGPVYQAGTFSGNPISIQAGLSTLNKLDYEFYGNLARKGDYLRTNISDIVEDLNLDLQVVGLASMFQIYFNPEPVVNYEIAKKSDAKRFLVYFRELLKNGVFIPPSQFECNFISGAHTEEDLDKTAQGIENALKVAWQL

SEQ ID NO: 5433 - protein, 237 aa, Methanobrevibacter ruminantium
MNRRSKLIIAILIVIIIGIAVILFGSMFGGEKLSSGDKDILVCAIDESEPRPGMGAVDMAFLVHMNDGGITNYTPIYPHGMVHPSIAEPEEYQAMGAGEKLLLHDCFYWEDKQQCMQYAKEILEYNTNYSCDAVIAVNSQAIDNIISAAGTLKYNGEEVNASGIDFIREEQNTMGMTRGDSVMVIVNALMQAAKDPDKRDKMINAAVSEYTAGNIAMYPEGSFMELLASKGLQAMFG

SEQ ID NO: 5434 - protein, 212 aa, Methanobrevibacter ruminantium
MNQKDYWNSIADKKEFTTPFHPEILENYLNKDDFIVDIGCGYGRTLRELKDNGYRNLRGYDISEKMIERGKNENPDLDLRIKDPDTIDLDDDSVDGIILFAVLTAIIDDEEQKALIDEIYRVLKPGGILYLNDFLLNDDERNLKRYDEYKDELGVYGAFKLPEGATLRHFDESYIFKLFDSFEKREYERQIYPTMNGHTSNGFYYIGEKNIG

SEQ ID NO: 5435 - protein, 412 aa, Methanobrevibacter ruminantium
MLMNEQTKLSKDHYMIFGLSWAGWVFDFYDLVLFTFLISQLQSSLHINAEMLALCLGLSLFATGLGGIIFGALGDKYGRKKVLEWTILVYSIGTLLCAFSWSFYSLVLFRFITGLGVGGEWATGQIYISETFPDNLRAKFGAFMQSGAPVGVILASIVGGMISPIIGWRMTFLVSIIPAITIILIRRYLKESDVWIKNKDDFVNKNIFQEFKQLVSKEYRKIFLISLVLCIFGMSAYWFTYSWLPTYLAEERGLAMVTTSLGIILIQCGDFTGYTTFGFVAERIGRRPAFTIYSFIMGISIAMITICWNQIDKVPDLIMVFMFLTGFGTGFFGGFGSLFSELFPTKIRNTGVGTVFNLARGVQFITPMIITFVGAYYDLSYGIAIAAIFAFLVGIWIWVFPETKGTAINDLD

SEQ ID NO: 5436 - protein, 180 aa, Methanobrevibacter ruminantium
MKIIALLASPRKGGNCDVLMDEMIRGAEENGHEVVKYFLEKCDIAPCKACMFCAENPDCVREDDGNEIINALVDADGVIFATPIYYGQMSAQGKLIIDRFYAIGQNPDKSLGGKAALIFTENQPEGTYKDYIELTKFSPFTFMGYDVIGHVDAGSAGPAGIVAEEQKDKLEEAYELGKLF

SEQ ID NO: 5437 - protein, 262 aa, Methanobrevibacter ruminantium
MINIVAGLGENENIILASRQLESIDDLNIQLVDNEDDLFDAFKDSNVGAVVRGSLKASKVIKLIKQYKSDCEVNRATYVNTSNDPNFNDSYEFLLSPVGIDEGKNIDEKITLAIQSANFIQSLGKTPKIAVLAEGRKDDYGRSERIDKSLKESEELTRLLEERFNSLDNFDNSSEDVSKNYQIKNYYILLEQAINDKFNILLAGDGIFGNIMFRALVLLDKWPSYGAVTLGIDEIFIDTSRDQTVEGYKRSLELAYNLAKLK

SEQ ID NO: 5438 - protein, 254 aa, Methanobrevibacter ruminantium
MPPQFLYKIYEKRLMNELDPDRMPRHVAIIMDGNRRYSRMKGDMEVIKGHELGADTLEKVLDWSIDLGIEIVTAYAFSTENFNRPEHEVEGLMRLFVENFKKIVDHEKIHKHKVRVKVVGRIELLPDDVREAIKEAEDSTKQYNERLFNLAIGYDGRLEIVDAIKKIYKKVEDGEISIDDIDENLVSENLYTAGLEDPSLIIRTSGEERLSGFLLWQSSYSELYFCDSLWPELRKVDYLRAIRDYQERDRRFGV

SEQ ID NO: 5439 - protein, 253 aa, Methanobrevibacter ruminantium
MIDTHCHIDFEEFDEDREELIKRAQDKLNAVINSGYSVESNNKVLELSKEYKDFIYPTFGFHPVSSQNSPEEEISAAHNQIVTHLDDILAVGEVGMDFYYCTDKALRARQQEIFMGFVEIANEYNVPLLIHGRDCERKIFNLLNDYDDIPKVIFHCYGGSLKVAKRILDKDDYYMSCSTMVCYSKHHQELFKNIPLERILTETDSPYLAMTKEERNEPANVVYAVEKLAELHETDVSEVDEQTEKNARYVFDI

SEQ ID NO: 5440 - protein, 226 aa, Methanobrevibacter ruminantium
MKPYVILNAAMTLDGKIATKTGSSEISGKEDLERVHEIRKKVDGIMVGIGTVLADDPRLTVHKINARKEDNPIRIVVDNKARTPLNFRILNDDAETIIAVSSICDERNENCDEEAVKRAKELEKRVNVFYSTGETVDLVEFMEYLYDYGIKSIMLEGGSTLNFSMIRDGLIDEVKICIAPMIVGGKDSKTFFDGDGFDYMKDAVQLELINSFPLGKDFIMEYKVLK

SEQ ID NO: 5441 - protein, 48 aa, Methanobrevibacter ruminantium
MGNMAEARRKMHERDERIKKENKSDVKKIRNFFFGCCDNKEKKKVKEH

SEQ ID NO: 5442 - protein, 214 aa, Methanobrevibacter ruminantium
MHSLFSDGELLPSELARRALVLGHEAIAITDHVDYSNINTIPEISAAIDDINSNWDITVVLGAEITHAPTESIPALAEKARELGAKIVVVHGETLNEPVVEGTNFAAVNCKEIDILGHPGLITKEEAELAKKNDVALEISARKGHCLGNGHVANIAREVGNDLVIDTDTHSPDDIITFERSIEIGLGAGMTKEEILKATIDNPRKILKRNGIEI

SEQ ID NO: 5443 - protein, 352 aa, Methanobrevibacter ruminantium
MISVFVPSHITGFFSIHDNPDPLLKGSLGAGVLLDKGVITEIDFKENFDLGGVNDNDLNLDSLNSDELLIIINGKRDEYNEVIILKTIHLMKKALDKEDISLSGVVINQIIQVPIGCGFGTSAASALGVAISINELFDLGLSLEECGQFAHLAEVELGTGLGDVIAELSKGIVLRTTPGAPGYGEAKSIVPHEKTGFGVFESLNADFYIITKSLGEISTASIISDPKHKKLITQVGEKTAEEFNKKDDGIVIGSKFKNKFNVAVDSEFNEEETIKKFMKSSLFFARKTGLISDELLELVHNLHGKVIGSSMAMLGNTLFAIATEEQKLKLEAEYYGEFDFYKLETEGIRIIK

SEQ ID NO: 5444 - protein, 177 aa, Methanobrevibacter ruminantium
MIRLSYDMQVYRKDLREVLKRTDNVVELGCHVGKTSELILYKLTTGSLIGIDNSPEAVQPLERLSFHHENFTHIIGDVRRHEVLKEVTELIGQCDVLSIDLGGGYHPDTVFKVYYIWASTLKPRDVLIRNQGLIDFVNSAITTEDMISEHGWLESCGDQGIPPQIKEFSLWTDKLDD

SEQ ID NO: 5445 - protein, 238 aa, Methanobrevibacter ruminantium
MKRSKKLIIAILVVILLGLLLAIAGYFVGGPDLSQENKTILVLAADKYEQPNGGCDMAYLVRLENGSLANYTPVYPGGMYHPSQSAPGNLQGNMLLHDCLWNGVEDGMQYAKEIVAFHTGVEADAVVVLYDEGVDNVLDSIRPIEIDGEPTNLSATDIIRENDNYAGYKGNEGVTGTMSRADAVMVLVKAVSKQAKDPAKKSAMLHAALDEYTKGNIVMTPKGSFTRLLATKGLESFA

SEQ ID NO: 5446 - protein, 442 aa, Methanobrevibacter ruminantium
MKEYKIAIIGGGPAGMIAAIRAAEILGPNAVCILEKNESLGKKLLLTGGGRCNITNNTPIHDQLNYYNKNKNFLKHSLYTLPQDKLLAIFEEKDLEFHQEDNKRVFPDSEDAHDILDILEEYLEELGVDVYNNTPINAQDIEHELNERMEPVFEIENEKISLNASKIIVSTGGITYPNTGSDGDGYKIASHMNHTITDIKPGLVSFNIDDFLLKTLSGLTLENVEVSFKDKKKKISVKGDILISHFGLTGPAIIDLSNRLLEKSDLTVLDDKLNLKSRDEIEELELFTNRITIDFTPDLTEEDIKNQITKDSPKNGKMAIKNYMKKYLPNNFIDYFLMKIDINPKKTMANITKKDKNKLAENLKRHVFEIESLEMDLAKVTIGGVKSKEIDAKTLESKYVEGLYFAGEVLEVAGPTGGYNLQIAFSTGYLAGQEAANSLKNE

SEQ ID NO: 5447 - protein, 440 aa, Methanobrevibacter ruminantium
MDYLLRDLRRTHYSKDVNPDISGEEVIIMGWVHEIRDLGGIIFVIIRDRDGLVQITAPSKKVDAEILEELRALRKESVVAIKGTVQEAGKAPNGVEIIPIKTTILNPAKQPLPMDPTEKVKAEIDTRLNSRFLDLRKANVSSIFKIKANMFKAVRQYFDEQGMIEINTPKLVASATEGGTELFPITYFEKEAFLGQSPQLYKQMMMGAGFDKVFEIGQIFRAEEHDTLRHLNEAVSIDCEISFADDVDVMNVLDGMITRVLQSTKENCAKELETLEYDLSAIPEGPFPEVKYDDAVDIINSKGIDMEWGEDLSREAEKALGDTQEGFYFLTDWPSAIKPFYAMPYEDRPEISHAFDLMYKNLEISSGSIRVHQYDLLVKQMIERDLNPDGFGSYLKAFEYGMAPHAGWGVGADRLAMVLTGVENIRETVLFPRDRHRLTP

SEQ ID NO: 5448 - protein, 426 aa, Methanobrevibacter ruminantium
MEILRYERETADELIKRSQADINEILNIVQDILSDVKENKDEAVKRYTAKFDRCELDDLQVSDEEIKNAYDNLDTDLIDALKRASQNIEKFHKAQIPEEWSMEVAKGITAGQIIRPINSVGCYIPGGRAAYPSSILMEVIPAKIAGVERIICCTPPGADGRILDAILVAADLAGADEIYKCGGAQAIAAMAFGTESIQKVEKIVGPGNVFVTGAKKLVYGDVDIEFPAGPSEVLILADKTAIPEYLAHDFLSQAEHDPEASCFLVTDDEKIAEESNDLIERFTKEAVRKEIIQESLEKHGHIILCKDMEEAIEFTNTYAPEHLIISTEDDNAILDKIKNAGSIFLGKYSPVAAGDYGSGTNHVLPTSGGAKMYSGLSTESFIKKPTVQTITKEGIEELSKTVIPIAEYEGFYAHANSVKVRLDKNE

SEQ ID NO: 5449 - protein, 101 aa, Methanobrevibacter ruminantium
MYKDEMIQLHQFLVYVLKYLDTDNNAHEYIEEYLALNISPHHIHRTKAEHKQAIFVLSNTISEVILHKEEGSIPPNVSNALRDLVRRSKKELKAAEAAQSK

SEQ ID NO: 5450 - protein, 462 aa, Methanobrevibacter ruminantium
MSTRKVVCLVDGEHYLPVTRSAVNSINSIDHIEVVALVFIGGTEKLKLGDEEEYSELLDTPVYFGKDKNQIPYKLIEDVIKKHNANIVMDLSDEPVLDYDKRFKIASVVLSCGVIYKGADFEFEPLTQYEIMKKPSLKILGTGKRIGKTAVSGYAARLIDKNNYNPCIVAMGRGGPEEPEVVHGNEIEINPEYLLEQSNKGIHAASDHWEDALMSRVLTIGSRRCGGGMAGDVFVTNMDKAAKKANKQDAKFVIFEGSGAAIPPIKTDKSIVLVGANQPIGNILGYFGPYRIMLGDLVILTMCEEPMASKEKIKEIEDFIHKIKPDVDVISTVFRPKPLSDINGKKVLFVTTAPEAVRDVLSSYLEETYSCEIVGLSSHLSNRPLLQEDIEKYKDDVDCIVTELKAAAVDIVTKEAIESGIELVYCDNIPVPISDDYPDLSESILKVVDGAIEEFSFNMLLD

SEQ ID NO: 5451 - protein, 353 aa, Methanobrevibacter ruminantium
MMSQDSNKNDINSYDFPSRVEKALKLIHTDSFKALDYFNEILDDFFKFTPDEIKENNLSSLIINSLNGKGSILNAFDKIDEAEECFDMVLNDFDSQDFTSLINKALILRKKGHLEESLDYYDEIAKYYPDKKELILAMKSEVYGELKIKLSDTDLDDYSIEAKDLIGRGLASHENKIVLEALDYYQKAIKADSSCKYLVLSLMDDVKREFFKLFLYEDIDIEKDEISKKKGAVLHYLFIQNNLFYAYMLNEEILEENKNDLFALNAMGMIFFYLDDCDLSIRYFDRCNTIDEKYLYPYLNKAIALARAKRFDEAKESFGKIKGLPNLIRDPNEEELDIFKRTIISNSIYSLGF

SEQ ID NO: 5452 - protein, 146 aa, Methanobrevibacter ruminantium
MSHVEKSLELFEAKFNCAQSVFCSFSKEFGLDEKQALKIAACFGSGMRKGEVCGACSGALMVLGLKYGQSELGDRDSKLKSDKKCTDFLEEFERANGSYICNELLGCDIRTEKGVNYAKENNLFIEFCPKFVESATLIVEKILKEE

SEQ ID NO: 5453 - protein, 359 aa, Methanobrevibacter ruminantium
MGDSLKVIIDAANVAHYQKGENSKAKLKNITLAVKALEQGHHDFLIIADASLRHNIDDKDTFVRLVEDGIIDEVPIGNVADHYILDLAYDENAKILSNDKFRDFMSEFPDINSMRIPFSIKDNELILGKTKKPKKVKNLLQNICDEILNELERKRWVVYKGKETTKFTPLNVAKQAILILDQSERDDMSSKIEGIFSKLPMFDKVMEMVDDVETSVPYVIFVLVHPKDYKAAVKDAGNISVTVADRLRLVHKPLIAVRNDLFIKPGYFGLNIVLTDEVEDIPPFNIEIQTNTYDEVFIKKNSRNIASTIAGRLGSWKFPFVSVKPNMILEKPGEFEIYLEKNSKKKKKDKSKDKDKKKK

SEQ ID NO: 5454 - protein, 400 aa, Methanobrevibacter ruminantium
MANNSVLRRIVSLITKHNILSIGTKYFPTTELETEYVDMFNYTQTMLMEIDKANITTESIFTNLVRDVGRENIPENHSFYELLPAQNKIDEYALVSKIIMGSDRYMYVELSEPSYIIDYFTDIILRENGEIIERSETEIVSRLMSKNDAIRIAIKLVGIGLDNNIRVRAAAGMTGAAAIERSIKFNKEVGDVPGVAFTKLGGEYALVLDTPFKLGQSEHAEYQHYLFIDIVDSTNFISKHGKNKLVELMTSVKEFMENCEGHIEGYREGGDDLIARFPSKGVAIRAGLDCAWFILNNGAKVKIGIGRSRREAGERANIAEGIKGFGALTLIVFDLANGLYAYYVPSDFSRTLCELFTTKKGKLVTAFLLVFILCYLLAVLGFGLYGILVFIIVVAYYTLK

SEQ ID NO: 5455 - protein, 101 aa, Methanobrevibacter ruminantium
MANEGGGHLKTILMIIILIAFICGLALGVSVIMGGDDNSQTESEGVHYVNVTKNITEYNESGNLIETEDGTHIEFSSYSDNVTEGENVTAYNSSTDAGNLF

SEQ ID NO: 5456 - protein, 397 aa, Methanobrevibacter ruminantium
MCLVNGVRAAGSRQGKYGLAVIESKDSNASAVFTSNKVVAAPVIHTKEMIKGGKISLVVANSGNANCFTGEDGIVDCDKTIDFASGITGISRSEIATASTGVIGRKMPMDIILPLVEESISKLEHSNEASTDAAKSLMTTDTYHKQFAVETSIDGKKVTIGGVTKGVGMIAPNMGTMLCFLATDASISAEYINKALKTAVNKSFNMIVVDGDESTNDTAILMANGKSGVEVVNDGEINPDFQEALDFICISLAKMMARDGEGATKFIECKVNGAKDENDAILASKSVISSSLVKSAIFGGDPNWGRIVAAVGYSGCEMDQNMITVIISDDNGKEAILVDKGKILAFEGTPNLDLAEKIMQEKNINILVDLYQGDASATAWGCDLTYDYVKINAEYTT

SEQ ID NO: 5457 - protein, 213 aa, Methanobrevibacter ruminantium
MNDYLNNSDTNDALVKLPAKQIGKNEIGTVSIEGPYGNTSSPVKVAYILGQHPREFSAHDAIYYALQNNSNELNYSYYVYRINVTNETADFEQSRMNGQLLAQEFVVNDSINKSYDLVIDIHSSNGGYIQDPYIFAPVSSDLLAYDAANNITKALPYVTYYEPASYTSPQYSTIPLEEGGIASIIFEMRGNPDNSLEHQADDFVKAVDKLVLN

SEQ ID NO: 5458 - protein, 394 aa, Methanobrevibacter ruminantium
MIINGKRSLAHVEKVAWIKPIEGADNIGLIGVLGWTCIAKIGEFKEGDHCVYIEIDSKVPEKEWSEFLRAKKFKIKTMRLGKFKVISQGLALPLDKFDVEIPKKVGTDVTELLEITYSNPKDIKRKSDGPNKYEEMARRRKALFRKPWAKWLMKREWGKRLMFFIFGNEKDGSKSFPKKFEYVHKTDQERCENMPDVLKDKTPFIRTQKCEGSSGTFILELTNSRLGKREYEFYVCSRNLRVFEDENTDFWDVAVKYDIENKLKDYLEKHKDCSYVAWQGEVCGPSIQNNPHKLSENHLFCFHMIDSEKGMFDIREAKELWDEYEIESVPIDEEEYILPDDFEEFKLTADGFYDPEVCEGQKKCRREGFVYYKTTDPNFSFKNVSRKYLLKIGE

SEQ ID NO: 5459 - protein, 203 aa, Methanobrevibacter ruminantium
MGNKTGLLPANGHRIQGRSSESFLDAREIIMELGLEGNEVFMDAGCGDGHAAIEAVDILDDDATIYAVDIYEPSIEDLQKFAVEKGYDNLIPICADIPDYIDIDDDTVDMILLINVWHGFKATRRMDEAIEELKRILKPGGKIAIMDYKKQEAKHGPPITVRSSPEDLEEVFKEHGMCLFSLNPDTGEDIPQGKSHYLIIFQK

SEQ ID NO: 5460 - protein, 129 aa, Methanobrevibacter ruminantium
MDNKIKAGIALAIIVLVAVIGFSFINESNNVVNQLSPLTESFDYSMEPMTTWDDSKKEYSFNQNISSANGKDYKDITIDILMYNDGKSLDKHTSTINSTKDGSFNLKFTQRLEGEPDEFYYNVTKATEI

SEQ ID NO: 5461 - protein, 342 aa, Methanobrevibacter ruminantium
MFKVSKSILIVCLVSLFLLVSQASAADSNGLSIRDINSVDENYNLDASYLDSLQDSNGMHSDSSLNSNGLDDKSNYDKTSISQNQTSSNLKDNDLDNNDGESEIIEEEAKDTEGVVMAGDSYSCGPASLATALNRLGLNLSLSEVSQHTNTSKDGTNMQSLIDAAGYYNFSAVGVEIQSKDLAENSIVHLDIDGAEHWTVVSKVTEESVFLADSTRGNINMSIDEFNSLFSGKAILLSELNKTNVSNVISNKNIKVLDQSQCLNVKGKGWVRVLVGYKTEWRYGLINTYSWVLRPKVINGHVSYSAWEYVKVKHLSWGKYKVKVPIYKYKYIKNQYEVKGKK

SEQ ID NO: 5462 - protein, 292 aa, Methanobrevibacter ruminantium
MESINLLVEALPYIKKFYNKKVMIKYGGHAMVDADAMASTARDTVLLKYVGMQPIVVHGGGPEITRSMEKLGKEPKFIKGLRVTDEETIDIVKMVLVGSINTDIVSQICHHDGKGAGLSGKDNKLIQASKTMHEIKDDDTGEIEQIDLGLVGKVDKINPEILEMYTENDYIPVIVPIGIAENSKTLNLNADTVAGAIASEVDAEKLIILTDVPGVLRDPNDPSTLIQKIHIDEVPQLIEEGIISGGMIPKIETCVEALNNGVKSAHILDGRIKHTLLIEIFTKDGIGTMIYK

SEQ ID NO: 5463 - protein, 244 aa, Methanobrevibacter ruminantium
MRKVFESIIEALKYPFRDWKNIIVIGFLLLIASLGRKLPFPEDPQQTVVFIGALLILFLQTGYGSKIVYSGLKGENIPPKLRPIPKLIWEGFKKIIIIIIYVHIMVIFISVGKTQLSANNIPIAIILFVLGGGTYLLMVGGLLNRYFHHGKFIKAFYLKEIIAIIKKIGFWDMISIVICAMISQTLTISTFINLVKGMFTSIELVLCIIAFFLAPIALMSTKRLISLNLRRILSSDEDLEKFAF

SEQ ID NO: 5464 - protein, 247 aa, Methanobrevibacter ruminantium
MGKLDGKVAIITGATSGMGRESAKLFAKEGAKVVVCGRNEERAAAVVDDIKAAGGEAIYVIVDMANLDEVPKIYEATMDEYGTIDILFNNAGVLSMSPLMDLTLEEWNKVFNVNVTSALVLTQLCVPVMKEKGKGTIVNTCSVASFGAHHGFAAYVDSKHAMMGLTRSMAWELGPEIRCNGIAPGLIHTAMVDSIGGPGALQNMIDQCPVKRCGEGQDIAELALFLASDECTFLDGQIIKCDGGFEI

SEQ ID NO: 5465 - protein, 494 aa, Methanobrevibacter ruminantium
MLNITTFLDANACRLEKEVFYYPNRELRYNSKELLTIVSGIGQSLKDKNIEKGDRVLIYLNNSPEYLFSLLAIWRIGAIAIPTNRILTSAELDYMISDSDAKLIITDDEARETIKDLKINSYIIEDCESFKDSEVLPAEETEWDDLCQLQYTSGTTGKPKGSMLTHGNWFTAIHNACDVLTYKEDDTFLCIYPMAHVGILWAIAALRAGALCITMDFFEINEYLRLCEEEKVSVLSGMPPVIHTLTNLEEEKRENLSTVREIISGGGPLHRKIWKKFMGQYNIPIINAYGLSESIVIGTGTVIRPEDYATADRYESVGHPVCFSELKIVDEDDPNKTLDKYEHGEIALRGPAIAKGYWGMEKETKESFLEDGWFLTGDIGYIDEDNRLFITDRKKDMIVMSGWKIYPTEVEETLIKYPKVDEIAIFSINDIHRGELPVAAVVWKEDEDPEGLLEYSREYLARYKVPRKIFTMDELPRVNGWKLLRRELREMFSQ

SEQ ID NO: 5466 - protein, 332 aa, Methanobrevibacter ruminantium
MIKIARIDGDGIGKEVTEAGVAVLESLDLNIDFVEAEAGRECFDKNGTTIPEETIRIARNAKATLFGAITSTPGEKSPIITLRQELDTYANLRPIKSFKGVDCLFDDLDFLIVRENTEGLYSGKERLEEDKAIAHRVITRKASERISRLAFQEAIKLNKESVTCVHKSNVLKKTDGVFKDSFYNVAKDYPQIKTIDYYVDATAMYLLTKPQEFDVIVTSNLFGDILSDASAGLVGGLGLAPSGNIGDKHGLFEPVHGSAPDIAGNNISNPIAMILSVSMMLEYLNEDYLASKVKTACENVLEKGKVLTPDLGGNAKTMDVANEVIKEIEKLD

SEQ ID NO: 5467 - protein, 155 aa, Methanobrevibacter ruminantium
MEKSIDELILDLKDEDDFVREEAIGSLELKGEEAVCPLIEALGQRNKDIKIGAAQVLAAIGDKRAIPALVATLGDRNKLVRREASTALTTMGDEAIEPVIAELDNPKWRVRGAACWVLGALDAKEALPKLEELLNDESSFVQYGAKDAINRINNG

SEQ ID NO: 5468 - protein, 120 aa, Methanobrevibacter ruminantium
MGLYEHDLNDLLKSLEDKGLVHYEGSYVQLRDFEGVINTVDSKEDVLTAELNQKEKKSFEIIKSLADENNLVSRYEIEGNLLYGDLKLTDFRMYHIILSLENKGLIEAVYKHNGDYYKIL

SEQ ID NO: 5469 - protein, 263 aa, Methanobrevibacter ruminantium
MDKAKVNNIILNYNLEGEGRTIVFIHGLSDSLNYWRPLQESLKGDYQTLSFDLRAHGESGDDRKEITIDLYQKDLYYLLNYLNIEKAVLIGLSLGGNVALDFAINHPKMVDGLIIMSSFSEFSDHLNEIFDSFEEAIEQGFEEFFDVILPYTLPEDVLKKHEVELEYVKKEGAKTANIEGIKAGIKAGYSFSITDKLNTIDAPTIVIAGADDELTDLELQRKIYDNIDNSEMIILEDTKHNVLIGKNISRILDIINEFMLKIE

SEQ ID NO: 5470 - protein, 164 aa, Methanobrevibacter ruminantium
MRISMSLPKKLLAEFDEVLKDRGYQSRSKGIRDALSDYILRYPWMNEMEGNRVGVITVIYDHHFTGVMENLADIQHDCMEEINASMHIHMTHKYCMEVIVVNGNVTHIRELAERMMRLKGVEHVKLTSTANGESLDREPGLEHSHSHSHSHLIFFLKNFFFLFS

SEQ ID NO: 5471 - protein, 311 aa, Methanobrevibacter ruminantium
MILITLSFLRDYERLAVFKEAIDEFAISNLDKDLDCSNSNGDINSDDDKKLDCSLAYDLGCGSGVLSYLASDYFDKIISIEQNRSIFKCANKNLKSFDNIEAINQNVLDFDFENYPKADLIICEMLDTALIDEEEVPILNHSKKYLKENGKIIPQGIINSAEPVFMNIDYLQYEDDEYQPIYEILGKSVIYSEFEFLDDIDEDFSCIIEFEIDDKYSDKKTDASFEVDDRCSDKTDYFNKSNDKIKVNGIKLTSFTKLNENIICGPTPMLNPAMLVPFEEIEVNNGDKIRIRLSYVMGGGVETIKTEVLDV

SEQ ID NO: 5472 - protein, 174 aa, Methanobrevibacter ruminantium
MLNLDEISENIDLFLEDCSSLIVLGIGNDIRGDDGLGPYIINQLTDLKENLSLKEPQSLENVHLLNGGSVPENFTGLIKRIDPSHIIIIDATLMNEEPGFIKIVNKEDISNVSISTHSMSLSYLVKYLEIEIDFKLIFIGIQPKDMDLTFELTDTIKNSSDTLVDLLFSKFLKI

SEQ ID NO: 5473 - protein, 379 aa, Methanobrevibacter ruminantium
MKVLFIGSRLYDDLAYHVDELGIESIITESNEEAPHLDLASKYYIVPRGMDKPMEVAIEEKVDAIIPLIGIDPPLKDLAIMKEKIEKENNIPVISSNFNAVDIASDKIKTKEFFKSIGLNVPEAKVLNKDDFSNEGEFLEKLGFQFPIVLKQGEGQGGKDICITSQFEDVLQYFESFNQALVENFIEGAEVSIEVIGWNGEYLPLVPVYKGDTSLEGIHPIKRLRYGPCDFEAIDNEEFRQLAKKIAVNLGSEGTIDMDLIYSREENKVYAIEINTRPSGTRYLSYATTGLSPLGLLVDIAAGNFDVKDLENKIKHYYSLEIPIGDYEGPAPNEPVKEYVNGNFIVHGPKGYQRITIRGNTREETYEIAKELTGNDYRS

SEQ ID NO: 5474 - protein, 357 aa, Methanobrevibacter ruminantium
MDLNYIIVLFVLTFLATVAFTYFVRHTLRDADVSDSPIVSEHRHKAGTPTMGGIAFLFAILFIVSIYYRNTNILIASFIMLTGGVMGLLDDLLGLKIKEYQKVVKNVSDSVVPIGLLDLGPGEEARVTTDKAKKQVYGYVDEGKLEIVAEIPIKYEPSEKTKIIVQLLPGLFLALTGVVTTLGGFTLGILAYPICIIAILGSINSINLIDGMDGLAAGIVAIASFSCCIYAYICGNMDMIPAFAILTGICLGFLVFNRYPASIFMGDTGSFVLGTGYAVAVILGDIPYFGVLALAVPIVSVIISLMHRAHIINLPVEPLHHTLNYKGISEVKIVLSYWLLTVLVCAIGILAKLYIFA

SEQ ID NO: 5475 - protein, 539 aa, Methanobrevibacter ruminantium
MSKTYFLNELADSISSQKTFSIAQLADAIGGKIYGADDYKSPNGFTGIFETLNEAVEGDIVIRHWINGKGVEIANDKNVACIITLTPKEDALEMASKLAFPVIVVDRIEFANAFALKWTIDNLSPNTQRVVISGTNGKSTSSHLIYHILNHCGYNVFTNTDAKSEFNTLIDPMVAKLISEQVISKQDFDVRKLDSVADLKNLDSEGKPINKGAFDYIVVEVSEVQGWGSDLMKDHAQIMSSAINPDVGVVTNVAMDHIGLVNNIEEVFHETSGLVKAINKGGVVLNYDDENVLAMKDLANDGVDIFFTSMEKDSILNNDYDNDKKVYFDRKSNAIVYDNKNILRYDELPFTGEHFIRNILSAISACISLEIPIEDICEGVKTYNPLSRRFTRLYDEPIVIDDFAHNPDGIKNTVRAAYDLAEQFDKGDLYIACAIRGSRGETLNGLNSEALALVIKELRHRNDDDIEKDENVKKREIYLILSSSCDLVDHLNYVEDFERGYISFSNLDKEHIKYIHFNKLYGALGYIMKKCIWKMMLYC

SEQ ID NO: 5476 - protein, 617 aa, Methanobrevibacter ruminantium
MGEFVFSFLEDQFRDIYLDCARMDKNLIEGDGVESILIAGRIAEKITKAIFVFEGIKDNEDNQYLRIEKLSNANILPNNIKNDLSQIRILRNNVYHNTLNSDGSGGFASYNAPKYVQSGGLRDYKTGFNEIKEYSKISKQNSNSNSNSSSNSSPNNEFGSELTAAREAHKLVFNVCVWFYVNYSGDKDFIRPKYKLSRRTQDADFLIRLKSAINDGNDFIKLRQNNPNNEIIQILNEIYVKKAPQEPKEEQVYGINNKDIKIRQPDVPYSKCLGISYDDELFMWHAEHGGKDLGLFESSKEAYEAREIYINSIPMPRKVNGAYSKARGISFSRIQKLWSASVKGQIISYHGSEAEAIMARKKYLKSHNLVDIKVKDGYKTITLEEKAKLEEKIRQKKESSKSDIKTIPSNSNTKDEMEKENIQKIMDGVKKLKDDLNESSASTYIKSSSLSSQSSSSDSVSSYSGSKSSSLGSTSSSSKSGSLNSKSTSNENSSFYDIHNIGSGDKTKKKVKIVNGSKVQASQTTKKVKVSAGNRVSKKHKSSSKNSTVSNNANSSKKSKSVAINKKKSSKYEGVFYEDGLFMWSAEVDGKHLGLFSSEKEAYEKREEYIKNKSNNN

SEQ ID NO: 5477 - protein, 197 aa, Methanobrevibacter ruminantium
MSKFKYCPMCAEPRADNSKYCSKCNFEFLTGKYVKVQEEEIKITEKVSQEEFVESNQLIQDTSLKINVLISRYLNYSLSNKFNENLPLSIIREYISSCLNSKVPSDFDDNYLQSLDALLNDEGYKNSINLFLQWIDENRSHLPGLVLNQYMIPHQNNVNRIEEILDLELEKNEDNDLFFDLLNKFLISEKEFIERLI

SEQ ID NO: 5478 - protein, 62 aa, Methanobrevibacter ruminantium
MPVVRISGNPNISVETKREMVKKVSEIVAESYNLPIETITVLIEAFEREDIGAGGKLLIDRD

SEQ ID NO: 5479 - protein, 278 aa, Methanobrevibacter ruminantium
MIEISDKFYDKTFKLFRYKNFENLCSNCGIFIEFDGFNDKELVDDGGITYIMDISINDKRGYSVIIEFQSSVVDEADIERFMKYATLTYIQYKKPVEIYVLSTVEEKNRVIRRRWNFFNEFTICVKSLKSIDGDKVLNSLKKKSRFDEDFTGDDIVDLLTIIFMKSVKTTVELLKEICLLVNEINALDEKELYDIKTFLLMYVKKFVEDKQEARILEELIGMRNDLFGRTWASVRNRAFLEGEARVVRCMFNEGIKIEEISKIVGLEESQILKMIGSS

SEQ ID NO: 5480 - protein, 376 aa, Methanobrevibacter ruminantium
MWYDMKRRRFYLILFIILLILAAIAIIGTFSSFSDVSGYDLGSDDLSIAVTGDVMFGRKMPGVLDSGASPFRNVENVTKSADILLVNFENPATYSTNPVKGDVPLKADPKYVHLLAEANEIVIASQDNNHALDYGDEGLNDSIKNLKDAGIYVIGAGNNLSEASKPVVIEKGDRKVTVLNYMDADNFAEYASIMPPATANSSGFCAYDSELARKQVAEARENESSIVIAYMHYGNEYSRSPNEYQINMSHELIDSGADIVIGSHAHVTQGVEMYHGKPIFYNLGNFIFDQSNPATHRSYFLNLDLHGDNCTVTLYPTVIVGYLPQFMDADSAKALLAELYPQCDQLKVNDDGTAQLTFKLGNITDNSTQSNDVRLY

SEQ ID NO: 5481 - protein, 152 aa, Methanobrevibacter ruminantium
MLGEIELKKLFPDFEDLVQPSGIDLELDEIFIQKSEGSLIDNEKNLPDIEAMEGPIYTLKPHTAYLASIRRKVKIPKGYTMLYLPRSTLLRSFISVQTAVGDPGFYGTLMFMIYNHGDFEYKIKSGDRIAQAVVFPVEGSGEYNGSYQEEEI

SEQ ID NO: 5482 - protein, 381 aa, Methanobrevibacter ruminantium
MVEISIVIPVYNVEKYLRECLDSAVNQTFKDIEIICINDGSTDSSLDILKEYQESDDRIIIFNQENQGPGAARNLGINKSKGKYVYFLDSDDYLELNALEKLYNICEEKSLDFVLFKLLNFNDKTGKTFQTKYYNMAFLNDRIGDNVFSYKDLYDCVFNLAVSPPAKLYKRELITDIDYPEGIIFEDNVFFLKTLLKAKRIYFLDEFLYNRRRRDDSLTSSGSDDYYDIIPSMNYLFDICRDLDDFELLKEGLYYKKFKELYIRFSKVNDVHKEEFFNLIREDCLKHKEEIDEDIANDKLRKRSKFIYESVLSSDDYKEFHYRIRLYDKNKEINDLKKENKSLKNENKKLKSSNKKLKKENKHFKSTKAYKVWKKYSKIKD

SEQ ID NO: 5483 - protein, 328 aa, Methanobrevibacter ruminantium
MVEITLGLPKGSLNNVNRGNTYQLFVDAGYEVRGYEPGNESYEINILNDSEIKAFLTRPQSTPVELNRGMVDISIVGEDWVKEESVLSDNDIVKIGDLNYGETRLIVAIPKESPYDSLSEFFRANADRERPILVFTEYPNLTRKHIMENEAYQEIYGDAVPFVQVRGLRDGDNKKVQVINSDGATEVYIAKGADLIVDNTQTGSSLRKAGLKELETILHSSAGLYAGVSCTEEKMVKAKMIYEQLLGAVTARKYFDVKFNIANEDIEKVSNYLIENKFCSHEPTVNHGSSFSQINVLIPKNIFPEMLDGIKELGASSIIRSDVKQYVI

SEQ ID NO: 5484 - protein, 407 aa, Methanobrevibacter ruminantium
MKITVAGVGYVGLSLAVLLAQKHDVTAITTTESKAEMLNQFISPIQDDEIERFFKEVREGERTLNLHTTTDKAAAYGDADLVIIATPTNYDDVGNFFDTSAVEDAIEWTLKVNPDVLMVIKSTIPVGYTESVREKYGIRNIIFSPEFLRESKALYDNLHPSRIVVGCDDDQMEEGQMFADLLLEGAREEEKRANSLEQDIPILLTHLTESEAIKLFANTYLAVRVSYFNELDTYAQTKGLDTQMIIDGVCMDPRIGGHYNNPSFGYGGYCLPKDTKQLLANYKDVPQTMIEAVVHSNSVRKEFIANQIISRNPKTVGVYRLTMKSNSDNFRASAIQDVMKSIKAEGIPIIIYEPTLDDGSEFSRSEVVNDIERFKRESDIILANRLDCDVLGDVAEKVYTRDLFRRD

SEQ ID NO: 5485 - protein, 308 aa, Methanobrevibacter ruminantium
MLTSVQKEILQTLINLYQNSDGKSIKGEDIAEVMNRNPGTIRNQMQSLRSLSLVKGVPGPRGGYKPTIEAYHNLNISVSDSNAKVPVYKENKKMDDVSVAKIEFTSVPHPGECEAVIKVLGSIKDLHLGDVIRVGPTPVNNLGLIGEIVGRDDMDNILLLDISTIRSIPKNTVFDIASLDLIYLKPGDSIKDAAYLLSHNQIDGAPVITEGVAIGMVSLIDIVNALAEGKENEDVRDIMSKRLFFINKDTLIANAVYKMYKFGISRLIVVDDEHAPIGVVTRTDLIETITNFKNFPLLYNMEMDEEME

SEQ ID NO: 5486 - protein, 311 aa, Methanobrevibacter ruminantium
MKVNQISIKKDMKVSELMEEFKGSGVLGAGRVARASNLLVNMINDPDMDIFMSMAGPLVPGGLRYIVGDLIRNKRIKVLITSGANITHDLLESFGGRHYRDLGFNDEELNDAGIGRISDVYTQSEDFEVFESEIIKIFETISKKIDNDKDNGIISIQRLLKEVGSLIEDENSILRLAYENDVSIFAPGLIDSMFGLQLWMFTQDHKLVVDAVGDMHYLSDLVFESDKIGAIMLGGGLPKHYTLASNLLKGGIDSGLQITMDRPETGSLSGAPLEEAKSWSKAKHGSNLVTVVGDATALFPLIYAAALDKID

SEQ ID NO: 5487 - protein, 179 aa, Methanobrevibacter ruminantium
MFNPIIALSYISSGFFMKISDDEYDEKNNKILAIIFGIVCGAFTALASSMSTDAACIFIAILIGNILAQKVDGIHHVVTMLSFLIVLVFLGLPAFSRPSILVVMICVAGALIDEKGNDNEILYEKSKFLMYFFDYRFALKVVILALALFGLVDIWTFVYFLCFEIAYEIARVLFEKFIL

SEQ ID NO: 5488 - protein, 215 aa, Methanobrevibacter ruminantium
MKVKNNIILAMDLMDLASAESVCESINQYIDTIKIGYPLTLAEGLKTIGLFKENFGYKVICDYKVADIPATNEKIANLTFDAGADAIICHGFVGPDSVEACKASAEDHGKEVFLLTEMSHPGAIRFLQKDADDIARMGVEMGISNYVAPSTRPDRLSEIRDIVGKDSFIISPGVGTQGGDPKETLKYSNALIIGRSIYNAEDPETATKDIIDSIQ

SEQ ID NO: 5489 - protein, 256 aa, Methanobrevibacter ruminantium
MIFAAILAGGVGNRMGEVDKPKQFLTLGDKPILIQTVEKFYLNSRIDEVIVLCHKYWLNHTKDLIEDYIPNAENIVVVEGGELRNDTIMNAVKYIEDNHELSEDDIIITHDSVRPFVTHRIIMENIEKTQEVGACDTVIPATDTIVVCHDGNIISDIPNRNYMYQGQTPQSFKILKLKECFNKLSDEDKRSLSDAAKIFVLNGEEVAIVKGEVFNIKITYPYDLKVANTIIDDAKLNISDAETGEYKVNLYDFGEE

SEQ ID NO: 5490 - protein, 340 aa, Methanobrevibacter ruminantium
MINIVYRLVAPKLLEEVYTELNLDVGVIVRPKYLSICKADQRYYYGKRVPEIIESKLPMALIHEAVGTVVKDNTGKFNVGDNVVMIPNIPRARDNIISENYIPSSKFRSSGYDGFMEEYVSLTEDRLVKLPDDLNMEVASFIELISVATHSIKRFKQFSHQKKDVLGVWGDGSFGYITSLVLKVMFPESKVYVFGMHREKLHMFTFVDETFLVDEIPDNVSVDHAFECVGKASANNAINQIIDIINPEGTIALLGVSEFNVSIDTRTILEKGIRVFGTNRSAREDFVSVVNLLEENPNMIHYLESLITEIVEVNTLNDIKRAFESDKNLRFGKTVIKWEI

SEQ ID NO: 5491 - protein, 336 aa, Methanobrevibacter ruminantium
MHEYEISIIIPTYNSSKTIERTIHSILTQDFKNYEMVFVDDASNDDTVSCIQETLADKKVNYQLIVNKNNKGPAYCRNRGVFASRGKYIVFVDSDDLIQFNHISSLHNYVKSDNFDSAFTKGIKINNQDELIDFKVDKYDGLIHLARKNKGIVRAKDLINLELLMKIPFSFVLLIYDKEIILNNSLEFNEDYRYGEDTDFALRYLANCGNVRVIDKYTYFYYQEEDSISRQVSLDRFESVKLFESLDSYFKEDDLREKLVHSRIPRFIFGNMNYFFYNGYNSEDVFKKMDVLDLFNKLRQFKVFEKRDWKFYLKVRLFLLNHRLYYKLWLRFKNNL

SEQ ID NO: 5492 - protein, 70 aa, Methanobrevibacter ruminantium
MNDLKKLYVLLAILIVIYVGINFSYNGLDTINTLTHVNLDLGPSMDNANDANHIKIGSSSFTKLSKIFTW

SEQ ID NO: 5493 - protein, 335 aa, Methanobrevibacter ruminantium
MTKILVTGGAGFIGSNFIKYMLDKYPDYEIVNLDALTYCGNLENLEDIEDNPNYSFVKGNIMDEGLVDVVVSSVDYIVNFAAESHVDRSIEDPQIFIKSNIIGTQVLLDAAYKYQIKKFLQVSTDEVYGSLGPEGYFTETTPLQANSPYSASKAGADLMVRAYGETFDLPINITRCSNNYGPYQFPEKLIPLMISNALEDKELPIYGDGKNIRDWLHVYDHCSAIDLVLHKGKIGEVYNIGGHNEKQNIEIVKLILKELNKPESLIKFVKDRLGHDRRYAIDSSKITEELGWKPKYTFETGIVETIHWYLDNQDWMEKVKSGEYQEYYEKMYSKK

SEQ ID NO: 5494 - protein, 187 aa, Methanobrevibacter ruminantium
MGKFKIVKSEIEGVFTVEPTVFEDERGYFMETYNENDFKAEGIDLTFVQDNQSKSSKGVLRGLHFQYTQPQGKLVRVIKGEVFDVGVDLRKDSPTYGKWVGEILSEENKKQLFIPKGFAHGFLVLSDEAEFVYKCTDFYKGDDEGGIQWNDPEIGIKWPLGNLKEEDIILSEKDKLWKPMKETPTDF

SEQ ID NO: 5495 - protein, 290 aa, Methanobrevibacter ruminantium
MKGIVLAGGSGTRLYPITKAVSKQLLPLYDKPMIYYPISVLMLAGIKEILIISTPRDLPMYKELLGDGENLGISFSYEAQENPNGLAEAFIIGEKFIGDDNVALILGDNVFHGHRFSEILKRAMNLEEGAVIFGYYTQNPESFGVVEFDDEWNVLSVEEKPKNPKSNYIIPGLYFYDNDVIEIAKNVKPSFRGEKEITSVNDEYLKRGKLKVELLGRGMAWLDTGTHDGLLEAANFIETIQKRQSVYVACLEEIAFINGYIPKEKLLELAEPLKKTNYGQYLIKLAKMKK

SEQ ID NO: 5496 - protein, 493 aa, Methanobrevibacter ruminantium
MNRFWNDLILPLFYEFKPEVIVEIGCFKGENTKNILEYCYYTNSKLKVIDPNPDSSFDPISLKNKYGDKFEFLKELSLNGLNLIEDYDAVLIDGDHNWYTVYNELKLIEKRFDQNNFPLIIFHDVSWPYARRDLYYNPELIPEEFRHPYKNLAMFPDKNELGDIGLNPTFNNAVFENTPKNGVLTAIEDFLDETNLNLSFFCLNAFYGFGVLFPSQSCDEKTILQIFYDSDVIGLLEKTYLKLRFTQEHIIKNKNIEINNLKDMNNSLNKKNIDLTGINSNLEKELDKLNNTKTEIEKELDKLNNTNIDLKEKLIISTNNQKELEKLLDNLKDDKTYLENELKDLNNTKTEIEKELNKVTNDKTNLKIELNNINNTNIELEKIVDDLCNEKSSLKNKINDLEYANQRTLKTIENLNGDIYSKTYENDSLKEDNLLLTKTNKDFLEDIKNLNNLNYDLEQKILNLEEEKNSILSSKTWKFGAPFRKISNIFNKN

SEQ ID NO: 5497 - protein, 506 aa, Methanobrevibacter ruminantium
MTYKVSIIIPVYNAAEFIIRDTLKSIENQTMDFEDIEVILVNDCSTDNTAKVINEYAKEHENIVPINLKENNGQPGIPRNIGITYASADYLMFLDQDDTFKKNACETLYNKISTENVDMVCGNHNIVSNGRSNICFNFDWAEEDEIKINKIDENPNFLTMGVAAWSKILRREFVLDNNLKFTEGVGEDIFFSIRALLLAEGIILLKNFIVVDYLVRGESLSHQVNAEYLDEFCEFYLNFFNYCEKNIKNDNLYHPLFNGRLNHVLSMLFFADLYFDDLSWVLIKIHELFKKVAEKPFVFEDTSYRIFFDTLIKDEYPFENSINIYSAIKSNRERKFDKGVKYLEQEAKLYIDNGNGFNEKDSIIANYKIYEFNEVEFNLENFKNIKRIRFDPITWNFINCVIHEIKTNNGDLLYEAINSINRRELYGLNKEEQSSNRNSKENIRYKSSDDSSAEGIADIFLTTDSQYLLYGDFNNLKSIKINFEVNLIDNNEVSKIVENLIENYDH

SEQ ID NO: 5498 - protein, 567 aa, Methanobrevibacter ruminantium
MSIKNKFLSLFNSSSNNSDFENLNNYYKKVLEDIENEDISGYDRNLKYYNDLKDCELFSSEYYITNQGLELSEEYALAHYLNEGYKQSRNPSPEFNNDKYLRLYPDVRLASLNPLAHYVLYGEKEGRRLPLSEYEELENEIVSVKNLIYQNRVTDNLVLLRDKVSKGKKVNVVFVLPAMMFVYKDLYNYFDNDDMFNVQIVLVPHRLGNSQKITDVAKDKHYQIFSYLKEKQYNVIDGYDFEKNEGIDLVSTCNPDIIFYVLPYMRIFPKTMKISNLPSNILYAYIPYGEFVEDNLDDLFFNFGWNEIAWKIFCSTEEYLINSTEKSIVGSSNVVLAGSARMDSLINFEESDEDYKWIYSKEENKKRIIWAPHHTLARPGMDDSLSYSTFDENFEFFYNYAKDHPDIEWVIRPHPLLKEVLSNINTNMRVQGIADENFADDYFFKWESLPNARFHEEIDYFDLFATADAMITDCISFKAEYLFANKPGLILNKTGVELDGYQGEITDAWYNCDGSDFEKIEEFIEDVVVGGNDYLKEKREEIFNKNFNVNLGSASKVIFDYIKNELT

SEQ ID NO: 5499 - protein, 1012 aa, Methanobrevibacter ruminantium
MKKNNFNKKITFVANYFWTSIKEGSKSNSYFNYDNYLKKYPDVKESGMNPFKHYLLHGIDEERSTNFDENINSYSLVENSDLFDYEYYCEKNNLKFDSYSKALMHYLEKGYKKGYNPSIKFNAEEYYEVRPDVKRADVNPLVHYLKYGKIEVTSMTENLNLKEYQLVKNSNLFDYNYYMEKNHLDLRNETEAIYHYLEIGYKKGYNPSNKFNGEIYFKKNPDIEESGWNPLVHYLKYGQKEERTDKCDKNLKEYSLVKESGLFDYQFYKDKYDLDLNSYKRGLIHYLEFGYKRGYKPSRNFDGEEYLKRYPEVKKAGFNPLVHYLKYGVNEERIGLRRISFKNFNKNYDVEAILENIDNDVTILLNVEDSNNLKECIENIKSTTKDYKIILIHENLDDEDLEYIKSNNDIELLRRSPHESFINALNNILDNAKNDIIFLKNNIRTFEKWIFKLTVAAYSDDRIGFVSPISNYSTVSLINIEEDEKSSEFISNISKRDYEESPLPNDSCVFIKKDVFKELKFDESSNEENWFATFIDRGLEKGWKSILDDSTYVYYQFNEVEPQQADEYDYSTPYVLENRPSVKFINSDAFNNSFQNIHEYADDNLEENIQEKTRKNILFAMHYGGGVEFTVKDIVNAIKNDYECYVLRAFKNKMKLYKVFNDYFISIKEFNIKYPWTPKMIHSDEYKQIYFYILINYNIDILEIDHLLLHTFDLQELAKKLDIPIILTLHDFYYICPSYFLLDENNKYCGGYCGDQPRNCSTRVTWIDLPANIVEWKNQWQEYMKELFGMCDYILTATDFTKDMFLEHYDSLKSDDITIIEHGRDLIRYDNNYTVPNIYQPIKILIPGVIGPHKGLDFIKELKGFDDDNRLEYHFIGQVDDELKSMGIYHGPYEREDFAKWVFKIKPSFIGIFSVCAETYSHTLTESICSGVPVLASNLGALKTRIESQGGGWLVNIDDAEETYEQILDISSKKEEYKFVTENLKDIRISSSEEMGSKYKEIYDKLTKKEDK

SEQ ID NO: 5500 - protein, 266 aa, Methanobrevibacter ruminantium
MEFIKYKSQFEKMIDNKIIGMPELIDSNISFKGKNNILCCNNIKLENIDIDFNGNNSVIFLGSNLGVNSHLTIFNNSTLFLGKNNTCGSSISISVAENQNLIIGDNCIVESDVKIRTSDNYPIYNYENSRINHSNSVFIGDNVLLGESSFISRGVKIGSGSIISPCSFLPPLFKAFSNSYVLGNPGRILKEDVYFVNDSINDYTIEEIKNSSINENESGLFDFVEKETLSLDKIDNILKKFNSEDSLDFIQKLFLQNKHKNRFFIE

SEQ ID NO: 5501 - protein, 441 aa, Methanobrevibacter ruminantium
MKKPKTKAQKESREKKPNNLKSDCMKKILYVLHSGVTGGTFLTNKDLMKNVEKEFDVYLLSAENKFLKLFSFSNNKLKLIRKYHRNYGINVETEETETNNISWSAKDFHNSWLSNIYFEILVNYNIDIVHIRHLINHSFDLPQVAEKLNIPIVLSLHDFYFLCPFYTLLDENYNYCAGECSHNKKNCYCPMDSLSDINSKEFISEWRVNVLKMFNYINVFVTTSFFVKDLFLSIYSNEDIINNNNFKVIEHGRDFPKLKKQMFEIPSSNKPIKILCPANHLNIMKGSQLIKRIKEEDNKNLIEFHFLGNCHDGIEEYGFSHGTFERDEFHKKVEEIKPSFVGIFSIWPETFCHTITEAWSCGIPVIGTNIGVIQDRILKNKGGWIVDRNNPKKAYEYMAEIFENKEEYLEIANNIKTMDLKDTKMMSIEYIQIYNNLLEIK

SEQ ID NO: 5502 - protein, 668 aa, Methanobrevibacter ruminantium
MTKVSVIIPIYNGEKYLKECLDSVCCQSLKDIQIICVNDGSTDKTLSILNGFASKDKRIKIISTENRGQGSARNTALKEAQGEYISFVDADDWISENALELLYFHAKSKDLDMLFFQMINYMDNSKNYVETELYNHLCFERNAIDEDTIFNFNDIKEFLFKIPVCPVSKLYKKEFLDSNDLYFPEGMFFEDNAFFYNSLFKSNCLGFLKKHLYYRRRHADSVTQTFDKRKFDIVKATNKVLDVFLENDQYLIFKKELINHTFSMLLEWFNKSPLELKDEFYRLIKRDFRGFNNLKEDFKNNLKEEYLLIFDISDKNKYYLDFLSEYKLSSADYDIFDKERYFHLNSQEYLEYKSNKSNNYKISVVIPIYNNETFIHRTLMSIENQSFGLENIEVIMVNDNSKDNTELVINEYSSKYENFKAIHIKEGTGSPGTPRNIGLYESTSDYVIFLDHDDYFEIDALEKLYNAINEEDCDFVYGTYASVDEDLPTKIIYPNELHGYFKNIYGNPRSIAFPPPSIWTKLFKRSFLIENRIIFPTILGEDAIFISKALFSADGIDYLWDDLICYHTLNKKSFTKNVSYDYLVQGFVSEEYLYNIYNDFESQSYELKENSTIPSEKSSENIEKMNLYKIRSEGILDFYLNQFYRSDLNDEDIYRIFPILSDFVSTRI

SEQ ID NO: 5503 - protein, 256 aa, Methanobrevibacter ruminantium
MALIEKNELFLLEEIVKKNFAAKYKDSILGIFWSILKPLLIMILLTIIFSNLFGGSIENYPVYFLSGKIIFDFFNSATSVSMMSLKGNINILKRTAAPKHIFTLAGVVSEFLNFLITLIILIGVMIVTRSPFYILESMIAIIPIMSLIIMITGISLILAVLCVYFSDIQHLWGVITLMLMYASAIFYPMNIIPEPFHGIMILNPIFWVIGQFRILVLWGTIPSRMNMLNLVLLSVIILVFGIIVFKKFEKKITLKF

SEQ ID NO: 5504 - protein, 488 aa, Methanobrevibacter ruminantium
MNQKRDELNSKQNINLDSENEISSSEINLKKRDPQNKSDLIAQQRMKAKRELIERYNMSESEAESTLKSIENKVMQKKNKKITNEKEIEINSNKVRMDDKNCSLENSAGVSENKDKNDEAIKIQSQNSQIEGESEEIIPEHVLERQNPNKIDNSDYEINSVSDTLPVIEEGESKPIQNAEDEIVKKELVDSVSDVVPVVGEKEENNEPIIKKDDSSDVDDVLSSIIPEYHQKSSIEVNNVSLSFNIENDKIDNLKEYIIRTLKRTKEKKIKFHALNNITFKIYKGEKVGIIGYNGAGKSTLLNVITGIYEPDEGNVKTYGKISPLLSLGAGFDYNYSGRENIYLNGAVLGYDKKFLESKFDEIVEFSELQDFIDLPIKNYSSGMLAKLGFSIATIVEPDILIIDEVLGVGDVNFQKKSSNKIKSLMDGGTTVLLVSHSIVQIREICDKAIWIDKGELREFGEVNEVCDHYLKDAQNATKNQVKDIRFN

SEQ ID NO: 5505 - protein, 817 aa, Methanobrevibacter ruminantium
MNYKISIIIPVYNVENYIEKSLNSIISQSIGIENLEVILVDDNSTDNSANIIKKYVSKYDNFKGIYCDIGSGFCGRPRNIGLSYATSEYIMYLDSDDWLEETACEVLYNTIINENADIVCGSQTRLDNEGNRKFYYHLWVTTLTDPNEDYNTRMKTTQEIIDDPNFKLVVTDLDKNPNILGHANVWGKIFKKDLITENELSFPEDIVAQDSVFLLNSFFVAEKIVFINDIIVHYNNLRCDDDDKSASYVKTTKNLFGRIKAYDLMDNISKKFSKEEFFYRYLLVGKLNYWFNSFLMDSNISTYEIKLLFKKYSHLFSNCYKFNTNLRKDIKNIFKEIDEGNYDIAASTVSKLQSKSFSASENKIKVSVIIPIYNNEKFLSKCLDSVINQTLNEIEIICIDDGSSDNSIEILNQYVLKDSRLKIISQENLGAATARNNGLKIAKGEYIAFLDSDDWLELNAFEKLYENITTNNSDLVLFNSIEHKENANLKERIHIKNDSIPDYNYYTFNYNYKKDLVMNGYLDIWSKMYRTSFLKENNIQFSNHQIFNDIQFHIKTMLNAKKISYCPEFLYNYLRINHPSLQNNLSLGNESFILLDIIDEIEDYLIDNEFYNELKSNFIRFKLTELESTLEKLENPYRNEFFKLIKNNFKKMQLTEYQRKELPPENYQFFNDVLTYDSFFEYALKNSEKERQKLSNALADSEKDRQKLSNDLENSGKERQKLSDALVDSEKEREKLSDALESSEKEREKLSDALESSEIERQKLSNALESSEKERQKLSNDLKNSEKEQELIKKEFTSSNSWKVTEPLRKIRRTIKK

SEQ ID NO: 5506 - protein, 532 aa, Methanobrevibacter ruminantium
MDKNEIFTLWIPDNDDNNLSQLAHLSLKSFLLCDYDVILYTYDHIGNVPNGVCIRDANEILDKSKIFRYKGGFKTYSGFANLFRYKRLYEYGGTWLDLDLLLIKRLSDEDIIIGSQTQEDIYSNPNNALFRFPPKDPLIKTILDYSEKRGSDINHAETGTLLLKKLLASEFPEYNQYLKHFNYSNIVNWNDVGDYLESPEIFLKCLNTNEIYGFHLFNTFFKKFVEFPKDSFFTTLKDIILNSSTSEEYAFNLMKYNITTQKQYIGINEWDLSYLNIFKDAFSKNEFKYTILIDSQNLKKMEIYNIIRAIFSSYGLESEKDIQIIICGKSDIGHDKIKFKDNVIFLASDFQDMKYYLNDYIFGEHIFPINKPVIFKEEFFKNNNFTSDVEHHVLNNSNSILNVLNRESYKLCLLANIDVFNLDMDVLKTLNMRIKEVDNSLIYDYSFRDDDVLKLMKLVDQCDSKSFLNVKSELSNLNIKFLSQKTSYHYFSAYKNILNSNSYDEFILKEHNDKLQCLNAFYLNRINPRYDY

SEQ ID NO: 5507 - protein, 332 aa, Methanobrevibacter ruminantium
MLDADEFIISDNGQNPREIIKKINENYYYLIKWITYVPTNNDDYNIKFIPKRITHVRDESLEQYYKVIVPKKVVNDFNVRVEMGNHNLKFDNFNRNELVKKDLNLKIAHFPLRSIEQCISKVSIGWPNIIAINLYNLSWGFHWKMLFDKIKEENDISLDDLEFFAKNYALVSTSDDILIKNQPINLDFCDKIEIRYDFEYNYLRNILENYAYFAEEIVSFKRKLKSVPILDDRFILKLASDYDVIEKSGLFDVNWYCKRYSPPRNIHPIIHYLLTYRENMNDPAGFFSTEYYFKTHVDVANSGMNPFVHYIKYGKKENRKIASSKSENFGVQ

SEQ ID NO: 5508 - protein, 407 aa, Methanobrevibacter ruminantium
MKITVAGVGYVGLSIAILLAQKHDVTAITTTESKAEKLNQFISPIRDDEIERFFKETRDGKRKLNLHTTTDKESAYKNADLVIIAAPTNYDDVNHFFDTSAVEDAIEWTLKVNPDVLMVIKSTIPVGYSESVREKYGVKNIIFSPEFLRESKALYDMLHPSRIIVGCDDDQKEDAQMFVDLLLEGVRLEEKRSDSPKQDIPILIAPFTEVEASKLFQNTYLALRVSYFNELDTFAQTKGLNTNIIIDCVCMDPRIGGHYNNPSFGYGGYCLPKDTKQLLANCKDVPQALIEAIVNSNAVRKEFIADQIISNNPKTVGIYRLIMKSNSDNFRASAIQDVIKMIKAEGIKIIIYEPILDDGSEFLKSEVVNDLDIFKRESDIILANRFDQDILGDVADKVYTRDIFGRD

SEQ ID NO: 5509 - protein, 893 aa, Methanobrevibacter ruminantium
MEIRYKNLLKVFTIFLVLLISCGFASAVSDLDEGNSANIVDNGDLSLSDNMMSESADNCKNLETIEESHTFSEKNTVKDVSYGLSTPIDGNTFEDIQTAIDNAADGDIIELNGTYFGNGSDIKITKDLTISGNLETILDAKNKSGIFYVNSNNVTLQNLKFYNSIVPEYGSAVHFLSNGSVINCTFINNTAGGVYGTIDYFWSTGGVVYLAKGNGSVINCTFINNTANADGGAIYCGVDGGSVINCTFINNTAKELGGAIYIGGGHDGGAHYSNVYDCYVDNCVFINNTAGEGAGIYYGGGGLIFNCTFINNTARFGDSILVNNMYYPNTVSDMKTLTIKECDFKSNKEGWGYVVVNYKAYKNTICGLCEIIDSNFSNEQAEDYINIYNQGNIYLSGNKISSNYATISNDLIAYGNNANITSQTSLVILDNTTKSVEKYSPFDVYAVLVDDQGNYIRDENISLFIGSKNVTGVFDNVNLFKYHLNDLSSLNYRTLVSGNYDGAKDLVVKTGVLQLDVEVDIDLDYEDDNVIIKLKDSEGNPISGESVSLLIDNNTSSVKTDSNGEAKVPVNEISMVKAIFTDGFGVNVSSYLVVKAVEKVKLVPTFANAKISLDVEDNCSAVIVTLKDLSGNPISSAKLDALVNGAGKTLITNASGQAKIDIEGNATVEVTYIDAENANATVSSSLTVIKNVDSVPVIPNRTATNIICKDMNTTAVAKPDGRIGKYFEVTLVDVNGKALANKSVNIGFNGAVYNLTTNETGGAKLQINLGYEGKYTFAIAFLGDDNYTGSFKVALISVSKHSPKLSAPAKTYKANAKTKTITATFKTSNGNAISGKKISFNINGKTYSGTTNSKGVASVKISLNKKGTYSCTAKYAGDGMYKATSTKFNVKIV

SEQ ID NO: 5510 - protein, 757 aa, Methanobrevibacter ruminantium
MKIRYKNLLKVFTIFLVLLISCGFASAVSDLDEGNSANIVDNGDLSLSDNMMSDSANNCKNLETIEESHTFSEKSTVKDVSYGLSTPIDGNTFEDIQIAIDDAQDGDTIQLNGTYLGNGSPIIFSKNLTIGGSGETILDANGLSGIINSSSEKIVLKDLTFVNGSGFTVDLRENNGDNLKYCSIINCSFEKCYGDKNSAVICLNGSGIILDCDFHYTNCTINIMGSEDVSILNSSFNYTGGYAIHSNSSTIVKACDFYFNSFFETYYENTNKVYNGNIVDLCKNSSISDCMFKGTYYETIIDSLVDSNTYQFSTLHVCDEVDVINCTFIRSITEFSGSAIYHFGNGSIINCTFINNSAGGSHGTPSYLYTQDGVVYIGSDDCLVLNCTFINCHSNTFGGALYINARNCYVINSTFIKNSAYEGGAIYLAQGDCYVINPVFSNNKANHSLYNDINDLNAVSYENDTSDDNQTEKIINPSIELDYLDDNLIIIFKDIEGKAISGESVSLIINNKTISVITDSNGEAKVPLNETSMVKAFYVDANGLNVSSSMMIKIVEKTNYIPIKRNSSFIDCKNMTTSAITNSKIRDGEYFVVSLKDANGKPLSNKPIQIGFNGKAYDRTTNENGSARLQINLAYVGTYTFAVCFLGDDYYNGSFVVAKIDVNAQKASLNAPSKTYKASTKTKALTATLKDAKGRLVSGKSISFTINGKSYVAKTNTNGVATVKVSLSKKGTYNFTAKLDNDKTFKTTASSGKLVIK

SEQ ID NO: 5511 - protein, 1285 aa, Methanobrevibacter ruminantium
MAAYNSGAYIQETLDSLINQSLDFKENIQVIIVNDASSDNTESVCQEYIKNYPNNIILINNRINCGPAHTRNVGLHYAEGEIINFLDSDDYISKKTFERVDSFFEDFVHVDMASIPIKFVGSKRGDHPLNYKYKGTGVINLLNNPDAIQLSSASAFFRSDILKASLFNHSRSRYDGSVSVVYNDNSPVSDSIPMIFNENLSVSEDALLINQMLLRNPLLGILSNCTYFYRKKATDNTSLISDSANHRSYFTSRVNNYMIRLINDSLDLYGKVPEFIQYVVMYDLQWIMEIRQVDHLLDLEDLTHLYDKLISILFYIGDKVIFNQRSIPSILKSHILLLKYFGWGYLDDKTFNFKQIDKKYYDEHGNLIPYIEKDQLSFIIQKLELNKIYLDIVDIKNIKSKINLNNNNNGTPDDDKKDDGKNSHDFYLSSQDDEDRQELYLSGMITSFFNSDFDIYAIVSEKDKSSSHILEKEIKVKKISYPQRDNLSLNFNYGYNQCFEVRIPLSEKTSRISFRMGFKSLNEVCNSLGIETLSEDSFDYINHHDLAFSGDLLIDYNHTSRLSQVSNYKISKDYLILDNGNHMIVRKRSLLTTIKYELVTFASILGEREEGWRTGILLRALYFILYPFYRNKRIWIFMDLPYTADDNGLQLFKSVRNMDKLKLEDYNKLLDLDESLLSRERHPYKYELFEGKDIGLVGLIKNVFSSIKNVFSRDSDDDENGKVKFIKGGSLGLDDKYDELEDNGDYSDYLNEHFGFADVNEDYLDNQDIQVEGSSFEDDIEHSSKFRRNVYGKAGFVKSFDAKVDAKYNDSLNSLENRFDKRVSNIKTRTRNADVREKVGLSRDRDDNFSKGFSPIDFIYGFDLSKFLSENSFVYLVNYILYRISKLLLRPRKIKRIDNRKIKKYFTLEQSTSHFNNVRHMENQYIASSNRDKLRKLLAREKQSNEYNALKKIGPVLAYKSLKHRIYALYAEVIVSSHPDNNLIYPFYGNFPHVAGLVKAKTVFLQHGVTKDDVSFWLNRFDKNLDMIVTVSDLERDSFFPRFDGDGEYISSYYGYDKETVQVLGFPRFDYLESLEDKKEIVIMPTWRRQLHNLKKEEFVNTNFFRTFNALINDKVLLDYLDSHGYKLVFKPHPNLNKYIGLFDKDSRVEFDLNDLNFAENSKDGTAKYGSRRYADIFNHSSLIVTDFSSVSFDFAYLKKPIIYYHYDNDYHFDSENGYFNYESMGFGPVIKSHKELVMSIIGSIESGCTMDELYKGRVDKFFKYHDRDNSRRVYKAILEMDKYY

SEQ ID NO: 5512 - protein, 338 aa, Methanobrevibacter ruminantium
MRYIADELKGRKTSDGKPYEFEFIPKDEFSLSNMKKLATSKYIFLTDNFFALAFMRFNKKTKLIQLWHGTGIFKKFGYDLLEDEQKKTMLKFSNKITNLMVSSHNVIDIYARNFAIDKSKVLPLGIPRNDYYSPEHLDEDYVRQLRGEFEQRYPNLRGKKIVLYAPTFREDPKYNAVFNYFDIEKFIDELGDDYILCIKLHPNYNKFADSANRIDLDELTDTYNIVNFTEYKDEQKLFLISNILITDYSSVMVEYTLLNRPIILFAYDLDNYLENERGFYFDYRKEVPGRIVKDTDELVRVIREKDFNLSNLKEFAEFQFDYFDAYSSKRILDYVLEE

SEQ ID NO: 5513 - protein, 94 aa, Methanobrevibacter ruminantium
MAGTTNLVDAMLVLALGFLIFAVIGWNLQSVIFSDMDPQERQATMESINQITNVTQGEQLNSTPDTSNQSGEGYVEQGKVYKDSKTGNLIMVET

SEQ ID NO: 5514 - protein, 243 aa, Methanobrevibacter ruminantium
MELIFSVFAVISLAAILLLGIELGLLSKFFNLSLKKHLILVLAYSIIIFAVIVILSPSYEAVLNSTFYSFYYYIIMGFVCLALGLLTLFYWSKMEWYPPALKCLLYFDFVPISLSLMLISTALMAPSFAFKVQNFSLNLTMVNSGLILVVLMAILMVIFYLFSDFVEDYRVTHYAIIIGSLLLIFALAYFVLGFIIPNMAPVFANPSTELTLMPIESIVVMVVLIALLLGLGALFRKRTNRLE

SEQ ID NO: 5515 - protein, 213 aa, Methanobrevibacter ruminantium
MTIPGGDFLTTGLNLISQSLLIPVVIILLVFVVVVVISLGGLIYEYTSRTKVSVDDVSNLILEISDSGSVDSMKSAIANSPIPKLQKDILLKIASTGNMSPNTREAFARKLIENEEGLTDKSLEITDIITRIGPTLGLMGTLIPLGTGLAALGSGDVNTLSESLIVAFDTTVVGIGSGALAYVISKLRNRWYEEYLSNLDVLSDAVLDFMAKH

SEQ ID NO: 5516 - protein, 293 aa, Methanobrevibacter ruminantium
MNQKLSNYFNMGLSLYLLLDLILITFTLVFKIENNLYYIIIAIDTILCVILIYEFYNRFKTAENKIHFSIRNSTEILAGIPIDLIFLPFAPNLTVFLTIFNLLKFLKIIGLFLEFFETIDVFLKKTHLDEILGLAILVILVSTLGIYLFDPSINSIFDSLWFVLSTITTVGYGDVLPNSYIGKVIGILILIFGVLIFSAITGAMTSYFARKVFATKDFNITENDDNIRLLKEDLSFNKKNLNNANEKIDKINNDVEKLKRELNEMKEELRESRQLNKELKEEIVILNENLKNK

SEQ ID NO: 5517 - protein, 279 aa, Methanobrevibacter ruminantium
MQRSLFDKVKTSLWMLPSFFGLVNGLGFIYLGRKNSNIKWTIEGIVYEIPWLIAILNIFNLSVAITAFSLGSFMVLISIVRSVMVNYEYQRLLDEEYVVRPSVESGSHGLDKQIKNGQFNEKEASPKEEKVKYNPYDLSGIDKNYDGRIKFDKYKAEIKEMEKEFNEKNDNVKELVEKRFSQSGITYDRFMFIIKDSEDLFNSQAANALDMIDLAPEYTETIDAEIRKKMETLRTIIEKNDELRDELIINMTTETGSEMEIKNLFEDMGHLTSSIKHYE

SEQ ID NO: 5518 - protein, 119 aa, Methanobrevibacter ruminantium
MTMKTGSELKFNDDYEYMTFDLDQEFLLGELGQDEIRDKIITAQEILDNHLANPYEAGQEIEIENPFEKPILRKYIKVNEVTEDMIDIIYYQVRNHYEVYKFVTLTDPAHRGRILIPKD

SEQ ID NO: 5519 - protein, 157 aa, Methanobrevibacter ruminantium
MQFDELMEKGDQARKDRNYEEALDWYQKALKEDKRRSEAWNMKASTLGLLGRPDEAIEAFDKSLELDFNNEQTWFLKGMTLFAVDRFNEADSCFDKAVNSDPHNPVYWKYKGMVLSQLGHNHDALECLDNALELNPDDEAILVFRHTVVEAIEKEDN

SEQ ID NO: 5520 - protein, 651 aa, Methanobrevibacter ruminantium
MKEFKLKSPYKPLGDQPQAIESLSNGIKEGFHEQTLLGVTGSGKTYTMANIIQNVQKPTLIISHNKTLAAQLYEEFKVFFPDNAVEYFVSYYDYYQPEAYVPRTDTFIDKEASINEDIDIMRHSATQSLLSRDDVIVVSSVSCIYGIGSPEDYGEFAFSINVGDIYDRGDILRKLIFMQYERNDIAFERGQFRVRGDVIEINPVHGTPPIRIELFGDEIDAISLINPVTGMREESINRYVIFPAKHFVVGADRMDQALKDIEAELQSRLNELNLEGKYLEAQRLEQRTRFDLEMLREMGYCPGIENYSMHLSGRNWGDMPYSLLKYFPDDYLTIIDESHVTVPQIRGMYNGDRARKETLVNYGFRLPSAKENRPLRFDEFEASQNQVLYVSATPGPYELSRSKNVVEQIIRPTGLVDPKITIRPVKGQVEDLLGEVRRKVEHDQRILVTTLTKRMAEDLTDYYAKIGIKVRYLHSEIDTLERVEIIDDLRRGEFDVLVGVNLLREGLDLPEVGLVAILDADKEGFLRSETSLIQTIGRAARNVDGEVLMYVDEMTDSVRNAVDITNKRRKLQMAYNEKYNITPKTTQRTLKEKKLADRAPSRDDLRGMPKDELKLLIKDLEAEMREAANNLEFEKAASLRDQIVALKSIKK

SEQ ID NO: 5521 - protein, 638 aa, Methanobrevibacter ruminantium
MKFKNSHILLVSLISIFLLLSISAASAADSDIAADDSSVDIVEIEDINIKESHYLCDDASTGSEDLSGDENTSASGTDDATGGNDTDATGGDDTGNATSVNGTENVTDSNGTNATNGTNATNNTKYDGPVTNATIIPVSTSADYQYGNFTFKVVDNATGEPLANQKISVSGVYFFTFNNGSSISTTKVFTTNSNGLLVIANKNLNKNLDTLGMVYNFTALDVGKYDLTFSGNDSLKIVVNNTLPITVNKVNAEIKASNFKDEVGTSKKYTFKLVNKNTGTVIKLASLKFQIKLNSSGYTTYNSTTNLSGQVGYNLNLLAGTYPVRIVNNDSNLKASTVSRNVTLTKKVGVLSASNRTILYNSAPTAIIKLTDKKTGKAVAGAVLKVRVYTTSKKYSDLAFYTDNKGQVSFKAALSLGKHKMIISTLDNNYTASSITRYVTLKKTTGKISAPKISATYKSGKLYTITLKNAKNGNAMYGSTLNIRIFVTSKSYYKYTGMTDGNGKVNINTSSLKPGTYKVSVSSGDSGFTAKAATGQIKITKIPLKLSPTAYKEKYNSGKTFKIKVTNKNTNKIISGIKVTVKVYTSAKKYKTYTVKTTNKGIAYLKVTQKPGTYKTVVSLSNAYYSASAVTSKITVTK

SEQ ID NO: 5522 - protein, 230 aa, Methanobrevibacter ruminantium
MYSETKIAIPIFQKKKEDVISVAQDCIIKGADILELRIDGMENPNPKLVREIIEEINFPIIATNRTTREGGFFKGTDKDRIAILRECADVADFVDVELQTNRKLIESITETGVKTIISYHNFKQTPDLDFLIDIVNQEKELGDIAKIAVMPNNLEDTLTVLAILSHFDDTVAISMGELGSYTRVIASKFNAPFTFAVANDTTAPGQIDIDTMRVLLNSDLINTDEFENNE

SEQ ID NO: 5523 - protein, 241 aa, Methanobrevibacter ruminantium
MKVVAIGADISNNDVSVSKSLVENIEKDIPKLIDLGAKRAALTNVTGDDVVISAFCEDDLLETVNRGIADILRANAESLGDLAGVSDDPSKAGEGLSYAEASLNDDGYQDAIIMAFDTYGGEGFVKDVANSAIEAASGMKSVIDVSDRIGSRTDIPGVGYVSENDTDDPVVVVSVKDLEQIAVVAGAMIGAALGCKNTYLVKRHTPCNVLPGSVLVSVTAFMNGNMIDLSIPFENKTRILG

SEQ ID NO: 5524 - protein, 289 aa, Methanobrevibacter ruminantium
MIILDENVKCLVQGITGKQGSFHTEQMLKYNTKIVAGVTPGKGGQEILGVPVFDSIEEAKENTDVNASIIFVPAPFAKDAAFESIDHLDLVIIITRATFPIHDTMEIMAYAKAKGVTVIGPNTPGVISPKVGKLGIMPTHIFSEGTVGVISRSGTLTYEIASQLSRAEIGQSTCVGIGGDPVIGTPYIEVLQMFEDDPETTEIVLIGEIGGSAEEDAAAYIKENITKPVVAYIAGISAPPGKRMGHAGAIIAGNSGTAKSKMEALESAGVKVARKPSEIVEYIKEIRGE

SEQ ID NO: 5525 - protein, 400 aa, Methanobrevibacter ruminantium
MDKEEIINKLMAGEMKLYQIDKFTENATEALDIRREFIERHSNCELNQIANYTLDMEKAFSKNIENPIGTVQVPIGVVGPLKINGEHADDEFFVPLATSEGALLASVNRGCSAITASGGVNARVIGDKMTRAPVIKTDSVVEAVKVKSWFETKFDELKSIAESTTSHGKLVKIDPIIIVGNYVYPRFVYSTGDSMGMNMVTIATEKVLSKLYDDLGVHAIALSGNLCVDKKPAAINLVEGRGKTVVADILIPEEIVKSKLKTTAKAMEEVNIAKNLIGSAAAGSMAFNAHFANMIGAIFLATGQDEAHVVEGSLGITTAEDRDGDLYFAVSMPDLPIATIGGGTRLETASEGLSIIDCLGSGKVNKFAEIVISTVLAGELSLVGALAAGHLAKAHQELGR

SEQ ID NO: 5526 - protein, 134 aa, Methanobrevibacter ruminantium
MSDKEYIDFKKEFKDFAQDLENSKPIFDDEDLSFDDFDNLIGNIGENNLSDDSIDRYGSINDDLDKLDSLFGSDCPEITLETENMLMNLSIKKDYSKIKDFNLRKKEFFKDLKDFIDEFESTEESDELMKFYDD

SEQ ID NO: 5527 - protein, 51 aa, Methanobrevibacter ruminantium
MCSSGGPMADLSMKKLKTKKYKCLDCGNEFKGLGRKVICPSCQSDNVELRE

SEQ ID NO: 5528 - protein, 134 aa, Methanobrevibacter ruminantium
MVGIAKAGEDKMLFIGTPDNDEIVQYLEKDDLIAVSSFNLGKKYEKGIRSLIYLTRDIESPIIVLPKNHPASKRLKMVLSVGENVRLDCGIIPGTHPEQDILCSCDSLSGLNIVKSADGVIIEGNVPDYKIEPF

SEQ ID NO: 5529 - protein, 237 aa, Methanobrevibacter ruminantium
MLLHEQAFQLIGESIVVLVVLIIIILIIALILGIILLRRNKLVFPSLIIFVVNVFYSPLKSLANFLRLDDALVDHIGIEVRNKVNKPKFDQIPPEEKIIVLPHCLRSRDCEASLKESGIKCTFCGKCAIGTIKSKAEPMGYKVFIVPGSSFVKKIIEQNKFKSVVGVACHVDLNQTMMALSDFYPQGVLLSTSGCFETRVDVSKVLSTIGYYEYKEKNKSIDDEKDDSEDIGRIKPS

SEQ ID NO: 5530 - protein, 129 aa, Methanobrevibacter ruminantium
MEENEISPFFTIKKIREGDSIQLDQKYIKVRSNTDKVIAIHYKAPIERTIELEMFFEDYNPIERLNYNIGDTGWVGANFRGLIDGKDKSLPVDYDYKILLLEEYKCLSKVELKHVKRSSKFRPNYTIAK

SEQ ID NO: 5531 - protein, 223 aa, Methanobrevibacter ruminantium
MNSKKIAIVLGIILLSFAIVGSASAFNLFGGPTTDFDNKFMSGTFTGDVSRNNISTNDSLSDWVDSYEDKERNITYNMSCIKGGSFLTDLYELQGMAAPEVRNFNGEDWKVYYSQAVPTTDENKTANESSVINVYICEADVDNVTYMINIIAYDNESIDCDGSLYCGFFKDDIQPLLESITLKDAKKAPQIYDLLNMTKDDFKQLQDYIEQVKTGNIPETAEG

SEQ ID NO: 5532 - protein, 172 aa, Methanobrevibacter ruminantium
MKVTVFHANECDKKKCTAFKMEKQGKCRIVYKIHQIPRGAVVLNPFSEKAVSFEDRGLVEDKGVVGLDCSWNKVSKSASFFSLSKYHRSLPFLIAANPVNFGKPCILSTNEAIAATFYITGFKEEANHIMDGFKWGHSFIELNYDLLEAYSSVKTSAEVVEIQNEFLAAHEK

SEQ ID NO: 5533 - protein, 53 aa, Methanobrevibacter ruminantium
MEDVEMARFEEAENRMFNVKICLKCNARNPAGATTCRKCGYKGLRFKAKEPRG

SEQ ID NO: 5534 - protein, 62 aa, Methanobrevibacter ruminantium
MLFLLFNYVFLYAILIIANLSFSIDLSTNSFSIYNHYLIFFNIPLFLLKKITLLKVFLNILK

SEQ ID NO: 5535 - protein, 249 aa, Methanobrevibacter ruminantium
MENVEQHLKEILKTRKIHLTLIDPDEQSPDEAVNIAKEAIAGGSDGIMVGGSTVDTAALDGTCKALSENIDNPIILFPGNINGASKYADAIFFMSYLNSNNPYWIIGAQALAAPAVNKTGIEKIPMGYVVAEPGGTVGWVGDAKLIPRNKPKIPAIYAMAAENLGMRFFYIEAGSGADQPIPPEMVAYTKRATSDIVLVVGGGIRDGIAAYTAAKAGADIVVTGTVVEETSDVKGKIQEIVAGVRKASE

SEQ ID NO: 5536 - protein, 361 aa, Methanobrevibacter ruminantium
MLNSLYTEAINKKGQLKEPLEELNESKIDLESKWNDTPIIPSKSNHIIAAGDGSYNKKKYLNFNFYAVAAESLIYNPTKEENKLSSIESVELDIMPHQSFLEDRLRNMMSIFEIKTAIKTFREYEIDYYLDDGSILGDLIRPIPLETISFEKKQEIIDSAYLKIKKGYENMDSDISSLNYKEEFKEFFDDEEIDEHDLIRLLENLENLIALKYLLENRKKIIAISKTSSSNELFYANIPDMAILDRFTRKEGFSKAYYRKVSYKVKHDFPIENEFFRNLGFTTVFARLKDYKNIIKIEFPYYIDDDEEIKNILSILKDNSTEGYPYLLKKAHKDVVISNQNMTSLSNVIGFLDKSGREMLD

SEQ ID NO: 5537 - protein, 502 aa, Methanobrevibacter ruminantium
MIGRCIGETSLIELSFISKEMPQVGEYVSIEYDGKVILGMIESMVRGSVSLNDDIYDPDTIEKIREIEGDDFYIKGKVTILGDINDNLRLPRTPAPPGTPIYRASSEILKDIFQMDNSLKLGHLISNEEVEIGVNINSMVSRHLAILAMTGAGKSNTVSVIIDGLLEYNGCMLIFDMHSEYVDAEFTNGEVNVIDPIINPQHMEFNEIKKLANIPSNAPLQERYFRRAFNEARKKVQEGVAKPTDFIEILEDVLVSMHESEQYESADKKKILDVMNKIEDLKVKYDKLLNTNVGDILKQLKPGMANVLDLGQVDENTAEVLVAHVLRRSLRSRKAYVKNKDKSALSYPIFFIVEEAHILAPQNRNPNSKYWITRIAREGRKFGLGLCLVSQSPKSVDAETLSQANNMIILRLVEPKDQRHVQTASENLSEDLVQQLPSLNIGEALVLGLMTKVPTLVKINEFKGRQRGGDLDIIEQWASQKKEKKETLQIELTRFNDLSGGY

SEQ ID NO: 5538 - protein, 463 aa, Methanobrevibacter ruminantium
MRFAHISDSHLGCRQFGLLEREKDFYEVFNRTIDKIIEEDVDFVIHSGDLFDSNRPSTEALLTFQQALLRLNEAKIPVYAIAGNHDSILRKGSLPPQVLFKDIGLNIISPEHPVHQLGAVLICGVPFATSSQKNALVENYNILSKVADTAVKSILVSHQGISKWMPEDSYEIDLDDLPKNFDYYAMGHLHNFYVEDYGKGKLVYPGSMEINRTSELNDNFKEFGKGFCIVDLSEDIPTVERVTIDLARKFYNEIIEYDKLDERLSVIEEELKTLEVKPIVDITVRGGDFESADVYEKINEKIGNDVLSFRPTFKPDNVLIGENQLDGDKTLDPKTLLKQTVDKKFAREEVTKLSVDLLDTLSEKRMGEAKYISDEFYDEYYYHKDENEVSSESEYGGSELNVNEHNDDGTSHLESSAYDSVSDNSSSLDDYLNKNLDSKEEVSDKEKSKENQVKTKEVSLDNF

SEQ ID NO: 5539 - protein, 932 aa, Methanobrevibacter ruminantium
MIFKHLQLKNFKSHADTELDLDLGISLIVGENGAGKSSIFEAISFALFKNYTTNNITDLVRTNKNLDEKIEMSVKLTFLCEGNEYMVERGGILSPSKTKSKPNFKSISNLFKISNGREDIIASGNKEVDRQIEELLNMNSSTFLNAIYIRQGEISALIDDTPANRKKLITKLLRIEELETAYNNIPSIIEEYKTRKAVLESNIRPESELNFELKKAKEDHFNLDDQIKKSKEEFEGLKVELENIKEEKEKLDKEKSDFESLKLKHAHEEENLSALNKGKEELFTKLNEITRNETEMGILKPFCEKLPIYKEFKESFLALNKLKEDEENHKKTLSQIEEYKTVIKDEQENHEKYIALEGEIKVLNNKKIEMSSEIKNLNELESRKDTLTQEVSLNNQKLETFFNSSKSVLSQFDLEEEISPIKTNDDFNKLESIVEDLRTNLRTSIDNTSTEIDNLKKESISLKQEIKSLDEPLADIKKVENKCPVCQSEISEDKKNELINGYEATISGNTKRINEINGFLLKLNEDKSLNESKLKSLDSIKNDIYANKHIVDDLDKSNKTLETLDAKIKELQGKKEELESLDKMIESKNGEFIELEAHNKKYLEASTLLKSFPDETKVKDDLYAIYGKIKTEDEKLKTYISSDSELSLNITLEELDESIEKLSEKDKRYNILLGSVKDKKEYEDKYENKKKEIESKTQEIEEIKKQIESSSYDEEYYNHVNILLERLNNKFTYYSQDIAVKETNLANFETVIKNIEEIIQQNREYKEEYIAVTEYYNLLEDFRKLYSKDGIQRDLKSQSRPLIQKNTKDFFDKFSFKYSDLILDDDYNISIFGPEGEANIDMVSGGEKIAIALALRLGITQAMSKGNIETILLDEPTIHLDSFRRQELINVLRSMSIIPQMIIVTHDTELETAADTLISVEKEEGISKIENS

SEQ ID NO: 5540 - protein, 141 aa, Methanobrevibacter ruminantium
MFEEDEKVNKIFNLIITQGIDSENEYKIFTERLYSKPDFLWTESFARDYAPFGEQFFSKVDIIVLLSGLYNDNKELFDTLIKKSEEFDIPLLLVRPYGMEIVPEELEEKVKSVVGWNANCIIDDIKSIIMGDYDFDDDFDI

SEQ ID NO: 5541 - protein, 357 aa, Methanobrevibacter ruminantium
MTSRRAEHERYLKSILSNSLSSGHPSKEAIERYRKSSPTYYNKLKLGLMNKYKDWDLLDIEGSSVIENIYGETLRIRRREKLDFHLEDKKDEIKNELSSNLKLIPGIGYQTESRLKENNYHTIYDLLQHDKYSHKAQKALNRIERNCFVSDFKLLKESSKYPMDHSQPIDKNRTLKALSSLDPFNLKFMDIETLGLSNVPIILIGIAEIKGKWIESNQYLLRDIEEEPAVIEAYLSHLDEASVHVTYNGASFDIPYIKNRAHYYRMDYNLDQIHYDLIYPARNLWKDVLPNCKLTTIEENLFGIKREDDVPGAFIPDYYQSYLKENNIGPLIPIIEHNRMDIVSLASFLMKIYEESF

SEQ ID NO: 5542 - protein, 102 aa, Methanobrevibacter ruminantium
MELTAEKRKELQEKVTTDINAILEKHELPYRMDGISVMKTSKGTSFLGNIRVHDPYKVKDVRKEVEDYFESYGNVTITSRDVVPCCELPYTYITFHIDYFNE

SEQ ID NO: 5543 - protein, 918 aa, Methanobrevibacter ruminantium
MSTESKDKQMGKIDQFKNDIRFRRKIEYVETIPGKDASYKKVDVLNKRILQYLEDKKIKLYRHQALAIEKTREDKNIIITTPTASGKTLAFNLPVLEELISDNDACALYIYPAKALSYDQLKVLRNFEDEMGLDLNPNPYDGDTPKAKRYKIRQESRIILTNPYQIHHILAWHHQWERFYSNLKYIIIDEAHYYKGIFGSNVAFLIRRLKRIAKFYGSEPKFILSSATLANPLELAEKLTGESFELIDEDSSPSGEKDFVLYNPYKSIKKDSKDQFDMDEYSRSVHMETERIFLYLILKDIQTLCFTSSRKIAELIALWTKRDMEKVKKRNVEKIAAYRAGYLAEDRRQIEDGLKSRDYLGVTSTNALELGINIGSLDAVIISGFPGSMISTWQQGGRSGRTNQKSLVILVAFENQLDQYFMKNPEFFFDKPHENVVIDLNNEKLLKNHIICAANELPLTLEEAKEEFNVTEDFLDNIVRNRDLRKSRGFYIYPYDDSPSFNFSLDQISNEIFTVMNGRTVIEHMEKSNMYREAHEGAVLINQGQTYIVNKVDLDSHFIFVKKKDVEAHTIALKRTNIKITKKIKKHRIGEFTVHFGELEVEEDYFKYKLMQYSKVIGEYIIDLPPLKFNTKGIWFTIPDSVKDKLEEIYKDETEVFAGGLHGTEHAMIGLFPLHVMCDRFDIGGLSTNYHEDTQEATIFIYDGYEGGIGICEKAIDLITELTKSTRNLIKNCECKDGCPSCIYSPKCGNDNKPLHKKATEYILDYMWDEMNKLSPEDLAKLEEERINTENSDYDNLNGHSDVEVEYDKKPNNAEIEIDDEREADNAEIEIEDDEAQEEYEKALEEFNKENYSIAKDILTDIIINYDNQSADAYYLIGKILFIQGDSMGALSFVKKALSIEPAHELANEFYFELKNSY

SEQ ID NO: 5544 - protein, 855 aa, Methanobrevibacter ruminantium
MISYEEFEKLVVEILERDISSNSDQKAAISADKSQSLFIVAGPGSGKTTVMVLKILKFIFVDDVQPKEILATTFTKKAASELLSRILSWGDKLKKKIPVFIMDKVMNGEMADGSVVDKVRKIDFNQINVGTIDSIADELLRVHRDAGTSQPILIEDFVANSVMINECLLKNDMYLHESLQEYLAEITGKESQIDQKPKVKNLTAMADILLSIKEHIYYNMVDINDILADTKDNERGKKIALNLIMEYEKTLRSQNIFDFAMLETEFLNRLSSGKLDSFLDDVKVILVDEYQDTNLLQESIYFRIAESAIKNGGNITVVGDDDQSLYRFRGASVDLFTNFIERVSRIGIEAKEINLKTNYRSTENIIDLCNDFVELDDEYQDARVKEKPKIVFPNLDSSEDTSENESPEDLPNEDEIETQKIPVLGMFRSSEEKLAMDLTNFLDELNRKGKVKRKVKRVLNKDINKKLNSDSEDALESYKKSGFELAQSEGEIIIELDEETGSIDDVAFLTYSPKEVTHNSRKFPFILKKRLEHLRTPIRVFNPRGQDLQDIESVAVFCGLMLECIDPNSYYQNSNKKLPRLARRNMSVWRRKAQSFIKDVNPEPHSPISLEDFIIHWQVRQPFNTNGSKDLKWPKEAGLMELAYKLVTWIEEFQDDDEGLVYLKAITQTINQTSFFNKYSSNIVFTSHEAEEESINEALMNIFVPIAVGGVKIDENLFEVIPPNRFNIMSIHQSKGLEFPLVIVDVGSRFKKNTVRESNLRFPKKADKSSIIQDRIRKYSSLGESERDSKDRAFDDLTRLYFVAFSRAKDVLLLVGLNPNIDGYKQKDKLQKIPNVALGWNRDEEFIGFDDIYLI

SEQ ID NO: 5545 - protein, 469 aa, Methanobrevibacter ruminantium
MKLSTRSKEYIIPEYSLTGDLLSFLTCNLQYRYQNKGNLPPSMPIQLWFGEFIHGVMEEAYLKWNNLSDEEKKDFKWDWERDIKPIEDIITKRLKVKGLNPPINYTENYGPKENMYSARVDRSIKIWGPHLFPLIEDAEVLIKGIRDMPKDNEGHSRSEYYSINGVIDVLSSVKLDEIYSIENDFNGDNEKSKNTFKQTTLDSFFVIDSCDIDNVRDKSSKKSGNKILEYLANNEEFKTILENLEDDEYEIIIDYKGMRRPSAPNKNDIDKNNIHLLNEDSNDENSLEDYKTWIQHEWQILTYAWLRSMQEDAKPVICGIIFYLNELVPSTEDLLLIREDLENNKTDIPRQSIPKDWEILKNWDENGPKAIHDDLSKKFKMDRSIRIINIKEDLIDDSLLEFDEVVNQIESSMIRELNGSKIKEAWNANAEQRTCNACDFSTFCNKKDLEENTNENSNEEDNKPVFSVP

SEQ ID NO: 5546 - protein, 226 aa, Methanobrevibacter ruminantium
MDYDINENANYSKIFIDELKLSRLPVAVKFINDESEVPEGIEKIDESLRHCEMITKAAKGESFYSTAEEQRCAGGASAMGLIDLPPKIASGELYYNLGRFESIETAKSVLDNIYRKDERSFGIVYAPLEKANFAPDVVVVIANPKNGMRITQAIVYNSGEMFNAKFAGIQSLCADAVSGPYVSGKPNATLACSGSRAYAGIEDEEIAYGMHRDNIKPIIEAFANMK

SEQ ID NO: 5547 - protein, 246 aa, Methanobrevibacter ruminantium
MSNLKIISWNVNGIRTRIKNKDINPVLEKEPDIILFQETKASYEQMDKKFLNKNPYDYYFLKGESARTGGLASFTNIVPKIIKRFFIKSQDAFHRACVLDFEDFTLIHIYAPAGTGKKANFNQKLDYFNSLLKYVEKNKDKNLIIAGDFNIAHNDIDISNKDTKVSFTDEERSVLDKLESFGFVDALRLFNEEESFSYWKNKEENDGARLDYFFVSESLKDKVKSSSILVDVEGSKHLPIELEIEI

SEQ ID NO: 5548 - protein, 218 aa, Methanobrevibacter ruminantium
MLSVSAVITAAGKNSRMRQDQEKRNLPLQNKLTLPFKSKTVIETTIDNVLNTKGIEECAIVLGHYSSEILPLIKDIDDERIKIVMNNPIDVGLSVSLLNGLNNINSDIALCVTADQPTVSSTTFNNILDSILNSSNPNKTISVLRRLDIGKLDTAKGLGMPFAASRCELIDYIKDKDDNLNPILREIFADGFEFYGVEENHPDELININYYSDYESLL

SEQ ID NO: 5549 - protein, 409 aa, Methanobrevibacter ruminantium
MPRLFKKTSFKIFIALIVIIILLIPISMAMTSHHNTQNMAEISKYENGSTVFNGDNIIDKNKINKYPIVSDIGALTDQILRGDIADAFFSISTGVVPTPASELVTGNITKSGEIQGIKGPAYIDIEKDQINIVEPGNFLYGFNTPYTQAVIVEGGIDIINNKTNETIKHINANDITNDTLPGDMVSEETIKYWYNTSQVGSKYNIEFCIDGLNDNRSYITPTELKEKFPEAYNYSIKYPGGSPVILYKDNVNSTVVSSTYTYLGSHPQYNDANREYNARQFVTAWNGTVIPANTSGCGREGVYFSAVKEANAQSGMATHGVCPPARALRNAVLALGFSLPVGMDYGEDAVLFGYSPSTGIRVTNTLDYPIQINMWTEGAGTGMAIYADVVEYIPNNVTTTNSTETGTTI

SEQ ID NO: 5550 - protein, 443 aa, Methanobrevibacter ruminantium
MKAAIIGLGVEGKKALNSLLKHNWDVYASDLNVNIKMDNLPISLAQVNVSPSKDKITFQKDNLTIDLGFNNQEIINSADAVVLSPSIWGSRIAEHYKNSGKLLCDVKTKHRDIFTIGVTGTNGKTTTVSMIKEILENAGKNVLVGGNGGGGFEGYYDLILEADEEEYDVLLIEVCDMTVGFCRYCFDFDIIALTNMGNDHMDVHGSMEGYKDSLKEFFKDKTIFLNKNPEFPESFKEEFIGISKNTIEYGETDYEIDLFGRFNRLNAGLSQSLSEYINENVFEIDEEIIKTSLENFKPVKGRLELLKLNDCTIYIGKSDNSDAIKVILDEVDFTAIFIGTPRHNENHRLDILNEVVNANPDAIILFPGLEDTLDQAIYRLGLLNYDGRIEIANNLDEIVAFVAEFSHDPAIFIGGNGQETIIKIQDRLREIADSINESDYECD

SEQ ID NO: 5551 - protein, 367 aa, Methanobrevibacter ruminantium
MKGEMMTSDEKIKLVEELCMTPGISGFEEKIAEIIKRELKDVADKIEVDKMGNLIATKKGSSKKGPTVMLASHMDEIGLMVSYIDDNGYLKFATIGGINDQMLMNQTVVIHSKNGDVTGVIGSKPPHVTKPEEKKKVVPYDEMFIDIGAKDKEQAEEMVSIGDPITFKTWFEAFPNNLVMCKALDNRLGCYVMMEVLKRVDSKATVYGVGTTQEEVGLKGAKVTSYKLNPDMAFALDVTLSGDHPGIKPEEAPVVIGKGPAVILIDASGRGIITPKYIRELLINTGEKEEIPYQLEVSSGGTTDGTAIHLTKEGIPTGVLSVPTRYIHTTVSVASMDDVENTIQLIVAAINSLEINFKYIFSILNTF

SEQ ID NO: 5552 - protein, 386 aa, Methanobrevibacter ruminantium
MFGVKKMKYKSKFGFGCMRLPLKDENNPQSIDQEYFNEMVDTYMEKGFNYFDTSYAYHNGMSEIAIKKALVERYPRESFLICDKMPTWALTSEEDNEKFVNTMLERLGIDYFDVFFVHNINIPWLELAEEHNTFEYVKNMKEKGIAKKIGISFHENSDLLEKFLNKYAKDIDIVQLELNYLDWEDPAIEAHKCYDLCVEHGLDVYVMEPLKGGVIVNQPEEINNDFKELSQDASIASFAMRFCASLEHVKIVLSGMSKMEDLIDNINTFENFKPLSEEEFDFLLKEADKLRENLAVPCSECGYCLKACPLEIPIPEYFRLYNHHKVQKESNIYRLYFDKLADEKVPASDCTQCETCIDYCTQKINIPKELEKLCEHFQEGFSPYGN

SEQ ID NO: 5553 - protein, 2632 aa, Methanobrevibacter ruminantium
MKFRTPSKKDTNKDIEKEFKNLRKELLDLTLRNPLLNFKARNRNLSIINQSPINIYRTLVLENKKMFFQANKKETKKSKAHAFIDEAKEFLSQESDKTLKADLSPSELQKRLFYIDQQSKTMVQEQGYNILYIAIGFIEWIDNKKPRQKNLAPLILIPVEMERKKVGNSFSLSWTGEDLQNNISIQAKLREIGIELPKFEQTSYVEGVNHYLENVRQAIRPFPKWDVKYDIALGFFSFTKFVMYNDLNPESWDENIDLTKNELIQAIFNPSKNVYEDTFEEDDVDEKLHYKTMYQVLDADSSQIAAIENVKAGHNLVVEGPPGTGKSQTIVNLIAELIAEGKTVLFVSEKMAALEVVKSRLDSVGLGKFVLELHSHKTRRKKFLKNLQKATNVRSTRDLKLDQTLRKLENLRDQLDQYAEIIHRPMANVKLSPFELYGMKESSEDYFSRQNRLLPLVRFDNPEDITMKDLDDIIISLENLSELYSTISKNNPWSYCNPKSLLPADLREIEQLIMDTLEALTDFRYEMDIINEVYGIKVPNTLQEYEDSITALSLLNSETVNLIDSSILLNREWYSNPEQAQILIKLLASYQQSSNLFDKFTDYLLIADLDTLIQDLNKDLNKKFRLFGGNSHKDELSRLYKGPVPSEKEALNDLIKVRKEIKVRQSYNDNEKLGIRYFGDLWGKNANVQELKEVSIWMRKFTHLLSNGTFNENTVKMLSNEIFHPSIDDGIDEYIEKGNRFYESLKKLESKLNPRSKIIFKKESEDVPFDKWEIQLNKWKGQLSSLHLWSQYSNTKRACMNTHASIFIKTVEKRNIKKDDVKPLVLGNFADSLLNIVFSENEILAGFIGELHENRIADFKDLDRKIINLNRKRIFNKLNSQIPKIFGGANDPEAKILAGEFTRKSGHLPVRTLLEKAGGTIKKIKPVFMMSPLSIAQYLDPTNPKLQFDVVIFDEASQVKPEDALGAFMRGKTAVVMGDTQQLPPTSFFDQMTDSEGGEEVATALDMESILHLCKMSFPVKMLKWHYRSRHESLINISNREFYDNELLVYPSPCHNDPELGLKFHYNPNTAYHRGEGSANPLEAKDVVKEIFRHFEKYGDKKSLGVGTFSVAQKNAILEELEIERKSHPEFEPLFSDKREERFFVKNLETIQGDERDVILISVGYGYDTEGKMSLNFGPLNQDGGERRLNVLITRAREKCVVFTNFRAHDIHLTANPPFGVKSLQSFLEYAENLSQNQFIDQEEDEEAPFEDAIYNFLADNGYRVDKRIGCAGFRVDLAIIDEENPGKYLLGIQCDGHNYASSKVARDRDRLREQVLNGLGWKIYHIWSTDWYRNRDLARARLLEHIENTIITTKVNDLKSKIHDAESMQINPVTTVVIDKKNKEKDSDDDSDSDKTDKNKESLINNYLKDLEDEFGDNSDKKDNNNEDDDSNNDDGGLVIDSTDDSIDNPDDGGLVIDSTDDSIDNPDDEGLVIDSDTNLGSEEFDIGSDSVLDDDSDDEEFGVDSDSDLDEEEIIEDSEIKLSDTLNTDLKDEDIYEPEIELDDNSDSDLDEEEIIYEREIQLKEGSDLDTEDEIIIEENNNNGSDIDLDSDDVTVFELSDEDSSSDSDDVTVFELSDDDSSSDSDDEELDNDSNIDLEDEESDDNFTLDLEDQSNNLMPKSTIDKSEFLKDLYGEDDDLSSTIDEEPKILNDNNEVINKSFDSKDKKSSKNISKSELKNQEKAKSKTKSKTKSKAKPKNRNQEIKNIENGKIKNDDSKKEQNKPKSKNRSILNRLKNIGGGLGLSRSEESEGKEFIKAEDKKSKEFVSDAKKSIKRKDRKAKDKDSNDKKEINKKLNKEQNIKNNKDNIVESDKKQEEIKEEIQKPVPKSKPNNTKELINQNNKTIEELEEYINNSSNNSDLEFDGASDIDLEKEIISEDKTKLDVESDIQMDDEYVIVDDSELEDEFEFIEELDDDSELEDEFEFIEELDDDSELEDEEFEFIDDLDDDFGSEDEYELVDDSELEDEFELIDDLEEKSNNYDNEDINLKEDSEYLEKEESEDIMRQKESVSKRKVEHEIIDDSLDVIVPISAERRADEYNNYSEDANVIIPIQDEEEFEEEYYNNDSQVDSEEGIDELEELISENINYSDDDAREEFLTNKESNQESEEDSYYYSAVGIENSLKKNAVQYPKSSNRNKKGIVGAVSSLKDEMLYINASIKEIENPTEREKIYVIDPSEEEYYNQPDDSIYYNDSLSENKERYAKSKQYEDEVEVISPVSDSDEGETGHIQSDYIERKAEDSSKSSSESLFSPKKHEYLDKIKEYAAESEYEEAAENPTISPVHTEIEESVESSVISPVHTEYVETVESSAISPVQQEYDKTEEPSTISAEDQETEFIDDILLEEDELSNIQDTDDSALAEEEPESIEIDDDEFESIITDVDQDYQELEKERIKEANVLSAVDNTRLTPTGKLEDYIVAYKEIDDVIIKSATEIYDDEKKVATAVMDIVSAEGPIHVDMVIRRIRESCNLSRAGTKFKEAIFKAIDRNESHMNLIREEDFLFIDYDQIAVRKRDKPNIDLISDLEIENAIDLVLSFEKSLKVKELARIVSRTLGFKSTSKKTSAKILEVIDVMIGKEILVNVNDKIEFR

SEQ ID NO: 5554 - protein, 95 aa, Methanobrevibacter ruminantium
MSITLIHTRRRLAHKKTYKSPNERKKKTLARLSHKERAQRNRDKKRARLDRQKNKNKPKSRKPKKSKMPYRFKYYQFQDYKFNSELDQLEKIDSD

SEQ ID NO: 5555 - protein, 59 aa, Methanobrevibacter ruminantium
MFYSTIMKIDSIDRLRDIRDALLVEQGINPTRNGEQAIRVVVDRIDEIQSTLDKKIEKL

SEQ ID NO: 5556 - protein, 689 aa, Methanobrevibacter ruminantium
MSNSNTDSSDNASDDASGSEIVSGINEELESNNLLTEDLSVDDVILQTSFYTSYAVKSAKSPTVLTFKNSTVVKGDKLYIYLKDSSNHGISGEKVIFKFSNSSYTRTTDSNGMAALDIKLNPNKYAFSAIYDGSDNYSASRKDFTLTVAKVNTKLTSSSSVVRGRNLYTYLKDKNNNALSNKKISITISGKTYTVTTDKNGRASLKLSLKTGTYSTKINFAGDKTYNSQSLSKKIKIYTLKTVMTIPSTSVVRGQYIYAYLKDSDGNALSGQKVVMKFDKIYFNLKTDKNGRVALKINTRLGKIPVKASFAGSTSYSASSKSVTITSYVEKTKITVENSTVKRGKYFYAYLKDSKDKGISNQKVKITLANINYTKTTDSNGKVALKIEENPGNYTIKLNFAKTNSYYASSKSLKINVLNNATAKIIAKDQTVLGEYSVRLTDMNSNPLANQTVEITAATVNRSVGSGLPITKKTVVINSDNIYNKATDSQFIKSIGEVLKSKGYKVIINSNIGPNAHCTDAMGAYSDVCIFCIFGGVDSGMFVDMAASWYQNLLKKYDNEVVLGFTHTQRNLATDTWLERAHDDDYSPKNFTGLSYPGTYLNDYDMDYVYGRTATEMANNFIKYAVNGLSIGLNNTVPCNVMEYNVTTGDNGYATITDLLPGDYAVISSYINKTAGYVADTVISIIEVK

SEQ ID NO: 5557 - protein, 283 aa, Methanobrevibacter ruminantium
MNFNLKDMILIFIRGFLMGSADTIPGVSGGTIALITGIYERLIHAISSIKFGFIKPLIKLDFAGFKEKLFEEIDFELFIPLVLGIGIAVLTLSKVIRYLLQNYTAYTFSFFLGLILASAYILYTKLDEINIKLIILTIIGIILSYIFVGLNPIAANHSLIVLFFSGMIAICAMILPGISGSFLLLLLGQYAYMLDSLNSLNFTEIIVFIAGAFIGILGFSKILNYLLENYESATMAFLIGIMIGTLRLPFNQITSNLTGSWLICLILAIIGVVLIVVLEKKLS

SEQ ID NO: 5558 - protein, 631 aa, Methanobrevibacter ruminantium
MGLFGFLKKDKKEKSNKKFDEESNKDLDEAIEESTDMIKKDSDSSKDKSESDDSKSKESKDSKEKESKSKEPNDSKSKKSKNKESKDSKEKEPKKSKSRLFRRSKKSEDSIDFDSIKHLSKEDMQEAKEKRLKKDSRTKEEKLKDETFRQIAMNHSNRNNRLAAVMEIKSQDILEDVCLDHKDRFVRTIAASRITDPNILEEIAYNAKYTDVRQIAFDQLGQVENVFAEIAKYDKKGKNRFAAINEIDDELILMDIVINAKDKKVRIKALEKINNAEILAEILKNTNDKKITNLIVEKESFDNEEVLSRIAEDESYDKFIRSEAIKKLNPDNEIIREIAINDSNEHVRLIAIEKLEDEDDLNEIALNSEYSSSRLQAVKKINNQEILSQIALNDEDKFVRMETLSKIDDEKILFEVYNKDSDEFVRSEAIKYINSPLNLADIAINDDNLIVSKNALNKIFSLYEEGDFEEDLDELLGKIAIKSNKDEISELSIKSIEKEDVLEHIVNESKNTNTLLLAVDKIKSEDILKNISESNENSKIRVKSVSKIKDKDNLEDIALNGNYNDARVEAIVNVHNQEILSNLALNDEDSKVREAACRNLNGLNTLKEVLAKDTDEYVRKIAKKRYDLISK

SEQ ID NO: 5559 - protein, 968 aa, Methanobrevibacter ruminantium
MMSSERKNIILKGGREHNLQNIDVSIPRDQFIVVTGLSGSGKSTLAFDTIYAEGQRRYVESLSAYARQFLGQMKKPEVDYIEGLSPAISIDQKTTKVNPRSTVGTITEIYDYLRLLYARIGIPHCPNCGKEVSHQTIGQITESIIEEGEGLKIHVLAPVIKDRKGEHKDILEDFRKNGFVRARIDGEIRGLDEEIELAKTFRHSIDLVVDRLVIREGTDFQRRLSDSVETACNFAEGIVTVMFNGRDSEGNETEYEKTYSEDFACTDCGISFQELTPRMFSFNAPQGACPECNGIGTKMEMNPDLIVPNKNLSLNEGAIVPWSKSNKKENYYYQMLQAVAEHFNFSMDTPFKDLSEEHQHILLYGSNEKVAFAFKRRNRSYRVNRKFEGVITRMERLYLETKSNYNRKYISKFMSDLKCPVCGGKRLRPEVLAVTVGDKSIIDVCDLSIKESYRFFQELELTERQMYIGKEILKEIKARLKFLVDVGLDYITMSRSSGTLSGGEAQRIRLATQIGSGLVGVLYILDEPSIGLHQRDNVKLIETLKHLRDIGNTLIVVEHDEETILSADYVIDIGPGAGEHGGKIIAEGSPEEIMESEESITGKYLSRREFIPIREDRRSGNGNFLTIKGARENNLKDIDVEIPLGLFTCITGVSGSGKSSLINQVLYKGLSTKINKKYMHPGKHDSIEGIENIDKIIRIDQTPIGRTPRSNPATYVGVFTPIRELFAETPEAKARGYKPGRFSFNVKGGRCESCFGDGIIQIEMHFLSDVYVPCEVCKGKRYNEETLDIRFKGKNIYEVLEMTVEEALEFFENIPRVARKLQTLYDVGLGYIKLGQPATTLSGGEAQRVKLAKELSKTSTGQTLYILDEPTTGLHFDDIKKLLNVLDRLTDAGNSVVVIEHNLDVIKTADYIIDLGPEGGDGGGEVIATGTPEEIAESGTYTGDFLKVVLNENRTALAKQLVEENSAK

SEQ ID NO: 5560 - protein, 322 aa, Methanobrevibacter ruminantium
MKGTWKLKLRLWLSMAVMFGLVYVLIMLAGNFLGYRGFYGFYAIAGLFVLFLQYIFGPKIVESSMGVHYLSESEAPELHQMVAELAQAANIPKPKVGISNTMVPNAFAYGRSKRSGHVCVTKGILGLLDHDELKAVLGHEISHIKHNDMAITTVVSAIPLICYYLGFSLIFSGGGGDNNNGGGALIGFLALIAYFLGQLIVLFISRVREYYADAGSVELGCQPEKLASALYKLVYGAARIPEQEIKDVEGTKAFFLTDISNARNEINDLSQLDFNRDGVISKEELDQLKNNNVKISGSNKIMEMLSTHPDMLKRIKRLADMN

SEQ ID NO: 5561 - protein, 530 aa, Methanobrevibacter ruminantium
MLWVDKYRPKTFKEVVGNNKQKKVIEDWLQSWQDGNPQKPLLLIGPAGTGKTTIAHIIANEFSEYIELNASDKRSQDVLMSTIGESATTKSLFGENKKLIIMDEVDGIHGTNDRGGTSALNKIIKNSKQPIVMMANDFYSNKLTTIKKNAQVIKMDKIRAPTINKFLRDVVLKNEGIEVDPDVLMKLSKRSSGDLRSAINTLQALVENGGELTEETLDTTGQKDNTATVIDTVTRVLKSTNAINVKRSLRENNEDPTLVMEYIAENIPREYEDNKEIKDAYEMISKADLFFGRARSSRNYGYWRYASDFMGPGVALSKKQTYKKFTRVTGPMAFTLMGRTRGQRALRDRIAAKMEEKMHVSLQVAYTIFPYFEIMFEDDVTAWQISDFLELEEDEIKRFRKKKIPKKVITAMEKVKAEMREEEKEEWRNSIKKGIFANVPSEADLADNNLNKNLIDEDYIEDITIKEDLNNISDDELDEIANEFSLKPSKSRLDKGKNDADNEEKKDKDEDKKEKTEEKLEKGQTTLFSF

SEQ ID NO: 5562 - protein, 314 aa, Methanobrevibacter ruminantium
MLGPWVEKYRPQTLDDIVGQKHIVESLKKYVDQGSMPNLMFTGPAGVGKTTSALALVKAILGDYWRQNFLELNASDARGIETVRTNIKNFCRLKPVGAPFRIIFLDEVDNMTKDAQHALRREMEMYTKTCSFILSCNYSSKIIDPIQSRCAIFRFAPIKAEEIADRLKYIAEAEGCEYEEKAIETIVLFGEGDMRKSVNMLQSAASTGNITEDHVYEVVTKARPQEIKEMVDAALRGKFMESRNILRDVMILQGTSGEDMVNQIYQDVAGRVMDGKMSGEVYMELIGAIADTDFRIREGANPRIQLEALLAKFL

SEQ ID NO: 5563 - protein, 493 aa, Methanobrevibacter ruminantium
MICPKCNTVNDDNEKFCKNCGLQLNTTRICPNCNTANKPNSKFCHKCGTTLSPVDTFKKGIIEENTSNSFFSTYKIPIICALVILLAIGAVTGVAIFGGDGNNGINSIIPLANDTYDDTNLNNYGVNHDNVSQTQSDNFTENQTDNLTDNQTVNQTVENKTKTATVQNQTDNNKTSNNDTNKTKVYSEKTNTTNSSAKVNTEKTNATNSSAKTYTEKTNTTNSSDKVYSEKTNSTNNSKVYTEKTNKTSDDNKKNDTSIDLKTDDNLTSIDSKINNTDDDNNSVIVIDNKQNDSDLNDSDDLNKNGLNDSDDLNKNDDLNDSDDLNNNSDSGKDTDNTLNDTTDDNKGDDTISDTIEMTDVPNLAQEAANNNYRFSSISYKGNVFTQAQCIDIFSEYILNVNNGVFSPIKINSVSSASSPSGEDQSQSISQSDYISIANRVHSWIDSNNQVPNYVGVSVKGQADLSPNKMLELFGQVVLNYAVTGDMPQSVDI

SEQ ID NO: 5564 - protein, 157 aa, Methanobrevibacter ruminantium
MKSIVFNIDCLLNFLKVRRSDLLERKFKRIIISNKVYNNLSNPSISQYIRDDLNTLIDKKFIKIEEINLNTAVFELYYEIINNYDNEILGESEASSIALAVKNKKTLAFNNPKSIEFYLEKYDIKCIGTKDILNDLLDKKIISTDEFYGILNELNQY

SEQ ID NO: 5565 - protein, 258 aa, Methanobrevibacter ruminantium
MRDRIKLNSFAVELRRDWELNPYSPIDLFSIVLSKLPDLTIIFYPMSENTSGMCIKNINLFNEKELEEECDSDDMVVCINSNMSKGRQRFTLAHELYHLLFEEDKEDIIICEDSNKDDSEIEANIFASYLIMPYEGLERYYKTNNIGKWTLEDTIRAEQFFQMSHHATLFRLKEQEFITKEECINFRKVFIGYEARINGFSDDLYVQSEESKKYYSLGKYIRSVEKAFSNKRISSGKRDELLLDAFRSDLTFNFNDGL

SEQ ID NO: 5566 - protein, 113 aa, Methanobrevibacter ruminantium
MKKIGQRLQGLRESKGLSQSDLANYLGISQPLLSQIEAGNRNLNLSLLDKLCALYGCTDSYILCKDDEYNAVNFSFRSKNAAREDLDCISSVHKIVLNMRFLNEIDEDDESEE

SEQ ID NO: 5567 - protein, 244 aa, Methanobrevibacter ruminantium
MAVPEINELFLPLLKTIKDKDEYKVKDITDEVIEIIEISEEDKNITLPNGETLIESRISTANTYLRKADLIESNRFLYYNITDEGLKVLEENPDELKEEDLMENSAFKELKDVYTHDDVTEEIPNPQDALKASLQKQMEDVRAEISNDVIKENEVKYFRPKNQKENDEIYEIRSRRANLKDDKDKSKRKCHDKHHGHKHHHKHKYIVYKEFSPADELLKYAELFERGYLTKEEFDKKKEELLKL

SEQ ID NO: 5568 - protein, 399 aa, Methanobrevibacter ruminantium
MSSKVDLEKAREYNKVKKYEESLSCYQSYLESGEELPEIDKERYAWDIYFARVKNASTIAELEEYVKELTKYAKQKNSSRREKPCSYTISILKLMKFYSDNITFNNNAYKLIAWADKLNPDYLSNNQAKRDDTHKYNSNKENWYLQITKGLFEIKKYDDVIRLSNEALEKIPEFNNFNDYWFKYKIAKSYKELGEYDKSLEYLDEIVKVKNDWFIYHEIAKNYYLKEDLDSSAKWAARAALSPDGKVESKLKLYLLIGDILKAKGYEDEYIMHKYLVYVIRNAKDWTQEEGWDEELASYELDLDNTDYKSIHKELSALWLSLKFIGQERQYGKITKVFENNNGFIKSGNKSYFFNAREFQDDKSFIYEGTEVSFFLEKAYNRKKDEVVDNAVNIYCEEF

SEQ ID NO: 5569 - protein, 398 aa, Methanobrevibacter ruminantium
MKFYNDTDIFVFLNEEYADFEGNEIESIESNIEDDFDYLFNFYEEKEEDYNHLVDFYDENLESFEFDSLIKDYEDYMNQIDSFIDDNQYREDNIESFIEDYEDEGEIFDLIIAKYEQERQEELDYYADEYKNQISPDDVEEKYYDHIESLDEMHYNNYEESIESKFEAYQSSPINNHIDYGNMHEVDNFSDYLDYKDMDTIDFALSQADSYNEIDRSPEWDIINSDGPEYDEPFFIEDFDDCDNIVVDYLENILPLDAELETLIEDDPYDSLENLISFDEEINSNIEGEIDFLISNKLEEMERYEYEVDSYLESLLEDKKAINNSIEAYLDREEYREYDEYYQFNDLELEEIENQGIDFDDLNNLDGTANIYFNRDEEDEEPFDLNEDIYYGDYQYDE

SEQ ID NO: 5570 - protein, 1546 aa, Methanobrevibacter ruminantium
METIAENQNTEFELNEYQEEAVTYYGEKPLLIEAGPGSGKTRVITERVRYLVEEKEMDPESFLIITFSNKAARELKERLMDYFDVDIINQMQISTVHSFCYKLLIENTNITYKILDDDYGTKKNMFIYKNRERLGFKRESTLTRGKVKDVVAAFDKYSTFDVDTEKLVEWIKENEPVSQDYIDFVNEEYRKTGKFPRKKIDLDKKKKNLKTATDYHAYADSWYNALHLQVAKAYPIYKKLLDEHNYLDFNILQVKALEYLKENPETQYTNILVDEFQDTDPVQIEIFEILMKNALNPIEKSKDDAEEDCPPISELELDEAEISDKKITSSFTAVGDMDQSIYGFRGALENYFEYFDNKYCCKKVGLNVNYRSTNEIIEFSEQYIKMQRGKKSRKNLREARKESRNIYYIENEEREMEAASIAKIIKGLKDEEKIKNYNDVAVLLRSVLTSSKDIINVFNDENIPFQVKGLQDLENKDEIKSILTLLHFIIEDDNPQETPIITFWEADWLNLRAFTNADFKQTFIKLSSETEEILIEKQKEFEENVFNYAKLIYNDITGNRFTKRSYKGVLELEDEVLDAVFKEYPKPVLTNKTLREYGITNEDDLEFFNQLNELKFEIFGDDKDFDERPTILNVYYRILEICGFLSEDYIFDPKNKQALDYIGLFTQIIYEYENIISNRDIRGLYWFLNSNIKNYSYDIENENGVNIMTIHKSKGLEFPVVILAGLNDSSFPREYEDLRETKYKNGSAVFYTPRECLRYKSLDKDDVTLHYEEEERNIYVAMTRAQDLLILSKNFKNPKKTTYSKTLEKEIKAIELKEKISSIKDELDELMKKEDVNDLSFLLKSLNDELKDIRAELKELKPLIKDHKKIKVLNKQLKELSIEIKWKIKDLKYEDKIMDDLIDLFNLDEDSGLTRDDLKNMFLNDFDIGENNEDSDESENSFEDIINDSTIDKELDNDNTSIDSLSSNNKPIEDYFEDKEALSDILVRTENEIAGLGEDIEKSLKRTKKLLSKLKELQDDDLNDSMSEIHFKYKMEIQSIIEGAIESNEDDSLSKNQIALNALYCMLQSIESEIMENKETMESNKEILKREKELNNKKSYLDYKIKLIKDTEEFDKKYDMGYSISSYEEYKIKEDLDELSKVLMDDSVNSIGDLALLREKVLEAGSPKLCEDFIINWELIESLFNDDKFAKLELLFKIMESEEIDNIRHMSILNDRTELKEKTKLFFMLFYYKNQEIEYKEKLSFINKKKDHLGNLINAYDGIIKIEPTEIDKVIDERKIPNVIVIEDDKKLTLSYSSIQTYESCPFQYHLAYNYKFKISDREAITEGNINHNSLEEINKTIIERKDEKEGELVGEIDNELLISRDEIIKIVKRIYMESPNIDRDETPIDYVLSNIFEYWDNYGRRFDIIGSEYQFDINREDYFVLIGSIDLLYKTDNGIVILDYKTTENISKKAQEKYKKQLYTYALALKDDPMYNDAVVDKLQIYAIKSLEMLDFELNEEERDEREEKIREIASNIRNEEFHSKGYDEFSECSFCRYSFICENN

SEQ ID NO: 5571 - protein, 402 aa, Methanobrevibacter ruminantium
MKYVIVIEDGASDYPIEEIDGKTPLKVAEKPALDRIAREGRTGLIQNVPESLPPGSDVANMSIFGYDPLLYYTGRGPLEAASMGVETKDGDVVFRCNTITERDGLMASSNAGHISSEEAAELMEYLNEYFNDKYPGFKGKFYPGVSYRHLFVYNDKENAEKLAKLDMVPPHDFVGETIADKIEFDSFADEVKSIMLESKEALENHPVNLKRIEEGKEPSNMVWFWGQGTMPAMPSMKEVYGLKGAVITGVDLIKGLGVCSGCTNLDVPGATAFFDTDYNAKGEYAIDALKDNDIVFVHIEAPDEAGHAKNLEEKVRGIENIDKHILAPLLEALPEYGDFKIAVLPDHPTPIDVGTHTRDMVPIAIYSTVDEPDDVQVYDEDSVKEGSLGELTGCNLLKLLLE

SEQ ID NO: 5572 - protein, 338 aa, Methanobrevibacter ruminantium
MDECKLVLIGFGAVGQGVARAISMKKEMINEKFGISLKVVAAGDSSSSAICQDGLDEELLLKTKEETGKLANYPEYGSDISGIDILDAVDYDVLIEATPTNIVDAEPAKSLTLKAFADGKDVVTSNKGHLALFYKEIIEAKEKAGVDFKFEASVGGAMPIINLCQETLASCGISSIKGILNGTTNYILSRMTTEGMTYENTLAESQQLGIAETDPTQDVEGIDAACKVVILANSVLGIDATYDDVEVRGISDVSLEAINLAKEEGYYVKLIGEVSRKQLKVSPRLVKKNSPFAIDGTLNLANITTDLADDITVMGKGAGSLETASAMLTDLINIIKNK

SEQ ID NO: 5573 - protein, 161 aa, Methanobrevibacter ruminantium
MRMNLILEILDVPGQLVSILGPIGELGANLVTIVHKREIRTEEGKVPVQIALEGERENLQAVVDKFKEMGVNLIEVDDTIKKEKLSTILYGHIIDTDLRDTVDKINAVEGLVVSDLQLKLDGELKSTALLTIELDLGKREIAYDKVMEIAKEKDFLVIDEV

SEQ ID NO: 5574 - protein, 71 aa, Methanobrevibacter ruminantium
MAIEKDAEKILEEFSKTLDQVPELEGTYYITDNLNLNREDESEEKDASKIVRNARTDKDGNVIVKRADWTG

SEQ ID NO: 5575 - protein, 603 aa, Methanobrevibacter ruminantium
MCGCIGLVGNFNKELLFSMMESTKHRGMDSSGYYLYNKGSSESLYENNFILDNRKSFNESSMEDNDSNQCSTIGLGHNLLSIFNLINEKREITDNINENRQPIILDNLVFIFNGEIYNFNKLESFLKENNENYVKSKSDSQLLANLIQYYYKETNSGNQENPLLESVKEVVGQLDGDYAFAIYDKDNDDLAISRDSIGVKPLFYAVTDNLKGFASERKALWKAGFEDSDIKDLKPGSILYNFEEIDLDDDLINEIINTDFKLLKSSFDDYKSYLDTKDTYDVYKELLADDIYEAVEKRVENIVDIGLIFSGGVDSTILAVILKSIAEKRQKQIDSVNNKSSDLDNVFLNGLGETSNPSNNSLENSKSSNDFSENVKPLNIRLYAVGLENSQDIEFSKRVAKDLDLDLKTIIIDEDTIRKSVPDVLTAIEDPNIMKLGVGMTIYLATKAIHEDNIKVALSGQGADELFGGYNRYLKHFDNHTLFDAYFDLDEEIYHDIANIYHVNLERDDAVAMANGVELRVPFLDKDVISLALDIPGKFKIKDGDDLLRKHILRDLAKDIGVAEYIADRPKKAAQYGSGINKILKKKVLRSFNIEEFVESLKH

SEQ ID NO: 5576 - protein, 88 aa, Methanobrevibacter ruminantium
MAKKNIYLAMILSFFIPGLGLAYDGVVKKFLGYFILGLIFIGLWFYFGMPLDAEISNTGFCCYLAYIIVWIFGLYDTLRTTIDINRGE

SEQ ID NO: 5577 - protein, 378 aa, Methanobrevibacter ruminantium
MAEFSLDVEEIKEEVEKSFQEEEKTIPNDKIKKQAEQNAIAIFEADFDDAAQREGIIKPLDDFGINAINRSSAKNSLLSTRFKEMSKGGSEADNVGDKLADLNRQVKALDPSKVDFTRTGFLGNLFHPVRKYFDRYEKAEVVIGNIIESLDNSSKVLQNDNTTLLSEETYLRELTKKLMTDIELAKEMDESIEVQIRNAEIQGVDQYKIDFVREEVLFPLRQRIMDMQQMIVVNQQGIVSLNVVRRNNKELIRGISRAKNVTVTALRTGVMVASALYNQKIAMDKIKVLNETTEDVIESTSKILREQGSQIQKTASETMISPEVLKTSFNEALAAIEDVSNYKQQALPKMQETIIAFNEMAQEGQKVIDKIEIGNNTQ

SEQ ID NO: 5578 - protein, 150 aa, Methanobrevibacter ruminantium
MTEEIKKKIKDMNFEGDFQSLDLYKEALFDLNQQFFSKKAKLSNLIEENYQYTNYNYDRLLNIVFHLEKMFNEEYKSILSIIQLSYKNNVVIDQLLQKKFKSLISIIDKTDSLYDDLVLNLSLSDSNENQRNISVLESMDSLIDSVKYYK

SEQ ID NO: 5579 - protein, 169 aa, Methanobrevibacter ruminantium
MKRYNHCIYCGYKLHSDDVFCPNCGVKIGYVDDQSVSLPLSKYKEQVLELRDEYEKKEKEVLSLVEKRFAPPQLTYHRFIGEIDNCRVLFFREAESILDIINLVTELSPKIETEIKKKIDLLKKIIDQMNDLINELIINMGDKEESENEVKIVLDDMKNLIDSVKDYDF

SEQ ID NO: 5580 - protein, 428 aa, Methanobrevibacter ruminantium
MTKKYGDRTLEVHAGQEEADPFTGARAAPIYQTSSYVFESAEYAANIFALKEPGNIYTRLNNPTNEVFEKRVAAIEGGVGALSQASGMAAITLAILNIAQCGDEIVSGNNLYGGTFNLFKNTLSKFGIKVNFVDSQDTKAFEDAINENTKALYCESIGNPKLDVPDFEVLADIAHRHGIPLMVDNTSAIGMVKPIEHGADIVVHSATKIIGGHGTSLGGTIVGFRVTFDWDQTASSPEFTEPDDSYHGLIYTEAFGNAAYITKARVQMMRDLGTCISPFNSFLLLQGLETMSLRVKQHTENALEVAKFLDNHELVSWVNYPGLEDNPNHEIAKKYLGDKFGCVLGFGIKGGIEEGKKFIESVELLSHLANICDAKTLVVHPASTTHSTLSPEEQIANGVTPDFIRMSVGIENVEDIIADIDQALKKSG

SEQ ID NO: 5581 - protein, 215 aa, Methanobrevibacter ruminantium
MTDNELKLETKCYDACEYGYLYGLNKKIPDEDWEKVKPYMRKWKRMDFVEGNIKVTGRPEGYRCLEEDVAKVEEILGITNTLAKRRANIEEKMSDPIKKVQFKDQCYNWLNMLFKSGTQPKQDLSRLAIHSTKIYDPADSFKNGAEDGYGELFIYTPHGMWYVINNGSDAANKSLNNLESKFGGAIGYRLMYADTVDTLIRVYTEENEYTGPQLY

SEQ ID NO: 5582 - protein, 744 aa, Methanobrevibacter ruminantium
MEDDNLEFNELLNDLEPHIFNFILDNLSEVPSDLSKKEQIEFITSNYSQDTIDDLIDEYNTFEIEATETLDSLEDDIFGLVAMGLDVPEDDKEEQISYIITNYSKDKIEYAIYEAELKREIIAELEELDDEYFNLIVCHFNLSDEIGERETLINCIFDNYSISQMKTAIEIADKKMVFYNDMLGFDDDVFSFICFNYSSLDYNNLKALENKESRKDKAYYLISNYSPTELHQKASEFFAKIDLFNSLDSLDEVLFRILIKNMNAYSFFLDRLDIIYNLMINYSDYIIYIEMDKARESFKTYDELRNLEDIKLLFLANYLNAPEEMIENWIKVSDFDNNIFKDYDVNPKNHIISFYIDDEEEEKEEEPKVKRNNLFGINYFDINPLELSPKEEIAYYIYKNKSEEDIIEGLNSFPNVIVDSDGNLVEGMNDSISNSNLNNPADSDINDIDDSDNKESDNISSNDDSTVKVNIEGADDGKSDEVEVKISDDEDSDSTENLDESDKDSNSSEDLEETQASQAPEKDSSRPEVSKEEFTKMLNELDGDVFKILTKKLAIVENNKVSIIDHIVSNYNYYEIEDRIKLISFKKDHYVRLDALDDATFNIFLKEFSTVPNSFNRFEKIDYIINNYSYGYIESRLEMVLDDIREIKRSLADDDVFFEIATYFKLPLHATKEEQIDHLLINYDLIRVRKRIAFYEGKLHVEGLIRGIVDKNKIECPYCGAKIRKDAKYCTNCGEKLSININID

SEQ ID NO: 5583 - protein, 248 aa, Methanobrevibacter ruminantium
MDLKDVYYSSKPYTQEEFESIIINAYKYVCEEIETKNKRFQACHDFEPCFICWNIELEGNEFTKWIEENSDLRVINKFNASMDVGVLGSFTEDTIKLENGIDLSKIPRCKGKCDREYFFNEECFFERRRLREKIGSIEDMELINPSSIFEFIDYKEEFIDLIIESVNLIKNHFPKAKIYLKYNWDHEYWDLTSICGNIYLKDGNNDENYSIYKYKLFPDFVKLRKSYGDFNYYIEMIDSDELDELLKN

SEQ ID NO: 5584 - protein, 264 aa, Methanobrevibacter ruminantium
MDIKTLQKRAIYYSESKYTRDEFESIIIGAFRYVCEEIIPNLSNFTRCGFDLNFERICFAKGVNGYLNKWIEENSDLRILRSTEISMDIGNPFSPKYDTYKLLDNIDYAKMPDCKLECPNNEDYEKIWRRKHCYWEREKVKERLNSIEGLILVNPNEIYRFVLKKDNFIDYIESTMDLIRKHFPMAVVILQFSPDPECETYDILSAVIYDADGDYDYSFLVQNEEFTEENWALIDYYDIHDLILKLTKSDEYYKSLIEKNLESE

SEQ ID NO: 5585 - protein, 148 aa, Methanobrevibacter ruminantium
MYKLKNFLKGHFAKSKVEDLNFHCKINENFLLINPNEIYDFIGENNSLIELINISFTLIKKYFPDSTIYLEFNQDPEYEGLNSIFANIYDGTNSYDCNMDLFEDLSLEFRELKKQYGKMDYFLDMVSVDEPFRNRLNDKFDGFLKIVR

SEQ ID NO: 5586 - protein, 119 aa, Methanobrevibacter ruminantium
MSFDWERFIDVAEHLRNYSNREEYQRTAVGRYYYTCFLIARDIYYDMAKVPEGTFVSHESVITFFEKSKKDIEKDLGTKLRNLRRRRNNADYDKEFRFADLNDIKKRYKDIITLLDKLK

SEQ ID NO: 5587 - protein, 143 aa, Methanobrevibacter ruminantium
MNNKTRMVVGRHSKRTGPEMDQIVEKYYFFEEGFAGLMMLFEEDWFVDKLLELKDLVLEHYDDVVFYFFNLTLKSDLESCCFLVTVIVKKDDGHEMSKSHIRSLISDRINDGSKLPFMINLVEVSDPLEFKRYTQGEIGPHKD

SEQ ID NO: 5588 - protein, 133 aa, Methanobrevibacter ruminantium
MQVAIAKKENGEILELDDISYQFVLWLNENNLTQLDPIYAKSVLKTTVGEFSKLTSQHEFEGEDEMLVPQLNYFVELSTWASWKDGKLMDEDEEITISFEICDVVFNRETMKEEYHPIEMTYMKSFIESFLEK

SEQ ID NO: 5589 - protein, 611 aa, Methanobrevibacter ruminantium
MTLTAEQQRIADDMCRELAPITFIQGKAGSGKTHLINELINLLEIDEILCPTNLAKQLYGRNARTIHSFFFHEFDKIEEGYQNPKAYDGVRNDYFLRNIAFTKIIVIDEVSMVRSDLMEMIHKILSTALKNDSPFGGIKMILVGDMFQLPPIVESEETYEYLKNEYGGLYFFDSHVIRNNLSQIKFYELNESVRHKDDSDWVNMLDMLREVPKFERVLPILEKINTRVVSPDEIPENITAITPSNAEANRINRRQLDKISGEEFSSRAHFRIKELDSKDYLEFYYSEDPMKIDMQKYYPIEVPSRFEAFLRYKIGARVMLTGSVMGGGKNGDFGTIVDREIIRDYDDSITEIIKVKLEKNNQVVSVTLDAFSAVDYKYEMEYDPTSHSLRRKTPYIQRVKQYPLKLGYAFTIHKSQGQSFPEMVLDLKSNIFASGQLYVALSRVKKLEGLYLTKPIAFSDIIIDERIIQFLDSLRNREFDVPEDGSSIGSQEVLISKKTPLNDLFEDFLHETESQAENEVNRTIHRLVDYAYALYQVDEYDMILLEIKKIAQIISNQFLIPQEDMEFIEKVKTMSDDKIDESICTSVLFNLYDVYKRVHDDPNPIVVDKIH

SEQ ID NO: 5590 - protein, 566 aa, Methanobrevibacter ruminantium
MLINIKIKNFRSLKDFEMNFNPGLNVIIGENDAGKTSLIDSLKILFGLKKIDINDYNEVGCPITIALDESNFHYCLESRIVEDTVVNTFYLKPTEDKINEMKTRLNGMDELKEAEARKMLKEYCSIFDISYRSNSIMENLKSKILESMESDEYTKVKSFSYPISFLGSREFENIDSFFENTFFKELKEEIWNIHIGDKTLNQHIDDYIEEFKNEQLSNQDAEELNAQLKEFMPDFKEINPIVNPSAKLSLDVDVEILNSSGQRIMIEKMGDGTNRRTTMAIFKHKKDKKDLVYVFDEIETHLHIKAQLDILKLLKDLTKENKQIIITTHSPFLINQVNLNEIHLMSIDKETGSKVSTLNSSEESQVALSNLGINNIDLFFTNKLLIVEGESEQNFIPIMYEKIYGYPISQNFIKIVKADGIRDIPNFIRVIKKSFSKTDIFVLMDNDADELTEERIEKMVEGDLIHRDNIFEIGDVEFEDTFSDDILRQALSQYMSDTLGYAVEASMRDIQNARHSDKFSKVLGEAFNRRTYKNFKKPLFAQYLAMFAEKEDIDEKIIKLFELISD

SEQ ID NO: 5591 - protein, 241 aa, Methanobrevibacter ruminantium
MYLEMNELACACRRQWKIDVNESIDIFSLAINKIKNLTIVFKVMDNDISGACLRLDKENIIFVNSRHSKGRQAFTIAHALYHLKYDENNFNICGIDSDDETEQKADLFASCLLMPHGALETYKLNNNIQKWDLDSIIDAEQYFQISHQALLWRLRHFLNEITYEQYRAFKEDINRNASIRGYDSSLYAPYLNKDYLTIGNYIQLTEKAFENELISLGKKEELLLDAFREDIVYNLNEEIIL

SEQ ID NO: 5592 - protein, 115 aa, Methanobrevibacter ruminantium
MGFKNMVETVGDRLKRIRLEHDFTQNQIAEYLGFKQGQIAKLESNKRILRSDSIIKLSNLYRCSPEYIILGIGEYSKTNMAFRSNNKNLSLDDIAEMNRIINNLEFLSRITDKQE

SEQ ID NO: 5593 - protein, 373 aa, Methanobrevibacter ruminantium
MIIQEIFYDCEKFLTIVHNGMDNDIKKRVIQKSIDVSRHEILLKERYIEKYQLENDNYEFFIKGFLDCENEKNPYTNYSTYFKQYVYPNKNDEIDNLSFKDFKKVYDFIYEYTNFKFTKLNINNIFLFFPTDILVKSIKSETTSYLIIKSSENISNISVKFKLNDIIKESINLTEIPNDNKIKSRENWNNYEIEIFDKDKIIYKSHTYVIMSINFNMGITTKIKKIKLNKFDKMVNSSNLKTEKFTISEENGLINISNYLLEESKNRNELNDVTKTECIFLRKNEREKAYEILEKLVKNDGELFIFDPYFLKQSEGKDVLKDLLNTILTHNDLVNIIFSKDIGESFENFKNSLTVDEKLFFKNIGGSAKKLFF

SEQ ID NO: 5594 - protein, 498 aa, Methanobrevibacter ruminantium; identical to SEQ ID NO: 4553

SEQ ID NO: 5595 - protein, 380 aa, Methanobrevibacter ruminantium
MNFYDLNKIRIKIAEDEIDIKENDFLYELYDLDNFDSLFDELDILINKIEYHQFEFTLIWYVGFFNIIKYEDIGNLPNISKLKSYNYLKGGLIKYFRGHFHLTNYTMEIKPYRNYYSFIEHYVLRPFQYRAITKLLNWIYIYDKKFFFELHYFDKSNFHFLRLFKLHEIKNFELEEKYIDFNCEDELKNYILFNYIITEYIHSVDKNLPKDIKTKIESDFKLIEKIEVNILIKIILDYIRFDETKKIPCYFLETIEENEETFFTIFESLEIYNINELNSLVNPLKEIHINQDRLFQQMITKLEKLLTEEIITIDNYEWEHFLNIIPEKYVLMINGLLRKTIGDLTFISELDREIRSKRYFSEKNKEKKLKELIDIAKNIN

SEQ ID NO: 5596 - protein, 456 aa, Methanobrevibacter ruminantium
MQTCSYCGNKIRNKAKYCDNCNSYLKLNNLEIQFDPKKYEKIRLLEKAIKEASNLIEEDNYGNLSAKTQIQIIYDTIYSYLVETTNFLKVLKKYDLNEKYFVYHSLEFINRVSKYPNGIISNEFLFEINRIFSDLKNKNNNNTRKYLFYTNINNREYIENTLLEILEYFDFKVFSYDDFKFPPEFPENFKTKFKSKYLILEYNSAENHISNKEEKALNQLYLLFGYLTFIHRFGRLNEKWHVNRFTLNHQISDLNASAMIELDKNNNFLDIHESLDILRTEIKLDKSDLIKFTNIPFKTNLYESIKNDVKNEVVLHNIEEYLRLYYIASTKSDLENSFIKFWTLAEKILKATFGQMNDESMVRYMKKILKYFGFANYIQDRIPFLRIKRNRLVHEIKDEITINDRNIIKLVVDYLILFLLNWSGELNNNEEYKFILDNFNKTDLNRRVELLSILNE

SEQ ID NO: 5597 - protein, 903 aa, Methanobrevibacter ruminantium
MVLSQSEMRRRAEKFIETYKEVSDERSYSQMFWRDFFDIFGISLNDVAVFEQAVKKFDGTQGFIDCFWKGKLVIEHKSEGKNLNSAFQQALGYLDTLSSLEKPRYIIVSDFKRIRLIDLFEDKKTEISLFDLKDNIQMFNFIYLDGVKHHEKQEELNIEAAELMGKLHDSLKESGYVGHELELLLIRLLFCVYAEDTGIFNTYQFFDYIGDEEDPISVGPKIQQLFRILNQPESQRQTNLPEELANFPYVNGKLFEEPIVPPYFDYEMYNQLKEICKFDWSTISPAIFGSIFQSIMNEDERRQLGAHYTSESNILKVINSLFMNDLWEEFRKAKKNSKKLEQLRDKMGKLKFFDPACGCGNFLIIAYRELRLLEYEILNILHNIKSERDTQVLFDSKELSNIKIENFYGIEIEEFPSLIAKVAMWFIEHQMDLKYEQLNIHKSNLPLISSANIIQGNALKIDWTQFLQPTNEVFVLGNPPFVGSREQTKEQKKEMKEVFKGVKRNGLLDYVSAWYLKAAQYIQNTNIKVCFVSTNSICQGDQVGILWEVLMKKYDIHINFAHQYFKWSNEARNAAKVYVVIIGFSTVDISPKHIYTYETLDSKPDLEIATQINQYLIDSEIVFIKSRNNPISNVSNIMKKGSKAYDYGNLTLSLEEKNELLDEFPEMEKWIKTFLNARDFLKSTERYCLWFADITPCELQQLPAPIKLRINNVKEKRENSSDSGINNIVNVPWLFENNQPKNDFLAIPVVSGEKRDYIPMKFLSKEIIVTNAIYTFESATLLDFAFLTSKMHMAWMKYVCGRLKGDYRYSKKIVYNNFPFPNELSEKDKNNIIKKAQKILDIRDEYKNESLEVLYGEYMPNSLQKAHIELDKAIDKAYSSKKFKDDNDRMKFLFNLYLEYTSD

SEQ ID NO: 5598 - protein, 305 aa, Methanobrevibacter ruminantium
MSKFYEAKSILKNLEVPDKQQSDICVYTFLSLLSVSEDTKWEDSTNEWIRIHDVIQFIKNNYGVVYAENSRETIRKTAMHPFRDAAFIEDNGVPTNSPRYKYRITDELLEVVISYNTSNWGSALSSFKENHETLIEIYSSKKEMRKMPVKINGQDLTFSPGKHNILQILIIKEFAPRFAPNSECLYVGDTTKKDLIKNTEKLQELGFEISLHDKMPDVVLYSEENDWIYFVEAVTSVGPMSQKRVNEIEKMTEEVESGKIFVTAFLDMKDFKKFSEEIAWETEIWVASFPDHMIHMNGDKFLGPR

SEQ ID NO: 5599 - protein, 490 aa, Methanobrevibacter ruminantium
MLNYVSNETNSFLNSISKEERKKIGQFFTDVDVAKFMAQLYVPTKKHLDILDPGAGSGILSAAIISQLENTDVDSINLTLYENDSRILPLLQNNLKFISENTSINLKYEIIEENYILNNSFSIESQEFCKKEYDFVIANPPYFKISRKAPEAQLMESICYGAPNIYFLFMAMSLHHLSKDSEMVFIVPRSWTSGAYFKKFREYLLSAGKINQVHLFVSRDNVFNKQNVLQETIIIHVIKSKKPLESIKISSSSNNDFSDIDEFEVPYDLAISNDENHFVYLPTNKGEVKVLNDVHKFDSSFLTEEIKLRTGLTVDFRNKSYLEEKPNKDNVPLIYPFHFNKNFITFPVEHDKKQYVNMAKKGLIQENKDYLFLKRFTSKEEKRRLQPAIYLKEDFPNYDYISTENKINFIESTNDDDLSKEQIYGLFVIFNSTMYDKYYRILNGSTQVNANEINSLNIPSRTSLENLGRILINKNDYSVESCDEILESIL

SEQ ID NO: 5600 - protein, 775 aa, Methanobrevibacter ruminantium
MIDRIDIGTVLGNEFIVIDKYGGEGKSGFGTVFIVYDDDLKKALALKTLQDKYLNDEETIGDFKKESLIWTELKHPNIVEALGLDIIDGRLFIIMEPIFSFMGKQSLDDYFFEGLSDYKILDWAIQFCYAMEYMEEQGIKYHGDIKPQNILVWDNEIKITDFGLTSFINESKIFKNKNVGNYYISNGKLCGTNAYMAPESFEGINNISTDIYSFGIVLYQMINKGNLPFEAENNFDNEWEELHKKAEIPYFDHILYDVVLKCLSKNPKDRYDSFKDLKRELISIFKETFDEEPYVPKEKDFEKDSNYYYFKGNSLANVGDIENFISNYDKAIELNPNSSDIRINYAINLIKYGYYDEALNHLNLAKKIFDENNKNFVSLDRLYFNFGHAYQSKGYLNKAIENYENAIEINENYLESYVNLGNIYKELELYEKALEKYQLALDINPNFFMALINMGEAYSFLGNYEDSENCFYKAKYQNINEDLYSLWGESLRRLNREPYALTKFFEILKINDESMYAYYNITISYLILDNLDQAKEYFGKALDLFGDNITYKLDLSKQFFKYGFQEESLEILDEIIETSEDNNKFFALFQKFNIFKDSDVKYSTSILDEIIYSSADDELKSEAYCDKALFLKDYEDFDLILEYFNEGLSLNPYNIRIYYLKGCFCHENEEYELAMQTFEEGLFIDKYNKELLYEKSRLHLLFGECEKCIGCCEKYLEIGYPSAEIYLSKALGFMGLEDYNESLNFLELAQSLVIDEETKEMILVTKVTIENFLER

SEQ ID NO: 5601 - protein, 458 aa, Methanobrevibacter ruminantium
MYQVSEKESSVYKYKALGTSNDREIKSKDVNDHYKVTEYNIDLIYNEIKEFIHYYLFSGEISTDFTIKVQDLFEMDDDDLRTLKTVHFLLSDEVRDLIQILPYLLRNLSHSTQKEKEEFNGIVRGRIDWNATLKTRYAKGFNDPSLFVCSPPSKFYDLEENQLLKFVLRKIISLKNNYLDFVDFIRNDEENPFDIESLSDERDWYEIVGNNYKMAKKTLKKVYFDDISDVRIIKAKHIRKAFKNRNVLYHRVARAYILYEDLFINEDIELLKELVEHRLIKATNPNKLYEIYIFYSLVRALPSPELRLLHSGNDYSTFDVLEDGTKVTVHYQYLPKPLQEVSEYAEILRNYNIQWAYRAPDIILEFEKEGKITYRIVEVKNSSSANYVRDSVYKVMGYYKDFERILYNEEATFTENCPIVLVTWGGIRIKDNYDPFKDSLIVLNRNEFLDSLEKLINL

SEQ ID NO: 5602 - protein, 952 aa, Methanobrevibacter ruminantium
MPNIEKYAYILDDFKEILDIYPIESKKPYKNNEFAAKMRNDIADDFNKFILDMVSNKEKYHSKISPGMMDWSKKPWAGFYHKDVTNTFKFGFYLIYLFEGDGSGFTLSLGQGVDDAEKKLVKRSEYLNYMITENELKIPDGFKHEANVGESIIRKFYKKEELDLEEFCNDLEKMIKIYESLIPHYNELRAGEEPSRKDVRPKNSGSKVWRISPGGSDIYDEAWEEFKQESYIGVGFYHGEIDYSTFKNKWSLDRYLDKDGVKDPSKAMLWKFVNWVEKGDIIVANKGKSKLAGIGVVTGDFIPLTKNKNRNKFGLDNIYPVKWIYTPDDLEISKNFFARHTLVEWQGDKWNQLLCVLARNDEVLKERILKKIYDESYKLLFEREDYHHMEGYKTESKEINDVWNDLLLKYENDEDIVDDVWDRLVNRKMKVHGDGSKNIKASIKGKLKISDEDLSKTAILLFETLKGLIGNRDEADQKRIIKEFNDSGYSKGFKSGRFSSILYYLDDYYYVINQKTIDTVKLLSLILGDEILLSNELDRYISNNAKYKEFIHNLRNAYYYDKYDVFEFRAFDAICHYLCSTPPIYFATNKAEKIPIEFYVDTDEILEGIDESEFDEMDLDDEEIEEITEVYIEETKYELLNINPPLLESKLQSFAIAETTVNQLCASLNAGKNIILDGTPGTGKTELAIKFATAASDNNFIDGYILTTATSDWSTFDTIGGLMPNEKGELFFYPGKFLDAIAENKWLIIDEINRADIDKAFGQLFTVLSKQDVELPYKENGKPIKIKLWDENYSKHDKEKSTYYIGNNWRIIGTMNVDDKDSLFDLSYAFMRRFMFIEVDLPEETQYKRLIKMWSNDLSEEYTNNLLRVYDVIKFRKLGPAIFKDMTEYIKFRDEISDDSTDLILAEAISSYIVPQFEGLNRNKVEQIRKLMGDIGLSQYLDEELKELIPKF

SEQ ID NO: 5603 - protein, 46 aa, Methanobrevibacter ruminantium
MEDELLKKYFNELRKEANNEDFINELEGSIETISREEIVELIKKHY

SEQ ID NO: 5604 - protein, 117 aa, Methanobrevibacter ruminantium
MGQKFNIKELEIRSFRGIKDLKYDFEGKSLVLCGPNGCGKSSITQAFEYLFTGQVASLKGIQGVKHDESLIHKGDSKEDLLVKAKIGGQYIERSFNEEFNPGRLKDIYEDSRMALFY

SEQ ID NO: 5605 - protein, 629 aa, Methanobrevibacter ruminantium
MNRKKLLSFIESKPRERYNQITGLISYEKYDEIETKLRQASKDINDEIKILNKRNDEKISELTQFYSCESDDLYEKINASLKKNNLKQIDENTNLTQYIDENKLSKPHKLLNKNIEELNHDYLRLLDNYENITLTELKTTNSLVSLLEKSREYLLLENPDKCPICQKYIDSEEIINDLSPKIDKINENLKLFKDWKNDCNIIIKQLSDLDYEIKDFNGENHNSLDYDLNDLIESLNDLSNFDKGLSEMDREILGSLNKDIISIKGKMQANTDEINRNLDHLQILKNIRENEKYLEKIQKQYDVSKKSHELFKKIKEEELANILKQIEEYTIEFYNYIHYDEDINSPKMKIKGSNSLTLALFFEDDESEPRSFSSEGHIDTLGLCLFLAFVKEFNKYDFIILDDIISTVDLEHKEQVINLLFEYFGNYKFIITTHNKLWFEQLARLADYYQQGRFQFVEITDWDREIGPSLSRKKDEKERIEQYINDNDTFAAGNAIRRQLEYELDKICKVNEIPLPLKKHYTVGDYYTPTKKFAKEMFKDTDVEEYYKNVFKELDLSLYKANLTSHNNEMNYDLNINEIKKLRDAVYGLETAFKCKNHSGNYVLKFDMDKCLGLCSHKRCIDFFTFNRI

SEQ ID NO: 5606 - protein, 334 aa, Methanobrevibacter ruminantium
MKLVVDGFGKSVAKRDNQIVIKENGKEINYYLAKDISQILLTGKGSITFDALTLLAENDVDCVSINWKGHVDYRLSAPDRKNAIVKKEQYFALTDSRSGYLAKAFVRAKIENQKAVLGTLAKSREEKDYIIEQREKVSEHIGKIEKLSNINSDNIRNNILGIEGQASHEYWSAFASVLDEKWEFFGRSGRGAKDPVNSLLNYGYAVIESEIWKSIYLAGLDPYCGFLHSERYGRASLVYDLIEEFRQQIVDKTVLSIVNRNQITPDDFEEDGNYIKIHERARRLLIAKILDKLNSKIMFHSKNISYSDIILYQGKLMADYLTNGVPYEGFSLRW

SEQ ID NO: 5607 - protein, 41 aa, Methanobrevibacter ruminantium
MIERYIISGDDEISYCSQCRNYETCDGDDCDPYFDDDLYDL

SEQ ID NO: 5608 - protein, 92 aa, Methanobrevibacter ruminantium
MLVFVMYDIVDTPTRTSLVKKLKHYGLHRIQKSIFCGFLSIDERLNLASEFDFFMSSERDSIILIPTCESCVDSILIEGNLDLPKKSLYEFL

SEQ ID NO: 5609 - protein, 254 aa, Methanobrevibacter ruminantium
MWVKRIYYVSLIRFKILKKRLIKSLLFRCTMKINTCHLVLKTNKKVKQNPSKFRGYIGREFDKYPILHNHYGNNKFLYSYPLVQYQIIDGQPSILGIEEGADILVDISSKIKALKMGDSYYRVEDHYLYYKEYDVRATRKYHQYKFLSPWLALNTKNYQSFKNIKDWKEKKSFLNNIMVGNILSMSKGLGIIVNKRLHVSSLLDDEIAEYKNVQMNAFTGEFKVNFNIPDFFGFGKGVSQGFGTVIKVTDQEED

SEQ ID NO: 5610 - protein, 455 aa, Methanobrevibacter ruminantium
MSKKEQILILSLGGSPEPLIYSIKEFKPDKVVFLCSPQTLKECDGILEETAFNEENVEIYEIPDAESLDDSFSTSKKVLSKFADDGFEVRVDFTGGTKPMVSGLVLAVIEGNYSNFKFSYVGQKDSQSRTKNGVGVVKDGSEITKMQINPYKKYAITEFKRGKNFFNTYQFEAALENFQSAKSRFIKGTEQRRISEIYERIVILYQKWDLFEDKVSKNTDLFKYLGFIINDIEKDEFILNEFENIDFFIQMKRNYEFLSFKIRGVSYDSEDPSIKGHLKFRISYYLSDLFNNAYRRIEEGKYDDAVARLYRINELIAQVQLTQKGLIDDDQLQTQKEFKVNISSTKSKAHARDNYDEILDFIDYNSSLKEKNKGYFGIANDKSYELLDLFGIKQSPKFDKLNSKLKERNGSILAHGLKPMNKKKAEELYDKTLDYAKDYFSFLDEDMDLAKFPKF

SEQ ID NO: 5611 - protein, 400 aa, Methanobrevibacter ruminantium
MMVRLQLETISPVYIGNTGNEYSRSEFAFAKFSGKKKLVRLNLDLVAKELYQRDEKLFKEFLKVLSDTKSFKNIKTKKDNSQFNKNERIAIKGMQKFLYDTIRPYDKDLFKKILSSCSSYKVSLQYAPESIKEKNGKKVSVTRKGESTADIGLIKENLKTNNEPYISGSSIKGAVRNALLYSRLNLSSKSNRDVAREINNKNNRDIKNIMTYVQFSDTFNTIEEPSLYGVESIGTKRNTFSFFETIDRGNVFEFEYRNTFNSKVHNPRMLNNFDLSVESIFKHIYEFSNDILDEEIRFIEDTVNFDYVYSDVDSGKLYKYFDDLKDKNTEESPLLRLGQGSGALGVSQLLEVKNSRSPTEFTTFRKFNRLGHKNHYDFPKTRKLIVNSFEPLGWVKLSKI

SEQ ID NO: 5612 - protein, 331 aa, Methanobrevibacter ruminantium
MYVCDKMKIVYLKPKSTFPFLSSDSIFGALTYGMAELFPEKLDSFIESFKNKNDIPFLISSAFPFIKNENNYFRFYPKPITKFQSKDMKLSKKFKKIKFIEEDIFLELVSGNISNDGIFDNFKDDLFLVNEFNESFLVKKENSEIIDGSLFSKEISPHNVIDRVKNNSINIFYSEDYRFRENKGLFFLVDFKDSSFEEIFISLLRFLRDKGFGHDISSGKGQFDFEIDDFDKFDNLNKSQYFLSLSRFIPDEKDISFIEELSDDDALYEIGDKRSRDSFGLRKKTRFFKEGSVFPDYTVKYDVNCGCLVETSDRSIEYGYSFNIPYNVEEL

SEQ ID NO: 5613 - protein, 255 aa, Methanobrevibacter ruminantium
MENLEFQGNVIIKGKIVCDTGLHIGESNETLEIGGIDNMVMRDKKSNLPYIPGSSLKGKLRHQMELFNKDSVRYILDNPKGRNREYAPCNCGKCSVCKIFGFTNDEDGTYVGPTRIIVRDAFPDDETKEFWESSEGVSRGAELKTENVIDRVKSTAMHPRPTERIPKDSKFDFEIVFGIYHDDDKENFKEIFTALKLLENNYLGGNGSRGYGKIHFEDLSYLIRNRSFYTDNAEEKVIELGVLSNLEDENLKIEL

SEQ ID NO: 5614 - protein, 143 aa, Methanobrevibacter ruminantium
MPNDLKDVENKIKGLKSLKYYEIEEFVKFDGDADKITKQLRNDDIKTSQLRKFFAAVKEIEMYVKDKRVWDDKAKVDFYLLMPKLAYAKGRKVISERFFNLMKITMEKVGSGNKEDTLDDFLRFVQFLEAIVAFFKVNNPGSL

SEQ ID NO: 5615 - protein, 885 aa, Methanobrevibacter ruminantium
MDRKNLEFASLLHDIGKFSYRAENNFSSEYKNLDKDDFGYHGAHSKWSASFIKHYWNSDITNLALYHHNPKSGINEEIGLIIQKADHHSSGERIDSIKNDPFKTPLLSIFSDILIKPEKNKKCDELYVPLEEFDLNRKWKNSIPTSIDNAKKGHNSLKKCYSALWEKFESEVKHLENTDDFNTILALLKKYTSCMPSATWGSKPDISLYDHSKTTAAIAVCRYLFNEETELKHTSSTQEVYSVISGDISGIQNFIFKISSPQKAQSAMSKRLRGRSLYLTLLTDAIANKIVQDLDLTQANILFCGGGRFTILAPNTEKAKKSLNEIQKEINAFFIEKFNAELYLAIASEECSGNGLENFSDITSILSYKIAQDKKHKFIDNLDDLFDFEEDLDGKSTCAVCGNLFKPKDEEDKFCDDCEEHIKLGSKVTNASYMIKCFFNEEFKNIYDKNKFKKVSFYEKPLNIAYIFTSNTSKKSVDKTFKEIKDILSEYDEFVDRFEIIKLNDTDFLEIENKFSLEELDKISFSFSFLGNTIPKYHNRNPLYFEHLAQISKGANKLGVLKMDVDDLGMIFGEGFNHAFKDSDESISSISRISTLSSQLDLFFSGFINKIASEFCVYDDGIKEYFKNDPSFFELNFKEVELKLQNDDGSKNEDESIIVYKEKYGMELDDEIKESIKEYSIPTIHINYSGGDDLLVLGPYDDIIEFSQELRTRFKQWTCNNDSINLSGGINIVSSKFPIGKAVIMAENYLEASKSCGKDKLTVFNEVVPWDAKGSKFKDFNQLHEFGLKLEEYNSQNKLSKSIVYSMLYLWKDNFEEHSGIFFNEEKWEKENFAKCNNNRFVPKFAYRLRGMNQNSKEYDVVLKEGIKYMPWIKIPVSWVSLRMR

SEQ ID NO: 5616 - protein, 1565 aa, Methanobrevibacter ruminantium
MSIDLNKNQKRAAYYNGDKYLVIEAGPGAGKTRVLIERIKFLINEEKVEPSSLLVITFTRKAAEELKERLYKDIDESVVSMMQISTIHAFCRVILSEIGEYNTRVLGDSVNEKQKMFLNKYKKDLGFVNECHIRQNEIFNLIDKYGEYATFKVDSKKLVDYIERNTKIDPEYIDFVNEYMKENDGRYPFDEVMANDAYKKSRTNALYLQIAKSYPKYLELLDEKGFSDFDQMQIKTLNYLKTNPNTIYKNVLVDEFQDTDPVQMKIFEILMKNADSFTVVGDIDQSIYGFRGANKNYFEYLYNNYDDRVYKVNLNVNYRSANQIIDISEDFIKSQRAEGAKQDKALGARDLDRNTYFLVNENSESEAKAIFEMIRYLHDSGKIENYNEIAILSRSIRFSNTAQDLIQLFIDNNIPYHVRGVPDLFDRPEIRSVITLIHHLIEDTNPHNHKFDLWELEWLNLKAYTGESFNQVLFNLSDETKNILNSIQEEFEENVLKEEKRAYLKVTGKKSHKYVFKRVFERDEKVLIELFKNIERPILSNENLIRYGVKNKQDLEFFRRLNDLKAYFNSEEYMDSEDTILDIYMKLLTDVCNYLTEDFINDPINRDELKNLAILSNTFHNYELIVDNKNLKGAYYFLRYNIAGYSTDNDESEGVQLMTVHKSKGLEFPVVILLSLNHKKFPSQYKDEYDRFYTPNSCLEYKNYDSKEEEIQDYLEEEDRIVYVAMTRAQDILVLSNLIKETPELEGLKAELNDNLSQIEKIEIIKDIPKGHIKIHDLINRNLSSCKFLEDDFSQLPKTVCEKPQVKKEDFLNLSFYSLENYVACPFKYKLMHDINFSESTMEFNKLRGLFVHNLLETINNRIRSNGNRYIGDDEVLAIFERFQDSFRFENLRLSKKEYDIIKNDVLYYYNTFGKDFNILNTELSFSIKKEYYGLSGIIDLIYKTKDGKMGILDYKNTERISRHYVQNYIKQVYTYMIALKDSFEIDELRIYAIKARKMISVDINQKSLDILLEELDNVSLNIKKEVFECNFGEGCLKCSFSKICVKANNDDVSVFDFNNEDTLSFRNKFYQNLPDYEIIDLKDRYWKDIDFDSDDETKFDVDISADDLASISAKEGVSVSANEGIPISAREGVSVSANEGIPISAKEGVSVSDKDNDLSVSANQIKNLNNSSDDKHLGADFKSKKDSFKSEMKSPSSKKDSSKSKKKSYKSKESSKSSKEPFISSYSKYLDLKSIPKKYKNFLKNDYSKDIDLFEYDDDLSLEENILRKYILKKKGLKLLKKELYDESEDYYKKLIHNSYFKEDYYPYKQLMKVYHKTKKYDKEADIIRDFFKSSVYANKYQFLYFKYKNRKLPKRARIKHNELKDLIKNYVNLLKDSDLSNNSIPNADRLKKDKNRLKILSDEEEFYNHKRSYYTNIADGLYEEKLNQEAFDLYAMAIYKYKEKSFRYYQRLASIYRRTNNYKHELLVIMEYFNKSNKIHRTKSSDKWFKQRLYSTKQLIGDENAIRQIENIVCKKGYNLKADYALNYLNHDLDEYYCLKNLDKELNYIISSNEDIFTLHKKK

SEQ ID NO: 5617 - protein, 398 aa, Methanobrevibacter ruminantium
MNETTSNELIHARRLYMKKNMKEAETNFLKVFNTNRELFNDLDEIYFIRAIQESHIDNCQSIGDLRHYADFVVENFNQEDCSNRNFEDPYADFILNLSTVLIKEEYYLDAIKYLIRLDESFLSDVSRHNSNGYYRFSHHEKYLSNMVKALIGIGKYDAALQYSIRLINDLPDTASEAKYWIKWSIAKIYNLTGDYELSIEYINELLLKRSENYFYKLLADNYLKLDDYDNALVSGVHYIILKKDIKSCVNYYTELGYILSQLGLTEESNKHYYLSYAIKKSYGNFIPDYLEEKIRDLGFDLENTNYNKIANELKPFWRECLYRNKKQFTGTISAIKQERGFGFIKPDDGGKNQFFLFKDFKDDHDYIWNNMRVSYYLGDSIDYSKNKESTRAVNVELI

SEQ ID NO: 5618 - protein, 564 aa, Methanobrevibacter ruminantium
MSSQLEELKKEFQIAEYNLDFDRLHTLCDKILEHDPNLIEYKQYIAISYFLSEDYENCIKEYSIYLDRREKDADDAYILAMSHLHLNNESEAMSIIEGFDEIDSLELKLKAYHDIKHYYKAIKAGNELLDIDSSNDEALQTMSEIYDELNNTEMSLFYEWELCKLKPAFKGFHLMRLYELGRYEEVIEIFERNPDDFKCDLLHYPFNFLIGSSYCEIGKHMDALKYLYRSNQLHECRDTGLQIARNYYILKDYEMAYKILKGVAVKEGLLDYDDSLSDDELLNDNSLLLLDEDGLEDDSLLLSDNETLNDDSLLLSEDKTLNNDSLFLREDKTLEQIMDKYCKGAPEEKADEKTCNEEEKETEVLSDIQILDQMLLELDIDESHYTQVEEEPSYFKETDEDSIDGDEDIDIVDANILRMMSEVCLYLKRYDECIMIANRLLSVSDRYDEIVNVISAYYLEMEDEWKADEWYLLLPIELAFNKPFVYTIARNLSLIGESDRALKIYSTIEKLIDESPYLLYERAGLYKRIGEKELAMKDLDKYNEIALKYLYENGEPEVKYEDLE

SEQ ID NO: 5619 - protein, 44 aa, Methanobrevibacter ruminantium
MKVEIMIIGILLLSNFLYHHEDGNPIVQYVAYIASLLVIILGFF

SEQ ID NO: 5620 - protein, 429 aa, Methanobrevibacter ruminantium
MKRKEVVLFMTVGTGINPDSNEAGYKKLAKKLYSTLNKIYPNYVIFFASNVSKHTIKYIDALFELDGDEFNEGEDYEIVELNNIDDFNYCFESFEAKIWEYDYLNEKKYQIIMDYTSGTKTMSAAMACCGMLYSRDLISVGGDRSKGEVSAGTEIINYQNLYKIYDKRAIMRIRYNFNTNRFQPCLDVLNYIVDMNIHKDSLVDLCKGYFAWDTMDFSHAYEHLKSIDLNYMEFAEIKNELKKNLNALGIIVNSKSQNLKNCYILACIINNAIRRAEEYKFDDAIARLYRSFELIAQIRLEKYNLMSSDIDIDLLKEKGLRQEFIDELENMREDGKIRIGLIKDYHLLNELDDELGKYFMENESKIKDLTFKRNNSILAHGLDSQSKEDFDKFLELVIGLAKKLDKDMNKFLEETRFAKFDLKLDINNA

SEQ ID NO: 5621 - protein, 112 aa, Methanobrevibacter ruminantium
MYKIINEDGSLVRGYPSDALYDLLTDKEKEHIQLFKNEIEKITEKEGLGKITVSVSYDEPIIEKAFQIQDKNGYSFDEFQEILDKIRLHMADFCKNNKELCEFKKFSYIISA

SEQ ID NO: 5622 - protein, 89 aa, Methanobrevibacter ruminantium
MMVSDKDLAKNNNVKGSRINVTPLMAAYFLGYMLSEKGEKISDEKIEDLYKGACFSMGIDPVEDISELFNELFSPKKKTKEDLENSFYC

SEQ ID NO: 5623 - protein, 468 aa, Methanobrevibacter ruminantium
MIHLGAIMSNIVDRIGMEKSVILLAAVVSFVTAFLANISVALPLIARELAMSNIIQNWVATIYLLPIAMLSIPLGKLTSKHGLNKSLLAGIILTIIGVIIACFSINSELLLLSRVIQGIGTALINVASMALIVSAVNPETRGQALGLNIAGVYIGLSSAPVIGGLVIYHLGWQSIFYIMLIPLIFSAYLSWSLKDEWTMYDGPIDITGSIIFSIGILLVIYGFTIVNTWLGIVLLIIGLLLLIAFAYFELRVNNPVFDVRLFKNSRFSSSNIASLISYTATFVITYILTYHFQYIMGFDSKFSGMLLIVTPVMMAILAPLSGRLSDRIDPQKLAAIGMGFVTVALTILCFLNESTPLYMILLAMFLQGIGYGLFSSPNTNAIMSSVPKEETSSASASLAAVRVIGQTLSLGMLTVIFAYIMGNVAIVPEYYPLLMESSRLSCIISAVLCVIAVVASLVGLRSDDEYET

SEQ ID NO: 5624 - protein, 594 aa, Methanobrevibacter ruminantium
MNSKQKTLIILSLSLILLASIAAVSAVDYTLTNADMDYVVKSNGLLHVHEAITYDFDSSPNGVYRDIPLKSGQSIENLEVYVDGAYAEYQIIPKGSGERIKVYLYTDSSKSHKLSSDSVITVHYVYDMPKVVKIYNDIGELQYKVWGDEWDEDLENLQSTITFPDDEELQFWINPYFSNAKARWAEDHLKIHSDFVGDGKYVEARALIPLSEFDSNAEYAQHINKNGKDEIIKIQDDDKKSQEGFKSLFSILNKVLVVLCFIPGLIYLKFGREPKTTYDAIYEHEPPTDDPPAYVNGMIGSGLKDVGSLNQEAFQATIMDLINRGKMGVSSEEDTEFTKTTFLTIKDTSGLKRFEADVINILKRYELNGNISLSYMQDCLRGESEARYFQGRFESWKENFENEYFSEDSFSRLFDKKGNDYLNYFAFLLIILGIIAFVASIFFDFAVTGSTIFVGVLLVIVGVVCLMLPSGIAGKYTDEGKLYEEKWMKFKKYLQDYSLIKEHPPESIVIWNKYLVYATALGVADEVYKAMKMEVYSGSDDYYRTNDLYMFYYLGGHRFINDSFNTASSTISAADNSSVGGIGGGSGGGGGGAF

SEQ ID NO: 5625 - protein, 249 aa, Methanobrevibacter ruminantium
MNSKQKALMVLALSIILLSSIAAASAEDYSLTNAKIDMVIQDDGLVFVDEAITYHFYKTMNGVYRYIPINNFNMEDFAVDVDGAYYELEGNDDDSQIEAKVYLYKDKDKTEKIDPGTDVTVHYKYYMSDLLDVKGDNAVLNYYLLGEDWEVDLEEIEANVHFPEKKELDYELVPSGSAEGKWSGDTLTITGENINAGDGLALIVEIPLDEFASGFSNAVHNDTDDDDDIDNDIDNDKDDLKDLTKAKQI

SEQ ID NO: 5626 - protein, 186 aa, Methanobrevibacter ruminantium
MSTFILVIIILGIILIIAGIIVALYNGLVTARNKVKNAWAQIDVQLNRRADLIPNLVETVKGYAGHEKSVFEDVTAARAGLMNANGVKEIGEANNQLTNTLKTLFAVAENYPELKANENFKELQAQLAESEDKIAYSRQFYNDTVLMYNNKCQTFPSNLIAGLFGFKEADFFEAAGEARSVPKVEF

SEQ ID NO: 5627 - protein, 596 aa, Methanobrevibacter ruminantium
MNNKQKTLAILILLAIVLTSISAASAVDYKITNADVHLDVEDNGILHVSENITYLFKSDGHGVYRVIPLKADEKMSYLTVDVDGSYFEYNIINRSGEKEVRVYLYKDKDLTDYGVSEGSTVTLKLDYYMENVVKLFRDTGLLEYKLWGEEWDQGVEHLNAKVTFPNDEEIEYWINDDSGKTESSFSGDTLYVKGSDIPKGDYVEARVLIPLGEFDFDADYALHYNHDASDEVKKQQEDFQKKQQYFNTIGNLLNVIYGILILTPLGIYLKYGREPKVSSDAIYEHEPPTDDSPAFVNAMMSGLSKDVGKVDKKGFQATIMDLINRDKLGMEIAYTNKKRPVSLLTVKSTDGLKDFEMELIDILRRYEQNGKINFLYMQQQLSNRNEAYHFNRAFNRWVSNFKVDYLPDDVLSRYFNTKGSDLIGKFKWIALVAGFTGIIGLLLTGSWIPLVLGLILIFVGVICFYLPSSIGGQYTKEGREYQQKWKRFEKYLKDFSLIKEHPPESVAIWNEYLVYATALGVADKVYKSMKMEVYDGLADGSNFSSNDLFVFYHIGGIRSLDNSFVTVNNIISADSSSSGGIGGIGGGSGGGGGGAF

SEQ ID NO: 5628 - protein, 584 aa, Methanobrevibacter ruminantium
MNLKQKAIIMLILSILLMSAISASDYKGSYMDYVHMNVNENGLVHVNESFTYQMVSPESEISLPLYHGTNASIENIHIRVNDLLVAYDLKKGDTLDELVIHPKSSDYDYDSESTGTYLLDVEVEYDIENAVKVYNDVGAFTYQINKTDFNGVSLGMAHIRIKFPGTQEHEYFIIPKEGESSAQWDEDHFHMTNSQPAKATVIIPLDELDADAKYAQHIDSDGLEAIKNDSFDLKYSLIQIVNILIKIFVIIAFILPVAIYLKYGREPKVTLDSIYEHEPPTDDPPFFVNAIMGGTFRDVGLVDTKAFQATIMDLINRGKLSVETEINEKNKQRTYLVAKSTDGLADYESDLISILRRYEEDGRIDLKHMELSLYSKSEARYFRGRFNSWGHLLYSNYLTDDIKAEYFEDKGSKLFKFFAYGGLILSVILFLYCLMFNQMEPLPWVIALFILSSVLICIPSAFAGHYTKKGKIFKERWNNFKKYLKDFSMMEEYPPESVAVWNKYLVYATALGVADKVSNTMKINFYDGLNDETYRDNDVFVFCDGNGLDLIGDSFSAVSTTLDSDSGGSDGVGGGSGGGGGGAF

SEQ ID NO: 5629 - protein, 162 aa, Methanobrevibacter ruminantium
MKLKYFAVCLFVLILAAGISAAYATDVDFEGGHSFTMPDGYEIVEGQNTTEDIIMEKNGDNRIVFQYWIDEYEDLKNIEENYNFGDIIKAVMEDAVIGNEENYTFEDYDVTQIDYKVQGIQCYSYILDNGKEGYVIHHIAKEDLKDLNDPDNVIGDLVKSIK

SEQ ID NO: 5630 - protein, 168 aa, Methanobrevibacter ruminantium
MDNKKIFVIVALALLAIVAVGSVSALDLGFLGGNDDQDTAAEDSDAKTTTIKGIEFNIPDGYVKAENYTLDGETRSSGSIDYKVYQEGYEKGATDAILFLIGDYPTDLTDDMLEQMNLGEPKTINGHDGYITTSNEGGDTFTVFFYAEDGDLVTVTVTDDTLLEEIIK

SEQ ID NO: 5631 - protein, 154 aa, Methanobrevibacter ruminantium
MNNKKIFAIAALAIIAIVAVGSVSAFDLNFFGGDDKQTTTLGGIEFNIPEGYEIVDNYTIVNETLHDGDDEYIVNSQYYENDDGDSLELYTSDYQDDMEDYILKILTKGDEKTINGRKGYINSEDGFTMFSFVDDGNLGFVTVSDESILEEVVK

SEQ ID NO: 5632 - protein, 155 aa, Methanobrevibacter ruminantium
MNAKKLTILAALAILAIVAVGSVSAFDLNFLGGDDSSTTTVGGIEFNIPEGYEINDTYTIENQTRTSSGGNEYIVNQEGYGNSDGEELLFLVGHYDTDITNEMLSAMKVGDEKTINGQEGFITSDDVYTVFSFAKDGELVTVTVSDESALESIIK

SEQ ID NO: 5633 - protein, 418 aa, Methanobrevibacter ruminantium
MNITENQSDNDEKILTKSFCLIFGALLFTALVMYALMSTVTEYASSMGSTATIAGLVSGIYVFGGLCSRIYSANALEKKDWKTLALIFLSIHFLACILYFFVDNVELLILVRFIHGLGFGASANAIVTIASSILPKKRFGEAFGYFMLGTTIAVGLGPYISGFFYDIWGSFGSFLLATVFSFIALVCVFFLDIERYHPDEKINNEDILSDAESVGTESIDANPIKKQKEKRSFIEKIFEIDAIPVSLFTALTALGYVSILSFYRLYAVELDLVGPFSIFFLIYSVILVASRPIAGKIQDKNGDKIICVIGIVAQSIGLFLIAYAPSDITIYICAVCAALGFGTLNSACTTIVTRNCSIDRRPYAISTFFIFCDSTIGFGPALLGCFVSATSGYAPIYYISAFITLMALPICLYSLRNK

SEQ ID NO: 5634 - protein, 489 aa, Methanobrevibacter ruminantium
MGEKAQWDSSLSFIFAMIGAAVGLGNIWRFSYVLYSNGGGSFFIPYFVAIAIMGIPFLILEYGVGFSFKDSFTNILKKIDGRLEIVAWILILFVFIVVIYYMVILSWDMVYLLTSFTFGWGVDTAAYFTNTVGGSADLAKGGIFLIPTTICVVLMWIVLWFISHRDVDKGIGKVSKVLIPSLFVIMGIIVFYSITLPGHMIGIDALLRPNWRMLLDVNIWLAAFAQIIFSLSMGQAIALTYASYLPESSRLTDNVLIVVASNSLFEIFTAFGVFSILGYMSLNSGMALNKLVTEGTGLVFIVFPMIFNVMGTVGRVLAPLLFLAILFAGITSALGFFEPMLSSASSKFNLSRKRTATILSIIGCAFSILLTTGISSYLVGVIDSFVNQFGILLLIGVQCIIFAWVYGIDHFIPVLNENGILKVGKIWKFIIKYLLPVVLFVIWAYGIFTLFTTAKTFEIMVDIIIIVAVLILSFILSHLNPRGSNEDNA

SEQ ID NO: 5635 - protein, 70 aa, Methanobrevibacter ruminantium
MTYNCCLKTSREYTEEGLLNLIAETFDTDVSGLKVENIDSYEDDRGENFIITCSKEEGNMKTIKVFHAYG

SEQ ID NO: 5636 - protein, 69 aa, Methanobrevibacter ruminantium
MKDMEYPNEEAKEKFEEIMLRRLRLLYGIDVSEMEIINISLGESSVEPTIRIVLIDSTEEDCIRVFEIA

SEQ ID NO: 5637 - protein, 490 aa, Methanobrevibacter ruminantium
MKQHSVGRVETKTFAINDKLKLSSGKTLENVELAYETYGELNTAKTNAILVCHALTGDAHAAGWHKNATKPGWWEIVIGPGKALDTDKYFVICSNVLGGCKGSTGPASINPKTNEEYALDFPIITIEDMVHAQKKLIEHLGIEKLHAVVGGSMGGMQALQWTVSYPNMMKKASIIATTARSSPQQIAFNEVGRQSIISDPFWNNGQYYGKNRTPRSGLAVARMIGHITYLSDESMYIKFGRELQDKDQLSYDFTLDFQVESYLHHQGESFVKRFDANSYLYITKAVDYFDLSVDGSLPDGLKNVKAKFQIIAVDSDWLYPVDQSKDLLTALQTLGVEVSYNEVKSDYGHDAFLLENGQMNFLLNNFLSENVVDDLMKTDVPTIDINSTIKDAANIMFDNQVTHLPVVDENDKLLGIVTAWDLSKSIAKDCKLLEDVMTKDVRYCKSTDSIEYISRQMKKFDISCLPVVNDDLCLEGIITTDQISHLISSY

SEQ ID NO: 5638 - protein, 255 aa, Methanobrevibacter ruminantium
MKENKEMNWKIKFAIIMFVLAVLIFLARYLICGDGEEIIAYLWKHIGFIPIDILIVALVLEEIMGRKEHEAILEKIDMLMGTFFSEIGNDLIAELSKANVNKANTDDLKAIKSWNDKDYDNKLKELKNNPVDFKANIAPEEREDFLNRIQSLLVENREFLVNLINNPNLLEKDEFSSLLLALLHLDEELARRGELTDIKDADFNHLNGDMKRVYSKLVYEWVYYLKYLNKHYPYMISLAIRTNPFDSEADVHVTE

SEQ ID NO: 5639 - protein, 66 aa, Methanobrevibacter ruminantium
MTHLTITEYREMVKDIIEFKNENGKMPDFASVNNQEISHENYSAMINDVNNYILQHGRSPEFVQIK

SEQ ID NO: 5640 - protein, 497 aa, Methanobrevibacter ruminantium
MSFSDKIYNAKPGYTYDDFLLVPNASWIEAKDVDTKINLTKDIKLNIPIMSAAMDTVTEADLAIALAQEGGIGVIHRNINQEAQVAEVRKVKSAEDITVRDVVTISPDSSIETVQDIMENESVSGLPVMEGDRIVGIISKRDVRPFLKNDSKRLVKEIMTSDVVTIKENISQEEALDIAYENKVERLPVVNEDGALVGILTIKDILNQDQHPNAAVDKNGKYLVAAACGPFDLDRAMALDEAGADIISIDCAHAHNMNVVKFAETIKDNIDADLCMGNIATKEAAEDLIAHGADGLKVGIGPGSICTTRIVAGIGVPQLTAIADVADVAGEAGIPVIADGGLRYSGDIAKAIGAGADVVMLGNLLAGTLEAPGDVVTMNGRKFKQYRGMGSMGAMTGGSGGGADRYFQELEKGSHMKHSKLVPEGVEGVVPYKGTVAEVVFQLVGGLKSSMGYCGAKDIQTMKEVARFVRITTSGIKESHPHDFLITNESPNYPTLD

SEQ ID NO: 5641 - protein, 239 aa, Methanobrevibacter ruminantium
MLLLISPINHEEAVESIEGGADIVDVKNPKEGSLGANFPWVIKDIRELTPKDMLVSATLGDVPYKPGTVSLAAMGALVSGADYIKVGLYGPSNYEEGVEVMKGVVKAVKDTNPDATVVASGYADAHRVGAVSPWDIPKVAKDSGADIAMLDTAVKDGHTLFDYLDIDDCRKFTEEAHSYGLKVALAGSVKKDQLKPLYDVGCDVVGVRGAACVGGDRNTGHIDRTAVAELKELVQSFEE

SEQ ID NO: 5642 - protein, 2416 aa, Methanobrevibacter ruminantium
MKLKLIYLICMICCVLLTFSTVSAIDMDGNLTASVNHLDGSHSDQSAFISQSESSKTNLNANNNLRVSSGDYDCVETMNELSNLDSKDSKDNNLSKDKTSLKSDLNSIDSDEYSLKSSLSSINSSKKSSYEDGDNEYENLEDSLDSKNKNSLSSNALGAGTSTFGDLQTMINNAQEGSTINLDGKTFIGNGSFITIKKAITINGGSATNLARFDARNLSYIFKISASNVHIKNCYFSYSTNCSVYFFGNGSSIDNCHFDYNYKHLWVAVNIKYFSLTNCNFTNGKTDMGSTAYVVADNATVKNCNFINNEASGTEQCYGAALQIGASSSGINEGYVVNCTFINNRVITTHSYSHAGALCFRPGIKVYNSTFINNYCNRMGGATTLHSDGEIMNCTFINNSAGEYGGAISTGLMADNISVNITGCTFINNYAPMGGAILIKGNNVKVTNSTFKENKARENDGGAVYILGNDALILNSTFQSNYAKNVGAGILINGSYVTVLNSSFARNNASYGAGIYVIGSNANLFSSNFTNHNVKNGSVYIKGIGAYVYNCNFASNTGENGAALYIEGSNTTLILSNFTNNNVTKDGGAIYVVGSNAKLMASNFLYNNAIPSESDIKSGLGGAVYIKGNSNTIDSSSFKYNTARNGSAIYTDGKNMNLSNDNFDRNQAWSYVLDSVIKPSSSYFNRSDILINLTLIGGNNIANAIYNTASVNDIYFYNVSYISSKGKKVTTSNEIHPVNGASNSQNGALLYQDDREDNQLVNVIVYKDPNSKSTSLSAINKNDIILNKTFTTGILGNVSLNLSSSVGKAIAPGNYLLYAKHTEDDYYKEIDEDNQFEILPLVDVAVDIVSSKDIVEYNRTNKFTVKVINNGPNNATDVQVSAVLPKGLILVSSSPSVGTYNSSTGIWTIGNLNSGVNQTLAINTRANTTGAVNYPVSVSSYEKDTNEANNKDNQSIKIPECDLLIDIASSNHSPKYSDIVNWTVTVKNNGPDDASKVVVSLGNLSGNELIYQKSTNANFNISTQTLELSKLASGSNVSFVITTKVNASNKKITVNSSVSSDTFEYNLNNNQDNDYVNVAPLCDVGITVKVSNRTANRNDLVKWTITVKNYGPDKASNVNVALSDLASLGLGLVNKSDANYASNEWNVGDLNKDASKELVISTKVNTENKNIVLKGTVNTSTYETNKANNLANDTLSVNPYCDVLIEVTASDNSANKNDVITWTVNVKNNGPNQAKDVKVSLTNMEKLGLIVQNRSFTFKDIAVLENSTFNFNKSSNIWSIGSMASGDISSMTVKTKVNCSDKVLSVEGNVSTSTYELNKANNHDDDLLTVEELCDLAVEVNASKKTANKGDIVNWTIKIKNNGPDTASDVFLTVSDLESLGMVFVNSSSKDFDSESFAWEIGELASGKGLTLILATQVDTSDETIMVEADVDTSTYELNKANNADNDSLNVNPCCDIVIDISVSDSPVNKEDIVNWTIVVTNDGPDDAKAVVVNLTDLEPLALIIMNVSESSYDNGQWTIGDLPDGESQSLIITTKANCSNDTIKLDGIVDTSTFELDKSNNHNDDILEIDPLCDLSIEISVSDSPVNNGDIVNWTIVVANDGPDGASDVIVSLSDLESLNLEILNVSEDNFNPETYEWIIGDLDNNENASLIISAKVNTSDDILDVESTVDSKTFELNKDNNYDNESLIVNPLCDLIIDISVSDSPVNTEDLVDWTITVTNDGPDMAENVKVYLNDLDALNLILVNASEDSFDGDAYQWIIGNLDNGDAVELLITTRVNASNKTIEVESAVLSDTFELNKENNYDNDTVTVNPLCDLIVVVDVSNSTINKDEVVNWTITVTNDGPDTAENVILDLSDLEDLGLIVLNVSDDSYNPESGKWIIGDLAPGETVDLIVTTQANVSNASLPVEAIVQGDTYELNKDNNHDDKLLDVNPLCDLVIEITVSNSSVNKGGTVEWTIVVYNDGPDDASDVIVTLDDLKTLGLILSNVTYGTTSMDISYDGSRLFVKDISSEDSENSDSIDESDSSSPNMLKASSKLDGVGSDLDNGELKSLKSGSYLSDDSSNDSDKASNTFDEETNLWYIGDLAKGNSISLKLLTEVNRSNDNITLPSNVDTSTYEVVKSNNFDSAIVEVLPLADNGDNESVNSSDSNGDNPLDGDGNSTSDGSNPDGDNSSDGDGNSTSDGSDPNGGNGDEPLDGDGNNSSNGSGNPDGSDSNGDNPLDGDGNSTSDGSDNSDGDNKSGDNSGNPDGSDSNGDNPLDGDGNSTSDGSGNPDGSGSSDGDNSGNSDAGEKSDDGSSDTDGSGNTDGNGSLDEDGDNDSGSGSGNYGSDLYDMYPWDDYMDNKTNDGSNKNNQGDNNSHAGKKVKNPTKKNLSNHVQAKQQKGVPMKNTGHPLALLVLTIFALFTLSYRKFKF

SEQ ID NO: 5643 - protein, 409 aa, Methanobrevibacter ruminantium
MKEEEIESMRKIFSQLKDKIEPLSQSPAIQALQKRVMEIRKEAIKNNSQLLETVQNSFKENDIDCFLASNDIEAQKIILDLINEEIESNPNIDSNDVYICKSKSNTLREIGFLELMEENNYNVIETDLGDRILQLKKEDNDPVHPTGPASHLTVSDIADIVNQSMDLNLNPVPKEIMEAVRSDVLNLMHKSYIGISGSNSIAAEDGAILMVHNEGNISFVQSKKLHIIVAGIDKLVPHLEDSVSIAKLETAYATGKPLTSYMNIVSGPSKTADIEKKLLKNMYGAERVAVILLDNGRSKAIDECLWCIGCGNCIVSCPVYNIIGNKFGYSSYLGGRGIALSRYLKDNEVSVDSGLYMCTLCGMCTENCPVLTPTYEIIENLRCDSQKEGLFRNQHKSIRDNIKNKGSPY

SEQ ID NO: 5644 - protein, 252 aa, Methanobrevibacter ruminantium
MLLYFRGCTAREKLDSISEATQSLLKLFNIEYEILDNEQCCGSVLLRTGFKEDGIEQMNKTYSDIKGKTILTSCAGCYKTLKEDYKTYLDADLEVIHISQLLNELINENSINKLDKDLLITYHDPCHLGRHAGEYEAPRSVIKTFSNLTEMKNIKEKSRCCGSGGGVKSAYGDLSNSIAKLRIAEANETGADLLVSACPFCKLNLSQNSDDLEVLDLSEFVLKMLKESDLDLSNLKMLEEDNLELSKNKKME

SEQ ID NO: 5645 - protein, 105 aa, Methanobrevibacter ruminantium
MIIAIIFMYNRVRNKRSTPATFALWVVVWMVVLFFAFAPKISDPLAGFFGFSRGLDLLIIAGFAVIAYAGFRFYIKIDNLNQNMTDLVREIAIRNEIQLDEENDE

SEQ ID NO: 5646 - protein, 235 aa, Methanobrevibacter ruminantium
MSNEISQNTEGIFLVVPAYNEERTVSQIIECIAERGYNVVLVNDGSADSTLELATESKRKYPDKIFVVSHVINRGLGAALKTGMMVALNKGAKYIITFDADGQHEISDIPNVCKPLQDGEADAVIGSRPFEDMPLSKSFANLVMNALTFIFYGRNVKDSQSGLRAFTAEAAEKIDVVSTGYGVSSEFIKEISDKNLRLAEVTITTIYTPETQHKGTDAIVGLKILGKMVIDLFRI

SEQ ID NO: 5647 - protein, 152 aa, Methanobrevibacter ruminantium
MRIGIADTTFARYDMGAAAIDELKKNASDLKIIRRTVPGVKDLPVASKKLIEEEGCEIVMALGMPGPMEKDKMCAHEASTGLIRAQLMTNTHILEVFVHEDEEEDPKELKKLADNRAREHAQNLIKMMFHPRLMEKEAGKGMREGKEDVGPL

SEQ ID NO: 5648 - protein, 396 aa, Methanobrevibacter ruminantium
MPKEEIDKIKRNLSGNPDLDRDYLVSQLEYYKGHEYSYEIIKEISHLILQSLDFYLIEDIGSKKTMASRILDEVMQYIETRDKRTAKEKLDKYMESFVDKYENKEDHKESDFNSNRSIREIQYIRYRENKLADSPKSFRVSPKKDRQVNWRKDVKIKKMESNSIEEIHEKEYHSFLNPLEEILFYHYIGLKKELAYIPFNEPLFDLYYLYGTLLFESDEYGKSEEYLLKALRINPVSSKTILALADIYKSKTRTYNRFFLYNVDALKFAYRNEDIARAYRNFGFFYVEENQLDVAAAFYDFSLNYDYNKHVVKELEYLKSRGVDTQIETEEAVGIIESKNIQVGVNDFVLDALKFICFDLDSRKHTSQALYFYRILYDLTKDNQVLGRINALSNKI

SEQ ID NO: 5649 - protein, 253 aa, Methanobrevibacter ruminantium
MEKGEMVSLLGRNGAGKSTLFLHFNGIHQPKSGEIYIDGEKLSYGKEELMLARQKVGIVFQNPDNQLFAPTVEEDVAFGPMNLGLPIEEVEKRVKDSLEKVGMGGFEKKSPHHLSGGQKKRIAIAGILAMEPEIMILDEPTSGLDPKGASHILKLLYSLNEEGMTIVISTHDVGLVPVYSSKIFLISDGEIIKSGTPKEVFSDVETIRKADLRLPRVTHLAEILEKNNDIDFGGEYPLTIGEARQKILDLLGK

SEQ ID NO: 5650 - protein, 367 aa, Methanobrevibacter ruminantium
MTNDDKTQEFKLISKTIDGDEIFLNHDSIVVKFAGKRNAIVTSWLNGGYSEDLSAVFNHQLSQENIDEYGDGGILGFLEMLSYDFYNKLDLKGNKLSGLVTSAQIDEYSIAVERYKDIEVLAITTAGVRVNAVSAGDVASYYELNGEYDFDLENEDPNPNKPGTINNIILINCRLDESSLLLAEMIAVEAKAVALRDLMTSSNYSSEIATGTGTDGIAICSNLQSDNFIENVSKHAKIGELIANAVIRSIKEALANLQWLTPSYQLNALVRLDRFKMNLDEFYDKSLNLDEMEKKEFIMSLIKVSKNPELVGYVSLIIHIIDQYRIGLLDKKPALKVLNSILNSNFNRKEWNSMKLLLEYVIEKQIE

SEQ ID NO: 5651 - protein, 233 aa, Methanobrevibacter ruminantium
MIEELVTNMSITESGASASSPIFTITILVFTILLLIGIIYFVFKMYEQSKPTVESIVLIAVLTAIATVGRLILMSIPAVNLASFVIIMVGVVFGKEEGFLVGALTAFVSGIFMGMGYWVIFQMLAWGLMGASAGYLASRFDSLPFRFIFGLLWGFLYGWITDISAIFYSGTALQITPIIALYINGFTYDLTHGVTNAVLLVVLYDWFKKMFTRAKIKYLSNPSSSDESIDLTN

SEQ ID NO: 5652 - protein, 645 aa, Methanobrevibacter ruminantium
MALIEFKNFSFSYLNSDGTESLEKSLDNISLNINFGDFVLLCGPSGCGKTTLLTNLKKELMPNGRREGSIKYNGTEIAQLDDFTSACDIGYLFQNPDSQIVTDTVIQEIAFPLENIGLPTEEIRNRISEIVAFFGINDILHKNVNELSGGQKQLINLCSLLVLRPKVLLLDEPMSQLDPIASYEFLSIIRRLNEEFSITVIMSEHKADSIFPFIDNAVFLKDGKIEFNDNAHDICEEVINDDIFENYLPAVTKIYNGLSQNYLENEEYISEYEEFTKLNTPLSIREGRRYLNIISDELIKINEDVQKNNNFENDYAYDSLEKDNSNQNSTSSKKEHDYYQKSSLTTKKYNSNKLGLRDRLPFSNDKNTLIRMNGIYFAYEKNNLILKNVDFKLNKGDFLSLVGGNGVGKSTFLQILVGILKPIKGKVRYSKNLKIAYVHQNPMIHFSKDTVKEEFLESILSSNAFSASEFNMETYDGLLKLNGNEFLESDLLNNLKFKNIDYRFKELIGFFDIENLLDKHPYDCSGGEQEKIVIVKALIQNTDVLVLDEPTKGLDPISSKNLAYILNSLVDNGLTIVMTSHDLDFVANNCKRCLMLFDKDIQIDDDPKVIFAENNFYTTFVNRMVKDYIPQAVTLDDVKEIWDLK

SEQ ID NO: 5653 - protein, 334 aa, Methanobrevibacter ruminantium
MVLLAFIFSDPYFVLSFLALILILIALQGVSSELKNIMKFFIPLSVLIIILNPLLNRTGAHRIYLFNGFFITYEAIAYGILMSLALLIVILVFSSYNRSVSYQEMLYIFSKKLPIISMIIVMALRFIPLINSRAIEVQKLNNLKANGVESDEEDDLNDDSLEDNLSEENNLSDENNSKEDSDSLDLEQFDSNISSLDIGSDSRVFKKIKSSKRFQSIAKEAKVLGKIMGITVSWSLEESMFTAKSMKARGYNSNERTSYLSYKFGLADIIFLAIIIVTVSIIVIGLIQGYGMINIYPSIDFSFSDLPFNIYYFAFIVFLLPLIYLEIKERFLWR

SEQ ID NO: 5654 - protein, 1351 aa, Methanobrevibacter ruminantium
MNKVQLSSILALVLILFLSLAVVSANDDILNINVTDTQDSVIDNSNGISDYFSSDNGIINDDGLSSDDETAGSQLLNDSEDLDSSDDLAKDSDLEDSKETSKTQDNSQKNEDSKTRLSDSSIIRITDSSYSSYFDLSKDGAIREGTIKDGDTLLIGNVSGKIFSITKNINILPISDGDTMSNCLIRLIEGSSGTSLSNLRIVNRNEKVGSFYLCGIHIINSAGHDIVNLTINNSQMKCYGIIMSNASNNRIINSTIITGQATAIPMTGSSNNLFYGNYIETYNTNMIYYCMYGNGDFYPREDLEKSHDNIIANNYFTSRNGTYDSYCYSVCLMAEAGGSGTVIANNTFNNTFRPITVSTPDTLVINNTILNVGGEAGIIVDGNNVTIMNNNISTKRLEGFQWNKEGDVVGIFTYGSNTRIIGNSIDTVGTNGIRSSGDATFISGNTINTESSACINLTKSNAVVEDNALNGIGSSAVRIYTSKLVENTTIRNNNISSDSEGIVLKGKIDYSLVCGNIIEISNPEDAIIVGKYTNRNPLVPQHYAIFNNTINGIVVNLTDISEIERNDTDSGLNNTNTSDSGNNGTGNTGNGTNITDVNGTDINGTDVNGTNITDINGTDVNGTNVTDVNGTDVNGTDVNGTDINGTGNATIPVNITKLSTSITVYNTTVLRGDYLDAYLKDQYGNPISGVSIDFHFKDKVYAKTTDSEGKASLHFDAIPDNYTMNISFTGNNYYLSSNITIDISVIPVSYYLNESNFYEYFGEDGYLKGDYEYADLIFQGDFRNKRIVLNQPLRIISDSAVLYDSIIKIESDKVVVDGFTIVNRNPGNKQDNHRFAILLDYVRDVSVINNKIKLDSYDSGYGIYLSETQDSTVSNNSIDVKADKLTFGIILYDSKDNLIQDNIIKVNGTDDPHQYESTIQVDTSISVDDYEAEGMIIPEVYKTYGIILFYSSSNDIGYNVINATSGLKKYYTAVKESTNSIVGVDLYYDSNYNKVHHNNVVVSAKDPYLYGLGVLGAETGKRDQFATNNSFTDNIVFVNGTYYAAGIIAGYNSINTTILRNYIICFSNNVSYGVILEGALNSVVDSNYVISRSRINYVLEGYDTDYNLISNNTLNAFGQYVGDVSLYNSKHNYIAGNKLSPIFREGRLKDASELPGGVDFDAIFSELGVSNPLHDYSDKDWSELLRTDLTDHADVIPPHTGAFYDDGGEGNIFVDNEVPAPPSGGNGQTNRTGSGETNSNGNGNSSNGSQNSNSNSTVVNNNNGNSGSQSDMDGSGNNPETDTLKGNTVGTSSSAAVTESARAYNLDVDEDAASSRSLSFGGMNIPVLCILFLLIFACASELVKRSKRNIR

SEQ ID NO: 5655 - protein, 615 aa, Methanobrevibacter ruminantium
MSTKVHSPDELPQKPGIYIMKDINEEIIYVGKSKSLRNRVKSYFQKNLDSPKTKVLMSHFNSLEYIVTNTEKEALILEANLIKKHRPRYNIRLKDDKRYPYVKITDEDFPKIVITRTISKTGTYYGPFTDVTAVRQTVKFLKQLFRIRTCKRMDGPCLNSQIDLCYAPCDGQISKEEYKEHIKKIDLFFQGKYNKIIKDLEIEMKQAAERQEYEKAAVIRDQISSIDEVMKKQFVEFENDLDQDIIAIAYTIHNAVAVVMNIRNGKIMGKDDFTMDGSENTTSDEVISAFIKQYYGINRHIPKEVLLEEDIPDKELIEEWLSDLRGNKVSLKVPQKGNKLRLVRMAGKNAEIIKNQRQKMENSMMELKRYLNLKKLPRVIEGYDISNISGKLAVGSKVSFLDGKPNKKQYKKFKMNTPGPNDFAMMKELLERRLKPLKEHYEKVRINEEHTKHNEAETEKIEPLKLGEEPNLIVIDGGKGQLGMAVDVLKEYNLTHIPIIGLAKEFEEIYIPNSSFPIIIPQDNEALHLLQQVRDESHRFAVTYHRKLRSKKIEESPLDEIEGIGKKRKLELLRHFGDFDSIKKASVEELKGVDGMNEKVALNVYNYFHEGEKEQ

SEQ ID NO: 5656 - protein, 180 aa, Methanobrevibacter ruminantium
MKVIGVTGLPGSGKSILFDTAEEKGALVVCMGDLVREKAAERGEDSGTTARKLREEFGQYIVAELTIERIKEILEKDKDAKIILVDGIRSPYEIELFKESFDNFISVSIYASPQTRFERLVLRNREDDPEVYEDFLVRDNREIGFGIAEVVATADYMLNNECSLEEFKQSVADFIEKEMD

SEQ ID NO: 5657 - protein, 248 aa, Methanobrevibacter ruminantium
MIPKTHPRYESLLLRDKVKNAFKEGYLADSGMIAHGRGETFDYLIGERTTEPARKACEAAVAYILLAENPVLSVNGNTTALAIDEIIELAKATDSKIEINLFYRTPERVEIIERMFKERGWEDILGGNDEKLEYIDNLNSPRATASKEGSYIADVMLVPLEDGDRAEVLVQNGKKIICIDLNPLSRTSKMSTVSIVDNIVRAVPLMTSMALDFKEKGKDKDKEFLENIIKNFSNEQNLKDSLAEIKLK

SEQ ID NO: 5658 - protein, 192 aa, Methanobrevibacter ruminantium
MKRFIAIDGLDGSGKDTQARKIKEKYEQEGTVVIRSHPTSDNFFGRHSKSALEKKGKLNKIIATLCYGADAIRSVIKYYGKYDTVIFVRYTLAVSYLSKAISVPVYKLVCVLLPISEYFFYLDVSPKELVRRVKSRNEKEEMFENYDAFVKVRKMAEPVLYNWNVIPADDSPDEIFSRIEAILDELDKKLLE

SEQ ID NO: 5659 - protein, 175 aa, Methanobrevibacter ruminantium
MDEKIENPELKAIMAIDPEEMDEDQLNKFVEAFMEATLIVPAEMETDIDIEGMSDEEIALNEEIEITIIKLEDDEGHEFIPAYTDDEEVEKLDFDVYGLIFKTEDLANLLYESEDELEAVVLNPFTEYSAEIPLDSLFELFDLEECDDPNCDNPHHHHHDHEHNHEHHHDHEHEH

SEQ ID NO: 5660 - protein, 285 aa, Methanobrevibacter ruminantium
MRKEIISILVIAIIAISVIPTAFSATDNGIVITYGETTYNNQNYKSIVDNYFASKGYGSSNVQGEVITAADVNAISSGISGKTYNSNQIVSCALVDMTQNNEITVEVDNSITTITPQMYASALKSAGITSGHVYVSTPVTATGESALAGIMNCYEEVTDVEIPENVKQAANDQIYTEAAIVENNDDVSSEELSKLVDDVKEEVQEKNITDHDTIVTIINDYSTTYNINISDSDIENLADTIQQLQEVQDDANSYKEQLDDAVNNTTSGFSIDGILNAILSIFNFS

SEQ ID NO: 5661 - protein, 188 aa, Methanobrevibacter ruminantium
MKSSITKEDYLRIYEMTDDVFTLDFDCGKLCNNICCTIEKEAKDDEYLEMVLYLLPGEEELFFENQWFEMYYETTDEYEYPDSWKGKVYYVKCSDPPYCDRKRRPIQCRSFPVSPHLDKDNKLHLIYDEDDFSYDCPIVSQKMELSDNFKEKILKMWSILIEDELIFDLIKMESVQRENNEKEYDFVF

SEQ ID NO: 5662 - protein, 199 aa, Methanobrevibacter ruminantium
MNKKRFKLLLTIFIAFALINTCFILNDNLSAADNAPKGYSNYYIRGVCFNVPDSYKLVDEGWDDVNRLSYAHFKKGNNFLNISLDKHSTKFNKNLLDGFSSFTINGINLNKKTISHVTGFYAKKNGVKHFVFATEDDFVYIAAKGPKLKDVLSSTNQRDYKPYHDSEYDFDDDAYYESDVYDDSFDDSFDDGAYYGYDW

SEQ ID NO: 5663 - protein, 227 aa, Methanobrevibacter ruminantium
MKSAVLFSGGKDSAMALNYAINNGDDVRYLLSMKSQNDESYMFHVPNIHMTDLISQAVEIPLMEVETDGVKEEELKDLRRGFIQLKEEGIEAIYTGALFSTYQKSRIENLADETGIKAISPYWHKDPKEYMELVLETGFKVIISGVFAEGLDEKWLGRLIDAQALQELEKISEKTYLNLAFEGGEAETLVIDGPIFKKRIEIVDAETDWHLDNGTYNVIEARLVEKE

SEQ ID NO: 5664 - protein, 261 aa, Methanobrevibacter ruminantium
MMDLISGIIYLILFIIIMVFAFSMGILSPYVGRREIISIIAIGFVLGAIGGYFFIYPMYQDSPYVLGNLQGLFTMESEIINLNIPSTSNISDVTEKILNQNGVNSVSTNGFELTTSSINNETKTYIDSYLKNDSQIERYSIGTNNISVDLKNDASSTATLGSLVTWLSNTVGVSSEFAFVHIKVNVNANQVLDIKEYLRDNHYTIVSVEGPVQDTIHYFYDHLAPDYVVMCITGIIGVLVAIAGIYVEPLTKFVRAFRRGG

SEQ ID NO: 5665 - protein, 193 aa, Methanobrevibacter ruminantium
MFDKSIAKKSSLPFKSINNNSLFKFISINKCLFKFISINNKGLFKFISIDNKGQLSLEYILSAMMVILLITLLSVPILSLTIDYSNDVINSISTKNELSKITDSIDFCYYSGKGSKKVVLLDFNQDFSVRFTNNGQKGIAYADLELSDNNHKEISSEYDYIGLNTNIQFSKGFNKILVEWDEDTGLIRLSKLN

SEQ ID NO: 5666 - protein, 302 aa, Methanobrevibacter ruminantium
MNIYILFWNIFNNIDFYLMSGFIMVFFTLLLANYYDLKYGIIPNKLSVFLMTFGILINVLILIVLNNRLYAIFYVSYLIIIFIISFVLWKISFWGGGDLKLFCSIGFSLPFIDILNHFYTGSILNSFSFNSQIILYPKIFSILINSILLSFPVILLLLVYKLLRENKLNLILFAFSNMKLLIKELSTKTVFINDLKEGMIVEDYYFNSLELFNLMEELTGNEECYNLKASQFKENSYVLKSSSMAGLTRDDIKLINFAYMETLINFPNFKIKMGVPFVPSLTVGYLVFLAFGDLVFLISTII

SEQ ID NO: 5667 - protein, 71 aa, Methanobrevibacter ruminantium
MMASILRNQVNFTFSYNFHMMASILRNQVNFTFSYNFHTMKSIYYLEVNFTKSSKFYEMTSILRDDINFTF

SEQ ID NO: 5668 - protein, 199 aa, Methanobrevibacter ruminantium
MNDLDNNLANAKGIGKTIATKVPMNVHDELVHLVDCGAYLSISDFLREAIREQLKNYKIADMRKINYQDAKREVISYFKKYKVCFLDEIAINLELEFELVNTILNDLVMEERIKMISKADQVFKDYLEENDLDESQHFSNKGNNFIKFKGKRIIVESSSKDVDFISLRPSPKNKSVLKSHGMVLNNGTVILSECYIFLK

SEQ ID NO: 5669 - protein, 558 aa, Methanobrevibacter ruminantium
MDFYKDSRFFQNFKEWIYLTKYIIITGGVVSSIGKGITSASIGRILRSYGLKVAAIKIDPYLNWDSGTLNPYQHGEVFVTYDGMETDLDLGHYERFLDVELPGISNITTGKVYQSVITKERNGDFLGACVQIIPHITNEIKEMVREISAKDDYDVVLVELGGTVGDIESQPFLEALRQLRNEEGSENVMFVHVTFVPYLNAAGEFKTKPTQHSSKELRSMGINPNMIVLRSQEPIDDDLKRKIAHFCDVDVKAVVNTPDAQSIYEVPLVLDRENAGQYISDRINLGIDFENDKNTLNEWEEIVNSLKIQDPVVTIGIVGKYVELEDAYISIRESLHHAAAKIGAKMNIEYLSSDVDVEDVDELKAFKEELSKLDGILIPGGFGDRGVEGKFQAVDYAIENDVPIFGICLGMQCMVIQFARRIGMEGANSSEFNTETPYPVIDMMEEQKKIKKMGGTMRLGAYDCKLIDGTRTMEAYGEENIQERHRHRFEYNNEYRDVLTENGLVIAGTTPDNFLVEIVELPDHPWFIGCQFHPEFKSRPNNAHPLFASFVQAAFDNK

SEQ ID NO: 5670 - protein, 126 aa, Methanobrevibacter ruminantium
MDTKTITAELNEEQYKKYQIMQENNLSVGEAIDLIFNLREEFELQANDYLEERLAELNDKKESLSKEMSSIDDELNVLKKIVDSPMDFKQKRDIIEKEYASFDETYDIKVIRAKHQVSWVTDFFKF
